United States Patent Application Publication US 2016/0078168 A1 - sequence listing, part 7

SEQ ID NO: 141723 - RNA, 81 nt, Homo sapiens
aaagacgagcagacacgcaaagaagcccgaggcgcaagagacaaggaggagcgcggcaagacaaccacgaaaacgaagagg

SEQ ID NO: 141724 - RNA, 76 nt, Homo sapiens
ggagccggcgagaccaccgggcccgcggccggccggagcgcggcaggacggcggagacaaaacagaggagaccaga

SEQ ID NO: 141725 - RNA, 64 nt, Homo sapiens
ggggccgcagcccaaggaaggcggacgggccccgaagcccaaggggagaccaggaacaaaacca

SEQ ID NO: 141726 - RNA, 98 nt, Homo sapiens
gcgagcgaagcggcaccgaggccggggccaacgagccaacgccaggcgccgcccacagagcggcgggaggggaaggagcagccacccgggcagaaagg

SEQ ID NO: 141727 - RNA, 70 nt, Homo sapiens
gcagacagacaacacgaaacgagacgacgaacgggaccgcaaaacgggacaagcccgcacgcgcagagac

SEQ ID NO: 141728 - RNA, 59 nt, Homo sapiens
gcagcaccacgagccagaagcagagccggacaggcaaccacagagagagcagccccccc

SEQ ID NO: 141729 - RNA, 79 nt, Homo sapiens
caaggaacgggcgcagcgagaggggccggggaggcacaagaggcgaaacagaagaacaagaacccaggaacgcagaaaa

SEQ ID NO: 141730 - RNA, 62 nt, Homo sapiens
aggaaaacaaaagcgcacaggaagaacaaagggggcaggcggccagcagcagcagagcaggc

SEQ ID NO: 141731 - RNA, 79 nt, Homo sapiens
cagcgccggggcacgacacaaaaacaggccccggagccgcagaaccaggcgaggccagcagcaagacacggccagggag

SEQ ID NO: 141732 - RNA, 80 nt, Homo sapiens
agacaggggaacgcggcgaccgccaagaaaggcagcgaggggagagcgggaccgggagaggggacgaaggcgaaccagca

SEQ ID NO: 141733 - RNA, 74 nt, Homo sapiens
ccgaggggcacaccagaacaacacaggacagccgccggggggggaaaaagggaccagggcgcgagccagaagca

SEQ ID NO: 141734 - RNA, 40 nt, Homo sapiens
gacgcccaaccacagcccaggccagaagccaaaccaaacg

SEQ ID NO: 141735 - RNA, 72 nt, Homo sapiens
aacgagcagggagaacaagacacggagacagagaagaagagggcagagaaagcggaaaggaggagggcagag

SEQ ID NO: 141736 - RNA, 60 nt, Homo sapiens
gggaaaaagaagaaacaaccccgaaagaagaagaggcaagccagggccccgaggacccag

SEQ ID NO: 141737 - RNA, 78 nt, Homo sapiens
agaaccacccaccaaacggaagcagaccaacgcaagacagagacacggggagaccacagaggagcgccgcccccaggc

SEQ ID NO: 141738 - RNA, 43 nt, Homo sapiens
gggagggagccgcagccgagcgccaacgaacccaccacgaagg

SEQ ID NO: 141739 - RNA, 48 nt, Homo sapiens
ggaaaccgcgccagagacacaggcggcacgaagaaccaaagcacccga

SEQ ID NO: 141740 - RNA, 80 nt, Homo sapiens
caagcagagacacaaaaccggacccggaacaggccaaaagcaaggccaaaaagcagaaaaacaaaccagcccaagaagcg

SEQ ID NO: 141741 - RNA, 74 nt, Homo sapiens
aggggcccggacggacgcccgccaccacccgccacccccagacccccagcccagaaacagggaggcaggacagg

SEQ ID NO: 141742 - RNA, 57 nt, Homo sapiens
gcgggggaggcgagcgcgccgcccggagccgcgcacacgggccagcccaaggcaaga

SEQ ID NO: 141743 - RNA, 84 nt, Homo sapiens
ccccagagagccagaaagaaagccccccaagagaacccagggggagccacgccggagcgggcaccggcgcggacccaccggagc

SEQ ID NO: 141744 - RNA, 57 nt, Homo sapiens
aaccaacccccaaaggcgggacagaacccagacccaagaaccagaaccagccaagcg

SEQ ID NO: 141745 - RNA, 72 nt, Homo sapiens
cgcccaggaaggagccaaagcacaagaagaagacgagggacgaagccacgacagcagagaggagcacggcag

SEQ ID NO: 141746 - RNA, 60 nt, Homo sapiens
acccccaccagcaaagcgggcagagcccggccacgccagcaggacacgccaggcacgccc

SEQ ID NO: 141747 - RNA, 72 nt, Homo sapiens
gcgcggcaggccaggggaccgggaagcgagaaccaggaacgaagaacaaaggggaaaggcaacaagacagcg

SEQ ID NO: 141748 - RNA, 85 nt, Homo sapiens
cggagggccgagggagggccgagccagccgcggccggaggagcccccaggccgcgaccgggagacccagccagaccgcccagacg

SEQ ID NO: 141749 - RNA, 70 nt, Homo sapiens
ggaccagacaaacagcccagaagacaagcaaaaaagaagaagcagaaaagcccgaccccacacaaaccca

SEQ ID NO: 141750 - RNA, 80 nt, Homo sapiens
cgaggaacggcggagcagggagcccaaagaccccggagacagggaggcaccgccccaacccccccccgcccggagaaccc

SEQ ID NO: 141751 - RNA, 72 nt, Homo sapiens
gaggcaacaacggaaaaaacgaaacaagaagcgagacccaaggaccagacgaagagaaagccggccccagac

SEQ ID NO: 141752 - RNA, 78 nt, Homo sapiens
caaagggaggaggaggaccggaggcagcacgcggcccccgaaccccgccgccggccagccggggaaaccaacaaggcg

SEQ ID NO: 141753 - RNA, 82 nt, Homo sapiens
aaaggcgaccccaacggcagcccccagcggagaccggagggaagcaaacccgcaaagcgcaaaagagcagggccaggcagca

SEQ ID NO: 141754 - RNA, 48 nt, Homo sapiens
ggagcagacccggagcaagagccaaaaggagaagcgaacaaaaaaaac

SEQ ID NO: 141755 - RNA, 42 nt, Homo sapiens
agagggaccaccccagaacccgggcaggaggacgcaacagag

SEQ ID NO: 141756 - RNA, 104 nt, Homo sapiens
ccggagcgcgaaggccgggacccggccccggcccacaggggggggcaaacccgagagaacggacaagaagcaccagaagcggagcagaggaggacagcagaggc

SEQ ID NO: 141757 - RNA, 95 nt, Homo sapiens
ccggagacgacccgacgaagcccacgccgggacccagcgcaggcaggacgaaggaacgagccgcacacagagacgcaagcacaaacaaacgggac

SEQ ID NO: 141758 - RNA, 85 nt, Homo sapiens
gacgaagaggggagaaggaagcgagaccaacgcaacccaaggaggccagagcaagccacaaaccagaccacggaagaggacaggc

SEQ ID NO: 141759 - RNA, 69 nt, Homo sapiens
acggagcaacgcaaggcaggcaacaaggaggccagagggaagcaaagcagccaacaccagaagaaggga

SEQ ID NO: 141760 - RNA, 65 nt, Homo sapiens
gagaaggaccaagaaccagacggggacagaagacccacgccgagccgcggcagaaccacaagacg

SEQ ID NO: 141761 - RNA, 82 nt, Homo sapiens
ggaagaggggcgaggcagaccgccccgggccgcggccgccccgagagggacagacgggccagccggccggggcaaagcggac

SEQ ID NO: 141762 - RNA, 83 nt, Homo sapiens
cgaccggcgacagcagccaggagcagagcgacagcggcgagcagaacacggcgagcggaccaacaagccacccacggcgccac

SEQ ID NO: 141763 - RNA, 84 nt, Homo sapiens
agcagggaacacagagagcaacgccacaccggcccagaagaacagggccaacagaggcaaggacggcacggacacgcaggacgc

SEQ ID NO: 141764 - RNA, 78 nt, Homo sapiens
gcagaaagcaggcgaacccgcggcgcaaaacgaggccacaggggagacaaccccaggacgggcgggacaaaggagaca

SEQ ID NO: 141765 - RNA, 71 nt, Homo sapiens
acaccgccccggccgccccccagaccgggacagaaggcaaggccacaccgaggagacgcagccaaagcacc

SEQ ID NO: 141766 - RNA, 83 nt, Homo sapiens
cacgaaaccgaccgcggcaagagcaggaagcccaggaacaaggaagcaacagaaaagccaaggcaggccccacagagcgacaa

SEQ ID NO: 141767 - RNA, 50 nt, Homo sapiens
acaaagcgcgcagaaagggcgaccaccaaaaaaacggacgacgcaaagca

SEQ ID NO: 141768 - RNA, 57 nt, Homo sapiens
gcccccgccccgcccgaggaccaagaccgagacaaaaaggaaaaagaaaccaggcgg

SEQ ID NO: 141769 - RNA, 70 nt, Homo sapiens
gcggacccagagaagccgaccccaagaaagagagagacagaagccacaggagcaaccaccagacggcagg

SEQ ID NO: 141770 - RNA, 74 nt, Homo sapiens
cggaaggagagcgcgggcgggcgcgccccaggagggagaagaccaaagaagagagagcaggaccaccaccgccc

SEQ ID NO: 141771 - RNA, 74 nt, Homo sapiens
agccagggaagcggcaggaggcacagcgggaccgaaaagcccgccgggaccgagagaccagcccgaccgagcgg

SEQ ID NO: 141772 - RNA, 80 nt, Homo sapiens
gaccggggccccccagccccgccaacccaggggacccaaccgcgccacaaagcgaacagccgaagggagagcgccagggg

SEQ ID NO: 141773 - RNA, 85 nt, Homo sapiens
cgggcaccgagagcaagaaaaggggaagaacccaagacacacacagcggagcaacaaggagggaagccacaagcagacgacaacg

SEQ ID NO: 141774 - RNA, 58 nt, Homo sapiens
gaggacccacagacgacacaaaacaggcagaagcggaggaagcccggagacaaggacc

SEQ ID NO: 141775 - RNA, 73 nt, Homo sapiens
gcaccagcggaaagggaacccgacaagaccaagacacccaaggaggccagaagcaaggaaagagcagggcaga

SEQ ID NO: 141776 - RNA, 83 nt, Homo sapiens
accaggcaacaggcagaaaaagaaccagcgagaccgggagagggacaacaggaggaggacaagagaggagagcgaggaggaag

SEQ ID NO: 141777 - RNA, 65 nt, Homo sapiens
ggagggacaaaaaagcacaggcgcccgagcaacaccgacgaacacgagcggggagcgggcgcgac

SEQ ID NO: 141778 - RNA, 77 nt, Homo sapiens
gaaaacaccgagcgaggacacccccagaggcgcagcgaggaggggaagccccccgcaggaccagggaaagaggagaa

SEQ ID NO: 141779 - RNA, 75 nt, Homo sapiens
gagcccgaacggaacccagaacagggcgcgacaccagcgggaagcaccgcaaggaagaaacgggggcgcaacgga

SEQ ID NO: 141780 - RNA, 79 nt, Homo sapiens
cgaccgccacacaccagcagaggaggcgggggcagccgcgagacggcacaaggcaccggcggagacccacaaagaggaa

SEQ ID NO: 141781 - RNA, 82 nt, Homo sapiens
ggacaaaaccgaggcccaaagagcccaggagaagcggagcggcagagaaaaaggccaccgaaccggagagaacagaaaaaaa

SEQ ID NO: 141782 - RNA, 70 nt, Homo sapiens
agggggcagcgacaagaaacccacccgggggccaccgcggagaagaaagcccggccagggacagccaagg

SEQ ID NO: 141783 - RNA, 81 nt, Homo sapiens
gagaagaagaaaacacagggcaagccaaaggaaccaaccacccaggcaaacaggaggggcgagacccccaagggccaccga

SEQ ID NO: 141784 - RNA, 81 nt, Homo sapiens
ggagcaagggaaggagcccggggcgacagagagcaacaagaggccagggccagcggcaagcagagaaaaccccccaagcca

SEQ ID NO: 141785 - RNA, 56 nt, Homo sapiens
ccgcgggagagaggacccccccccccccccaagggccaaccgccccccagcagcag

SEQ ID NO: 141786 - RNA, 82 nt, Homo sapiens
ggggcggcagcgaggaacaggagagcggccgcagacaagggggcgccagcccaaagagcgagccaaagaaccgggaagaacg

SEQ ID NO: 141787 - RNA, 73 nt, Homo sapiens
gcaaaagcagacaagggcaccggacccgggaaggagaagagaaaagggaaggcacggaggaagcccgagacca

SEQ ID NO: 141788 - RNA, 67 nt, Homo sapiens
cagaaaccgccgccacacgcggggcaccgccacggaccaccggccggagggagaagggagggcaagc

SEQ ID NO: 141789 - RNA, 82 nt, Homo sapiens
caacaggaaaaaagagaagaaagaaagagaaaccagcaggaaggaagagcccagaaacaaagagagaggggcgccagggcca

SEQ ID NO: 141790 - RNA, 82 nt, Homo sapiens
agaccagaccgcaccgcgcgcgacccagcagccggggggaaaagaccccccccagcccgggggcccggaccggaggagcaaa

SEQ ID NO: 141791 - RNA, 78 nt, Homo sapiens
gagcggggaagggggaaaggcaccaggacaagcaaagagcgcagaaacggagggcagcagggaccggcggacgcccca

SEQ ID NO: 141792 - RNA, 71 nt, Homo sapiens
ccccaaggcgggaacagggcaaaccgcgggggccagcggcagcgggcagcggccgagcgacaggagccgaa

SEQ ID NO: 141793 - RNA, 66 nt, Homo sapiens
cccgcagccacagagaggaaccccaagccaagcccaagacaaaaacgccagacaggagcgaagggc

SEQ ID NO: 141794 - RNA, 36 nt, Homo sapiens
cgggcgaaggggccacgcgagcgacaccagaccgag

SEQ ID NO: 141795 - RNA, 72 nt, Homo sapiens
gggaaccaggaaacgcaccgcacaaaccaaccgaggggaaaagggaaacaccagcaggcacgacgggacacg

SEQ ID NO: 141796 - RNA, 83 nt, Homo sapiens
gcaacgagaacaaagggccgggagcgagccacaggaaggaggggcaggaacagcagaggagacggcacacagaggaaggacac

SEQ ID NO: 141797 - RNA, 83 nt, Homo sapiens
gacgagcgcagcaaagagggccacggaaccaccagccagaacagacgggggcaagagacagagcagccgcgacaggggaccac

SEQ ID NO: 141798 - RNA, 80 nt, Homo sapiens
agagaacaggccccggggagaaaaggcgaccgaaacacaagaggaacgaaagagcaaaaagcaaacgggcacagcagcca

SEQ ID NO: 141799 - RNA, 68 nt, Homo sapiens
caggaagcgagagcgaagccgccacccaaaccagcaaaccagcaccagagcagagcggggaaccgaac

SEQ ID NO: 141800 - RNA, 51 nt, Homo sapiens
ccaggagcacgagcgaagacagcaggagggccaagaggggcaaaaaggacc

SEQ ID NO: 141801 - RNA, 76 nt, Homo sapiens
gcaacagagcgccggcggcagaaggcggcagggagcacgcaccaggagcccacggcccacccacagcgaaacaaaa

SEQ ID NO: 141802 - RNA, 74 nt, Homo sapiens
gaaacaccacaggggcaagaagccagaccagcccaccgcacccagggaaaaaacagcagccacacgaagccggg

SEQ ID NO: 141803 - RNA, 124 nt, Homo sapiens
cgacaagcccgggagacacaggcagaaacaagggagacagccgcccggccaagcacccgcagcaggcagccagagcagccccccagcgcccgccgcaccgggccagcagggcagaccccgcagc

SEQ ID NO: 141804 - RNA, 75 nt, Homo sapiens
cccacggccgggccacccacaggccgcaaaggaaaacgcagcacagcccgaccagagcccaccccagagcggagg

SEQ ID NO: 141805 - RNA, 76 nt, Homo sapiens
gagggaagacggggggcgggccagccacggcaccgcgccgacagggcagaagcacagcccgaccaggaggagagcg

SEQ ID NO: 141806 - RNA, 115 nt, Homo sapiens
cagaacgacgaggaaggcaccaagcccccagacaaaccgaaggcgacagagacagcaagaccagggccacccggcgcacacccagagccggccgcacaccagagccggacccaaa

SEQ ID NO: 141807 - RNA, 58 nt, Homo sapiens
cgccaacaagagagaggggccaaggaagagcgcccggggccgccagaccgagacgccc

SEQ ID NO: 141808 - RNA, 50 nt, Homo sapiens
gcccgggcgaagagcccccccccaaggccaggcgaccaccgcacagcgcg

SEQ ID NO: 141809 - RNA, 84 nt, Homo sapiens
cccaaccaggcaccccaccgcgaagacaccgagaaagacagcaaagaaaaggagaagaaaggaaaaaaacaaccccgggcaccc

SEQ ID NO: 141810 - RNA, 64 nt, Homo sapiens
gcgacggcagaaagagggaaaaaggaggagacgaccagacgaaggaagaccaaggaagaacagg

SEQ ID NO: 141811 - RNA, 65 nt, Homo sapiens
gaaggaccaagaaccagggggcccccaaagggaagccaaacacaaaggaagaagcccggagacga

SEQ ID NO: 141812 - RNA, 82 nt, Homo sapiens
cacgggagcggaagaacagccgaagaagggcccccggaagaaccgaaggacacacagggcacaggaaaaaagagcggaaaaa

SEQ ID NO: 141813 - RNA, 68 nt, Homo sapiens
cgcgaacacagagaagaagacaaaagagaacgaacgcagaccgggaaaaccaacaaaccaagagggac

SEQ ID NO: 141814 - RNA, 107 nt, Homo sapiens
ggacccacagcagcccaagaacaacacacaacccgcaccaaagggacggggcacgccgcaagaaggagaacaggaggaggaaaacagaacagccgagcgggaagcgg

SEQ ID NO: 141815 - RNA, 85 nt, Homo sapiens
gaagaggagcgaggaggcaccacagcggcagcgacaagcaggcagcgggcgccagcaaaaccgaaacaggacaaaccggcgacca

SEQ ID NO: 141816 - RNA, 72 nt, Homo sapiens
cccccgccggaaacagaacgaagcgcgcggcaggcgcgcgccgccccaggccgcaagacccagcgcccaacc

SEQ ID NO: 141817 - RNA, 64 nt, Homo sapiens
ccacagcccagggaaggcaccaaaagggggggcaggaaagaggcggagaagaacccaaccaaaa

SEQ ID NO: 141818 - RNA, 76 nt, Homo sapiens
gaacgagaacggcgagagaggaagagagaagacggcgaagccccagaaagggcccacccagaaaacacgaaggaga

SEQ ID NO: 141819 - RNA, 71 nt, Homo sapiens
cggaagaagcaggaggcaagaaaggggaaccccggagaaaaggccaagaaggcaggaccgaaacaacaaga

SEQ ID NO: 141820 - RNA, 82 nt, Homo sapiens
aaaccccagcaagagcggaggcgcccggcggagcagaggaaccacacgcgacagcgcccgagcggcgccgacacgggaagag

SEQ ID NO: 141821 - RNA, 65 nt, Homo sapiens
gccaaagagcaagccaaccaagccaggcacacaggagcagagggaaagcgaggcaacgccaggac

SEQ ID NO: 141822 - RNA, 70 nt, Homo sapiens
gccgcaaaccagacacgcaggggcacaagaaggccaaccccaaaagagagaacacaggcaagacgaaaac

SEQ ID NO: 141823 - RNA, 82 nt, Homo sapiens
cagccccgagagcggaacaggacgaaggagacgcaggagggagagcagccagaggaagaagaggaccaccgcacaaaaagcc

SEQ ID NO: 141824 - RNA, 116 nt, Homo sapiens
cgacaaagcagggaggaaggggacggccgggggagacacgccacaacaaggccaaagggagacacaccacggcagggaggcagaaagcgagagcaccagacaaaaggccacaggag

SEQ ID NO: 141825 - RNA, 81 nt, Homo sapiens
gaccaagcaggacaccagcgaaggccagcagcgggcgcaggaaggccaccgacaggaaggagacagaacagacagaaaaaa

SEQ ID NO: 141826 - RNA, 78 nt, Homo sapiens
cccggcgccggaccggccacagcacacacgaggagcaggacacaccacccccaggacagcagaccacagcccggcagg

SEQ ID NO: 141827 - RNA, 51 nt, Homo sapiens
gagcagcgggagccgagccaaggcgagcccaagagaacgaaagcacagaaa

SEQ ID NO: 141828 - RNA, 52 nt, Homo sapiens
ccggggaggagaggaaggaagaggacagaaagggaaagcgagagccgagaga

SEQ ID NO: 141829 - RNA, 68 nt, Homo sapiens
ccaaaaacaaaacgaaccaggacggcaagagcaacggacccaaagagggagcaagaagggaagcaggc

SEQ ID NO: 141830 - RNA, 56 nt, Homo sapiens
cgccgggaccccaggccagacagggccgaggccccagagcggagggcagagagcgc

SEQ ID NO: 141831 - RNA, 75 nt, Homo sapiens
agcaggaccaggagacaagagcaaccagaaagagagggacaaggaaaagaaccaggcaacacaaaaggccgccac

SEQ ID NO: 141832 - RNA, 38 nt, Homo sapiens
ccgacagccgcagaacccgccccagagcacacagcagg

SEQ ID NO: 141833 - RNA, 76 nt, Homo sapiens
gacccagaagaggagcagacggaaggaacggaggccccggacggagaaaaagagcggacaggcaagacaggccacc

SEQ ID NO: 141834 - RNA, 70 nt, Homo sapiens
cggcgcccggacgcgaggggggagacaccgcaccaagagggcacagacggaccaaaacaacagcaaggca

SEQ ID NO: 141835 - RNA, 79 nt, Homo sapiens
aaacaagaggccgcagcggcaaggagagacgcgcgaggggcgccgaagcgaggggacccagaccacaagacaggaggac

SEQ ID NO: 141836 - RNA, 72 nt, Homo sapiens
gaccaaagcggaccagagacaggccgggcaccccagcagccccagcagccacggacggcacagcccgaccgg

SEQ ID NO: 141837 - RNA, 73 nt, Homo sapiens
gcagagaaaccacaagcggcacgggcaaaagacagaccagaagaaggcagaaacccgcgagcagaacgccgcc

SEQ ID NO: 141838 - RNA, 83 nt, Homo sapiens
cacacaaaccaggggcacacagccgcccccccaccgcggaagagcaagggaagcacaacacccagccgggggggcaacggcca

SEQ ID NO: 141839 - RNA, 74 nt, Homo sapiens
gccggggcgcagggacacggggggccaagggaccacacgaggcagccggcgaggggggagcccagcaggagcgg

SEQ ID NO: 141840 - RNA, 39 nt, Homo sapiens
cagcccgagaccgcagcagaccacagccccaccagcgcc

SEQ ID NO: 141841 - RNA, 80 nt, Homo sapiens
gccaccagagggccacaggcccacagacgggagaaagaccccagcaggccccaaggagcggcaagaggaccggccgacgc

SEQ ID NO: 141842 - RNA, 76 nt, Homo sapiens
aaacagccaaccccaggcagggcagccagaccagcccaggcccacaggggcccccccacgaaaaagacacaagcac

SEQ ID NO: 141843 - RNA, 78 nt, Homo sapiens
aacgaagagaaacagagaggcgcagaggaccacgcagcaaggcgcacacaacgccccgaaccaaaaaaaccaagccgc

SEQ ID NO: 141844 - RNA, 74 nt, Homo sapiens
gacagccagagacagcaaaaaagaaccccgccaaagccaaacgaaagggaacggaaacacaaagcggaagaaca

SEQ ID NO: 141845 - RNA, 84 nt, Homo sapiens
accaccaccccaccccggcccggagcagaaggaggcacgggagcgccacacgcccgagggccaccccccccggggccccgcggc

SEQ ID NO: 141846 - RNA, 40 nt, Homo sapiens
aggggccggagccgagagaaggccgcagccaagccggaac

SEQ ID NO: 141847 - RNA, 76 nt, Homo sapiens
gaagaggaagaccgagacccaaggacacggcgcacggcccaagcgggccaaggagccgaccgggcccaccaacgaa

SEQ ID NO: 141848 - RNA, 72 nt, Homo sapiens
ggcggcgcccccagagcggcaccaaaagaaccacgccgagggaagcagagaaagcggggacagaaagcacgg

SEQ ID NO: 141849 - RNA, 97 nt, Homo sapiens
ccacggcggccgaggagaggcagggcgcgagggcgggggcagcggcagaccaacgggagccgcaaggacaacagccgcggccagacagcggccggag

SEQ ID NO: 141850 - RNA, 76 nt, Homo sapiens
gcgcggcggcccacaagaccgcggggagccaccccccaaccaggagacaccccgcggggaaggcaggaacggagcc

SEQ ID NO: 141851 - RNA, 64 nt, Homo sapiens
aaacggcagaacagccggaacaggagagagcagccgggcggcccagccaaacaggccccgagag

SEQ ID NO: 141852 - RNA, 75 nt, Homo sapiens
gcacagaacaacagaagaggagagaggaacccgaagaagaaaggacgacagccagagagggagggcggcccacca

SEQ ID NO: 141853 - RNA, 73 nt, Homo sapiens
aagccacgagcaaaggcacaaggaaccacgcccgcgggacacaagacgggcaagggcaacagcaacgaaacgg

SEQ ID NO: 141854 - RNA, 75 nt, Homo sapiens
agcagccgaccagccgcggagccgggggcaggaaacgagggaaagagcacggaccgcggaagcaagaagcagcca

SEQ ID NO: 141855 - RNA, 39 nt, Homo sapiens
gcacacgagcggaggcgaagagacgagagggacaggagc

SEQ ID NO: 141856 - RNA, 74 nt, Homo sapiens
agcgagcgagggggggcgcgccggaaaccggagcgcgcagcaggcgcaaaaaccagacaccccacaccaccacc

SEQ ID NO: 141857 - RNA, 70 nt, Homo sapiens
gacgaaaagaaagaacaagcgcaaagaacagccggacagcaaggaccagcaaaaggaccggaccaagaag

SEQ ID NO: 141858 - RNA, 61 nt, Homo sapiens
ggcgagcggacccgcagccccaaaggggagaggcaccagcaacagaccaaccgcagcaagc

SEQ ID NO: 141859 - RNA, 80 nt, Homo sapiens
cacggagaggagcagcccccggagacagcggcacagagggccgccagccaaagaccacgggggccaaacaccaggagaag

SEQ ID NO: 141860 - RNA, 77 nt, Homo sapiens
aaaccaggcccgccgcagagaggagaaagcaggccggcgcggaagaggccggcggcgggacggccccacgggacccg

SEQ ID NO: 141861 - RNA, 110 nt, Homo sapiens
caaaacagccgcccgagaccgaagaaaagaagaagaagaagaaggccaggaagaaacagcgaaccaaagaaggaaaaacgcaacaaacggaaggccgacacgaaggagcg

SEQ ID NO: 141862 - RNA, 70 nt, Homo sapiens
cgccaggagggagcgggcagaagccaaaacaggaaagacgaaagggaggcgggacagaacgaacaaaagg

SEQ ID NO: 141863 - RNA, 79 nt, Homo sapiens
cgggcgcgcgaaggagccgcgagccgaggaggggcgcgaggagggacggaaggacagaaggcgacacaggcagaggaag

SEQ ID NO: 141864 - RNA, 75 nt, Homo sapiens
aaggaccaagaaccaggcaggggaaaggaagggagcagcgaagccagggaggagccgaaacaaaaggaaaggaga

SEQ ID NO: 141865 - RNA, 65 nt, Homo sapiens
gagccacgcgccgacccaccaccacagcagggaacaaaggaggcccacaccgagcacccggagag

SEQ ID NO: 141866 - RNA, 76 nt, Homo sapiens
ccgccacacagcccgacggccagcgaagaccgcgacggggcgagccggcagaggagcgggcagagaagaccggaca

SEQ ID NO: 141867 - RNA, 80 nt, Homo sapiens
gcgggccgggacccagccaggcagaccccgggcagcaggacccgggaggcccccgggagaagaagacgaggaccagaaag

SEQ ID NO: 141868 - RNA, 85 nt, Homo sapiens
gggggaggagaggagcccggccccacagcggcccggcaggcccgcagagagaaaagggaagccaccacacggggcggagcccacg

SEQ ID NO: 141869 - RNA, 32 nt, Homo sapiens
cccggcggccaaacaccgagagacaagcagga

SEQ ID NO: 141870 - RNA, 104 nt, Homo sapiens
cggcggcagcgggcggacggccggcgggggcggcggcggccagcgccagccggagaagcggagagacaaccggccgccgcagcgccgagaagacacgcccccga

SEQ ID NO: 141871 - RNA, 75 nt, Homo sapiens
aaggaacaagagagcaagaggacaggagccacgcagcagacggaggcagagcacgaccagccacggcaacccgcc

SEQ ID NO: 141872 - RNA, 74 nt, Homo sapiens
aaaagagccgggggcaggggaaaagaaacaaacaacaagaagaaggacaaggaacgaaggcaaggaggcgggcg

SEQ ID NO: 141873 - RNA, 72 nt, Homo sapiens
gggaaaaaggaagaagacccgaaggaacaaacagaaaaggagagagaggggaagaccagcaagcacaaagga

SEQ ID NO: 141874 - RNA, 76 nt, Homo sapiens
ccgccagggaaagggccagagcccaaaggcccagaccaacggagggcggagaaggaacagggagagaaacaacggg

SEQ ID NO: 141875 - RNA, 59 nt, Homo sapiens
agcagcgggccagaacggccaggagacgcaacgaaccacacgggaagaccaacaaaggc

SEQ ID NO: 141876 - RNA, 78 nt, Homo sapiens
gcacccccacggggcgcagggggcggggaagggagaagagaccgacgaacaggaggagcccggccaggagcagcgcgc

SEQ ID NO: 141877 - RNA, 68 nt, Homo sapiens
gaggaaacggcggcgcggagccagcgcgcagaccagcgggccaaggcagagagcgagggggcccggac

SEQ ID NO: 141878 - RNA, 38 nt, Homo sapiens
cacacgggaaggggaaaaaggacccgagagcagcccca

SEQ ID NO: 141879 - RNA, 76 nt, Homo sapiens
ggaaacaaaaacgcacacaacgacccagcaaaccaaacgagccagcagaaaccagggaaaagaaccccacaacagc

SEQ ID NO: 141880 - RNA, 87 nt, Homo sapiens
cgaaggagcagcccaggaccgagaccggagcagccggggcggagcggccaagaaggacaagaaggggagaagaaaagaaacggcaaa

SEQ ID NO: 141881 - RNA, 72 nt, Homo sapiens
ggaacagccaggggaaaggccacagaagagccaccaaaacaggacgaggacccggccaacggagaagacaag

SEQ ID NO: 141882 - RNA, 82 nt, Homo sapiens
aagaaccgcacgacacgaacaaccaggagcccccaggcccgccgccagagggacaggagccaggccagaaaaggacggggcg

SEQ ID NO: 141883 - RNA, 70 nt, Homo sapiens
cgaagaagcgccccgacaccaggaaaacccagaaagcaaggcagagaccacaagaaccaggagagaccca

SEQ ID NO: 141884 - RNA, 68 nt, Homo sapiens
caaaccagcgggaacgcacagcaggacccaggcccaaaaggaaaagccagacacaccccagagaccca

SEQ ID NO: 141885 - RNA, 68 nt, Homo sapiens
acaaaccagagcagcgcaggccagaaaaccagcgacacgaacccccagcgaggaagcagccaagaaga

SEQ ID NO: 141886 - RNA, 80 nt, Homo sapiens
gagcgaccagggacaaaagacagcaaacacccaccgaggcaaaaggagcggaagcgcggggcggcgcccggacggccgag

SEQ ID NO: 141887 - RNA, 86 nt, Homo sapiens
gcgcgcagggcgcaccgggaagcagaacgcagacccagcagcccagcgccgagcgcagggacagaggacgcggccccagagccccc

SEQ ID NO: 141888 - RNA, 78 nt, Homo sapiens
cagcccaaaagcagcaaagaacaccaagacggcgaccacaggaaggacacaggcagcacgagacaaggaacacccgag

SEQ ID NO: 141889 - RNA, 76 nt, Homo sapiens
gccaagacagcacggcggcgggcaaggacggcggcgcccagccggcccgccggggacggcccgccacgggccccgc

SEQ ID NO: 141890 - RNA, 73 nt, Homo sapiens
gccacgggagaagggcagcacggcaggccggccagccgacccagccaggcccagcaccagcacggccaagcag

SEQ ID NO: 141891 - RNA, 87 nt, Homo sapiens
cagcaccgggcacccccaaaaccaccagcagcccaaggcaggggaggacagccacgcaaggaggacagcaagagcagccccggaacg

SEQ ID NO: 141892 - RNA, 71 nt, Homo sapiens
ggaaaagagacgcagacagcaaaccagaaagcaaaaaaggagccaagaccaagaccagcccagaggaacag

SEQ ID NO: 141893 - RNA, 83 nt, Homo sapiens
gccccgcggggagcgcccccggcgcgagccccaggaaagaccacaacgaagcgaaaacgaacaggcccccgcaaaacaaaaca

SEQ ID NO: 141894 - RNA, 76 nt, Homo sapiens
cggcgggagggccgcgggacgcgggccagaccgaagggcagaggcacaacccggagacggcaggcgggaaccagaa

SEQ ID NO: 141895 - RNA, 95 nt, Homo sapiens
ggagagaagccaagaaagacagacagaccaggcccaggcagaagcccaacccccaggcgcagaccagaccgccaggccgaggaaacggccgcaca

SEQ ID NO: 141896 - RNA, 74 nt, Homo sapiens
cgaccgccgcgcagaaggcacgccgacaaacgcagcccaagagaacaggcgagaacaagagagggaaggagaaa

SEQ ID NO: 141897 - RNA, 80 nt, Homo sapiens
aaaacagaaaaaaaaaacacgcaaagaccaccagcaggaacagacgccccaccaggccagcggggcgcagagagaacccg

SEQ ID NO: 141898 - RNA, 74 nt, Homo sapiens
acaaacaaggccggaaaaacaaagcacacacaccagacgaagaacccagagaaaggaaaccaagcacaacgggg

SEQ ID NO: 141899 - RNA, 54 nt, Homo sapiens
cagaaagcaccccacaggggaggagcagggccgccccgaggagagcgacgcccg

SEQ ID NO: 141900 - RNA, 41 nt, Homo sapiens
ccacagccaaggcgggagccacgaaggaaagaggcagaagg

SEQ ID NO: 141901 - RNA, 71 nt, Homo sapiens
aagaagcaggaggaagggcagaccaagagaagagaaagaccaagagccaagcccagggaagccgccgcaca

SEQ ID NO: 141902 - RNA, 52 nt, Homo sapiens
aaggaggcgagcccggaacccggagaccagcgcgcgagcaagcagcgcgaca

SEQ ID NO: 141903 - RNA, 85 nt, Homo sapiens
caagacccgcccgggcccaagcggggggggaagaggaggaggcgcccgacacgacaaaccacgcccaaacggagaaaacccaggg

SEQ ID NO: 141904 - RNA, 80 nt, Homo sapiens
gccgcagcggcaaggagagacgcgcgaggggcgccgaagcgagggagcgcccaaaacgcaaacacacccaaagaagcaaa

SEQ ID NO: 141905 - RNA, 88 nt, Homo sapiens
cgggcgccgccagggaaccgcggccgcaagaagcagagccgcgcacggagcaggacaaggccaccgaccagagacaaggccccgaggg

SEQ ID NO: 141906 - RNA, 79 nt, Homo sapiens
agacgcaccagcggcagcgggaagcggccagccgagcaagcggaggaccacgccggccgggcacagggcgggcagcccc

SEQ ID NO: 141907 - RNA, 64 nt, Homo sapiens
agggcgcgccgaaagcggggcccgggcagagggaaagcagaggacggaacaacccgggggaccg

SEQ ID NO: 141908 - RNA, 56 nt, Homo sapiens
gcgccgcgccggggcgcccggcacccgcggaaagaagcggcacggaaggaaacggc

SEQ ID NO: 141909 - RNA, 80 nt, Homo sapiens
gccaccgcccggcccccaagacggcccccgggcggcaagcagaagaggaacagaagaagcagagcagagacggagcagca

SEQ ID NO: 141910 - RNA, 73 nt, Homo sapiens
aaaacgcaagacacaagcaagaaggccgcggacccccccccccccaccccacaggagaagagacgaaagaaga

SEQ ID NO: 141911 - RNA, 75 nt, Homo sapiens
cagcaagcaagagggcgcaggaggaaacaggcaggacgggagggccaaggcggcggcagcggcagcggcggcagc

SEQ ID NO: 141912 - RNA, 75 nt, Homo sapiens
aagaaagagaagagcagcaagagcaccacaaccacacagccaaaaagacaagagcgcccaagcggacagccccac

SEQ ID NO: 141913 - RNA, 79 nt, Homo sapiens
cacagccaagcgcagacaaagcacacgagcgggcacgggccaagagaaggaggagagaacccagaccacccaggcaccc

SEQ ID NO: 141914 - RNA, 79 nt, Homo sapiens
gcccagcaaagagcaaaccaaccagagaagagcggagaggaacagaaggcggaggaaacgcagccaccaaggaagagag

SEQ ID NO: 141915 - RNA, 82 nt, Homo sapiens
gaagacaggacaagccacacggcacggccagaaagagagagggggcccaggaccaggacagaggggaggaacccagggcacc

SEQ ID NO: 141916 - RNA, 76 nt, Homo sapiens
aacggcggaaagcagggccagagagacaggggccaggccaggggcaggggaagcacccaaccaacgagcgggccac

SEQ ID NO: 141917 - RNA, 79 nt, Homo sapiens
agccacggagaagaagcagaccaaggaaggacgagcccccgcggagacagcccgaagaacccgaacgcaagcggcaacc

SEQ ID NO: 141918 - RNA, 40 nt, Homo sapiens
cccacacccccccgggggggcaccacgccacgggaaggca

SEQ ID NO: 141919 - RNA, 48 nt, Homo sapiens
ccggaacaagaaccacgcccgcaccagccacgcggaaagagaaaaggc

SEQ ID NO: 141920 - RNA, 63 nt, Homo sapiens
gcccgcacgaccagcgaaccgcccaagggcagagccgaggccggacagagacgagagcagcgc

SEQ ID NO: 141921 - RNA, 51 nt, Homo sapiens
acgacaaccagccggggcacaggagggagcgccacagagcaaggggagcgg

SEQ ID NO: 141922 - RNA, 107 nt, Homo sapiens
cccacggcagccaaggcacagcacccggggccacccggaggagcccacagagcagcgccccccccaacccaacggcaccaaggaagagagaagggaaaccaaaggag

SEQ ID NO: 141923 - RNA, 78 nt, Homo sapiens
ggcccagccgggcgcggcccagagagcgggagaagacgaggacgccaccagcaccgccacgaggaggcgacaggagag

SEQ ID NO: 141924 - RNA, 68 nt, Homo sapiens
aaaaccaccggggaaaaggcacggagcagaaacacaagaccgggcgggcagccgagcccgggggaggc

SEQ ID NO: 141925 - RNA, 67 nt, Homo sapiens
ggaccaagaaccagggggcggggccgacaaaacagacggggcggcgggccgggccgggggacccgac

SEQ ID NO: 141926 - RNA, 75 nt, Homo sapiens
acaacagggcaccgaagaagagccaagggagagacaagagcacaaccaaagagccccaggagggacagcgggaac

SEQ ID NO: 141927 - RNA, 105 nt, Homo sapiens
aaaccaagagacaaccccgaacagcacacaggaaggaggagagaagggcaagggccaaaagaggcaccccgccaggaagaggcggcggcggaggagccccgcagc

SEQ ID NO: 141928 - RNA, 84 nt, Homo sapiens
ggccacacgccgccgcggcgcagccagggcagagggcccgggagggagggagaacacaagcaggccaacggcgagcgcccaaca

SEQ ID NO: 141929 - RNA, 70 nt, Homo sapiens
ccacaccacacccagccaggggaaccaaaggacccccaaggccaaagaccgcaaccgccacaaaaccacc

SEQ ID NO: 141930 - RNA, 53 nt, Homo sapiens
agacgcagggcgcccccgcccagcgacccaacagagacccgcaagggcacagg

SEQ ID NO: 141931 - RNA, 53 nt, Homo sapiens
cgcagggcgcccccggaccccgccccccccaccagaccagggcacagcagaga

SEQ ID NO: 141932 - RNA, 85 nt, Homo sapiens
acgccaaccggccagaggacgagggggccccagccgacagcgcccaggccgagcaaggggaggaggagggcgagaagcccagccg

SEQ ID NO: 141933 - RNA, 72 nt, Homo sapiens
ggaaacccaaagagcgacgaagcagcaacgcagcggagaagagggaagacggaccgagggacaaacgaagag

SEQ ID NO: 141934 - RNA, 54 nt, Homo sapiens
agccaggcggagagacaagcacgagcgcagagcaggacccacacgacacaaggg

SEQ ID NO: 141935 - RNA, 73 nt, Homo sapiens
cccccaccggcagggccccagacacgcgacggaacagcgaaacacgaccagacaacaccgaccgaaccggagc

SEQ ID NO: 141936 - RNA, 69 nt, Homo sapiens
gggaacggccgggcaggagggagagaggagcacccggagcagccgggagaagccccccaggaagacccc

SEQ ID NO: 141937 - RNA, 80 nt, Homo sapiens
agcgccagggacaggagcgagggaaggaagcaaaagaggcccccggccccaaggagagccccaagagcccaagaacccaa

SEQ ID NO: 141938 - RNA, 72 nt, Homo sapiens
aagagagcaggagggcagcagagaacacgggcacacagggcagagacaggcaacagacggcaacgaaaggca

SEQ ID NO: 141939 - RNA, 66 nt, Homo sapiens
agcaaaaggaagcaacccagaagagcgaaggacccagcgaggagggaagagccaagagcaaggaga

SEQ ID NO: 141940 - RNA, 71 nt, Homo sapiens
aagccccccccacaggaagaaacgagccagaagaaccgaaaccgcagaggggggccccgccggaggaagcg

SEQ ID NO: 141941 - RNA, 74 nt, Homo sapiens
ggacacgcaggcggcccaggaccaggaggagagaaggcacaaagaaaacaccccggaagaaaaaagaaaaagaa

SEQ ID NO: 141942 - RNA, 79 nt, Homo sapiens
agcgcagcaacggcgggggaccacgagagcggaggcccccccccacaaggcccgcaagcaccagccccacccgcacgcc

SEQ ID NO: 141943 - RNA, 77 nt, Homo sapiens
cacgcggaagaccaagcccgcgcgacgggggagggcgccccgcgagccggcagcggaagagcgcaacagaggaaccg

SEQ ID NO: 141944 - RNA, 74 nt, Homo sapiens
ggagcaaaacaagggggccaccacagagcaagagaaccgcagccagaagcaaagcagacagacgcgaaaagaca

SEQ ID NO: 141945 - RNA, 41 nt, Homo sapiens
gacggaccccacccaggaagacccccaggcaaaccgccccg

SEQ ID NO: 141946 - RNA, 79 nt, Homo sapiens
caagcagcagaaccggagcagcgccaggcgagcgagagagcccgggcccccaaaagccaggcccccccggggcgaaccc

SEQ ID NO: 141947 - RNA, 75 nt, Homo sapiens
ggggagggggacacacaaccgcccagccggcgagggacgccgcagcacccgagggacccgaggagcccaccaagc

SEQ ID NO: 141948 - RNA, 67 nt, Homo sapiens
gaacggggcgcccaggccgcccgacccaaagggaaaacagaaacagacaccgggaagggcacgacag

SEQ ID NO: 141949 - RNA, 70 nt, Homo sapiens
aagcgcaacaccaggaggcccacgaagacgagaagagaagcagcagggcaccggggagccagggacagaa

SEQ ID NO: 141950 - RNA, 78 nt, Homo sapiens
caccggaagcgggaaagcagaccagccagccccaagcagccgcacgacaaagaacgaagacaagagccaggagaaaca

SEQ ID NO: 141951 - RNA, 39 nt, Homo sapiens
accgaggaaggccgccacaagaacacgagagaacgcgaa

SEQ ID NO: 141952 - RNA, 81 nt, Homo sapiens
ggagggacagccccaggagccggggccgcagccaccaggacgcaaagacacaacagccaagcggagcgacaagagcgggac

SEQ ID NO: 141953 - RNA, 73 nt, Homo sapiens
cgcgaggggacaaaggcgcaagcgagaggaaacgggccccaaggcgaccggcggcccgggagagcccagccgc

SEQ ID NO: 141954 - RNA, 85 nt, Homo sapiens
cgcaaacaagccaacccaggaggaaaaacggaaaccaggagcgcaggccagacaggaacagcagccaaacgagggagccaagccg

SEQ ID NO: 141955 - RNA, 68 nt, Homo sapiens
cgcacacgacagcaacaagacacggagcaaggaggaaaacacacggacacgagacagggacaggggcg

SEQ ID NO: 141956 - RNA, 70 nt, Homo sapiens
aggaaaacggcgaaccgaagaccaaaacaacaggcacaaagagagaaggaacacccacagggcagacaga

SEQ ID NO: 141957 - RNA, 61 nt, Homo sapiens
gagagcaaggaaacagcgacagaagccagcacaccaccacaacaggcaaggaacacaagcg

SEQ ID NO: 141958 - RNA, 75 nt, Homo sapiens
agacaccggcacgcaacagggcagcgcaagaccccgcacggaagcagcaagcacaggcagcgcagagccagagac

SEQ ID NO: 141959 - RNA, 55 nt, Homo sapiens
gagcagcacccagggccgcaaaaacacagggagaggcgccaccagcaaaaccaga

SEQ ID NO: 141960 - RNA, 76 nt, Homo sapiens
gaggggcaagaacaccgaggggccgggaacggcgccggaggaccagacccaggagggagcggcagcccacaagcag

SEQ ID NO: 141961 - RNA, 80 nt, Homo sapiens
aagccggaagcagaggcgaacgccaccagcgcggcacggagacaacaggcacaaagagagaaggaacacccacagggcag

SEQ ID NO: 141962 - RNA, 68 nt, Homo sapiens
cacaagcacgcggaagagccagggcacgcccacggaagccccccaaagcgagggacacaagaccccac

SEQ ID NO: 141963 - RNA, 71 nt, Homo sapiens
ggagaagccccagaccaggaaggagggaagacggccggagacaaggcgcacagcgacaccgacaagggacc

SEQ ID NO: 141964 - RNA, 75 nt, Homo sapiens
acacgggggcggcccggaggcaagccacacaggggagaccagcgagagagacaccaagccaagagaggaggaacg

SEQ ID NO: 141965 - RNA, 47 nt, Homo sapiens
agggcgcccccggcaccaagggacgaccaccaacacaccgagaagac

SEQ ID NO: 141966 - RNA, 36 nt, Homo sapiens
agcaggaaacgcccagaaggaaccgcggcgccaagg

SEQ ID NO: 141967 - RNA, 47 nt, Homo sapiens
cggcagcaccacacagccaccgcagaggcagaggaggggacacgggg

SEQ ID NO: 141968 - RNA, 51 nt, Homo sapiens
gccagcgccggggggcggacacgggaaaacagacggagggaagggagccgg

SEQ ID NO: 141969 - RNA, 82 nt, Homo sapiens
caacagaggagcaaaagaagaggggccagacgcaaagccccacaacaccgcgcccggaaagcacaccgccacgagaaggaga

SEQ ID NO: 141970 - RNA, 78 nt, Homo sapiens
aacggcacagccccagcaacaccccgcagccgcgcaaaaaaagaacggacgggagacacaggaagagcgggccaaccg

SEQ ID NO: 141971 - RNA, 74 nt, Homo sapiens
aaaggaaacaagcaaccaacaggaaccaggccgaggagcaggaagaaacaccagccgacggcgcacagggacaa

SEQ ID NO: 141972 - RNA, 72 nt, Homo sapiens
aaacaagaaggaaaaacgccacgcaccggagagagcacagaacagcgcgagccacaaggcaaggaagcaggc

SEQ ID NO: 141973 - RNA, 62 nt, Homo sapiens
ggggcgggagagccccgcagaagacgccgacgaggcgcagccaaacggagcagggagacgag

SEQ ID NO: 141974 - RNA, 75 nt, Homo sapiens
gagccgcccgcgcggaggcgcggccgacgaccgggaaacaggggagaggcccagcaagaggaaacagcgccaaaa

SEQ ID NO: 141975 - RNA, 65 nt, Homo sapiens
gggcccccaggcgagccacgccaccgggcacggagcgaggcagaagccgagaaacaagccacccc

SEQ ID NO: 141976 - RNA, 83 nt, Homo sapiens
caaaaccaccccgaaaccgacacacgacagcaagaaagaaccaagagggagacaagggaaaaggaagacaaaaaacacaagga

SEQ ID NO: 141977 - RNA, 71 nt, Homo sapiens
cacagagggagcgcaggggaagacaacaagggagggcacagccaagacaacaaccaagcaccaggaaaacc

SEQ ID NO: 141978 - RNA, 63 nt, Homo sapiens
cgaaggccaccgcgagcgggaaaccaaccccgcagacccaagagcgcagcacccaagcccccg

SEQ ID NO: 141979 - RNA, 82 nt, Homo sapiens
gaaggagagcagcgccaggaagaagagaggaagagaccggaacagaagcgaaacagaggacgaagaggcaaaagcagaacaa

SEQ ID NO: 141980 - RNA, 38 nt, Homo sapiens
cccaggacggaaaccagagagaaagcaagagcgcgcgg

SEQ ID NO: 141981 - RNA, 67 nt, Homo sapiens
gacaagagaggagacccaacagacgacaacggcaagcggagaagagcaaggccgaaccgagaggaag

SEQ ID NO: 141982 - RNA, 72 nt, Homo sapiens
aagggacagagaacacagaacccccaggagacaccagcagggcacgacaacgaaagcaaccgagaaaagagg

SEQ ID NO: 141983 - RNA, 78 nt, Homo sapiens
ggaggacccagggagcacggccagaggaccaggcgaccagcaccagcccgaccagacagaagacccgaccagaagcaa

SEQ ID NO: 141984 - RNA, 91 nt, Homo sapiens
cccagggaagcgcagaaagcaggcgaacccgcggcgcaaaacgcggcccagcaggagggcggggccgcggcagccacccccacagcacgcc

SEQ ID NO: 141985 - RNA, 76 nt, Homo sapiens
gaaacccgcccccgggccaagcagccagcagaaacaagcaacaaacgcaaaaacggaggacgcaaacaacacaggg

SEQ ID NO: 141986 - RNA, 73 nt, Homo sapiens
gccacagcacgcagccccaggcagagcagcagaggaaccgcgggccccgaggggaagaaagacaccgaaagaa

SEQ ID NO: 141987 - RNA, 78 nt, Homo sapiens
ggagcggcggaggccaaccagcgcccgccccgcgcagaccaaccaggcacaggagagaaacgggagggcccggaaacc

SEQ ID NO: 141988 - RNA, 72 nt, Homo sapiens
acccacccgaacacagccccagacaaagagagaagcggggaagaaagcaaaagcagagccggagccagcacc

SEQ ID NO: 141989 - RNA, 72 nt, Homo sapiens
gcaagcggggaacgcgggcggcgagacggcggcaggacggcggcagaagaagcccaggacccaggaaggaga

SEQ ID NO: 141990 - RNA, 37 nt, Homo sapiens
cgcaacggcaacgggagaccagcaccgaaaggaggac

SEQ ID NO: 141991 - RNA, 75 nt, Homo sapiens
gacacgaaggaacagaaggcccacaaggagaccagcaggaaacagacgcagagccagaaggggggagaacgagga

SEQ ID NO: 141992 - RNA, 83 nt, Homo sapiens
ccgcgccgccaccgcgaacaggagcccgacagaaggaacgcaaggcggggaaaaaaaggcagcacacagacgcagcaacgggc

SEQ ID NO: 141993 - RNA, 72 nt, Homo sapiens
aagcacagagggaaaggaaggcggaaaagcccaaacagaacgcggcagaacggaggcaggcagcacgagaca

SEQ ID NO: 141994 - RNA, 110 nt, Homo sapiens
gagcgcaccagaagcaaaaagacagccaacaggcacgagaggaaaaccaacacgggaggaacaaagccccggagacacaaagaaccccgcggcaacgaagcaaggagccg

SEQ ID NO: 141995 - RNA, 73 nt, Homo sapiens
acaaagcggccgaaacagaaaacaagagaccacagaagacccaccgcgcagaaggcaagaccgcaaaggaggc

SEQ ID NO: 141996 - RNA, 69 nt, Homo sapiens
gccaagaacagaaaaaagaggaggggaagcacaaaagcagaaacacaaacgaacccgggaaacacgaac

SEQ ID NO: 141997 - RNA, 54 nt, Homo sapiens
cccacagaggggcgacgggaggcaaaacagcaggcgggacagagggaagaaggc

SEQ ID NO: 141998 - RNA, 98 nt, Homo sapiens
gaggagagcacaggaaggccagggaagccggacgccgccgggaggggcaagccagccagacccacccaggaaggagggggacgaaggaccaaaccaaa

SEQ ID NO: 141999 - RNA, 80 nt, Homo sapiens
gcacacgcccagggcacaccacgaccgcaaggacacgaggagcaccgcagccgcgacgcacccgggggcgcggcaagacc

SEQ ID NO: 142000 - RNA, 77 nt, Homo sapiens
cagagcggcgaccaccagaagacaaggcaaggacggggacacaagaccagccagcccagccacagagacaggccgcc

SEQ ID NO: 142001 - RNA, 88 nt, Homo sapiens
cggacaggacccgcccagcccaacggggaggggacggcaaaacagaacagaaaggcggagaaaaaagagggggaaaagaccacgagaa

SEQ ID NO: 142002 - RNA, 45 nt, Homo sapiens
cgcggacaacaccaggaaaagacagagagacggagcaccggagcc

SEQ ID NO: 142003 - RNA, 80 nt, Homo sapiens
agaccaggcccgccacaccccggcgccggaaaggcagccaaaggacagagcgggagccaccagcgccaaagggaagccag

SEQ ID NO: 142004 - RNA, 81 nt, Homo sapiens
caaccgcgcccaaaagaaaaacaagaccagcaacaagaggcagaacaacaacggacgaagcgaccaacgacgaagagcaga

SEQ ID NO: 142005 - RNA, 71 nt, Homo sapiens
agccaccgcagaggacagacagggaaggcccaggagcacgccagaaggcgggaaaagcgggcgcacaggag

SEQ ID NO: 142006 - RNA, 39 nt, Homo sapiens
cagccccgaggagcgggaacagacaggaggaacagaagg

SEQ ID NO: 142007 - RNA, 76 nt, Homo sapiens
gcaaccccccaggacgggcggaggcggggggaccggcgggcggccccacaccaggagaagcacagcaccggaacgc

SEQ ID NO: 142008 - RNA, 78 nt, Homo sapiens
gcgacgacaccagcagacaaagacaggaagaaaaagagaaccaagcacccaccaagggaacggagggaaagcgacaaa

SEQ ID NO: 142009 - RNA, 56 nt, Homo sapiens
accgggccggggccccgcagaccgccggaccccgacaccggccacacacaggacaa

SEQ ID NO: 142010 - RNA, 35 nt, Homo sapiens
ggagcggaggagccagacaggcgaccggcccgagg

SEQ ID NO: 142011 - RNA, 76 nt, Homo sapiens
aaggccaaaagggaagcaaccagcgcgggccacgcaccagaccgggcaaaaggggacagcccagaccaaaccccag

SEQ ID NO: 142012 - RNA, 81 nt, Homo sapiens
ccccgagagaaggagaccacaccgggcacaacagcgaggacccgccagaaggaacgacgccagagaaagaaaagcacccac

SEQ ID NO: 142013 - RNA, 72 nt, Homo sapiens
acagcagggccaaagaagagaccggacaagcagccagcggaccacaagcaaacaaaagccaacacgaacccc

SEQ ID NO: 142014 - RNA, 71 nt, Homo sapiens
gaaccacaacaacgagaaaagcaaacaaaacaccaccgcaggagcagccgcaacagcgcaccgacacaagc

SEQ ID NO: 142015 - RNA, 58 nt, Homo sapiens
caggagcagaagaacggcgccacaagcacaggcggagaacaaagggggacagagaaga

SEQ ID NO: 142016 - RNA, 78 nt, Homo sapiens
gcgcaacgccagacgccacacacagaccaccgcaggaggagacaggccgagaccgagggccccgcaccccggagaaga

SEQ ID NO: 142017 - RNA, 53 nt, Homo sapiens
cggcgaagcaagacagcagacagggcagaccagcagccaaggacgagaaaccc

SEQ ID NO: 142018 - RNA, 70 nt, Homo sapiens
gcagaggacccccagacaggcggcgacagcacagaagacaagacggaagcgaacacaacgacggcacccg

SEQ ID NO: 142019 - RNA, 37 nt, Homo sapiens
gaaaacacagcagaaagcaagacggccacaggccggc

SEQ ID NO: 142020 - RNA, 70 nt, Homo sapiens
gccaccgaggcagaacaacaacggaaaaggagaagagcacagccccaggcacaacacaagaaaagcgggg

SEQ ID NO: 142021 - RNA, 102 nt, Homo sapiens
ggcaggcaaaacaaagaaccacagaacggacaacaaaacaacccggaacagaggcgcaggaagggcaacaccaaaccagaagaaggacgagcaaagcgaaaa

SEQ ID NO: 142022 - RNA, 87 nt, Homo sapiens
accaagaagaggaaaagaacagagccacacaagaaggccagccggaccgccgcgccccccaacgaccaggccccaacaacacgcgca

SEQ ID NO: 142023 - RNA, 76 nt, Homo sapiens
gggaggaaccagagacccacacaagcagaaagaggaagaagcaagccggacccacgacggcaggaaaggaggccag

SEQ ID NO: 142024 - RNA, 83 nt, Homo sapiens
ccccccgggccgggggcgaaggacacccgcaggaaccggcagaggagaaacagacggccccgaggggcggccgcacccaggcg

SEQ ID NO: 142025 - RNA, 57 nt, Homo sapiens
cccagaagccggagcacaaggagaaagacacccccagacacagaaaacaggggccag

SEQ ID NO: 142026 - RNA, 56 nt, Homo sapiens
accaaggagaagagaaggacggaacaggaagaagagagggcgaaggaggccacaca

SEQ ID NO: 142027 - RNA, 72 nt, Homo sapiens
gcggagcaggagagcgcggaggcgggagcagcaggacgcaccgccaccaggaccgaggacaggagagacaac

SEQ ID NO: 142028 - RNA, 76 nt, Homo sapiens
cggggggggccacagccccagcgaccagaaacacaagagcaagagggacagccaggaacgccagacccgggaggga

SEQ ID NO: 142029 - RNA, 68 nt, Homo sapiens
gagcacggcggccaagaaagccggacccacagccgccagagagaccgggccagggacggccccaccac

SEQ ID NO: 142030 - RNA, 78 nt, Homo sapiens
gcccagcgcaaaaacgaaacaggcgcacaccaaaagcaaagcagacaaagggcaacagggaagaacagacaaaaagca

SEQ ID NO: 142031 - RNA, 68 nt, Homo sapiens
cgccgcacaggccgcgaacggggcaaaggacaaaagcacccagacaaaaaccggcaagagacaaaaca

SEQ ID NO: 142032 - RNA, 70 nt, Homo sapiens
accacagacccagacagggagaagccaaaaggacaggcagagggcccaacaacagaagaacccgccagca

SEQ ID NO: 142033 - RNA, 71 nt, Homo sapiens
gcaagcccaaacccaaaggggagaacgagagcccagacagagaaagcagacacgaacaagccgagcgacca

SEQ ID NO: 142034 - RNA, 45 nt, Homo sapiens
cgccgggacaccggaagccgagaaaggcgaaaccaaccaaacgcc

SEQ ID NO: 142035 - RNA, 75 nt, Homo sapiens
accacggaccccaaggaagccacggcagacacacaacccgacccgacgaagcgcgacagagggagagcacccgcc

SEQ ID NO: 142036 - RNA, 68 nt, Homo sapiens
cccggaccgagggagcgcggcccgagagaggccagcgagaagccggccagggcacaaagaagaccccg

SEQ ID NO: 142037 - RNA, 75 nt, Homo sapiens
gagcccggcaggacacaagcggcgagagcgccaggaacagggcacaaagggggcccgggcacaacgccagcagcg

SEQ ID NO: 142038 - RNA, 119 nt, Homo sapiens
cggagcacagcagccgcaggcccaccgcggggaaccgcccgcggcggggcgcggcgaacgagcggagccaccagcccagacggggaggcgggagggagaagccccaacccggcagggga

SEQ ID NO: 142039 - RNA, 40 nt, Homo sapiens
gaggaccaagagccgcaaagagaaaaagcgcgacccagca

SEQ ID NO: 142040 - RNA, 75 nt, Homo sapiens
gcacaggagcgagagaggaccccggacacgaaagccgggaaagcggaagcccgcgggccccgcagaagcagccgg

SEQ ID NO: 142041 - RNA, 38 nt, Homo sapiens
gcgaaacgcacgagaaggggcgagaggcaagacaaaag

SEQ ID NO: 142042 - RNA, 60 nt, Homo sapiens
cgcaaacggaagcggacgcgggaggacggcacaccgcggcgaaccccaaagcagagaagg

SEQ ID NO: 142043 - RNA, 79 nt, Homo sapiens
accaaggggcgagagcccccaccccagacaggggaacagggcacagcccacccaggggcacaagaccgaaagagcaggc

SEQ ID NO: 142044 - RNA, 31 nt, Homo sapiens
aacaaagccagacggcaaaagcagaccggaa

SEQ ID NO: 142045 - RNA, 78 nt, Homo sapiens
aaagaaaagcaggcacgagaagcaagagaagccaagacgaaggaaagcgcaggacagcagggggaaagaccaccgcac

SEQ ID NO: 142046 - RNA, 81 nt, Homo sapiens
cccgcccccgcgggcgccgggccaggacggggacgcggcgcacggcgcggaggggccgagggcaggggggccgccacggcg

SEQ ID NO: 142047 - RNA, 78 nt, Homo sapiens
gccccaacccagccagcccagccggaaagagagccaccgccagggaaagggagcagcaccggccacacccacagcacg

SEQ ID NO: 142048 - RNA, 78 nt, Homo sapiens
cccagcagccagaaccaaaaaggagagcgggaggagcgagaaaggagcacagacaaaaaagagccaccaaacccagag

SEQ ID NO: 142049 - RNA, 52 nt, Homo sapiens
agcccaggccgcacccaggacaaagcaaaagcagaccggaaaacccaccggc

SEQ ID NO: 142050 - RNA, 74 nt, Homo sapiens
aaaaaggccagaagaaacagaacccggcccaaaggggaggccggcaccggacaagagcagagaaagagacgagg

SEQ ID NO: 142051 - RNA, 64 nt, Homo sapiens
cacagagcgcgcggccaagacaaggcagaaaaaaccccaaacacccagagcaaaagaaaccaag

SEQ ID NO: 142052 - RNA, 76 nt, Homo sapiens
gaaaacacgggccaacacggcgcgaaagccagggaaggcccagggggcgaaagcccaccacaccagcacgggggcg

SEQ ID NO: 142053 - RNA, 37 nt, Homo sapiens
gcaaaggccccgacagagacggcaagcaggaaacgga

SEQ ID NO: 142054 - RNA, 83 nt, Homo sapiens
gccggggcggccggccaggaaccacccgaagacggcggaaaacccgaagcagaagcccgacacaggcacaagaccgagcaggc

SEQ ID NO: 142055 - RNA, 114 nt, Homo sapiens
caggcacagaaacccgagagccagacgccaaaggaaaccccgggggacacccccaggagcacccgcccacagccagccacagaggagacccagccgcagagaccacgccaagcc

SEQ ID NO: 142056 - RNA, 80 nt, Homo sapiens
accaccccgcgcccccgcgccgccccgaagcccaggccaggcgaaccagccgaaaaaggagaaaccaaaaggaaaagcga

SEQ ID NO: 142057 - RNA, 71 nt, Homo sapiens
cggaggggcagccacccccggggagaagcagaccgcaccaggcgggaccccgaaaaagcccaaacagacag

SEQ ID NO: 142058 - RNA, 70 nt, Homo sapiens
cacgacacccgccacacccgacccgccaagaagccgcgagcaccacagcacaccccagcgcacgaggggg

SEQ ID NO: 142059 - RNA, 73 nt, Homo sapiens
gccagaccgggaagaaacgaaggggggaggcccaggccaaaagagaaccgaacaagacagaaagcgggacgcg

SEQ ID NO: 142060 - RNA, 75 nt, Homo sapiens
ccaacagaaagaagcagaaaggagcgcagcacacagagaccccacagagaccccaacaggcccgaccaacaaaga

SEQ ID NO: 142061 - RNA, 72 nt, Homo sapiens
gccggagacgagagccaagaggaaaaacgcaagaagcgcacaggccccccaccaggcgcccaccccaccaac

SEQ ID NO: 142062 - RNA, 76 nt, Homo sapiens
cggcaaaaagaaaaaccagcgaagcacagaaaacaacagacgaggaagaagcaccaaaagcacgccaaaagacgcc

SEQ ID NO: 142063 - RNA, 68 nt, Homo sapiens
aagcaaaaagcaaggccaccaacaagagcaacccaggcgccggggaaggaaccagaacggcacccccc

SEQ ID NO: 142064 - RNA, 72 nt, Homo sapiens
gcgagggggggagagaagcacaagcgggggaaaccaggaccaagagaagcaaagggagaaacaacgcaaaaa

SEQ ID NO: 142065 - RNA, 75 nt, Homo sapiens
gacgccgagaagcagaggccccgaggaggcagcacggcaggagacgaggagaggacagcaggacacccggacccc

SEQ ID NO: 142066 - RNA, 71 nt, Homo sapiens
cgcaccagagcagggcccccgagaaacaccggggccaggcgcacgcgggacagagcacccgaagcgcccag

SEQ ID NO: 142067 - RNA, 76 nt, Homo sapiens
ccaggaagggccgccgagcgccaggccacccccgggcagcgggccgcccggcagcagggacgggagaaagaacaga

SEQ ID NO: 142068 - RNA, 55 nt, Homo sapiens
gccgcccgccaccaccggagccagcagaaggggaaaagaaacgcgagccaggccg

SEQ ID NO: 142069 - RNA, 65 nt, Homo sapiens
gcgcgacgcccagagccgcggccggggcgcgggagagacagccggagcggcccaaagaaggaagc

SEQ ID NO: 142070 - RNA, 69 nt, Homo sapiens
cgaccaacacccgaggcggacgcagagacaggagaaaccggggcggggggcggccaaaggaacacagaa

SEQ ID NO: 142071 - RNA, 71 nt, Homo sapiens
agcaaggacaaaggggcccagaaccaggcccgaaaaaacagcggagcaacaggaggcaaacaggcccccgg

SEQ ID NO: 142072 - RNA, 100 nt, Homo sapiens
ggggcccagaagcggggacccgagacgcaagccccagcgaccccaagcaaaccgaggccaaggcccgcgccccagcagagccagaccgacaggaaagacc

SEQ ID NO: 142073 - RNA, 72 nt, Homo sapiens
agcagcacagcaacaaaggcacgcagcgccaggaccccaccggaaaccccgcagaaaggagccgcggcaccc

SEQ ID NO: 142074 - RNA, 75 nt, Homo sapiens
agcccacgcccagagccaaagggcggacggaagggcgaggggaagcgcgaacacccaaaggaacagcaaagcagc

SEQ ID NO: 142075 - RNA, 78 nt, Homo sapiens
agcggagcggagcgcggaagcaggcccccacgggaacgacgccgcgagagccagggagccaaagaccccccacaccgg

SEQ ID NO: 142076 - RNA, 63 nt, Homo sapiens
cgcgaccgagacggcaggcggcggaagcggagcaggcccagaaagaacagacaaagaccgaaa

SEQ ID NO: 142077 - RNA, 78 nt, Homo sapiens
ggggagaggcggcgcgaggagcagcgaaaacggggagagccggaccccagagaaacacagcccaaagaaacacacccc

SEQ ID NO: 142078 - RNA, 71 nt, Homo sapiens
cccagcagccgccaggccggccggagccgagcggagggaagaacgaaccggcaggcccagcgggacgcaga

SEQ ID NO: 142079 - RNA, 73 nt, Homo sapiens
caggcaagagcccgcgagaaggacagcccaaggcggaaaagcgaaggaagccacaagcacagcccacacaaac

SEQ ID NO: 142080 - RNA, 38 nt, Homo sapiens
ccgggaccgaaggcgaagaacacaagggaagacaaaac

SEQ ID NO: 142081 - RNA, 81 nt, Homo sapiens
gggagacgcgggagcgagcgcagcaaagcgcccagccgccgcccgcgcccgcggccgggggaggggccgagaccccgccac

SEQ ID NO: 142082 - RNA, 60 nt, Homo sapiens
ccgcacgagaagagagccagaggggggacgaacccacagagccggacgagcgggagagga

SEQ ID NO: 142083 - RNA, 95 nt, Homo sapiens
caggaggagcgcgaagcgggaccacgcggaggacgggcaacaggagccccacgccacgggaacagcagagaacaaaggaccgcaaacgaagacgg

SEQ ID NO: 142084 - RNA, 74 nt, Homo sapiens
cggagcggagcccggaggggccaaaaagcagaaaaacaaaccagcccaagaagcgacaaagcccgcgaccaaac

SEQ ID NO: 142085 - RNA, 75 nt, Homo sapiens
gaggacgaaacaggagagagaacacaacaagagaacaggaccaaaaacgcggggccaccacccaaggaggagcac

SEQ ID NO: 142086 - RNA, 75 nt, Homo sapiens
ccagggagagcgggcagccccaggggacaggcggaacagccacgcccaggaaaccagccaccgagagcgggggcg

SEQ ID NO: 142087 - RNA, 83 nt, Homo sapiens
ggcgccacaggacgaggacacacgggagcgcggccgagggggcgacgaggcgacggcggccaggcaagaacggaagcacgggc

SEQ ID NO: 142088 - RNA, 77 nt, Homo sapiens
ccaagcaacaacaggcccacacagggggaacgccaggaaaaaaggcgaaccaagagccagaaaacaggcggcgcgga

SEQ ID NO: 142089 - RNA, 85 nt, Homo sapiens
cccacccggaaacaaacgccaggggacccccagaccaccgacagcaccaaggagggaagcggacacacaggacgagaaacccgac

SEQ ID NO: 142090 - RNA, 78 nt, Homo sapiens
caggacgggacggggcaaaccgccgccgcccccaccagacagacgcgcaaaacccagacaagccgagaccaccaggag

SEQ ID NO: 142091 - RNA, 69 nt, Homo sapiens
acaaaaggagaaggggcaagcaaagaaccaaaaagcaccacacccaaaggaggagagaaagaacccacg

SEQ ID NO: 142092 - RNA, 71 nt, Homo sapiens
agcaccggaccagcggagcggccggcagagacagaggaagaggcagagccggggaaggcgcaaccccgaca

SEQ ID NO: 142093 - RNA, 58 nt, Homo sapiens
aacaaggaaacaacaggaacacggcccaagcacggcggcgagccagaggccaacgcag

SEQ ID NO: 142094 - RNA, 76 nt, Homo sapiens
ggccccaggaccccacaacaccagaacaaaaggcagggaacaaaaaccggaagcaacccccacaggcaacagaaga

SEQ ID NO: 142095 - RNA, 81 nt, Homo sapiens
gcagccgggaggagaccgaaacgcgccggaggaagagaggcgggagaaaagcacaacaggcacaaacaggccccacaccag

SEQ ID NO: 142096 - RNA, 84 nt, Homo sapiens
ggggaaaacaagacaacagggccaagcaagaggagaagaaaagaaagccgagggaaaaaccggagaagagaaacaaaaggacag

SEQ ID NO: 142097 - RNA, 66 nt, Homo sapiens
ccaggagccaccaacaccaaaaagggaggggggagacacccaccaagcgcagcaaagccacaccgg

SEQ ID NO: 142098 - RNA, 75 nt, Homo sapiens
cacacgggggcggacaccacaagaagggcgccaggcccaggaggcaagagcgagaagagcgcaagacagaaagcg

SEQ ID NO: 142099 - RNA, 75 nt, Homo sapiens
gcggagcaaacggagccgccaagggggaaggggcacccagaggccccacaggcgcagagcccaaagcaagggcaa

SEQ ID NO: 142100 - RNA, 55 nt, Homo sapiens
cagacccaagcaacccgcggggacagggaaaaaagccaaagcagacccccaagcg

SEQ ID NO: 142101 - RNA, 61 nt, Homo sapiens
ccgacgcagccgggaagaaagccacaggacagggagaaaagaagggaagggaccaccgaca

SEQ ID NO: 142102 - RNA, 67 nt, Homo sapiens
gagccggaccggagacggggccaacagcaagcaacgacgcgcggaacacagaccgaccaccaaaagg

SEQ ID NO: 142103 - RNA, 82 nt, Homo sapiens
agaagcgcagcggaggaaggcgagcaagaaagacgacacagcagccacaaaaccaagcgacagggcaacccaggaagaaacc

SEQ ID NO: 142104 - RNA, 79 nt, Homo sapiens
cgggacgcacagagaccggaagaccaagcaggagaaccgaccgacccgaacgacaaaacgaacgaggcgacggccaccg

SEQ ID NO: 142105 - RNA, 73 nt, Homo sapiens
acacaaccaagcgaaaaccagggagaaaaccagacgagagacagaagacgaaagggcaagaaagagagcacgg

SEQ ID NO: 142106 - RNA, 76 nt, Homo sapiens
gggcgacggaccaagcaccagaaccaccgggaggcgaaaagagacagggcaaacggcccagcaaccacacaaggcc

SEQ ID NO: 142107 - RNA, 71 nt, Homo sapiens
caccaacccccgcggaggagggaagagcaagcaccacaccgaaccggaacagaggcagcgggaagagcacc

SEQ ID NO: 142108 - RNA, 78 nt, Homo sapiens
caaagcaccagaagcccgggcaaagcgcaaacgccaaggcgccggggagcaggagaagaaggcacccagcgagaccgc

SEQ ID NO: 142109 - RNA, 74 nt, Homo sapiens
gccgaacggcagccccaagaacggaaaggccaacggcacacgcacgcaagccaaccgggaagacagacggcaaa

SEQ ID NO: 142110 - RNA, 79 nt, Homo sapiens
gcagggcgagccggagagccggccgagcgaggcggcgcggccagaagcaggaggcaaagggaccccaagaaaccaaagg

SEQ ID NO: 142111 - RNA, 84 nt, Homo sapiens
caagagccgcagccaagcccggaagacgcgaccgggcaccggcgggggaaagggagcagcaccggccacacccacagcacgacc

SEQ ID NO: 142112 - RNA, 72 nt, Homo sapiens
cgggccggaccgggaaaacggccgcagggggcgggaaccgacgaggaccccagagacacgcccagaaccaac

SEQ ID NO: 142113 - RNA, 81 nt, Homo sapiens
ggagaggagagaaggccaaacaacccaaggaacacgaggacccaaagaacaaacccggagagaagaaaaccccagcagggc

SEQ ID NO: 142114 - RNA, 75 nt, Homo sapiens
aaacgggggggcggccggggccgccaccacacgaaacagggcaaggaaaaagcgcgcaggagggcagcaccgcaa

SEQ ID NO: 142115 - RNA, 73 nt, Homo sapiens
gaagacagaacgcccccaccaccgcaaacagcccagcacgacagagacccggaaagcgagcagcaaagaccca

SEQ ID NO: 142116 - RNA, 76 nt, Homo sapiens
gccggcaagggcgcgccaccgcaaaggcccgcgcaccgccagggaagaaacgggaacgaagcagagcccaacaggg

SEQ ID NO: 142117 - RNA, 67 nt, Homo sapiens
gcaaacaccacaggcgagaccggcgcagcaaagccaggggaaacaaccccaggcggagcagccaagc

SEQ ID NO: 142118 - RNA, 79 nt, Homo sapiens
gcgccaccgcggccaccgcaggcacaggccgaacaggacccaaagacaggaccacgcaccagcagagaaggaaagcaaa

SEQ ID NO: 142119 - RNA, 82 nt, Homo sapiens
ccgcagacggcgaggggcgaaacaggagacggggagggcaccagccggggaaaggagcgcagcgcccgggcggaggagcaga

SEQ ID NO: 142120 - RNA, 71 nt, Homo sapiens
ccccacacaaggggcgaaggaaccgaaaggcaacggcagcagcagccagacaacacagggacacaacaaac

SEQ ID NO: 142121 - RNA, 80 nt, Homo sapiens
gcggggacgggagacccagaacagaggccgggggccagccagccgagcgccacccaaagcagcagcaccaaaaaaggacc

SEQ ID NO: 142122 - RNA, 82 nt, Homo sapiens
gaaaacccggaagcggacgcgggaggacggcccacggcagcgcacccacagcggggccgggccccgaccacccagagaaagg

SEQ ID NO: 142123 - RNA, 81 nt, Homo sapiens
agcacgagcgggcccccaggccgaccgcacgccggcgcacgggaaacccaagcgcgacccgaacacggaagaaagacacgc

SEQ ID NO: 142124 - RNA, 80 nt, Homo sapiens
gaagaggaagcaaagccaaggggggaggggaacagcagcggagaacacggcagagacaaaacggaccaccgcgacagaaa

SEQ ID NO: 142125 - RNA, 75 nt, Homo sapiens
acaaccaggcaaagcacagacgccagagcacggagacgaaaggagaacccagcacccagcacggaccagcagagg

SEQ ID NO: 142126 - RNA, 69 nt, Homo sapiens
gcccgaccagccacaggaacacaaacagagagcaacaggcaagaaagaaaaaggcacacaccggaccaa

SEQ ID NO: 142127 - RNA, 38 nt, Homo sapiens
ccacacccccccgggggggacggcccgccacgggcccc

SEQ ID NO: 142128 - RNA, 88 nt, Homo sapiens
agacgacgcaccgcaggcagacaaaagggccaaagaagggagagagaccaacacaaacaacgacacaggcacagacccgagaaaaccc

SEQ ID NO: 142129 - RNA, 70 nt, Homo sapiens
agagggccggcgcggggcacggggacgaagggaacccgccgggcggcccggcacccagccccccggcacc

SEQ ID NO: 142130 - RNA, 71 nt, Homo sapiens
aaggggggccggcgcagacggccaaaggacgggacaaaggcagcagaaaacaaagccaagaagcagacacc

SEQ ID NO: 142131 - RNA, 77 nt, Homo sapiens
ccagcgacgcaaaccagcccagcagcggcacgaaacagcagcggaagagccgggaagaccgcaggaaagcaggaagg

SEQ ID NO: 142132 - RNA, 73 nt, Homo sapiens
aaagggacgaagggaacaagcacggcaaaacacaagacaagcaggagaaggaagcgcgaagaaccaagaaaag

SEQ ID NO: 142133 - RNA, 78 nt, Homo sapiens
ccaaaggcaggacagccagcaggggaaagggagcagcaccggccacacccacagcacgaccggaacccagcgaccgac

SEQ ID NO: 142134 - RNA, 66 nt, Homo sapiens
gagcagggggggggggaagccgcagcggaaagcaggagcacagaagcgggaccggggcgggacgag

SEQ ID NO: 142135 - RNA, 74 nt, Homo sapiens
cgggcccccagccgacagccagggcggaagcccgccccagagcagagacgcagcgaacgcagccaaagaaaccc

SEQ ID NO: 142136 - RNA, 74 nt, Homo sapiens
ccccggccaaagcgaaaggcagcccagcaaggcgagcaaaaaccggaggagcagaagagaggaaaagggaccag

SEQ ID NO: 142137 - RNA, 60 nt, Homo sapiens
aagggccaccccacagacgaggccagcaccacgcacagggacaaaggcaaggagaagcag

SEQ ID NO: 142138 - RNA, 76 nt, Homo sapiens
cgagcacgccgcgcagcccggccgccggcccccaacagcgccggacagggacaagcgcacagcggagaaagcagcg

SEQ ID NO: 142139 - RNA, 63 nt, Homo sapiens
aagggaggcggaaccagacaggaagggaaggggcggagacgggcggaacgcaggaggccagag

SEQ ID NO: 142140 - RNA, 81 nt, Homo sapiens
ggccccgcccggcggggaagcgccgcgccaggacggcagccagacgagcagggccgcagcaggccgcagcgccaaagacca

SEQ ID NO: 142141 - RNA, 71 nt, Homo sapiens
gacaagacaaagaggggagcagacggcaggccagaccccgcgagacagagggaaagaaccaccaccaacga

SEQ ID NO: 142142 - RNA, 81 nt, Homo sapiens
acaccgccccccgggacccccggagcccccagacccaagaagacagcgaaccagaaaagcacggcgccgagaggaaggaca

SEQ ID NO: 142143 - RNA, 73 nt, Homo sapiens
aaaaacagcagacacccacagcggacagaaagggaaaccaaggcccagagcccccgggagagccaccacgcgg

SEQ ID NO: 142144 - RNA, 81 nt, Homo sapiens
ggaagggagggcacggccccggccgccccaacgggggcacgaagggggacacaggcgagagagaccaagacacaccacccc

SEQ ID NO: 142145 - RNA, 77 nt, Homo sapiens
aaaaagaggagaccccaggcaccacagcccgaggcccggagcgaccagggccgcaagaggaagaggacgggaaggga

SEQ ID NO: 142146 - RNA, 56 nt, Homo sapiens
ggcccacgccagggagggggagaggcggagaagccacccgaccaaaaaacaccgag

SEQ ID NO: 142147 - RNA, 77 nt, Homo sapiens
gagaacggcaacccaccagacaccagccggccggcagaagaaaggagaaaaaaacaagagcaacaaaggcacaacag

SEQ ID NO: 142148 - RNA, 70 nt, Homo sapiens
gccagaacgagccacagggcaagcgagaagaacgaacagaacagggaaagcagaaagaggagagcgcaca

SEQ ID NO: 142149 - RNA, 77 nt, Homo sapiens
gccgcagagcagaccagcagagcagcagccaccggggaccgcaaggccgcggggcccaacaaggcaagacacagcgg

SEQ ID NO: 142150 - RNA, 69 nt, Homo sapiens
cccccccacccccaaaggacaccaagaggagagaagaacaaccggacaacaggcggaggcgaggcagac

SEQ ID NO: 142151 - RNA, 78 nt, Homo sapiens
gcaaaaggggcgcaaggcaagcaagaaggagacacgcagagaagcacagaagcgaggggcgacacggcacagaaacac

SEQ ID NO: 142152 - RNA, 66 nt, Homo sapiens
cccccacccgccccgggcggggccccacaggagaaagcaggaagagggacaagcaaagggggagac

SEQ ID NO: 142153 - RNA, 73 nt, Homo sapiens
ggaccaggaggaggcaggaccaaaagggaaaagcaccgaccggaggagcggcgcggaacggcacaaggcaaca

SEQ ID NO: 142154 - RNA, 73 nt, Homo sapiens
ggaaccagcaccgcagcaaccacccagaaacccccccagagcaaggaaacgagcaacagcgagcaaagaaaga

SEQ ID NO: 142155 - RNA, 82 nt, Homo sapiens
ggaacgccccaaacacagggcaggggcccagaagcagcaagaaccagacgagggcagaagggccgcacagcgcacggcggac

SEQ ID NO: 142156 - RNA, 68 nt, Homo sapiens
acgcgagcccccagaaggaacgaaagacaacaaggccagaccagaaaaagggcgcacaacgcaggaga

SEQ ID NO: 142157 - RNA, 83 nt, Homo sapiens
gccgccgccgccccaggggggcgcccgccgggacgccgaccgccgggacgaggggaagagggaacagaaacgcccccgacgga

SEQ ID NO: 142158 - RNA, 80 nt, Homo sapiens
ggggggagagaacccaaccagggggaaacacagaacgcaggagaagcagggcccgagcggaagaggaaagaaggagccgc

SEQ ID NO: 142159 - RNA, 78 nt, Homo sapiens
gaccccgcggccggagggagagggagagaccgcgggcagagggacaccgggcagggccgcaggggcagccaccaggga

SEQ ID NO: 142160 - RNA, 33 nt, Homo sapiens
gaacccagcacgcgaagcgagaggggcccaggg

SEQ ID NO: 142161 - RNA, 77 nt, Homo sapiens
cgaaacagaaaacaagagaccacagaagggcgccggagccgagagcgccgcgcggcgcgcccgcacaccccccggcg

SEQ ID NO: 142162 - RNA, 54 nt, Homo sapiens
caaaccgagccaaaagcggcaaggcaacaggagaaaagacgaagggaaaaaagc

SEQ ID NO: 142163 - RNA, 68 nt, Homo sapiens
cgacccacaggccagagaggggagggcaggaaaaagaaaccggcagccaaacaacaagagcccgggag

SEQ ID NO: 142164 - RNA, 81 nt, Homo sapiens
cagccccgagagcaggacacagagcggaggaacaaaggcggaccacagaaaacgcacgggcgggcggccagacgcagacca

SEQ ID NO: 142165 - RNA, 77 nt, Homo sapiens
gacgggggaccgccgccgcccagcggcgcgagggcggcccgcagaagagcacagaaggagaaggccagcaaagcgga

SEQ ID NO: 142166 - RNA, 63 nt, Homo sapiens
ccagcagcccccagagcgggaccacaggagaggagaagcagcagcaggcccagaccggaggag

SEQ ID NO: 142167 - RNA, 82 nt, Homo sapiens
agcccagccagaccagaccgggcacagcaaagcgaggaccagaccagccgcaagacgagacggcacgccagccgggccacgg

SEQ ID NO: 142168 - RNA, 71 nt, Homo sapiens
cgccgcccagaaccaccaccggccccccggaggccaacaacacaccagaccaggagacgcggccggagccc

SEQ ID NO: 142169 - RNA, 83 nt, Homo sapiens
gaaccaacggagcggggcaggggcgacgagagcgcgcgaacgcacccgggagaaaaacccgccaagccgggacaggacccaag

SEQ ID NO: 142170 - RNA, 97 nt, Homo sapiens
cccagcagaagaagagaggagggagaacacagaaaccggccccagggaggggggaagacagggcccagcaccacaggacgggccgggaagccgccag

SEQ ID NO: 142171 - RNA, 74 nt, Homo sapiens
aagaagcaccagcaagggccccagggcaccccgcggaacaggagacagcggagaaagagcccgggaagcacgaa

SEQ ID NO: 142172 - RNA, 73 nt, Homo sapiens
agaagaaagacacggagcaggaggaccagaggacgcaccagaagacagggcaaccagaagccccacgcagaca

SEQ ID NO: 142173 - RNA, 68 nt, Homo sapiens
ggaaccagagaagagacaacagcccaagacacagcaagcagcaaccaagcaagccagccgggagccag

SEQ ID NO: 142174 - RNA, 80 nt, Homo sapiens
cggaagaccgacggaagaccacaccccgagggagcccaggacaccacgagaagcaagggcacacgcagcaggggacaacc

SEQ ID NO: 142175 - RNA, 54 nt, Homo sapiens
gcccgaggaggcagccaagccgagccgccacccggcagagacgagcacgagagc

SEQ ID NO: 142176 - RNA, 78 nt, Homo sapiens
acaagggacgcgaccaccaaggcgcgagaacagacccagcccgaggaaggagaagaggcgccacgacaggccacagag

SEQ ID NO: 142177 - RNA, 71 nt, Homo sapiens
gaagagcgccagcacacacaagcacgcacaagagaaggagaggcacaaacaaaacagaccgaagaagagaa

SEQ ID NO: 142178 - RNA, 76 nt, Homo sapiens
aacgaaaaaaagagaaaccggggaaccacggacaacccagaggacaacgaaggcgaggagaacagaagcggagaac

SEQ ID NO: 142179 - RNA, 83 nt, Homo sapiens
aaagccggccccggcaaggaggaaggggcgagacaaagagaacagagaaaagcaacccgacaccgacccagagaggagagagc

SEQ ID NO: 142180 - RNA, 80 nt, Homo sapiens
cggcagccggggagcgcaggaaccagacgggggcgagcgagcaccgagcaacacacgcagcccgccgacacagccaccaa

SEQ ID NO: 142181 - RNA, 76 nt, Homo sapiens
accaagaaccaggaacagcaggaaggagaagagccaagaccgcccacaggcagggcggagccgccaaacgcccgca

SEQ ID NO: 142182 - RNA, 67 nt, Homo sapiens
cacagcagaggaaaaaaacagacgcgacaagagcgcccccgaggagccaaggcacaaaacgacagcc

SEQ ID NO: 142183 - RNA, 79 nt, Homo sapiens
aaagggcagcaaccaaaagccagcaaaccaggcgagacagcaggagcaccaaaccccaccaaaacggccgaagacgccg

SEQ ID NO: 142184 - RNA, 72 nt, Homo sapiens
aaccggggcggggaggaaaacccagacaggaagccagcacgccaagcaagccgcgaagcagccacggacccc

SEQ ID NO: 142185 - RNA, 72 nt, Homo sapiens
aaaaaacaggcccagccccgggagcgggcggcgcgcagagcagaaccacaagggacacgccgccacacaaca

SEQ ID NO: 142186 - RNA, 74 nt, Homo sapiens
ccccgcgccgccgaccccccggcgccgcgccggcggcggagcaccgggggcgcgaccaccgcaccccaggagca

SEQ ID NO: 142187 - RNA, 69 nt, Homo sapiens
gcgcggccgcccacacgggcgcccgccgggcacgcggggaaggagaagcacggccacagggaagcccgg

SEQ ID NO: 142188 - RNA, 68 nt, Homo sapiens
gcagagcccaacgaaggcaaaccaacccagcacaaacccgaaaaacgaaaagccagaggaagaacgca

SEQ ID NO: 142189 - RNA, 82 nt, Homo sapiens
cccgcggaacagcggaggacgaagagcgggacccgagcccgcaaccccgggggccaaggaaacggaagaccaacccagcaac

SEQ ID NO: 142190 - RNA, 51 nt, Homo sapiens
ccaccacccgaagacgaaggcgccggcgaaagcaacgaagggacgccagaa

SEQ ID NO: 142191 - RNA, 36 nt, Homo sapiens
gcccaccgaaagaagaaccagagcaacagcgaacca

SEQ ID NO: 142192 - RNA, 85 nt, Homo sapiens
caccagcggggacagcagcccaccaacacagcaccaacagcccaagaagaacagagaacgacacgagggaggcgagggcgagccg

SEQ ID NO: 142193 - RNA, 61 nt, Homo sapiens
gaaaggggaggccgggaggacgaagcgaggaagaaaggacccggcaggagcgcggccagcc

SEQ ID NO: 142194 - RNA, 85 nt, Homo sapiens
gaagcgcgggcgcgggcgcgggcaaggccacggcgccgaccagcggcggcgacgcgcaaggacccccgagcgaccccgggcgacg

SEQ ID NO: 142195 - RNA, 76 nt, Homo sapiens
cccgagaagccaagaaaaaggacaaggacgccaggaaaccaagacaacagcaggcgcaaaaacgaacccacaaccg

SEQ ID NO: 142196 - RNA, 74 nt, Homo sapiens
gaacaaaggcagcggaggcacggacaccacacacacacagcgacaagaagccagaagccaaaggaaaggagcca

SEQ ID NO: 142197 - RNA, 79 nt, Homo sapiens
cgcccccgccacgcagccggccaccgccgagacccagcacacgccgaccaggagagaaaagacacaggagaacgggagg

SEQ ID NO: 142198 - RNA, 69 nt, Homo sapiens
ccaaggcaacagggagggacacacccaagcacggaccaaaacaaagcgggaagccagacgcaagcgaaa

SEQ ID NO: 142199 - RNA, 51 nt, Homo sapiens
ggcgcgcaccggaagcaccagcgaggaagaggccgagagacccgcgaacga

SEQ ID NO: 142200 - RNA, 77 nt, Homo sapiens
ccagaaagcgcagagcaaacaccaaaggaacacagcacccacccacacccacacccgcgacgggagggaggagccgg

SEQ ID NO: 142201 - RNA, 71 nt, Homo sapiens
ccaaggacggacaggaggcgaaaggcaaagagggaggaaaagcgggcgcagcgcgcggacagcgaccgcga

SEQ ID NO: 142202 - RNA, 79 nt, Homo sapiens
gcgacggcagcggaggagggcaaggacaccccgccaggcaaaaggggccaaagcagagaaccagcagcagcccaagaaa

SEQ ID NO: 142203 - RNA, 83 nt, Homo sapiens
ggacggggcggcaggcgcccgcggaccgagccgacggagccggaggcgggagccgcggcggccggggagcacccgaagaagac

SEQ ID NO: 142204 - RNA, 68 nt, Homo sapiens
agacacggggcaacgagaaccagaccgcacgcagaaaaccaggagaacgccccagacagccaccccac

SEQ ID NO: 142205 - RNA, 77 nt, Homo sapiens
gaggaggacaaagagcccccacgagcccgcaagaccggagaagaacaagccgacccaaagccgccgccgagggcccg

SEQ ID NO: 142206 - RNA, 74 nt, Homo sapiens
accaggacagaaggagaaggagacccggaacaagcaaagggcaggaaaggaggaaacagcaacgaacaggaaaa

SEQ ID NO: 142207 - RNA, 40 nt, Homo sapiens
ggccagggacgcgacaaggcggagacaaccagaagacgac

SEQ ID NO: 142208 - RNA, 77 nt, Homo sapiens
ccccgcagacggcgggggcacgacagcgcaaggaggccgcacccaaggccgcagacaaggagaagagggacacagga

SEQ ID NO: 142209 - RNA, 73 nt, Homo sapiens
gcgacgcgcccggcccggagcccccagcgcagcggccgcggcgaagaccagggccacagcccagaaacccaaa

SEQ ID NO: 142210 - RNA, 70 nt, Homo sapiens
cgggggcagccgcagaggcgcggcaaagaagaggacccagccaggaaggacacccagcaagagacaggac

SEQ ID NO: 142211 - RNA, 74 nt, Homo sapiens
gaaccaagcacacggccgaaaacaacgaacgagcaaggaagggccaaggcagaccccacaccggagaacgcaac

SEQ ID NO: 142212 - RNA, 66 nt, Homo sapiens
aacacaaagcaaggcacagaaggacaaccgagggagcaagaaaggaaaaaaagaagcaaccaagac

SEQ ID NO: 142213 - RNA, 54 nt, Homo sapiens
caggaaagacgaaagccgcaagcagaaaaacacccccccggaggacccacggag

SEQ ID NO: 142214 - RNA, 49 nt, Homo sapiens
cagccgagcggggccggccacagaaaaccccaaagaaggcccccgcggc

SEQ ID NO: 142215 - RNA, 76 nt, Homo sapiens
ggacagaggaagaggggccccaccagacagggaccggcggcaaccggaaggaacggagggcgggagagagaagaaa

SEQ ID NO: 142216 - RNA, 74 nt, Homo sapiens
caaaccgaaagaagaagaggagaagaaaagaccagacgggagggaaaacaaggacaaggccacccaagaagccc

SEQ ID NO: 142217 - RNA, 69 nt, Homo sapiens
ccaccaagagaggaaacagagggaaagagcgagacgaaccagaagcacccccggccccgagaacgagaa

SEQ ID NO: 142218 - RNA, 57 nt, Homo sapiens
acaccacaaaaccgaaaacaggaccacacaaagcacggacccagggcaccgccggga

SEQ ID NO: 142219 - RNA, 78 nt, Homo sapiens
aacgccccggagccgccggccgcagcgcagcgccagccaggcagggagggaagcggagagacaggaaccaggggggac

SEQ ID NO: 142220 - RNA, 77 nt, Homo sapiens
cgccagccccgagagcgggaacagggaacaaccagcaggagaggaaaaaggcccacgacaccccgcaggccggcaaa

SEQ ID NO: 142221 - RNA, 69 nt, Homo sapiens
gacacagccacaagaaggcagcaaaccaagcaaccagagaaagagcgcgcacgaaagcacacgaaaagg

SEQ ID NO: 142222 - RNA, 74 nt, Homo sapiens
ccccgcgccccgcaccgcggcaaagagaggacgcagcgagaaaggcggaaaccccacaagcggccaccaccaac

SEQ ID NO: 142223 - RNA, 77 nt, Homo sapiens
ggaggagagagacagacccagcaaacaggacgggaagaacagaagccgagacccacagccaaacagcggacaccaag

SEQ ID NO: 142224 - RNA, 68 nt, Homo sapiens
gcaccacaacagagccccgaaaaggaacggggggaaaccggaaaggcgaaaaggggaaggagacccaa

SEQ ID NO: 142225 - RNA, 84 nt, Homo sapiens
aggggcggaggaggaagaagaggggaccccggaccagcgcgagggcgaggcccccagcaggagacggcacacccggacagcccc

SEQ ID NO: 142226 - RNA, 79 nt, Homo sapiens
ccgggagaccgcaggcagaaagcccacgaccgccccagaggcaccaggccagcagcacgaggaaggaaaaccgcaacgg

SEQ ID NO: 142227 - RNA, 62 nt, Homo sapiens
ggaggaagggaggagacccgaccccagaaggggcgacagcaagaaggagccagcacagaggc

SEQ ID NO: 142228 - RNA, 75 nt, Homo sapiens
gaggccggcaacccacaggggacccaagggagagagggaacggcgaaagggcagcccggaaggagcaccaccacc

SEQ ID NO: 142229 - RNA, 50 nt, Homo sapiens
cgaccagccaacaacgggaccagcacaggagggagcaggaaaaaggcgga

SEQ ID NO: 142230 - RNA, 81 nt, Homo sapiens
gcaacaacgagacccaacccgagcgcggagaacccgcccagaagccagaccccagcgcacgggaccgccgccccagcgggg

SEQ ID NO: 142231 - RNA, 82 nt, Homo sapiens
ccaggccccccgccccgcgcagcaggaaaagaaacgagaccagaaggaaagaaaaggaagcaacaacaaagcccagagggag

SEQ ID NO: 142232 - RNA, 83 nt, Homo sapiens
cacaccacacagagagcgaagcacgaaggagagagaggagaagccagaaaagaaacaccaaaaggaggaagagccaccccaac

SEQ ID NO: 142233 - RNA, 78 nt, Homo sapiens
ggagccgccgcaagccacacgcaaaaaaggcccggggcagccacccagcggccaccccacccccccacacacaggacg

SEQ ID NO: 142234 - RNA, 86 nt, Homo sapiens
aacgccgggagaggcggcggcagaggcgagcggagccgggaaaaccgaaaacaccaagaaggcacagaccggccgggggccccccc

SEQ ID NO: 142235 - RNA, 76 nt, Homo sapiens
gcggagcaccagaaaaaagagcgaccgccggacgcagcaaacaacgaagcgcgcaggagagaagaggcagcgcggc

SEQ ID NO: 142236 - RNA, 74 nt, Homo sapiens
aggagacaaaccccagacgcgccggagggccaggccaccccaggccaccagcaagaccaccccccgagaacgag

SEQ ID NO: 142237 - RNA, 75 nt, Homo sapiens
cgggggggacgagcggagcccgggacaggagggaacgccgcacaagcacacgacccgcccgacccacgagcgcaa

SEQ ID NO: 142238 - RNA, 66 nt, Homo sapiens
aggcccaaccaaagacaggaacccgccgccgaggaagcaaacaacacccacggacgacaaggaaag

SEQ ID NO: 142239 - RNA, 76 nt, Homo sapiens
gaagaaggccagcgggccaggaagcgcaccaggaggccggcagagcaagacggcaaggagaaaacggaacgagcca

SEQ ID NO: 142240 - RNA, 90 nt, Homo sapiens
cgcggggggccagcggaagaaccccccgggagccagaccggcaccgaagaccagaaggcccggacaagacagagaccagccagagagaag

SEQ ID NO: 142241 - RNA, 87 nt, Homo sapiens
gacccccggcgccgagcccgacccggagcgacgacggccgcgccaagcggaaagggccaccacagagcccgcagggacacagcagaa

SEQ ID NO: 142242 - RNA, 53 nt, Homo sapiens
cgcgggcggaagacgaggccacagacaccgaaggaagagaagaccacagaaac

SEQ ID NO: 142243 - RNA, 74 nt, Homo sapiens
ccgaggcaggaaccccacggccgaaagaagaagaaacggagaagaggaagcccgagaacacgaaacaaggaaga

SEQ ID NO: 142244 - RNA, 119 nt, Homo sapiens
ggcgaccgggaagaagcgaaaaggagcacgccaggcgaccacgagcccccaggccgagaagccccagcacagccccaaccaaggaacacacgcacgaacaaccaaaccaggaagcaaca

SEQ ID NO: 142245 - RNA, 69 nt, Homo sapiens
accgcacggaaacgaagcgacacgcgggaacaaagaccggaagacagcacaaggaagaaacaaaaacac

SEQ ID NO: 142246 - RNA, 40 nt, Homo sapiens
cgaagaagggaacacaagagccgaggcgcaagccgcagcg

SEQ ID NO: 142247 - RNA, 65 nt, Homo sapiens
aaggaccaagaaccaggaacaccaaacgggcaacccgaccacccgcaagacgaagaacagacccg

SEQ ID NO: 142248 - RNA, 93 nt, Homo sapiens
aagacgagccacaacccgaggcagcgaggaaaagaagagccggacgagcgggagaggacaccacacaaaaaacaggaaaagagaacaggcacc

SEQ ID NO: 142249 - RNA, 71 nt, Homo sapiens
gaccacaaggagaggcagacgggacaagcggcgagcagaccgcaaaacgggacaagcccgcacgcgcagag

SEQ ID NO: 142250 - RNA, 79 nt, Homo sapiens
cagggggaggaaagcagacagacccaccaagagggcgggagaaccacgaggagagaggcgaggggacggcggggagcgc

SEQ ID NO: 142251 - RNA, 77 nt, Homo sapiens
gggcagaaggccgggcgcaacagaggggccgcgcgacaacagcaccaggcccgaagcagaaaacagagggaaagaaa

SEQ ID NO: 142252 - RNA, 76 nt, Homo sapiens
gccacggaaggggcccccggggaggccgacccaccagcacgagccagggagccgccgggaccggcccgggagacga

SEQ ID NO: 142253 - RNA, 71 nt, Homo sapiens
ccagcgagacacccgaggcacgaggaccgcgaagggaaacacaaagaagacaccagaagggccagcaccac

SEQ ID NO: 142254 - RNA, 87 nt, Homo sapiens
gggcgcccagagccgcgccgccgcgccgcccgcggaaggaagcagccaccccgccaggccccccgcccgccgcccccggaggaggac

SEQ ID NO: 142255 - RNA, 75 nt, Homo sapiens
cagccagcaacacccagacgggagagaagcgccggccggaaagaagacggggaggagcaggacgagcccaagggg

SEQ ID NO: 142256 - RNA, 73 nt, Homo sapiens
gccgaaaccggaaggacaccccaaaggaaggcagaagcagacaggagacagacgggaggggacacggacgcgg

SEQ ID NO: 142257 - RNA, 59 nt, Homo sapiens
cgaggcagccagcccgaagaaaagggaaaacgcgcgggccaagggaaagaaaacaagcc

SEQ ID NO: 142258 - RNA, 91 nt, Homo sapiens
cgaccacgggccgacggaccccacacagagaggccagaccaggacacacacccagcaaagagacgggacgcggaggaaggaggacccagga

SEQ ID NO: 142259 - RNA, 70 nt, Homo sapiens
aggaccaaccccagcaaaggggccacagagacgcagaacgcgggaccgaaggacgaacagagaaaccccc

SEQ ID NO: 142260 - RNA, 79 nt, Homo sapiens
cagaggcagcaaaaagggcagaagagcccaaggggaaagagcaccgaaaccaggcggaaacacggcaggcaacccacgc

SEQ ID NO: 142261 - RNA, 78 nt, Homo sapiens
cggccgagaacgaagaggccgccgccgggcccaggcccgcgaccgccgccagcgcccgaggacaagagcgcccaagcg

SEQ ID NO: 142262 - RNA, 94 nt, Homo sapiens
cgggaccgggcggcacgcacgcgggcagggaacaggcggagcggaaggggaggcaagcaggggggcaaaggaaagaaggcagaaagggaggcca

SEQ ID NO: 142263 - RNA, 77 nt, Homo sapiens
gccagggccgcgcacaaccccgagcgcccaccggcggaaagccgaccaccgccgcggcggaggcggaccggggggcc

SEQ ID NO: 142264 - RNA, 68 nt, Homo sapiens
acaagaccaaaggaacgggcacaaccacggggcaggagggcaggagaaaggagaaaaagaggcaggga

SEQ ID NO: 142265 - RNA, 55 nt, Homo sapiens
ggaaagacacagcacaagcccggggaagccagaaaaacggaaccgggagaaaaca

SEQ ID NO: 142266 - RNA, 70 nt, Homo sapiens
cgacggaggaaccagaccagcaaagagaagagagcagccacagaaggcggccaaaaggcaacaggcgaca

SEQ ID NO: 142267 - RNA, 72 nt, Homo sapiens
gagcacacgcaccagaggccaaaacagcacaacccccagaggaaaaggcacagcagaagcacagacaaagac

SEQ ID NO: 142268 - RNA, 74 nt, Homo sapiens
cagaagacggggacgcaccacgagggcggaagggcaagaaagaaggaaagcccaagagggagcgcccgacacgc

SEQ ID NO: 142269 - RNA, 77 nt, Homo sapiens
cagccccaacggcaagcaacgaggaagacagagggcaaaacagaggaagaaaagaaagagaagaagggagccccgac

SEQ ID NO: 142270 - RNA, 75 nt, Homo sapiens
cgggagccgcgagcggcgccgcccccgcggagccccgccggacacccaacagcacgcagacaaggcaccaacaga

SEQ ID NO: 142271 - RNA, 81 nt, Homo sapiens
aaagaggaagggccggccggggcaggacaacgccacagcagcggaaagggaaacgagacaacacacccaagacaaagagaa

SEQ ID NO: 142272 - RNA, 75 nt, Homo sapiens
gaggccgcaccgccgccacgccacacccgcaacccgggcccgcgcacaagaacgagaaccccccaaaccaaagaa

SEQ ID NO: 142273 - RNA, 79 nt, Homo sapiens
cggcccaggggccggcgaaacagagcacgagagacaaggaggggcgcgccgcccacccccaaagccacacgccgccccc

SEQ ID NO: 142274 - RNA, 81 nt, Homo sapiens
cggcggccagggacagcggaacaaggggagacacagcgcgagaggcagagaagggccaaggccgcggcaagccacgaagcc

SEQ ID NO: 142275 - RNA, 58 nt, Homo sapiens
ccccagcaggacaaacgcacccggcgaagagacaagcgggcgacacgagagggaagcc

SEQ ID NO: 142276 - RNA, 78 nt, Homo sapiens
agagaacagcaggagcggaaaggggaagggcgcgcaggaacaagaagaagggcaaccacagagccaagaaaaagaaac

SEQ ID NO: 142277 - RNA, 72 nt, Homo sapiens
gaacaacagcaccagacggaaacgaaacacacagcccacccaaacaggccagcccaagggcaagaaagcccc

SEQ ID NO: 142278 - RNA, 56 nt, Homo sapiens
gggaaaaagcaaaagcaaagacaccccaaagaggagaacccaggacgagaaaaaac

SEQ ID NO: 142279 - RNA, 74 nt, Homo sapiens
agccagcacaggccagagcaaaaggcaagacggcggcgggagagggcgaaccaaagaaggaaggcgacccaaaa

SEQ ID NO: 142280 - RNA, 65 nt, Homo sapiens
cacacacaagaaaggcaacaaaaccacgcaggcgcgaaaagccccccgggagcagccagaacaga

SEQ ID NO: 142281 - RNA, 78 nt, Homo sapiens
gccggacggcgggccccgggaccgggcgggaacccgcggggagcgggacacgaacgggcgccgcgcccggggagacag

SEQ ID NO: 142282 - RNA, 81 nt, Homo sapiens
gaaaggaaaaacaggccggaaagcacaggaaaaaccaaaggaaccaggggggaccaaggcaacgaacacaagcagcgggca

SEQ ID NO: 142283 - RNA, 82 nt, Homo sapiens
cggacgccagaaggaggcgcgggcagaaaaagcggggaaaacaaaaaaaagaaggagggaagagggggccaggaccaggccc

SEQ ID NO: 142284 - RNA, 82 nt, Homo sapiens
ccaggggccaggagggccggccgccgcccgagccagccgagacgaagcgcggccaggggggcggaccagggacgagcgcccc

SEQ ID NO: 142285 - RNA, 77 nt, Homo sapiens
gcaagagggcgaacaacacggcaacgggacggcgacagcccgcaccaggggacaccaaaaggagcacgcaaccccac

SEQ ID NO: 142286 - RNA, 79 nt, Homo sapiens
ccaagagccagcacccagcagcggaagcaccagaacagaagaggaacgacagcgccaccccccagaaggcgacaacaga

SEQ ID NO: 142287 - RNA, 79 nt, Homo sapiens
cacgggccgcgcgaaaaagaacgagaaggaaaagcagaaaaaagaagaccgcgaaaaaaggccaaagaaaaacacggaa

SEQ ID NO: 142288 - RNA, 74 nt, Homo sapiens
gcggcaggagacggaccagggaccaaaccacagcaaaaacaccaggaaagacaacgaaacacacaacaaaaagc

SEQ ID NO: 142289 - RNA, 85 nt, Homo sapiens
caacggaggcaaggcgaaaaacaacgccgcagaacacaccacagccacagcacggaagcaaagaccagaacaaacagaaggaagc

SEQ ID NO: 142290 - RNA, 94 nt, Homo sapiens
cgcccgccgcgggagagaggacccccccccccccccaaggaacacgaggacccaaagaacaaacccggagagaagaaaaccccagcagggcgcc

SEQ ID NO: 142291 - RNA, 74 nt, Homo sapiens
agacccccagcacaacacaccggaccaccggccacacaagccagcaacagcaagaaacaagcaaaggggacaac

SEQ ID NO: 142292 - RNA, 83 nt, Homo sapiens
gccgcccaggggccaggcgaagcacgagcagaccggcccgaccgcccacagacccaaacaaagagacaaagcaggaggacaca

SEQ ID NO: 142293 - RNA, 80 nt, Homo sapiens
ggcgaaggaagaggcggacggcgggaccacaagacaacgcggagcggcgaagagcaaccaggaaacagcccgaacgcaca

SEQ ID NO: 142294 - RNA, 90 nt, Homo sapiens
gaaaccagaggaagaggaaagaaagaagaggagggaaggccccaggccagaagcggacccagaagaggggagcagcaaggaggaagacag

SEQ ID NO: 142295 - RNA, 82 nt, Homo sapiens
gaagaaaggagaaacagagggagaacaagccacaaacaacccccaccacgccaagagaaggagagagaaaggacaagaaaga

SEQ ID NO: 142296 - RNA, 78 nt, Homo sapiens
ggcggagagcccacgcaggaggcgacaccccaagagggccgccaccacgaggagcaacccccaaaagagcccagaaag

SEQ ID NO: 142297 - RNA, 67 nt, Homo sapiens
aacagggcaccaagagaggcgagagaccaggacggaggcgcaaagaaggcacagaaggagaaacggc

SEQ ID NO: 142298 - RNA, 77 nt, Homo sapiens
gcggcgggccccgggaggcagaagagaagcccgcggggaacggcacagggaggggacagaccaaccggcagccaacc

SEQ ID NO: 142299 - RNA, 82 nt, Homo sapiens
cccgagccgcgggaagaggcggcgccgccacccccccccagcagggagacccgaccaccggaagccacggcccggacccccg

SEQ ID NO: 142300 - RNA, 81 nt, Homo sapiens
ccaaccggaggagagaccaaccgaagcggcggcaggggccgcggcccggagccaccggggggaagaagaagggaacaagcg

SEQ ID NO: 142301 - RNA, 78 nt, Homo sapiens
gagaggcaggcggagccgaccgggccaggcaaaagagacacagcagaccccaggagaaaagaggcaaaaaaaaggcga

SEQ ID NO: 142302 - RNA, 85 nt, Homo sapiens
cggcggcgacaccacgggaggcagaccacgagaagccagcacacagcaagaaggaggccacagcaaacgggaagaggaccccacc

SEQ ID NO: 142303 - RNA, 72 nt, Homo sapiens
gaacaacagcacgggagaaagcgcccacgcacgaaagcccaggccaaaaagaggaccggaacggcaaaggaa

SEQ ID NO: 142304 - RNA, 73 nt, Homo sapiens
cacacagcgcccggcccagcaacaacaaaccagaacggcagcgcggagggggccgcacggaggacacgcacgg

SEQ ID NO: 142305 - RNA, 52 nt, Homo sapiens
cgcagggcgcccccgacggagcaccgcgcccaggcggaggcagggcggacgg

SEQ ID NO: 142306 - RNA, 78 nt, Homo sapiens
cccccagagaggccccaagcgcagccccgacaagggaccgggcgggccccgcaggaaacccccaccggcccacacaga

SEQ ID NO: 142307 - RNA, 83 nt, Homo sapiens
agagaagcacaaaacagcagacccaagagcagcggaaaagaccagcacaggaacgccagacccgggagggagaaacgagaggc

SEQ ID NO: 142308 - RNA, 74 nt, Homo sapiens
aggccccagcaaagaggacaaaagagcggaggagcggcgaggagagcaggcggcagagcaaagcgagcaagggg

SEQ ID NO: 142309 - RNA, 72 nt, Homo sapiens
caggcaggagggagcaaaaaaggaagaaccggaaagagcaccagacacacacgccaccagagcagaagaagg

SEQ ID NO: 142310 - RNA, 71 nt, Homo sapiens
cgcagaccgcagaaggccggagacaccagcaggggcgagcaccagcacaacaaggagaccaagaacccggg

SEQ ID NO: 142311 - RNA, 78 nt, Homo sapiens
agcggcgcccgcgccggaccgggcgagcgcggcgcccagggacccgcgggagagacgagagccgaggcgccggaaaca

SEQ ID NO: 142312 - RNA, 84 nt, Homo sapiens
ggagcagccggaggacgcggagcccaagaaacgggcagccaggcccccacagcccgcaggaaccgaaagacgacgcaccgaaac

SEQ ID NO: 142313 - RNA, 74 nt, Homo sapiens
gaccagacaggaccagggaggagcaggaaagagaagggaagcaagaacgcgggaggagacagggagcaaacggg

SEQ ID NO: 142314 - RNA, 74 nt, Homo sapiens
gggccagggagccccaggcagcccgcgcacgcggggggagcagggggggagggagaaggaaaacggacgagccc

SEQ ID NO: 142315 - RNA, 88 nt, Homo sapiens
ggcccaaggcggaggcgccgcccggggccccgcggcgcaggaggcggggagcgcagagcgggcgagcgcggagggaaggccaggacag

SEQ ID NO: 142316 - RNA, 78 nt, Homo sapiens
ggaaagggcggagaagggggaaaacccccaaaggagcaaccgacgccgccaagccgaaaacacgaaccccggaaggaa

SEQ ID NO: 142317 - RNA, 54 nt, Homo sapiens
aaagggaaagcagcaagcaaggccaaaacagcgacaccgaacagcgagcacacg

SEQ ID NO: 142318 - RNA, 77 nt, Homo sapiens
aaagagcaacagcagggcaacaggggaggggggagcacaggccggcggggggcggacaccagccaagcagcggaacg

SEQ ID NO: 142319 - RNA, 51 nt, Homo sapiens
acacaaaagaggagaaaaccgggcgcagccgagacagacccagcacggacc

SEQ ID NO: 142320 - RNA, 72 nt, Homo sapiens
gacccagaaaggagccagaacgggaaagacaaagcaaggaaaaacaagaagaccagggaccgggcaaccaaa

SEQ ID NO: 142321 - RNA, 79 nt, Homo sapiens
gcgcgcgccccggacccgggcggacgagcacgaacacacgggggcggaaagacgaggaaagccagaagggcaaagccaa

SEQ ID NO: 142322 - RNA, 58 nt, Homo sapiens
acagacagggccgcagagagcccgggcacaccgagcccccaggacaggggcggaccca

SEQ ID NO: 142323 - RNA, 78 nt, Homo sapiens
ccccgcagcccgagccgccccccgagcccgcccccgaggcgcagaagggagagacggagcaaagagacaggggcagaa

SEQ ID NO: 142324 - RNA, 90 nt, Homo sapiens
gcgggcggcaggcgagggagcccgcgcggcgagagcccacaggcccccacaggcccagggccccggccaggcccagccccgcgggagacc

SEQ ID NO: 142325 - RNA, 81 nt, Homo sapiens
ggaagaccagaaaaggggagcagaaagggaaaaacacgggaaaaggaaaaagcgccacggacccacgcgcgggagcagagc

SEQ ID NO: 142326 - RNA, 77 nt, Homo sapiens
caccaacaggagcaggagaccccgagagaaacggcgagaaaaccaaacaggagccgacagccggagaagggcaggga

SEQ ID NO: 142327 - RNA, 73 nt, Homo sapiens
cgcagggcgcccccgccccagggaacccgagaaggccaacaaaagagcgaggaaccaagaagaggagacaaga

SEQ ID NO: 142328 - RNA, 71 nt, Homo sapiens
caaacagccaccaacaacagccaagaggcacaaaggacgcgaagaggggcaggacgcaggcagccagagag

SEQ ID NO: 142329 - RNA, 73 nt, Homo sapiens
gaccagcgaagaaggcccgaggaaaggaggggcccagacacccccagagggccacgacacccgcccccaccgg

SEQ ID NO: 142330 - RNA, 75 nt, Homo sapiens
cccacaaggacccgaggaacagcgcacgggcgggcgaaggcagcccacgaggaggcagcacggcaggagacgagg

SEQ ID NO: 142331 - RNA, 74 nt, Homo sapiens
ccggaaaccacagcagcccagcacacagaaggcagccacaccagcccagggcaccagcgggccgccgcccggcg

SEQ ID NO: 142332 - RNA, 73 nt, Homo sapiens
ccgggagcaagaagaacacccagaggaggagccaggaggagagaacaagaaaagcgcggaaacgcaacaaaag

SEQ ID NO: 142333 - RNA, 78 nt, Homo sapiens
gcgcggccaggggcccggagacacccgccacacccagaagcgggcccggccgcggagggggcggcagcagcccgcgcc

SEQ ID NO: 142334 - RNA, 74 nt, Homo sapiens
acaaggggaagaaaagcaagagccaagggagaaaacgaaaaccgcaagaaaaagaccagacagcgaacgaacgg

SEQ ID NO: 142335 - RNA, 91 nt, Homo sapiens
gcaggggagcgaaggcgaggggcagcggcaggagagccggccgcgacaggacgacaggcccagaacaggacagagcaggacacaaaaagga

SEQ ID NO: 142336 - RNA, 55 nt, Homo sapiens
aaggccgcaacaccggaagccggaaaagccaaaacacaaagccacaacgcagaag

SEQ ID NO: 142337 - RNA, 78 nt, Homo sapiens
gggacaggagcaaccacccagccacccgaccacacacaccaggaaaaaggacgagcagccgcaaggaaaccacacaag

SEQ ID NO: 142338 - RNA, 72 nt, Homo sapiens
aggaggcaacgccgcgggacacaaaagcaaccgagagggaaacaaccacgcgaaaaggagacacagcacaaa

SEQ ID NO: 142339 - RNA, 77 nt, Homo sapiens
aaccacacccagggacccccagaaggaacggagacaaaaacggcccggagaggagggagcaacagcgagcaacaggc

SEQ ID NO: 142340 - RNA, 73 nt, Homo sapiens
caccgcccgccaggacgacgggcggcccagccccccacgcacgaggccagcaccgcccaaccgcaggggccac

SEQ ID NO: 142341 - RNA, 78 nt, Homo sapiens
ccgggccaggaaagaagaaaggggcaaggaagaaggcaccgcccagaaggaaacagcgaaagcacaggaaagccgaac

SEQ ID NO: 142342 - RNA, 63 nt, Homo sapiens
agccggcgcgccacagcgggcacagaaacgcaccacgcacaggcagaggagcagcagggaggg

SEQ ID NO: 142343 - RNA, 73 nt, Homo sapiens
ggacggcaaacggagccaggcacaagaaaacacaccgacagagaacccaggccaacacacagacagaggcagc

SEQ ID NO: 142344 - RNA, 73 nt, Homo sapiens
accaggcaccggggggcaacacccgagaacggcgggaagagaagacacgagcacaaacggcacacagagaaaa

SEQ ID NO: 142345 - RNA, 84 nt, Homo sapiens
gaaccagcaaaaacccaccacaaaaaacacaaaaaaccaccggccagcgggcagaacaaggcgcaggcgcggcgaccagaccca

SEQ ID NO: 142346 - RNA, 79 nt, Homo sapiens
agagaggccgcgccgggcagaggcaacgcggaaaaaagccggggggacgcggacagcgcccaagggcgcgaacgggaag

SEQ ID NO: 142347 - RNA, 73 nt, Homo sapiens
gcagcccccagagcgggaccacaggacacaacacagaaaccaaaagaacgaaggccaaaaaagcagaagaaca

SEQ ID NO: 142348 - RNA, 78 nt, Homo sapiens
ggagaggccgaggggagaaggggaggcagcgcggcccagcccacgcgccgaccacgagaccgagaagacaaaacagcc

SEQ ID NO: 142349 - RNA, 73 nt, Homo sapiens
agaaccggaagagaaggggagaggcgacagggacaacagaacaaaggaagggaacgcggaaccccagagagga

SEQ ID NO: 142350 - RNA, 63 nt, Homo sapiens
aaacccagacccagaaggcaaaacaccgggcccgaagaaaaccagggggaaggccccgggcag

SEQ ID NO: 142351 - RNA, 79 nt, Homo sapiens
ccagccaaacaaaaaggaaaggagacaagcagagacgaaccaggcaaagccgcggaacacccacagcgccacacgagaa

SEQ ID NO: 142352 - RNA, 77 nt, Homo sapiens
ggcaagaaacacaacgggaacgaagggcaagcccaacgccgaaaggccagacggggcagggaacaacgggcgaaagg

SEQ ID NO: 142353 - RNA, 98 nt, Homo sapiens
gaagggccagccagaaccaagacacacagggagccagcaccgagcccccgggccagcagaggagcaagaggggggggcccccccgaagaaaggaaccg

SEQ ID NO: 142354 - RNA, 84 nt, Homo sapiens
gacagagcggcgggacgcggggacgccgcggccccaacgcgccccgggacgcacacggcaccaaaccaccaggagacaaagcca

SEQ ID NO: 142355 - RNA, 55 nt, Homo sapiens
cgaaacaaaccccaaccaccggccccgcaacccccagccacaacgcgaaccgggc

SEQ ID NO: 142356 - RNA, 72 nt, Homo sapiens
gacaaaagggccaaagaagggagagaggcacagcacagaaaacccaggccgcagaaacaaaaaaaagaaagg

SEQ ID NO: 142357 - RNA, 72 nt, Homo sapiens
ccccggcgggcccgaggcggcgagagaggcaggcggagccgaccgggccaggcgcaagagagcaaagcggga

SEQ ID NO: 142358 - RNA, 69 nt, Homo sapiens
ggccagggcccgaacgccgagcagagaggccgggaagaaggagggacacagcagcgcggagagcggccc

SEQ ID NO: 142359 - RNA, 59 nt, Homo sapiens
cgcccccccgcccacgacaccacccccccgaagagcagcaaagagagcaggagaaggac

SEQ ID NO: 142360 - RNA, 71 nt, Homo sapiens
acggcaggacacggggaaagaagaacccaccaaaagagaaagagcgcgcacgaaagcacacgaaaaggaag

SEQ ID NO: 142361 - RNA, 73 nt, Homo sapiens
ccccaccccgaaacgccccgaaaagacgggcaacaggcggggcagcagagcccagcacacagcagggaggcga

SEQ ID NO: 142362 - RNA, 85 nt, Homo sapiens
ccccccgcgcaggccccggggggccggggcaccagaggggaggggagacaccacaacccaggccgcggaagaccagcgggagccc

SEQ ID NO: 142363 - RNA, 75 nt, Homo sapiens
cacccggagaggaggaaaaaaaggaccaccccaacaggaaacaagagagccagaaaagccagcaagcgcagaagg

SEQ ID NO: 142364 - RNA, 60 nt, Homo sapiens
gaagcagcaaccgaaaggcgagggaaaaagacggacggcggcagagaagaaacgccagga

SEQ ID NO: 142365 - RNA, 58 nt, Homo sapiens
ggacacgccagggccccgcaaagaaaccgcccaccaaaaccgaacccaaaccaagaaa

SEQ ID NO: 142366 - RNA, 73 nt, Homo sapiens
gaaccccgacccagcagcaaggccagcaaccgcacaggggggacgagcagcaacagcagagagccggcaagcc

SEQ ID NO: 142367 - RNA, 68 nt, Homo sapiens
ggcgccgagccggaccggagagcacaagccggccacgcgcgccgggggcccggaaagggacgcgcgcc

SEQ ID NO: 142368 - RNA, 83 nt, Homo sapiens
ggacgagaacggagagaacgcggaaggagacggagaagaacacacaggccacccacggccgggcagaccccaagagaaaggag

SEQ ID NO: 142369 - RNA, 112 nt, Homo sapiens
cggcggccccgacgacagcgggccgggaaaagggcacgaggccggaaccgcccagccccggcccgggagcgagacgcaacagaaaagccgagacaggagaagagaggaaaag

SEQ ID NO: 142370 - RNA, 68 nt, Homo sapiens
ccaaagcgaacgaagagcaccgggagcggcgaagaggcaccggaggagacagaagcgaaggggacagg

SEQ ID NO: 142371 - RNA, 91 nt, Homo sapiens
gcagcgggacaggacggagcacggcgaagcagcggagaagcggccaagaaggcggagaaggacccaaggcggagcaggccaaaggaagaag

SEQ ID NO: 142372 - RNA, 72 nt, Homo sapiens
ggacccgagaagaggcggaaagagagggcaaaaaacacagacaccggcgaacaacaagaaccggggagacac

SEQ ID NO: 142373 - RNA, 37 nt, Homo sapiens
ccagcgaggggcagagcagcccggcccacacgcagcc

SEQ ID NO: 142374 - RNA, 57 nt, Homo sapiens
cccacagaaccaaagcagaaaggaggacccgaaaaccccgagaggcaaccaaaaaaa

SEQ ID NO: 142375 - RNA, 73 nt, Homo sapiens
ccgagcacccgccccgggcaccaacgaaaaggacaaccggggaagcagaacacgacgaggaaggccccaagca

SEQ ID NO: 142376 - RNA, 51 nt, Homo sapiens
cacggccacggccagaggaccccaaggcagagacacccacggcaccaccgc

SEQ ID NO: 142377 - RNA, 62 nt, Homo sapiens
aaaaaacacagccgacagacgccaccaaaagcaccaggagaccaagacacaccaccccaggg

SEQ ID NO: 142378 - RNA, 84 nt, Homo sapiens
aaggcggcccggcgggcgacggacggccggacaggaaaaccagagacccagacacgcgaaggaacgaaaggccaaaaggcaaaa

SEQ ID NO: 142379 - RNA, 61 nt, Homo sapiens
ggacgcgggcagcagcaggccgggagagcgaaaggggaccagacggggaagccaaaaccca

SEQ ID NO: 142380 - RNA, 54 nt, Homo sapiens
cccgagagcgggacgcaggacaggccgccagggggacagaaggagcaggcaaaa

SEQ ID NO: 142381 - RNA, 74 nt, Homo sapiens
caaggaccgcgcagaggggacggggccacgccacaggaccggcagccggggcccgacccaggcaagcgagcagg

SEQ ID NO: 142382 - RNA, 32 nt, Homo sapiens
gccgcgacagaaagcacaacgggagccgcaca

SEQ ID NO: 142383 - RNA, 67 nt, Homo sapiens
ggcgccgacggaggggccagccgcaggcaccaagaagaccaacaagcagaagagccaagacaaaaag

SEQ ID NO: 142384 - RNA, 79 nt, Homo sapiens
gcccccgacagccaggcccgcgagaagaaagaccacagcaagaccacgcccccagccgggggaccaggccgaacgaccc

SEQ ID NO: 142385 - RNA, 69 nt, Homo sapiens
aacgaaaccaaagcacaaaccaggggagacaccgcgccaagggagaagaccccacgccccagagacaaa

SEQ ID NO: 142386 - RNA, 76 nt, Homo sapiens
ggggcaggcggagaaggagacaccggaggacgaagagggggaggagcacgcgcaaccggggcgagggcggggcaga

SEQ ID NO: 142387 - RNA, 51 nt, Homo sapiens
agaggcgcggcacaggaaagggccgcgcgaaaggccaaccggcgccaaacg

SEQ ID NO: 142388 - RNA, 62 nt, Homo sapiens
ccaagaaacaccaccaacaaacggaggacccgaaaaccccgagaggcaaccaaaaaaacgga

SEQ ID NO: 142389 - RNA, 66 nt, Homo sapiens
cgcagggcgcccccgagagagaaaggcaagcaccccggacaagaaggagaaggcacaagcacccaa

SEQ ID NO: 142390 - RNA, 82 nt, Homo sapiens
gccaggcggaaaccagacggcgcgccgggaccggcacaagggagcacgccgcggcaaccaggaagggccccacaccaaaccg

SEQ ID NO: 142391 - RNA, 64 nt, Homo sapiens
cggagcaccgcgcaaaaaaacgggccaggaagcggggaaaaacggacaccagcaaaaagccagg

SEQ ID NO: 142392 - RNA, 89 nt, Homo sapiens
cccacgagaggacagcccagaggaggaagaagggggaaagggaaaagaggaagagagaaacagagagaaggagaagagaaagaccccag

SEQ ID NO: 142393 - RNA, 58 nt, Homo sapiens
cggggggcccacccccgaccaaaggcagagcggaaagcagcgcccacaaagagaagga

SEQ ID NO: 142394 - RNA, 81 nt, Homo sapiens
cggccaggggacagcagcccgaagagcaaggaagaccaaaaccaggggcaaaggacagacagaagaggcgaggcagagagg

SEQ ID NO: 142395 - RNA, 67 nt, Homo sapiens
aagggagggccacggacacagaaccacaggggaagaaccacaggggaaggaacaaagcagagaaacc

SEQ ID NO: 142396 - RNA, 78 nt, Homo sapiens
cagcaccggaccagcggagcggccggggcaaaggagcagagaacgacaagccacacgaggacagcccgcaacaccacc

SEQ ID NO: 142397 - RNA, 78 nt, Homo sapiens
acgggccaaaaggaagacccagccagaccagggacaaagagcaaacagacagggccgcaggaggaaccacgaaagacg

SEQ ID NO: 142398 - RNA, 81 nt, Homo sapiens
gaaccaagaagaacagcaaaaccagcaagacggccaagcgacagcgccccaaacaaaccaggcggaggcaaggcacgaccg

SEQ ID NO: 142399 - RNA, 80 nt, Homo sapiens
aaaacaagaaggacaacagcccccacgagaacaggaacagaagaaacggaaaggcagggaccgccgggagagccgcccac

SEQ ID NO: 142400 - RNA, 56 nt, Homo sapiens
ggccggagaggaaagagacccgcagagccacagggcagggacagggcggcgccacg

SEQ ID NO: 142401 - RNA, 90 nt, Homo sapiens
gacaagaccaaggcaacaaggacaacaagagacgggacaagacagggcaaaggacagaccaggcgcacaagagcagggaccccaggcgcg

SEQ ID NO: 142402 - RNA, 76 nt, Homo sapiens
aaacagcagagccaccagccaagaccaagcgcgaaagcgccaaaaggacagcaggcacaagaagaaccggcgaacc

SEQ ID NO: 142403 - RNA, 71 nt, Homo sapiens
gcaccagcccgcgcggggcgcgggcgcggccggaccgcagccgcaagacagccggccggcagccaggagcg

SEQ ID NO: 142404 - RNA, 83 nt, Homo sapiens
aaagcccgggagcagaagggaggcccaagacccacaacaaaagcacaccgaggagaagaccaggggaacaccaaaaacggaaa

SEQ ID NO: 142405 - RNA, 76 nt, Homo sapiens
ggaaaaaaagaggagagcacggggcgcgagcgaacggagcaaacgaggcagaagacaccaacccaagaaacagagc

SEQ ID NO: 142406 - RNA, 82 nt, Homo sapiens
aggaacccggaccaagggagccccaaacaagggggacggacagaggccaagaagggacccagacacgacccggagaaaaagc

SEQ ID NO: 142407 - RNA, 81 nt, Homo sapiens
ccccgcgcaggagggccaaaacgcccggcggaccacggccgcagcacgggcgaaaagccaggagcaaaagacgagcgcgac

SEQ ID NO: 142408 - RNA, 76 nt, Homo sapiens
gagaaacacacccccccggcagaaccgccgccacaagaaccaccaaagaccgagcagggacgcgaacaaaaaaaac

SEQ ID NO: 142409 - RNA, 83 nt, Homo sapiens
cccccagcccccaacccagggagcaaaaggaggggcacagggaggagcagcacccgagaagccccggaagccgggacacccgg

SEQ ID NO: 142410 - RNA, 76 nt, Homo sapiens
aagcaaggcgacgccagaggaggaaaggaagacaagccccacaagacacggacacaccaagcccgggccaaggaga

SEQ ID NO: 142411 - RNA, 71 nt, Homo sapiens
cgcaccgcaccccacagccgccagggcgccggccgagcccgggaaaacgacagcagcagcagggccggaag

SEQ ID NO: 142412 - RNA, 83 nt, Homo sapiens
cgggcggaggcggcggagcgcgagagccgagcggaccagggaagaaaacgccagagaagcagagcagcccggagcgaggggag

SEQ ID NO: 142413 - RNA, 79 nt, Homo sapiens
aaaccgcccaggcccccaggcgggcacgggggaagcgagagaacaaaacgaggagaagagaaaagaagccaaagaagac

SEQ ID NO: 142414 - RNA, 68 nt, Homo sapiens
aaagccgaaaaaaacacacaaagcgaaacagccaaacaagaagaagagaagggacgaaccagaacaag

SEQ ID NO: 142415 - RNA, 114 nt, Homo sapiens
cgggaaccgaggagacgagccaacggcggccgccccgggcacacccggcccccggacgcccgaaacgaaggaggcccaaccacaaaaggagccgacggaacccagacggagaac

SEQ ID NO: 142416 - RNA, 60 nt, Homo sapiens
gcccaccagaaacacagccagacacgggaaggaagagaaccgaagaagaaaaccaaaaac

SEQ ID NO: 142417 - RNA, 78 nt, Homo sapiens
gcgaccgaaaccaccgagaacaggaggggacccccccgcggcggcgaggcccgagccagagaggaggacccgcgccca

SEQ ID NO: 142418 - RNA, 80 nt, Homo sapiens
caggcggaaagagccagggggccgccaggagagaaacaaaccgggcaaggcaggcccggcaaacggaaggcaagcggcaa

SEQ ID NO: 142419 - RNA, 55 nt, Homo sapiens
ggcccggcgagccccgcaggacacaccggaacaaagaaaaccaaaacgcaacaga

SEQ ID NO: 142420 - RNA, 38 nt, Homo sapiens
gcccccaaagacgggaacagcaccgggcaggaacagca

SEQ ID NO: 142421 - RNA, 73 nt, Homo sapiens
cccgcaaagacccagacacaacagcacccccgccggggaagaccccgggaggagccccggccccacaagacca

SEQ ID NO: 142422 - RNA, 62 nt, Homo sapiens
cgcggaccgcggacagcgaacccggagcaaaccagccggcgggcgccacaacggacgacgaa

SEQ ID NO: 142423 - RNA, 71 nt, Homo sapiens
cgcggggcaagaggaggcgcgagccgagacacaagccccaaggggaagcacccggacccgagccggagcgc

SEQ ID NO: 142424 - RNA, 78 nt, Homo sapiens
ggagagaccagaggaggaagagcaagcgggggaccgaacaaggcaaaagggacccgccagaaccaccacgcaaacacg

SEQ ID NO: 142425 - RNA, 89 nt, Homo sapiens
aagcgccaagccggacaaagggaaggggaaaccacacgcagaaggaacgggcaccaacaagaaggggccaagcgcaagcagccgagaac

SEQ ID NO: 142426 - RNA, 73 nt, Homo sapiens
cagagaaaaggcacagaacacagcgcagcacggaggcgccaaggcgcccgggcacaggaacacaagaacaccc

SEQ ID NO: 142427 - RNA, 71 nt, Homo sapiens
accacggggcggcgccggccccaagggcccggccaggccccaccgccacaagcaggggaacaccgccaacc

SEQ ID NO: 142428 - RNA, 80 nt, Homo sapiens
ccacagccaaggcgggagccacgggaccagcacagcccaccgggccccgcagcccaggcaccgccgccaccagggaccgc

SEQ ID NO: 142429 - RNA, 72 nt, Homo sapiens
accacagaagaaggaagggccacccaggacaggggcacccagaaggaagaaaccaaacgaaacacaacgacc

SEQ ID NO: 142430 - RNA, 79 nt, Homo sapiens
accccccgagacccggaccgagcagcccgacccccaacggaccccgccccggaggagcgcgcaccaggagcgccgcgcc

SEQ ID NO: 142431 - RNA, 77 nt, Homo sapiens
aaaacaccagcggccaaaagagcagccacagaagaccaaacgcagaccagcccaggaagagccgcccggacaagagc

SEQ ID NO: 142432 - RNA, 82 nt, Homo sapiens
gagcggagcggagcgcggaaggcccgaggccacacgggaacgaagaaagagcgcacggcgcgcgggaagcagggacagccaa

SEQ ID NO: 142433 - RNA, 82 nt, Homo sapiens
aacacgggcgacggggcccagcagacagccgaggggagcgcggggcccggcagaaaggcggacaaacaggacgcaaaccccg

SEQ ID NO: 142434 - RNA, 74 nt, Homo sapiens
ccgaaacacagagaggcggaaaggcaccggagacagaggcggaaccaaaagcagggaaaccgggaaccgccaaa

SEQ ID NO: 142435 - RNA, 78 nt, Homo sapiens
cggggaacgacgcggcgcgcgcggacgaagagccccccccccaacaccgcgacacgcaggcccgaggccagagggggg

SEQ ID NO: 142436 - RNA, 81 nt, Homo sapiens
cacggaaacaggaaagaggcaaccccccacggagcagaacccgaggaagcagcccgaaagcgagcaaagaaggccaagcag

SEQ ID NO: 142437 - RNA, 68 nt, Homo sapiens
acgcacagcaaacccacccagcacaccccgcgaaaggaggaggcacagagcccgagagcacccagccc

SEQ ID NO: 142438 - RNA, 91 nt, Homo sapiens
cgggagcgccgagcgcgccgccgccgccgccagaacaaccgggcgccgacgagacggggccggcggcagagaccacgcccagcaggagcgg

SEQ ID NO: 142439 - RNA, 78 nt, Homo sapiens
ccggcggagcagaggaaccacacgcgacaggagcagaagacaccacaccagcccgcagcaaggcacgacacaaggaga

SEQ ID NO: 142440 - RNA, 77 nt, Homo sapiens
ggccagccaaccgccggcaaccccgggcggccgcaccgccaggaaccgggaagggaacagggaaccaagcagagaaa

SEQ ID NO: 142441 - RNA, 75 nt, Homo sapiens
gaaccagaacaccgggaagaacacagaggaaccagaaaagaacgaggccaggagagaacacgcccaggacgggac

SEQ ID NO: 142442 - RNA, 38 nt, Homo sapiens
ggccaagaaaacaggaacgagccgaagaagaggggaga

SEQ ID NO: 142443 - RNA, 46 nt, Homo sapiens
gggccagcgcacggccaccgagccaggggggccaggaggagcccca

SEQ ID NO: 142444 - RNA, 38 nt, Homo sapiens
aagaagccagaaacccgccaggccagaagaggagccgc

SEQ ID NO: 142445 - RNA, 60 nt, Homo sapiens
cgcacagaaacaaggcgcggcggcggagcggcagacgaggacgcgcacaggaaaggacgc

SEQ ID NO: 142446 - RNA, 79 nt, Homo sapiens
cagaggcaccgacaaggaagaaggccccgcaaaccagacagacaacacccacagaacaaacaccgcgcagaacagaacc

SEQ ID NO: 142447 - RNA, 81 nt, Homo sapiens
ccaaacaccgccgccggggagacacaagaccggcggccacgcaccccccaagaagaggcacccaggcacaaggagcggccg

SEQ ID NO: 142448 - RNA, 72 nt, Homo sapiens
gcagggcgcccccggcaggccagggccaggaaccccagagccggggaagggcagaggcacagcccggaacag

SEQ ID NO: 142449 - RNA, 67 nt, Homo sapiens
ccgaaaggccccgcagcgcagacgcggacgggagggaaaaccagcacccagccacaccccaccgccc

SEQ ID NO: 142450 - RNA, 79 nt, Homo sapiens
caaagcaggcaccaaggacagagcaggaccaaaagaagcaaagcgaaggggcgccgaaccgagcccgaagggaagggcc

SEQ ID NO: 142451 - RNA, 80 nt, Homo sapiens
gaacagggaaccgccccccaacacggaagcccggacgaggggcaggaccggggacacacgacgcgggacgagcccgccgc

SEQ ID NO: 142452 - RNA, 75 nt, Homo sapiens
ggggaaaggccggccagcgggacaggagggcaggaagagcgcagcggggacaagagcacacaccaagcccacaca

SEQ ID NO: 142453 - RNA, 73 nt, Homo sapiens
gaacacccccccagaaaccaacccaaggaacggaaacgccaggaagaaacccaagggaacggagaaccgcaca

SEQ ID NO: 142454 - RNA, 90 nt, Homo sapiens
gagagacgcaaacggcgggaccagcagcgacggagcagcagcaggccgcgacaggggggagaggggcaaggccaccccaagccccccacc

SEQ ID NO: 142455 - RNA, 81 nt, Homo sapiens
ccagagccagcagcccaccaagagaacaaacagagccagcaagaacagccaaacaggagcacacacagccagcaacaggga

SEQ ID NO: 142456 - RNA, 81 nt, Homo sapiens
cgggccccgagcgacgggcgaagggaggggggcagcggagcccaggcggcagcgccaggaaaccggagaagacacaccaca

SEQ ID NO: 142457 - RNA, 81 nt, Homo sapiens
ccgagagcggaccgagagcgcgaaacgcacgagaagggcacacaaagcgggaaagggaaagccccaaagcagccgcacgga

SEQ ID NO: 142458 - RNA, 64 nt, Homo sapiens
accggaaaccccgcagaaggcgaggagaaaaacggagaaagagaacacaaccagcgccgacacc

SEQ ID NO: 142459 - RNA, 82 nt, Homo sapiens
agggccaaggcaacacccgacgggcaacacacagaaggaagccaggaagaagccgaaaacagcaccagcacccaacagccag

SEQ ID NO: 142460 - RNA, 67 nt, Homo sapiens
gccgggacggaggacgcgcagcgcaacaggagacgaacccagaccagcaaaacggagcacaggcgag

SEQ ID NO: 142461 - RNA, 63 nt, Homo sapiens
agcaagacagcagggcccagaaacagacccacaggaaagagacagcccccccccggccaaagg

SEQ ID NO: 142462 - RNA, 84 nt, Homo sapiens
ccaggccggccggccggacaagcccaggagccgaccagagagcagccaacgggcggccaccacaacgccaacggcaggggccca

SEQ ID NO: 142463 - RNA, 77 nt, Homo sapiens
cgcgccgcgcaccacccaccaacgccacccagcaggggcccgcggagacagacagcagcaggcccggagacccgagc

SEQ ID NO: 142464 - RNA, 73 nt, Homo sapiens
gcaggaggcaccgacccccacacagacacagagccccggcccaaccggccgagcaagggcagccaccagggac

SEQ ID NO: 142465 - RNA, 70 nt, Homo sapiens
gaagccgaggggcagagggcgaccgaccgagcagggcacacccgcgaggaaaaaggaccagcgaccaaca

SEQ ID NO: 142466 - RNA, 75 nt, Homo sapiens
ggaaagagaaagaagaaggagagcccaagccggaacagccaacaaagagaggggcagacagaagacaggagacca

SEQ ID NO: 142467 - RNA, 72 nt, Homo sapiens
aggacccccagggaacacaacagaagaggcgcagcaggagccgcaaagggcaagacaaaacggcaggaaaaa

SEQ ID NO: 142468 - RNA, 79 nt, Homo sapiens
cccgaaggaaagagaggccggggaaagccgggaaggcaggccccgaagccccagaacaagccagaagagcaaaccacga

SEQ ID NO: 142469 - RNA, 80 nt, Homo sapiens
gcgagaggaggccgccagcagaggcggagcccgcagaccgcagaaggccggagacaccagcaggcccgggggggaggccc

SEQ ID NO: 142470 - RNA, 76 nt, Homo sapiens
gaccagcccgaggaggaagaagcaacaggaaagacggcgagaccacaaacagagcgggcggcaaagaaggggcgac

SEQ ID NO: 142471 - RNA, 66 nt, Homo sapiens
gggaaccccggagaaaaggccaagaaggcagggcggaaaaacgcagcacggcccacgagcagaaca

SEQ ID NO: 142472 - RNA, 77 nt, Homo sapiens
cgcggaagcaggaagacaagacgaggacgcgcacaggaaaggacgcggaacaagcaggcagccaggcagcagaaggc

SEQ ID NO: 142473 - RNA, 59 nt, Homo sapiens
ggccccgccacccacaggccggacccaagccagaagcccgcaaagcccccagaccgcag

SEQ ID NO: 142474 - RNA, 71 nt, Homo sapiens
cgaggacggacgccaggagcccgagaaggccacgcccagaccaccgcgccccgagggcagcccacgacgag

SEQ ID NO: 142475 - RNA, 68 nt, Homo sapiens
gcgaagacccgagagaggcaaacgaagaaaacgacccagccagaggacaaaggaccgaggacagggaa

SEQ ID NO: 142476 - RNA, 43 nt, Homo sapiens
agaagacaaaacccaccagccccaggaaaagagacggcggaca

SEQ ID NO: 142477 - RNA, 70 nt, Homo sapiens
cccgccgcgggggaccaccgcccgccccaacccaagacggagcgggaagggacgcgaagaaccccaagga

SEQ ID NO: 142478 - RNA, 68 nt, Homo sapiens
cggaaccaaagaaaaacagaaagaggaaaaccagagaaacaagaggaggaggggcgggcgcggacggc

SEQ ID NO: 142479 - RNA, 75 nt, Homo sapiens
gaaaaccggaccaaccaaagaaaacaggagggcagcagagcaggcaggcaaaccagaacacgagagggaaaaaaa

SEQ ID NO: 142480 - RNA, 68 nt, Homo sapiens
aggcacaggcgcaaaacagggcaagcaggggaaaacagcaagaggcacggagcccaggcgccggaacc

SEQ ID NO: 142481 - RNA, 81 nt, Homo sapiens
gaagacccgcagagccaacagagccagcgggagccggagcagggagcagcggggcagagcccgcggcagcggcgccaggca

SEQ ID NO: 142482 - RNA, 84 nt, Homo sapiens
gcgcgccgccgccgccgccccccccccgggggcccgggaggagagaaaggagaagagccaaggagaccaaacccagcagcaccg

SEQ ID NO: 142483 - RNA, 71 nt, Homo sapiens
gaacggagcagacaaagccgaaggaggcagagaaggggagcaagaccccagccgaggaccgagggagcagc

SEQ ID NO: 142484 - RNA, 78 nt, Homo sapiens
aacaaaaaaaagaccagacagagaagccggaggagagggaagggagcggccgggcaggaaagaaaggcaagcacacaa

SEQ ID NO: 142485 - RNA, 73 nt, Homo sapiens
cccccggacagacgccgacgcccaggccccccagccccagcgcgcgcgccaggaggcagacgccacgaggaaa

SEQ ID NO: 142486 - RNA, 80 nt, Homo sapiens
gggcaggagcggcggccaggccagacccgaaggccaggagacccgaccccaagggaacagccaaaccaggaaaggaacca

SEQ ID NO: 142487 - RNA, 81 nt, Homo sapiens
ggagaccacagcaagacaccgggaccccggaagccaaaaagcaggaaaagcccaggcggggcaggcccagcacgagcccag

SEQ ID NO: 142488 - RNA, 68 nt, Homo sapiens
acacaagcgaaaacagcaagcgagcgaaaggaagcagacaagcgacaagacaacccagaaaagaaaag

SEQ ID NO: 142489 - RNA, 63 nt, Homo sapiens
aaaagcaacaaagaggcccaaagagaagagaagcaaggaaagaagacaagaagaagccaaagc

SEQ ID NO: 142490 - RNA, 32 nt, Homo sapiens
aaggacagggcagcaaggaagcacaaacacca

SEQ ID NO: 142491 - RNA, 74 nt, Homo sapiens
gccgggggcgagccggagcgaccccggcaggccgggagagagcgcgaaccggaaaaagaacgacggaagaagga

SEQ ID NO: 142492 - RNA, 68 nt, Homo sapiens
aaagcccaggcaagagcaacacgccacagacaaagcagccgagcggaaaaggaagacgagcaaagaag

SEQ ID NO: 142493 - RNA, 90 nt, Homo sapiens
caagagcaaggacagcgcaacagaagaccgccagagacagagaagacaacgcgggccaaggaaacagggcacaacgacaacaggaacacc

SEQ ID NO: 142494 - RNA, 69 nt, Homo sapiens
cggcgcccgcgccacagccaccagagccggcagcaaagagggaacagcaccggggggaagaagaaggga

SEQ ID NO: 142495 - RNA, 58 nt, Homo sapiens
ccacacgcgccaacacagaaaaacaacaggcacaaagagagaaggaacacccacaggg

SEQ ID NO: 142496 - RNA, 69 nt, Homo sapiens
aaggcaggggccgcccggcagcgccccccccaacccaacggcaccaaggaagagagaagggaaaccaaa

SEQ ID NO: 142497 - RNA, 74 nt, Homo sapiens
cacgagcgccacacggccgcaccgcgcgagcacgggcggagcgaacgaacacaccagggcacagcacaaaacag

SEQ ID NO: 142498 - RNA, 105 nt, Homo sapiens
gccaaaacccgcagacgaagaagcacaaagaaaagaggccggccagaagacccgaggaccgggaacgaaggggccccgaggaagcagaagccgagggacggggcg

SEQ ID NO: 142499 - RNA, 82 nt, Homo sapiens
ggaacagaagccggaacaggaccagaccacgaccagaggacaagacaaagggagcaagacaagccaaagaggaaaagcaaag

SEQ ID NO: 142500 - RNA, 64 nt, Homo sapiens
gggagagccgccgcaaacccagaccggacaggcaggagacagcaacaaggaccacagagacaca

SEQ ID NO: 142501 - RNA, 80 nt, Homo sapiens
caccgcggggggcgccgaaacacccaggaccccacaaaaagaccgacaccgcaagaccaggccgacggcaacgcacgggc

SEQ ID NO: 142502 - RNA, 68 nt, Homo sapiens
agggcccacgaccccgccggacaaacaaccccagacccgcggggcggaagaaacaagaaaccacacaa

SEQ ID NO: 142503 - RNA, 83 nt, Homo sapiens
gacggcagccagacgggaagaagggagagaacggcggccaaagcgccagacaagggccgagccccggagagccccccgcaagg

SEQ ID NO: 142504 - RNA, 47 nt, Homo sapiens
caaagacacggaccaagaagccaacagagccagcaagaagcaaccga

SEQ ID NO: 142505 - RNA, 75 nt, Homo sapiens
agcggagaagcggacacagaccgccggccccaggccaacacgcccaggggggaaggagacgcacacccacaccgg

SEQ ID NO: 142506 - RNA, 69 nt, Homo sapiens
gggcagagaggggcgaaaaccagcagagcgcccaccacaggaccgcggaggcaaccccgcgcacagagc

SEQ ID NO: 142507 - RNA, 85 nt, Homo sapiens
cgggccagagaggcccagcacggccagagagcgagccaaggcagcaaggagacgacagccggagagcgggcccggagcccagggc

SEQ ID NO: 142508 - RNA, 70 nt, Homo sapiens
cgccagagaagggacccaagacagagggaggagaaaacccaaacgacggacaaaacagggcgacgcaaca

SEQ ID NO: 142509 - RNA, 57 nt, Homo sapiens
ggaccaagaaccagaccccgcgagcaaaggaggaggaccacaccaaaagagcacagg

SEQ ID NO: 142510 - RNA, 77 nt, Homo sapiens
gcccagcccgagagcgggaacaggggcaccaccacgcccaggggaggggcgaccccggggcccggccagcacgaccg

SEQ ID NO: 142511 - RNA, 79 nt, Homo sapiens
cgacagcgggagcacaggcccgggagggagagaaacccagaaacagcgagaacggaggcccacagaagagccagagagc

SEQ ID NO: 142512 - RNA, 79 nt, Homo sapiens
gaccacgaacaccgcgaagacaggacaagacaagggccaggcaaaggcaaaaaggcaggggagcagacggagagaaaaa

SEQ ID NO: 142513 - RNA, 42 nt, Homo sapiens
ccaggaaccccggaagccagaaagagacagggccaccggccc

SEQ ID NO: 142514 - RNA, 78 nt, Homo sapiens
cccagcacagccacccccaccgagcaccccgccagccaggcacacaccagacaccacccaccgaacccggagccggaa

SEQ ID NO: 142515 - RNA, 81 nt, Homo sapiens
gacggccgaggaaggaacggcccccccccagcccgccccaaaaggaacaaagcccagccagccagacaccaagccgaaagg

SEQ ID NO: 142516 - RNA, 63 nt, Homo sapiens
ggggcccagcggagccaccgagcgaggacgagggcgccggcgacgacagccagcagaagcggg

SEQ ID NO: 142517 - RNA, 73 nt, Homo sapiens
aaaccagaaacaagccaggccagacggaggacccccagcgccccggggaagacggaagagacgccacacagag

SEQ ID NO: 142518 - RNA, 72 nt, Homo sapiens
agccccgcccgggcggcccccaccggaccgacagcacgaacgagcccgacccaggacaggacccagcgcggg

SEQ ID NO: 142519 - RNA, 81 nt, Homo sapiens
caggagaagccgcccaaagaacgacaagcaaagggacagcaaaggcgcagcaccagcacccaaccaagaacgacccaaaag

SEQ ID NO: 142520 - RNA, 70 nt, Homo sapiens
aggcgccaccagaaacgaaagacaaggagggagcaaaggaggcgcgcccaccgcgagcggaaaagacccc

SEQ ID NO: 142521 - RNA, 37 nt, Homo sapiens
cgcaggccccgcgccaggggcggagaacggaaaagca

SEQ ID NO: 142522 - RNA, 76 nt, Homo sapiens
aaaagagaggagggagaacacagaaacccgccccggagcagcaggagagaagaccgagccaggaagaaaaaccgca

SEQ ID NO: 142523 - RNA, 79 nt, Homo sapiens
agcacagcacccacaaagcaacggacaaggcgaagcagaaaccaagcggagggaccgacgcagaagaagaacccgggaa

SEQ ID NO: 142524 - RNA, 74 nt, Homo sapiens
agaagcggcaagaacagacgacaccaggccagaacgaccgacggaacacaaggacgagcaaagaaagggcaaca

SEQ ID NO: 142525 - RNA, 50 nt, Homo sapiens
acccgagccgagcccgacaaccgagacgagaaagacagaccagaacagag

SEQ ID NO: 142526 - RNA, 74 nt, Homo sapiens
cgggcagaggcgggccgccgagcggacccggaccgggggccggggcagcagaagaggacaagcagacagcacca

SEQ ID NO: 142527 - RNA, 68 nt, Homo sapiens
accgaaaaggggaacccgaaaagcgcagacgaagccgcgaacgaaacggcaaaaaaaaaacaaagcca

SEQ ID NO: 142528 - RNA, 69 nt, Homo sapiens
agcacgaaacgccaagggccaggccagaagggccaccacgcacgccccaaacggacgagcagccagacc

SEQ ID NO: 142529 - RNA, 69 nt, Homo sapiens
gagggaaagaagaggccccagcacacgacccgaaagccgagccagaagagaagaaaacgagcacggaga

SEQ ID NO: 142530 - RNA, 80 nt, Homo sapiens
gaagccacgaacagacgcacgagggaagagacggcggggaaaaacgcaggaccaaaagaaggcaaaagggagcaaagcca

SEQ ID NO: 142531 - RNA, 71 nt, Homo sapiens
accagagagacccgagcaaggaaaacgagggcagaaggcggcagggagcacgcaccaggagcccacggccc

SEQ ID NO: 142532 - RNA, 71 nt, Homo sapiens
cgcagccaggcgcggaaggaggcaaaggggcgaaaaagcagaaagcaaaaaaaaacgcagacaggagcaga

SEQ ID NO: 142533 - RNA, 73 nt, Homo sapiens
cccacaaaggaacgcccacccacggggaccagcagccgggccagggccagagcaaaggacaaaccggcgacca

SEQ ID NO: 142534 - RNA, 49 nt, Homo sapiens
gccggaaacaagacaccgaaagcccggcacccaggacgcccaccaggag

SEQ ID NO: 142535 - RNA, 71 nt, Homo sapiens
aagccccacaccagaccacggagggagcggaaaccgacgcagacgcgccccaacccagcggaaacagggac

SEQ ID NO: 142536 - RNA, 68 nt, Homo sapiens
aacaaaagcaacaaagaggggacacacaggaagacgaacacggaacgggcgagaagaaagcagagagg

SEQ ID NO: 142537 - RNA, 75 nt, Homo sapiens
gccagagccccagaccacgagagcccaagccccagagagaacgcacacaaggcaaaaaaccggggagaaggaaaa

SEQ ID NO: 142538 - RNA, 83 nt, Homo sapiens
accaccacccacacccaccaacaacaccacaaaaccacagccaaggggaacaacggagacggagaagaaccaccaagaaagaa

SEQ ID NO: 142539 - RNA, 79 nt, Homo sapiens
gcgacacgacggcggaacggggaacgacggcccagcaggcggggaagagaaaggagcgagagagacagcgccaaggaac

SEQ ID NO: 142540 - RNA, 82 nt, Homo sapiens
ccggacagaaagcaagcagcgcaagcgcacggagaagggaggcacaacccacgggagagcagcaagcacccccccaggccac

SEQ ID NO: 142541 - RNA, 38 nt, Homo sapiens
gggagccccgggagccgcacggagaaggaccaagaacc

SEQ ID NO: 142542 - RNA, 70 nt, Homo sapiens
ccccaaaaaccgccgaaaaagagaagacgcacccgaccgggccgaccacgaggaagacgcacgccggacc

SEQ ID NO: 142543 - RNA, 72 nt, Homo sapiens
aagcaaaccaaggcaggagaggagccagcccccaccccacagcgaacgggacagacgcgagcaagccgaacg

SEQ ID NO: 142544 - RNA, 73 nt, Homo sapiens
aggaccacccgagaaggggaagacgaggaaagggccagggaaaacacaccaaacaggccaccaagcacggagc

SEQ ID NO: 142545 - RNA, 84 nt, Homo sapiens
gccggagggaccccaggacaacagcaccagagcacaagcccaggacacagaggcgaacagccgccccgcacgggaaaagcgcgc

SEQ ID NO: 142546 - RNA, 84 nt, Homo sapiens
ccgccgcccccacagcacacgaccgcccgggcccccccggacacacaggagaccccaagccaaaacggacaagccaaggcacga

SEQ ID NO: 142547 - RNA, 82 nt, Homo sapiens
aagaagacccggaggaaacaacccaacccgccacacaaggacgagagaaacgacaccaagaacgagcgcgaaggacaagcga

SEQ ID NO: 142548 - RNA, 69 nt, Homo sapiens
cacaaagaaggagacgggggcacgggagcaggaagacacagacagaagacagccccgaaggaaagggcc

SEQ ID NO: 142549 - RNA, 85 nt, Homo sapiens
acgcgggcgcaggaaccgaccagacgggaaaagaaacccgaagccccagggccacaaaagaagacagggaagccgaagaagccag

SEQ ID NO: 142550 - RNA, 73 nt, Homo sapiens
ccaaacccagacaaggaaggacagaaaagagccaacgcagaaaagaagaaagcagaagccacccagcccaccc

SEQ ID NO: 142551 - RNA, 74 nt, Homo sapiens
ccgagcgaacgcgcaacagggccgcacgcaagacaagcaaagggacagcaaaggcgcagcaccagcacccaacc

SEQ ID NO: 142552 - RNA, 69 nt, Homo sapiens
cggaaaaggacgagagcaccggagccggcaagagccgccacaacaaacaccaaagagaaaacaggcaga

SEQ ID NO: 142553 - RNA, 75 nt, Homo sapiens
agccgcggagcggacccagcaagacggcggaagcagcgcagcacagcgagcaacacgacaaacgcccgggacagg

SEQ ID NO: 142554 - RNA, 74 nt, Homo sapiens
ccagggggaacgacagaaggggaggcggaacaaggccaacagagcacaggcaaggcaccgagggggggcaacac

SEQ ID NO: 142555 - RNA, 84 nt, Homo sapiens
ccggagcggggggcggagcagacacagacagcagagggaggcagcgcacagcccagcggaggacacgccggggcagggcagccg

SEQ ID NO: 142556 - RNA, 73 nt, Homo sapiens
aagacacgaagccggcccggagagaggccaggaggacaaggaccaagagcgagccagagcaaagcaccccaaa

SEQ ID NO: 142557 - RNA, 79 nt, Homo sapiens
cgccccaaaaggaaacagcgaagccgacgagcccgaacagacgcaccagcgggaggaagagggacggcccaggagcgcg

SEQ ID NO: 142558 - RNA, 76 nt, Homo sapiens
ggaggacaaagcagacacaaggaaacgcaacacaaagagaaaagggaacaggcgagaagaagaaaggaaagcgaga

SEQ ID NO: 142559 - RNA, 56 nt, Homo sapiens
agcagaccgggaccaggagccgcaaaggcggggaagaaacagaaagaaacacaaaa

SEQ ID NO: 142560 - RNA, 76 nt, Homo sapiens
aagagaaaaaagcgcgaagaaagcgccaagcacacgccgaggagccaagccgcggcgccggcgcgcccgacagcag

SEQ ID NO: 142561 - RNA, 74 nt, Homo sapiens
aagaaccaggggagaagaagacacaacgggcccgcagcaagaaaaagaaacccggggagaagagaaagaagcaa

SEQ ID NO: 142562 - RNA, 74 nt, Homo sapiens
agaagcacagccacgagccaacacaggagaagagacaacgggaaacacacaaagcccagaaggaacaacaaggg

SEQ ID NO: 142563 - RNA, 75 nt, Homo sapiens
gggagacaccagaacacccacacacagaggggaaagacccagagaagagggcagagacgcgcaaagcggggagga

SEQ ID NO: 142564 - RNA, 72 nt, Homo sapiens
gcccacccagccagcacacacgaaagacagagaagagcaaccaggccaccaagcacaaacggacgcaaagac

SEQ ID NO: 142565 - RNA, 73 nt, Homo sapiens
agaccgcccgacggggaccgagggcggcacagcacagacaccgcgccgaagaagccaggaaaaagcccaggag

SEQ ID NO: 142566 - RNA, 79 nt, Homo sapiens
aaaaggaacgaacacggacacaggacggggaagacggacagcaggagaaggaagagagaaggccacgcccgaccccaag

SEQ ID NO: 142567 - RNA, 68 nt, Homo sapiens
agcgggacccggagcccgagcagccgccgccaggcaacggcgcacccgaggaggcaaggacccagcag

SEQ ID NO: 142568 - RNA, 49 nt, Homo sapiens
gccggcccacacccccaggcacgcgaggcacacccagaagccacaggag

SEQ ID NO: 142569 - RNA, 80 nt, Homo sapiens
ccagaagcgcccaggaaaaacgcccccaaggaaggaagcggccacagaccgcccccacgacgagcaacgagccaacaaac

SEQ ID NO: 142570 - RNA, 69 nt, Homo sapiens
gacagaaggcccaaaaaaacgaaaccggagcaacccacgacccaacaccacagcccggaggaacaaccg

SEQ ID NO: 142571 - RNA, 75 nt, Homo sapiens
accgacaaggaaggaaacaccaagcagggcgacaacccggaaaccacaaaaggaaggaccaaagaaagaccagcg

SEQ ID NO: 142572 - RNA, 75 nt, Homo sapiens
caagcagagaacacagcacaagagacggaaaaggaagggaaggagccgacaccacaaggagaccagcagaagggc

SEQ ID NO: 142573 - RNA, 66 nt, Homo sapiens
aaagaagagagagcaggccgaggcacagaagaaagagaggcgacaaagacgcggggaggggacgcc

SEQ ID NO: 142574 - RNA, 78 nt, Homo sapiens
ccggaaaccaacaagagcgggacggagcgggccaccggggccacgacagcgagcgaccccggccgagaccaccccagc

SEQ ID NO: 142575 - RNA, 82 nt, Homo sapiens
cggcagcaggggacagcggagagaccaagacacccaggagaaagacagcggggaaaagaaaaaggagggggcaaaagggggc

SEQ ID NO: 142576 - RNA, 72 nt, Homo sapiens
gaagaacagaagacggaagaagaaacacagcgcaggggaggcagcgagcagagggacaaaaaaaacaaaaca

SEQ ID NO: 142577 - RNA, 88 nt, Homo sapiens
cgaaagccggcggagaggaccggagcggaaaacccgaaggcgcccgcgccggcagaggaggcgagcacccgccagggagaggaacccc

SEQ ID NO: 142578 - RNA, 72 nt, Homo sapiens
gcggacgaccagcggccaacagcaccacagcaacccggacagacgggacccaaaacgacacacaaaccaaaa

SEQ ID NO: 142579 - RNA, 77 nt, Homo sapiens
ggaggagggaaagagaaggcgaggaaccagcaaccagcagcaccgagagagcccagcaagaccacgacacgagagcg

SEQ ID NO: 142580 - RNA, 76 nt, Homo sapiens
gccgagaagcgaaccagaaacacagaggagaaggagaaaaccgggccaaaagagaagaaaagaggaacccaggaaa

SEQ ID NO: 142581 - RNA, 101 nt, Homo sapiens
gcgggaggaaagggagagacaagagaggagacccaacagacgggagcaacagcgagcaacaggcaacgaaaacagacaaaacaacggaaaagcagggcacc

SEQ ID NO: 142582 - RNA, 84 nt, Homo sapiens
gaggaaggaacgggcacagcagggggggcacacaaagaggcacgggcgcgaggcggagcgggagacgggagaggccgaggcccc

SEQ ID NO: 142583 - RNA, 70 nt, Homo sapiens
gggcagcggaaaaaagccaccgaagagaacaggaacaacccagacacccgggccagcacaaacccagaaa

SEQ ID NO: 142584 - RNA, 75 nt, Homo sapiens
caaacacgggaagccacacaccaaaggggccacaacgaagaagacagagagacaacgcaaagcagacgcgcacaa

SEQ ID NO: 142585 - RNA, 61 nt, Homo sapiens
ggagaacgggaggcgcagaaagaggggccccagacacgacgcccccggccggcccgggccg

SEQ ID NO: 142586 - RNA, 77 nt, Homo sapiens
agcgcccagaagggggcgcggcgcgcacccagacaaggaaaaaccgcacgaaccccagcccgccgggaagcgccgcc

SEQ ID NO: 142587 - RNA, 69 nt, Homo sapiens
gcaaaagggaaaaagcacgaacgccgcgggaagaagggccagaaaaaagaggagcagccgcaacagcgc

SEQ ID NO: 142588 - RNA, 84 nt, Homo sapiens
ggagcgggccagccgcgcggcgggaagcggcggcggcggcccagcgccaagagagccggacgagcgggagaggacaccacacaa

SEQ ID NO: 142589 - RNA, 47 nt, Homo sapiens
ccccaaagcagcccggaacccccagccaggaagaaaaggacacacgc

SEQ ID NO: 142590 - RNA, 71 nt, Homo sapiens
agaagacgacccaccagacagccagcacagcggagaaaaagaaagcggcgcgccaacagacccgggggaag

SEQ ID NO: 142591 - RNA, 80 nt, Homo sapiens
acaggaaaaccaaacggcaaccaaggcggagccacacacccccacaccaagcccccaacaagacccggacgcacacgaaa

SEQ ID NO: 142592 - RNA, 77 nt, Homo sapiens
acgggagagccgaaccagaagagaaagaacggcacagccaacaagagaacggagcggacaccagaccaaccagaccc

SEQ ID NO: 142593 - RNA, 72 nt, Homo sapiens
acccaggaaacagcgcaagaaacagaggaagagccggaacaagagaagaaagagcgcaaaccaggggagcac

SEQ ID NO: 142594 - RNA, 74 nt, Homo sapiens
aaaccagcaccaccgggcagcagaggaaacaaacacgaaccaagcgggaacacggacagagagaggggcgccag

SEQ ID NO: 142595 - RNA, 77 nt, Homo sapiens
gaggcggcgagccggcgccggggacgaggagaggaccaggaggaggaggcagagccgcccaacagcacaagaagcgc

SEQ ID NO: 142596 - RNA, 79 nt, Homo sapiens
ggcgcgagggggcgcaggaccggccgcaggccaccgacacgagacaaccgggagccgggcaacacaccgaaaaaaggga

SEQ ID NO: 142597 - RNA, 65 nt, Homo sapiens
acaaaccagaggaccagaagaagacggaaggacagaacggaaaagagaaaacaaagccaccaaag

SEQ ID NO: 142598 - RNA, 76 nt, Homo sapiens
cggggcagcgacccgcccacgcccagcagcagcagcaacagacccacacagcgacaggaagaacagaccaaggaga

SEQ ID NO: 142599 - RNA, 52 nt, Homo sapiens
gaagcaccccacagagacggcccgagaaccggaggaagcaccaacaaaaagc

SEQ ID NO: 142600 - RNA, 82 nt, Homo sapiens
cccgcgcgcgccggccggcccggacccggacaccaccagcggccaagacggcaccgaaagcgaaggaagcccgcccccaaag

SEQ ID NO: 142601 - RNA, 72 nt, Homo sapiens
agaaggcagaacgaaaggaggcagagccaacagaaggcgcaaaaaccagacaccccacaccaccacccagac

SEQ ID NO: 142602 - RNA, 75 nt, Homo sapiens
caaccagaaaacaaagacaaaaggagacgagaagaagacaagaggacagggccaaagcggcaggagaaggaaggg

SEQ ID NO: 142603 - RNA, 80 nt, Homo sapiens
ggccaaagggcgccgcaaagcagaggcgagaaaaggcggcagccggccgcaagaaacgaaggcagacagaacaagaaagg

SEQ ID NO: 142604 - RNA, 70 nt, Homo sapiens
cgcgcgaggagaggagcgcaacagcagcaccaggggagcgcgcaaggaagcgcgggggcaggccgggcga

SEQ ID NO: 142605 - RNA, 79 nt, Homo sapiens
ccgagcggacccggaccggggaagccgaggccgccagcgccaagaaaaaaacaaggccaaagccagccccagaaacaga

SEQ ID NO: 142606 - RNA, 76 nt, Homo sapiens
caccagccccccaggggggaaggagggccccgggacggagaggagccgggcccccaagagcccacaggccacgacc

SEQ ID NO: 142607 - RNA, 68 nt, Homo sapiens
ccccaagagaacacaacacaagagaggggacaggcaaaaggcccgaacaccaaggaccagccacacca

SEQ ID NO: 142608 - RNA, 67 nt, Homo sapiens
ggagaccagaaaggagccccgacagcacacaaaaaagccccggccagcgagcccgccccagggagcc

SEQ ID NO: 142609 - RNA, 36 nt, Homo sapiens
ccaccaagacaagagaagcagggaaccccacagacg

SEQ ID NO: 142610 - RNA, 54 nt, Homo sapiens
accacaccaagacaccaggggagaccgagcagaaaagcgaggcaagggcggcag

SEQ ID NO: 142611 - RNA, 73 nt, Homo sapiens
gagcaagggagagcagaaccaggagcccccaacagagacagaggcacaaaaggagaaagcagaagaaacagga

SEQ ID NO: 142612 - RNA, 55 nt, Homo sapiens
gaccgcccgggggagcaccaccggagcccagagggcggagaacggaaaagcacca

SEQ ID NO: 142613 - RNA, 81 nt, Homo sapiens
caagacaacgcggagcggcgaagagcaaccagaggcgagacaggaccgcggacaaaccgccccagggcgaccagcaccgaa

SEQ ID NO: 142614 - RNA, 80 nt, Homo sapiens
gccagagcccaaaccccaggccaagcagccaccagcagcccccagagcgggaccacaggaggagcaacccaccagcagac

SEQ ID NO: 142615 - RNA, 62 nt, Homo sapiens
gaaaacaccaggaaagacaggagaccaaaaaggaacggcagagcgaaacaaacaagagggcg

SEQ ID NO: 142616 - RNA, 78 nt, Homo sapiens
gaaaagagggacgccaaacacccaaagccacaagggcgcagaagccggcagagcccaagagacaacaagccgaaaaga

SEQ ID NO: 142617 - RNA, 78 nt, Homo sapiens
gaaccagagcgcaaaagcaagaggcaaaaaggaggcgaagagagagaaacgaaaaagaggaaggagcgagggagcaca

SEQ ID NO: 142618 - RNA, 87 nt, Homo sapiens
gcaacaccccgagccagcgagccagcgagccgccgacccgccgagcaaaagggcgaagaagagcagagcagccgaagcggggacgac

SEQ ID NO: 142619 - RNA, 56 nt, Homo sapiens
gaagggccaccccacagacgggaccgacacaagaagcagccagaacagacgggaaa

SEQ ID NO: 142620 - RNA, 82 nt, Homo sapiens
aagacggcaaagaagagaaaggaccacaaggaaaaccacaaccgaagagaaacaccaagacccccgccccaaacccgccaga

SEQ ID NO: 142621 - RNA, 73 nt, Homo sapiens
ccagcccccagaaaggaggacaacgggacccagaagagggaaacacaaagaagacaccagaagggccagcacc

SEQ ID NO: 142622 - RNA, 72 nt, Homo sapiens
cgggccagcggccgcgcacccccggccggaggcaccagcaacaaggaaacacgcagaaggaaaagcgcagag

SEQ ID NO: 142623 - RNA, 52 nt, Homo sapiens
agcagacagaccggagcaggggggccccagcccggccgaacgggcgcacgac

SEQ ID NO: 142624 - RNA, 86 nt, Homo sapiens
gcaaccgagggaaccgaggcagcggaggggggggaggggagaagaaacacagggccaagagaaaaaaccaccgaagaaagaacgga

SEQ ID NO: 142625 - RNA, 75 nt, Homo sapiens
cggcaggccgcccccggcaagggcgcgcgggggcacagcccaggcgcagcagcggacccccccggccccggaggc

SEQ ID NO: 142626 - RNA, 83 nt, Homo sapiens
caaagaaccaaaaccaagacccagccaagcagaggccacacgaacgggccaggcagagaagggcggaacaggggggcggcaca

SEQ ID NO: 142627 - RNA, 42 nt, Homo sapiens
gccacccccacccaagagcaggagagcagagccggagccagg

SEQ ID NO: 142628 - RNA, 82 nt, Homo sapiens
cgggggcacggcaccgaaggaacgcgcagcagacggcgggacccagggccaccagacagaaggagaccaggcaccggagaga

SEQ ID NO: 142629 - RNA, 70 nt, Homo sapiens
gggaagcaggggaccccagagggcacacacgacacacaacaaagcacaaggaccgaggaaccacgccagg

SEQ ID NO: 142630 - RNA, 74 nt, Homo sapiens
ggcaaggcagggagcccgacaacacagggcagaaacaaaggaggagaggcccaagaccagcgaaccccccgccc

SEQ ID NO: 142631 - RNA, 97 nt, Homo sapiens
gccggaggacccagggagcacggccagaggaccaggcgaccagcaccagcccgaccaggcgggggccggccccagcccagacggaagagagagaccc

SEQ ID NO: 142632 - RNA, 71 nt, Homo sapiens
cccggccggcaccaccgcgcaagagccggggacaagagaaaaaaagggcgggcgaacaaaaagagcagagg

SEQ ID NO: 142633 - RNA, 68 nt, Homo sapiens
cccaggacgcgcccccgggagcgggcgcccagaggcagccagcacgagcccccccaccaccacagccc

SEQ ID NO: 142634 - RNA, 61 nt, Homo sapiens
ggcgcgggcaggggcggcgcggcgcgggcggcggggcccacgggaggccaacagacccaac

SEQ ID NO: 142635 - RNA, 75 nt, Homo sapiens
aaagaagagcccccccaccacgaaaaccggagaggaggaacacggaagggagcgcagagcaaaccaggcagaagg

SEQ ID NO: 142636 - RNA, 81 nt, Homo sapiens
aaggccggaaggaagggaaaccgggggccccggacaacccgagcagaggccgaggcggccaccacgccccacgagaacgag

SEQ ID NO: 142637 - RNA, 76 nt, Homo sapiens
aaaggagaagggaaagaaagaaagagacaacgacagccaacagccaggagagaacgacaggcaaaaccccaagaca

SEQ ID NO: 142638 - RNA, 72 nt, Homo sapiens
ccagggccccgggccgccgggaggcggcagcagaagccagggaaccgaagggccgacccaccccaaccggcg

SEQ ID NO: 142639 - RNA, 75 nt, Homo sapiens
ccggcggccacgggcaaacaggacgcggaaccacggaacaggcagagccagaaaaaaaagaacacacagcacggc

SEQ ID NO: 142640 - RNA, 53 nt, Homo sapiens
acgagcgaggccgcgcggacaagaggcaggggaccccccgagggcagcccggc

SEQ ID NO: 142641 - RNA, 69 nt, Homo sapiens
gaggcaagagccggcaccaagggaaaacagggcacccgaaaagaccagcaacaggacagcaggagccca

SEQ ID NO: 142642 - RNA, 84 nt, Homo sapiens
cagagccgggagaaccggaggaggaggccacacagaaggacggcccgacggaagaagagaagcgagcgcgaggagagcagaacc

SEQ ID NO: 142643 - RNA, 74 nt, Homo sapiens
cccccgcacaggcgcccgcccgcacgggcgcgccaagggcacagagggagagggacacaggacaaggagccacc

SEQ ID NO: 142644 - RNA, 58 nt, Homo sapiens
ccgcgacagcagcagccaggaggacgagagcccaagaccagagcagaaggaaacaaga

SEQ ID NO: 142645 - RNA, 43 nt, Homo sapiens
aggagacgcgcagcgcgcggaacccccaaagacacacggaccc

SEQ ID NO: 142646 - RNA, 72 nt, Homo sapiens
gaaagcaaaggaaacgaaagccaaggacacgcaggacgaagaaggaggagagcccagaagaaaccaaagggg

SEQ ID NO: 142647 - RNA, 83 nt, Homo sapiens
cagaaagaccgaagacaaaaaccagaagacaagcagcgacaggcccagaacaggacagagcaggacacaaaaaggaacccaga

SEQ ID NO: 142648 - RNA, 73 nt, Homo sapiens
caaaaagacggacagcccacgggaacaagaggggacagaaaggaaacggcaaaaggcgccccacaaagaggaa

SEQ ID NO: 142649 - RNA, 83 nt, Homo sapiens
ccgggcggggggggaccaggccagcacgccagggcaggcaagcccaaaccgcaccacgacgcgaaaacagcaaaagagcagcc

SEQ ID NO: 142650 - RNA, 51 nt, Homo sapiens
gaagagcgccacagcccagaaagagagccacgacagagcacacgccgcgcg

SEQ ID NO: 142651 - RNA, 87 nt, Homo sapiens
gaagccagcgggggccccagcaccgcaaccaccgccaccagccacggagggcagagccggaaccaaaaagaagccccagagccgggg

SEQ ID NO: 142652 - RNA, 74 nt, Homo sapiens
aggaaagcccacggggaaaacacagaccagaggacggcacaaaggagagacaacaggcacaaagagagaaggaa

SEQ ID NO: 142653 - RNA, 68 nt, Homo sapiens
aaaaccagccaaacaggcggacaaaaacacagaacggaaacaacaccacagaccgcagcaagcgaagc

SEQ ID NO: 142654 - RNA, 74 nt, Homo sapiens
aaacgaaccaggacggcaaaggagccccgccacaccagcaggcgccaaacaccgggccagggcaacaagacacc

SEQ ID NO: 142655 - RNA, 73 nt, Homo sapiens
cccccaaacgacgcagccacggagaggaaaagacaggcagggaggcagcggcaagcggaccgggaggcaccac

SEQ ID NO: 142656 - RNA, 86 nt, Homo sapiens
gcgcggacggagcagcggcagagacgaacaagaccaggaggagcagagcccagcgccaaccggcagcccacaaccgcccggcgcag

SEQ ID NO: 142657 - RNA, 80 nt, Homo sapiens
agagcgcacggcgacgccccaggggaaaacccccgggaccaggacaggcgacacaacagggaagaccgggagaccagaca

SEQ ID NO: 142658 - RNA, 66 nt, Homo sapiens
accgacggcgcaagagaaacgcacgacaaggcacgaggcgcggcgaccaccacagcagagcccggc

SEQ ID NO: 142659 - RNA, 42 nt, Homo sapiens
gacagagacaacaccgagagagaaccaggcaagacacacgca

SEQ ID NO: 142660 - RNA, 47 nt, Homo sapiens
ggaggaggcaaagccagcaccaaacccagggcagcggaccccccgag

SEQ ID NO: 142661 - RNA, 52 nt, Homo sapiens
gccggacagagagaaggcgagcaccagcccaaaacagaaaccgacagacgca

SEQ ID NO: 142662 - RNA, 75 nt, Homo sapiens
gacacgaggagaagaaagagggaagcacaggaacaaccgagaaccagacaaaaaagcgccccgggggaaaggcac

SEQ ID NO: 142663 - RNA, 76 nt, Homo sapiens
gaccaacgagccagagcaaaaccagcccagagaacaagaggagagaaaaagcaggagagcacccaggagaaaaaag

SEQ ID NO: 142664 - RNA, 44 nt, Homo sapiens
ggccgcgcgccgcgcccgcgccacaggagacccgggagccccag

SEQ ID NO: 142665 - RNA, 83 nt, Homo sapiens
cagagagagcagggacaggaaaggagggggcgcgcagccacagacccaggagcggagaaaggagagcaggccacgccagaccg

SEQ ID NO: 142666 - RNA, 80 nt, Homo sapiens
gcgccgcacccacggaaaacgaagccaagggaacagaagcacccgcagaggacagaggaggaggagagagaagagacgcc

SEQ ID NO: 142667 - RNA, 59 nt, Homo sapiens
caggagaccccagccgaaccccaggacaccagggaaccgaaccaccaggccaaaaagcg

SEQ ID NO: 142668 - RNA, 68 nt, Homo sapiens
cgaccagaacgaccccgggacaagaccccacgaagccacgcacgccagccccaggaaggcggagacca

SEQ ID NO: 142669 - RNA, 71 nt, Homo sapiens
cggggggagagaacccaaccagggggaaacacagaacgcagggccaggaaacgaggccgcgcaaggcacaa

SEQ ID NO: 142670 - RNA, 71 nt, Homo sapiens
caagaggccaaccggcacaagcaggcaccaccagcaccaccccagagcagccgccgaccccgcgaagaaga

SEQ ID NO: 142671 - RNA, 70 nt, Homo sapiens
ggagacccggggacccccgacgccaggcagcgcccccaaacgaagcccacaggggcaacacagcccaacg

SEQ ID NO: 142672 - RNA, 65 nt, Homo sapiens
gccaagccaaccagccagcaggccgggcgggggaagcgcaggcgcagcaacgccaaaaagaaacc

SEQ ID NO: 142673 - RNA, 59 nt, Homo sapiens
gcgggggggcgacgcaggagcaccgcagcaccaggccaggaggacaagagcgagcaagc

SEQ ID NO: 142674 - RNA, 74 nt, Homo sapiens
gcgggaggcagcggcccccacagagcgaagccaaagccgcccagaagcagaaccggagagcggaaaggaacgac

SEQ ID NO: 142675 - RNA, 75 nt, Homo sapiens
gagggacaggccccggaaggaacagaagcgggccagagaagaacggggagcgcacgcaccagaagaaaagagaaa

SEQ ID NO: 142676 - RNA, 86 nt, Homo sapiens
cgcccacgaggagcacagccgggccgcgcgaaggaggaagaaggcaccacgacaaaccggagccgaggggagggaggccagccaag

SEQ ID NO: 142677 - RNA, 83 nt, Homo sapiens
acggaacagacaaagacaaacggaacaagcccaaaagaacgaggccggaagacgccgaaggggagaagggccggagagcagag

SEQ ID NO: 142678 - RNA, 84 nt, Homo sapiens
accagcggagcgcccccgggacaggcgacgacgcaggcgcggaggacgcgagaccccagaacgagcccgggaaccaaccccagc

SEQ ID NO: 142679 - RNA, 54 nt, Homo sapiens
acacagagccaacccagaagagccaagcaaagggggagcgccaggagagaagag

SEQ ID NO: 142680 - RNA, 49 nt, Homo sapiens
gaccagcgggaggccagaggaagggcgcgggccccggggccgcggcgaa

SEQ ID NO: 142681 - RNA, 72 nt, Homo sapiens
cagaccgcagaaggccggagacaccagcagacagggaggccgcacagaggaggagcaccaaaccgagggagg

SEQ ID NO: 142682 - RNA, 74 nt, Homo sapiens
acggccacgaacccgagggggccaaaaagcagaaaaacaaaccagcccaagaagcgacaaagcccgcgaccaaa

SEQ ID NO: 142683 - RNA, 100 nt, Homo sapiens
agggacaggagagccccaaagccgcacccccgcccacagccaggccccggggcccagcgaccgacagacaggacgaagccccagccccccccgcagcgaa

SEQ ID NO: 142684 - RNA, 59 nt, Homo sapiens
cgggacaagagagccgaggcgcccccaccacccacaaggaccagggacagggggagaag

SEQ ID NO: 142685 - RNA, 52 nt, Homo sapiens
cgaggggggggaaccacacggcgggaaaacggcacaaggcgacgagggaggg

SEQ ID NO: 142686 - RNA, 75 nt, Homo sapiens
gagagaaagacaacacggggcaaggagcacagccaagggaaggggcacgaagaccaaccggccaaagaagagaac

SEQ ID NO: 142687 - RNA, 59 nt, Homo sapiens
cagcccggggacagccacgagagcacagaagggaaggccagaagagacaaggccagaag

SEQ ID NO: 142688 - RNA, 80 nt, Homo sapiens
ggaggaggaagaaaccggaagaggaagaggaaagcaaaggagcagggaggcccccagggcccggcaggaaccggaacaac

SEQ ID NO: 142689 - RNA, 83 nt, Homo sapiens
aagcagggaggagaggcaaaaagaaggcaaaagggccccaccaagaagagaaccagccaacaaggaaaaggaaaagggaaaag

SEQ ID NO: 142690 - RNA, 61 nt, Homo sapiens
agcacccaccgagaaggccagcaggacgcacaaaaccgaggacagaggcaaggcagaaagc

SEQ ID NO: 142691 - RNA, 70 nt, Homo sapiens
ggcaagaagcgaagagcacacgcagacacagaaaagcaacgaagccacaacacaccagacaagaaaaaga

SEQ ID NO: 142692 - RNA, 79 nt, Homo sapiens
acagaaccacgccgcgcgcgcaaccccaagagcggagacacggggaaacgcaggcaaccaagaaaaagcacgccacgaa

SEQ ID NO: 142693 - RNA, 67 nt, Homo sapiens
gaacccagcacggcaaccgcgcggcaggccaggggaccggcgagcagcgcgcaaagagagaaggcgg

SEQ ID NO: 142694 - RNA, 68 nt, Homo sapiens
ccgggagcaaagagcgcacagaacaggagcacaacaagcaacagacaaggccacacaccgcagacaca

SEQ ID NO: 142695 - RNA, 78 nt, Homo sapiens
caagaagacacaaaggacggaggcacggcccagggaaacacccggagaacccaggcaacagagcaaccgcagacagcg

SEQ ID NO: 142696 - RNA, 85 nt, Homo sapiens
ccggccccaccgccgcacgccgccggggcgcggccgcccgagacgcacccccccccccggcggagccccgaaggagcgcaggcag

SEQ ID NO: 142697 - RNA, 78 nt, Homo sapiens
agggcagccggggagaagaaacgaagaggaaagcaaaaagggagcccggagggaaaagagcaagcaaaaacaacagag

SEQ ID NO: 142698 - RNA, 69 nt, Homo sapiens
gaacagaagcacaaccagagccggccccgaacgaaggcacagccgacccaggaaaaaaaccaccagaga

SEQ ID NO: 142699 - RNA, 76 nt, Homo sapiens
gaaaacagacaggacaagcaaccggcgacaaagaagagcagcccaggcagcgcggaggagggaagggcacgagcac

SEQ ID NO: 142700 - RNA, 76 nt, Homo sapiens
cacagccacccgggagagcccggaaaggcccgcggcgaggagcgagcagaggacacacagcaacgaagcaggggag

SEQ ID NO: 142701 - RNA, 84 nt, Homo sapiens
gagcgcggcaggacggcggaggacgcacaagaccagccacgcaccgcacacgaccgccacaggaacggaccgcccagagagagg

SEQ ID NO: 142702 - RNA, 74 nt, Homo sapiens
cgccgacggccccgggggcgcgcgcccaccaccccgcccccgcccgagcgcaaggaagagccgagcaacgaaaa

SEQ ID NO: 142703 - RNA, 77 nt, Homo sapiens
ggaggaagggcagcggcagagcccaggcgggcagcgccagcgggccagcccgggcccgcgaggaagacgaagaccgg

SEQ ID NO: 142704 - RNA, 78 nt, Homo sapiens
cacgcagcgaagccacagaccccagaaacgggcaagcgcgcaaacccagaacgcccaacagcggcgacccggccacga

SEQ ID NO: 142705 - RNA, 80 nt, Homo sapiens
gaagaagcagcagagggcaaagagaccggagaagaagaggcagaacgcaggacacgcaagagcggcgagggcacaagccc

SEQ ID NO: 142706 - RNA, 82 nt, Homo sapiens
gccaggcaggacccaacgacaggcgccccggcccaacggaagaacagaagagaagaaaaaaagaagaagggaagcgcacgag

SEQ ID NO: 142707 - RNA, 76 nt, Homo sapiens
ccggagaaggagcccacaacaaccacaggcaaccacaccccaaacaaggaaggccagacccgcagcaacccaagaa

SEQ ID NO: 142708 - RNA, 40 nt, Homo sapiens
ccaaggcccgcccccagcccgcagaccaagaggaacccgg

SEQ ID NO: 142709 - RNA, 67 nt, Homo sapiens
ccgggacgaaagcaagacggaaccacagacaaaaacccaaagcagcgaccggcccgaggaccgccgc

SEQ ID NO: 142710 - RNA, 88 nt, Homo sapiens
ggcgcccccggcccggagcaacgagcgcagcgccggccggaggagaaacccaccagcggccacaaccccgcggcggggagcaccagac

SEQ ID NO: 142711 - RNA, 74 nt, Homo sapiens
gcaggccacgcagcccaacccccaagccaagcagcaggaagacgaggacaacggcaagcggagaagagcaaggc

SEQ ID NO: 142712 - RNA, 76 nt, Homo sapiens
ggaggaggccgaggaagaaagaaacggcgcggagggcggagaaggaacagggagagaaacaacgggaacagaaagg

SEQ ID NO: 142713 - RNA, 49 nt, Homo sapiens
gggagccaaccccaggggacaaagagaccggacggagaaccggcccgaa

SEQ ID NO: 142714 - RNA, 74 nt, Homo sapiens
acccggagacaccccgcagcacagccgcgaccaagaggccccaaagccggggaagaccagccgaaacccgggga

SEQ ID NO: 142715 - RNA, 76 nt, Homo sapiens
agcagcagcggcgggaggagccccgggagaaacagcacccaggacacccaaagagcggaaccaaagaaacccagcg

SEQ ID NO: 142716 - RNA, 52 nt, Homo sapiens
gaggcacacacgcgccagagacaaaggacccccgggagcccgagcaggaaga

SEQ ID NO: 142717 - RNA, 79 nt, Homo sapiens
gcacccgcaccgacgacaccagcccgaggagcggcaagcaaggccaccccaagccccccaccccccgcccccggccccc

SEQ ID NO: 142718 - RNA, 79 nt, Homo sapiens
cgccggccgacggccggcgggcgggggccccgcgccgcggccgagcagcggggaccccagagcaagcacagcgagcgga

SEQ ID NO: 142719 - RNA, 46 nt, Homo sapiens
gccagcaaacggacccggaacacagggggcggacgggaaaagaacc

SEQ ID NO: 142720 - RNA, 77 nt, Homo sapiens
gcaggaagaagaagaagaagacccacggggcgggaggaccgcgccagaagggggcgaaagcgaaaaccgaccgacac

SEQ ID NO: 142721 - RNA, 84 nt, Homo sapiens
cgagaagcgccgcccagaagcagaaaggaacacggccaaagccccagaggacaagccagaagagacaacaagcaccaaaaacaa

SEQ ID NO: 142722 - RNA, 76 nt, Homo sapiens
aaggacgggagaacaccccacagggaagaggggccagggagcagaagacccaaaagaaacccacaaaaaaccacgc

SEQ ID NO: 142723 - RNA, 79 nt, Homo sapiens
cagagagcgcaccagagcagcacaaggaagcgccccaaagagcgacgggcaagagagcaagagcgcagcacagacaaga

SEQ ID NO: 142724 - RNA, 82 nt, Homo sapiens
agaccagccggaccgcccgccagggagacaacaggacagagcgggagccaccagcgccaaagggaagccaggagcccggggg

SEQ ID NO: 142725 - RNA, 65 nt, Homo sapiens
ggacaacccccacagaagggagacagggagaccaccaaaaaaggacccaagaagaccagccgaag

SEQ ID NO: 142726 - RNA, 73 nt, Homo sapiens
ggacggagaacgccccgaaccccgcacacgaggaagagaggaggaagccaagaacgggagcgaagccacgcag

SEQ ID NO: 142727 - RNA, 77 nt, Homo sapiens
gaaacaaggagggaacagaacccgaacggcaacagacgaagagagacagaaccaacggcccagaagacagacaagga

SEQ ID NO: 142728 - RNA, 79 nt, Homo sapiens
ggaaaaaaaacagaacaggaggggagagggcaggaaccaccgcccaaagaaagcagaccacacagacaaccgacccagc

SEQ ID NO: 142729 - RNA, 47 nt, Homo sapiens
aaaggaccgggcaaagaaaggagaacccagacgcgggagaacaggcc

SEQ ID NO: 142730 - RNA, 87 nt, Homo sapiens
gaaccgggaagagggcaagcagccagaaggggcgcccggcgggccggagagaccaggagagggaacggccccggcagcgagggcagg

SEQ ID NO: 142731 - RNA, 68 nt, Homo sapiens
cccgagcgcccgagcacggagagggggaccgggcgcacaggcggcgccgacaaggagaggaagacacc

SEQ ID NO: 142732 - RNA, 43 nt, Homo sapiens
ggcgcggcccgcgcgcagccggccggaagcccggggcggcgac

SEQ ID NO: 142733 - RNA, 83 nt, Homo sapiens
ggagacaggaagggaaagagagcaaggggaaggacgggagacacagacacaccggccgccaggcacagagaaggcaaacggga

SEQ ID NO: 142734 - RNA, 42 nt, Homo sapiens
gaggggggccgccgccgaccgccccgagccccggccccaaag

SEQ ID NO: 142735 - RNA, 80 nt, Homo sapiens
aagaaagggccagaagaagaggaagaggggggggaagacaacccggagaacacccaggggacgcccagaccaaacaacaa

SEQ ID NO: 142736 - RNA, 86 nt, Homo sapiens
cagcacggacacaagaggaagcggaaaccagggccacagcacgcagccccaggcaggccgcagaaggaacggcagccacacagccc

SEQ ID NO: 142737 - RNA, 59 nt, Homo sapiens
aaggggagccaccagccccccggagcgaagaaagcaggggaggaagcagcaaggcgcga

SEQ ID NO: 142738 - RNA, 67 nt, Homo sapiens
ccagaaagggcggaagcgaaacacaggaagagacccaaaggcccacgaggccgagaacaccaggcgg

SEQ ID NO: 142739 - RNA, 56 nt, Homo sapiens
cacacagaccagaggggggacggggaggaacacccagcacgcagaggggcgggcac

SEQ ID NO: 142740 - RNA, 67 nt, Homo sapiens
gcggacgcagagacagggagcacaagcgggaggggccggcgaagcgaagaagccgcgaggaagacca

SEQ ID NO: 142741 - RNA, 74 nt, Homo sapiens
caacacggggaaggcccaaacccgacaaaaggcgagagcggcagcgcgacaaggcaaaagcagaccggaaaacc

SEQ ID NO: 142742 - RNA, 77 nt, Homo sapiens
aagccggcacagcccaggagcaaaacaagcacgacagggaagacccagaaaagaaacacaaaacaagcgggaaagaa

SEQ ID NO: 142743 - RNA, 75 nt, Homo sapiens
gcggaagcaagaagaagacagggagacacagaacaaggggacccgaacccccgggccggaggacccagccggccg

SEQ ID NO: 142744 - RNA, 70 nt, Homo sapiens
accgaagcacgggcccaacaggcaccccacaaacagggcagggcgaagcagcaaaacacacagccccccg

SEQ ID NO: 142745 - RNA, 75 nt, Homo sapiens
gggagcaagaagcaggaaaggccggacaccaggaagaacgaagcgcgcagaaaacacagaaggcaaaagcgcaaa

SEQ ID NO: 142746 - RNA, 67 nt, Homo sapiens
gaccagacaacgggcaggcacgcagcccaagaggagggagaaaaagccaggccacagccagagaaac

SEQ ID NO: 142747 - RNA, 79 nt, Homo sapiens
ggcaagcggcgccaccaccagcaccaggaggaccggcgggagccagcaaccccaagcaagccggcagcccggccccagc

SEQ ID NO: 142748 - RNA, 68 nt, Homo sapiens
acaaaggacaacacgccagcaacccagagggggaaagaccaaccgaaaccgacaaccgcaagaaagcc

SEQ ID NO: 142749 - RNA, 65 nt, Homo sapiens
accgcccccagaggccgggccgcacccccaaggcgaggagaagcagagggggggagcgcccggga

SEQ ID NO: 142750 - RNA, 85 nt, Homo sapiens
acgggcaagcgcgcaaacccagaagaaggaagcagccaccccgccaggccccccgcccgccgcccccggaggaggacgagagccg

SEQ ID NO: 142751 - RNA, 62 nt, Homo sapiens
gagcgcggaggcgcggcccccaggaagcgggcaccaacagacaaccagggcaagcagaggca

SEQ ID NO: 142752 - RNA, 74 nt, Homo sapiens
ccggagcgacagcagcaagcaaacacagagaaggccaacaagcagaggggccaaagacaacccggcccggcgcc

SEQ ID NO: 142753 - RNA, 71 nt, Homo sapiens
acaaaacccgagcacagaaaagaaaaggaccggaggaaccccgacagcagagacgacgcggcaagcagcgg

SEQ ID NO: 142754 - RNA, 77 nt, Homo sapiens
ggggcacacagagaaggagacccagggggggcccgcaagaccagcggagagcccgcagagcaggcagacaggaggcg

SEQ ID NO: 142755 - RNA, 64 nt, Homo sapiens
ccacaaaccggcccaacaaccacaaggaacaaacggagagacgccgaacgaccacacacagaac

SEQ ID NO: 142756 - RNA, 77 nt, Homo sapiens
cgacgcagccacacccccggcccgaccccaccccaaccccgcggcaccccggacgcagggcagaccaacgcccaacc

SEQ ID NO: 142757 - RNA, 67 nt, Homo sapiens
acgcgcagaccggggagggaaagaaaggaaaaggaaaccagaagagggacgaagaaaacagcgcagc

SEQ ID NO: 142758 - RNA, 61 nt, Homo sapiens
acgacgacggcaccaacaccccggggaacggcagcgggcacgagcggagaggcagagaccg

SEQ ID NO: 142759 - RNA, 72 nt, Homo sapiens
cccccaggggcaggggaacccagccggagcccaccgccaagacacagagaacacgacccgggccgcagccga

SEQ ID NO: 142760 - RNA, 82 nt, Homo sapiens
ggaccaacacaagagcaaagcccgggagaacaaaggagcgcccgggagcagaagccaagaaccccaaaaccaagacccaggc

SEQ ID NO: 142761 - RNA, 78 nt, Homo sapiens
gaacgcgggggagagcacacgcccgccgccgacgaacggggaacaccgcccagccaagggggagggcagcgccaaaca

SEQ ID NO: 142762 - RNA, 74 nt, Homo sapiens
gacaagacccgggaaggaggcgacagagcccaaaaggcagagcgaggagagaagaaggagggaaagccaaacaa

SEQ ID NO: 142763 - RNA, 75 nt, Homo sapiens
gcccagacagagcacggcagaggagaggcggagcgcaggagggggaaggagaacagaacccagaggcccaagaca

SEQ ID NO: 142764 - RNA, 71 nt, Homo sapiens
cccgaccacaccacccccgccagcaggacagccaaaacacgcacaggaccagacaacaagaaaaagagcca

SEQ ID NO: 142765 - RNA, 78 nt, Homo sapiens
acagggcccgcgcaacgaaggaaaagacccagagccggaccccggaggggcccccccgcccaggggaccgcagcgcca

SEQ ID NO: 142766 - RNA, 73 nt, Homo sapiens
acccccacccgagcagccagagcggaccggggcagaccaaacggcaagagaaggaggaccggcgcaaagaagg

SEQ ID NO: 142767 - RNA, 70 nt, Homo sapiens
accgcagaaagacagagcacgaaaggcaacgcgaccggggaccacgggaaagcccccgcagccggcagac

SEQ ID NO: 142768 - RNA, 65 nt, Homo sapiens
ccgcaagcccacagagagccaggccaaggcaaggcagagcgaccgaagagagaggcggcaacaac

SEQ ID NO: 142769 - RNA, 61 nt, Homo sapiens
gagaaacaagaggaggagggaggcacacccagaagccacaggagaagcaagaggcggcccc

SEQ ID NO: 142770 - RNA, 51 nt, Homo sapiens
caggaacccgcgaagcgggaagaaaaggaaggggaaccacagcaggaacga

SEQ ID NO: 142771 - RNA, 80 nt, Homo sapiens
cgagcagcacgcagcagagcgaaaaagaccccaccgaagcccgggcaggcgaccggcgaccaggcccaaaacagaccaga

SEQ ID NO: 142772 - RNA, 64 nt, Homo sapiens
gaagaaaggcaggagcagccggagaaaacacggagaagagagagccagcagaggccaaggcagc

SEQ ID NO: 142773 - RNA, 86 nt, Homo sapiens
ccaaccagcggagacgccccaccaccggcagaaaagaccaagacccaccggcccgagggaagcagcgaagaccgccgcggaggccg

SEQ ID NO: 142774 - RNA, 81 nt, Homo sapiens
cgagaggagcagccaaggaggccgggcccaccagcggcgccaccgcgacgaggacaaagccggcgacagacgcaacacagg

SEQ ID NO: 142775 - RNA, 77 nt, Homo sapiens
gacagcacagacagaacccgcaccagggacgaagggaacccgccgggcggcccggcacccagccccccggcacccag

SEQ ID NO: 142776 - RNA, 50 nt, Homo sapiens
cgaagaggcaccggaggagcggaacgggccagacaggcgcacggacacca

SEQ ID NO: 142777 - RNA, 72 nt, Homo sapiens
ccccgggccccgaggaagcaaccagccgacggcccaaccccgcaagacccagagcgcagggagaagaaacga

SEQ ID NO: 142778 - RNA, 78 nt, Homo sapiens
ccacagagaagacggcaggccggaggaggcggaggccagccgagacaccacgacgccacacgacagagaccgcaagaa

SEQ ID NO: 142779 - RNA, 78 nt, Homo sapiens
ggacaacagggaggagggagaacacaggaaccggccccggggaggggggaagacagggcccagcaccacaggacgggc

SEQ ID NO: 142780 - RNA, 80 nt, Homo sapiens
gcaccgggcgggccccggacccggagacaccccgcagcacagccgcgaccaaggagacagaagggggagacgggagcggg

SEQ ID NO: 142781 - RNA, 70 nt, Homo sapiens
aacaaaccagccgaaaagaagacgcaagggcgggaggaaggcgggcgacaccccccgcagcaccccccgg

SEQ ID NO: 142782 - RNA, 59 nt, Homo sapiens
gggcgcacagcgcccgaggacaggacgaaggacagagagggacgggcagacgccccgac

SEQ ID NO: 142783 - RNA, 72 nt, Homo sapiens
gacaccagaaggcaaggaagaggagaaggagaaagacagcaaagaaaaggagaagaaaggaaaaaaacaacc

SEQ ID NO: 142784 - RNA, 55 nt, Homo sapiens
cgaagccagaaagaagccacccagagagaaccagggacccaacacccagaagagc

SEQ ID NO: 142785 - RNA, 51 nt, Homo sapiens
ggagccggccgagcggaggccgaggcacccgcgcagagccggagaaagcgg

SEQ ID NO: 142786 - RNA, 77 nt, Homo sapiens
aacagcccagcacgaaagagcaaccaaaacaggacaagaaacaccaaacaagcaacagccaagaaaaaacggcaagg

SEQ ID NO: 142787 - RNA, 67 nt, Homo sapiens
ccgacgccaggcagcgcccccaaacgcggcggagaaaccaccacaaacacgaggccagcaacgacca

SEQ ID NO: 142788 - RNA, 62 nt, Homo sapiens
ccgacaagccgaccagccaagggcagaggccaagaccggcccaagaaggagaaaagaagcga

SEQ ID NO: 142789 - RNA, 68 nt, Homo sapiens
ggacgccgcgcacgaaaaacgaaagaggaacaaaggcaagcagggaccgagccaagaaaaagaacaag

SEQ ID NO: 142790 - RNA, 83 nt, Homo sapiens
cccagcaccgaaagggaccgaaaggagagcaaagaaagcgcaggaaggaaagggacaaagagcgaagccgaccagcgccagga

SEQ ID NO: 142791 - RNA, 59 nt, Homo sapiens
cggcgaagacgcgaccgcggcgcgagcaccaggcgccacaggagccgcagaagcaaagg

SEQ ID NO: 142792 - RNA, 59 nt, Homo sapiens
gacagacaagcaacggaagccccgggcccacccagggagaagagaaaagggaaggcacg

SEQ ID NO: 142793 - RNA, 118 nt, Homo sapiens
aaaaacaaaagcagcggccggacagcgccacggcgggccgcgggaggacaccacccacaggaccaaaagaccagagcaaacgaaggaagaacccaaaccacaacaagcacaagagcac

SEQ ID NO: 142794 - RNA, 46 nt, Homo sapiens
aacgaggaaagaggcgcagcgaggaaagcacgaccagccggagagg

SEQ ID NO: 142795 - RNA, 72 nt, Homo sapiens
caggaagaaagaccagcacgaaagaaaaaggcacaaagcgccaggaaaggggacggaaagagagccgcagcg

SEQ ID NO: 142796 - RNA, 88 nt, Homo sapiens
cacggaaggacgacgacaaacacgcagaggaaggagcagcgcaagcacgagagacaaggaggggcgcgccgcccacccccaaagccac

SEQ ID NO: 142797 - RNA, 77 nt, Homo sapiens
gcagcgggccaggacgcagcaagccggccaccacaaaagcccggggcaggagaggggaggcaagcaggggggcaaag

SEQ ID NO: 142798 - RNA, 56 nt, Homo sapiens
agaacagaagcaaagcacaccagaaaaaagagggggcggagcccggacggaaagaa

SEQ ID NO: 142799 - RNA, 74 nt, Homo sapiens
gaaaaaaaagaaaacaagcgcacgaaacacgaaaggcagggcccaaagaaaaaaaaccaaaaccaaaagggcaa

SEQ ID NO: 142800 - RNA, 83 nt, Homo sapiens
cccaaaacgaaagaagggagaggcggggagcagcgccgggagaaggaccacgcaggccccaggcagagagcccacggccacca

SEQ ID NO: 142801 - RNA, 75 nt, Homo sapiens
aacacgcccccgacgaccagagagacccggccccagcccacgagggccagcccgcgccccccgaagaagaaagaa

SEQ ID NO: 142802 - RNA, 67 nt, Homo sapiens
cgccagccacggacgccacagagggaagaccccaagggaggggggaagacagggcccagcaccacag

SEQ ID NO: 142803 - RNA, 36 nt, Homo sapiens
accaacccgcaacagcagcccggcgcccccccgcgg

SEQ ID NO: 142804 - RNA, 62 nt, Homo sapiens
cgggcaaaaagagccccaggcggaagggcgcggcggggggcacaaaaggggaccgggagcca

SEQ ID NO: 142805 - RNA, 75 nt, Homo sapiens
gagaaaggaacaggagacagagcgaaacacagggaacaggaggacaaagcaggacagggacaaagaccaaaagga

SEQ ID NO: 142806 - RNA, 86 nt, Homo sapiens
cgcccggaggcgcagcgccaagagaagaaaaagagccgggaggagcaggggagggcagcggcgggagaccggccaaccggcccaca

SEQ ID NO: 142807 - RNA, 80 nt, Homo sapiens
aagaccagacaaccagcgaggagagaaaccacagagacccaagagaagagggacagagaaagaagcaagaaaaaccagcc

SEQ ID NO: 142808 - RNA, 56 nt, Homo sapiens
accaaaaacagaaacccagagggaagaacgggcaggagaaacgaccccgcaggaag

SEQ ID NO: 142809 - RNA, 76 nt, Homo sapiens
gaaggcggccaggccaaccgaaggaaagaccacagcaagaccacgcccccagccgggggaccaggccgaacgaccc

SEQ ID NO: 142810 - RNA, 81 nt, Homo sapiens
gggaccaggcgaagcggccgagcaggcgagcgaacgacggaacccgcccacgccagcgaagccgacaggaccaacgacagg

SEQ ID NO: 142811 - RNA, 57 nt, Homo sapiens
ggcggacgggaacgacgcgagcagaagaggggccgaaggggacagaaggagacggaa

SEQ ID NO: 142812 - RNA, 79 nt, Homo sapiens
aaaccccgccacgccaaccggagagcagccaaaagaaacccccaaaaccggaagaaagagaaggaacagaggacacgca

SEQ ID NO: 142813 - RNA, 61 nt, Homo sapiens
gcgcagggcggcgggcagcagcacaacgggcgcaccaagacggcccgccacgggccccgca

SEQ ID NO: 142814 - RNA, 83 nt, Homo sapiens
gaaagacagcgggaagaggaacgcaagcacaggaccagaaacgaaaggcagcagaagaggaaagccagaaagacgagcaacag

SEQ ID NO: 142815 - RNA, 75 nt, Homo sapiens
aagacaaaacacagcgccaaggaaagaaaacccagaagacacgagaaaaacccaacggccgccaacagaaaaaac

SEQ ID NO: 142816 - RNA, 75 nt, Homo sapiens
caccccgccggcaaggaggcaccgcggcagacgggaccacgaggcaacgccccagagagggacaccagggggaaa

SEQ ID NO: 142817 - RNA, 66 nt, Homo sapiens
gggcgccaaacccggagccaaaggaggagaacccgccgcccgagggcgaaaccaccacccgggacg

SEQ ID NO: 142818 - RNA, 75 nt, Homo sapiens
aaccagaacaaaacagacaccggccaggaaaaaaagagacaacagccacaagggacaaaaggaagacaagggaga

SEQ ID NO: 142819 - RNA, 75 nt, Homo sapiens
cagaccgcagacagaaacgccccgccgcgcccggggccccggggcccgggcagagggaaagcagaggacggaaca

SEQ ID NO: 142820 - RNA, 77 nt, Homo sapiens
cgcggccagcaaccaaaaggaacagagacgccaagcccgggcccggaggcacgagacaccagaagaaagggaccaac

SEQ ID NO: 142821 - RNA, 81 nt, Homo sapiens
gcgccacgggggccagaagcaggccccaaaccaccagccgccccaaaaccaccaaccacagcccccgaccagcagagaaga

SEQ ID NO: 142822 - RNA, 44 nt, Homo sapiens
ccagagggcccgccgagaggcagccaaaacggacaagccaaggc

SEQ ID NO: 142823 - RNA, 81 nt, Homo sapiens
cccacggaggaagagccgggcagcccggagcgggccaggaaagaccacagcaagaccacgcccccagccgggggaccaggc

SEQ ID NO: 142824 - RNA, 78 nt, Homo sapiens
ccagcccccccccccgacagagacggcggagaccccgaaggcgcaaacgacaccacccgaccgaaacggacaggcagg

SEQ ID NO: 142825 - RNA, 71 nt, Homo sapiens
acaacaccgagcgaagaaaagaccaccgccacaccagcagggaaaaggagccacaaagaccagggagcaaa

SEQ ID NO: 142826 - RNA, 57 nt, Homo sapiens
cggaccaaggaagaacccgaagcaccgggaggcaccgccccaacccccccccgcccg

SEQ ID NO: 142827 - RNA, 71 nt, Homo sapiens
aaaaacacgcagggcgcagagccaaagccccaaaagaccgggaagagccaaacagacacgaccggggaaga

SEQ ID NO: 142828 - RNA, 67 nt, Homo sapiens
ggagccggagggaacagcagggcaaagcaacagccaaaaaacagaggaggccaacacgccaccaccc

SEQ ID NO: 142829 - RNA, 36 nt, Homo sapiens
agcgcagcgccacaaacaggccgggcaccaggaggg

SEQ ID NO: 142830 - RNA, 67 nt, Homo sapiens
agagccccgggcgccggggccgcgagaaaaaacggaccgacggagaaaaaggaggagaccaggagga

SEQ ID NO: 142831 - RNA, 73 nt, Homo sapiens
gccaggcccagggggagagagccaggcgagggcaggcggcaccaggacgccgaaaagcgaccggacgcaggca

SEQ ID NO: 142832 - RNA, 66 nt, Homo sapiens
ggacgggcaacaggagccccacgccacggggcacgagcaaaaaaaagccccgagcaacaaaccagg

SEQ ID NO: 142833 - RNA, 69 nt, Homo sapiens
agaaaggcgaaaggaaggcgcggaaacagaacaaccacccagaaaggaccaaagacagagacaagcggg

SEQ ID NO: 142834 - RNA, 87 nt, Homo sapiens
cggacaggcgccgcgccgccgcacgggaccgccgagccacaccgggccacagcacagcaaagccacaacacccaggaggcccccgga

SEQ ID NO: 142835 - RNA, 73 nt, Homo sapiens
aaaagaaaagcaaaaaggaaagaaacccccgacggccaaacacgacccggagaacacaagaggaacccgagcg

SEQ ID NO: 142836 - RNA, 82 nt, Homo sapiens
ggacccgacccgagccaccaggacacgaagcgacccccgaagggacccgccacgaaggggagccccggagaaccgagacacc

SEQ ID NO: 142837 - RNA, 80 nt, Homo sapiens
cggcagacaaagacagcgcccaaacaaccccaaggccaggggaggccacgaagggggagcccgcagaagcgcggcaccgg

SEQ ID NO: 142838 - RNA, 71 nt, Homo sapiens
ggggcccagaaacgaaccggagacaagggacggaaaacacggagaaacgaggagacgggcgaacacaggga

SEQ ID NO: 142839 - RNA, 67 nt, Homo sapiens
gaaaaggggcggaggacacggggaaccaacagaagaagggagaagaaccaacaacggaaaaccagcg

SEQ ID NO: 142840 - RNA, 67 nt, Homo sapiens
gaaacagagaggggaaggagcccagcgacacgagccagagaggcaccaacacaagagaccaccccac

SEQ ID NO: 142841 - RNA, 87 nt, Homo sapiens
gcggagaaggaggaacccgggggcaaggaggagaccccagggcagaggccagccccgggcccccgcagaccgggcgggcggaagaag

SEQ ID NO: 142842 - RNA, 77 nt, Homo sapiens
ggcacaaggcccgccgcaccccagcgcgagccaccgagacagacaagcagaccggaagaccgacggaagaccacacc

SEQ ID NO: 142843 - RNA, 65 nt, Homo sapiens
aaacgaaccagccgaaggaggagcaaaaaacagaagcagggccagaagggggcaaggcaaccgcc

SEQ ID NO: 142844 - RNA, 76 nt, Homo sapiens
ccacgcggacgggcgaggagaacacccggaccggacacgccgagcgaaaaccagagacccagacacgcgaaggaac

SEQ ID NO: 142845 - RNA, 76 nt, Homo sapiens
cccccagcgcgaggcggcccggcggcggcggcaccaggcccgcaggcccgcaggaggaaacacacgggacagcaca

SEQ ID NO: 142846 - RNA, 63 nt, Homo sapiens
gccaagaggacgccgagcaggacccagcggaagaaacggacaccaccagagcaagccccgaag

SEQ ID NO: 142847 - RNA, 65 nt, Homo sapiens
gaggagcggagaccgacacaacccccgggacacagaaccagggggggcgaccaagggaacgagcc

SEQ ID NO: 142848 - RNA, 40 nt, Homo sapiens
cgaggaggcgccgcgcagaggggaaagaaaaagagcccac

SEQ ID NO: 142849 - RNA, 74 nt, Homo sapiens
accgagagcggaccgagagcgcgaaacgcacgagaagcaggccgccagacaacccagccaaacagagaaagaaa

SEQ ID NO: 142850 - RNA, 76 nt, Homo sapiens
ggggcccgcccgcggcccccgcgcggaggacaccaggccagaaagcaaaacaccgagagcccgaaacacggggaag

SEQ ID NO: 142851 - RNA, 81 nt, Homo sapiens
aaaacaaagaaaggaggaaagcacgcagggcgaaaccccacaagggaaaggaaaggacccccccagaaccaggaagacaac

SEQ ID NO: 142852 - RNA, 53 nt, Homo sapiens
gaagcaacacgagaaccaccccgacacaacaccaccagcgaacaagaggcgcc

SEQ ID NO: 142853 - RNA, 36 nt, Homo sapiens
gccccacgcccaggagcaggcccagcaagagaggaa

SEQ ID NO: 142854 - RNA, 73 nt, Homo sapiens
cggaacagcgggaagcaggaccagagaaagcgccgcaacgcccccagcgccgaaaagcgaaaagaaacaagcc

SEQ ID NO: 142855 - RNA, 55 nt, Homo sapiens
cacaggaagggccgaggaagcggacgagaagcgagaagcgaacaaaaaaaaacag

SEQ ID NO: 142856 - RNA, 79 nt, Homo sapiens
ccaagaaaggagccgccaagggacgggccaaggaaggacaaaccacaagggacgggggccacgggcggagacagcacgg

SEQ ID NO: 142857 - RNA, 80 nt, Homo sapiens
caccgcggagcaaaaaaagagcccgcaagaagaacagagacagcagccaaacccccaggcccagagcgcggcccaggggc

SEQ ID NO: 142858 - RNA, 72 nt, Homo sapiens
cagccagcccgagcaagaaagaggcccgagagagaaagggaaagaaggagcggagcagaacaaggaccccca

SEQ ID NO: 142859 - RNA, 64 nt, Homo sapiens
ccgcacgcggcgggcagggacgccgcaggagaaaagggaaacaggggagcagagggacaaacca

SEQ ID NO: 142860 - RNA, 78 nt, Homo sapiens
ccggcacgaggaggggccgcggccacaggcgccaagaagccgagacaagccagaaaagccaaaaaccgacagccccca

SEQ ID NO: 142861 - RNA, 74 nt, Homo sapiens
cgccggcggccgcggcccgcccagcacggacagccgagcgaccggcccgaggaccgccgcacgaccaaacgcag

SEQ ID NO: 142862 - RNA, 76 nt, Homo sapiens
cgaccgcgcggaccagggcgacaaagggacccgagaggacacagaagagagaaagccgaagacaggagcgaggggc

SEQ ID NO: 142863 - RNA, 76 nt, Homo sapiens
gcgggccccgagagcagcagcggcagagacagaccgcgcaggcgcggcaagaggaagaccacccacagcacccaaa

SEQ ID NO: 142864 - RNA, 81 nt, Homo sapiens
aggcccggacagggagccaagccaacggagcaagcgacaaacaacaagcccggaggcaaaaacccacggccaggaaaagga

SEQ ID NO: 142865 - RNA, 79 nt, Homo sapiens
agaagcggaagagagggggcgcccagcgccaacaccaaggcaccggacgaagaaagaaccacagaaaacaacagagaca

SEQ ID NO: 142866 - RNA, 57 nt, Homo sapiens
caaaaacagccacccaagcccagcaaggacaaaggacagcaaccccgagccacgcag

SEQ ID NO: 142867 - RNA, 75 nt, Homo sapiens
ccacgcagccaagcacgccaccaagcagccagcacaacccagccacagagcgcgcagggccagccacaaggcaag

SEQ ID NO: 142868 - RNA, 57 nt, Homo sapiens
aaaagccgccggaccaaaaacaaagcggcgcggacaagaagacagcagacggacgaa

SEQ ID NO: 142869 - RNA, 77 nt, Homo sapiens
aaaaaaccaaaaagacccggaggaaaccaaagcggcgcaagcaggaagagagaagggcacagaccaagacaacgaac

SEQ ID NO: 142870 - RNA, 73 nt, Homo sapiens
gacagcgcgcaccagcaaagaagcacaaaaggaacgacacagaaaaggaagagaaaaagaacaagccacgggg

SEQ ID NO: 142871 - RNA, 58 nt, Homo sapiens
gccggcgccggagacgagccgaacggccgagcgaccaggagaggagcccccgcccgaa

SEQ ID NO: 142872 - RNA, 81 nt, Homo sapiens
ccgggagggcgccccccgccagaagccgaggaaagcggaagcggccggcaggggaaggacgagcagacaacagggagaccc

SEQ ID NO: 142873 - RNA, 81 nt, Homo sapiens
gagggagaacaaacaaagaagacccagacagcccaaacgcagacagaaacaacgagggaagcaacgcacacggcgccacac

SEQ ID NO: 142874 - RNA, 73 nt, Homo sapiens
accccaaggagcaacacggcggaccacacaagcaaaagagagggccgcgaaaccaacgacaacagcccgacac

SEQ ID NO: 142875 - RNA, 67 nt, Homo sapiens
aagcgaggcagccagcacccgcgagaagagcgagaagcacacaaggaagacaggaggccagagcgac

SEQ ID NO: 142876 - RNA, 72 nt, Homo sapiens
ccagggacagaaggagcccccccacaccagaaccaacaccgcacccgaaaggagggcaccagacgggaacgg

SEQ ID NO: 142877 - RNA, 82 nt, Homo sapiens
cggcggcgagaggacaccccccgcccggacggagcggaaccgagaacccgcacagacagagagaagcgacgggcgcccagcg

SEQ ID NO: 142878 - RNA, 85 nt, Homo sapiens
cagcagcccagacgcggcacagagagggccgggagcgcgcagccagaaagccaccccacccggggccccagcaccagccgacggc

SEQ ID NO: 142879 - RNA, 74 nt, Homo sapiens
cccagccaagaacaaagacacagagcacacgcagggcagaaagagccgcagacgcacagcaaccaccggacccg

SEQ ID NO: 142880 - RNA, 69 nt, Homo sapiens
caagcaacacaagaacaggcgccaacggccgacaagcccgacgaagaccggcggccacagcagcaagca

SEQ ID NO: 142881 - RNA, 79 nt, Homo sapiens
cgccgaagaagcacgaaagccccacccgccgcagcaagcagagcaccgagacggagccagaacgagcccagcggagcag

SEQ ID NO: 142882 - RNA, 37 nt, Homo sapiens
cagccaggcggcgggccagaccaagggaagccaaaac

SEQ ID NO: 142883 - RNA, 60 nt, Homo sapiens
cgaaacacccggccagcgccccgcgcgccacgcagagccccgccaggaagacacgccggg

SEQ ID NO: 142884 - RNA, 68 nt, Homo sapiens
gccaagacaccgcgaaagcggcccagaaggacggaacagccagggaggcgcgacacggcaaggggcgc

SEQ ID NO: 142885 - RNA, 69 nt, Homo sapiens
cccaagaacagaaaaagaacccagaaagcagaaccaaccggaaggagggggaaccgaaagaggcgacgc

SEQ ID NO: 142886 - RNA, 53 nt, Homo sapiens
agcggaaaacgaacacccccgggaacaaggggcgaacgccacggggggcccgc

SEQ ID NO: 142887 - RNA, 83 nt, Homo sapiens
cgaggaccgagcgcccgcccggccacaacagggacgaacgagcgcaggagggacggcaccaagaagagcccggagagcgagaa

SEQ ID NO: 142888 - RNA, 70 nt, Homo sapiens
gcggagggggacacccgggcggggcagagcagcccccagccagccgcgaggcggcaccaggacgccgaaa

SEQ ID NO: 142889 - RNA, 74 nt, Homo sapiens
ggagcgggcccccacaaacacgacgccacgacaagcgaaccgcaggaggcacacccgccagccagcggcgcccg

SEQ ID NO: 142890 - RNA, 77 nt, Homo sapiens
ccggccgccgaccgcggccccgccggccgccggccgcgcgggggcgccggccgcccgcaggacaccgagggcccagc

SEQ ID NO: 142891 - RNA, 75 nt, Homo sapiens
gagggcacggccccggccgccccaacgggggcacgaagggggacacaggcgagagcacaggagacgaggaaggaa

SEQ ID NO: 142892 - RNA, 63 nt, Homo sapiens
cacccaggaggacggcccaagcacaaaacaagaccaagcacagaagagcaaacggagaccggg

SEQ ID NO: 142893 - RNA, 57 nt, Homo sapiens
acaagggcccggaaagccaagggaaacaccacaaagcgagcaaacccaccaaagagg

SEQ ID NO: 142894 - RNA, 50 nt, Homo sapiens
accaccagaagcgaagggggaaggcccagaaggggaagacccccagcgaa

SEQ ID NO: 142895 - RNA, 62 nt, Homo sapiens
ccgaacacggggacaagagggccccgggaaagagaccaaggaaagcaccccacgaacaacca

SEQ ID NO: 142896 - RNA, 82 nt, Homo sapiens
ggaacccgcaaggacgagaagaagcaaagaggcacacaggggacacggaacccaaggagacgaagcgaagcaggagaaggag

SEQ ID NO: 142897 - RNA, 36 nt, Homo sapiens
gcaccccccaaagccggagcggaagcccaagaacag

SEQ ID NO: 142898 - RNA, 70 nt, Homo sapiens
ccggaccaccccaccagagccaggcagccgggcaccaggacacccgccggcccaagagcccagccgcccg

SEQ ID NO: 142899 - RNA, 68 nt, Homo sapiens
gcacccaggggacaaaaaaggaacgagaggacacaggaaacgcacagaagaaacaacagagagccacc

SEQ ID NO: 142900 - RNA, 74 nt, Homo sapiens
ggacggccagccagcccagccggaggccacggccggccaggcacagcgacccgaagaaaccgcagcaaaagaaa

SEQ ID NO: 142901 - RNA, 76 nt, Homo sapiens
cagcccccgagaggagaaacaggcgcggcggcggcacaccccacaagacccgccaagagggcgacaagcaagcgag

SEQ ID NO: 142902 - RNA, 72 nt, Homo sapiens
gaaccgaagcagcaagccgacacaacagccgacaaacgggagccaaggaaagaccacagcaagaccacgccc

SEQ ID NO: 142903 - RNA, 85 nt, Homo sapiens
gcggacccgcacacaggacccccagagagccaggaaggagacgggagagccacccggagagggcgaacccccccacggcaagcaa

SEQ ID NO: 142904 - RNA, 85 nt, Homo sapiens
cgggagccgcaccaccaacgcggccgacaacagccggcgccgccacggcgccggcggcagagcggggagacgagacaaccgcccc

SEQ ID NO: 142905 - RNA, 80 nt, Homo sapiens
gcacaaagacagggcacgggacgcacgggccagacacacagagcaccggcgaccacgagacacagccgagaggcccccaa

SEQ ID NO: 142906 - RNA, 109 nt, Homo sapiens
ccccgcgcggcccccacgccagacggcccccccggggcgcgccgcagacggagcggacagaaggcacgggggcccgcacgagaaagacacggcagcgcaggcagaccgc

SEQ ID NO: 142907 - RNA, 70 nt, Homo sapiens
cacgccaccgacaggaggaagaacaccacccgcaagggcaagaacaccagcaagcgcagaaccagacagg

SEQ ID NO: 142908 - RNA, 66 nt, Homo sapiens
agcgcagccagcacccagaggcgccaggcaaaaccccggcacagagcggaagcgcagaaggaaagc

SEQ ID NO: 142909 - RNA, 73 nt, Homo sapiens
gcagcaaaggaacagaccaagaaaagaaaaaccacaagccaacgaaaggagggcgggccagggaccggcaaaa

SEQ ID NO: 142910 - RNA, 72 nt, Homo sapiens
gggaccagcagacaagagaaacaggccgaaaagaaacccagagaccggaggggaacagcagcgaaaggccgg

SEQ ID NO: 142911 - RNA, 65 nt, Homo sapiens
ccaaccaagcgaagacagcacacaagcaaaggcagaaagcacgccaaccggaacacaagccccgg

SEQ ID NO: 142912 - RNA, 60 nt, Homo sapiens
gaaagcagggaagcgacagggaggacaaggcacgaggcgcggcgaccaccacagcagagc

SEQ ID NO: 142913 - RNA, 45 nt, Homo sapiens
cggagcagccagaagacgggggagggcgcgagcgcggcccagaca

SEQ ID NO: 142914 - RNA, 73 nt, Homo sapiens
ccgcgccgccgcccacaagcggcgccgcgccccggccgcacggggagaagaaccaacaacggaaaaccagcgg

SEQ ID NO: 142915 - RNA, 82 nt, Homo sapiens
gggcgcaggagcacagcagcccgaggcagagcacggagaggccagcccgcgagcagcagagcgggcaggcgggaggaggcag

SEQ ID NO: 142916 - RNA, 76 nt, Homo sapiens
gcggcagggagcgcgggggcccgcgcagcagcgaccacgccgcccccccaccgcggaagagcaagggaagcacaac

SEQ ID NO: 142917 - RNA, 75 nt, Homo sapiens
gaaggggaaccaggaagcccacaccgggcagccccagccgaagccaacaagagaaaagcccaaaacaggccgcgc

SEQ ID NO: 142918 - RNA, 83 nt, Homo sapiens
ccgcaggacccggcccccgcaacccccagcccgagccaaagccagggagcgggggaggggcagcccgcccacgcccgagggag

SEQ ID NO: 142919 - RNA, 74 nt, Homo sapiens
gagccgaagcgggcagaggagccaagaccaggccaagacaccaaagcggggacgacgagcccacggcacaacgg

SEQ ID NO: 142920 - RNA, 73 nt, Homo sapiens
cacagaagcaaaagccgaagcaggacggagccacaagggcagacagagcacaagcgcggggaaacagcccgaa

SEQ ID NO: 142921 - RNA, 85 nt, Homo sapiens
ggaaagccaagcggcggccaccgcaggggcccccacacggccggagagagagcggagacaaggccacagcaggccacggcggggg

SEQ ID NO: 142922 - RNA, 58 nt, Homo sapiens
ggaaaccaacaagacgaggggaagaccagcaagcacaaaggacaccacagacaaaccc

SEQ ID NO: 142923 - RNA, 56 nt, Homo sapiens
caggagcgccacgcgcggaaggcagcgcccagcagcgcagagaaaaacggcagcag

SEQ ID NO: 142924 - RNA, 113 nt, Homo sapiens
gcaaaaagccgggccaaaaacccagaaacccaccacagccaccgcacccaacaccgagacgcggccacgccagaacagccacagccagcaaagagaagggaagaagacgagca

SEQ ID NO: 142925 - RNA, 71 nt, Homo sapiens
aacgcccgcgggacacgggaagcgggcacggaagaggaccaccacgcccgggcaacaacggaggcgagaac

SEQ ID NO: 142926 - RNA, 81 nt, Homo sapiens
ggacgggggggcggcccggccccgcagggcgcgcgggggcacagcccaggcgcagcagcggacccccccggccccggaggc

SEQ ID NO: 142927 - RNA, 73 nt, Homo sapiens
gcagccgaggggcgcaaagcccaacggaggccacccgggcaggcaagggcaagggggccacaaagaggacacc

SEQ ID NO: 142928 - RNA, 37 nt, Homo sapiens
agggggcccgccccaggcgggcggaggcagggcagac

SEQ ID NO: 142929 - RNA, 53 nt, Homo sapiens
aaccgcaggaaacgagccggcaccgaggagcaacacccccagggagcccagac

SEQ ID NO: 142930 - RNA, 75 nt, Homo sapiens
gaacaaggggaccaaaccacgcaggaccccaagccaagaacgagaaggggccaaggagaccgcacgccggacgga

SEQ ID NO: 142931 - RNA, 56 nt, Homo sapiens
gaccacgcccacccacccaagagagccagaaacgccgaagggaccaggcagacggg

SEQ ID NO: 142932 - RNA, 80 nt, Homo sapiens
gaagacaaggagcaaaggcggaggcggcggggaaaccaaccccgcggagcaggcggaaggagcggcgggagacaggaagg

SEQ ID NO: 142933 - RNA, 66 nt, Homo sapiens
cgcgcacccgagccgcaagggccagaacgaagcacaacaggcagcgggaaaaccgacacggagaaa

SEQ ID NO: 142934 - RNA, 78 nt, Homo sapiens
gcgcccgagcggccgcgccggcccgggacgccggcgaggggcgcgggcgcgcgccgggaaagaccacagcaagaccac

SEQ ID NO: 142935 - RNA, 76 nt, Homo sapiens
gcccagaccggcaaaacggccacacggagaaaagcccacagagccccggggacacagacgccagaaggagacacac

SEQ ID NO: 142936 - RNA, 84 nt, Homo sapiens
agcgaccaccaacagaccgaagcccgggcgcgccaggcacagccaagagcggaccggcagcggccagcgcagcggccggagcag

SEQ ID NO: 142937 - RNA, 75 nt, Homo sapiens
aaggaccaagaaccagaagaaagacaaggcgaccgaaccaaggagcaggccagaaaagaccaggcagcaacaggc

SEQ ID NO: 142938 - RNA, 75 nt, Homo sapiens
ggagacaagcgcagcgagcagcagccgcccaaaacacaaaccaaagaagaaacccgaaggaccacagagaaccaa

SEQ ID NO: 142939 - RNA, 87 nt, Homo sapiens
aggaaggcgccgcgcgggacccggaggaccgaccccagcccacgggcacgcagggcggagaacggaaaagcaccaggaagcagagag

SEQ ID NO: 142940 - RNA, 70 nt, Homo sapiens
gcgcgccacgcgggagcgagaccagagcgccacggccacggcccccccgggcgcggccggcacgcaccac

SEQ ID NO: 142941 - RNA, 70 nt, Homo sapiens
gaagaccgaggcaccaaggaaacccgacggaaaagaacagagcaggcgagaacgaaaccaagaggcaaag

SEQ ID NO: 142942 - RNA, 65 nt, Homo sapiens
gacgcaccgcaggcagacaaaagggccaaagaagggagagagaagcgccaaaacgggcaaaaggg

SEQ ID NO: 142943 - RNA, 87 nt, Homo sapiens
agccggcgcggggagaaggaggggcaggaaagcagcgggaccagggacagagaaggcgaagaaggggagaaacgaggcacaaaaaga

SEQ ID NO: 142944 - RNA, 36 nt, Homo sapiens
gcaggcagccagcaaaaagagagccgcgcacccagg

SEQ ID NO: 142945 - RNA, 68 nt, Homo sapiens
gcacgaagcgaagacagagaacgaagcgaccaaagcgcacggcagcgagaggacgcaacccacccgac

SEQ ID NO: 142946 - RNA, 58 nt, Homo sapiens
gggcagccgcccaggaggggccaaagccgacagaaaaggaagagacccagcgaacaag

SEQ ID NO: 142947 - RNA, 81 nt, Homo sapiens
aacagccgagaaccgaaaccaaagagccaagcaagggggaggcaggagcacaaaaggccgcagcgagccgccgcagaccaa

SEQ ID NO: 142948 - RNA, 57 nt, Homo sapiens
gaccgagagcgcgaaacgcacgagaagaagccaagaagagcagaagaaaaaagccaa

SEQ ID NO: 142949 - RNA, 57 nt, Homo sapiens
ccgaccacgacaaggagcccagagggcccagcaggaaccaacgggagcgacacagcc

SEQ ID NO: 142950 - RNA, 82 nt, Homo sapiens
agacaccggaaaagagcggaacgacaacccccagacagggcccagaaaaggccacggaaacgcaaggaagaagacggcaccc

SEQ ID NO: 142951 - RNA, 75 nt, Homo sapiens
gggaggcagaagagaagcccgcgggccccgggcgcgggagccagccgaagaaaggaaaagagaggcgccgacaag

SEQ ID NO: 142952 - RNA, 67 nt, Homo sapiens
gcagaggagagaaccagaaagcccaggaaagagacacgcaaagaagaaaaaaaacgaggagagcgaa

SEQ ID NO: 142953 - RNA, 92 nt, Homo sapiens
cagagcggagggagccccagacacgggcgggacgaccccacaacccgagcgcccaagccccccgcgcagagggagaaggcacccgggccggg

SEQ ID NO: 142954 - RNA, 65 nt, Homo sapiens
cggaagcgcgacggcccagaccgcgagcggaggacagcaccgaacccagcggggccgccccaccc

SEQ ID NO: 142955 - RNA, 75 nt, Homo sapiens
gggaaccagcaaaggccgaagcccagccggcagaggagggaagcggacacacaggacgagaaacccgaccacacc

SEQ ID NO: 142956 - RNA, 83 nt, Homo sapiens
cgggcaaccgggggagcaaagagccgacagagaacagaaacgggaccacagaggagcacagcaaaaaggaagccgaaaagggc

SEQ ID NO: 142957 - RNA, 69 nt, Homo sapiens
gaaggcagaggaacacaacagaacacggccagcacgaaagggaacagcccgaacacggagagcggacac

SEQ ID NO: 142958 - RNA, 80 nt, Homo sapiens
gccgcgccgggccgcccggcgccgggagccgacagccgcgccggacaagcagaccggaagaccgacggaagaccacaccc

SEQ ID NO: 142959 - RNA, 50 nt, Homo sapiens
ggggaacccggggccagagaagccacagggaaaacaagggcgacagcaag

SEQ ID NO: 142960 - RNA, 78 nt, Homo sapiens
aaggcgaagaaacagcggagaaggagaagggagaagaaacagcagccgcagacagagcggcagacacgcagcaaggca

SEQ ID NO: 142961 - RNA, 53 nt, Homo sapiens
cgcgggcggcagcaggcgaaggcagacgcccagaagagcacaaagaaccaacg

SEQ ID NO: 142962 - RNA, 83 nt, Homo sapiens
ccggagcgggcggcccgggcgaggccggcgccgccgcgccccggccccccggccgcacagggacgacaagaaggaaaggaagc

SEQ ID NO: 142963 - RNA, 81 nt, Homo sapiens
gcagggcgacagcggcggcgagaggagaacaacaagcgacgccaacacgcagaagggagaaaccgacacggaacgacagag

SEQ ID NO: 142964 - RNA, 74 nt, Homo sapiens
gaccgggccagacccgaaccgcgccagagaggaaacaaggaagagggccaggaaggaaacgggagaaccggaag

SEQ ID NO: 142965 - RNA, 78 nt, Homo sapiens
acacaaaaaaaaccaacagccccccagacaccaagcggaggccaggcaagaaggaggcacagcaggccccaacaaaag

SEQ ID NO: 142966 - RNA, 76 nt, Homo sapiens
ggccgagaaacagagagaaaagagacggagcaagagaacgcaagagacggcggaggcaaggcaccaccggccacgc

SEQ ID NO: 142967 - RNA, 104 nt, Homo sapiens
ggacgaagcggggaggagcagaagagcccaaaaccaacgaaccaaaagcaaccgcgaagagcagagaaacagccccagaagggagaaggcaccccacaaagcag

SEQ ID NO: 142968 - RNA, 73 nt, Homo sapiens
ccaagagaagaagaaaagagggacacaacagcagccacaggaaccgagcagaaaggagcagaagacaaaacag

SEQ ID NO: 142969 - RNA, 40 nt, Homo sapiens
ccacgcaagcccgcccccaggccccggaccccccgcgccc

SEQ ID NO: 142970 - RNA, 34 nt, Homo sapiens
cccgcccaaacagaggcggccagcggcagcgggc

SEQ ID NO: 142971 - RNA, 80 nt, Homo sapiens
gggacacccgcccccgccccgcagccgcccgccgccgcgcccgccgagacagggcgcacgaggcccgccagcgccccgga

SEQ ID NO: 142972 - RNA, 62 nt, Homo sapiens
gcaaggggccaccaggaggccagggggcgccagcgcacaggagcgagagacccaccccaccc

SEQ ID NO: 142973 - RNA, 70 nt, Homo sapiens
ccccgggggggcccgaggaaccaccacccaccgaagggggacgaagacccaaacgacacagcggaacgca

SEQ ID NO: 142974 - RNA, 60 nt, Homo sapiens
caccaggcagaaaaagcaggccgaaagaaaaccaccggcggcacgggaggaggcagagcg

SEQ ID NO: 142975 - RNA, 91 nt, Homo sapiens
ccgcaccaaaaacagaaaaagcacaacagagggacaacaaaagccccacaagagccaccaaaagagaagacaccacacccccaccggaaag

SEQ ID NO: 142976 - RNA, 75 nt, Homo sapiens
cgaaggagaaggccacagccgagacaccgacacagaacaaagccagaagccaaccgccccgccccggccggcagc

SEQ ID NO: 142977 - RNA, 72 nt, Homo sapiens
cgccaacaaaaccgaacaagacgcagcaagagacaccaaggacaccagagcggcgaggcaaccaggcaaaac

SEQ ID NO: 142978 - RNA, 72 nt, Homo sapiens
cgccgcacccggacggaccgccacgcgcccgggagacgcccgcgccgccggcccgggcccgccggccacacc

SEQ ID NO: 142979 - RNA, 67 nt, Homo sapiens
cgcccccgagaagaaggaggcgcaagagacaccaaagcgggaggggcccgccccgcaggacggaaca

SEQ ID NO: 142980 - RNA, 78 nt, Homo sapiens
cacacccgcgcgcgcccgggaggaaggaacgaggcaaggagcaaagcagcggcgcagcccgggaagcaagaaaggaca

SEQ ID NO: 142981 - RNA, 72 nt, Homo sapiens
accgccggcgcgggaaacgggcgaagcgacgagccgcgaggaggcaacggcgaagcaagacgaggaaaacgc

SEQ ID NO: 142982 - RNA, 69 nt, Homo sapiens
cggaggagcggagaaccggagcggccaacggcaggagcagagaacgaggcccacaggaaacggcccggg

SEQ ID NO: 142983 - RNA, 61 nt, Homo sapiens
gccagggcccgaagagggaagacacgcggaaacaggaacaagacgaccaacaaccaggagc

SEQ ID NO: 142984 - RNA, 77 nt, Homo sapiens
gaggacagcgcacacagcaagcacgagccaacagaccgggcgagggagcaagagaacgcgcaaaaagcaaccagacg

SEQ ID NO: 142985 - RNA, 77 nt, Homo sapiens
ggaaccgagcaacgcggccccagccgcggagacacaacaacagaggcagcaacgaccaaacagcgggggaaagacca

SEQ ID NO: 142986 - RNA, 67 nt, Homo sapiens
aaagggcaggcggaagagaaggacgaacaggagaccccacccggaggccgcgcgagcaagacgggag

SEQ ID NO: 142987 - RNA, 70 nt, Homo sapiens
acaggagaaaagccggaaagcaggcaccaccaggaaggaagagacccagacgaagagcgcacagaaagag

SEQ ID NO: 142988 - RNA, 72 nt, Homo sapiens
cgcggacccagaggaagccgccccgggagaaacggaggccaaggcaaaagacgaaaaccaccggaacggcga

SEQ ID NO: 142989 - RNA, 84 nt, Homo sapiens
ccggaaccacaccaacagcgccgccagcgcccgcccacccggagccaggcacacaggacgaccggaggccaccagccgcccggg

SEQ ID NO: 142990 - RNA, 76 nt, Homo sapiens
cgaaacgccacaggaccccacacagcagcaccagaaaggagcaggcaggaagacagaacggcagcacggaaagagg

SEQ ID NO: 142991 - RNA, 73 nt, Homo sapiens
agaacaacgagagagagcaaaaacaccagacaagacgaaaccgaaagccagagccccgcgagaccaggccagc

SEQ ID NO: 142992 - RNA, 99 nt, Homo sapiens
ccaagaaaacaagaaagaacaagagagaaggggaaaaacggcggcagggaaaaccacggaggaggcaaggaggccacggggccgaagacaccaaccggg

SEQ ID NO: 142993 - RNA, 74 nt, Homo sapiens
cccggaggcaaagggaagccggaagaacaacgccagaaagaaagccaccagagagggcagccggggagaagaaa

SEQ ID NO: 142994 - RNA, 77 nt, Homo sapiens
caccggagcagcagcgcccgccccgcagacgcccggaaacgaccacgccaggggaaagcacgaagggagcccagcga

SEQ ID NO: 142995 - RNA, 76 nt, Homo sapiens
ggaggaggaggggagaggccggaggacaccaacaggaagagcagccccgaggcggacccacacaccgagaggcacg

SEQ ID NO: 142996 - RNA, 63 nt, Homo sapiens
gcagaaagagaccgcagagacagccaacacggcacccacaggaggacgggcagagggagaggg

SEQ ID NO: 142997 - RNA, 77 nt, Homo sapiens
cggagcgggcacggagcgggcgcgcggagggaggaagaagagccaggccaggacagaagcacggaaggagggccaac

SEQ ID NO: 142998 - RNA, 73 nt, Homo sapiens
cgggaacgggcagggaacagcggacaagaagaagacagaacgcccccaccaccgcaaacagggccagcagaaa

SEQ ID NO: 142999 - RNA, 68 nt, Homo sapiens
gcgacaacaaccgcagagagccacggcacagcgccacaggaaaccgggaaccccagcgggccaaagca

SEQ ID NO: 143000 - RNA, 71 nt, Homo sapiens
agaggaggggaagccagaacagcaccgcaggacgaaccaaggacaaaccggcgaccacacacggggacgac

SEQ ID NO: 143001 - RNA, 55 nt, Homo sapiens
caaaagcaacaaagaggggacaggcacccaccgcaggcaagaacagcagaaacaa

SEQ ID NO: 143002 - RNA, 58 nt, Homo sapiens
cccaagccagaaccgcgcgcaccgcgaccgccccccccccccaccacaggaaccccag

SEQ ID NO: 143003 - RNA, 77 nt, Homo sapiens
gcggccacaacccaacggcgagcgggaaagccgaagaaaggagggcgagagcacggagcaggggccgggaagcagag

SEQ ID NO: 143004 - RNA, 76 nt, Homo sapiens
cgccaccaggcgcagcaacaccagcaacaggcccagccagggcacaaccggccagccacagcgcggcccggaaaaa

SEQ ID NO: 143005 - RNA, 104 nt, Homo sapiens
aacagagagggaagaaacaccaagggccagacccgacgggagaggggcgacagggcccaccggacggaaagcagaagagaaggaagaggagacaaaacgccgcg

SEQ ID NO: 143006 - RNA, 74 nt, Homo sapiens
gaagaaacccgcggaaagaaagccggaaaggaacagaagacagagaagaagcagaagaagacaaagcagcaaaa

SEQ ID NO: 143007 - RNA, 66 nt, Homo sapiens
ggccaccacgcaccacacaggggcggcgaaaacacccacgccgcagagagaaaggcgagcgaagac

SEQ ID NO: 143008 - RNA, 81 nt, Homo sapiens
ggaacaacacacagaagccaggaggaggaaaggcaagccgaccgaggggaggcagaacagcagcgggcggccgcaggaaga

SEQ ID NO: 143009 - RNA, 55 nt, Homo sapiens
aagcacacaagagcggcgaaggagcacgaagaagcaggcgcaccgggggggaccc

SEQ ID NO: 143010 - RNA, 60 nt, Homo sapiens
cccgcggccgcccgagcaggaggacgaacagagagaaacagcgggaaacaaggacaaggg

SEQ ID NO: 143011 - RNA, 60 nt, Homo sapiens
cgcagaccgagacccggacagggcaggaaacagggccccgggcgcgggagccagccgaag

SEQ ID NO: 143012 - RNA, 79 nt, Homo sapiens
ggcaccagcgccagcccccaccacagcggaaaagcagcggcagccccgacccagcacgacggaaacagagacaccaagc

SEQ ID NO: 143013 - RNA, 38 nt, Homo sapiens
gacaccaggaacccaaggcagaaggcggcagcggagca

SEQ ID NO: 143014 - RNA, 71 nt, Homo sapiens
caagggccaaaccgagcggagaacgccacagccgcgcaaaaacagagaagcacaccgacaaaagggaggag

SEQ ID NO: 143015 - RNA, 74 nt, Homo sapiens
gaccaccgaggagacaagcggagcgagcgaagcccaggaaagcgccgacagcccggggcagcgagccagcaccg

SEQ ID NO: 143016 - RNA, 56 nt, Homo sapiens
gggaaacacgggccacaggggggcaggccggaccgaaggacaggagaagggcagca

SEQ ID NO: 143017 - RNA, 71 nt, Homo sapiens
cagccgcggcggagacgcacaggcccggaaggggacaaaacccacgaagcaaagcgcaacaagcacccacc

SEQ ID NO: 143018 - RNA, 75 nt, Homo sapiens
caggcccaggcccagcgggccccgaggccccagaccaacaaccccacgaggcaacagcaagagaaaagcccacag

SEQ ID NO: 143019 - RNA, 77 nt, Homo sapiens
cggaggccccagggaagcgcagaaagcaggcgaacccgcggcgcaaaacggggccaagggcccccagcggccgacag

SEQ ID NO: 143020 - RNA, 73 nt, Homo sapiens
agcagcaagggcaacaaagagaaaagacacagacgacccagaacgaaggaaggaaagacgagcaggaaaagca

SEQ ID NO: 143021 - RNA, 84 nt, Homo sapiens
aggaagacggccagggaaccaaacagcagagcagggcagccgggccaggggcccccaggggacaagggccaccaggaacaagga

SEQ ID NO: 143022 - RNA, 61 nt, Homo sapiens
caacccccaacaccaacacccagacggaggccaagaagaagcaaccggagagaggaaaaca

SEQ ID NO: 143023 - RNA, 75 nt, Homo sapiens
cgaagaaggccggcaacccacacaagcgaaggcgcgcaccggaagcaccagcgaggaagaagacgggacagggag

SEQ ID NO: 143024 - RNA, 53 nt, Homo sapiens
aaaggccgaccccagagaacggcaacgaaaagagacacgacgcaaacccccaa

SEQ ID NO: 143025 - RNA, 77 nt, Homo sapiens
ggggagcacaccacacggacacccggcaggaccacaaagaagggaacagcaagaggcaaaagcgcgagggacagcgc

SEQ ID NO: 143026 - RNA, 65 nt, Homo sapiens
gacagcgagaacaaaggagagaggaccacccagaggagcaacgagggagaggcgcacacaggaaa

SEQ ID NO: 143027 - RNA, 67 nt, Homo sapiens
caccacaagggacgagaccaaacggaagagcaaagcagacagcgacaagagaagagcgacacccaac

SEQ ID NO: 143028 - RNA, 79 nt, Homo sapiens
cccaggcccacaaccagcccagcagcagcaagcagggggagaggcaccagcaacagaccaaccgcagcaagcacagaga

SEQ ID NO: 143029 - RNA, 77 nt, Homo sapiens
gaagaggaggacacgacccagggcgcggggaagaggcccgcgggcaccaggaccaacgggaacacaacgggccaccc

SEQ ID NO: 143030 - RNA, 83 nt, Homo sapiens
gggacgaccccgaacccaggacagcaccaggcccaggacagcacgagcgccgcccaagagagagaagagaggcgcgagggcag

SEQ ID NO: 143031 - RNA, 82 nt, Homo sapiens
caagaggaaaaagcagacgaaaagggcaggagggaccagacagcgcagcccgaggagcggcccgacggccaggaggcgaaga

SEQ ID NO: 143032 - RNA, 100 nt, Homo sapiens
gggacaacagaagcaccagaaagcaacggcaagcagagagaacagaggagcgaaagccacgagaaagagaagaagggacagcccgccccccaaggaagcg

SEQ ID NO: 143033 - RNA, 69 nt, Homo sapiens
aaagaaggcggccaggccaaccgaagaccggagagaacagaaaaaaagcggcccgggaccaggaaagac

SEQ ID NO: 143034 - RNA, 68 nt, Homo sapiens
gacaggccccccgccagagcaagggcagacaaacaaaagaggaaacacggcacgcccagggccgcgcc

SEQ ID NO: 143035 - RNA, 52 nt, Homo sapiens
cagaacgagagccagacaggcccagcaagggggacccaagaagaggcagaca

SEQ ID NO: 143036 - RNA, 73 nt, Homo sapiens
acagaacgaagagaagaagcgaggaagaccagcaaggaaaagcgaaacggccagagaaagacaagcacgagac

SEQ ID NO: 143037 - RNA, 69 nt, Homo sapiens
acaaacaccggagcacacggcgagagaaagagccagacacgccgggacaccacagcaagaggaacgggc

SEQ ID NO: 143038 - RNA, 111 nt, Homo sapiens
ggcggcccacggacgaggccgccccaggcgcccgacgcggaccccagaccaagggcaagaaagccaagagccaggagaggagcaaggcccagcgagccccagccaggccag

SEQ ID NO: 143039 - RNA, 73 nt, Homo sapiens
cggcagcacggccgaaggagacagcccagaagaacgaggaggaccgagcgaaaaaaaacgaaagagaaaaaaa

SEQ ID NO: 143040 - RNA, 75 nt, Homo sapiens
aaacaaaagaacagaaagcgagcagagcccgcgaacaagacaagaaaaagaacggggacacgcgagacaccaaga

SEQ ID NO: 143041 - RNA, 72 nt, Homo sapiens
gcacgggcgcgccaagggcacagagggagaggggacgaagggaacccgccgggcggcccggcacccagcccc

SEQ ID NO: 143042 - RNA, 73 nt, Homo sapiens
ggggcccacaccgcgcacaggaacacgggcagaagacccgagcggcccgagacaaggggacccagagcaagcc

SEQ ID NO: 143043 - RNA, 74 nt, Homo sapiens
cggaggaagcaggaaggaccacccaagagcgcccccgagggaagcaaggggccgagaacaagaagagaagaccg

SEQ ID NO: 143044 - RNA, 54 nt, Homo sapiens
cggagaaaaggccaagaaggcaggggcacgcacaccccccggccccgaagacca

SEQ ID NO: 143045 - RNA, 87 nt, Homo sapiens
cccagaggaggaagccccccccaccagccaaaagaaacccccaaaaccggaagaaagagaaggaacagaggacacgcacaccacaga

SEQ ID NO: 143046 - RNA, 81 nt, Homo sapiens
ccaggagcgcccacgagaacagagcggcgacgaaccagcgagaggagagagggggcggggccgacaaaacagacggggcgg

SEQ ID NO: 143047 - RNA, 64 nt, Homo sapiens
gcggccccagaacaaaggacagaggagccagcgccacaagggagcccacagggggggcgggcag

SEQ ID NO: 143048 - RNA, 64 nt, Homo sapiens
caagggacccaccccgaacacgaggaaaaacccaaccgagaaaggaagagcccaggaaggagcc

SEQ ID NO: 143049 - RNA, 77 nt, Homo sapiens
gacagagacagagcagcccaggaaagggccgagaaagaagagaggaagaagaggaggaggaggaagaggaggaagac

SEQ ID NO: 143050 - RNA, 49 nt, Homo sapiens
acgcagacgggaagagaagaaggacagacaacgaagagaagagccgcac

SEQ ID NO: 143051 - RNA, 89 nt, Homo sapiens
gcaaggcaagaccgaacagaaggaacgacgcggaccagaagccagagcgaggacgccggcaggggcacgagggagaggccgagaagaaa

SEQ ID NO: 143052 - RNA, 81 nt, Homo sapiens
gaaggaacagagccacagagaaaaagacgccacaacagaagagccagagaaaacacagcagcaagaagaggccgaagcggg

SEQ ID NO: 143053 - RNA, 73 nt, Homo sapiens
ccccggccgccccccagaccgggacagaaggcaaggggcgggccaagaagagcggagaagcagcccagcgggg

SEQ ID NO: 143054 - RNA, 74 nt, Homo sapiens
gggagcaaggagggcgaagagcgaggagggcaaagaccaccacaaagagaagaacgggagcggcagccaagaag

SEQ ID NO: 143055 - RNA, 70 nt, Homo sapiens
ggagaaggcgcaacgcggcgcaccggcagacgccggaggcgaaaccaaaaccggaggagaagaacagcag

SEQ ID NO: 143056 - RNA, 69 nt, Homo sapiens
ggacacagacggagcaaacccccagggaagaaggagaaagggccaaccccgaagaagcaaacagaaacg

SEQ ID NO: 143057 - RNA, 62 nt, Homo sapiens
acaaacgccgcaccaggcgagcagcgcccccgagcagccacagcagggaccccacgaaagcc

SEQ ID NO: 143058 - RNA, 92 nt, Homo sapiens
ggcaagcaccagagagggcggcagcagagaccccggggggcaacaagccccaacagcagggaccaccagccaggcaggccaaacacaacagg

SEQ ID NO: 143059 - RNA, 75 nt, Homo sapiens
gaaggaccaagaaccagaaaccagggggagaccgcaccaggaggaaaacagagacaaagacaacgaaagagacag

SEQ ID NO: 143060 - RNA, 55 nt, Homo sapiens
ccgggaacccccacgcggccagcgaaaacgcccagcaaagcagcccgaggaggca

SEQ ID NO: 143061 - RNA, 44 nt, Homo sapiens
gaaccagagcccacaacccgacagagccgcagccaagccccagg

SEQ ID NO: 143062 - RNA, 83 nt, Homo sapiens
ccaccagcaccccgggaccgggaaacaagacgaagcaaagcgagaggagaaggagcgagcgagcggccagcaacagccacccc

SEQ ID NO: 143063 - RNA, 34 nt, Homo sapiens
aacacacgcagaacaggaaacggggacagaagaa

SEQ ID NO: 143064 - RNA, 74 nt, Homo sapiens
cgagcaaccagaggaggacgaccggaacgacaaggaaaggagaagcacaagaagacaagggcccagaaaccaca

SEQ ID NO: 143065 - RNA, 77 nt, Homo sapiens
acaggagaacgccgggagagaacggagcagaccgcaggcccgaggagcagcccaacagagcaagggcagggcgccca

SEQ ID NO: 143066 - RNA, 110 nt, Homo sapiens
cgggacaaaagcagaaaacaaagcaaaacaccagagaaacaccacccacaggagaaccggagagagcacccaccacggaagagaaagaagaaggggaagccccagcaaag

SEQ ID NO: 143067 - RNA, 71 nt, Homo sapiens
gaccccagacccaaacaacggcagaagcagggaccccaccaccccagaccacccagaagacaaagacacgg

SEQ ID NO: 143068 - RNA, 87 nt, Homo sapiens
gccagcgacggagagggcagaagaggaggagaggggaaggagaacaccagagaaagcgggaacaccaaggcgcaaagacagcgcaag

SEQ ID NO: 143069 - RNA, 55 nt, Homo sapiens
cacaaaggcgcaaccaagaaaggcgggagacaggaaaggaaaacagggcgggagg

SEQ ID NO: 143070 - RNA, 81 nt, Homo sapiens
gcggagccggccccaggcagcgggcggcgccagcggagaacagcccgaccacggccgaaaaacgcgggaacgaagcacaaa

SEQ ID NO: 143071 - RNA, 81 nt, Homo sapiens
acccaggaacaagacgacaggccgggcaaggccacaccaaacccagcacggggggcgagagggaggacccgagcccaggaa

SEQ ID NO: 143072 - RNA, 72 nt, Homo sapiens
caaacagccaccaacaacagccaagaggcacaaaggacgcgaagagcacccagccaaacccaggcccgagaa

SEQ ID NO: 143073 - RNA, 60 nt, Homo sapiens
caccccccccccggagccaccggaaaacgacagaagcaacagacacagccagagacgggc

SEQ ID NO: 143074 - RNA, 91 nt, Homo sapiens
caaccccagccgaccgagcccaggagcgccacgcgcggaaggcagcgcccagcagcgcaggaccaggacacagaccggaaaccgaggaggc

SEQ ID NO: 143075 - RNA, 75 nt, Homo sapiens
gcagcgcccagcagcgcagagagaacacagggcacgggaggccgcgcagggagaagagcgggaagagggccacag

SEQ ID NO: 143076 - RNA, 79 nt, Homo sapiens
ggcacacccaccaagcacccaacagaagaagaggccaggcaccaacgcggaacaggaggaggaccagaagccagcaagc

SEQ ID NO: 143077 - RNA, 78 nt, Homo sapiens
cggcccacagcacccaagaagaaggagccccacaggaaggaacggaagaagccgggaccgacaagaggcagaaagccc

SEQ ID NO: 143078 - RNA, 90 nt, Homo sapiens
gggagaagaagcaagccccgcagaagagaaaccgaagcccaccaccaacagcaaaggaagcaggaaacaggcaaaggagcgacagacagc

SEQ ID NO: 143079 - RNA, 71 nt, Homo sapiens
agagccgggcgacccaaccaagggaccaggggagaaagaaaacacgaaacaggaaagaaaggaaaaaaagc

SEQ ID NO: 143080 - RNA, 74 nt, Homo sapiens
gggcacccacccgcaggacaacacgcagcgaaggaggaggcggaggagaggaaaacccaaggagcgcgacagga

SEQ ID NO: 143081 - RNA, 70 nt, Homo sapiens
ggaaagaacaagcgcacgacaagccaagaacgcgacgcacaaggaaaaacagagagaaaggccgagcaac

SEQ ID NO: 143082 - RNA, 70 nt, Homo sapiens
ccggacggagggagaggcgccagcccaccagagggcgaaccaaagaaggaaggcgacccaaaaccacgaa

SEQ ID NO: 143083 - RNA, 77 nt, Homo sapiens
gccccgaccagcccgccacagagcaggaaaacaagacgccagaccaagagggacagggaggacccagaagaggccgg

SEQ ID NO: 143084 - RNA, 50 nt, Homo sapiens
cggagacagcgagacccgccaggagcaaagaacgaggaaccccagagagg

SEQ ID NO: 143085 - RNA, 83 nt, Homo sapiens
caaaaaagcaggccaggagagagcagcccacgcgagagaaacacaaccgagggcccggggagagggcgaagaacgaaacgaaa

SEQ ID NO: 143086 - RNA, 58 nt, Homo sapiens
ggaggagaaggcaggaagagccaaggagacaacagggaccgaaaacaaggacacgagg

SEQ ID NO: 143087 - RNA, 71 nt, Homo sapiens
gggcgaaggcaggaaccaccaggagggacgccaacaggaggaccgggcggaaggacgcgcggaagaggggg

SEQ ID NO: 143088 - RNA, 76 nt, Homo sapiens
agaaggcgccaccaggcggcgcccccgcagcccgcacccacccacgacaggacggacccggaagggcacggcagaa

SEQ ID NO: 143089 - RNA, 72 nt, Homo sapiens
caccaggaaacacaggccagacaagggcaaaggaggaagaacggggaggaagggaaccccaccgggaccaga

SEQ ID NO: 143090 - RNA, 84 nt, Homo sapiens
aaacgcggcgacccgaggaggaaggcccgcgggcccaaggaccgcgaggagcgagagaccaacgggcaagcaaccgaggagaaa

SEQ ID NO: 143091 - RNA, 80 nt, Homo sapiens
acaggagagcgggagacacaggagaagcagacccaaaaacccccgaaagaccgaggcgagacagagggaaagaaccacca

SEQ ID NO: 143092 - RNA, 70 nt, Homo sapiens
cccgaggacgaaccaccccgcgccagcagcacagcacgccgcaacaccgacaaaaaggagcaacggacag

SEQ ID NO: 143093 - RNA, 78 nt, Homo sapiens
ggccacggagcaccagccgccccagacaggggaccgaggaagccacgcccccagagcagcagcgaaaacggccaacag

SEQ ID NO: 143094 - RNA, 73 nt, Homo sapiens
ccaaacgccagagaaaagaggaaggacgcagaaacgggcaccgcagccaggcgagaggaagagagcgaaacac

SEQ ID NO: 143095 - RNA, 39 nt, Homo sapiens
cccaggccccgacgccccgagccacccgcgagcggcccg

SEQ ID NO: 143096 - RNA, 71 nt, Homo sapiens
agagaaacggaggaaacgacgggccaagaggggcagagacaagaagcacaacaaccaaacaacccggagcg

SEQ ID NO: 143097 - RNA, 78 nt, Homo sapiens
aggaacacagagaccacacagagacacgccacccaagggagaagaacccccacgaacaaccgaacccaacaaaggcgc

SEQ ID NO: 143098 - RNA, 77 nt, Homo sapiens
aggaggaaaacacagcagcagcagcaaacaccaagagcgaagcaaaccagaagcaaccagccacccgggcggaacaa

SEQ ID NO: 143099 - RNA, 73 nt, Homo sapiens
aaaaggcggcgcaggagcccggacagccagcacgacgaaggagaacaaacggagccaagaaaaaggagcccca

SEQ ID NO: 143100 - RNA, 66 nt, Homo sapiens
ggccaaggccaaaagccaaagcggaaccaacggaacggacacgagaagagcacgaaacaggacaga

SEQ ID NO: 143101 - RNA, 62 nt, Homo sapiens
gagaaaccggggaaccacggacaacccagaggacaacgaaggcggaccgaaaagacgcggcc

SEQ ID NO: 143102 - RNA, 85 nt, Homo sapiens
cccccacgccccaccacaacaaacgaggaaccagcacaagacaacaaccagaaggaaggacacaaaacaaggccaaagcagcaag

SEQ ID NO: 143103 - RNA, 58 nt, Homo sapiens
caaaggggaggacagacaaacagaacgagagccacaggggccaggaagaagaggacac

SEQ ID NO: 143104 - RNA, 61 nt, Homo sapiens
gcaggcgagacgcagaggcaggaggagcaagcacaacaggccgaagaggccggagaaggac

SEQ ID NO: 143105 - RNA, 73 nt, Homo sapiens
gggcacaaccaccagggagcacggaagaccaggggagagacaggcgccagacagacaagcaccaaaagaaaaa

SEQ ID NO: 143106 - RNA, 79 nt, Homo sapiens
caacaaagcagaacacgacaagggagccaacgaaaaccacaaaaccagcacagcggagagcaagacaacgacagcccga

SEQ ID NO: 143107 - RNA, 82 nt, Homo sapiens
gggggccccagcaccgcaaccaccgccaccagccacggagggcagagagcggcgggaggggaaggagcagccacccgggcag

SEQ ID NO: 143108 - RNA, 78 nt, Homo sapiens
ccagcaaaggggccacagagacggcagaagcggaggaagcccggagacaaggaccgcccaagggacgggccaacgggg

SEQ ID NO: 143109 - RNA, 71 nt, Homo sapiens
aaaaggccgacaacgagggagaagcacaagacagcacagagggaaagcccgaaaaggaccagcgaagcaag

SEQ ID NO: 143110 - RNA, 86 nt, Homo sapiens
gcgccaccgacgccgcccaccggcacagcggaccccgcccgaacaacggcaagcggagaagagcaaggccgaaccgagaggaaggg

SEQ ID NO: 143111 - RNA, 78 nt, Homo sapiens
gccccggccgcggggcccggcgaagggcagagaaagagcgcgcacgaaagcacacgaaaaggaaggaaaaacgcagcg

SEQ ID NO: 143112 - RNA, 67 nt, Homo sapiens
aggcccaacgagagccaccaagcggaccagaacaaggacgagcaacaaagaacgaacccccaaacgg

SEQ ID NO: 143113 - RNA, 52 nt, Homo sapiens
gggcaggccggccacagacaagaaggccgagcaaccgggacaggcccagaag

SEQ ID NO: 143114 - RNA, 81 nt, Homo sapiens
cagcccgggcagcgagcgcaaaagaacccgcgacgccaacagaggagaagaggagaacagcaagcccaaaaaagagcacgc

SEQ ID NO: 143115 - RNA, 79 nt, Homo sapiens
gcgcccccgagaccccgcggaacgcccaccgcggagagcagcacgaccccagcacagacacgagaggcgagggacgaca

SEQ ID NO: 143116 - RNA, 93 nt, Homo sapiens
cccgcgcgaggggagcgcgacaaccggccgaggacacagcgccccgggagaaggcccggccaggccccaccgccacaagcaggggaacaccgc

SEQ ID NO: 143117 - RNA, 76 nt, Homo sapiens
ggcaaaagcaaaaggaagccaggaacagaacgaacaggccgcgaagaggaaacaaaagcgcaggagagaccaggcc

SEQ ID NO: 143118 - RNA, 73 nt, Homo sapiens
cgccgaagaagcacgaaagccccacccgccgcagcaagcagagagacaggggaaacgaacaagaaagaagagc

SEQ ID NO: 143119 - RNA, 71 nt, Homo sapiens
agggcagaacgaacaggaacaaagccagacgggaagaagaccaagggagcagaaaccaaggaggaccggcc

SEQ ID NO: 143120 - RNA, 81 nt, Homo sapiens
cggcggagcgccagagcgccgaaggacggccaccaggacggccagcagaagcaggcgagccccccgagaaaaagaagaaac

SEQ ID NO: 143121 - RNA, 81 nt, Homo sapiens
cgaacaggaaacaggaagccgggagagaaacacagagccaaaagccagacggagaaggaaagcacaccggagagaaagaaa

SEQ ID NO: 143122 - RNA, 72 nt, Homo sapiens
gggacggacagccggccaggcccccgcgagaaacaggaccgacgaagaaaacagggagaaaggcacggacag

SEQ ID NO: 143123 - RNA, 79 nt, Homo sapiens
gcagcaccaggccagagccagaacaggagagagccgaggggcagaaccagagagcggccaggcggaaggagcgagagca

SEQ ID NO: 143124 - RNA, 86 nt, Homo sapiens
cagagggaggcgcagacgggagccgggagccggcagggacgcggagccccggaggccgcggcggacggacaccggaggccaccaca

SEQ ID NO: 143125 - RNA, 85 nt, Homo sapiens
gccgccgccgccccacccggggcaggggccagggccagacgccgcgcgcgacaaggccccaacaccaaacacagaagcaacagcc

SEQ ID NO: 143126 - RNA, 83 nt, Homo sapiens
cggagccgacgggcacgggaccccgacaaggaagaccaaacagccaaaagcacaagcgacacaccagaccccaccacccaccc

SEQ ID NO: 143127 - RNA, 75 nt, Homo sapiens
caagcgccgaacggaccgggggaaacaaaaacgcacacaacgacccagcaaaccagggaacaaccaaagaacaaa

SEQ ID NO: 143128 - RNA, 80 nt, Homo sapiens
gggaaagacccaggagaagccgcccaaagaacgaggacacgagcccagccaggcgagccagcgccaaagaaaaagaacaa

SEQ ID NO: 143129 - RNA, 59 nt, Homo sapiens
ccaaaagcgccagcaaacccgcagacgaggcgaggaaccaaaggccaccccgccgagcc

SEQ ID NO: 143130 - RNA, 77 nt, Homo sapiens
agccaggggccgccgccgggagcggggcggcacggggcgggggcaagggcgcccgcgggaaccagagacgcgaacac

SEQ ID NO: 143131 - RNA, 55 nt, Homo sapiens
acaacccccggaccggaggagagggaaaaggccaaaaccagacgagagacagaag

SEQ ID NO: 143132 - RNA, 82 nt, Homo sapiens
aaggcagacagcgagggcgacgagggcgagcaccaaagccaaggaagcccagaagaaagagcaccccccggaagcagcaggg

SEQ ID NO: 143133 - RNA, 72 nt, Homo sapiens
gcccgccagccccaaaggcgggaacagggaagccacgggccggcccaggaagaaagagacggggcgccaggg

SEQ ID NO: 143134 - RNA, 74 nt, Homo sapiens
caccggaagcgacgggacgccaggagacgagccccgggcagggggagagaaagagcaagcgcccccgaaggacg

SEQ ID NO: 143135 - RNA, 73 nt, Homo sapiens
ccccaggaccccaccccaagggagggggcccacggggcagggaagagcacaagcgccgcgcgccacgacacag

SEQ ID NO: 143136 - RNA, 73 nt, Homo sapiens
gccccccacacaaggacaggaccgcaagcccgcagggacgaggccccaaggccaaaacagaagaggcaaagcc

SEQ ID NO: 143137 - RNA, 87 nt, Homo sapiens
ccgccgccaccaccgccaccggaacccgagaccgagcagaacccgaggcgcggcggcgagacgcaaaagaggagcgccaccagagcc

SEQ ID NO: 143138 - RNA, 59 nt, Homo sapiens
gagaaggggaccgggcgcgggcaaacaggcgcagggggcccccgcccgaccgacaggcc

SEQ ID NO: 143139 - RNA, 75 nt, Homo sapiens
ggccccaaccacgcggcgcgagccccgcccccgccgccgcgcacaaccgcacggcaggcgcaaaaaccagacacc

SEQ ID NO: 143140 - RNA, 88 nt, Homo sapiens
ccggagccgaccgcacgcgggcgcgagaacggccgcccgccgcagcggaggagagcggggcccagaccccccgcggacgagcgaccca

SEQ ID NO: 143141 - RNA, 68 nt, Homo sapiens
gagcgcccggggcacgcccgcggccgccggacggccgggcgcggaggaaggggaggagcacagaacgc

SEQ ID NO: 143142 - RNA, 68 nt, Homo sapiens
gggcgggccgggcagggcggaggccaacaccacgacgagggcaagccagccaagcaggccagaagagc

SEQ ID NO: 143143 - RNA, 73 nt, Homo sapiens
ccacacaacccaggcaaccaacaggcccaaccaggaaggagacgccaggaggccagggcagcaccgggcagcg

SEQ ID NO: 143144 - RNA, 57 nt, Homo sapiens
ccgcgcgagaccgcccagaggggcccaccgcgcccaacaaccgaacccaacaaaggc

SEQ ID NO: 143145 - RNA, 87 nt, Homo sapiens
cgcgaccaggccgggcaccccgagcgcaaggacagcgcgaggccgcgcagcccagcgcagccaaacaccagcaggaaaaaagagcgg

SEQ ID NO: 143146 - RNA, 77 nt, Homo sapiens
aaccgggagcaccagcgcgccacgacccgcagacaagaaagaaacccaaacagcccggaaacccaggagagaagaga

SEQ ID NO: 143147 - RNA, 65 nt, Homo sapiens
caggcagcaggaagcacggcgggcgaaacagggcgaacgaccccggccccccaccacccaacccc

SEQ ID NO: 143148 - RNA, 67 nt, Homo sapiens
ccacgaccggcggggcgcgccaaggacacggcacaccgaccgacggaggcacccagccaacaccgga

SEQ ID NO: 143149 - RNA, 71 nt, Homo sapiens
aaagcccacagccggacgggccggggaaggagcaagccagagccgaggagcacaccaaacagaagcgcagg

SEQ ID NO: 143150 - RNA, 65 nt, Homo sapiens
agcggaccgagagcgcgaaacgcacgagaaggaacaccccgaagcaagaaagaacggaaaaaaga

SEQ ID NO: 143151 - RNA, 79 nt, Homo sapiens
gggggcccgacgcacacgggggcggacaccacaagaagggcgccagcaacagaagaaccgaaggcaggggagccaaccc

SEQ ID NO: 143152 - RNA, 70 nt, Homo sapiens
acaccggcacccagcaccacccggaggagaccggcagcagaaaaaaaacagggcgaccagcggaagagcg

SEQ ID NO: 143153 - RNA, 74 nt, Homo sapiens
aaacgcaaggagaaacccaagagcagcggcaggaggcccagaagaaacaaggccaagccaggcggaggcaccca

SEQ ID NO: 143154 - RNA, 69 nt, Homo sapiens
aacgccagcagagaggagagacggaaaaggggacaaagacccagggcaggcgggccagagaaaaaagag

SEQ ID NO: 143155 - RNA, 82 nt, Homo sapiens
cggcaggacgggccggggggacacgcgggcgccacagaccgggccaaacaacccaggaggaagagacacgcggagggaggac

SEQ ID NO: 143156 - RNA, 75 nt, Homo sapiens
ggcagagggcaggaccgcagggccaaacacagaagggcgcccccccggcaccgcaccagccggcgcggagcaagc

SEQ ID NO: 143157 - RNA, 62 nt, Homo sapiens
gagaggacccaacaggggcagaagcgaaacccaaaagaacccgccaggcaagacaggccaac

SEQ ID NO: 143158 - RNA, 79 nt, Homo sapiens
caaaagcgcagcaagacggccgcgcggcccgcagggcaggccgcagaccaacaaaggggcgcaggccggccaagaacca

SEQ ID NO: 143159 - RNA, 58 nt, Homo sapiens
gcccaacccccaccccgcccaaggaggcccagcgaaagaccccacccaacccccgaga

SEQ ID NO: 143160 - RNA, 55 nt, Homo sapiens
aagcaggcacgcaagaagaaggagcaggggagcagcaagccgggaaacagcgcgc

SEQ ID NO: 143161 - RNA, 71 nt, Homo sapiens
ggcccgaggcggcgagagaggcaggcggagccgaccgggccagaaggccaggcaggacgacgcggagcagg

SEQ ID NO: 143162 - RNA, 77 nt, Homo sapiens
cgaggcccggacacccaaacgcagcgaacacaggcaggagaggcagcagcagagcgaacaggacgaaaggagaagag

SEQ ID NO: 143163 - RNA, 71 nt, Homo sapiens
aaagcagcggccggacagcgccacggcgggccgcgggaggacaccacccacaggggaccccgaagcaggag

SEQ ID NO: 143164 - RNA, 70 nt, Homo sapiens
gcagaggcgaagggcacgcgccagaaaagccggcagagaagcgaggaaaggcagggaaccagggagggag

SEQ ID NO: 143165 - RNA, 72 nt, Homo sapiens
acagaggaaagcacaaaggaagacgaaccggagaagagagcccaaaaggcagagcgaggagagaagaaggag

SEQ ID NO: 143166 - RNA, 90 nt, Homo sapiens
ccggcagcccaccaccacgcagcaggagaagcaccccacccaccacgagaggggccagaagaagcaggcaccgcaagagagaccgcggga

SEQ ID NO: 143167 - RNA, 71 nt, Homo sapiens
acagggaacccgcagcgagccccagggcgaaaagaaagaagcaacacgcaaaaggcaagacagggccaaac

SEQ ID NO: 143168 - RNA, 70 nt, Homo sapiens
aaggggcaacaagaaaggcccgaagaggcacaggagcgaaccgccgacggacccagcagaaggacaagaa

SEQ ID NO: 143169 - RNA, 76 nt, Homo sapiens
gaggagaacagaagccagccgacaagggcagaacgaacaggaacaaagccagacggccaaaacggaaaacgccgac

SEQ ID NO: 143170 - RNA, 80 nt, Homo sapiens
accgagaacaagcccagaccgcgggggccagacagcaccggcaagaccacccacaggccgagacgcaccagagccggacc

SEQ ID NO: 143171 - RNA, 85 nt, Homo sapiens
caggggaagacccaaaggcagcaaaaacaagagccccaaagcagccaaaagacgccaaacgcgaaagggagaaagaagaacgccc

SEQ ID NO: 143172 - RNA, 80 nt, Homo sapiens
gggacccgaaaaaacaaaacaaaagaacagaaagcgagcagagcccgcgaacaagacaaggacaggaggccagggcacgg

SEQ ID NO: 143173 - RNA, 69 nt, Homo sapiens
ccccaggcgagccgacagacccgccgcaagagcacaaggggaggaacagaacgaggaaccaccgagagc

SEQ ID NO: 143174 - RNA, 78 nt, Homo sapiens
cgcggagaaagagaccaccgaggcgacgccggaccgcgaagagacgagaggggcacggaaggggagagggacggggaa

SEQ ID NO: 143175 - RNA, 51 nt, Homo sapiens
cgccgcggaccgacaacccagcaacgggagcagaaggaaaaaaaagcagaa

SEQ ID NO: 143176 - RNA, 41 nt, Homo sapiens
ggcggcagcaccacgcgcgagagcacaacgaagagaagcgc

SEQ ID NO: 143177 - RNA, 77 nt, Homo sapiens
ggaccagcgagcagagcggacgcccccaggagaaacgaggagcgcggccaccccccggaagaaaggaaagggcggca

SEQ ID NO: 143178 - RNA, 73 nt, Homo sapiens
ggagaaagagcccccagccgggccgggagccggcggaacgagggggagaagccaaaaggacaggcagagggcc

SEQ ID NO: 143179 - RNA, 76 nt, Homo sapiens
gaagcagaacgacaaaagccaagggcaaacggaccgaacggagaagacaacagcaagcagaaacacccgaggaaac

SEQ ID NO: 143180 - RNA, 82 nt, Homo sapiens
caccgccaagcccggggcaacggccgcaacgcgaacccgaggaaaggaggccaacagaaagaacccagcaccgcaagcccac

SEQ ID NO: 143181 - RNA, 74 nt, Homo sapiens
aacccgaaaaacgagacagcccaaggcggaaaagcgaaggaagccacaagcacagcccacacaaaccagaggag

SEQ ID NO: 143182 - RNA, 69 nt, Homo sapiens
cagcaacccgagccaagcaggaaggcccagcaaagagaagaagggacaaaggaaaaagaggaggaaaac

SEQ ID NO: 143183 - RNA, 62 nt, Homo sapiens
cgagacgggacacgccaccccaccaggcaggggagaaggacggcagaaaacgagacgccggc

SEQ ID NO: 143184 - RNA, 54 nt, Homo sapiens
gcccgggagaagaggcggcgaaagaacagaccaggagcagacaggacggcaaag

SEQ ID NO: 143185 - RNA, 77 nt, Homo sapiens
cagcccggaggacacgaacacaccggagggggaagggaagcgcgggaagccgcgacagggcgggagaacgccgcccg

SEQ ID NO: 143186 - RNA, 89 nt, Homo sapiens
gccgccgcgggcgccgggagcgagcgggagggagccgcgcgccggcgcgcgccgagcgggcacagaaagcgagagagccaaagacgaga

SEQ ID NO: 143187 - RNA, 76 nt, Homo sapiens
ggaacacacaggaggaagagaacggggacaagaaaagaccagcgagcaggaaccgcggagcagggaaaaacccaca

SEQ ID NO: 143188 - RNA, 70 nt, Homo sapiens
accgccccgcaagaccaggacgcagcagccccgcgaagaagagaacgggcccgagaaacgcccccgagac

SEQ ID NO: 143189 - RNA, 72 nt, Homo sapiens
gagaagaccacaggggcagccaggccggggacgccggcacccgcacaacccagggggccgaacccagaccaa

SEQ ID NO: 143190 - RNA, 75 nt, Homo sapiens
gcagaagaaccacgcagagcgagcggaaacccccacgggcgcaaaggaacaggaggcccggacccccagcacaag

SEQ ID NO: 143191 - RNA, 81 nt, Homo sapiens
cacgaagacgaccagaacgccccagcagaaccaccacaagccagggaaacgcagagaccagagaaagcacacagcgagccc

SEQ ID NO: 143192 - RNA, 70 nt, Homo sapiens
agcgccccaggaagacaagagaacagacagcgacgagaaggccacgagggacaacccggcggaccaagcc

SEQ ID NO: 143193 - RNA, 76 nt, Homo sapiens
aaagagaagagaagagaaaggcccggagacaagcccaggaaagcgccgacagcccggggcagcgagccagcaccgc

SEQ ID NO: 143194 - RNA, 73 nt, Homo sapiens
ggagggccgagccagccgcggccggaggagcccccaggccaacagacagcgacgagaaggccacgagggacaa

SEQ ID NO: 143195 - RNA, 72 nt, Homo sapiens
gcgccccccccaagacaaaccaagggcgggggggcacaaggagggccagagaaaaacccaagacgacacgcg

SEQ ID NO: 143196 - RNA, 81 nt, Homo sapiens
ccgaggcggagcgccgagcggaagaaaacaccggagcccaagacaccaaaacagacgcaggcaagaggcagaaggacaaag

SEQ ID NO: 143197 - RNA, 67 nt, Homo sapiens
cacgaccggaggcggagaagacgacccacggcgcccgcagcgcagggcaacaagggcaaacagggga

SEQ ID NO: 143198 - RNA, 75 nt, Homo sapiens
caaccgccggcaaccccgggcggccgcaccgccaggaccgacagacaggacaccccccaaacgcaccaggcccca

SEQ ID NO: 143199 - RNA, 73 nt, Homo sapiens
ggagacacaggaacaaacgagcacgcaagaagcagccgacacgagcggcaaaaacagcgaaaggagagcacac

SEQ ID NO: 143200 - RNA, 76 nt, Homo sapiens
gaaagacacagcacaccacaaaaagaaacaggagaaccaggccgcagccccaaaagggagaggacgcagacggaac

SEQ ID NO: 143201 - RNA, 72 nt, Homo sapiens
ggaaacagcgggccagagcagccagacgggaaggaggcaaaaccggaagaccaggacaaaacagaggggaag

SEQ ID NO: 143202 - RNA, 79 nt, Homo sapiens
cggacgccacgagacccaaaccccgaagccgccagcgacccccagcagcagggaagggcggcccgagaagcaggggaaa

SEQ ID NO: 143203 - RNA, 72 nt, Homo sapiens
cccagaacagggccgggcggcccaagggaaaagcagcggccgcaagagagaacacagggcacgggaggccgc

SEQ ID NO: 143204 - RNA, 67 nt, Homo sapiens
gaccagaacgcagcaacaaagggagccagccagagagggacgggccaaccgaggcgccccaagacgc

SEQ ID NO: 143205 - RNA, 72 nt, Homo sapiens
gcccgccgcggcgcccgggaaggaaggacccgcgcgaaggaagaccgaagcaaacagcgagggcaagggacg

SEQ ID NO: 143206 - RNA, 74 nt, Homo sapiens
cgagaggaaaggcgagggaagcgccggggggagaagagggagacccgaacgaagacgcagcccagacaggaaaa

SEQ ID NO: 143207 - RNA, 78 nt, Homo sapiens
gggagcccacacacaggaccgccccggacaggaggagaaggccgccaaaaagcgaaaccggaccaagaaaaaacaaaa

SEQ ID NO: 143208 - RNA, 70 nt, Homo sapiens
gagagggaagcgcccggccggaggcaggggaaagggagagcccgaccagagaaaaggcggaagaccgcca

SEQ ID NO: 143209 - RNA, 82 nt, Homo sapiens
cacaacaacagcaacggaggcgggaccggaacaggcacaccccacacaagcacgccaagggccggcccagggagaacgcaaa

SEQ ID NO: 143210 - RNA, 86 nt, Homo sapiens
agaaggcccagcgcccgcagaaggccgagaagccacccacgccccggcccgcggccaaagaagaacaacagaggaggaaagaaggc

SEQ ID NO: 143211 - RNA, 74 nt, Homo sapiens
gcaaaccaccagcacaaaagacaacccagaaaagaaaaggccaggggcgccgaaaaacccgggaacaaacaggg

SEQ ID NO: 143212 - RNA, 74 nt, Homo sapiens
gggaaggcgccggggccagcgcagccgcggcggagacgcacaggcccgggggaacggaccaggaacaggccacg

SEQ ID NO: 143213 - RNA, 85 nt, Homo sapiens
cgggacggaccgagaccggaccgagagcggaccgagagcgcgaaacgcacgagaaggagccaggagcaggggcgcggcagaggcg

SEQ ID NO: 143214 - RNA, 71 nt, Homo sapiens
acacaggaagcggggaaaagggcaaagcccacacaaaacaaccggccgaagagcggccacccagacgaagc

SEQ ID NO: 143215 - RNA, 72 nt, Homo sapiens
gcccggaccaggagagacgccaaggggcccgcaacaccggaaccgggagaagacggccgacaaaagcagaca

SEQ ID NO: 143216 - RNA, 75 nt, Homo sapiens
cgacaaggggcccgaacagagggggagcgacaaccgccagacggagaggaaaggaggaaaggccagagggcacca

SEQ ID NO: 143217 - RNA, 69 nt, Homo sapiens
cacagcagggcagggaacaggccgagagcccaagagaacgaaagcacagaaaacaacgccccaggaccg

SEQ ID NO: 143218 - RNA, 78 nt, Homo sapiens
ggcgacgcgcgggaacaacgcgagcggcgcgcgggacgaaggacccacgaggaagcggccgcggcgaaccccagagcc

SEQ ID NO: 143219 - RNA, 72 nt, Homo sapiens
gccccgagaccacccaaggggaccgaagcggcgggcgacacggaaggagaaaccaacacaaggccgagcccg

SEQ ID NO: 143220 - RNA, 91 nt, Homo sapiens
aaacgcacaaacagaaaaccaaaagcaagaaagaaaaagaaaagccccaaagccccaggagcagcagagcccagaaccgggacaacccagc

SEQ ID NO: 143221 - RNA, 78 nt, Homo sapiens
ggccaaggggcagggacgcggagagaagcaggaagcagggcaaacaaggccaagaggccaggagcgcccggaggaagc

SEQ ID NO: 143222 - RNA, 82 nt, Homo sapiens
gccgggaagaaaagacaaacagaggaagaggaaggaaaagacaacagccaagaagcgacccgagaagagcaaagaacgagag

SEQ ID NO: 143223 - RNA, 77 nt, Homo sapiens
gcaaggacgagccggggcgcgaaggcacaagccagaagacgaaccagccaagggacaaggcagagacccccaaaaca

SEQ ID NO: 143224 - RNA, 52 nt, Homo sapiens
gcgggcacggcgcaggaaggaagcagcaaaagaccaaaccagccaaaacaag

SEQ ID NO: 143225 - RNA, 79 nt, Homo sapiens
ccccccggccggcgcccgcgccccggcggggggaagcccgcgccgccggcaccagaggacccagaagaccccagacggg

SEQ ID NO: 143226 - RNA, 81 nt, Homo sapiens
gcccccgagagcggaacaggagaccggaaagaagggagaccgcggggaaaagagaaaggccaaccaaagaccaggagaacc

SEQ ID NO: 143227 - RNA, 55 nt, Homo sapiens
gcaaaaccaaccaggccaacaggcgacggcggagccgagaagcgggaacagagga

SEQ ID NO: 143228 - RNA, 83 nt, Homo sapiens
ccgagccgccccgagcccgccgccacacccgaggcgacagacacagcaccggccccggcagcgggacgcaggacggcagccgg

SEQ ID NO: 143229 - RNA, 72 nt, Homo sapiens
cccaggcggccggacaacggcgcggcgacaaagggcaggcacgagcaaggaggagccccgaaaagcaaagaa

SEQ ID NO: 143230 - RNA, 100 nt, Homo sapiens
gaaaccgaagccccacaagccagggaagaccccgaaggaccaaggcacagagaccgccccagccagcacacccagagcccaacacccccaagacacaagc

SEQ ID NO: 143231 - RNA, 74 nt, Homo sapiens
ccccacacacccggagcccccccccccagcaggccagacaagcaaacaacggaaaggagggggaagcaacggcc

SEQ ID NO: 143232 - RNA, 78 nt, Homo sapiens
cagccgcgaccggacaacaaccggccgcggaggcgccaggagggcggcgggcagagcagagaccaaggagccaggaag

SEQ ID NO: 143233 - RNA, 72 nt, Homo sapiens
agaacccggaggcagccaccagacagggcccaggacagaaggcgggcaaggagcgccccccgagcacccccc

SEQ ID NO: 143234 - RNA, 73 nt, Homo sapiens
agacagcccgcagcacgaccagcaggaacgggagcgaagaggaaagaaagacccccgggacagaaacaagccc

SEQ ID NO: 143235 - RNA, 49 nt, Homo sapiens
gggaagggaggaagcacgcagagacagcgaacccacccaacacggcaaa

SEQ ID NO: 143236 - RNA, 61 nt, Homo sapiens
ccaagaagacagcgaaccagaccaagaaccaggaagggcgacagagcagacaggaccggga

SEQ ID NO: 143237 - RNA, 86 nt, Homo sapiens
aaagcggggacccagacccggagcccagggaagcagccgaccagccgcggagccgggggcagggaggagccgggagcccacagcca

SEQ ID NO: 143238 - RNA, 77 nt, Homo sapiens
gggggccacaccagccgggccaggcagaggaagaaagagggccacggacagaggcgcagcagaggaaccgcagaaga

SEQ ID NO: 143239 - RNA, 62 nt, Homo sapiens
cagacccaggacaacgccaacaaaccgcggggcaggacccaggagacaagagaaaaacgaga

SEQ ID NO: 143240 - RNA, 85 nt, Homo sapiens
gcgggcgcggacgcgcagcaggcggggaggacgaggggcccgggcccagagcggaagacaagacggaacccaaggaccgcaaaga

SEQ ID NO: 143241 - RNA, 71 nt, Homo sapiens
ccaagaaaagacgcaaagagacgagaaccgggaccgcaacccacagacaacaagaaaacacagcagaggac

SEQ ID NO: 143242 - RNA, 82 nt, Homo sapiens
cgaccaaggcgaacacaggcgccccgcacccaacaacccaccaggcacccgaaagagccgcagacgcacagcaaccaccgga

SEQ ID NO: 143243 - RNA, 73 nt, Homo sapiens
acccagcccgcggaggccgcggagcgccagccaagaaaaggaagaaaccaaacgaaacacaacgaccaacggg

SEQ ID NO: 143244 - RNA, 80 nt, Homo sapiens
cccgagggcccgggaggccggggagcccccgcccagccagacccaggccagagcgacaccagagacccagcccacccggc

SEQ ID NO: 143245 - RNA, 73 nt, Homo sapiens
caaaggcaccaggccaccacagaaacaaaagcaacaaagaggaacccacaggagggccagaggacaaagcacg

SEQ ID NO: 143246 - RNA, 86 nt, Homo sapiens
ccgagcgaggaggccggcgcagccccaagacagagcgcacccggcaggcgcaacagagcgccggcggaacaggagcgaccaggaca

SEQ ID NO: 143247 - RNA, 57 nt, Homo sapiens
ccggcagcaaaaggaaaagggacaggagccagcggcccaggggcgggggaggaaaca

SEQ ID NO: 143248 - RNA, 59 nt, Homo sapiens
ccgcggacagcgccgacgccggggcacggccacgcacgaccccggggcacggaggggcg

SEQ ID NO: 143249 - RNA, 77 nt, Homo sapiens
ccgcaggcacaggccgaacaggagcgacaccagagacgaagcaaaagaacccacacagcacagcaccagagcaacgg

SEQ ID NO: 143250 - RNA, 81 nt, Homo sapiens
ggacaagaccaaaggaccgccccgggaggcaccgagaggaaaggcgagggaagcgccggcagcacagcagaccgcgaagac

SEQ ID NO: 143251 - RNA, 74 nt, Homo sapiens
ggacgagaggagaaggccaaggagagacacaaggcaaagagccaggcgcacacgcaggcacaacaagaagcaag

SEQ ID NO: 143252 - RNA, 77 nt, Homo sapiens
ggaaggcaggaagcacagaagaaggaggggcagagggaaaaagaaaagaaacaagacaaccagaaggagaagaaaca

SEQ ID NO: 143253 - RNA, 86 nt, Homo sapiens
gccgaagccccagcaccgccggcggcaggaaaggacgcgccggagccggaggcagggcagcaccagagcaaaccaagacccccccc

SEQ ID NO: 143254 - RNA, 74 nt, Homo sapiens
aaaccccaggaaaccaacgccggcaacgcccgaacaggcgggccaaaggagaaacaagaaggagacaacaacgg

SEQ ID NO: 143255 - RNA, 88 nt, Homo sapiens
acaagggccggacaggcaccacgcaccgacagcgccgccaccgagccgggcccaccccccaccaaggaagggcggaccccgacgcaga

SEQ ID NO: 143256 - RNA, 92 nt, Homo sapiens
acccggaaaaaggaagcaacgccaccagaggaagcacagaagaaaagcggccaggcgagaagacagaaggagccacagagaaccccagcaaa

SEQ ID NO: 143257 - RNA, 64 nt, Homo sapiens
ggcgccaccggcgacccccccccagcaccggaacgggaacaggaaacgacaaccaggaaagagc

SEQ ID NO: 143258 - RNA, 67 nt, Homo sapiens
ggaggcacgccccgggcggcacggccacgcccggaacccgcagaaacacgacagcaccaccacccac

SEQ ID NO: 143259 - RNA, 80 nt, Homo sapiens
cgcaggggcgggaaagacccaggagaagccgcccaaagaacgggcggcaccccaccgcccagccacagccccccccacag

SEQ ID NO: 143260 - RNA, 77 nt, Homo sapiens
cccgaggcgggacacagagggacgaaacgggcgacccgaccaagccagcggggaaggcggccaaagaaggagcggag

SEQ ID NO: 143261 - RNA, 59 nt, Homo sapiens
cggcgcggcgagggagcagcaccagggaggacgccccggaaaaaggcacaaacccagca

SEQ ID NO: 143262 - RNA, 79 nt, Homo sapiens
agcccgacggggccaccgcggcggcgcccgcaccgcgcccgcaaaggcagcgggggcagagacggggaacagggccacc

SEQ ID NO: 143263 - RNA, 83 nt, Homo sapiens
ccaccaaagggggcgcgaccgagagagccaccagccaggacagggcagaccgccagcagcacagcaagccacagagagggccg

SEQ ID NO: 143264 - RNA, 75 nt, Homo sapiens
gagagaagaaggaagaacacaagggaaacgaggagccgcaacggcccacagccaggacgaggggaagaagacagc

SEQ ID NO: 143265 - RNA, 72 nt, Homo sapiens
agcgggcggagacgcgacagggaaaccagcccaagcacaaaaggggcacgcaggaacagaagacacagcaga

SEQ ID NO: 143266 - RNA, 53 nt, Homo sapiens
cacagacagaccgaggggacgggaccacaagacaaacgagggcccagcaagca

SEQ ID NO: 143267 - RNA, 85 nt, Homo sapiens
gccccagcgcagcagagcgccaagacgggagggagcgggaaggggagcgaaggccgcgcagccagagggaacagcggaccgggag

SEQ ID NO: 143268 - RNA, 70 nt, Homo sapiens
ccagggaaccacggagcacgagaaaacggcggggacccacaaagcaggaagggacaacaaacgagggaaa

SEQ ID NO: 143269 - RNA, 74 nt, Homo sapiens
gaaagagaagaagacccaaaaaaaagaggagcagcaggcacagcacgggcagagccagggagaccgaaggacca

SEQ ID NO: 143270 - RNA, 83 nt, Homo sapiens
agcggcggcggcggcagcagcggcagcggcaagcaccaacccggggaagaaaacgaggagaaaggggaaagcgaacagaaaac

SEQ ID NO: 143271 - RNA, 74 nt, Homo sapiens
cgagcaggggcccacacccccggcacccccacaggaccggacagccagagccccaaagcaacccccgaaagagc

SEQ ID NO: 143272 - RNA, 79 nt, Homo sapiens
aagacgaccaggccgcacggcacaggaaggagcaagagagagcaaggcaccagcagaacagacacccccaaagaccaga

SEQ ID NO: 143273 - RNA, 59 nt, Homo sapiens
ccggcccgccccgagcccgaaagagccgcagacgcacagcaaccaccggacccgaaggc

SEQ ID NO: 143274 - RNA, 80 nt, Homo sapiens
ccaggagcggcagacggcaggccagcgcccacaaggagaagagaaggagcgcgggcgcgccacgcccgccacacacagcc

SEQ ID NO: 143275 - RNA, 70 nt, Homo sapiens
gaccgcccggggaacagggcagcaagcgacagggacaccacgccaccagcggagggagaaacggccgccc

SEQ ID NO: 143276 - RNA, 78 nt, Homo sapiens
accaccgaagcacgaacacagccggaagaggacacaccaacaggcagcgaagacacgggacacacgccgcacagaaga

SEQ ID NO: 143277 - RNA, 80 nt, Homo sapiens
gggcccgcggaggaaagaagcaccgggcccggcccccaaccacgcaacaacagggggagagacaaccagagcggaaaggg

SEQ ID NO: 143278 - RNA, 71 nt, Homo sapiens
ggccgggccgacagcacggggcagacaccgcccgaacacacaccgacgcgcgcgacgggaccacaggcgac

SEQ ID NO: 143279 - RNA, 77 nt, Homo sapiens
acagcaggcccgggcgaagagcccccccccaaggcaaacagcccccagcccacagcagcaggggacagcagcccaca

SEQ ID NO: 143280 - RNA, 77 nt, Homo sapiens
caccaccccgcgccagggagcgccgcggcggagcggggaaacagaccaagagcaaaacagaagcaggaaagacagaa

SEQ ID NO: 143281 - RNA, 84 nt, Homo sapiens
ggcgcaaacaagccaacccaggaggaaaaacggaaaacaaaaggagaagacaaaagagagaaaagaaaggagagcaagaaccaa

SEQ ID NO: 143282 - RNA, 69 nt, Homo sapiens
gacaccggcagcaggacaagagcagaagaagagggccagggacggcagaccgggacccggcggcaggga

SEQ ID NO: 143283 - RNA, 82 nt, Homo sapiens
gccccagccacgcccaaagcacaaggagaaggacggaagaggggccggagagaccgggcaggcacgggacaagcaagggccg

SEQ ID NO: 143284 - RNA, 73 nt, Homo sapiens
gaaaccagcaacaagagaaaacccggagacccggccaaacagacggcgaagacaaacacccacagagggccac

SEQ ID NO: 143285 - RNA, 77 nt, Homo sapiens
cgcagcgggcacccgggggacgcggggacaccacaagcacggaagaaggcgggcgagaccaggacagaaggaggacc

SEQ ID NO: 143286 - RNA, 75 nt, Homo sapiens
gccaggaccggcggccagaaaacaagaagcagagcgacagcgggagacccccgaacgaccggccaccagggcgag

SEQ ID NO: 143287 - RNA, 79 nt, Homo sapiens
cggacggggcggggggaacgaagaaggcacggacgcaggagacaaagccagcaaagggagaccgagcgagcgcggcaag

SEQ ID NO: 143288 - RNA, 78 nt, Homo sapiens
cgggagggcggagaaggcagcggaaagcaccagccccggagcgcacaaccagaccccagccccccccacccggcaccc

SEQ ID NO: 143289 - RNA, 84 nt, Homo sapiens
ggaagaggaggaagaagcagaagccgaaaccgccaaagccagaccaagaccccggaccggggcccagcggccccagagcccgcc

SEQ ID NO: 143290 - RNA, 77 nt, Homo sapiens
cggaggacgcggcagcccgggagcggcgagggaaaagcgaggcaaggcaggcggcggggacgagagccccggcacaa

SEQ ID NO: 143291 - RNA, 84 nt, Homo sapiens
acaccaggcacccgggcccagccgggaacccccacgcggccagcgaaaacgcccagcgagaggcccggccagagaccgccgggg

SEQ ID NO: 143292 - RNA, 80 nt, Homo sapiens
aaagagggaccagcacaggcacagggaaaggcccggcgcaaccgcggaaaacagagagcaaggcaggaacggaccaaaca

SEQ ID NO: 143293 - RNA, 69 nt, Homo sapiens
cacgaggagaagggcaaagacaaggacaaccgcggacggacccaaagagacggcagacagggcagaaaa

SEQ ID NO: 143294 - RNA, 84 nt, Homo sapiens
cacaagggaacagacacacaagagggcacaaagcagcccggagccagaaccacacgaacacagagacgcccaagcagaggccgc

SEQ ID NO: 143295 - RNA, 112 nt, Homo sapiens
gaacggggcaaggagcaaccaacagcaacgagaggacagcagccaggcagacccagcaagccgaacgagaaagcgagcgaggaaaaaggcaagagaaagccccgacaagaaa

SEQ ID NO: 143296 - RNA, 80 nt, Homo sapiens
ccccagcagccagcaacaccccggggaaagcagaagaacagccacaggaagagggaacaaagaaggaaacaggagaagcg

SEQ ID NO: 143297 - RNA, 69 nt, Homo sapiens
cgcaccgagaaaggaaggaaaaccgacgaccacccggcccgcgcgcccggaagccgcgagccggaagcc

SEQ ID NO: 143298 - RNA, 58 nt, Homo sapiens
ggaagcaagggggacaaaggagaacaggaggaggcaacaggcaagagcaggaagcccc

SEQ ID NO: 143299 - RNA, 80 nt, Homo sapiens
ggacagcaagcggccgccgcagagcgggagccgccaagccccggacgacggacccccggagccagcgaggggaagggccc

SEQ ID NO: 143300 - RNA, 73 nt, Homo sapiens
accaagcgggacccaaagcgggaaccaaaggcacggagcccaagagaaaggacaagaaacaaagagccaacac

SEQ ID NO: 143301 - RNA, 69 nt, Homo sapiens
gagaaagacccccagaaaccaccaccgcagagaccaagaagaccaccaaaagaaaacccaccgaaaaac

SEQ ID NO: 143302 - RNA, 73 nt, Homo sapiens
ccggacaaccagaggcagccagcagggggagggccggcacgagaagagagcaggcgggaggcacaaaaagagg

SEQ ID NO: 143303 - RNA, 78 nt, Homo sapiens
gaaacccggccgaacgcaaccccccggcccacggacccagaggacgagaacaagccgaagcggacaccagaaagacgg

SEQ ID NO: 143304 - RNA, 70 nt, Homo sapiens
cgggcgccccgggcgggcgagcacaggcacacacaccacagccagaagaaccacaggccacaacgagcca

SEQ ID NO: 143305 - RNA, 54 nt, Homo sapiens
gagcacagcacgaacagacagaaagcaccacagaaagggcacagacaaagaagc

SEQ ID NO: 143306 - RNA, 78 nt, Homo sapiens
gagccccgcccagcacccgccggacggccgagaccgaacagacccgagggaaagggccacgaggacgggccggcaaag

SEQ ID NO: 143307 - RNA, 85 nt, Homo sapiens
gagcgaaagagaggcccccggccgacaagcaagcagcgcgccggccccaacacggaccgaacgccaacggcaagaaagggaaggc

SEQ ID NO: 143308 - RNA, 82 nt, Homo sapiens
ccggggcgccacggccacggcgcggcaccggggcgccgggaaagaccacagcaagaccacgcccccagccgggggaccaggc

SEQ ID NO: 143309 - RNA, 73 nt, Homo sapiens
gcaaaggaggaggaaaaaggaccaaacagcaagggaagcacaccgacagagaacccaggccaacacacagaca

SEQ ID NO: 143310 - RNA, 40 nt, Homo sapiens
gaggagaaggaggaggaacggaggggccgccgcgccagga

SEQ ID NO: 143311 - RNA, 98 nt, Homo sapiens
gccgccccgccagcgccagacggacgaggcggcggagaacaagcggcagaggaccagacccgaaccagcccccaacccaacccaggaaccacaaaaac

SEQ ID NO: 143312 - RNA, 75 nt, Homo sapiens
cagacaacaccagaacagggggagaaccaggacaggaggggccgagaccccgccacacacacggagccgaacaaa

SEQ ID NO: 143313 - RNA, 89 nt, Homo sapiens
gcaacaacaaccagcagcaacaaggaaacaggacaggaaaacaggaggcagaggaacaaaaaaagacaccacgagaaacagacacacca

SEQ ID NO: 143314 - RNA, 74 nt, Homo sapiens
gaagaagaaaggacgacagccagagagggcacccaccgggggaaccaaacaggagcgaccgccgacaacaacgc

SEQ ID NO: 143315 - RNA, 74 nt, Homo sapiens
gcaacaaaagaaacagaccaaaggcaggccgaagaaaccagaggaaagaagaaaaaaaccgggggagaagagag

SEQ ID NO: 143316 - RNA, 88 nt, Homo sapiens
aacagaaaagaagaagaagagggaaccccagcgccaaaggaaccgaggacagcacaggaaagcaccccagagggagacaagccaccac

SEQ ID NO: 143317 - RNA, 67 nt, Homo sapiens
agaggcccccagaccagaaaagcggccgcacaaggggagcagggcagcaccccccacgcgcgagagg

SEQ ID NO: 143318 - RNA, 77 nt, Homo sapiens
accagacgaaaacagacacagccagccagccacacggcagaaaaagaagcacgagggccagccgcacggacaggacg

SEQ ID NO: 143319 - RNA, 82 nt, Homo sapiens
aaggaaccaggagagagcagccagaggagggacgaaagggcacacagcgacgccagcacccaccagcccgagcagagcgcca

SEQ ID NO: 143320 - RNA, 57 nt, Homo sapiens
aagcagcccgaaaaagacgcgagaagccacacggagggccacaggagaccccaagag

SEQ ID NO: 143321 - RNA, 43 nt, Homo sapiens
ccacgacacgggaggacggcgacgagcaaagaccaacaccaga

SEQ ID NO: 143322 - RNA, 105 nt, Homo sapiens
ccagcgggccgagaggagacacggagaaagccaaacagagaaggaaggggaccagagaaaaggaggaggacggcacaaaaaaaggcagagaagaggagcaacaag

SEQ ID NO: 143323 - RNA, 71 nt, Homo sapiens
gcgacagcggaaggcaccacaagagcggggcaccgacaaacgagaaagaagcaggacagagacaccagcaa

SEQ ID NO: 143324 - RNA, 69 nt, Homo sapiens
agggagaaaggaagggacagagggggcgaaagccagaaagacccgaaaaggaagcaccaggacggagac

SEQ ID NO: 143325 - RNA, 53 nt, Homo sapiens
ggaaaccagcagagcagagggccccgccaggcgaccaggcaccggccagggcc

SEQ ID NO: 143326 - RNA, 47 nt, Homo sapiens
ggaacgggaccgcacaggggggcagcaggacgcccaccccaacgcac

SEQ ID NO: 143327 - RNA, 88 nt, Homo sapiens
gggcgcgcgcgaagcgagcgagaaggcacggagcgccgcggagcgcaggggcccccggagggccacaagccagagcgccccggccaag

SEQ ID NO: 143328 - RNA, 75 nt, Homo sapiens
gccagccacggacaccaggcaggccagagcagcaccaggccagagccagaacaggaggacgcccgaccccaccca

SEQ ID NO: 143329 - RNA, 76 nt, Homo sapiens
aacaaaaaggccagaaagaggagcagagacgccggacagagaggggggaaaggaacggaagaccaagaacaggagg

SEQ ID NO: 143330 - RNA, 74 nt, Homo sapiens
cgggcacccacagacggcgaaggcagccacagcgcccagagagggcggagaacggaaaagcaccaggaagcaga

SEQ ID NO: 143331 - RNA, 81 nt, Homo sapiens
acgcgacaaccgcgggcaggcgccgggaggccgagccagcgacaagaggaccgagaggggcgggacagggaccccaccacg

SEQ ID NO: 143332 - RNA, 80 nt, Homo sapiens
cggcgccgaaggacaagccccgaacgagggggggccccaacaccacacaagcaaagcgggccacagagaagaggagcaag

SEQ ID NO: 143333 - RNA, 114 nt, Homo sapiens
aagagccacgcaaccccacaggcggacgaaaaaaggcggccgcgggggaccaccggcagccgcagagacgcccgagccagcggcacgaaaccccccaggacacacccccagaga

SEQ ID NO: 143334 - RNA, 78 nt, Homo sapiens
agacgcaaggggagcacggggccggaccagccccgaaacacggggcaagaagcaagcaaccaggcgccgcaccagaag

SEQ ID NO: 143335 - RNA, 76 nt, Homo sapiens
gaaaccagaagcccaagggacaagggcaacaaggccggcgggacaacacaagggaaccaaggagggcgccgcgggc

SEQ ID NO: 143336 - RNA, 69 nt, Homo sapiens
cagcggcgaaagacaccacaaacaaaagaccaggaggaggccccgccccaggcacgccaggggacaaag

SEQ ID NO: 143337 - RNA, 58 nt, Homo sapiens
cccccaagagcgggacacagaaaggggagcaagaagaaagagcagggaggagggagcg

SEQ ID NO: 143338 - RNA, 74 nt, Homo sapiens
gaccacaaacgagaccagcggcgaacgaaaaggcagcaagggacagccggagaaagaacaacacaacagagcca

SEQ ID NO: 143339 - RNA, 71 nt, Homo sapiens
cccaagaaggcaggccacgagaggccaccgcacccgagggcagggaaacccagacgacaaggaaggccaag

SEQ ID NO: 143340 - RNA, 84 nt, Homo sapiens
ggaaaggaccagaccgcccaggaaacggcgccaccaggggccagaaccgcccacggcccccacagcggacccggaaccccagac

SEQ ID NO: 143341 - RNA, 85 nt, Homo sapiens
cgccgccgccgccaccaccgccaccggaacccgagaccgagcagaacccgaggcgcggcggcgaggagcgccaaaagcaggggaa

SEQ ID NO: 143342 - RNA, 52 nt, Homo sapiens
aaggaccaagaaccaggccacagagggaccaacggaacggccagcgagggag

SEQ ID NO: 143343 - RNA, 86 nt, Homo sapiens
caagaaaaggaaaaccacacagacaaagaggaggaaagagccaaccagacagccaggaagacccccgagaagacaaaaaaacagga

SEQ ID NO: 143344 - RNA, 59 nt, Homo sapiens
ccagcgccggaaaccaacaaggacacccgagaaagcggacggggcgccacccggacacg

SEQ ID NO: 143345 - RNA, 53 nt, Homo sapiens
ccacgcccaaaagagcgcaccaacccccacgccgggcccgggaggagcagggg

SEQ ID NO: 143346 - RNA, 69 nt, Homo sapiens
cacagacccagccacgaaggaacgggcagaacacccaacagagcacgacacccagagcaaagggagccg

SEQ ID NO: 143347 - RNA, 76 nt, Homo sapiens
agggcgaccccaagggacagcgagcccgggcgaaaagccaggagcaaaagacgagcgcgacgccaccagcaacgaa

SEQ ID NO: 143348 - RNA, 27 nt, Homo sapiens
gacacagggccccgaaaaggcgaccaa

SEQ ID NO: 143349 - RNA, 79 nt, Homo sapiens
cggcgacccaagggcaacaacgacaccaaggaaaggcgcaccaaggaacacgacgaccggaagcagagagcgaaagcag

SEQ ID NO: 143350 - RNA, 81 nt, Homo sapiens
acgacagggaggagcggagaacgcaggaaccggcccacagagcagacagacagcgaacacggaagccacgaaaagcaaaag

SEQ ID NO: 143351 - RNA, 100 nt, Homo sapiens
gcaaggcaagaccgaacagaaggaacgacgcggaccagaagccagagcgaggacgccggcaggccccgagagcagggaccgggccaagacgagcgacagg

SEQ ID NO: 143352 - RNA, 68 nt, Homo sapiens
acggccgcccagggcagggaggagagggaaaaacacgggcagaagccccgagcagggagggaaaacca

SEQ ID NO: 143353 - RNA, 73 nt, Homo sapiens
aggaagagaaagcagaagaagcaacagggcaggggaccggggcaggccaccccccgcggaacgcgggaccgcc

SEQ ID NO: 143354 - RNA, 37 nt, Homo sapiens
gccaagaccacagcagcacccagacgacgcaccaaac

SEQ ID NO: 143355 - RNA, 73 nt, Homo sapiens
agcacaggcaaaggaagcaccgcacacagggggagggaaacggccaggagcagacgcggaacgggccagggcc

SEQ ID NO: 143356 - RNA, 36 nt, Homo sapiens
aggaggccccaaagggcgagacaagggaggcgagga

SEQ ID NO: 143357 - RNA, 71 nt, Homo sapiens
ccccagacccccggccgcccacgccgcggcgcgacccaaggcgccggaaggacgccaggcccaagaagagc

SEQ ID NO: 143358 - RNA, 74 nt, Homo sapiens
agggcgcagcagaaagcaaaccagcaggcaccaaggaaagcagaagacaaggagacccagggaagcagaacgaa

SEQ ID NO: 143359 - RNA, 67 nt, Homo sapiens
caaagacccggcgcaagcacaggacacaagagggcccggcagaaccaccgcgagcagacgggagaag

SEQ ID NO: 143360 - RNA, 83 nt, Homo sapiens
gcggcagggcagcagaagcgcaccccgacgccgaggaacgagagcgcgaagcaagaaccagaggcagcagacccgagagagga

SEQ ID NO: 143361 - RNA, 74 nt, Homo sapiens
ggccccaaggcgaccggaacagaagacagagacacgacacagcagccaggcaaagggaaaagaacaaagaaccg

SEQ ID NO: 143362 - RNA, 77 nt, Homo sapiens
ggagaggagaacacaagagcccacaagacgggaagaccacggcagcaagccacggacaccaaaaagcggaacgacca

SEQ ID NO: 143363 - RNA, 77 nt, Homo sapiens
cagaccggcaaaccgggccggcagaaaacaaacccaggaacggacagcaggggagacagaacagacagaaaaaacaa

SEQ ID NO: 143364 - RNA, 79 nt, Homo sapiens
agaagacaggcgcgaagcaaacaaaaacgccagcagagaggagagacggaaaagacaagccagcgccagggagcacaac

SEQ ID NO: 143365 - RNA, 70 nt, Homo sapiens
acgcgcccccgccgcacggaaaagagaggagccaagcccaacgggacgggaaaacggccacagccaacga

SEQ ID NO: 143366 - RNA, 105 nt, Homo sapiens
gagagaggcaccgggacggaccgagaccggaccgagagcggaccgagagcgcgaaacgcacgagaaggagaacggaagaggacaagagacgacacgcaagcaggc

SEQ ID NO: 143367 - RNA, 79 nt, Homo sapiens
acagcgcgcgcgccccccaggccgacggaggacgaggacggcgcgccagcgcggggccccggcccgcaagaccgccgcg

SEQ ID NO: 143368 - RNA, 76 nt, Homo sapiens
cggaccccccaacaccccacgaaggcggcaccaaggagagccaggcacaaaaaggggaagacaaaagcagacccaa

SEQ ID NO: 143369 - RNA, 73 nt, Homo sapiens
ccccggcccgcccgcccacaaaccggaggacacccccagacgcagaagggcaggagacacagccgaggcacca

SEQ ID NO: 143370 - RNA, 79 nt, Homo sapiens
gaggcgaagcgacgccggaggcagacaacaggcacaaagagagaaggaacacccacagggcagacagagaaagaacaca

SEQ ID NO: 143371 - RNA, 71 nt, Homo sapiens
gaacaagcagcccagaaccaaagacacacaaaagggaagaagaagaaacaggcagaagcagaaaaacgaac

SEQ ID NO: 143372 - RNA, 78 nt, Homo sapiens
caggggcgggagagccccgcagaagacgccgacgagaccgccgggcgaagggggggcagagccgggccccagccaggg

SEQ ID NO: 143373 - RNA, 71 nt, Homo sapiens
ccggagagcaaacaacacgacgaaacagacaggggcaagcgggagcgccaagcacagagacgagcaggaca

SEQ ID NO: 143374 - RNA, 41 nt, Homo sapiens
cccgggacaccaagaaagaacgcaaacaccagcaacacccg

SEQ ID NO: 143375 - RNA, 72 nt, Homo sapiens
gacccagccaggccgccagcaagggggaaagcggaccaagaggaaacccgaagaggcacaggaagaaacagg

SEQ ID NO: 143376 - RNA, 82 nt, Homo sapiens
agagaagaaacaaacggagagagggaagccccgggagcgaccaggggcgacccaaagggcaggccagcgcggcgcagggccc

SEQ ID NO: 143377 - RNA, 37 nt, Homo sapiens
acccagacagcgcgccgggggccagagacgccaggaa

SEQ ID NO: 143378 - RNA, 77 nt, Homo sapiens
gagaacccagacaacaggacgccgccaagagcacaaagccggccgcccagagaagcacacagaacgcagaaagacaa

SEQ ID NO: 143379 - RNA, 71 nt, Homo sapiens
aaagaggcaacaggccccagaggagggaaaggacggaccaccaaggaaccagaaggccaacccaccgacaa

SEQ ID NO: 143380 - RNA, 75 nt, Homo sapiens
cccaccaccagaggcaagcagcacaagagacagggcagggcagcagcacgaccgacccagcagccccggcagacc

SEQ ID NO: 143381 - RNA, 82 nt, Homo sapiens
gggccgggaggcagaggggcagggagcgaaagcacacgaagaggcagcccagaagaagaaagcaagcaggaggggccaggcc

SEQ ID NO: 143382 - RNA, 80 nt, Homo sapiens
gcccaggcccacccccagccgaaaaccaccggcagagcagaaggacagggagaaagagcgcgaagaaacacgcggaaaga

SEQ ID NO: 143383 - RNA, 68 nt, Homo sapiens
cgcagggcgcccccgacaggcgacagaggaaagacacaaagaagagggagaaagccagcccagcaaca

SEQ ID NO: 143384 - RNA, 79 nt, Homo sapiens
gcgggcaacacgcccccccagaggcccggccaacgcaacagggagcccacgcaagaggggccggggaccgcccagcagc

SEQ ID NO: 143385 - RNA, 78 nt, Homo sapiens
cccgcacaggacacgaggcgcgacgccacagaccacggcccagaggccacgacggaaccaagaacagcacgaaacaaa

SEQ ID NO: 143386 - RNA, 75 nt, Homo sapiens
ccagggaagcccaaagccaggaacaccgccaagccaaagaggggccgaggccgccggagccccagacacccccca

SEQ ID NO: 143387 - RNA, 71 nt, Homo sapiens
ggagccacggaagaggccgggaaaaaccgaagccaaagcagaacgagcagaaaagcaccgaaagcacccac

SEQ ID NO: 143388 - RNA, 69 nt, Homo sapiens
ggacaaaaccgaacaccgagggccagaacagccaggggcagggcagcaggacaaacaaagccagagaac

SEQ ID NO: 143389 - RNA, 78 nt, Homo sapiens
cggcggagcggcggaagaagagcggaggagcgccaacagcgacccaagagccccacggagccaagacagggccaaaaa

SEQ ID NO: 143390 - RNA, 78 nt, Homo sapiens
gagcagaacacggcgagcggaccaggaggcgcaagccagggccgaaacggggaacccagaccacccggaaccggcagg

SEQ ID NO: 143391 - RNA, 75 nt, Homo sapiens
gaaagcgggaggccccaaaagaccaacggcacccacagcccccccagaagccgcgcagagcggaccgcgaagaga

SEQ ID NO: 143392 - RNA, 74 nt, Homo sapiens
aaaaggagagaacgcaaacaggcacacgccagcaaagcacgggaagacacacaggacacagagaagggacgagg

SEQ ID NO: 143393 - RNA, 101 nt, Homo sapiens
aaaccaagaacgaaaagccaagaacaagcacaagaggaggaagaagggggaaagggaaaagaggaagagagaaacagagagaaggagaagagaaagacccc

SEQ ID NO: 143394 - RNA, 54 nt, Homo sapiens
aaccaaaggccaacaaagggagcagcggggaagcgaagacgcggggaaacacag

SEQ ID NO: 143395 - RNA, 73 nt, Homo sapiens
cgcaaaagggaaaaccggccacacacccccacggcgagacccagagagccaagaggggcagcggaggaagccg

SEQ ID NO: 143396 - RNA, 77 nt, Homo sapiens
caggaggggagagaaccgaggaaaggaggagacccacccggggacgagccgccccagaagcaccccaggccaccacg

SEQ ID NO: 143397 - RNA, 77 nt, Homo sapiens
agggcgcccgcggcggacaagcgaggaagcaagggcaccacacggcaacaggcgacgggcggccaacacacagacgc

SEQ ID NO: 143398 - RNA, 77 nt, Homo sapiens
gagcgccacaggacgaaagaaggggggcagaaagaagaggaggacaacaagccaacagagagagacgaagaaaccag

SEQ ID NO: 143399 - RNA, 77 nt, Homo sapiens
gcgggacgaggaccgagaccgcggccgggaccgaggcgcaccacccggagcgagacgcgccgaaggggggagccacc

SEQ ID NO: 143400 - RNA, 52 nt, Homo sapiens
ccgggcgacgaggcacagcgcgcaagaagggaggcggaggccccagggacac

SEQ ID NO: 143401 - RNA, 69 nt, Homo sapiens
aacgcccgggaagcgacccaaagcgcaggccacgccaccccgcgcccccgggcagaccggcaagccccc

SEQ ID NO: 143402 - RNA, 75 nt, Homo sapiens
gcaagaaacccggcaaaccgacgcgaagacccgagagaggcagaggcaaggaaaggcacagaccggccagaagag

SEQ ID NO: 143403 - RNA, 82 nt, Homo sapiens
cgccaagaagaccgagagcaccacaaggccaagggcaaggagacaggcgaagacgaagagcaacagacacaggagcacgggc

SEQ ID NO: 143404 - RNA, 76 nt, Homo sapiens
cacaaccccgcaaacaccaccacgggccaaaaggcccagggcccccggcagcggaaaaagccccgcagggccagca

SEQ ID NO: 143405 - RNA, 77 nt, Homo sapiens
gagaagaagggagcagaggaccgcggagcgcagacggacaggagcccagacaagcacacggacccgacaccggcgcc

SEQ ID NO: 143406 - RNA, 70 nt, Homo sapiens
cacgaggcgggccgggcaggagggaacccggcgcaaccgcacccacgaagacacaaagagaagagagcaa

SEQ ID NO: 143407 - RNA, 62 nt, Homo sapiens
caggaggccagggggcgccagaaacggaggagagaggacaggcaaagaaaaaaagggcgcag

SEQ ID NO: 143408 - RNA, 82 nt, Homo sapiens
ggcgaaggcgggggggggaaagcaagcaagggagcagcacacgccccagcgcgacccgggcccaggggcgggagcccacacc

SEQ ID NO: 143409 - RNA, 75 nt, Homo sapiens
gagaagcggacgccgcaggggaccccgcccgaaagcgacacagcaaacggcgagcgggaaaaggccagaagagaa

SEQ ID NO: 143410 - RNA, 78 nt, Homo sapiens
acccgggaacggaggagggagagcccagaggaccggcggcccgaccaaagaagaaccacagccagcaaccgcgaagaa

SEQ ID NO: 143411 - RNA, 59 nt, Homo sapiens
cagaacaccaaaagcaagaggcaaggaaaacccaaccccaagaaacagaagcaaaaaag

SEQ ID NO: 143412 - RNA, 78 nt, Homo sapiens
gaaaggacccccccagcgaagccaacagagaaaaaggaccaacaaaaagaacaagaaaagacagccaggcaacaagaa

SEQ ID NO: 143413 - RNA, 70 nt, Homo sapiens
ccgcgccgcgccgccgccaccagcccaagagaaaggcgcagcccagcccgaaagcagaacgacgccggcg

SEQ ID NO: 143414 - RNA, 65 nt, Homo sapiens
agagcgaacacccagaaacgggaacaaccaccacgggacgaaaagggaaggcggcaggacaaaga

SEQ ID NO: 143415 - RNA, 79 nt, Homo sapiens
ggacagccaggagaagaagagaaaaggagggaacacagacccagccgccaaagacagaagacagcccacgacacaggcc

SEQ ID NO: 143416 - RNA, 75 nt, Homo sapiens
cagaaacggcacccggccagccgggcagccagaggggagacggacgcaaagacaagggagaagcggcggacaagg

SEQ ID NO: 143417 - RNA, 70 nt, Homo sapiens
ggagggggccccaccgggcccgaaggcgcggaagccaggagggaagcccagaagacgcacaagagagacc

SEQ ID NO: 143418 - RNA, 71 nt, Homo sapiens
agagccgaaaagcgagcagagaacagccgcaccggagagggacaagaaaggcgggaaaccaacccgcaagg

SEQ ID NO: 143419 - RNA, 76 nt, Homo sapiens
acgaacgaaacacaggcagcaggcaacaggaagaagaacccacaggggccaacagaggaaggaacaaaggaacgca

SEQ ID NO: 143420 - RNA, 57 nt, Homo sapiens
ggcggggagccggccccccggcccgcgggcgcggcccgcggcgccagggcagaggag

SEQ ID NO: 143421 - RNA, 63 nt, Homo sapiens
gacccaaagcgggaaccaaaggcacggagcgagaaccagaagccacaggccaaccaagcaaag

SEQ ID NO: 143422 - RNA, 86 nt, Homo sapiens
aacggcagagcagagacagcacagcaggaaggccccagaaaaccaggaggaagaggaggagcggcagaacgaacagcggaggaacc

SEQ ID NO: 143423 - RNA, 68 nt, Homo sapiens
gcgcaccccgcggacgccacagcgcggcgcaagcagccccagacaagccaaaaacagcaaaaacccgc

SEQ ID NO: 143424 - RNA, 85 nt, Homo sapiens
cccggaaaaagcaagcgaagacacaagaagaccgagcaaagagaccccggaacaacggcacagccaacaagagaacggagcggac

SEQ ID NO: 143425 - RNA, 78 nt, Homo sapiens
cgcccgccgccgcggggccacccccgggacgcgcccacggcgccccggcgcggagagcgcgcgccgcgcgcccgcaca

SEQ ID NO: 143426 - RNA, 73 nt, Homo sapiens
gccggacaaacacgcaaggacccccccggccaagggcaagcaagggagcgaggcggccagggccccagaagca

SEQ ID NO: 143427 - RNA, 79 nt, Homo sapiens
aacggacccccgccgccggccgccgccacagccggacccgccacccggaagggccagcgcaagcgggcgccaggacggg

SEQ ID NO: 143428 - RNA, 65 nt, Homo sapiens
agccgcagcgacggcggcgacagcaggccccagaaagcaggcaggcccagcccccaggcgccgcc

SEQ ID NO: 143429 - RNA, 74 nt, Homo sapiens
accggaaaccaccagaccgaggcagggcccccgaagccagaggacggaaccgaggcagagcccaggaccagccg

SEQ ID NO: 143430 - RNA, 85 nt, Homo sapiens
ggcaccagggaggccggaacggggcgagcgccagagcaacaaagcgacgggcgggggggggcggcaccagggaccaggcagacga

SEQ ID NO: 143431 - RNA, 78 nt, Homo sapiens
ccagccagccccccaggaccacagccccgaccgagagaaccagcgccagcgcaggacagaggcggccggcccgggaga

SEQ ID NO: 143432 - RNA, 77 nt, Homo sapiens
aaaagaacagagaaaaaaccaacaccccggcagccgggaacggagaggagaaaaagaaacccaaaggggcacaagag

SEQ ID NO: 143433 - RNA, 74 nt, Homo sapiens
gagcccggcccgacggcagccggcaggcagggcacacagagaaaaaaagggaacaaaacacagcaagcagacaa

SEQ ID NO: 143434 - RNA, 81 nt, Homo sapiens
cagcacccaccccggagggggaccacaagacccacgacagggggcacccgaggaggaagagggcagggcccacggaaagaa

SEQ ID NO: 143435 - RNA, 65 nt, Homo sapiens
gaaggagagccccgaaaaagacaacagaccaaagccccggcgcaggaacacaggacggccgaaca

SEQ ID NO: 143436 - RNA, 88 nt, Homo sapiens
gcaagaggacacaggggaccgggaccagaaaggagacgaaacgcgagcaaacgcagaaaaagccagcaggaagaggcagcagaggaac

SEQ ID NO: 143437 - RNA, 74 nt, Homo sapiens
acggggaagaaaggagcgaggagcagaaaccagccacgggccggaggcaaaaaaggaccgacacaagaagcagc

SEQ ID NO: 143438 - RNA, 76 nt, Homo sapiens
gaaaaaacacgccgagcgacgaagaagaccggaagcccacaaagaccccaaaggagggagagcagaaagacgagcc

SEQ ID NO: 143439 - RNA, 74 nt, Homo sapiens
gaagcagcccagaaaaccaacgaaacacacagggaggaagcagaagaaaggacggcacaccaaagccaaccaac

SEQ ID NO: 143440 - RNA, 62 nt, Homo sapiens
gaagaccccaggcgaccacaccagacacaggggaacacccagaggaacgcgagaaagaagcg

SEQ ID NO: 143441 - RNA, 66 nt, Homo sapiens
ccaagcaacccgcggggacagggaaaaaggggaccagccaaaacggaaacaaagcccaaccacgcc

SEQ ID NO: 143442 - RNA, 89 nt, Homo sapiens
agcaccccacgcccggccgacaagcacgcaaaacaagcggaccaacgaagaagcccaaccggagcggacggggcacgggcgagagccgg

SEQ ID NO: 143443 - RNA, 73 nt, Homo sapiens
aaacagacccacggaccacaaagcaggcagaaacacagggaaggggcacgaagaccaaccggccaaagaagag

SEQ ID NO: 143444 - RNA, 114 nt, Homo sapiens
gggcccacgcgggccgggcccaaggccccgacgcccccaggcccgccagggcccgaggccgggaacccggcaccagccgggcaaaaacccaaaccaacagaaccgcaccgaggg

SEQ ID NO: 143445 - RNA, 58 nt, Homo sapiens
gcccccgagcccggaggggggagaaaaggcccaggacacagccagcaaacaaaacagc

SEQ ID NO: 143446 - RNA, 65 nt, Homo sapiens
ccaggcggcgaccggcggcgccacgagagcgggcagcggaggaggaagacccgggacacaccaac

SEQ ID NO: 143447 - RNA, 80 nt, Homo sapiens
agcgaaccagccgggaggggaggagcgcaggggcgcaccacaccagccccacacgcaaggccacagccaggccaacccca

SEQ ID NO: 143448 - RNA, 53 nt, Homo sapiens
cccgccagcaccggccccaccacaggcgcgacgagaaaccaaagaaaaaggaa

SEQ ID NO: 143449 - RNA, 72 nt, Homo sapiens
agagggggcgcgagcgggggagaagaagaggagcaagcggggaagaagcaaaagcgcggcagccaggaccaa

SEQ ID NO: 143450 - RNA, 84 nt, Homo sapiens
gcagcaaaccggagcaacagaagagcagagggaccaccccagaacccggacccggcggcgggcagcagcacggggccaggcggc

SEQ ID NO: 143451 - RNA, 73 nt, Homo sapiens
ccagaggagaccgccacacaagagaagacccaccgaggaggagaagacgaaggagcagggacagccgcacgag

SEQ ID NO: 143452 - RNA, 70 nt, Homo sapiens
cgcacaacaagcgcggaccgcagcagacccaacccccgcagacaaaagggagaggaacacaagcaagaag

SEQ ID NO: 143453 - RNA, 73 nt, Homo sapiens
gagacggggacagccagaaaccggggaccaacaaccaccaagaaacagaggaaaggaaaaggcgaaaccagca

SEQ ID NO: 143454 - RNA, 72 nt, Homo sapiens
cccgaggaggaacaggcagaggaaagggcgcaggcagaggagcagccgccaccccccagggggggcggaccg

SEQ ID NO: 143455 - RNA, 68 nt, Homo sapiens
gaagggagacacgggggaagaggagcaaggacaagaaaaagagaaccagcaagccagccgcaagacac

SEQ ID NO: 143456 - RNA, 74 nt, Homo sapiens
cagcccacggcacggagcaccagcacagcaggccaaagcaacccccaggacaaacgaggggcaggccgggacag

SEQ ID NO: 143457 - RNA, 55 nt, Homo sapiens
ggcagagaaagcagggaaaggagagcaccacacaagaccgacagaacaagcgcaa

SEQ ID NO: 143458 - RNA, 41 nt, Homo sapiens
agagaaggacaacaccacaggggaggaacgacccagggcgg

SEQ ID NO: 143459 - RNA, 91 nt, Homo sapiens
agaaagaaaggagcgccccaaaaggaaacagcccaggcagcgcagacgaaacagcgcgcagaagccaacagaccccgcgacggagaccaag

SEQ ID NO: 143460 - RNA, 71 nt, Homo sapiens
cacggcgagcagaagccaccgacaagaagaaagccggaaacaagccaccgcgggagaggacgccccacgga

SEQ ID NO: 143461 - RNA, 77 nt, Homo sapiens
cgagagccagacgacaggggaggggcccaaggaaccccaggagaagaggcgcggcccagaaggggacgaaaaaagaa

SEQ ID NO: 143462 - RNA, 77 nt, Homo sapiens
ggccgggccggagacgcgcccgcgcgcaggggaagcgggcagagccccgcgacaagagaagcaccagaagacgcagg

SEQ ID NO: 143463 - RNA, 58 nt, Homo sapiens
ccgagcgccaccgcgcccaggagagagagagagagaggaagcgaagaaaaagcgccag

SEQ ID NO: 143464 - RNA, 82 nt, Homo sapiens
gcgagcgcgagcggcgcgagaaagacagcccagagcaagcacacggaggcccgggagccagaccgggagcccgccccagcca

SEQ ID NO: 143465 - RNA, 75 nt, Homo sapiens
gcaaaaccggaaaagacgcgcaaggaacgaagcaggcccaggagaaagcacaggacagggcgcaaccagcgccac

SEQ ID NO: 143466 - RNA, 82 nt, Homo sapiens
agcgccggggcacgacacaaaaacagggcgccagagagggaaaggcgcccaaccaaaaaagcaacacagaggaaagaagcaa

SEQ ID NO: 143467 - RNA, 84 nt, Homo sapiens
cgaggacaaaaccgaaggagggcgggaaagaggaaagaagacacgcaagagaacacaccacccagcagagcgagggaaaggcgc

SEQ ID NO: 143468 - RNA, 107 nt, Homo sapiens
ggggccagccaggccgcgcgggcccgaggccggaggaacccggacccggcgagcggcgccggggaaggaaccagaacggcaccccccccccggcccggacgcgcccc

SEQ ID NO: 143469 - RNA, 59 nt, Homo sapiens
cggggccggcccccgcaaccccacggagaaccgcagccagaggcgggagcaccagacag

SEQ ID NO: 143470 - RNA, 84 nt, Homo sapiens
cgggcgagcagagaagaagcaggaaggacgagacgagaccgggacggaagacggcaaagacgagaccgagaacggaagaggaga

SEQ ID NO: 143471 - RNA, 98 nt, Homo sapiens
gagcagcaaccaaagcaagccaagaggaggaggaggcggaggccaagcggaaagaagcaggccaacagaccagcagcagcgcgaaaagcagcgcccgg

SEQ ID NO: 143472 - RNA, 62 nt, Homo sapiens
cagaaagcggcacgaacagagccgggagcaagaagaacacccagagagagacggggcgccgg

SEQ ID NO: 143473 - RNA, 75 nt, Homo sapiens
aaggggacaaacccgggagaacacccccccaggaggcgaggagagggggcgcaggcagggccccccaccagccga

SEQ ID NO: 143474 - RNA, 80 nt, Homo sapiens
cgggcacaccagacccagaggagagcaggagccagcgaccaggacgggaagacaaccagccagaggccggaggagagagg

SEQ ID NO: 143475 - RNA, 62 nt, Homo sapiens
aggaccaagaaccagcacggaacggaaacagaggcggaggcggccgggcgaaaacgaggaga

SEQ ID NO: 143476 - RNA, 57 nt, Homo sapiens
gagaccgcgcagaagacacgcccggaagaccagccaacagggggaaacggccaaagg

SEQ ID NO: 143477 - RNA, 33 nt, Homo sapiens
gccgagacgcagggggaaggccgggcccaggac

SEQ ID NO: 143478 - RNA, 65 nt, Homo sapiens
ccaggccaggagagaagaaaagacgaggacccagagaaaccgcagaaagagaaagggggcgggag

SEQ ID NO: 143479 - RNA, 72 nt, Homo sapiens
cgcagcagcgaaggcagaaggcacagaccagcacagggagacgggcgaacacagggaagaaggacggagcca

SEQ ID NO: 143480 - RNA, 83 nt, Homo sapiens
gacggagcaagacagacacacgcccacaaagcccagaagaagggcaccagcgaagggaaagggagcagcaccggccacaccca

SEQ ID NO: 143481 - RNA, 35 nt, Homo sapiens
gccggaggcagcccaggcggggaagacccgacaag

SEQ ID NO: 143482 - RNA, 82 nt, Homo sapiens
gcagggcgccgggagaaggccaacaaccccgggggcgagaggggggcagacacccggaaaacaggccgacagacagagccgg

SEQ ID NO: 143483 - RNA, 73 nt, Homo sapiens
caggcaacggggaccccggagcccagaagacagagggcgagaggcagcgagaagaaaaagaagagagagacac

SEQ ID NO: 143484 - RNA, 74 nt, Homo sapiens
aggcagaagaacgaagaacacacaacgggaggagaacaccggaagagagaagggcacagaccaagacaacgaac

SEQ ID NO: 143485 - RNA, 49 nt, Homo sapiens
acagccggcaagagcacaggaagcaaacaggagcggggcaacaagacgg

SEQ ID NO: 143486 - RNA, 71 nt, Homo sapiens
aagcgcaccagccaaccgagaagaaggagaaagacaaagccccgagaaagaccagcaccgccgaaaagcaa

SEQ ID NO: 143487 - RNA, 71 nt, Homo sapiens
gggcagcgccggggaggagcggggcgcggcaggcgaggcgacgaggggaaccagaagaggccaaccagcac

SEQ ID NO: 143488 - RNA, 79 nt, Homo sapiens
ccagcaaccgcggaaggaccgagagaaggcagcaggaagaaacagcgaaccaaaaaccagcagaagcagagaagccggc

SEQ ID NO: 143489 - RNA, 85 nt, Homo sapiens
cggcccccggcgggggcgggacagcggcccccggagggggcagcccgggagaaccgcggcggccggagcggaaagcaggaaaacg

SEQ ID NO: 143490 - RNA, 80 nt, Homo sapiens
gccagaaaaggaaacgaccccggccgagcgaggagagagcaggcggcagagcaaagcgagcaaggggaaaaacgaacccg

SEQ ID NO: 143491 - RNA, 55 nt, Homo sapiens
ccagaccccagaaaccccgagcgggcggccaagacaagaaaaagcgagacaagaa

SEQ ID NO: 143492 - RNA, 73 nt, Homo sapiens
caccgagggcccagccgcgcaccagcgaccggccccggggcagaagagcggcgccgaggagaaggaaaaagac

SEQ ID NO: 143493 - RNA, 53 nt, Homo sapiens
ccacaaggcaccaagcgggggggagcgaagaaagcaggggaggaagcagcaag

SEQ ID NO: 143494 - RNA, 55 nt, Homo sapiens
ggccgggaggcacggacacacaaaaaggaaggaacccaacgaggaggcaaccaac

SEQ ID NO: 143495 - RNA, 71 nt, Homo sapiens
ccaggacagaggccagagacaggccccccacccggcgccccgggccagcgggacaccagcaagcaggggac

SEQ ID NO: 143496 - RNA, 76 nt, Homo sapiens
caaagagcaagccgaacggacgggagaacgaacggggaccacaccggggaacagagacacaagaccagcagccaag

SEQ ID NO: 143497 - RNA, 85 nt, Homo sapiens
aaaacgagagcgacccagagaagcaggaacgcagacaaagaaaagggggggagacccgcaagaaggacggcgggcccggaaggaa

SEQ ID NO: 143498 - RNA, 67 nt, Homo sapiens
cacaagcggacagaacagacgggacccccagccaaaggcaaaggcgacggggccaagggggaagaac

SEQ ID NO: 143499 - RNA, 79 nt, Homo sapiens
cacagagaacaagccagaaaaacagccgggcccaagaaagaagcagaacgcgccagcgggggaacaacaaaaagaccga

SEQ ID NO: 143500 - RNA, 76 nt, Homo sapiens
ggaggagacgggccgcacccgccccccgcgcccgccaccggccgccgcccggccaccaacggcggggggcgaggag

SEQ ID NO: 143501 - RNA, 34 nt, Homo sapiens
agaacgaagcaaaccggaaacagccagaagacca

SEQ ID NO: 143502 - RNA, 72 nt, Homo sapiens
gacggaagcagccaagccaaccgagagggcaaaaaacacagacaccggcgaacaacaagaaccggggagaca

SEQ ID NO: 143503 - RNA, 78 nt, Homo sapiens
gagacgcggcccggaccagccacgggagaagggcagcacggcaggagcacccgccccaccccccacaccaccggcaca

SEQ ID NO: 143504 - RNA, 76 nt, Homo sapiens
agacgagagagaagaggagagagaagaaccaacgccagagccggggaacagcggggacacagacaagcccgggcag

SEQ ID NO: 143505 - RNA, 71 nt, Homo sapiens
agaaaacccacagagaggagcggagaacacagaaccggcccggggaccacaaaccagcgccgacggaggag

SEQ ID NO: 143506 - RNA, 56 nt, Homo sapiens
cggggcccgaaagcggacccgggggcccccccgcacccagccgccccagccaccac

SEQ ID NO: 143507 - RNA, 77 nt, Homo sapiens
caaggaacaagagagcaagaggacgcaaacaacaggcgaagaggaccaaagaagagcaggaacagaaaaagaggcgg

SEQ ID NO: 143508 - RNA, 80 nt, Homo sapiens
gagcgacagaaagagagcgggggcagcgacagagccaaaacagagcggaaccgaggagagaggggcagccacaccccagc

SEQ ID NO: 143509 - RNA, 76 nt, Homo sapiens
ggaagccaaaggagaaggccggccacccaccaacaaagaggggagcgccacgaagggcaccaacccgcggcaccag

SEQ ID NO: 143510 - RNA, 77 nt, Homo sapiens
gccgccggccgcggggcggaggacagaacgaccgcccggccagcccaccccccgacgaaggccacggggagacacgc

SEQ ID NO: 143511 - RNA, 78 nt, Homo sapiens
gagccccagggagaacacaagcaccccggagacggaccccaaggaaccccgggaaccagagagcagcccccaacccga

SEQ ID NO: 143512 - RNA, 71 nt, Homo sapiens
ggcccgcccaagagcgacagccccagaagcaagagaggaaaacagaagcgggcaagcagcgaacaagggaa

SEQ ID NO: 143513 - RNA, 84 nt, Homo sapiens
cggcccggccgcgcccgcggaaccagaccagagccgggaaccaccacccccggccagaggccacccagcccgacaccaaccccg

SEQ ID NO: 143514 - RNA, 80 nt, Homo sapiens
gcacaggaacaagggacggccggccaaggccccagccacggaaagagagaacccggcaggggcagggggaccagagaacc

SEQ ID NO: 143515 - RNA, 77 nt, Homo sapiens
cgcgaccgaggggacgccgcccgccgcccgccgcaggccacccgggaacggaggagggaccgcaacccaccaaggag

SEQ ID NO: 143516 - RNA, 79 nt, Homo sapiens
gagcgagcacacaggacaggagagaaaccacaggacaagagacacgcaaaccaaggcgacggaaggcagccaaaaaaac

SEQ ID NO: 143517 - RNA, 97 nt, Homo sapiens
ccagaccccggccgccgaccgcggccccgccggccgccggccgcgcgggggccggcacagccacaccgagaagaccggcccaagaaccccaccgccc

SEQ ID NO: 143518 - RNA, 75 nt, Homo sapiens
ggcggcggcccaggcccggccccgaagagagcccggaaccaccggccgcagccgcagggaccaggcagacgacca

SEQ ID NO: 143519 - RNA, 68 nt, Homo sapiens
ggaggagaagccggaggaggacaacgacaccaccgcagcgacgagcagggaaagggagcagcaccggc

SEQ ID NO: 143520 - RNA, 60 nt, Homo sapiens
aaagcacaaacaggaggcaggaaggggcagagacagagcagccaggcacaagaagcagca

SEQ ID NO: 143521 - RNA, 77 nt, Homo sapiens
cagaacaccagcacggcgaaggaacgagaggagcaacagagacaggcggaggccaccccaccacagccgaccacagg

SEQ ID NO: 143522 - RNA, 80 nt, Homo sapiens
agcccacgaacagcccacgccaaaccagaccccaggccgccagcccagcgaaaagaggacagccaacccccaacaagaga

SEQ ID NO: 143523 - RNA, 64 nt, Homo sapiens
accgagaaggagcaggggaaagagcccggggacaaaggggggaacagaaaggaacggcaccgcg

SEQ ID NO: 143524 - RNA, 73 nt, Homo sapiens
aaaacaaacggacagcccagcgcgcagcgcaggccaggccgccgccaagggaccacgaaagccaggggggcag

SEQ ID NO: 143525 - RNA, 67 nt, Homo sapiens
agaggaacaacaagcaggcaggcgacggacagggccccccccacggaaacacgaggcaacaaaacag

SEQ ID NO: 143526 - RNA, 70 nt, Homo sapiens
gaagcggcggggccggagaagggcaaggacaaggaggcaagcgccaggaccgcggggggcgagccgccgc

SEQ ID NO: 143527 - RNA, 79 nt, Homo sapiens
agaaccaggaggaaccacagcaaggaagaaacaggacgagaagaggccccccaaaggacacaggacagaccgagaacga

SEQ ID NO: 143528 - RNA, 85 nt, Homo sapiens
caaaagggcaaccaagagagccccaaagccacggagcaccacacgccagaagcggacccagaagaggggagcagcaaggaggaag

SEQ ID NO: 143529 - RNA, 74 nt, Homo sapiens
gcaggaaacagaagaaggccagcgaggaaggacgcaaaacagaacccccccaggacagcaagaagaccagaaga

SEQ ID NO: 143530 - RNA, 70 nt, Homo sapiens
agagaggacacgaaacggacaagaaagaggagccgaacaaccaaaaaccaagggagcaaggaacgccgaa

SEQ ID NO: 143531 - RNA, 70 nt, Homo sapiens
acaccgccccgaagcaaagaggaggaaggagggaccggcccccagcaagccccaggggcgagccacaagg

SEQ ID NO: 143532 - RNA, 82 nt, Homo sapiens
gggccacaacggcgggaacccagacgcacaccccgcagcccggacagacccccgccccgaggaaaacggcacacgcaggagg

SEQ ID NO: 143533 - RNA, 92 nt, Homo sapiens
acgaggagccagcgcagggcagcagccgcccagaagaccaggcgcaaaaaccagacaccccacaccaccacccagacgaccaaaagggcacc

SEQ ID NO: 143534 - RNA, 86 nt, Homo sapiens
ccggccggacccgcagcaggcacaaggccccacgggagcgggacgaccagcaaggcaccagaagggggcccaggccagccagcccg

SEQ ID NO: 143535 - RNA, 109 nt, Homo sapiens
cgacccgccacacacgcgccgcggggacgggaaacagggcacggagaggccacaaaggcaacagagcgccaaaaagaggaccccagcacagcacagagcagggagagaa

SEQ ID NO: 143536 - RNA, 79 nt, Homo sapiens
cccgcggccagccgccgccagcgcccggccggccgaagcagaccccgccccggagcgggggagcgcagcaggggccgga

SEQ ID NO: 143537 - RNA, 75 nt, Homo sapiens
ccagaccagcagacaaagccccccaaacaccacaagacccacaggaccgcgaacaaggaggccacaaaacacccg

SEQ ID NO: 143538 - RNA, 75 nt, Homo sapiens
ccgcccgggccagcggccgcgcacccccggccggaggcaccagcgcaccgccagggaggagagcggggcacgcgc

SEQ ID NO: 143539 - RNA, 38 nt, Homo sapiens
gcggaccgccaacacccaggacagccagcaaaggggga

SEQ ID NO: 143540 - RNA, 57 nt, Homo sapiens
agcgggaaagaaggcaaaacacggggcccaccagcgacccccccccagcagagccgc

SEQ ID NO: 143541 - RNA, 65 nt, Homo sapiens
cgccagcggagcgaacccgagagcgggagcgggcgggccaggcgccggaccgaaggcgcgaccac

SEQ ID NO: 143542 - RNA, 73 nt, Homo sapiens
aaaagaacaaaaggaaaaaaggggaaaaaaagagaagacaaggaagaggagaccgacaacgaagaccccagga

SEQ ID NO: 143543 - RNA, 71 nt, Homo sapiens
aaaggaaaaggaaaaaacaaggggaagacccaaggaaccaggcgaagggacagcaccggccaaagcagccc

SEQ ID NO: 143544 - RNA, 85 nt, Homo sapiens
gcgagagccgcaccgccaacccccgagcaagacgggaaaaacagccaagcagaagaaccgaaaaacaagaaggagaagaaagaga

SEQ ID NO: 143545 - RNA, 37 nt, Homo sapiens
accacaagcccacccgcagaagaggcgacgagggagc

SEQ ID NO: 143546 - RNA, 77 nt, Homo sapiens
cgaacacaaccccacgccaaagaaaccagcccgaccaggcaaggaccacgcgagacaacgagggcgcggaccaacag

SEQ ID NO: 143547 - RNA, 78 nt, Homo sapiens
cacaaggccaggcaacgggaagagcgacagccccaggcccgggggggcggccgaagcagagaacacaaacacccgaaa

SEQ ID NO: 143548 - RNA, 83 nt, Homo sapiens
gcacccggccgcgggcggccgccgcgccgcccaggcccggaccaggagaccaagacacaccaccccagggggggcccaaccac

SEQ ID NO: 143549 - RNA, 113 nt, Homo sapiens
accgcaaaggaggcgaaccgggcgaaggaccagcgggaccagccccgccccacaccggcgcaggccgcccggcgagaccaaggggacagccgaccagaccggaacccacgagg

SEQ ID NO: 143550 - RNA, 38 nt, Homo sapiens
ccacccagcgacagcaaagaagacagaccgcgaggcca

SEQ ID NO: 143551 - RNA, 69 nt, Homo sapiens
cagaggcgggggcggcccagggaaccacaggacgccggagaccagaccacagaagagccgcagggagga

SEQ ID NO: 143552 - RNA, 72 nt, Homo sapiens
gaagagagacaaccccaggaccccaagagacggaaggacgaaggaccggggacaccacacagccccaggcgg

SEQ ID NO: 143553 - RNA, 82 nt, Homo sapiens
cacaccacgacaccgaaaacccaccgagcccgccaaagacacagaagccaggagcaaacacaagcaaagacagaccacagcc

SEQ ID NO: 143554 - RNA, 82 nt, Homo sapiens
cgcgacgccggcgccccgggcgggcgcagccgccaccggcagcagcagcaccaccggacggcccacgaggccgagaacacca

SEQ ID NO: 143555 - RNA, 67 nt, Homo sapiens
aacacaaccagaagcggaaacaagcggaaaggacacaggcagacgccagacacacagccccagcaac

SEQ ID NO: 143556 - RNA, 81 nt, Homo sapiens
cgcggcgggacaagcgcgacgcccggcgcgagccaagcgcgcgccgagcaaaagagacggaaaaggacacacgcccggggg

SEQ ID NO: 143557 - RNA, 74 nt, Homo sapiens
agcacaacaaagaagagaccgcaaaggaaacacaaacccgaaggacaggacaagcagaccgaccaaacagggag

SEQ ID NO: 143558 - RNA, 84 nt, Homo sapiens
gaggcagccaagccgagccgccacccggccgggagaacagagacccaccaagaaaccagaacccggacaagggaagggcccgag

SEQ ID NO: 143559 - RNA, 75 nt, Homo sapiens
gaggaacgggacaaagcggccagggagcacagaaacccaacagaggaagccgcaagaaacgggacgacaggaagg

SEQ ID NO: 143560 - RNA, 81 nt, Homo sapiens
cgggacggccggccccagacaccaccggaagagaagaacgaccggaagaggaggagagaggaccggcggccaccaacaggc

SEQ ID NO: 143561 - RNA, 81 nt, Homo sapiens
aggaccacaggcccagacgagcggaggaggcacagggcgcggaccgcacgagcgcgcgaccccccagaaaaggacagcaaa

SEQ ID NO: 143562 - RNA, 76 nt, Homo sapiens
ggagcccccgcccggcagccaccccgcgggaacgagcaggagcacgaaggggagaaaagggaaggccccaagccaa

SEQ ID NO: 143563 - RNA, 71 nt, Homo sapiens
accggggcccggcgcccgggcccgccccggagggacacaaacccccaggaacagccaccgggaggagaacc

SEQ ID NO: 143564 - RNA, 83 nt, Homo sapiens
gagcaagaggcgaccgggcaggcaggagcggcaccggagcgcgcagggggcgcgccgccgcccgccccagaccgcggcgaaag

SEQ ID NO: 143565 - RNA, 68 nt, Homo sapiens
ccgcggcgaaccggcgggaccccaaaggagccaggaagagacaagcaacgaggaaaagaaacaaaaca

SEQ ID NO: 143566 - RNA, 81 nt, Homo sapiens
ccaaagggagccccggggagccccagcccggcgagaagaggcgcggcgcggccagaccgcgcgagggccggcggcaggcga

SEQ ID NO: 143567 - RNA, 71 nt, Homo sapiens
agaaggaccaagaaccagacggacaaagaccaaagaaaagcaaacccggggaacgcgacacaacaacacaa

SEQ ID NO: 143568 - RNA, 76 nt, Homo sapiens
cgccgccgcacgggaccgccgagccacaccggaccacaccaaagaagggggccaccaagcaagcgagaagaagaca

SEQ ID NO: 143569 - RNA, 45 nt, Homo sapiens
agcagcgaagcaagcgaggagccaggccaaacacagccggaggca

SEQ ID NO: 143570 - RNA, 56 nt, Homo sapiens
gcagccggaggcgggaagcgcggacgaaaagaacaagcgcccggagacagcaacga

SEQ ID NO: 143571 - RNA, 79 nt, Homo sapiens
gcaagaccaaaggagcccaccaaaggccgaccccagagggggcaaccaacaacgaggaccagagccaggggcaccagag

SEQ ID NO: 143572 - RNA, 77 nt, Homo sapiens
aaccagcggggcgacggaagaggccaggacagcgagggggcagaaacaccaaggagcggccgcccccacccccacac

SEQ ID NO: 143573 - RNA, 34 nt, Homo sapiens
aacagcaggcagaaaaaagggaggcaaggagcac

SEQ ID NO: 143574 - RNA, 79 nt, Homo sapiens
cacagggagaaaccccacccccaagaaccaacccccaaaggcgggacaggcccccacagagagcacacaaacaaagcga

SEQ ID NO: 143575 - RNA, 78 nt, Homo sapiens
ggcgccacaaaggagccccacaccaccacacccgggccagcgagcagaaaagacaagcggagaaaggaccgagggcag

SEQ ID NO: 143576 - RNA, 66 nt, Homo sapiens
ccccccgccaggcgcgaccgcggcgccgagcggccgcgagaaccgggcagagcagcccggcgcacc

SEQ ID NO: 143577 - RNA, 60 nt, Homo sapiens
aagcaggagaccccccccagaacaaaggagccggcagacagcaacacagggcagggcgag

SEQ ID NO: 143578 - RNA, 74 nt, Homo sapiens
acacaagacgaacgggagaacagcagcagcccacgaacagaaagggaacaaggcacaaggagaggggaccacca

SEQ ID NO: 143579 - RNA, 74 nt, Homo sapiens
ggcggagcgacggggaggcgcggccaacggggccacaagcgccgacgaccaaaacaggagccaccacgagccga

SEQ ID NO: 143580 - RNA, 74 nt, Homo sapiens
cggagccacccagagcaacgcccgcacgggcacagacagggcaaggagagccaagcggaccaagaaggcaagag

SEQ ID NO: 143581 - RNA, 75 nt, Homo sapiens
gaagacccacccccaccagaggagaaccggaaggcagagaaaagacagaacaaggcagcccgagacaaaggcagg

SEQ ID NO: 143582 - RNA, 78 nt, Homo sapiens
aaccaagaagggccgggaccagcgggcccaccaaaaaggggaaggaacaaaccaaagagcagaccccccggaaaaaaa

SEQ ID NO: 143583 - RNA, 81 nt, Homo sapiens
agcaggcccgggcgaagagcccccccccaagcaaaagcggcgccaggaaagaacaaaaacgaagcaggcagaagaagagag

SEQ ID NO: 143584 - RNA, 89 nt, Homo sapiens
acggcccagcaggaggaggacaagcggaggggagcagcagaacaagaggcagcggaacggcgggacaacgcgaccgcacaccaacgcca

SEQ ID NO: 143585 - RNA, 63 nt, Homo sapiens
cgccggagacagaaacgagccccagaagcacacaaggaagacaggaggccagagcgaccaaac

SEQ ID NO: 143586 - RNA, 80 nt, Homo sapiens
gaccgcaacacgagcaggcaggccccgcaggccacccaggcccggaggcagcgcagagaaacagcacccaggacacccaa

SEQ ID NO: 143587 - RNA, 72 nt, Homo sapiens
gaaggcagcagaagggcgacgagaccaacaagacgagggcgcagcacaggaaacccgaccgccccaggggca

SEQ ID NO: 143588 - RNA, 68 nt, Homo sapiens
cgggcgccggcgcgcacaagggcagagggccagagcccagaaaagaacgcccaaggggcaagaaggac

SEQ ID NO: 143589 - RNA, 68 nt, Homo sapiens
accaagaaccagggaaggaagagaaccgaagaagaaaaccaaaaacgaaaaagcaagggagagcacaa

SEQ ID NO: 143590 - RNA, 85 nt, Homo sapiens
aacccaggcacagcggagccggcgcggggccacaaaggaggcagaaggcaaagcaagcccgcacagccggagacacacccaaggc

SEQ ID NO: 143591 - RNA, 72 nt, Homo sapiens
cgacccggacgcaagccgggagacgcacagcaagagcccggacaccggaagcgggaaagcacccgacgagga

SEQ ID NO: 143592 - RNA, 76 nt, Homo sapiens
ggggcgcgggggacgggagcggcagccccggcaagagggcagagcgccggcacaaccaacaggcccgcacccaggc

SEQ ID NO: 143593 - RNA, 75 nt, Homo sapiens
agagaaggcccgaggagagaacagaggcgagaggcccgggggccaagccgaccacaaagacccccggcgaaagaa

SEQ ID NO: 143594 - RNA, 79 nt, Homo sapiens
aaaggaaaaacgaaaaacaaaaacacaaaaaccaaccagccaaaacggacaagccaaggcacgagccaaagaaacaaac

SEQ ID NO: 143595 - RNA, 56 nt, Homo sapiens
ggcaagggcgacaaaggacacacggaacacgcaggaggagcaaaaaggacagagca

SEQ ID NO: 143596 - RNA, 88 nt, Homo sapiens
ccccggccagcggccacaggacggcggggcccgaagcccccggcgggcgcgcgcgcgggacgcgaccgcaaaacgggacaagcccgca

SEQ ID NO: 143597 - RNA, 62 nt, Homo sapiens
ggagaaccggaacccagcagacggcacccgaaaacagagggacgaggccacagcagaaaaaa

SEQ ID NO: 143598 - RNA, 81 nt, Homo sapiens
cggagcgagccccaggccggggaggggggagcacgagaagaacgagagcgaaagaacgacaggcagacagaaaaagagaag

SEQ ID NO: 143599 - RNA, 73 nt, Homo sapiens
cgcccagccaaagaaacaagccgggaaagggacaagaagggcaaagccgaagccgacaagggcacggcgaaaa

SEQ ID NO: 143600 - RNA, 90 nt, Homo sapiens
cagagaccaaggcgcgcccggcgggccggaccaaggaagaccgcaggaaagcaggaaggcaagaaagccaaggacgaaacccacacggag

SEQ ID NO: 143601 - RNA, 82 nt, Homo sapiens
gcccagcccagcagaggaccagccgcagcaggcaaaagcagaccggaaaacccaccggcaagaccacacccgaggggagccc

SEQ ID NO: 143602 - RNA, 75 nt, Homo sapiens
gcggcgcggcgccggcggagggaagaagacggcgaagcaccaacgccaaggggccccggcgcccgcgcagcagag

SEQ ID NO: 143603 - RNA, 49 nt, Homo sapiens
gacccgggcacccagagcagggagggaaaaacgaagagccgaagaacac

SEQ ID NO: 143604 - RNA, 80 nt, Homo sapiens
cggccgagcgcggaggcgccccgcgcagcgcgcgcccaagagaccgaaggagcagacgaggcacgagcgccagcgcgaga

SEQ ID NO: 143605 - RNA, 66 nt, Homo sapiens
gcgcgagccaggacccgaggcgagggcgccggcaccagggcgcaaccggaaagggaaggccacaag

SEQ ID NO: 143606 - RNA, 76 nt, Homo sapiens
ggaaccggcgccccaccaagagagaaagacagcaaagaaaaggagaagaaaggaaaaaaacaaccccgggcacccc

SEQ ID NO: 143607 - RNA, 80 nt, Homo sapiens
cgcgagccagcgcgccgcagccccccaagcggccgcgagaagcagcgggggggcaggcgacgaagggcagggccaggggg

SEQ ID NO: 143608 - RNA, 76 nt, Homo sapiens
cacgcccccccaaacggacagaggcgaaccgggcggggcggcccaaggggaagcgggcccggccccgcgggaaggg

SEQ ID NO: 143609 - RNA, 56 nt, Homo sapiens
caggcggaaagaaacaagacaacaccgacagcaaggaggcacagggaacacccaac

SEQ ID NO: 143610 - RNA, 62 nt, Homo sapiens
gagcaaacgcgaaccgcgcaggacgccaaaccaagccgcagggggaagggaaaagcacaggg

SEQ ID NO: 143611 - RNA, 60 nt, Homo sapiens
ccgccaggagaaaaaaggccgggcccaagaagcacgaagcgggggcagcccaaagcagga

SEQ ID NO: 143612 - RNA, 118 nt, Homo sapiens
caggggccaggcgaagcacgagcagaccggcccgaccgcccacagacccaaacaaaggccgccagacccacccggacccccagaaaaggaaacaaggaacaacaaaggagaagccaac

SEQ ID NO: 143613 - RNA, 78 nt, Homo sapiens
ccgggcgccgccccagcggagggcagccccgagccaggcccgccgccgagcgaggcacgcacacacagcaccgaagaa

SEQ ID NO: 143614 - RNA, 78 nt, Homo sapiens
gcggaacgcgaccgcagcacacgaggaccaaagacagagacaagcggggaagaacggcggagcacaccgaccaaaaaa

SEQ ID NO: 143615 - RNA, 54 nt, Homo sapiens
agccgcagccacaacaccggcaggaaccaccaggacagaggggcaccaaagcgg

SEQ ID NO: 143616 - RNA, 76 nt, Homo sapiens
gacaaaggaccagccagaaaagaaagagcgaggccggaaccaccgcaggcacggggacccagaacgcaccaccacc

SEQ ID NO: 143617 - RNA, 66 nt, Homo sapiens
ggccacgaggcccgcgcacgacccagccccagaggacaccagcggggcccgcccgggagaagcccg

SEQ ID NO: 143618 - RNA, 67 nt, Homo sapiens
gaagagccacagcagaaggagaggcgcaaaaagcgagagaacgcaccgggggcagacaccaccaagg

SEQ ID NO: 143619 - RNA, 79 nt, Homo sapiens
gccggcgcgggaggcgacgacccgcgcagacacggaccgcgggccagccgccaaagaccccgccgaaggaaaagcagac

SEQ ID NO: 143620 - RNA, 75 nt, Homo sapiens
aaccggcagcgaacaaggagaaagccacaacagggcggcaacaggggcgagaaaggaaagaccacacagggaaac

SEQ ID NO: 143621 - RNA, 89 nt, Homo sapiens
cagggggccggccgacacaccccgcagcaggcgggcccaggaccccccaccaggcgggccaggaagccccacaagaagaagcgcccccc

SEQ ID NO: 143622 - RNA, 57 nt, Homo sapiens
gacagggccaacgcgggacggaaggacccggaaccccacaggccgaggcacgaaccc

SEQ ID NO: 143623 - RNA, 76 nt, Homo sapiens
acggccagagggaccggagcaaaaagcgcacgcaaggaaaccgggacagcaggcgccgcgaaggcccaagcgcaca

SEQ ID NO: 143624 - RNA, 69 nt, Homo sapiens
caacccccaagcagagacccaaaggaccacccaagaagaccaaggcccaaaaggacccaagagagaagc

SEQ ID NO: 143625 - RNA, 73 nt, Homo sapiens
aaaacaacgacccacgaagcaaaagagaaaacgaggcccccaggacgcacccacaaggccaaaccaagccgag

SEQ ID NO: 143626 - RNA, 82 nt, Homo sapiens
ggaccggagaacaccgcgcgggaagaaggggcaacacccacgccccggagcccgggagcacagccggccagagaaacagacc

SEQ ID NO: 143627 - RNA, 63 nt, Homo sapiens
cggagccggcgggcggggaacccaggccccgccgaggcggccagagcaggcgccggggcggag

SEQ ID NO: 143628 - RNA, 48 nt, Homo sapiens
ggaaggagacccaaggaaagcgaaccggacggcccaccacgacgggcg

SEQ ID NO: 143629 - RNA, 38 nt, Homo sapiens
agccccaaggaaacagaaacacgaggagcagagcaaag

SEQ ID NO: 143630 - RNA, 78 nt, Homo sapiens
gagaacacggcgagggggaagcggcccccgcagacgccggcaggggagaagccccccgcggggaagaaccgggacggc

SEQ ID NO: 143631 - RNA, 69 nt, Homo sapiens
cgcaaacaaagacccggacccgaaagaagagccgcccgacacacaaacaaaaaaggacccccccgcaag

SEQ ID NO: 143632 - RNA, 65 nt, Homo sapiens
agaagggccaccccacagacggcaggaagaggcagaggaagaggaagaggaagaggacgggccgg

SEQ ID NO: 143633 - RNA, 73 nt, Homo sapiens
caaacgcagcagaaaagaaccagaaggagagggccgggcaaaacccccgagccaccagaaaagggaagcagga

SEQ ID NO: 143634 - RNA, 79 nt, Homo sapiens
cccccgaacaggccgaaaacagaagaccccggaaccagcacagagagcaggaccgaaggagaagaaggagaaggggagg

SEQ ID NO: 143635 - RNA, 72 nt, Homo sapiens
gcgaaggcccagagccgggggagacaagggcccgggacgagcggcccagcgacgagcgaagaggcacaaaac

SEQ ID NO: 143636 - RNA, 69 nt, Homo sapiens
aagaaaaaaaccagaggaagagaggggcacgaaaagggggcgaggaggagggagacaggggcaaaaaac

SEQ ID NO: 143637 - RNA, 76 nt, Homo sapiens
ggagagacgccgggagaaggcagcggacgcacacgcaccagaagaccgggcgaggccaccccgaggcaaggcccca

SEQ ID NO: 143638 - RNA, 74 nt, Homo sapiens
cccggggcgggccgacggagacaaccgcagccccggcaccaaaggacaggagaaggcggggaaaaaaccagaga

SEQ ID NO: 143639 - RNA, 72 nt, Homo sapiens
aaagccagacacagcggcgaagcgcggaagaccgaggagcagggagcaaccacaaggaaaggaaaccaccga

SEQ ID NO: 143640 - RNA, 71 nt, Homo sapiens
caggaaagccgccccaccaacaggacgggggcaaccggacagagaagcccaagagaagcaggaggagcagc

SEQ ID NO: 143641 - RNA, 71 nt, Homo sapiens
gcggcgggccgggcagcccggccgacaaccacgaggaaaggaagacagaaaacagaagcaggaaccaggga

SEQ ID NO: 143642 - RNA, 74 nt, Homo sapiens
acacgagaagccagcaccacaggggccagaaacgaacaagacggaccaaggaggagaaacaccggcgcacacac

SEQ ID NO: 143643 - RNA, 32 nt, Homo sapiens
cagacggccaagacagaggaaaaggaagccaa

SEQ ID NO: 143644 - RNA, 65 nt, Homo sapiens
ccgagacccggacagggcaggaaacaggcggcgggggcccgggcagggcccgagccccggaggag

SEQ ID NO: 143645 - RNA, 81 nt, Homo sapiens
cgcgacgggccccgagcgacgggcgaagggaggggggcagcggagcccaggcggcagcgccagggccacccaggcccgcag

SEQ ID NO: 143646 - RNA, 53 nt, Homo sapiens
cagggagggaggggaaagacccacaccaagagaggagcgcccggcccaggcgg

SEQ ID NO: 143647 - RNA, 114 nt, Homo sapiens
cacggcggccccgccggcggcaggagaagacacccggaccaaggaggaggcccggagcgacaacgaggaagagaaacaccaaggaaccacacaagaaaagaaagcaaaaggacc

SEQ ID NO: 143648 - RNA, 65 nt, Homo sapiens
cgagcggagcccgccggagagacagacacggccaaaacagaagaggcaaagcccagccacagcag

SEQ ID NO: 143649 - RNA, 74 nt, Homo sapiens
cagggccgaagcaaaagccaggaggaagagcagaccggacgagacacaccacgcagccccgggccagcccggcc

SEQ ID NO: 143650 - RNA, 78 nt, Homo sapiens
gggaagacgagccgagccaggcccgcaagaccgcagaagcccaccgggaacccggcaccgagcgacacaccaggacgc

SEQ ID NO: 143651 - RNA, 102 nt, Homo sapiens
cacagcaacacggccgaaaccccaagcaccaccaccaccccggaaaccagcccgacacgggaagagaagaggaggccacccgaagggaaccgcgcccccgag

SEQ ID NO: 143652 - RNA, 80 nt, Homo sapiens
acgggagaggcggccagaagaaaacgaggggcggaacacccgccaaagcagagaaaagagccggggaagagagggagggc

SEQ ID NO: 143653 - RNA, 69 nt, Homo sapiens
ggcgccaccaccgacgagcgaagagcaaggagaagacagaggagccagaccaagagacagcacaggcga

SEQ ID NO: 143654 - RNA, 72 nt, Homo sapiens
cggagggaagaccacggaaaaacagacagaacaaaggagaccaagaaaacgaaaaaggaaggaaaaccacaa

SEQ ID NO: 143655 - RNA, 74 nt, Homo sapiens
ggaaagaccccagaaaaccacacccgaagagacaccgaaagccaccccaccaagccacagaggaaaaggcgccc

SEQ ID NO: 143656 - RNA, 37 nt, Homo sapiens
aggaagacccaaaaggccaaccaccccagaagacgcc

SEQ ID NO: 143657 - RNA, 77 nt, Homo sapiens
ccccacgaggccccgggcagcgggccggccacggcgggagagcggcaagagaggagcaggagaggagggaagagaag

SEQ ID NO: 143658 - RNA, 79 nt, Homo sapiens
gaagaacgggcccgccggcccgcgccacggccaccacgcggcagacagggcccgcccggagcaaagacccgggagacgc

SEQ ID NO: 143659 - RNA, 72 nt, Homo sapiens
ggagacagggaaaacacagaccaagagccgagagagacagacaagaaaggcaaagaaaccccaaagccagca

SEQ ID NO: 143660 - RNA, 73 nt, Homo sapiens
acgaaacagcgcagccaggaacaggacgaagaccagcgccagggaaagaagagcaagaacgaggccaaggagg

SEQ ID NO: 143661 - RNA, 65 nt, Homo sapiens
gagcgccccaaaaggaaacagccagggggcagaacagggaagccgacagcaaggcggaaaagaag

SEQ ID NO: 143662 - RNA, 96 nt, Homo sapiens
gacgcggacaaaagagaagaaccaaaacggccccgccgccccagccaccagaagaacagaagaagaagaaaaaggcggaacaaagagcggcacccg

SEQ ID NO: 143663 - RNA, 82 nt, Homo sapiens
ggagccggagccgacgggcggggccgcacgggaccccggaacccgcgcgcgcccacgacgccgagcccccaaaacacaagag

SEQ ID NO: 143664 - RNA, 79 nt, Homo sapiens
gaagaggcggacggaggagcaggcgagaagagaagcgccacgcagagccccgccaggaagacacgccggggaacgaagc

SEQ ID NO: 143665 - RNA, 61 nt, Homo sapiens
aaacccagacgacacaacccgggcgcgccgagagcggcccaggaggaacaaccagcccacc

SEQ ID NO: 143666 - RNA, 75 nt, Homo sapiens
caaaggcagcgcaaaaaacagccaccgagcagccgagcgcgaggccaagggggaacaagcgcggaagccggacgc

SEQ ID NO: 143667 - RNA, 68 nt, Homo sapiens
gccgagacccagaccagcaggaaaaaaagcccacagacggaggacacgccgggacaaagacgcccaga

SEQ ID NO: 143668 - RNA, 74 nt, Homo sapiens
gcacagacgcggcagacggaccaacagcgcgcaaggaggaagagaagcacagagccacagacacgcgagaagga

SEQ ID NO: 143669 - RNA, 63 nt, Homo sapiens
ggcaccagacgggcgggaaagagaggcccggacacggacaggccaggcccacggcccggcgac

SEQ ID NO: 143670 - RNA, 84 nt, Homo sapiens
gccgaagagaggacgggagggcaacgagcacaacaggagcacgaggagggaaaaaggcgcaggcacacaggacggcccaccccc

SEQ ID NO: 143671 - RNA, 73 nt, Homo sapiens
gccggaggcaggggaaaggcgccacaggagccgcagaagcaaaggcaccgccaaaccgaaaacgcgggaaaga

SEQ ID NO: 143672 - RNA, 65 nt, Homo sapiens
aagcacagaagaagaaagccagcaagcagaagaagaggaaaacaccgaaccgacgaaagaggacg

SEQ ID NO: 143673 - RNA, 76 nt, Homo sapiens
ggaccagagaggacggcaccagccaggagggaagcgagaacgcggcgacaacgggacgcccgcgaagaaagaagag

SEQ ID NO: 143674 - RNA, 59 nt, Homo sapiens
acccccgggacacgggccccacaggcgcgacacgccgaccgccgcgccagcacaccccc

SEQ ID NO: 143675 - RNA, 46 nt, Homo sapiens
cggcgcccaacaggcgcaacaacgggggcaggcagagagaaagcaa

SEQ ID NO: 143676 - RNA, 79 nt, Homo sapiens
ccgagagcgggaccacaggccaagaccaaagaaaaaagagaaggaaagcggacaaaacgcggaaagaggccggaccgac

SEQ ID NO: 143677 - RNA, 91 nt, Homo sapiens
ccgggccacccgggcgaggcagagaagggccaggagaggagcacgaggacaggccccgacgaggacagccggcgcggaagaggccggcggc

SEQ ID NO: 143678 - RNA, 84 nt, Homo sapiens
cgacacaagcccacgcgcccgcagcaagacgggacggagggggaagacagagaagaccacacaaccgaaggggccgggcaggac

SEQ ID NO: 143679 - RNA, 80 nt, Homo sapiens
cggggaggccgaaacagaaaccacccgccacccgcccagcaaagaacagacggacaacaggaagccaagccacaagaccg

SEQ ID NO: 143680 - RNA, 74 nt, Homo sapiens
gaaaaacggagagccacaaaaaaggaagcgaaagcagaaaaagcaggagcaccagcgcaagcacagaacagaca

SEQ ID NO: 143681 - RNA, 58 nt, Homo sapiens
gcaagcggcgacacacgacgggccaggcagagcagcccaccagggaggggaggggggg

SEQ ID NO: 143682 - RNA, 71 nt, Homo sapiens
caaaccaaaaggagagcaagcgccagcacccaagagaggggcagacgaaaggaaaagaggagaaaggaacc

SEQ ID NO: 143683 - RNA, 73 nt, Homo sapiens
ggggccagagaggcggaagaggaggccgagggggccaaaccaagccgaggcccagcggaacgcccccgggaga

SEQ ID NO: 143684 - RNA, 81 nt, Homo sapiens
agcgcgacgcccggcgcgagccaagcgcgcgccggacgagcagggggaggaacaaagcgaggaagggaagggaaggcgaca

SEQ ID NO: 143685 - RNA, 52 nt, Homo sapiens
aagaaacacagccaacacgaggccaggcagagaggcggaccccgcgggcgcg

SEQ ID NO: 143686 - RNA, 79 nt, Homo sapiens
gcaccccccagaaagccaacagcggaccagcacacaccgaccgacaaagcaggaggcgccaggcggcgagccagacggg

SEQ ID NO: 143687 - RNA, 76 nt, Homo sapiens
cgccgccgccgccccggcgaggcgcagaaaccccggacaaggcacgccagacgggagaagaaccaacaacggaaaa

SEQ ID NO: 143688 - RNA, 81 nt, Homo sapiens
aagccacaggccaccgccggaaccgcgggcccgaaggggacaggcccggccaggcccccgaggggcccccacgcggacagc

SEQ ID NO: 143689 - RNA, 82 nt, Homo sapiens
caccggagcggagcgcagcagcgccgccggcgcggccgcggagcccccgagacaagcagaccggaagaccgacggaagacca

SEQ ID NO: 143690 - RNA, 71 nt, Homo sapiens
aaaagaagaaccgcaaaagccagaggaaaccgcaagagggaagggaaacaggcaaggcagaccaagaggca

SEQ ID NO: 143691 - RNA, 73 nt, Homo sapiens
gccgaggacccaaagaacggccaggaaaagcgccaacagcagaaaacacggaaggcaagaaagaggaaacaga

SEQ ID NO: 143692 - RNA, 65 nt, Homo sapiens
agaagagcgggggaaagaggacaacagggagcacccagaaagacgaaaccaaaaaggagaagagc

SEQ ID NO: 143693 - RNA, 73 nt, Homo sapiens
aaagcgcgcggagccggcaccggggcaagagcaggacggagacgacgcagccagagcagcaagaggccaaggg

SEQ ID NO: 143694 - RNA, 67 nt, Homo sapiens
ccccacaaaaccaagcgaggccaggccgccggaccgccaagggccaaggaggaagcaagacagccca

SEQ ID NO: 143695 - RNA, 82 nt, Homo sapiens
agggggccacacagccagggcagcgccccccgaaacaagacgcaggccagcagaacgaagcggggaacaggaagcaaaaagg

SEQ ID NO: 143696 - RNA, 83 nt, Homo sapiens
aaaggacgaccagcggacacgaacaggcaaaagcagaccggaaaacccaccggcaagaccacacccgaggggagcccaggaca

SEQ ID NO: 143697 - RNA, 53 nt, Homo sapiens
gcccggggcaaagcagcaaagcaccacggacaggccggagagacacagggccg

SEQ ID NO: 143698 - RNA, 65 nt, Homo sapiens
ggagacccggggacccccgacgccaggcagcgcccccaaacgcaagaccgacccgaacgagagcc

SEQ ID NO: 143699 - RNA, 75 nt, Homo sapiens
cagccacaccaggcccagaggccaggcagacccagccaaaccgggcaaagcgaaagcaaagcaagggggaaacag

SEQ ID NO: 143700 - RNA, 73 nt, Homo sapiens
ccccaagacggcccccgggcgcgcggacaccgaagcccgaggccacaggacacgccaagggagcggcccccac

SEQ ID NO: 143701 - RNA, 74 nt, Homo sapiens
cacacaaccggaccacggagaaggacagaagaaaagggaagccagccccaaaggcgaagcgcaaaagagaaccg

SEQ ID NO: 143702 - RNA, 74 nt, Homo sapiens
cccagacggggaagagacacgacagacagcgcacgaaacacacaaagaaccaccaccgggaggaagccagacaa

SEQ ID NO: 143703 - RNA, 86 nt, Homo sapiens
ccgccccccgccggccgccccggcccgccggacccacggccgccccggagcccgacgcggggaaaagagcaaagaagaagcagcga

SEQ ID NO: 143704 - RNA, 74 nt, Homo sapiens
aaggggacacggcccgacgcggagggccggcaacggccacagcaccggggggacggcagcacacgacgggagga

SEQ ID NO: 143705 - RNA, 73 nt, Homo sapiens
ggcaacacaggggagagagccggcaaccagcagaaaagcaacaaggaggacaagaaggaagaccgcaaacaac

SEQ ID NO: 143706 - RNA, 73 nt, Homo sapiens
acagccagcaccgcacgcccgcaagggagggagacaacaaggacaaagccaaagccgagaaacgacgcccaca

SEQ ID NO: 143707 - RNA, 41 nt, Homo sapiens
aaaacaccagggaggagaaggagcacaacaggcagacagac

SEQ ID NO: 143708 - RNA, 86 nt, Homo sapiens
cggcggacggggggggccgcgcccggccccgcgcgggcggacggcggaggcgcccccaggagaagacagaggagccagaccaagag

SEQ ID NO: 143709 - RNA, 77 nt, Homo sapiens
cagccaccacagacaggccaacccccaaggagcgaacgcagggccccacaccccagccaaagacagccagcgaggac

SEQ ID NO: 143710 - RNA, 78 nt, Homo sapiens
cagacggaggccccggagccaggcaggcaggccacacaacacgcaaggaagcagaccgagaacagcaagagaacacaa

SEQ ID NO: 143711 - RNA, 83 nt, Homo sapiens
aaaggcagaccaacaagaggacccaggagaaacgccccaaagggcccgaggcagccgggagacagccccccaggaaccgcgcc

SEQ ID NO: 143712 - RNA, 81 nt, Homo sapiens
acagacacggggaagcgcaaaaacaagacggggcgccccacagaggggcgacgggaggcaagcacgcaaggcgaagccagg

SEQ ID NO: 143713 - RNA, 72 nt, Homo sapiens
gggaagagccccagcacagagggaccgggagccgcaccaacgaaccaaaggcaagaaccggagcaggagaaa

SEQ ID NO: 143714 - RNA, 74 nt, Homo sapiens
gcacccgggcccagccgggaacccccacgcggccagcgaaaacgcccagaacccgccacccccacccggcgccc

SEQ ID NO: 143715 - RNA, 66 nt, Homo sapiens
aggcgccgggagccaaggaccaggaaaaaacacagggaggcagaagccacaggaagagccaaggaa

SEQ ID NO: 143716 - RNA, 49 nt, Homo sapiens
gcaaggccaagagaggacgcccaaccacagcccagaaggaggcagcggc

SEQ ID NO: 143717 - RNA, 84 nt, Homo sapiens
aggaaaacaaccgagggcagaacagacgcgaagcaaagcgccacccagaagacgacagcccagcaaccccccgagggaacgcac

SEQ ID NO: 143718 - RNA, 65 nt, Homo sapiens
acaacccacagaagcccaacagaaaccggaaggcgaaacagcgcgccgaagagcggaaacaccgc

SEQ ID NO: 143719 - RNA, 81 nt, Homo sapiens
gcgccggacgcgagcgaggcggagaagggacacggcaggcgccagagccagaggacagaaagcagagcaccccacccacca

SEQ ID NO: 143720 - RNA, 81 nt, Homo sapiens
gcccgggcgccccgcagccccccaacaccgcccgccaggacgacaggggggcgggccgagcacccgcaggccccgcagagg

SEQ ID NO: 143721 - RNA, 65 nt, Homo sapiens
gcgcgccggaaaccggagcgcgcagcagcggccgcgagaaccgggcagagcagcccggcgcaccc

SEQ ID NO: 143722 - RNA, 85 nt, Homo sapiens
gcgggaggacggcacaccgcggcggaacagggcggaaccgaccaaccggaccagacagaagcaggagggaggcgaaaaaacgaag

SEQ ID NO: 143723 - RNA, 83 nt, Homo sapiens
gcccccaggcgcgcccagccccgcagccagggcgaacccccgcagacgcaaacagcagacggaagaccccacggcaaaaccac

SEQ ID NO: 143724 - RNA, 77 nt, Homo sapiens
ggagcccggcgcccgcggccagccgcaagacccgccacaagcaacgcgggaagagaaggacccaggccaagccacca

SEQ ID NO: 143725 - RNA, 66 nt, Homo sapiens
cgcggacgcgagacggcccggcgcagcgagcgcggacggagaggaaagcgaacacagaagagaacc

SEQ ID NO: 143726 - RNA, 73 nt, Homo sapiens
gagacagcgggagccacggccacacgggagagaagcccaggaagacacgagaagcccgaggaggcgaagccaa

SEQ ID NO: 143727 - RNA, 79 nt, Homo sapiens
caagggcaggaacgcacagaaggcccaagggaccaagaaaggcccagggaccaaagcccggacaaggcccgagcaccag

SEQ ID NO: 143728 - RNA, 81 nt, Homo sapiens
gccagggcccaaagaaccggggcaggacccaccacggcgacccccgcggcgggaagaaggcagccacagcggaagcgcggc

SEQ ID NO: 143729 - RNA, 77 nt, Homo sapiens
agacgccagcgggacgaggaccgagaccgcggccgggaccgaggggaggcgggacagaacgaacaaaagggaaagag

SEQ ID NO: 143730 - RNA, 55 nt, Homo sapiens
cgcagcggaggcgcggaaggggaaagcagcagacaaaggaggggggaaagcaaag

SEQ ID NO: 143731 - RNA, 78 nt, Homo sapiens
ggcacacgagggagaagacaaaaagcgagcaaccaccaaagacaacagaagaacccagggaagcgagccgcagacgag

SEQ ID NO: 143732 - RNA, 43 nt, Homo sapiens
cagaaggagcaggaaccaaaggacgaaacggaggagcccagga

SEQ ID NO: 143733 - RNA, 73 nt, Homo sapiens
ccgcaacaagcggcagcaaggccaaaacagaagaggcaaagcccagccacagcagcagcccagcagcaaacaa

SEQ ID NO: 143734 - RNA, 57 nt, Homo sapiens
ggccaccacagaaacaaaagcaacaaagagggcgaggccaggggccaaaacaacgcc

SEQ ID NO: 143735 - RNA, 68 nt, Homo sapiens
ccgccgcccccccccacgcgccgcggcccggccgcgcccagcagggggggccccagcccggccgaacg

SEQ ID NO: 143736 - RNA, 78 nt, Homo sapiens
caggccaagagggacccacccggcgggaaagggagcagcaccggccacacccacagcacgaccggaacccagcgaccg

SEQ ID NO: 143737 - RNA, 70 nt, Homo sapiens
ggacccggacaaccagaggcagccagcagggggaggacccagacagacggcacgcccacagaggagcggg

SEQ ID NO: 143738 - RNA, 75 nt, Homo sapiens
gcgaggccaacgaccggagaggggaacagacgcagggcagggccccgcccggcggggaagggcgccagggaagga

SEQ ID NO: 143739 - RNA, 40 nt, Homo sapiens
cgcaggaggacgcagacggagacccacgaggaagcggccg

SEQ ID NO: 143740 - RNA, 79 nt, Homo sapiens
cggcggaccgcgagacagccagccgaccgaggaacaagcagaaagcacgaacaacgagaacaagacacgagcaaacccc

SEQ ID NO: 143741 - RNA, 53 nt, Homo sapiens
gcgaaaaggaagcggaagggaaagaccacagcaagaccacgcccccagccggg

SEQ ID NO: 143742 - RNA, 77 nt, Homo sapiens
agaaggaggaggggaaccgagcacagcaaaaggggcgaggaaaacgcagcgggccaaaagcagagaaccaaagaaca

SEQ ID NO: 143743 - RNA, 77 nt, Homo sapiens
gcccagccgggaacccccacgcggccagcgaaaacgcccagcagcaggcaacaaaagaaaaagaccacagagaggaa

SEQ ID NO: 143744 - RNA, 55 nt, Homo sapiens
cgccccgagccccacacaccacacgccccagcgcaggagaacaccaaccaccagg

SEQ ID NO: 143745 - RNA, 76 nt, Homo sapiens
agcccaggaacaccaccggaccagaagcgggccagccagcaggccagcccaaacacggcgaaggcaagggaccggc

SEQ ID NO: 143746 - RNA, 76 nt, Homo sapiens
aaggccacaacccaagaagaaaggccaaaaaaagcaagggacgcaaggggggccaccacagcaacaggcacagaaa

SEQ ID NO: 143747 - RNA, 82 nt, Homo sapiens
ccaaccaagaagggaggagcgacggacgagccggagagccacccgaaacaagaaagaaacacaaagacaaggaaagaagagc

SEQ ID NO: 143748 - RNA, 72 nt, Homo sapiens
gcgacggcgccggcggcccgacagaagcgaaggggacagggggagaaccgccagggaaacccgggggacaga

SEQ ID NO: 143749 - RNA, 66 nt, Homo sapiens
gaaacacaaggaaccaggcacagggcgagaggcagcgcaggcaccccccgacagcggagacagaca

SEQ ID NO: 143750 - RNA, 60 nt, Homo sapiens
ggacaccagcgcggaagcggcggcaggaggaaagacaagccccaaaagcagccgggaaag

SEQ ID NO: 143751 - RNA, 83 nt, Homo sapiens
ggggggcaaggccagaggccagcccaagcggcccaccccggcccggaaggagcagcaccacaggcgaagcggccaggcccggg

SEQ ID NO: 143752 - RNA, 77 nt, Homo sapiens
ccaggaggcaaccgagacgcagcccgagaggggcagggaccaggcccgggaggccacacggacggcgagaacggccc

SEQ ID NO: 143753 - RNA, 79 nt, Homo sapiens
gaaaggaaagaggagaaagaacacggaacagaacaacccagaacggaagccccccggaaaaggggaacggcgagggaac

SEQ ID NO: 143754 - RNA, 85 nt, Homo sapiens
gcgcccgcgcccccgcgcgacgccagagaaccgggagacgacgcgcacgcgggggcggggagaagaaaggggccccgggcccggg

SEQ ID NO: 143755 - RNA, 58 nt, Homo sapiens
cccgagcggggggacgcgccaggcacagcagcagggcggaaagaagaggaaagaaaca

SEQ ID NO: 143756 - RNA, 78 nt, Homo sapiens
gacgaggagagcacgacggaccaagacgagcccagcgcaaccccaagcgcccaaagcgcggggaccacgagccaggac

SEQ ID NO: 143757 - RNA, 68 nt, Homo sapiens
gaagccagaggaaagggcagacagagacccagaagggcagcaggcaccagaacggaaaaaggggccgg

SEQ ID NO: 143758 - RNA, 66 nt, Homo sapiens
ggaggccccccagccacgggaacccccaggaggaccaaaaggagcgcgggccgagccgagggcgcc

SEQ ID NO: 143759 - RNA, 39 nt, Homo sapiens
ccggagccagccaacgagcggggcgagcaccaaagccaa

SEQ ID NO: 143760 - RNA, 84 nt, Homo sapiens
cccaccgccggcgcgggaaacgggcgaagcgacgagccgcgaggagcggaagcgagagaggagaggaaaggacgagacccccag

SEQ ID NO: 143761 - RNA, 76 nt, Homo sapiens
cgaaccaggaagagagacgacgagcaacagacagggacagacagccagagggaaacgagagccagaagggaaagac

SEQ ID NO: 143762 - RNA, 47 nt, Homo sapiens
aggaaggcagaagagaggagggcgaagggaagaagcagaaaccagcc

SEQ ID NO: 143763 - RNA, 80 nt, Homo sapiens
cggaccgcgcacgggcaggagcccaaagagaaggaaaagccaaaacccaggccgaagaaaccccgaacgaagagccaacg

SEQ ID NO: 143764 - RNA, 74 nt, Homo sapiens
cgagaagcacgcacagggccgcgggaagaccagccccaaaggaagccaaaaggcgggcagccacgccggagacc

SEQ ID NO: 143765 - RNA, 53 nt, Homo sapiens
cccgacaagacggagaacaaacaaaggcgagacaaagaggcacccccacggcg

SEQ ID NO: 143766 - RNA, 81 nt, Homo sapiens
gaggcacggacaacacaccggaggcagggggacacagccacccaggaccggccaggaccgacgggcagaacacaagcagca

SEQ ID NO: 143767 - RNA, 80 nt, Homo sapiens
ccgcacgcaccagacgcaaacgcgaaaaggagggcgaagaaaaaagagggcccaaggagaacagccagcaaagacaagag

SEQ ID NO: 143768 - RNA, 76 nt, Homo sapiens
gacaggaggagccagggcccggcccgaaaggagagccgaaccaagcgaaaagacacgcacagaaaaaacaagaggc

SEQ ID NO: 143769 - RNA, 76 nt, Homo sapiens
cgcgccccgcgcgaccccggggaaacaccccgacagcaccacaacaaggcagcgcgcgccggaccagcccacagcc

SEQ ID NO: 143770 - RNA, 87 nt, Homo sapiens
ggacccgcaagcagcccaccacgccacaaacgccgcaccaggcgagcagcgcccccgcggagaagcggaggagaccaaggaggccac

SEQ ID NO: 143771 - RNA, 54 nt, Homo sapiens
ggaggagggaggaaaacgcagggcgaaggggaaacgaccgaaccaagaccgaac

SEQ ID NO: 143772 - RNA, 82 nt, Homo sapiens
agcaggaccccgaggacgaaggggagcgggaggagcgggggccgccggcggcccggccaggggagacggacgcaaagacaag

SEQ ID NO: 143773 - RNA, 67 nt, Homo sapiens
cgccaagccgcgccggcggacccgcacggcggggagcaccgaaagcgagacgacgggaccgaaggac

SEQ ID NO: 143774 - RNA, 84 nt, Homo sapiens
gccgacaccacaacaaagaagaccacacacgggaaacacaaaacaaacacccgccgggcagcagaggcggaggagaaacaaaaa

SEQ ID NO: 143775 - RNA, 74 nt, Homo sapiens
gaagaggagacgacggacggcgggcaccggccgacgggaagcgagaaacagagagacaggccaaagccccaagg

SEQ ID NO: 143776 - RNA, 35 nt, Homo sapiens
gccacgaggacgagaggggggagaggaggcaagaa

SEQ ID NO: 143777 - RNA, 81 nt, Homo sapiens
cgcggcggagggaaaaaggaagaggagaaggaaagcccgaacccgcagggggaggggaaaaccccggggaagagccaagag

SEQ ID NO: 143778 - RNA, 77 nt, Homo sapiens
gccgccaagaagaccgagagcaccacaaggccaagggcaaggagacagggcgggagggggacggcggccccggagcc

SEQ ID NO: 143779 - RNA, 37 nt, Homo sapiens
caagggcagaagacagcaggcggagacagggcacgac

SEQ ID NO: 143780 - RNA, 78 nt, Homo sapiens
gaaaacagacgcccagccaaacaaaaaggaaaggagacaagcagagacgaaccaggcaaagaaacacaggggaaacac

SEQ ID NO: 143781 - RNA, 76 nt, Homo sapiens
gaggcacccccggaccagaacggcacggccacgggcgggcaggcaagacaacagagaagcaaaggccagaaacaga

SEQ ID NO: 143782 - RNA, 75 nt, Homo sapiens
ccaaaccacagacaacaacaggacgaacgacagacggcagcgcagacggaccccgggagaaagagacaacgacaa

SEQ ID NO: 143783 - RNA, 77 nt, Homo sapiens
cgcgcgaaaaaaggagagagaagccaaaagcccggaaacagcagccaggagcaggggagagaagacagaagagggga

SEQ ID NO: 143784 - RNA, 77 nt, Homo sapiens
gaacaaaccgaagaacagcgggaaagaaggcaaaacacggacaacagacacacccagaagcgccagcgaggggagca

SEQ ID NO: 143785 - RNA, 68 nt, Homo sapiens
aagaaaccagaaagagaacgggacaacaaaagagccacccaaggcaaaccgacaccagcgacacaagc

SEQ ID NO: 143786 - RNA, 36 nt, Homo sapiens
aaaccgaggcgagacccaaaggcgaccggcccgagg

SEQ ID NO: 143787 - RNA, 64 nt, Homo sapiens
cagcgccggcggccaggaaacccacgccagacgaagacaacccagacaccgcaacgcccacagg

SEQ ID NO: 143788 - RNA, 75 nt, Homo sapiens
ggaaaacaaaagaggaaggaacggaaaagagcgcgacagagggagagcacccgccacaggccacaaaggaggcag

SEQ ID NO: 143789 - RNA, 75 nt, Homo sapiens
cgcaccagacaacgccccgggaccggagcagaacccccgcagagaaagggacccacccccaccccacccagagac

SEQ ID NO: 143790 - RNA, 74 nt, Homo sapiens
gacaagcggagccccgcagcgcgcaccgagagggacgccacgacgcccagaaggggaagacccccagcgaacag

SEQ ID NO: 143791 - RNA, 58 nt, Homo sapiens
ccgcccggccaccccgcacgcggaagcgaggaccacccgcacccaggggacgcacggc

SEQ ID NO: 143792 - RNA, 64 nt, Homo sapiens
agcgaaaaaagcagccacaaccgaagaaagaaaacccacagaaaacccaaagaaaccgaggacg

SEQ ID NO: 143793 - RNA, 69 nt, Homo sapiens
cccagggaccggcaccgcagcaccagagggcaagggcgcagcacgcagacccgcaagccccaagcagag

SEQ ID NO: 143794 - RNA, 49 nt, Homo sapiens
accaagaaccagccgagcggccagagagccagagcaccagcaaaggaaa

SEQ ID NO: 143795 - RNA, 70 nt, Homo sapiens
gaagaacgggcccgccggcccgccgcagaaagcaacaaagcgagagcacaagaaaacagccccgagcacc

SEQ ID NO: 143796 - RNA, 74 nt, Homo sapiens
aagaggagacaagagacggcaggcagaggaagcccaaggcccgaagaagcccaagccagaagccagccagagca

SEQ ID NO: 143797 - RNA, 71 nt, Homo sapiens
gcgcggggaagaaggggccgacccacacccggagcaggcccagccgagaagaaaccgcaagaaagaaagcg

SEQ ID NO: 143798 - RNA, 85 nt, Homo sapiens
ggacgaggccgcgggggaggcggcggcgccaagcaaggccacggccgcaagaccacgagggacacccgccgggcgcacaaggcca

SEQ ID NO: 143799 - RNA, 68 nt, Homo sapiens
cgcgggcgcgcacccgagccgcaaggcgcacacagagaaagcgagaaggcagagggccaaacgaagcc

SEQ ID NO: 143800 - RNA, 79 nt, Homo sapiens
ggaggaggcacagggcgcggaccgcacgagcgcgaacccaggagaaacgagagggacagcaaggaagacgccagagagc

SEQ ID NO: 143801 - RNA, 55 nt, Homo sapiens
agaaacaccgaaccgccacccaggcccaagaagacagcccaccgaggaagaccaa

SEQ ID NO: 143802 - RNA, 76 nt, Homo sapiens
acggagaaaacccggaaccgcgacggcggcagcaaaccagccggcgggcgccacaacggacgacgaaaacacagcc

SEQ ID NO: 143803 - RNA, 85 nt, Homo sapiens
cacaacccgaaggcgaacacagaggaaaccgcaccgcccggaggagagaagagacgaggaggaggggagaccgcggcaggacacg

SEQ ID NO: 143804 - RNA, 74 nt, Homo sapiens
gacaggagcggccaaccggggcgcagggcaaggcagggagcccgacaacacagggcaggaccgcgacgagaaga

SEQ ID NO: 143805 - RNA, 79 nt, Homo sapiens
cgcgaagagcgaaagggggacaccggggcagcaggaagagccagcgccaaaacaacaaaaaccagaggcacagacccag

SEQ ID NO: 143806 - RNA, 83 nt, Homo sapiens
gcagcgaggcgaaagcaaccacaggacgcacaaaacagaaacaaggacccggaaaggaagaaaacaaaaagagaagaaaacaa

SEQ ID NO: 143807 - RNA, 77 nt, Homo sapiens
acaagcgccccgacggagcgccaggacggaagaaaacccagcccggaacaaagacgcaaccggcagaagccaggacg

SEQ ID NO: 143808 - RNA, 117 nt, Homo sapiens
cagagcagcaagaccgccgcaggggcacccccaacgagaaccgaacacacaaaagccaagggcacagagcgaggaggacgaccgcagcccagaacccccaggacagacgaccccccc

SEQ ID NO: 143809 - RNA, 79 nt, Homo sapiens
cacacgcccccgccaacacccgagccgaagggaaggaagccagcgaagcaccgggacacgagacggccacacacggaca

SEQ ID NO: 143810 - RNA, 61 nt, Homo sapiens
gcaaaaagacccaccaaggaagcagcggccacgccagcagggcagcaagaacgaaaacaag

SEQ ID NO: 143811 - RNA, 94 nt, Homo sapiens
aggaggcccaagacaccacagaagcccccgagcccagaccagaggcgcggcaggcccgcaggcacccaggcgagcgggacacagcccggcggac

SEQ ID NO: 143812 - RNA, 63 nt, Homo sapiens
cagccgccagcgggcagaggaaagaaaagaagacccagagagaagacagacgccacaaagaga

SEQ ID NO: 143813 - RNA, 81 nt, Homo sapiens
gcgcaagggcgcggagccgcgggccggcgagcgcgcgccaccagagaggacagagacgaggcgggcccaagggcaccaccg

SEQ ID NO: 143814 - RNA, 39 nt, Homo sapiens
aaggccgagagccgccccagagaaagggaaaaccgccgc

SEQ ID NO: 143815 - RNA, 76 nt, Homo sapiens
acgcacaccccaggagaagaacccagaaaagacagcaaaaaaccagccccacgaaaccacaagaacggggaaccgg

SEQ ID NO: 143816 - RNA, 68 nt, Homo sapiens
aggagagacgggagcccgacacaggacaggcgcaacagccagacccgccgaaccccacaggggcagga

SEQ ID NO: 143817 - RNA, 72 nt, Homo sapiens
agggcagagacagcggacgacggccacagaaccccgagagccccgcccacaaaagccgaggacggggcgccc

SEQ ID NO: 143818 - RNA, 79 nt, Homo sapiens
cagaagcgggacggccgcacccaaccaggaggcacacccgccggacaccacccgccagagccggggaggacgagagaca

SEQ ID NO: 143819 - RNA, 77 nt, Homo sapiens
agaagacaaccaggcaggggggccaaacgcgaggggggagacacgccacgcggccaaaggaacacggaggaaaagca

SEQ ID NO: 143820 - RNA, 83 nt, Homo sapiens
agagaaacaaaggacggaaacgccgaggaacccggcgaggcggcaggggcagagcgccacgggaggcacagacagggcgacag

SEQ ID NO: 143821 - RNA, 59 nt, Homo sapiens
gcgagccgaaaagcgagcgcgaggaaaaggcggcgggagaggagcaagaggggggggcc

SEQ ID NO: 143822 - RNA, 68 nt, Homo sapiens
ggcgcaaaagagaacaccaagggaaagcaagcaaggacagcagccagaaagcagcgggggacgaagaa

SEQ ID NO: 143823 - RNA, 75 nt, Homo sapiens
aggagcgcaagcaggagcgccgcgcgaagagccaaggagagcgagacgacgggaccgaaggaccccgccagagac

SEQ ID NO: 143824 - RNA, 78 nt, Homo sapiens
acacaacaggaaaacaaaagaggagaaaggaacgccagcgccggagaccaccgaaccgggccgaaacagccgggcgag

SEQ ID NO: 143825 - RNA, 83 nt, Homo sapiens
cccacgccgagcggccgcgccgaccaccacccggcaccacgaggcccagccagcaccgcgcacccagcagcacccaaagggac

SEQ ID NO: 143826 - RNA, 69 nt, Homo sapiens
gcagcaggaggagcagcccggaagccgcagacagggaggacccgagcccggcgagaaaaaaaacaaaga

SEQ ID NO: 143827 - RNA, 68 nt, Homo sapiens
cacccagcacaccccgcgaaaggaggaggcacagagccaagggcagggagccagcaccggccaacggg

SEQ ID NO: 143828 - RNA, 107 nt, Homo sapiens
ggcgccgagcggggagacccgggcacccaaggaaagcgccagagacgagagcgcaccacccggagcgagacgcgccgaaggggggagccaccgaacgagaagaagcg

SEQ ID NO: 143829 - RNA, 61 nt, Homo sapiens
cgggcgcgggggccggggcgcgcgcagacaaaacagaggagaccagaccagaagccccgaa

SEQ ID NO: 143830 - RNA, 88 nt, Homo sapiens
cgaaaccggaggcccggggggcccagccccgagggagccggggcgccgggcccgggccgggcagacgaggcgaggaaccaaaggccac

SEQ ID NO: 143831 - RNA, 104 nt, Homo sapiens
ggcgcgcgggaggccaagaccgcggggaggagccgcagcgccagcaccaggcaggaacaaggcacccaccccagcaagaagagcccaaagaagagcgacagcgc

SEQ ID NO: 143832 - RNA, 73 nt, Homo sapiens
gcaaagcaacagccaaaaaacagagcaaagaaggcaaaggagcaagcaagaaggaaggccaccaccgggcaga

SEQ ID NO: 143833 - RNA, 62 nt, Homo sapiens
gacagaggcgaggaggaggagccagggcgagcaccaaggaggcaaaacccaacgaggacggg

SEQ ID NO: 143834 - RNA, 82 nt, Homo sapiens
cgccgcgccccaccacgcagccagacccaacggacacgcagaaccagcccaaagacggaggacccagcaaccacccgcagcc

SEQ ID NO: 143835 - RNA, 60 nt, Homo sapiens
gcgcgcaccgccacccgcagagcacacgcggagcagggaccgacacaagaagcagccaga

SEQ ID NO: 143836 - RNA, 59 nt, Homo sapiens
ccgggaggcaccgagaggaaaggcgagggaagcgccggggcaagaaggaacagacaaaa

SEQ ID NO: 143837 - RNA, 80 nt, Homo sapiens
gagaagcggccgcggccgaaaggcaaggagcccggaagcaagagaccagagcccaaggggggacacaccaccgggaacaa

SEQ ID NO: 143838 - RNA, 77 nt, Homo sapiens
agcaggaccgacccgggcacccgggcccgggaccccccgcgccgcagcagggaaacccagacgacaaggaaggccaa

SEQ ID NO: 143839 - RNA, 69 nt, Homo sapiens
ggaagaagcacagccacgagccaacacagagaagaccgggaggacagcgagcggagacaaagaagaaaa

SEQ ID NO: 143840 - RNA, 77 nt, Homo sapiens
gcagacgcacgggaacaaagcagaggacacacacccggagaacaagaaagggaagaaaagggagaagaccacagggg

SEQ ID NO: 143841 - RNA, 80 nt, Homo sapiens
ccggagcaggaggcgcacaacacccagaccacacgaaggggcagaagagcacaagacggaagagaggagcgaccagacgg

SEQ ID NO: 143842 - RNA, 104 nt, Homo sapiens
gagcaaggagaagaccccggaggggagagggagccccaaggcgcacaccgacccaccggccacaccgcccccgggcaggaagacgaggaggaagggaggcggga

SEQ ID NO: 143843 - RNA, 80 nt, Homo sapiens
ccgcggcccgccaccggccccagagagcggaacaggcgaggaaaagagcccccggcgacgcggagggacccgggggcggg

SEQ ID NO: 143844 - RNA, 88 nt, Homo sapiens
ccgaggccccccagccagcagaacagccagaggacagaaagcagagcaccccacccaccacccgaaacagagcggaaaccagaaaccc

SEQ ID NO: 143845 - RNA, 76 nt, Homo sapiens
gggcaacgcagcgccgcgccgggcggacaacacggagaacgacccaaccagggaggcacacccagaagccacagga

SEQ ID NO: 143846 - RNA, 84 nt, Homo sapiens
ccagccagaccagggacaaagagcaaacagacagggccgcagggacagagcagaagggcgaaagaccgggccgcagaagaggcc

SEQ ID NO: 143847 - RNA, 85 nt, Homo sapiens
gcaccggagaaaaccagcagagaaggcaggcaaagaacagagccggaggagggcagaaaggagcaagaggagcgggagaagaggg

SEQ ID NO: 143848 - RNA, 77 nt, Homo sapiens
cagaaaggagggagaacagcaaaggaggaccaggcagcacaaccgccagaaggaagacaaggaacaggaggcccgga

SEQ ID NO: 143849 - RNA, 86 nt, Homo sapiens
cgaaaagcgccgcagacagaagggggagaagcggaggagcgggcgcagagacagcaaagagggagagcccagcagcgccaagccgg

SEQ ID NO: 143850 - RNA, 110 nt, Homo sapiens
accacggccacagccgccgcagacccagcagccaagagggaagcagacgagagcaaggcccgaggccacacgggaacgaagaaagagcgcacggcgcgcgggaagcaggg

SEQ ID NO: 143851 - RNA, 61 nt, Homo sapiens
gagacgaacaggaagagaaaaagaaacagcggaaagagacacgcaggcagggcgcccgccg

SEQ ID NO: 143852 - RNA, 77 nt, Homo sapiens
cggccgagacggcggcagcagcggcacaggaagaagaaccgcagagaggaaaggcgccacacacccccagcgggggg

SEQ ID NO: 143853 - RNA, 68 nt, Homo sapiens
gacccggccccaaccacccccgccccccaggaggaccagccaaaagagccgggggaaagccaccagac

SEQ ID NO: 143854 - RNA, 80 nt, Homo sapiens
agggggcacaaggcggcggaggaggaagggacagaccagccaccacgcccgcccacacagcgccccagagccggagcggg

SEQ ID NO: 143855 - RNA, 61 nt, Homo sapiens
aggaacccgaagaagaaaggacgacagccagagagacaaaccaaggagaaacgaaagacgg

SEQ ID NO: 143856 - RNA, 34 nt, Homo sapiens
caaggcggcacgagccaaggacggagccccacgc

SEQ ID NO: 143857 - RNA, 61 nt, Homo sapiens
cggagaggagagcacacggcaccgagggaggaggagaacagccgcacgggcggcgcccggc

SEQ ID NO: 143858 - RNA, 59 nt, Homo sapiens
aaccccgcgccggcgggcgcgcgagcgcccggcccgaggacaggaaccggagaaacgcc

SEQ ID NO: 143859 - RNA, 72 nt, Homo sapiens
aaggaccaagaaggggggcgcgacagaagaaggaaccagcaaagcgccacgaagcacaagcaagaggaccag

SEQ ID NO: 143860 - RNA, 81 nt, Homo sapiens
ggccgggccggcggcacagccaagggcgggagaccggaaggcaaagcagaggagccaggccccggggagacagcacgccag

SEQ ID NO: 143861 - RNA, 70 nt, Homo sapiens
caccccaggaacagcaaagcaacaaggccgaacggccacagggacaggaacccacaggggaagagacacc

SEQ ID NO: 143862 - RNA, 76 nt, Homo sapiens
cgaccggcgcgccccgcccggaccgcgcagaaccagggcggcggccagcgccacgcgaagccagcacaacagacac

SEQ ID NO: 143863 - RNA, 77 nt, Homo sapiens
gggcgggagggccgagggaacgggcggaggccgacgacacagacaagcgccccgggggcagcggcccccaccgaggc

SEQ ID NO: 143864 - RNA, 80 nt, Homo sapiens
gccaacgagcaggagagccaaggcgcaagaggagacggccaggaaagccgccgggcggcaaccggcgggaacccgacaca

SEQ ID NO: 143865 - RNA, 75 nt, Homo sapiens
gcgggcgagggaggggaccgccgcgggaggaagacccagccccccaggacacaagcacagggagaggagggagga

SEQ ID NO: 143866 - RNA, 92 nt, Homo sapiens
cccggcggcgggccgaggagccgggcgcaaggagcggaagagggcagcgggggcagagacggggaacagggccacccacacggacgccaacg

SEQ ID NO: 143867 - RNA, 72 nt, Homo sapiens
aaaggaagcgccaagaaagggaggcaagaccaggccgaaaacccaggacagcccagacacgcgcccgccgcc

SEQ ID NO: 143868 - RNA, 73 nt, Homo sapiens
acccggcagagaacacaacaagcaccagccacagggagggcccgagccgggacagcggacgggggcacgcgga

SEQ ID NO: 143869 - RNA, 75 nt, Homo sapiens
aaaagaggacgagggagcacagccagggcgaaagaagaccccgccaccggcccccacgcaccaccaaagccgcac

SEQ ID NO: 143870 - RNA, 71 nt, Homo sapiens
gcgaccagagaccgccggggcggcacacggagcacagggggaaccacaaagaacggagacacagagagaga

SEQ ID NO: 143871 - RNA, 77 nt, Homo sapiens
gcaggagcgcggaagggacagcccagaaggcacgcgcacccccaacaggagcagcaccgaggccccccccacccccc

SEQ ID NO: 143872 - RNA, 57 nt, Homo sapiens
ccagccggcaagccaggccaaaggcgccaggaaggagggggagaggcaccagcaaca

SEQ ID NO: 143873 - RNA, 40 nt, Homo sapiens
gcagggccaggaggaacagaggccaccaacggcggggggc

SEQ ID NO: 143874 - RNA, 89 nt, Homo sapiens
accgaagaaccccaccaaaccagaacacaccagggaaacacaacacccacacgacccgagccccaaagacagaaaagccccgagacgga

SEQ ID NO: 143875 - RNA, 59 nt, Homo sapiens
cgggccagggaagacaacaccagggggaggccagggggacccaccggagcgccgcgcgg

SEQ ID NO: 143876 - RNA, 74 nt, Homo sapiens
cccacggggccgcggaccagagacgccacgcgccacaccagcaccagcaagcggcaggcgcgaccaagggccac

SEQ ID NO: 143877 - RNA, 48 nt, Homo sapiens
accaccaacaaacgggggccagaaacagagaggcagaccacagcggga

SEQ ID NO: 143878 - RNA, 74 nt, Homo sapiens
gcgagcacggcagccccccccgcgccggcccgccggcggggggaggccacaggcgcaagcagccgccaaacacc

SEQ ID NO: 143879 - RNA, 71 nt, Homo sapiens
cggggcgccagagcgccaagcagcaaaggagagaacagaggcaggaaaggccggcccagcaaaaggaccag

SEQ ID NO: 143880 - RNA, 53 nt, Homo sapiens
gacggaggcgcgcagcgcccgaagaccccgcgagcaagaaggggagaccgccc

SEQ ID NO: 143881 - RNA, 85 nt, Homo sapiens
ccaaaagcacagaaaccaaaaaccgcaccaacgggaacgggacacaccacaggaagacaacgaagagaggaaagaagcggaaagg

SEQ ID NO: 143882 - RNA, 77 nt, Homo sapiens
ccgccacccagagcgcacggcgacgccccaggggaaaacccccgggaccaggacaccaaccagcccgcccaggcccc

SEQ ID NO: 143883 - RNA, 82 nt, Homo sapiens
cacccaccaagcacccaacagaagaagagggaaaaaggagccaccacagaaccaaaagaaaggaacaaaccacaaagcggaa

SEQ ID NO: 143884 - RNA, 63 nt, Homo sapiens
cccgcggggcaagaagaggccagccggacccccaaaaccggaaagacaccggcgagaacgccg

SEQ ID NO: 143885 - RNA, 91 nt, Homo sapiens
ccagggcaacaccacagaggaagcacagggaaggaaggagaagaccgacccaacaacggacgcccccagcggacccgggaggccgagcggc

SEQ ID NO: 143886 - RNA, 70 nt, Homo sapiens
cggcgcggccccgacccccgcccggcgccggcccgggccgccagggcaggcaagagggagaagacagcga

SEQ ID NO: 143887 - RNA, 75 nt, Homo sapiens
agaaggaagaaagaagcacggacagaacagcacagcgcacgccgaagaagacggcgccagcccaccgcaacaagc

SEQ ID NO: 143888 - RNA, 65 nt, Homo sapiens
ggcgacgaaccaagaggaccaggaagcagcaggagggaagaggaaagcacaaagacacccaaccc

SEQ ID NO: 143889 - RNA, 79 nt, Homo sapiens
aacaaaaacgccaaaaaacggagcaaagggcagcggcggagccgccaaggcggcgcagcgccaagaaggacaagaaggg

SEQ ID NO: 143890 - RNA, 73 nt, Homo sapiens
gaacaaaaagcagaaggcagagccgccaagcaaaacagccaccacggaccagaccccacaagaaaacacacaa

SEQ ID NO: 143891 - RNA, 77 nt, Homo sapiens
aagccccggagaaccacccggaggagacggggcagacaacggagcccgggggccaagcaggaaaccacagaccggag

SEQ ID NO: 143892 - RNA, 77 nt, Homo sapiens
ccaacacagagccaagcgccaagcccgcaagaagcccagcgcagcaagaccgccagccagagaacgcgagaccgggg

SEQ ID NO: 143893 - RNA, 77 nt, Homo sapiens
gcgcgcccacgccgcgccagacaggaaaccaccccacccaacccccgacacagaagaggagaaaacggaacaacagg

SEQ ID NO: 143894 - RNA, 78 nt, Homo sapiens
gacagcacaacaccgcacggggagccaagccggccagcccgcgggagcgccacacagagcggaagaaccgaccgggac

SEQ ID NO: 143895 - RNA, 62 nt, Homo sapiens
cagagcgagggaggagagagggagagccaaagaaggagcggcgacaagccacacaccaaacc

SEQ ID NO: 143896 - RNA, 67 nt, Homo sapiens
ggacacaggcgaggcggacacccgggccgcacagagccaggccccggggccccagcggcaccagcgg

SEQ ID NO: 143897 - RNA, 73 nt, Homo sapiens
gcacagaggcgaacgggagccaaagggccccggggacggccaggaacagccacggggacaaagaaacaccaag

SEQ ID NO: 143898 - RNA, 60 nt, Homo sapiens
gccgagcagggcagcagcaggcaaacaggcgggcaacgcggcgcggaagaagacagagag

SEQ ID NO: 143899 - RNA, 82 nt, Homo sapiens
agaagcacaaggacagagcacccaccacaggaggaaagccaggccagaagaaggaaggccggggaggggacaggaaagacac

SEQ ID NO: 143900 - RNA, 74 nt, Homo sapiens
gccgggggggacagcacgcccagcccggaccgcgaggcccgcagccgggacaagcggggacgagagccccggca

SEQ ID NO: 143901 - RNA, 74 nt, Homo sapiens
agcaaccaagaacccacaagcccaacacaacgagcaaagaagggcaagaaaaagaaccggaagcacagccacag

SEQ ID NO: 143902 - RNA, 84 nt, Homo sapiens
gcgggaaggcggggcgacccggggggcgcgcccagagccccgcgcagcccagggaaggaaggggaaccacaaagaagagaaggc

SEQ ID NO: 143903 - RNA, 77 nt, Homo sapiens
gaggcagaggggaggcgcgaaagaaagccaacaggcagaccagagacagcgccacgcacccggggagcagaccacgc

SEQ ID NO: 143904 - RNA, 70 nt, Homo sapiens
acagcgcaaagggcagagaaaaaagagcagcgaggcgaaagcaaccacagaagacgacaccagagccggg

SEQ ID NO: 143905 - RNA, 63 nt, Homo sapiens
ccagacggagaaccgcaggaaagggacccaaaccagggcaagcagaaacccgaaccgcccccg

SEQ ID NO: 143906 - RNA, 68 nt, Homo sapiens
agacccacaccaagaggggccaaagaggcggcacaaaggaaaaaaggcaggggcccgaacagaccaga

SEQ ID NO: 143907 - RNA, 67 nt, Homo sapiens
ggacaaaagagaagaaccaaaacggccccgccgccccaggggcaaggaggacgacccgggcagaaca

SEQ ID NO: 143908 - RNA, 86 nt, Homo sapiens
aaagaaaaagcagagcgaccggaagggaaagcgccgagagacgggccgcgccgcccgcaagcagagagcgggcagggagcacagag

SEQ ID NO: 143909 - RNA, 55 nt, Homo sapiens
gcagccgggccagggccagagcaaagaaaaggacgggacacggagaggcgcggga

SEQ ID NO: 143910 - RNA, 87 nt, Homo sapiens
gccggagcagacgcgggaggcgcgcgccccgcacagcacagaggggcagccggagagccgggaaagagggaacaggcacgccccacc

SEQ ID NO: 143911 - RNA, 74 nt, Homo sapiens
cagcgccggaaaccaacaagagaaaagcagaagcccaggacgcccggcaccggagacgcggcgagggacgaaag

SEQ ID NO: 143912 - RNA, 71 nt, Homo sapiens
acgcagaaacagcagacggaggccgggagcaggcaaagggaaaggcaaaaggcgaaaccagacggcaggcg

SEQ ID NO: 143913 - RNA, 59 nt, Homo sapiens
cgacacgggcgccgcggaaggaacaccaggcggggcgggcgagcccggcccgaagcccc

SEQ ID NO: 143914 - RNA, 76 nt, Homo sapiens
gaaggaccaagaaccagggaagccgaccaacggcccccgcccccaccaaaaggaggaggaaaacaggaggaggaac

SEQ ID NO: 143915 - RNA, 82 nt, Homo sapiens
gagccgggaccagccgggaccggccggagaggagcgacgcgagggccgagacggcgcggcaaggcccagagggaggcacaac

SEQ ID NO: 143916 - RNA, 80 nt, Homo sapiens
gcaggggcgggcggcagcgcgcccgggagcgcgcgccgggaacggcacccgaagagagacccagagaaggccgcaggcgc

SEQ ID NO: 143917 - RNA, 79 nt, Homo sapiens
ggaaggcgaagcacaaacagaagagcgaaagcgaagcaggaagaggaccggcgcgagggcggcccgcagaagagcacag

SEQ ID NO: 143918 - RNA, 64 nt, Homo sapiens
gaagcccggacgacgaggaaccgcccaacaggcccggagggacccagaacgggggaacggcacc

SEQ ID NO: 143919 - RNA, 43 nt, Homo sapiens
aagagacaggaagagggcccagcccagcccccagaagggacgc

SEQ ID NO: 143920 - RNA, 72 nt, Homo sapiens
ccagcgacaacggaagggcaccgaagaggcaccccaccgaaaaacagagggcgaaccaaagaaggaaggcga

SEQ ID NO: 143921 - RNA, 78 nt, Homo sapiens
cgcgggccggggcgcgcgggcggcgcgggccacaccagaggagccggaagggaagaaagcacgggaaaaggccgggcc

SEQ ID NO: 143922 - RNA, 103 nt, Homo sapiens
gccgaggcaagccaccacgggcagccgcagagcgagcggcagcggcccggaaccggggcagcggagcacagcaggaaggagcacaaaagccggcgccaggcca

SEQ ID NO: 143923 - RNA, 85 nt, Homo sapiens
gggagccggcggcggcgggcgcgggaagaggcggcagcggcggcggcggcgcagaacagacggagccgccgcacccaggcggagg

SEQ ID NO: 143924 - RNA, 74 nt, Homo sapiens
cgcaaaaacaagacggggcgccccacagaggggcgacgcccgcagaaaaaccggcaggcacaacaaaaagggcc

SEQ ID NO: 143925 - RNA, 76 nt, Homo sapiens
ccaaccacacgcacagagaggccggggggggcacagagccccggaagacagcccccagcgaccagacccagggcca

SEQ ID NO: 143926 - RNA, 58 nt, Homo sapiens
acagcccaaacgccccacgaccaggaaccaacagaggcaaaacccgacgcaaacgacc

SEQ ID NO: 143927 - RNA, 76 nt, Homo sapiens
gaaacccacaacacagacccagaagagacgaaaaagacggaaaaaccagaagagaaaaaacaaaggggagaggcac

SEQ ID NO: 143928 - RNA, 69 nt, Homo sapiens
caaacgccaggacccacccgggcaaagaagagcaaagggaagcacagcacagcagaagcacacgacaga

SEQ ID NO: 143929 - RNA, 84 nt, Homo sapiens
cacaccgagcgaagcacccccagcggggaccgcccgggacaacagcgcggggcacagggacccaaaacgaaccaacagaccagg

SEQ ID NO: 143930 - RNA, 59 nt, Homo sapiens
aaggagcacaacaggcagacagacaaggagacggcgaaaaccaaagaagaaaagcaccc

SEQ ID NO: 143931 - RNA, 72 nt, Homo sapiens
ccaacacagagccaagcgccaaggcagcccaaacgcccgagaaggccacgcgcagaaaaggccaccaaaagc

SEQ ID NO: 143932 - RNA, 82 nt, Homo sapiens
ggggcggaacacccgccaaagcagagaaaagaagggagaaagaggaagggaaagggggaggacaggagccgacccggagccg

SEQ ID NO: 143933 - RNA, 79 nt, Homo sapiens
caacaagcacaaggagccaaaggacggcccgccaggggcggaggaggcgaggagagagaacaagaacacagaaaaaccc

SEQ ID NO: 143934 - RNA, 78 nt, Homo sapiens
aagaggagaaggcgaggccacagaaccagccacagcggggcggagagaaccagccccaagcacgggaagacccccagc

SEQ ID NO: 143935 - RNA, 82 nt, Homo sapiens
ccgaggagccagccgagaaggaggaccccgcagcagagcggaaaggagcagcaaggcagcagccgaaacccagcggcaccaa

SEQ ID NO: 143936 - RNA, 83 nt, Homo sapiens
cagcagaggggccacgcgggcccgaggcgcaccaagggcgaaggagccggcccaagaacgacaccgaacaccgcacagaaagc

SEQ ID NO: 143937 - RNA, 76 nt, Homo sapiens
caaagacacccggccgcgcggggagaagcgcccgcaccaggacacagcgcgaaaagagaagcagaagacacaggcc

SEQ ID NO: 143938 - RNA, 73 nt, Homo sapiens
ccccggcgggcccgaggcggcgagagaggcaggcggagccgaccgggccagccaaagcggacgccggccacca

SEQ ID NO: 143939 - RNA, 78 nt, Homo sapiens
ggagccagagcagcagccacaggggggcaccaaacaaccacagaagccagaagcccaggccccaagaaaaacgggaac

SEQ ID NO: 143940 - RNA, 70 nt, Homo sapiens
cgcaggaaaagacccaccccaagacagggaggccgcacagaggaggagcaccaaaccgagggagggcagc

SEQ ID NO: 143941 - RNA, 41 nt, Homo sapiens
gaaacacccgaacagcgaaacgccaccagaggaagacgaga

SEQ ID NO: 143942 - RNA, 78 nt, Homo sapiens
cgagccggagaggagccgcaggagaaggaaccagcggggagaaggcccagcgacagccacccacgcacccgcggccaa

SEQ ID NO: 143943 - RNA, 73 nt, Homo sapiens
cccgccgcccgccgcaggccacccgggaacggaggagggggacaagagaaaaaaagggcgggcgaacaaaaag

SEQ ID NO: 143944 - RNA, 64 nt, Homo sapiens
gcggcggcggcccggcggcccgggcgccgcgaggcggcccgaacagggccgaaaccaaagaccc

SEQ ID NO: 143945 - RNA, 61 nt, Homo sapiens
aaaaaccaaagaacacaagaaaccgcgagggaagcgggagaggccacccgcccacgagcgg

SEQ ID NO: 143946 - RNA, 77 nt, Homo sapiens
acggagaaggcaaggaaggaggcgggacagacgggcgaagcgagccccagaacaagagaagcagggagagcaccaaa

SEQ ID NO: 143947 - RNA, 82 nt, Homo sapiens
aggagaacccccagggaagcagaaggagcagcccacagcaaacgccagagaaagcccgcaccggaacacacggagacacgaa

SEQ ID NO: 143948 - RNA, 67 nt, Homo sapiens
caggaccaggcacccgggaagggacacacaggaagacgaacacggaacgggcgagaagaaagcagag

SEQ ID NO: 143949 - RNA, 38 nt, Homo sapiens
gggcacggggacaagggccagcgcccacagcagggcag

SEQ ID NO: 143950 - RNA, 73 nt, Homo sapiens
gaccagacagggagcgcagaggacgccgaggagggggacccacgcccggcaggagaggagcccccggagccca

SEQ ID NO: 143951 - RNA, 88 nt, Homo sapiens
ccagggaagcgagcaaggggcggaaggccgaagccaggggcggggaccacggccgggacaccagggcagagcggacgagaaccaccac

SEQ ID NO: 143952 - RNA, 77 nt, Homo sapiens
gaaagcgggagagggaccggaacggcggcgacaaggggcccgaacagagggaagagagaagaagcaaaccgggaccg

SEQ ID NO: 143953 - RNA, 72 nt, Homo sapiens
agagagaacagcgcagggcacggaaggggcccagcacagagccggggagcccgggaccagggccagggacgc

SEQ ID NO: 143954 - RNA, 54 nt, Homo sapiens
caccccccccgcccagagaggacaccgagaaaaagggccggccgcagacccaaa

SEQ ID NO: 143955 - RNA, 42 nt, Homo sapiens
ccgccagccagcaggccccagcagggcgcgagcggccaggcg

SEQ ID NO: 143956 - RNA, 63 nt, Homo sapiens
gagaagcacacaaggaaccaggagacagaaggacagcaggcaaccaagggcagaccgcacaag

SEQ ID NO: 143957 - RNA, 76 nt, Homo sapiens
gcgaaccgcggagccggcaaggcagaaagcagacgaaggacaagccgagggaagacaggaagggcgggcaaacagg

SEQ ID NO: 143958 - RNA, 68 nt, Homo sapiens
aaaaggacgagaacgccgcgacagaaagccacaaacaacaagacccagggaaaaggaagagggaacag

SEQ ID NO: 143959 - RNA, 79 nt, Homo sapiens
gggaagccaacgaccacacgcaaacccggcgcggagccgggccgccccagaacccgcaccacaagggcgaccgccgacc

SEQ ID NO: 143960 - RNA, 77 nt, Homo sapiens
ggggcgggcgcgccccgcggagccggagccgcagaggccccgggcggaccaggcccagggggagagagacgcgggaa

SEQ ID NO: 143961 - RNA, 72 nt, Homo sapiens
aagcgcgcacgggaaacaaaaggcggagaacggaaaagcaccaggaagcagagaggaccgcagaagggaagg

SEQ ID NO: 143962 - RNA, 68 nt, Homo sapiens
caaaaagcagaccgcacgaagaccaagacggacacggaaaaaaccaggagggaccacgggacacgaac

SEQ ID NO: 143963 - RNA, 47 nt, Homo sapiens
gggaacagcggcaagaggccagaccgccaagaaaccaaccaggaggc

SEQ ID NO: 143964 - RNA, 89 nt, Homo sapiens
ccaaagcgagagagggaagcgcccggccggaggcaggggaaagccaccaggcaggcaaccagcgggaccagaggagaccggagccacca

SEQ ID NO: 143965 - RNA, 51 nt, Homo sapiens
cagacgcagggcgcccccggacccgaaccacaaagacacacagaggacaag

SEQ ID NO: 143966 - RNA, 76 nt, Homo sapiens
gcccgagaaggggacggcgggcgagggaggggaccgccgcgaccgaacaggaaggccccggaaccacagagcggca

SEQ ID NO: 143967 - RNA, 71 nt, Homo sapiens
ggcagcgcccagcagcgcaggcgggcaacacaacaaggcgcggacacccagacaagcgcgccaccggcccc

SEQ ID NO: 143968 - RNA, 63 nt, Homo sapiens
gcggccagcgacagaccgcgccgcgccggcgagggaagaagaaacacgagcacacggaacggg

SEQ ID NO: 143969 - RNA, 83 nt, Homo sapiens
gacggaccccagcgggaaacgccggagcggaaggaaacagaaacgaaggaggcccaaccacaaaaggagccgacggaacccag

SEQ ID NO: 143970 - RNA, 61 nt, Homo sapiens
gcggaggagcgaggcagcgacaggacgggaacggggagccacaccagccagcgaggaccca

SEQ ID NO: 143971 - RNA, 90 nt, Homo sapiens
acggcgggccccgggaccgggcgggaacccgcggggagcgggacacgaacggaccccaagaagaagcggaagaggagccgcggaaccaag

SEQ ID NO: 143972 - RNA, 75 nt, Homo sapiens
accgcgcagggcgccgacagaaggacagagaagaacccagaaaaaagcaaggccgaaaaacgagagaggaggacg

SEQ ID NO: 143973 - RNA, 58 nt, Homo sapiens
cgccgcgccggagcagcccgccacgccggggccaggcccgccaagcgcccccgggcac

SEQ ID NO: 143974 - RNA, 84 nt, Homo sapiens
caacgccagaaacaggaaagggggagcccggaagcagggccggccggcagagcacaccgcgcaccagggaccacaggcagcaga

SEQ ID NO: 143975 - RNA, 55 nt, Homo sapiens
cagacgcagggcgcccccgcaaagggaagagccacaaagggaaccaggcgaagag

SEQ ID NO: 143976 - RNA, 68 nt, Homo sapiens
gcaacccggcagcagaagacaagaagaggaggacccaggaagcacggaccaaccacgaggaggacagg

SEQ ID NO: 143977 - RNA, 81 nt, Homo sapiens
cacggagcgcgcggagcgaacccaccccagggcgcaaggggacaaacggagccggagagcgcgcaagcaagaggagcagga

SEQ ID NO: 143978 - RNA, 85 nt, Homo sapiens
aagccgaaaaagcgcccgagacgggcccgccgaaaggccagcgagcgccgacacccaacaagaccagcccccagcagagagcggc

SEQ ID NO: 143979 - RNA, 71 nt, Homo sapiens
ggcgccggccccaagcaccaagaaggcggagaggaaagagagggaccaccgaaaaaccccaaacccacaag

SEQ ID NO: 143980 - RNA, 56 nt, Homo sapiens
caacccgacccgacgagacggaagagcccggaacacacagcagaaaagcccaggga

SEQ ID NO: 143981 - RNA, 70 nt, Homo sapiens
aaaaaggagggcaaggagaaacgaagaggagacagaagcggagaagacacgggaagcaaacaaacgaacg

SEQ ID NO: 143982 - RNA, 82 nt, Homo sapiens
acccaaagaacaacggaaaagagccccaaaccgaccccaccaggcggggaagagccaagacccaaacacaaccagcaaaaga

SEQ ID NO: 143983 - RNA, 72 nt, Homo sapiens
gagaagaaccaaaacggccccgccgccccaggaaacaaccggaagaaagggaaaagggagcggaaagcagaa

SEQ ID NO: 143984 - RNA, 72 nt, Homo sapiens
ccgcagccaccaccagagggaccaacccagaaaaaacaccagcagcccagcaaccaaaaagaagaccgcacc

SEQ ID NO: 143985 - RNA, 62 nt, Homo sapiens
gagccgaccagccagcccacaagaaccgcgaggacagaggagcgcagaggcggagacagagg

SEQ ID NO: 143986 - RNA, 75 nt, Homo sapiens
cccggggaaaccggagggacccggcccggaggaagaaagccaaggagggcacaggagacgaggaaggaaaacaag

SEQ ID NO: 143987 - RNA, 63 nt, Homo sapiens
cgggggcacgcgcaagccacagagaagcagcggaagcagcgaacagccacgcagaggaaggca

SEQ ID NO: 143988 - RNA, 76 nt, Homo sapiens
agagaacaaagaagaggcgggcggagggcacaccagagggaaagcaggagcccggaaaggagaaggaaaagacggc

SEQ ID NO: 143989 - RNA, 77 nt, Homo sapiens
ccgggaaaagggcacgaggccggaaccgcccagccccgaccacagcaacacggaaagagaaagaaaagcaaaagcga

SEQ ID NO: 143990 - RNA, 85 nt, Homo sapiens
cggggaaggcgagagaggcgcagggggagcacagccagaaggggaggaggagccgaggaagggaccacagaccagcacgccggcg

SEQ ID NO: 143991 - RNA, 54 nt, Homo sapiens
gcgccggaaaccggagcgcgcagcagccaaagaaaagaccaccggagaaagaaa

SEQ ID NO: 143992 - RNA, 53 nt, Homo sapiens
gccgcgagcagcggacgccggccgccgcaggagacgggaacggagccccccgc

SEQ ID NO: 143993 - RNA, 77 nt, Homo sapiens
cgggggaggcgagcgcgccgcccggagccgcgcacacgcacagaaggcccaggagggcgacggaagagcagcccagc

SEQ ID NO: 143994 - RNA, 69 nt, Homo sapiens
ggccaaacaagaggcaaggggggaggagcgccgccccccgcacaaggcccagaaagcgggcaccagcgc

SEQ ID NO: 143995 - RNA, 84 nt, Homo sapiens
gcggaaggagaacgaaggagcaggaaaaccggaagggccgaagccgccacggcaggccgggaacgccacacaacagggccccgg

SEQ ID NO: 143996 - RNA, 77 nt, Homo sapiens
gcggcaggggccgcggcccggagcgagaagacagaggagccagaccaagagacagcacaggcgagcgagcagagaca

SEQ ID NO: 143997 - RNA, 82 nt, Homo sapiens
gaccaaagaaacaaagaacggacccacaccgaggcacccgaagaagagaccaccaaccagacgggaagaagagcaggcagca

SEQ ID NO: 143998 - RNA, 77 nt, Homo sapiens
agcacccaaaggagcaacagacagcccccagaacagcaccaggagaagcacgcgacagaacagcgaaggcaaaaaca

SEQ ID NO: 143999 - RNA, 66 nt, Homo sapiens
cccaccgccagccacccacgccagcagagggaaagacaaggagccgggccgagaaaccgaaccaga

SEQ ID NO: 144000 - RNA, 76 nt, Homo sapiens
cgcgccgcgcccggaccccaggaaagaccacagcaagaccacgcccccagccgggggaccaggccgaacgacccgg

SEQ ID NO: 144001 - RNA, 76 nt, Homo sapiens
gcccgaggcaccgggggcaggagggacacacggaggccaggccagagggaccaacgaaggcaaacaccacacgcag

SEQ ID NO: 144002 - RNA, 73 nt, Homo sapiens
ggacaagcgccagaacaagagaggccaaccacaaagagagaaggcgcggaagaaaggcagcgcagacagaccc

SEQ ID NO: 144003 - RNA, 69 nt, Homo sapiens
cagagaaacaaaggcagcaaacaaacccccaagagagcgacacagcaaacaaagaggaacaagaaaagg

SEQ ID NO: 144004 - RNA, 69 nt, Homo sapiens
accccaccacaccaccagaaaaaggggaagaacaaccacacacaggagaaaaccggcacccagcagcgg

SEQ ID NO: 144005 - RNA, 68 nt, Homo sapiens
gcccggcccggccccgacacgaaggagaccgcaggaaacacacaaaagccaccagcagggaggccagg

SEQ ID NO: 144006 - RNA, 80 nt, Homo sapiens
gcggacagcagggagcggccgagccacccaaaaacagggagaagaccaaaccgaacgaagggacccaggagggcgcccaa

SEQ ID NO: 144007 - RNA, 73 nt, Homo sapiens
gcagaccagaccagagaaaacgggaggacgcacccggggaaccagcaaacaaggagaagacagaaccaccaaa

SEQ ID NO: 144008 - RNA, 75 nt, Homo sapiens
ccaggccgcccgacccaaagggaaaacagaaacagccaggacacggccaaggccggcgagaacgcccgcggcagc

SEQ ID NO: 144009 - RNA, 89 nt, Homo sapiens
cggaaaaagaggaaagagggaaaacgaccagagaggaccacagaaaccaaggccagggagggagccccccaggcccaaaccaaagcacc

SEQ ID NO: 144010 - RNA, 76 nt, Homo sapiens
cccacggccgccccagggcaagacgggcccaaagcacaagcgaccgccgaaggagcccccgaacggcaacgccccc

SEQ ID NO: 144011 - RNA, 68 nt, Homo sapiens
aacaagaacacacgaggcaaccacaggagcggcgagaacacagcaaccccaaccagagaaacacgccc

SEQ ID NO: 144012 - RNA, 91 nt, Homo sapiens
agacaagcacacagccccggcagaacccaccgcgccggggccagggacaggcaggagggaagaaagcagcgaggagccacccgaacgacca

SEQ ID NO: 144013 - RNA, 68 nt, Homo sapiens
acaacccgaggacgaaccaccccgcgccagcagcacagcacggacagcagaccacagcccggcaggcc

SEQ ID NO: 144014 - RNA, 77 nt, Homo sapiens
ggcgcacccacacaccaccccgagaaggaccccaagaggagaggagcgaaaacgccacaacagagggggccagggcg

SEQ ID NO: 144015 - RNA, 53 nt, Homo sapiens
cgagcgaggaggaggcggagcggggcccgacgaccgaaacaaggaccccccgg

SEQ ID NO: 144016 - RNA, 58 nt, Homo sapiens
ggcaggccagggcagccgcggaaaagaaaagccaagaggaaagccgagggaagggaag

SEQ ID NO: 144017 - RNA, 72 nt, Homo sapiens
agggccgagccagccgcggccggaggagcccccaggccaaggaaagcgcaaacccagcaagcgacagaaccg

SEQ ID NO: 144018 - RNA, 75 nt, Homo sapiens
agaaacagaacgcgaacagacagaggggcgaagaaggaccaggagcgcagagggccggagacaggaccagaaggc

SEQ ID NO: 144019 - RNA, 81 nt, Homo sapiens
cgggcaaccaacaagaaacagacacaccgcacaggccaaaacggaaaacgccgacaacaaagcagcaggaacaggcagagc

SEQ ID NO: 144020 - RNA, 87 nt, Homo sapiens
ggaagagaccgagaagacaggcagcggaaaagagaagaagaagcggaaaggcagagaaggagaaagagaagagaacgggagaaggag

SEQ ID NO: 144021 - RNA, 75 nt, Homo sapiens
aaagagaggaacggggggagagaacccaaccagggggaaacacagaacgcaggaggccggaagagcgggagcggg

SEQ ID NO: 144022 - RNA, 73 nt, Homo sapiens
aagcacgcaaccaggaagaagacaaaacgacagcacaggcagaacaagcagaacagacgacaaacggaaggag

SEQ ID NO: 144023 - RNA, 81 nt, Homo sapiens
aacagaagccagccgacaagggcagaacgaacaggaacaaagccagacgaacccagcccgcgacacacacagagcacgccc

SEQ ID NO: 144024 - RNA, 77 nt, Homo sapiens
ggaagggcgcccagggagggagaagagagcgccacccaccagaggagggaacagcccgcacagcggacgcaaagaaa

SEQ ID NO: 144025 - RNA, 74 nt, Homo sapiens
aacagacacacaagagggcacaaagcagcccggagccagaaccacacgaacacagggcacccaaacaacaaacc

SEQ ID NO: 144026 - RNA, 45 nt, Homo sapiens
gcagagaaaccccagaccaggaaacccgggcacaaaacggggaac

SEQ ID NO: 144027 - RNA, 71 nt, Homo sapiens
gccccgcacgacgacagaggcccagagcccccccggcggaaccaaggacagcaggggcagccgagccgcag

SEQ ID NO: 144028 - RNA, 81 nt, Homo sapiens
cccggccagggagaagagaacccacagagccggaacagaccagcagacaggaaaggcagagggagcacacaaggagaaagc

SEQ ID NO: 144029 - RNA, 51 nt, Homo sapiens
cgccacagccccaccagcacgaagccaccccaagcaagaaggaaagaaccc

SEQ ID NO: 144030 - RNA, 73 nt, Homo sapiens
cggaccagggggacggcgacagcgccgaacaggacacaacagcggaccaagcgccggggcaagcaccccaggc

SEQ ID NO: 144031 - RNA, 72 nt, Homo sapiens
aagcccagacccacccggcacaccgcccgaagcaagcaacccaaaagcaggaggcagagcaacccaagggcc

SEQ ID NO: 144032 - RNA, 56 nt, Homo sapiens
caaacacaagcagaaggagcgaagaagagaaaacagaaacgccggagaggaaaaag

SEQ ID NO: 144033 - RNA, 35 nt, Homo sapiens
gcaaggagccacagaagcgcacacaagagagggcc

SEQ ID NO: 144034 - RNA, 68 nt, Homo sapiens
gcggaggacccagaaacgcagaggggggagcccccaaaaggcggccaggagaaccggcgaccaacagg

SEQ ID NO: 144035 - RNA, 72 nt, Homo sapiens
aggggagagcgacccaaacaaaggaaccccccccacacgaggagcaccaacacagaccccgcccgggggcgc

SEQ ID NO: 144036 - RNA, 60 nt, Homo sapiens
gacggaggcgcacgcagagcggcaccacagaggccgccaagaacgagcaggacaaaaaca

SEQ ID NO: 144037 - RNA, 77 nt, Homo sapiens
gggcgcacagggccgaggcccagaaggaagccccccgcggccagaaggagcagccgaagggaggaggacagcacacc

SEQ ID NO: 144038 - RNA, 66 nt, Homo sapiens
caagcccaaccccgagcccagaccaaacacggccacacagaccgaacacaaacagccaacaggaca

SEQ ID NO: 144039 - RNA, 59 nt, Homo sapiens
aacggcgggggaccacgagagccccccgaaacaaagagacgcacggcggaccaagagcg

SEQ ID NO: 144040 - RNA, 74 nt, Homo sapiens
cgaggaagaaggaaagaggcaaacaaagagaggcaaggcagcacgacaaagacccgaggggaagcgcagccagc

SEQ ID NO: 144041 - RNA, 81 nt, Homo sapiens
cagagagccccgacgccgcaggaacaggcagaggagacaccgcgccacaaaaccccagccacagcggaggacgaggccaac

SEQ ID NO: 144042 - RNA, 79 nt, Homo sapiens
aagcagcaggcccccgcacgcagggcagcagaggccggcgagggcgagggacgaggccaccgcggccgccgccgggacc

SEQ ID NO: 144043 - RNA, 66 nt, Homo sapiens
cgaacccaccggaggaaccacagcgggaagccgcaggggaaccagaagaggccaaccagcacgaac

SEQ ID NO: 144044 - RNA, 72 nt, Homo sapiens
gaaaagagagaaccccaaccggggaggaaaaccgacgaagcccaacaaagaaaggacagcaagaagacagga

SEQ ID NO: 144045 - RNA, 72 nt, Homo sapiens
aacgccccgcccaagaccagagagcgaagggccgggcaggagggcggcacggccgcacgaagaccccacccc

SEQ ID NO: 144046 - RNA, 80 nt, Homo sapiens
ggaggccgcccgggagcggagcaagggagaagacaacacaccgaggacaggagcgaaggaaaaaacagaagacgcagccc

SEQ ID NO: 144047 - RNA, 78 nt, Homo sapiens
cggagccgccacccagagcgcacggcgacgccccaggggaaaacccccgggaccaggaaaccagggccgggaagcaca

SEQ ID NO: 144048 - RNA, 78 nt, Homo sapiens
aaaagaaaggcagacgaagggaaagcccagaacagcgaaaaccaaagcagcgagagaagagacgcccggcaaacaagc

SEQ ID NO: 144049 - RNA, 75 nt, Homo sapiens
acccgcccacagggcacccccagaacacacaccaaagcacagggcaaaggaggaagaccgggcagccaccccgcc

SEQ ID NO: 144050 - RNA, 60 nt, Homo sapiens
cgcccgcgcggcgcggggaccgcggcccgaccagagccacgcacacagaaacagcgagac

SEQ ID NO: 144051 - RNA, 67 nt, Homo sapiens
gcacgaggggggaagggagccaagacacacaagcaggagccaggagcccggaacagagcggaggaag

SEQ ID NO: 144052 - RNA, 78 nt, Homo sapiens
ccaggaagcgcccaagaacagaagaaaagaccaggcccagggagggaaaaacagacgagaaagaaacccagaagagga

SEQ ID NO: 144053 - RNA, 83 nt, Homo sapiens
cacgaggcgggcagcagcagccccggggcccggagagaacggaggcgaagagagcggggaacaggcaagagcgacaagcagaa

SEQ ID NO: 144054 - RNA, 80 nt, Homo sapiens
cgacccggaaccgccgggccgaacagcagacgccgcggagaacacacaaccgcacaggcagaaggaaaacagcagccagg

SEQ ID NO: 144055 - RNA, 80 nt, Homo sapiens
ggaggacacagcagccccaggggcagcggcgacgcggaggggggaagaacggaagcgacgacagggcgcagcgcgcacgc

SEQ ID NO: 144056 - RNA, 75 nt, Homo sapiens
aaggagacggaaccaaggaaaagccgaagcaacgccagaaaccacggagagcggagaagaaaagggaccccaaag

SEQ ID NO: 144057 - RNA, 72 nt, Homo sapiens
cgccgggagcggaaacagcggcagccagaggacaaaggacaaaggagaagacgacagaggaaaagagagaca

SEQ ID NO: 144058 - RNA, 77 nt, Homo sapiens
aacagcaaagcccaagagaggcaggcagcgacagccacacaacggacagagaaaagacacagacgacccagaacgaa

SEQ ID NO: 144059 - RNA, 68 nt, Homo sapiens
caccgggacccacagggcaacaacacggcaccacacaagcgaagaagccgagaaaccagccacgcaga

SEQ ID NO: 144060 - RNA, 78 nt, Homo sapiens
caaaagaaagcaagaccccgagggaaggggccgcagaagcgagacaaacagcggggcacgcgaggaagccccagaaca

SEQ ID NO: 144061 - RNA, 83 nt, Homo sapiens
ggcaccgcaggaaacaagcccacccagaaaaaggcccgggacccaggaaccagggaagcaccgggcacaagacgaagaccccc

SEQ ID NO: 144062 - RNA, 57 nt, Homo sapiens
gcgcaacagaaacagagagagcacggcagacacaccgaccagaggaaggcgaacccg

SEQ ID NO: 144063 - RNA, 112 nt, Homo sapiens
ggcgcagggggggggcagcgccagcgccgagccacgcgcagcagaacacaaaggagggacaggaggagcccccgcacaggaccaagaagcggaccagaagagggacgcggaa

SEQ ID NO: 144064 - RNA, 70 nt, Homo sapiens
ccgacagcaccgagggaggcgccagcagccccccaaggagaagcccggaccacagaggaaccacgagaag

SEQ ID NO: 144065 - RNA, 63 nt, Homo sapiens
ccacagggaaagaaggcaggcgggaacagcgccaccaacaaaacagcaacaccacagcgaaac

SEQ ID NO: 144066 - RNA, 73 nt, Homo sapiens
gacgagcccagcgcaaccccaagcgcccaaagggggacaggagccaggccaagagaaagaaacacagaagcga

SEQ ID NO: 144067 - RNA, 86 nt, Homo sapiens
aaacaggaaggagaaacaagaaccgaaacggcaaaaaaggcccggggcagccacccagcggccaccccacccccccacacacagga

SEQ ID NO: 144068 - RNA, 73 nt, Homo sapiens
caggagcgggagagggccagggaaaacgaggcgccacaaaaaccagcccacacagcgcagaccgggccgcaac

SEQ ID NO: 144069 - RNA, 78 nt, Homo sapiens
gcgaaacgcacgagaagggaaaggaggacaaaaggaaaaaaaaaaagggaagacagagaggcggggaaaggcagacag

SEQ ID NO: 144070 - RNA, 80 nt, Homo sapiens
cacgcaggcaacccccagcaggccagaggcacagcccccagggaccgggagccgaagccacgcagcccgcggccagcacc

SEQ ID NO: 144071 - RNA, 57 nt, Homo sapiens
gagcacgaaggacccagcagggcaccagggccggcccagggagaacgcaaaaccacc

SEQ ID NO: 144072 - RNA, 68 nt, Homo sapiens
gacgcgagaagccacacgggacagcacggaggcaagaaggaagagccgagcggggaaaacccgccccc

SEQ ID NO: 144073 - RNA, 76 nt, Homo sapiens
caccggcgggaggaacaaaaggaaaccccccaggcaagaggcgcaggaccgggaagaccaacaaacgcaccgcggc

SEQ ID NO: 144074 - RNA, 75 nt, Homo sapiens
ccgccagggaagaccacaacaagcaagcagcagcacgcgaaaggccccccgaaaaagccgaggaggagaggagag

SEQ ID NO: 144075 - RNA, 49 nt, Homo sapiens
cggagaacacacacaagagaagaaacaaaaccaaggaaggaagacccac

SEQ ID NO: 144076 - RNA, 70 nt, Homo sapiens
ccagaagccgcccagcaggagaaccccagcagaggcacacccagaagccacaggagaagcaagaggcggc

SEQ ID NO: 144077 - RNA, 68 nt, Homo sapiens
cgcagcggaaagcaggagcacaggggcacaaaaccaggggaaagaggaagaaaccagcaccgggaccg

SEQ ID NO: 144078 - RNA, 84 nt, Homo sapiens
cccggaccggccgagaggaagacgagccgggaggaacggcccggaaacaggaggacggcggacacggaagcacagccaaagaaa

SEQ ID NO: 144079 - RNA, 86 nt, Homo sapiens
cgccgccaccagccgggcaccggggagccggccggacacgggcccgagggaccgccaacaagcggcccgcaccgggccagacaaca

SEQ ID NO: 144080 - RNA, 93 nt, Homo sapiens
gaccgagagcgcgaaacgcacgagaagaggacaagaacaaggaaaacaagagaaccgaaaaagaacagaagggcacagccaaacaagacgaag

SEQ ID NO: 144081 - RNA, 66 nt, Homo sapiens
gcggaccgagagcgcgaaacgcacgagaagcgccaaggaagagcgaagaagcaaaagaagaagaag

SEQ ID NO: 144082 - RNA, 54 nt, Homo sapiens
agaggaggagggaggggaaaaggaggagggagacaaagcagagcccacagacaa

SEQ ID NO: 144083 - RNA, 76 nt, Homo sapiens
ccggcgagaggagcgggcgcacgggaggggaacgggccgaacgcaggacgcagaaggacccacagaagcccaaggg

SEQ ID NO: 144084 - RNA, 58 nt, Homo sapiens
aagcgcaacagaaacagagagaaaaacaggggcacagacgacagaagccaagagggcg

SEQ ID NO: 144085 - RNA, 84 nt, Homo sapiens
ggccggggaagggccaggccgggcagccgccgacgagcaggcgccggaccgaaggcgcgaccacgacgagaagcgggggccgca

SEQ ID NO: 144086 - RNA, 75 nt, Homo sapiens
aagcacaagggggcccgcacaccagcccccaagcccccaggcacccaggagacaagcaagcccagaggggagagc

SEQ ID NO: 144087 - RNA, 80 nt, Homo sapiens
agaggagcgcagggcggcgcaaccagcccagggcggcggagacccacccagccaacaaacacccgaaggaccacacgagg

SEQ ID NO: 144088 - RNA, 74 nt, Homo sapiens
aaccacggacaacccagaggacaacgaaggcggacaaaaccacaaggcaagaagccagcaacagccagcggaga

SEQ ID NO: 144089 - RNA, 56 nt, Homo sapiens
ccaagcacggggggcaggccaccgacgggagcgggccgagaaaaaccacagagaca

SEQ ID NO: 144090 - RNA, 74 nt, Homo sapiens
gacccgagcccgggcgccgcagaccagcacagccaccacgagccggaacccgaagaggcagcagcggaccggaa

SEQ ID NO: 144091 - RNA, 87 nt, Homo sapiens
ggagcggccggaacacccagaacccagcacgcaaacaggcagggggcagcacaggaggggggcccgacacccgcggacgcaggcgag

SEQ ID NO: 144092 - RNA, 63 nt, Homo sapiens
gcgccaacacaagagaaacaccaaacaaggccaaacaagagaaggccaaacaaaaagacccaa

SEQ ID NO: 144093 - RNA, 86 nt, Homo sapiens
cagggccagcgcgggggacgaccagagcgaagccgaacagccagggggccgaggcccgggaaccgccgaaccccaccgcccccgcg

SEQ ID NO: 144094 - RNA, 46 nt, Homo sapiens
aaagggccaaagaagggagaacagcggggaagcacagccgagcccg

SEQ ID NO: 144095 - RNA, 85 nt, Homo sapiens
cggcagcagcagcggcgggaggagccccggggagacacgagcccacccgagaccacgccggacccgccccgccacagaacccgcg

SEQ ID NO: 144096 - RNA, 76 nt, Homo sapiens
ggaagagagcacacgggccaggggagagagaagaaccgagcaggacgaaaggaacccgagacaacgagaagccgag

SEQ ID NO: 144097 - RNA, 80 nt, Homo sapiens
ccgcaagacagcagccacgccggcccagagacacagaagaacgcagcccggggagcagcaccccacaggcacgccaaccc

SEQ ID NO: 144098 - RNA, 79 nt, Homo sapiens
gaaggcggcccggcgggccaccccacccccgggcggccacccgcgagcggcccgcacgccacgcccggccggcgggccc

SEQ ID NO: 144099 - RNA, 78 nt, Homo sapiens
cgggcgaccacccggcgcaggagcggccgcgcggcccagaacagcagccccgcgaagaagagaacgggcccgagaaac

SEQ ID NO: 144100 - RNA, 57 nt, Homo sapiens
ggaggagcgaggcagcgacaggacgggaacggaggacgagcaacaaagaacgaaccc

SEQ ID NO: 144101 - RNA, 88 nt, Homo sapiens
cgcgaagaggcggaccggacggccgaggcccgaaaaagcccaagacagcagaagcagacaccccaggaacagcaaagaaaagcaaaga

SEQ ID NO: 144102 - RNA, 75 nt, Homo sapiens
ccaaagggcagcgccaggccagaaccaaagggaaaagcaaacaaggacagcccaggccaagacagcagccacgag

SEQ ID NO: 144103 - RNA, 83 nt, Homo sapiens
gaaacgaaagggagcgcagacccgacacacggcagggaaccccaccccggaaggcggggacacagacgagaacacgaagagga

SEQ ID NO: 144104 - RNA, 85 nt, Homo sapiens
gggaggagcgcagcacaggccaggcccagcagcaggccggcagccaccaccagccagagccccagccccgccccagccccacccc

SEQ ID NO: 144105 - RNA, 70 nt, Homo sapiens
gcagcagagcagggagacggaggaggaggagaagaagagagacgagggggaccaagaaggaacacaaaac

SEQ ID NO: 144106 - RNA, 65 nt, Homo sapiens
agagccgcaagggccaaagcccaagaacgagacaggaccggagaaagccagaagagcgcagagaa

SEQ ID NO: 144107 - RNA, 73 nt, Homo sapiens
ggaaagggggccagcaacccagacgcccacaggacaaacgccagagggcaccagaccaaacagcgaggaagcc

SEQ ID NO: 144108 - RNA, 59 nt, Homo sapiens
agcgacagcggcggaaggccaccagaggcggagaccggaaaccgagagaaacgaagacg

SEQ ID NO: 144109 - RNA, 79 nt, Homo sapiens
ggaacgcccgggccagcccaggaccccaggggaacaagaggccacgcagagccacgccgagaggcgacaaagacgcggg

SEQ ID NO: 144110 - RNA, 68 nt, Homo sapiens
gccacgggccgagacacgcagcggcggccagggaccagcacgggcgcgagcccgaaagcaacggccgg

SEQ ID NO: 144111 - RNA, 70 nt, Homo sapiens
aggcccgcacaggaggaaagccgggaagacaagccacagaccccgccggggaagaacaggaggggagcga

SEQ ID NO: 144112 - RNA, 84 nt, Homo sapiens
gagggaaaaaggaagccagcacagggacggaaaaggacgcaaggaccaaaaaacaaagggcggaaagaagcagaagaaaagaaa

SEQ ID NO: 144113 - RNA, 77 nt, Homo sapiens
agcccgccgggacacaccccaggaaaaagacagcccgcagcacgaccagcaggaacgacaagcagaccggaagaccg

SEQ ID NO: 144114 - RNA, 38 nt, Homo sapiens
ggcagcgcgcccaggagaaacaccggacaagcacagac

SEQ ID NO: 144115 - RNA, 79 nt, Homo sapiens
accagagagcacgcccagcggagaaggagaagccgcaggacacccccgaggcgcaaggaagaagagacgccgcgcggca

SEQ ID NO: 144116 - RNA, 55 nt, Homo sapiens
gacacgggcacgacgggagccacaaaagaagacccaaagcaccaacaaaaagcaa

SEQ ID NO: 144117 - RNA, 66 nt, Homo sapiens
cagcagccccgaagagaaacacacggacaacaaacgacaggacgacccggacaaccacccacaagc

SEQ ID NO: 144118 - RNA, 72 nt, Homo sapiens
gaggagacccaacaagcgccaccaaagcaaggagcccgaaacaagggaaacaggccagccacgcagcagcag

SEQ ID NO: 144119 - RNA, 75 nt, Homo sapiens
gacggagaaaccaccggcggaccgcacaagcagaacagagaacgaggaagaaaaggaaacccaaaaagacaaggc

SEQ ID NO: 144120 - RNA, 38 nt, Homo sapiens
gacacagggaaagcggaggggcaggcccaccgaagaca

SEQ ID NO: 144121 - RNA, 79 nt, Homo sapiens
aggccgcagcgcgggagcagcacgccagccgcaaggacggcggggcggggagagcgacgcaggggaggacagggaacgg

SEQ ID NO: 144122 - RNA, 78 nt, Homo sapiens
agcagaggaaaaaacgaccaagccagagaacagcccccacgcagcccagaagcacccgccccccccaggcagcagccg

SEQ ID NO: 144123 - RNA, 62 nt, Homo sapiens
cccggggcgccacgggggccagaagcaggaagaagacggcacgggacccccagcacaggcag

SEQ ID NO: 144124 - RNA, 68 nt, Homo sapiens
ggaaaagaacggagcccaccgcaggacaccgggcacacaagacaaaggcgccgcagcaccccccggac

SEQ ID NO: 144125 - RNA, 78 nt, Homo sapiens
ccagggaccacacgagagagccaggcggcagagaaggggagggaggaacagacacagacgagaaacgcaggagaaggc

SEQ ID NO: 144126 - RNA, 70 nt, Homo sapiens
gccgccaggaaccagcgggccacaccccgacccaaaaccacgcggagaagccgaagcgcacagacacaga

SEQ ID NO: 144127 - RNA, 76 nt, Homo sapiens
cgcgcccgcgcggcgcggggaccgcggcccggcgaccacagcacacaagccgcgaccacgagcgccagaagaagaa

SEQ ID NO: 144128 - RNA, 73 nt, Homo sapiens
cgcggacagagaagaggacgcggagacaagagccggaaaggaagagaaaggaaggagaaaggagcaccggcag

SEQ ID NO: 144129 - RNA, 73 nt, Homo sapiens
ggcggcgcgagccagcggggccggccaagccgacgccagcgggcgccacccaacaggcgcaccgcccacggcc

SEQ ID NO: 144130 - RNA, 69 nt, Homo sapiens
ccagcccccggggacagcaaccagcagcgcaggccggaacaacccaacacagagccccgagaggggcgc

SEQ ID NO: 144131 - RNA, 88 nt, Homo sapiens
ggcgcacgcgggcgcacccgccccggcgccgccggcccgcgggaccgacagccgggcagaggcaacagaggagaagaggaagaggaaa

SEQ ID NO: 144132 - RNA, 82 nt, Homo sapiens
agaaggacagaaagaagacgggagacaccggaaccgaaagaaaacgccggccacacacggcacaagggaagagaaaagacac

SEQ ID NO: 144133 - RNA, 72 nt, Homo sapiens
aaccacccaggaaacagcgcaagggcggaagaccgacggagcgaggcgaggacagagacagacaccgagagc

SEQ ID NO: 144134 - RNA, 78 nt, Homo sapiens
cacccccaccggccaggcgagaaaggcaggggcaaagaaaaaggagagaaaaagaggcaaaacaacaagaagaaaaga

SEQ ID NO: 144135 - RNA, 71 nt, Homo sapiens
agcaggcaaggagaaaagcaaggcaagaggagacgggcccgcgcgcacggcgcgggacacagggcgccaca

SEQ ID NO: 144136 - RNA, 82 nt, Homo sapiens
gaagcggccgacacaccaccacggaacgccaaccggcggaccgcgagacagccagccgaccgaggcgccacaggagccgcag

SEQ ID NO: 144137 - RNA, 66 nt, Homo sapiens
gaggaggaccgcccaggaggcgcccgcccggccggcaccaggacagcgaggcaccagagcgcgcgg

SEQ ID NO: 144138 - RNA, 74 nt, Homo sapiens
gacaggaggagccagggcccggcccgaaaggagagccggcggagcaggacccaaagaagccagaaggaaaaagc

SEQ ID NO: 144139 - RNA, 67 nt, Homo sapiens
gaaggaccaagaaccagcagaaaagcacacgaggccgggcagcggcagacaccagcaaacacagaca

SEQ ID NO: 144140 - RNA, 82 nt, Homo sapiens
agagccaaaccagaagaggagggcccagaagaaaaaggagcaggggaaggagacgggcaggagcgagccacccggaacaagc

SEQ ID NO: 144141 - RNA, 76 nt, Homo sapiens
gaagcaaaagccaggaggaagagcagaccggacgagacacaccacggacgcagcccggacaaaacccccggaggaa

SEQ ID NO: 144142 - RNA, 64 nt, Homo sapiens
cccgcagaggaccacggcgccggcacccaacacgggaaaccgcaagaagcaagcgaacagaagc

SEQ ID NO: 144143 - RNA, 74 nt, Homo sapiens
ggcgcggagggaccagcgagcggagggaacggaaaaagcaacaaaacacaccaagaaaagggaaccgaagcgga

SEQ ID NO: 144144 - RNA, 74 nt, Homo sapiens
cagagggggaagggaccagggcaggaaggaaagccaagcgcaggaagaggcagaaaccaggcagaacgaacggg

SEQ ID NO: 144145 - RNA, 79 nt, Homo sapiens
aggcaagaaggaaggaccaacacaccacaccgaaagcagccacgcggcaggggggaagggcccaccacccagcgcccca

SEQ ID NO: 144146 - RNA, 70 nt, Homo sapiens
acaccaggggagaccggggcccccaaagggaagccaaacacaaaggaagaagcccggagacgaccaagag

SEQ ID NO: 144147 - RNA, 65 nt, Homo sapiens
caagagcagcaggggcaggagaacaaagcacacagacacaaggaaccagggcacaggcacggggg

SEQ ID NO: 144148 - RNA, 85 nt, Homo sapiens
accgccacgggccgagacacgcagcggcggccagggaccaaacggccgagcgaccaggagaggagcccccgcccgaagaccgggg

SEQ ID NO: 144149 - RNA, 88 nt, Homo sapiens
acccacgaaagagagggcacaaaacagccagagacaggcacacgagagcacgaaaaagagaaaaagaagaagaacccggcaagccacc

SEQ ID NO: 144150 - RNA, 92 nt, Homo sapiens
gcgcggagaaccccgaggcggcccggaggcggcggagggcaccccgggcgggcggcggcgcaccagaacaagcacagccgggcccgccccaa

SEQ ID NO: 144151 - RNA, 84 nt, Homo sapiens
gaggcggcaggacggccaagaccagcgcgagggcccgggcaaggcccgacagcgagaagaagaaaagaagagagcgaggagcgg

SEQ ID NO: 144152 - RNA, 61 nt, Homo sapiens
ggcgcccaaaagcggggcacagaacacaccagaggcggaccaagaccccaggaagccccgg

SEQ ID NO: 144153 - RNA, 37 nt, Homo sapiens
cagacagacgcgcaaaacccagaaggacaagcaggag

SEQ ID NO: 144154 - RNA, 83 nt, Homo sapiens
caccaccaacgcggccgacaacagccggcgccgccacgaaacgcgaagacgacgagcgcaccaagaggaacacaggcgaccgc

SEQ ID NO: 144155 - RNA, 74 nt, Homo sapiens
ccccggaaggacgggcggggggagaaccgcccagacacgacggcagagccgagacaagaccagccagcggcccc

SEQ ID NO: 144156 - RNA, 85 nt, Homo sapiens
gcgagagcgggaacaggaccggcgggccggaagacggcagcggccccggagacacaccgcgccggccgcccgcaggacaccgagg

SEQ ID NO: 144157 - RNA, 74 nt, Homo sapiens
gaaagcgagacacgagagaaaaacgcaagggaaaagagaaaaagaaagcgacggaaaaaaacaaaagaacacaa

SEQ ID NO: 144158 - RNA, 74 nt, Homo sapiens
agcgccggccgggcagacccaccaggcgcagcgggccccggcaccggccgacccagcgagcggaggaaacacac

SEQ ID NO: 144159 - RNA, 40 nt, Homo sapiens
ccgcgccgcggccgagcagcgggcccaaggggaaggaaca

SEQ ID NO: 144160 - RNA, 83 nt, Homo sapiens
gggcggcggcagcgggccagacccaggaccgcgacacggaagacagaggaagaggaagacaaaccggcacgaaagaccagaga

SEQ ID NO: 144161 - RNA, 68 nt, Homo sapiens
gggcagaacgaggggaggaaagcaggcccgaaggagcccagcaagcccagacaaccagaccagaacga

SEQ ID NO: 144162 - RNA, 75 nt, Homo sapiens
agaccgaagaccaaaaagcgccccggcgccaccaggggccagaaccgcccacggcccccacagcggacccggaac

SEQ ID NO: 144163 - RNA, 68 nt, Homo sapiens
caaggaggcagggacccggagccacccacaggacccgccaccaaaggcggcccaaccgggggaggaaa

SEQ ID NO: 144164 - RNA, 79 nt, Homo sapiens
gaagggaggggggcagcggagcccaggcggcagcgccaggagcgggaacccaaggcaaaagcaaggggaagaaccaaaa

SEQ ID NO: 144165 - RNA, 80 nt, Homo sapiens
cgggcaccgggcagcccgggcgggcccagcccagagagccaggagcaggggcgcggcagaggcgcggacgagcagcgcag

SEQ ID NO: 144166 - RNA, 74 nt, Homo sapiens
ggcgcggccgggcggggagcgcgagggggcccgccccaggcggaggcccggaccccgccgcgaagcaagaagag

SEQ ID NO: 144167 - RNA, 73 nt, Homo sapiens
gagacagccacaaaaaaggacgacagcaccagggaggggacaagcaaacggcgcggagaaagaagccaaggca

SEQ ID NO: 144168 - RNA, 70 nt, Homo sapiens
gcacccggcaaaaaccacagggggaagacgagagagagagggaccccgaaaaagaccaggaagggaaaac

SEQ ID NO: 144169 - RNA, 87 nt, Homo sapiens
cgaggaccgagaccgcggccgggaccgaggaaccaaaggcagacccagaagagcacaaaacagagaaaagggaagggcccggagagg

SEQ ID NO: 144170 - RNA, 77 nt, Homo sapiens
cgaggggaaaccgcgccagagacacaggcgaccacagcacacaagccgcgaccacgagcgccagaagaagaagaaga

SEQ ID NO: 144171 - RNA, 76 nt, Homo sapiens
gcaggcgccccaccgcagcagcccagccacggaagcaaagagagaaggaaaccaagaacaacacaagaaaaaccag

SEQ ID NO: 144172 - RNA, 74 nt, Homo sapiens
caagagggcgggggccgcggccaagaacgccggcgccccaaccgcacaccacgaagggagggaaggaaggaaga

SEQ ID NO: 144173 - RNA, 76 nt, Homo sapiens
ggcccacccggccaccccccagggagccgaagccaagggacggccaccccaggaggcggggccagcggggcaggag

SEQ ID NO: 144174 - RNA, 72 nt, Homo sapiens
accgcaggcagacaaaagggccaaagaagggagagagacagggaggcgcaagacgccccgcccgaagaaggc

SEQ ID NO: 144175 - RNA, 60 nt, Homo sapiens
agcaacagccgccggcggaaggaaagcacagagagcaggaacaaggcagccaagcacaag

SEQ ID NO: 144176 - RNA, 75 nt, Homo sapiens
cagccgcgcgccgagaagcacccgcgacccagaaggcccagaaggggaagacccccagcgaacagagacccaaaa

SEQ ID NO: 144177 - RNA, 66 nt, Homo sapiens
ccacgggcaacacaggcagaagagggacgcaaaaggaggcagaccgaaaacagagggccccaccgc

SEQ ID NO: 144178 - RNA, 78 nt, Homo sapiens
cacggcgggcgcgaccgggcggcccgggggggcgggcgcagcgcggacagcaaaggaggaaacaccacacgaaacaca

SEQ ID NO: 144179 - RNA, 71 nt, Homo sapiens
aggagcagcggaagccgggcgcgcccccccgcgggcgccgcccagggaaagggcagcggaggcagagccga

SEQ ID NO: 144180 - RNA, 79 nt, Homo sapiens
gccaacgagaagcaccggagacaacaggacaagaacccaaccagcagcaaaacaccaaggaaagggagcagcaacccca

SEQ ID NO: 144181 - RNA, 84 nt, Homo sapiens
ggcgggccgcagcgggaccccagccccgccaagcgcggccgccgcccccgcccagagacgaagaggagcagaaccagaagggac

SEQ ID NO: 144182 - RNA, 58 nt, Homo sapiens
aacgaggacaggcacagcgcaggaaagaagcagcgaagcaaagacagggaaaggaccc

SEQ ID NO: 144183 - RNA, 53 nt, Homo sapiens
ccaaccagcacaaaggcccaagacagcagaggcacacaaacggaaccgcacaa

SEQ ID NO: 144184 - RNA, 81 nt, Homo sapiens
caacagcaaggcggaaggagaagaggccgccgcgccaacgcgagcggcgacggcgaggacaagaagggcagagaagccaga

SEQ ID NO: 144185 - RNA, 83 nt, Homo sapiens
caggagaaggggaaagcacaagccaggaaaggacgcgcgaagcgcgggcggcaggacaccgcgaccagcaccacccaaacaag

SEQ ID NO: 144186 - RNA, 50 nt, Homo sapiens
gccggagccccgcgccagcgacagcaagaacggcagaaacacacggaaaa

SEQ ID NO: 144187 - RNA, 54 nt, Homo sapiens
ggccaacaggccaagggcggcgccccaggccgaggaggaccccaccaacaagca

SEQ ID NO: 144188 - RNA, 78 nt, Homo sapiens
agcgcccgagcgacgacgccagcaggacccggcaggcacaagcggagcgggacagacaacgacgaaagagcagcgaaa

SEQ ID NO: 144189 - RNA, 70 nt, Homo sapiens
ggcaggagcccgaaggcccaagcccccccgggccagccaacacaacaaaaccccggacaagaaagccaga

SEQ ID NO: 144190 - RNA, 74 nt, Homo sapiens
gaagagcgaagagaccggagccgacagacgaggcggccccaggggggaccaacaagggagaaccaacagaacaa

SEQ ID NO: 144191 - RNA, 71 nt, Homo sapiens
gcaccggaagccggaacaacagccagagccagccagcagggcagcccccgcccgcccccaccccccacagg

SEQ ID NO: 144192 - RNA, 62 nt, Homo sapiens
gggcacaaggccaggcccaagagccagacccaagacaaaagcggggaaggagcacgggagcc

SEQ ID NO: 144193 - RNA, 65 nt, Homo sapiens
cgccgccgccgaggagaaagacaaacccggggcaaaaagggggaacgcaggaggcaacgaacggc

SEQ ID NO: 144194 - RNA, 60 nt, Homo sapiens
aaagggaaggaagaagaccaagggcacggagcgagcagaggaggaggaaacccggaacac

SEQ ID NO: 144195 - RNA, 78 nt, Homo sapiens
ggggcgccccacagaggggcgacgcggacacagacaggcaggagaagaaggagcggcagaaggggcgaaaacaaacca

SEQ ID NO: 144196 - RNA, 64 nt, Homo sapiens
agaagacacccaccaggacccggcaagaagacccaagaacggaacgaagaggagcgcaagacgg

SEQ ID NO: 144197 - RNA, 105 nt, Homo sapiens
ggacacaccccaccccacaggacgccccagagaaagcccgccgcaccagcaagcgcgggaacccacaggagggccagaggacaaagcacggcggaagagaagcca

SEQ ID NO: 144198 - RNA, 78 nt, Homo sapiens
cggggaggccgcccggcgcagcggggaccggcggcggcgcccaggcacccggcccggccacaagggcgcagaagccgg

SEQ ID NO: 144199 - RNA, 73 nt, Homo sapiens
accaccgcggcgcggcagcgcgcccgaggcaggaagagcggagagcagccccaaaaccagaaaacaaagggga

SEQ ID NO: 144200 - RNA, 69 nt, Homo sapiens
gaaaccaggcgggcacccaccccggccgagagggaaaaaggcgccacggggggaaccagaagcacaagc

SEQ ID NO: 144201 - RNA, 68 nt, Homo sapiens
ggagaaggaccaagaaccagaaaaccagaaggcaccgacaggaaaggaaaaggagaaccaggcacccg

SEQ ID NO: 144202 - RNA, 77 nt, Homo sapiens
agagggaagcgcgccggcaggaccagggggcgaaggcaggaaccaccaggagggacgcacaggaggccaagcaggag

SEQ ID NO: 144203 - RNA, 54 nt, Homo sapiens
agcgacacacagcccgccggggaggccagaagaggagaggcacaaccaggcaca

SEQ ID NO: 144204 - RNA, 51 nt, Homo sapiens
ccgcccccgccacaccaacgggcgaaacacagcagggaccaggagggaccg

SEQ ID NO: 144205 - RNA, 79 nt, Homo sapiens
gggaggccgaggcgggcagacaccgagccacaccagcggacagccaccaagaggccagaaggcagaacagcgacacgaa

SEQ ID NO: 144206 - RNA, 48 nt, Homo sapiens
cagaaagccaaaaaggagaaagggcgaccgacagacaagaacggaaag

SEQ ID NO: 144207 - RNA, 88 nt, Homo sapiens
caggcaggccagagcagcaccaggccagagccagaacaacccgggggcaaacgcggcagcaccgacgaacccccaagcgaccaaggag

SEQ ID NO: 144208 - RNA, 90 nt, Homo sapiens
cgggccaagggcaccgggcccagcaaaagccgccagggaggcggcgggcgacaaaccccgggggaccacccaccgggggaggcagcggcc

SEQ ID NO: 144209 - RNA, 73 nt, Homo sapiens
gaaaagagccacagagaacggggaaaggcaccaaaaaccacgcagcacccgacccaccggcagagacccgcac

SEQ ID NO: 144210 - RNA, 68 nt, Homo sapiens
gccgggaccgaacaggcggacaggagagacaacggaggcaagaaagacggagaagcgagaagagacca

SEQ ID NO: 144211 - RNA, 79 nt, Homo sapiens
cagcaaggccgcacaggaacaggagggcgagccccaggcccgcagagggcagaggacgaaagcacgccccgcaggcaaa

SEQ ID NO: 144212 - RNA, 71 nt, Homo sapiens
cccaaccgcggagacaggggcgcagccagccccagcgaaagcaacaaggccgccacccaggaaagcgccca

SEQ ID NO: 144213 - RNA, 70 nt, Homo sapiens
agaggcggcccggaagggcacgcagacaggaagaagaaagagggcgccaggacaaaagacccacaccgaa

SEQ ID NO: 144214 - RNA, 79 nt, Homo sapiens
aggaaagcaccagacgccaccacgggcacccgcgccgggcaccgaggaccagccaagacaggacaaaccggcgaccaca

SEQ ID NO: 144215 - RNA, 77 nt, Homo sapiens
gacgcaagaaacccaggacgagaacagcaacagcacacaggacagcaacgccagcgcacgagcacaccacagacccc

SEQ ID NO: 144216 - RNA, 71 nt, Homo sapiens
gggacccagcaacccagggagaaagaagagagaccagaaacgagaggagaagaaaccagccagacagagcg

SEQ ID NO: 144217 - RNA, 111 nt, Homo sapiens
ggcagcccaaacccaggaaggcagcagcggccacagcgcggccgcaggcccgcacgggcggaggaggggaccacagacacaccaagagccaagaggcggcaagcacggggg

SEQ ID NO: 144218 - RNA, 78 nt, Homo sapiens
agagaaaaagcagccggagacaggcgagaggaagacgacgaggaagagcccgccgaagaggagaagcaagggacagac

SEQ ID NO: 144219 - RNA, 69 nt, Homo sapiens
aaagaaagaacacaaacgacacaggaaaggaaacagacagcgcgaggagagaagccacaagcaacgaaa

SEQ ID NO: 144220 - RNA, 70 nt, Homo sapiens
gagccaccagcacggaccaggaggcgagcaacaggagaccggaaacgagagaaacgaagacgaagaaaca

SEQ ID NO: 144221 - RNA, 51 nt, Homo sapiens
gaagcaggaaggaccacccaagccaagcaggcaccaagcagccaccaagca

SEQ ID NO: 144222 - RNA, 86 nt, Homo sapiens
ccgggcccgccaacccggccacgcggccggcaccgaccaaagcacacaggcagacagagaacaccacgggacaaagccagcggagg

SEQ ID NO: 144223 - RNA, 66 nt, Homo sapiens
gagcccaggagaaaccggacgcgacggggaaacccgaagaggggagaaaaggaacaagaaaacaac

SEQ ID NO: 144224 - RNA, 76 nt, Homo sapiens
cagggaccccccgccccggaccgcggaggcaccgagaacggacgcaagcggggaggggaagcggggacgagagccc

SEQ ID NO: 144225 - RNA, 87 nt, Homo sapiens
cagaccccaaccgcagggcgggagcggccacaccagcacaaggcacagcgagcagccgccaagaagcagggcccaggacagaaggcg

SEQ ID NO: 144226 - RNA, 77 nt, Homo sapiens
aaacaggcaggaaaagagcagcccgacggccaggaggcgaagagacgaggaagcccaggagcccgaacacaaaaaga

SEQ ID NO: 144227 - RNA, 86 nt, Homo sapiens
ggcggcccgccggccggcgcggcgcagaagaaacccgcggcgaccacagccaaagcgggcggaaaagccgggccacagaagcacca

SEQ ID NO: 144228 - RNA, 76 nt, Homo sapiens
gcgcgagaaggacgcgcagccaccccagggaaccaggagccgacaacaacccgacgcaaggcagccacaccaccca

SEQ ID NO: 144229 - RNA, 78 nt, Homo sapiens
ggcgacgccccaggggaaaacccccgggaccaggacaccaggggggaaaaaccacacaggcaaagaacgcgcaaaaca

SEQ ID NO: 144230 - RNA, 82 nt, Homo sapiens
cagccgagacaccagcccgaaacaccaccaagcggaggcacccaccacgggccaggcgggccagaggcaagccgcgggagcc

SEQ ID NO: 144231 - RNA, 70 nt, Homo sapiens
gaacacacaaagacacagacacaacgagaccaaaaagcaacccgcaccaagccaggagaagggagacggg

SEQ ID NO: 144232 - RNA, 76 nt, Homo sapiens
gagacagacgagaagacagaagacccccgccagcccagggccgaaaagaaaacaggagaaccacccgccaacagca

SEQ ID NO: 144233 - RNA, 58 nt, Homo sapiens
agcggagccccccaagagccggaaagagcacaggggaggggaagcaacagggcggggg

SEQ ID NO: 144234 - RNA, 80 nt, Homo sapiens
agggccccgcccggcggggaagagaccgaaggagcagacgaggcacgagcgccagcgcgagacagacggggcgcagaagc

SEQ ID NO: 144235 - RNA, 66 nt, Homo sapiens
aggccgagggggcggacacaagcagagccaagcacaggggaaccagaaagcacgggaaggaacgcg

SEQ ID NO: 144236 - RNA, 72 nt, Homo sapiens
acagacaaaggcaggggcgccagggcaccagacgggcgggaaagagaggcccgcgcgcgacggccacgagcc

SEQ ID NO: 144237 - RNA, 76 nt, Homo sapiens
cacagcagccagccggcccgaggacaccgacaccagcaggggcaacaggaaaacaacccagagaacccaaaccccc

SEQ ID NO: 144238 - RNA, 76 nt, Homo sapiens
aacggggaccccggagcccagaagacagagggcgagacaaccaggaaaccgagcggcaccgcggcccccggggacc

SEQ ID NO: 144239 - RNA, 128 nt, Homo sapiens
cccagcgccaccaccacgccagccgcaccagccgcccaagccgcacagccgcggcggcagcagcaggagagccaccaggagagaacgccgcgccgcgcgacaacggcccggcaggcaaggccggccgc

SEQ ID NO: 144240 - RNA, 69 nt, Homo sapiens
gagagacccgccagcagggggagaggcaaagacaccggcagagaaccaaagcagccagcaagcacgagc

SEQ ID NO: 144241 - RNA, 67 nt, Homo sapiens
aaccgaacacaggagaccaggaccagcccagcgaagacaggggccaaagaaagacagcaaacaccaa

SEQ ID NO: 144242 - RNA, 70 nt, Homo sapiens
cggcgcgcggacccaggcgcggaggcgaggccagcagcggggagacacagagcaccagccagaggagagg

SEQ ID NO: 144243 - RNA, 78 nt, Homo sapiens
gccaccgagcgcgcccagaggacccgccgcacccaggcggaggcagcggcgcaaccggccacgcaacccccccccaga

SEQ ID NO: 144244 - RNA, 71 nt, Homo sapiens
gaacagaagagaggaagaaaggacagggagagaagccaagaaagacagcaagcccgagaagcaagaccgcc

SEQ ID NO: 144245 - RNA, 57 nt, Homo sapiens
cgggccaagacacccaaggaggcaacggcggggacacgggggcggggaaacggacca

SEQ ID NO: 144246 - RNA, 80 nt, Homo sapiens
gagccgaggcgggccccggaaccggaacagcgcaaccgaaggcacggggcaggaaacagaagagagccaccgggaggccg

SEQ ID NO: 144247 - RNA, 76 nt, Homo sapiens
gggggacgcagggaggagcgggacaccccggaagcgggaaagacacgggccggagacgaccgggagagggagagca

SEQ ID NO: 144248 - RNA, 59 nt, Homo sapiens
gaagagcagagagaaggcagggcaaaccagaaagacgaaaggaagcaacgcgagagcag

SEQ ID NO: 144249 - RNA, 77 nt, Homo sapiens
agcagcagccccgagggagcgaaggcgagagaagcggagaagagcacaggagacgagaggacagggacaagcgcaca

SEQ ID NO: 144250 - RNA, 72 nt, Homo sapiens
ccgaaggcggcgagaaaagaaacagcgaaggagaaggagccagggcgaaaaaaaaggccgggcaaaggaggc

SEQ ID NO: 144251 - RNA, 78 nt, Homo sapiens
gggccggaacgaaagcaggacggaggagcgaccaccgaaccccgaacaggcccaagggccggcagagagacaacccca

SEQ ID NO: 144252 - RNA, 81 nt, Homo sapiens
cggcgcgcggggccgccgccagcggcggcccgcggcgcccgcacccgggcccgcaggccagcaaacgagaaggagacccaa

SEQ ID NO: 144253 - RNA, 77 nt, Homo sapiens
acagaccgacagggagggagggacggaaacaaagacagggcccacaccacaccgaagaaccaccgggagaggaagga

SEQ ID NO: 144254 - RNA, 90 nt, Homo sapiens
ccgcagacagagccgaaaccaggcggaaggcgcgagaagcgagcgcgacaaacccagggacagagaaaaaggaaggcaaccccaccccca

SEQ ID NO: 144255 - RNA, 42 nt, Homo sapiens
ggaagaaaagaccagagagaagcaagagaaagacagcaaaga

SEQ ID NO: 144256 - RNA, 80 nt, Homo sapiens
caagggaggcagaaaggccccgcacgccaagccgggagcccacaccggaggagaggaaagcaccgccaagcggagaaaca

SEQ ID NO: 144257 - RNA, 83 nt, Homo sapiens
aagaaagaagagagaggaaaagaaagaaacaaaagaaacaaagagcaaagaacggcagaacgcgcagcaaaaaacgcacaagc

SEQ ID NO: 144258 - RNA, 36 nt, Homo sapiens
gaggcagccagcagggggaggcgaaaagcaggaaga

SEQ ID NO: 144259 - RNA, 73 nt, Homo sapiens
aaggaccaagaaccagaagcgagagaaaacgccagagcaaccagaggcagcccaaagaggagagcacaaaaag

SEQ ID NO: 144260 - RNA, 78 nt, Homo sapiens
cccacaaggaaagcaacgaaaagaaggaggggccccaccacacgcacacgcaagcacgaggacaagacagcaacagcg

SEQ ID NO: 144261 - RNA, 84 nt, Homo sapiens
caccaagcacggccaacgccggcacagggaagaaggccagaagaaagggccggaaggcggcaaagccacagagaaggacagaaa

SEQ ID NO: 144262 - RNA, 48 nt, Homo sapiens
ggcggaaagcggaggacgaacaacggaggcgagcgcaggcacgacaga

SEQ ID NO: 144263 - RNA, 77 nt, Homo sapiens
gaacgcaccaagaccgggcaaccggaccgacaccggcccaaggggccagccccagaacagggggcaaacaccagggg

SEQ ID NO: 144264 - RNA, 75 nt, Homo sapiens
caaaacccagaaggcaggcaggcggaacccaaggagaaacaagcacgccgcaacgaagacagccggagagacaca

SEQ ID NO: 144265 - RNA, 74 nt, Homo sapiens
ggggcggaacagggcgcacacccgcacggggaaaaagagccagaacacgagaaaagaagaagaacaagcacaga

SEQ ID NO: 144266 - RNA, 80 nt, Homo sapiens
cggccagacacaaagacccaggacccagccgagcccacgggaggcagaaagcaccggcaccggagaacacgagcgcgaga

SEQ ID NO: 144267 - RNA, 65 nt, Homo sapiens
cgaggccgcggcagggcccgcaggcggcgcacaggaagcacgggaaagggagcagcaccggccac

SEQ ID NO: 144268 - RNA, 70 nt, Homo sapiens
cgccaggcagcgcccccaaacgggacccgcccagcagagccacggagccacagcaggcccgcaggagaca

SEQ ID NO: 144269 - RNA, 37 nt, Homo sapiens
aacccgaaaaacgaacgaaagaggcggacgaacccaa

SEQ ID NO: 144270 - RNA, 73 nt, Homo sapiens
gacaagaaaggcaaaagcaaaggcaaaaagaaaagccacgagagaagcagaggaaaagaaggcaagaagaagg

SEQ ID NO: 144271 - RNA, 68 nt, Homo sapiens
caggagcaggcagacgggcacagcgagagcccgccacgccacaccgggggaaaccacaccacccgcca

SEQ ID NO: 144272 - RNA, 78 nt, Homo sapiens
cagccacgaggcgagccagagccgcagcccacacggaagaagaagcgcacaaggagcacaacagggagcggaagacga

SEQ ID NO: 144273 - RNA, 62 nt, Homo sapiens
acggcaagcagaagacagcggacaggagcgagaacccgagcagcgccagagcaacacaccgc

SEQ ID NO: 144274 - RNA, 76 nt, Homo sapiens
cgaagaaagaacgcagagcggagggggaccaccccaggaagaagacaacagaccacaggcggagcagcagcagccg

SEQ ID NO: 144275 - RNA, 104 nt, Homo sapiens
cccgagcccggggaaggagcaggaagaggaccacagggaccccacccggcggaggaacagcagacaagaaggaagaggaaggccgaagagaggcgacgaacgga

SEQ ID NO: 144276 - RNA, 79 nt, Homo sapiens
ggaagccaaccagaaagaaacccaacacagcccaaagaaaaagggcaccaagggcaaaggaaaaaacggcgcaagcaag

SEQ ID NO: 144277 - RNA, 71 nt, Homo sapiens
acgccagggcgccgcggaccgcgcggggaaacccagacgacaaggaaggccaagggacccacgaccaacca

SEQ ID NO: 144278 - RNA, 80 nt, Homo sapiens
agacagaagcagcacaggaggggcaggacgaagccaagaggcgaccaggacccgcgggcacagcccccccagcaaagggg

SEQ ID NO: 144279 - RNA, 70 nt, Homo sapiens
gaagggcaaagccgaaacaggcaggcgaccacggaacccagcaaccagagagggaaaggggagcgaagag

SEQ ID NO: 144280 - RNA, 86 nt, Homo sapiens
agaaaagaagagacagcgagaacaaaggagagaggaccacccagaggagcaacccggacacaagagggcaagaaaggcgcgacggg

SEQ ID NO: 144281 - RNA, 77 nt, Homo sapiens
acgacaaaagaaccagaaaaagagaaggaggcgcgagagacccagcagcaagggacaaacgggacggaaaacgccag

SEQ ID NO: 144282 - RNA, 74 nt, Homo sapiens
gcggcggcgcccccagccggagccccagacaacccggacggccggccaaacgcagaaccggccgaaaagcacaa

SEQ ID NO: 144283 - RNA, 75 nt, Homo sapiens
acgagaggcggcagcggcgggggcaggcccgggcgcacgaccgcggcccggcagcacccgaggaggagcgaaacc

SEQ ID NO: 144284 - RNA, 74 nt, Homo sapiens
gggagaccggagaagcggaggacccaggagcacgacacacaaggaacgagggcaccaagccccaggagccacaa

SEQ ID NO: 144285 - RNA, 71 nt, Homo sapiens
gccccgcgggggacggaagacaacagcacaagcagcgagcgaaggaggaagacgaccagacaccgaaacag

SEQ ID NO: 144286 - RNA, 80 nt, Homo sapiens
aggagcagccacagagacaaaccaccaaagaaagagccagccccaggccgcgagccggacaacacaccacaagaaccgca

SEQ ID NO: 144287 - RNA, 88 nt, Homo sapiens
ggcgcaagccccggccgggcgaccaagcggaggcgcgcggaacagcgccgaggcgacccgcccaggcgcacaagagcagggaccccag

SEQ ID NO: 144288 - RNA, 84 nt, Homo sapiens
ggacaacagcgagagcacacaacaaccaggcggcagcggagaccgggccaggagaagcgaagcggagcagcaaacaagaggcca

SEQ ID NO: 144289 - RNA, 80 nt, Homo sapiens
gaaagagaaacccggagggcgccggggaacacgaggacccaaagaacaaacccggagagaagaaaaccccagcagggcgc

SEQ ID NO: 144290 - RNA, 72 nt, Homo sapiens
gccccgagagcggaaacaggacgaacgaaccacggcaacagccggggagggcggacgggagaccggacgacg

SEQ ID NO: 144291 - RNA, 38 nt, Homo sapiens
aaccaaaaaccccccccaaaaacaggaccacgcaagac

SEQ ID NO: 144292 - RNA, 54 nt, Homo sapiens
cgcaccacggcaggaggcggcagagacgggaggaaggccaaagccacccccaaa

SEQ ID NO: 144293 - RNA, 80 nt, Homo sapiens
cggcgggcagcacgccgcgggagggcgcccgcgcaccccaccggcagcccgccgccagcgcgcaaggaagaagagacgcc

SEQ ID NO: 144294 - RNA, 60 nt, Homo sapiens
ccaagcagaggggaagggggcaggaagccaaggaaacccggcaaagaagaaagacagcgg

SEQ ID NO: 144295 - RNA, 79 nt, Homo sapiens
aaagcagaggccaccagggcccccaaggcaggcccgggcaggcgagaaaagcaggggcccccggaaggcaggggacccc

SEQ ID NO: 144296 - RNA, 74 nt, Homo sapiens
gggcagacagacagcggaacgggagcaaggagaaaggagcccagggcagaccgggagacacaaagaaacacgag

SEQ ID NO: 144297 - RNA, 74 nt, Homo sapiens
gacaggagagcgggcaagaggggaacgcgcgcacggcgagaaaagagcaccaggaccagccacgggaacacccc

SEQ ID NO: 144298 - RNA, 73 nt, Homo sapiens
gagcgcgaagaggagaaaaggcgaaaggcggagacggaagacaaaagagcggagcaaagcgcagcaagcacgc

SEQ ID NO: 144299 - RNA, 66 nt, Homo sapiens
acccccaccacagacgaagaccagaaacaggacaagaacagaaggaaaagaaggaggccagcggga

SEQ ID NO: 144300 - RNA, 30 nt, Homo sapiens
ccgagcaacgagggcagaaaggccgcgaca

SEQ ID NO: 144301 - RNA, 77 nt, Homo sapiens
ggagaaacaagcagaagaaccgacggagaagagggcggacagcaagagcagccccggaacggaggaagggagccgga

SEQ ID NO: 144302 - RNA, 70 nt, Homo sapiens
cagcagaagaaacacccaaaaccgcccaaacaggaaagaagcacaaggaccgaggaaccacgccagggcc

SEQ ID NO: 144303 - RNA, 71 nt, Homo sapiens
cacggacgcgccagcaagccggccaaacaacaagcaggaagaaggagaaagacaaagccccgagaaagacc

SEQ ID NO: 144304 - RNA, 66 nt, Homo sapiens
aggcacgcggaccccacacacagaaaggacaaagccagaagaaagaaaagaaaaaagaaacacgcg

SEQ ID NO: 144305 - RNA, 53 nt, Homo sapiens
aaacgaaagaagcaggaaggagggccccaaggcggcagccccgaccgacgggg

SEQ ID NO: 144306 - RNA, 87 nt, Homo sapiens
ccaagacccccagggggcgaggacaagcaaggaccgcaggacccaggccagaccggagcagcggggacagacccacagcggggccgg

SEQ ID NO: 144307 - RNA, 81 nt, Homo sapiens
agccaggaacccgggacagcaggagggggccacggccaagggcgcgcaagaaagcccagaacacaccgaacgaaagccacc

SEQ ID NO: 144308 - RNA, 59 nt, Homo sapiens
aaccgggacaccgcgggccacgagcgccaggagccggaaagccagggaaaagcagagac

SEQ ID NO: 144309 - RNA, 81 nt, Homo sapiens
agcggccagcaggagcgccggggccggggcgaacgcggccggagaaggaagcgccggccaaacgagcacagcaaacgcgaa

SEQ ID NO: 144310 - RNA, 78 nt, Homo sapiens
agaggacccaccgggggcagggcgcaccacgaaaacaacacagcagggaagcagaagggcaggagacagagagaaagc

SEQ ID NO: 144311 - RNA, 81 nt, Homo sapiens
acaccggcgaccggccgcggcgcccggccaccgaggcggccagcggcagcgggcgcggccacaggccgcgcacggggccac

SEQ ID NO: 144312 - RNA, 73 nt, Homo sapiens
gaagggaaagaaacccgggaaaaagagaaagagaagacaaaggaggaggggagccagaaggaccagcagggcc

SEQ ID NO: 144313 - RNA, 43 nt, Homo sapiens
ggccaccgcaaccccacccccagccgaccaacaggagaaaccc

SEQ ID NO: 144314 - RNA, 72 nt, Homo sapiens
cgagcgaccacgagcccaagaaaccaggcccaaccagcacgcggaggcgagccccaacagaccgggaggaac

SEQ ID NO: 144315 - RNA, 53 nt, Homo sapiens
caaacacaggacagccaacaaaaagacgaaacaagaggaggcgcccacgaagc

SEQ ID NO: 144316 - RNA, 85 nt, Homo sapiens
gcaagcgaacgcaggaaagcaggcaaaaggcgcgcgcgccgccccccacccgccccgggagagagcccggaagcaggaagaggag

SEQ ID NO: 144317 - RNA, 86 nt, Homo sapiens
gggagcaacgggaggccggacccagcgagcgggcggcacgcacgcagcacaggaagccggagaaccgaaggaccgcggaccaggcg

SEQ ID NO: 144318 - RNA, 76 nt, Homo sapiens
ccgcgagccagcggcagaggcaagggcggagaccccagacggcagagaggccaagaagcagaagccaggccgaggc

SEQ ID NO: 144319 - RNA, 42 nt, Homo sapiens
gacaccaccagggagccaggagaggcgaccggcccgaggacc

SEQ ID NO: 144320 - RNA, 78 nt, Homo sapiens
gagagcgcaccaggcaccccggggccagacaaacgcagaccaagcgaagcacccagcccgcccaagaagagaaaggag

SEQ ID NO: 144321 - RNA, 39 nt, Homo sapiens
gccggaccgagacagagaagaaagggaggagcgcacagc

SEQ ID NO: 144322 - RNA, 90 nt, Homo sapiens
cggcggcgaggaaagcaggaggaggggcggcggcgggaagaacccccagaggagcccaccaccggaccgggaccgggaaaggccaggccc

SEQ ID NO: 144323 - RNA, 83 nt, Homo sapiens
gggaaccaccggacggacggagcagcccaggggacgggcgcagcgaacggcaagaagaagcgaaaaccgcccacaacaccagc

SEQ ID NO: 144324 - RNA, 71 nt, Homo sapiens
gcgcacacccacccagaagaacgagccgagcccacggagcgaggagccggcggcacaccggcccccccagc

SEQ ID NO: 144325 - RNA, 76 nt, Homo sapiens
ccgcacacagaggaaacgaacagcccgaagcgaaccaccagacacgcaaaaaacaccaaggaccccgaagagaagc

SEQ ID NO: 144326 - RNA, 62 nt, Homo sapiens
caggacggcgcggcagagccccgacgccacagaacggccagcccgcgggagcgccacacaga

SEQ ID NO: 144327 - RNA, 58 nt, Homo sapiens
cggggggccaggcacacggggagacgcacgaccagacccgccagaaagggggccgggc

SEQ ID NO: 144328 - RNA, 76 nt, Homo sapiens
acagcccaaaggccaacccggagggcccagcaaaaggaacggcggaaaaagaacagacaacccagcaacagacgga

SEQ ID NO: 144329 - RNA, 70 nt, Homo sapiens
ggggaccgcaaaacagagaccggaaaagagcgggccgcacgggggaaagggagacaggagagcaaaacac

SEQ ID NO: 144330 - RNA, 105 nt, Homo sapiens
gcaaggaggggagcaagggcaccacggccacacgggcacgccagacaacgcccagaggccagcaacagaagaaagcaagcaccggggaaagcggcccgaaacaag

SEQ ID NO: 144331 - RNA, 55 nt, Homo sapiens
agcagacgaaggacagggagagacaccccgaccgcacccggccgccccgggccag

SEQ ID NO: 144332 - RNA, 61 nt, Homo sapiens
cggccggagcgaggggcggaccgcgggcgcccacgaccaggccccaggacggcgagagccc

SEQ ID NO: 144333 - RNA, 73 nt, Homo sapiens
ggccccgcgccgcggccgagcagcggcccaggcagagccgggcacagaagcggcgggcagaaggacagcgacc

SEQ ID NO: 144334 - RNA, 62 nt, Homo sapiens
acagagaaacaagggcaacgcggcagaagacaaaagaaggaagagccagacagaagacacag

SEQ ID NO: 144335 - RNA, 71 nt, Homo sapiens
ggcaaagggcaaagaggacccacagcccaggacccagagggacaggaaccacggagggaccaggagcagaa

SEQ ID NO: 144336 - RNA, 75 nt, Homo sapiens
aaagagcggaaaggcaaaaggacaggggcccgggaaacagagaaacaccgaaaacagaggcgaaaacaggccggg

SEQ ID NO: 144337 - RNA, 72 nt, Homo sapiens
gaggagccaagcaaacagaagcgcggccaaggaagggaagggaggcggaaaagaaggggggcccaaagccaa

SEQ ID NO: 144338 - RNA, 80 nt, Homo sapiens
cgccgaacgacgggccacaggaccagccaaggaagcaacacagcagcgagagaagcagaaaaagcagaagaaaaaaaaag

SEQ ID NO: 144339 - RNA, 63 nt, Homo sapiens
gccggggccacgccagcgccgagggcgagacggcaggcaggccaaggcccccgcccaggaggg

SEQ ID NO: 144340 - RNA, 54 nt, Homo sapiens
ggcggcaggaccgggggccgaggcgccggggaccccagaagaacacaaaaagcg

SEQ ID NO: 144341 - RNA, 81 nt, Homo sapiens
gcgggccaccacgggacccaccgcccggcgccccagccgccccgggaaccagaccgggacagagcccgcacgcggacacgc

SEQ ID NO: 144342 - RNA, 79 nt, Homo sapiens
cgccaggggacacggcacgcagcgcgcccgccagggcccagagacccacgagcacgcgagagaacaacagagacccggg

SEQ ID NO: 144343 - RNA, 71 nt, Homo sapiens
gcccggcacgggccgcgcacggcaaggggaacggcgagggaacccaggaaggagggcgacaaacaccagcc

SEQ ID NO: 144344 - RNA, 82 nt, Homo sapiens
ggaggacagcaccagacaccccggcccacacccccgccacgcccgccacgagagggccgaggcagacaagggaaaggccgcg

SEQ ID NO: 144345 - RNA, 34 nt, Homo sapiens
ccgggcaagggaagaaaaggggaggaccaaaagg

SEQ ID NO: 144346 - RNA, 70 nt, Homo sapiens
gcggcgggccggacgcagaagaacaaggggaggggccccagaacagacacaagggcgcacccccgagaga

SEQ ID NO: 144347 - RNA, 85 nt, Homo sapiens
cgcgccgacgcgcccgacccgaagacgcgcccagcggcgggcgagggcggacagggccaaagcggcaggagaaggaagggaccgg

SEQ ID NO: 144348 - RNA, 85 nt, Homo sapiens
gccaggcgcccaagccaagcagacaggccagggacggaaggggagaaccaaccaggcaccaagccaaaacggacaagccaaggca

SEQ ID NO: 144349 - RNA, 40 nt, Homo sapiens
gaaagccaagaaccagcggaccaggcaagaccccccgcga

SEQ ID NO: 144350 - RNA, 51 nt, Homo sapiens
ccgacggcgcgcgcccgcgcgcgcggcgaggcagcgagaagaaaaagaaga

SEQ ID NO: 144351 - RNA, 76 nt, Homo sapiens
gggcgaacaggaaccccagacaccgcaccgagcgacaggcagggcccaggcgcccacgacagcacccgaggagggc

SEQ ID NO: 144352 - RNA, 77 nt, Homo sapiens
gaggcaaaacagacaaaaccacaaggagcaggaacagcgcccacaaccgagccccagacagccaccccacgcccacc

SEQ ID NO: 144353 - RNA, 70 nt, Homo sapiens
cggaccagaagccagagcgaggacgccggcagccggcaccgggccggaccaacgcccaaccaagagccaa

SEQ ID NO: 144354 - RNA, 76 nt, Homo sapiens
gcgcaacacacacagcagcaacagccgcacaggcaaacagcgaagacaagggaggaagaggcaacaaccacacaga

SEQ ID NO: 144355 - RNA, 82 nt, Homo sapiens
gcagaaaacgcagagaaacgcacagaaccaagagaccggagacaaaaagaggccaagaccaagaggacaggggacagcgccc

SEQ ID NO: 144356 - RNA, 77 nt, Homo sapiens
agcaagagccccaaagccaccagggcaggaaaggagggcgaaacacaagcaccacccccggaagcaccaggagccac

SEQ ID NO: 144357 - RNA, 37 nt, Homo sapiens
caaaaggaaaaagccggcaagacgaaggaaaaggaac

SEQ ID NO: 144358 - RNA, 62 nt, Homo sapiens
caccaccccgcagccccagccggcccaacagagaacggcaaacagcgagaaaccacagacac

SEQ ID NO: 144359 - RNA, 83 nt, Homo sapiens
gcaccaagaccaggccggcgacagcaccaagaacccacgcaggggagcggcgacaaggagcccacacagacaaaagaggccgc

SEQ ID NO: 144360 - RNA, 94 nt, Homo sapiens
acccccaccaaaccggccagaccacgacagagcaaagacccggccccccccaacagggaacaacggagacggagaagaaccaccaagaaagaac

SEQ ID NO: 144361 - RNA, 73 nt, Homo sapiens
cagcagggccaaagaagagaccggacaagcaggaaccgaaggggaaaacgagacaacgaaggggaaagacacg

SEQ ID NO: 144362 - RNA, 53 nt, Homo sapiens
aaaaaggcaacccgcgaggaggaaaaacgacacgcgggcacgcaaaaaaacca

SEQ ID NO: 144363 - RNA, 71 nt, Homo sapiens
aggcaacggggaccccggagcccagaagacagagggcgaggcacggcagacacaccgaccagaggaaggcg

SEQ ID NO: 144364 - RNA, 69 nt, Homo sapiens
ggaagggagaagaccaaagggaagagaaacgcaaccgagaccagggacagaaggggggcaaggcccaca

SEQ ID NO: 144365 - RNA, 76 nt, Homo sapiens
cggagaaccccacggagaaccagagggaaagacaaggagccgggccgagaaaccgaaccagagaccagagaagaaa

SEQ ID NO: 144366 - RNA, 74 nt, Homo sapiens
gaccccccagcaaggcagccagacgggagccgaacggaccccgccacccaaaacaaggaacaccagcccgaccc

SEQ ID NO: 144367 - RNA, 80 nt, Homo sapiens
cacaaaggcagcggccaaaacggccaccacacacccagagaacagggagggacaccgccaaacaaggaccgaaaggcggc

SEQ ID NO: 144368 - RNA, 68 nt, Homo sapiens
gccggaccgagcgcccgacccggcgagcggaaccggacaagagaaacaggcccagcacaaaaaaagag

SEQ ID NO: 144369 - RNA, 50 nt, Homo sapiens
aaaaaggcccccaagccggggccggccaagggcgacggaacccaccgccg

SEQ ID NO: 144370 - RNA, 67 nt, Homo sapiens
agaagcgcggcagggagcgcgggggcccgcgcagcagcgaccacggaaggggaggagcacagaacgc

SEQ ID NO: 144371 - RNA, 84 nt, Homo sapiens
ggccgcaagaagacgcgaccggcgccacggccagaccgggccaccacccggcgcaggcgggcaagcaggacagggcagaccgcc

SEQ ID NO: 144372 - RNA, 101 nt, Homo sapiens
ggccaacacgcgggcagcgaacaagcgggagcaaggagggcgaagagcgaggagaggaggaaaaccaggaaggacaggaccagaagagaaaaacagcagac

SEQ ID NO: 144373 - RNA, 83 nt, Homo sapiens
cgggcggcaaaggagcagccagagggccgggcccagcaccgaccacgacagaccaaggagcagcgcacaccggaggggggcac

SEQ ID NO: 144374 - RNA, 75 nt, Homo sapiens
aggacgaagagcagggaaacaccacgaagcagccaagggcggagaacggaaaagcaccaggaagcagagaggacc

SEQ ID NO: 144375 - RNA, 95 nt, Homo sapiens
ggccacggccgcacacgccagaagaccgcggaaggaagcacagccaaggacacgagcgcggagcgagaaaccaagaccgaagaaaaagaaccgag

SEQ ID NO: 144376 - RNA, 73 nt, Homo sapiens
cggccacgaccaagaagaagcgcggaccccgcggagcacacgcagacacagaaaagcaacgaagccacaacac

SEQ ID NO: 144377 - RNA, 112 nt, Homo sapiens
gacacgacgacggaaggagcagaacaaacggccaagaagggccaccccacagacggccaaagggccaaacaacagacccacagaacaacaacagagccaaacccgccagaac

SEQ ID NO: 144378 - RNA, 83 nt, Homo sapiens
gaaggacacgaaagaagaacagagcaggccaaggaggccccccacaggacccaggaccacccccacccccaacagggaaacca

SEQ ID NO: 144379 - RNA, 74 nt, Homo sapiens
cgacacagaaggaacagcagacaagacgagcccaccacggacagcaaacagagacggacagggccccccggaaa

SEQ ID NO: 144380 - RNA, 112 nt, Homo sapiens
acggagagcagcagccgcccgccaaccccaggggaccagaggaaccagcccgagcgccagaaccagagaacagcagaggcccaggaaacagccaccaccccggcccccagag

SEQ ID NO: 144381 - RNA, 71 nt, Homo sapiens
agacggacagggcacacagaaccgaaaaagagcgggcgaccaaacggaagagagaggagacacaaaaggaa

SEQ ID NO: 144382 - RNA, 74 nt, Homo sapiens
gacgggcaggcagccaacagaaagacaggaccccagcagaacaaaaagagccggagccaagacagccccggagg

SEQ ID NO: 144383 - RNA, 101 nt, Homo sapiens
aaaccggaaaccgccaaaaccccccacacaccccgccgggacagaaagaaggaaaaaacgcaagaaggaagaaagagagaaagcaaggaaaacgacaagag

SEQ ID NO: 144384 - RNA, 37 nt, Homo sapiens
cccgagagcgggacgcagacaccaaccccgcccccac

SEQ ID NO: 144385 - RNA, 85 nt, Homo sapiens
agggggcccagagccgggcgccacccgaggacaagccacgaggcggccccagcgcgggcgacaggccgacacccccagagagccg

SEQ ID NO: 144386 - RNA, 70 nt, Homo sapiens
ggagcagcagagcagggagacggaggaggaggagaagaagagagaaacagaccacccccaaacggaaagg

SEQ ID NO: 144387 - RNA, 75 nt, Homo sapiens
gcccccaggcagcagaccaagggaggaccgcgcacaaagacaacaggcacaaagagagaaggaacacccacaggg

SEQ ID NO: 144388 - RNA, 82 nt, Homo sapiens
cggcggccgccccgggcacacccggcccccggacgcccggccaaaacggaaaacgccgacaacaaagcagcaggaacaggca

SEQ ID NO: 144389 - RNA, 67 nt, Homo sapiens
ggagggacagcggaacgacaaggaggaaacagcgcaggacagccggaggaggaagacaaacaggggg

SEQ ID NO: 144390 - RNA, 62 nt, Homo sapiens
caaagcaggcaccaaggacagagcaggaccaaaagaagcaaacaccagaacccagaagggac

SEQ ID NO: 144391 - RNA, 76 nt, Homo sapiens
ccagcggagcgaacccgagagcgggagcgggcgggccaggaccagcagagcaaggagacccagccgacagcagcgc

SEQ ID NO: 144392 - RNA, 79 nt, Homo sapiens
gcggcaacaggggcgagaaagggaaaggggaggagaggaaagaaggagcaaagcccagggaaaaggacgggagccgggc

SEQ ID NO: 144393 - RNA, 73 nt, Homo sapiens
gcgggcgagagcgggaaccggaaacaggggacggacgcgacagaacaaaagaaggcagcgggggcacagcgag

SEQ ID NO: 144394 - RNA, 54 nt, Homo sapiens
agcacgcccaggcgccacacaagaggaaggggagaagaaaaagcagcaaaagag

SEQ ID NO: 144395 - RNA, 52 nt, Homo sapiens
agcggaaccaggcagcccagaacagcccaaaacaccgccaccgaaccacccg

SEQ ID NO: 144396 - RNA, 75 nt, Homo sapiens
aaacgaggcgcaaggggacggcgacgagaagagcagccagagaccacagcgccggaagggcagccgccaacagcg

SEQ ID NO: 144397 - RNA, 45 nt, Homo sapiens
ggcgccggaggcgccgacaaggccgcggaacaagcccagcgccgc

SEQ ID NO: 144398 - RNA, 56 nt, Homo sapiens
cacgccagacgaccccacccgcgccgcgacccggggacgaagggaacccgccgggc

SEQ ID NO: 144399 - RNA, 77 nt, Homo sapiens
cacagagccaggccaccgagagaagcagagcaccgcagagaagggcgacaaaagagcgagcgaaaagagggcgaaaa

SEQ ID NO: 144400 - RNA, 79 nt, Homo sapiens
cacccacccgggcaaggagcaaagaaggacacagcacacacacagcaaaaggagaagccaaaccaagaggagagcgcga

SEQ ID NO: 144401 - RNA, 90 nt, Homo sapiens
gcggcggccagggagggcggagcagcccggcggcggcggccgaaccaaccgagcggaccgacccaaaaccagggaccaggaggaggagaa

SEQ ID NO: 144402 - RNA, 89 nt, Homo sapiens
cgggagcgaccaacacaagggggccgcaaggggagggagcagcgcacacaaggacgaaggaaaaggcagggacgagggaagagagcggg

SEQ ID NO: 144403 - RNA, 106 nt, Homo sapiens
cgcagacacgcgccaaccggcggagacacggcagggccagaaacgcgcgcagcgggggcgggagagagaaccccacccaagagacaaagaccaacgagccaccaca

SEQ ID NO: 144404 - RNA, 77 nt, Homo sapiens
agcaaccagagaacaagaagaagaccagggaaccagaacgaaagggaccgccggacccaggaaccgaaggggaacag

SEQ ID NO: 144405 - RNA, 73 nt, Homo sapiens
gcaaagacaggagcccggaaggaagagacagagaccaagccaaacccccagaacgggacgacaaggcagaagc

SEQ ID NO: 144406 - RNA, 78 nt, Homo sapiens
gcgaagaccggaggcggaagaaaaaaggagcgcaggccaggcgcccagccgaggcacacagagaaaaaaagggaacaa

SEQ ID NO: 144407 - RNA, 59 nt, Homo sapiens
cagaagacagaaggaagccggccacagaaccaggaagacagcgcccagcaacccggcac

SEQ ID NO: 144408 - RNA, 73 nt, Homo sapiens
aagggcgaaaaaaaagggaagaggagacaccccgggggccccgagcaaaccaggcgagcaggcgacccaaaag

SEQ ID NO: 144409 - RNA, 70 nt, Homo sapiens
gccaacaaggaaggacgacccaggacagcacaggggaagaacacggaaaccggacagggacaggaaagaa

SEQ ID NO: 144410 - RNA, 69 nt, Homo sapiens
ccccccaagaccggcggcccaacccaccgggacggcaagacgaggcaaaaagacacagaacaagagcgc

SEQ ID NO: 144411 - RNA, 73 nt, Homo sapiens
cggaacccgcggggcggaccggagaagccccgagcaccccacagcgagaacaagccaaagacagaccgccagc

SEQ ID NO: 144412 - RNA, 75 nt, Homo sapiens
aaaaggagaaggaccgcaagcccaagacacgggggaaaaagggacgccccaggggagaaagagccagaaaccaag

SEQ ID NO: 144413 - RNA, 74 nt, Homo sapiens
ggcgggcgagcgaggggcaaccagcggggcaccgggacgggccgagccgaaacgaaaagcaccagacagagacc

SEQ ID NO: 144414 - RNA, 57 nt, Homo sapiens
cgggaagcaggacgcgccgcgccccaagcgggaggccaccgccccaccagcaggcaa

SEQ ID NO: 144415 - RNA, 78 nt, Homo sapiens
gcccgaacacgcgggcccaacaccagccgccaccgcaagagaaaagcgggcccgagaaccaaagaagcccacccacaa

SEQ ID NO: 144416 - RNA, 57 nt, Homo sapiens
aacagggcagccacacccgcgagaagcaggaacacacggacagggagcccaaccagc

SEQ ID NO: 144417 - RNA, 76 nt, Homo sapiens
cagagacaaagacaacgaaagagacagcacaaaaaggaccgaggaagaagagccggggaacaagcagagagagagg

SEQ ID NO: 144418 - RNA, 87 nt, Homo sapiens
cggagaccaccgcggcgcggcagcgcgcccgaggacacggacaggccaggcccacggcccggcgacgaaggcacaagaaacccccca

SEQ ID NO: 144419 - RNA, 75 nt, Homo sapiens
ggcacaaccgacagagggcaaacgagcggacggccaaggaggaggagcgcagcacccagggaaggcagagacggg

SEQ ID NO: 144420 - RNA, 77 nt, Homo sapiens
ccgcgccaagcacggaaccaaagaagcaggagcgaaaacgccacaacagagggggccagggcggggaagacaaacag

SEQ ID NO: 144421 - RNA, 51 nt, Homo sapiens
ccgaccccccggcgccgcgccggcggcggcaccgcgcgccgcgccccccca

SEQ ID NO: 144422 - RNA, 73 nt, Homo sapiens
acacacggacgcaccaagaaacaaagagccccgggaaaagaaaaaaaacgccccaaacggggagaaaagacga

SEQ ID NO: 144423 - RNA, 63 nt, Homo sapiens
ggggccagggaacccggcaccgccccagaccccgccccccgaggcgcagcccgaacccagcag

SEQ ID NO: 144424 - RNA, 73 nt, Homo sapiens
gcgggaggccggcggggcgacccgggcgggccacaccgcaaaggagcagaaagggcaccggaccacccaacag

SEQ ID NO: 144425 - RNA, 78 nt, Homo sapiens
ggaggacgcagcacggcaggaagccagcccggagggagagaagggaacgagaaagaaaagacaaccaaggcaagggcg

SEQ ID NO: 144426 - RNA, 83 nt, Homo sapiens
ccgagcgggaggccacagcagccagccggcccgaggacaccgacaccagcaggagcacagaccagcgcgcgaccggagcccca

SEQ ID NO: 144427 - RNA, 80 nt, Homo sapiens
cgaccgcccgcgagagagagaaagacgcgaggggacgaggaagacaggagcaagaagaacccacagggagcaggcccgag

SEQ ID NO: 144428 - RNA, 76 nt, Homo sapiens
gcaaccaccgcgaccgagcggcagaccagcgccagcccacaggagagggcgcagaaaaccgagaacagggggggca

SEQ ID NO: 144429 - RNA, 82 nt, Homo sapiens
cccccgccgccgcgagaagagaggagacgagaaccagaagaggagaccaggaaaaaaagaaagaccgcccaggggcagacgg

SEQ ID NO: 144430 - RNA, 78 nt, Homo sapiens
aaagccccacagcagccagaaggaaaggaagaaagagggccacggacagaggcgcagcagaggaaccgcagaagaacg

SEQ ID NO: 144431 - RNA, 65 nt, Homo sapiens
acaccccgagagagaggagaagagcccagcacaacgaagccaggcgcccgagccaggggccccgg

SEQ ID NO: 144432 - RNA, 83 nt, Homo sapiens
agggaaagagaccaaagaagaggcaggagaaaagggcagcgccccggggaccggaaaggcgcaacggagacacccagaagggc

SEQ ID NO: 144433 - RNA, 87 nt, Homo sapiens
ggccggccagaagacgcgagagcaccgaagacggcaagcacggccacgccaagagggagcacagcgcggaagccccgaggcagcccc

SEQ ID NO: 144434 - RNA, 79 nt, Homo sapiens
aggcggcgcaggggaacccggcggcggagagagacagaccccacaaaaaaggagaggccagaccacgaacacccccccc

SEQ ID NO: 144435 - RNA, 83 nt, Homo sapiens
ggggccggcgggagcgcgaacgagcgacggcggaacccggggccgggacgcagcccggcggcagcagacagaagcgaagggga

SEQ ID NO: 144436 - RNA, 87 nt, Homo sapiens
ccccccgaagaagaccccccacacgggccgaccgcgggccgcgcacccaccgccaaggacaaaaggagcccagcgcacagcgcaccc

SEQ ID NO: 144437 - RNA, 49 nt, Homo sapiens
ccccaccgcagcagcccagccacgaaaacgcacgcaaggcgcaaaaggg

SEQ ID NO: 144438 - RNA, 75 nt, Homo sapiens
acgcgcggaaggcagcgcccagcagcgcaggacgaggaggaggacaaggggcagggagacccagcgagcagagcc

SEQ ID NO: 144439 - RNA, 72 nt, Homo sapiens
gcaccgcgcgagcacgggcggagcgaacgggggaagaggagagcgccgaacaacgaagaagggcgaagggag

SEQ ID NO: 144440 - RNA, 74 nt, Homo sapiens
aaacgcccgaggcccgaaccgcgggagaggggaagagacaagaccagggaggcagcgcgaggaggaagcagaaa

SEQ ID NO: 144441 - RNA, 75 nt, Homo sapiens
gcaccccaaggagcgggccaccagaagggacagggccagccccagagagaaaaggacccaaagacaggaccacgc

SEQ ID NO: 144442 - RNA, 75 nt, Homo sapiens
gcccggcggggagcgccggagccgggccgacggcaccaaggcggggccggggagcccgggccagaccccccagac

SEQ ID NO: 144443 - RNA, 75 nt, Homo sapiens
ccgaccgcaacagaacggacccgacaggcccaggagaaagcaagacacggaccggacggcaaagaagcgaccagg

SEQ ID NO: 144444 - RNA, 78 nt, Homo sapiens
ccaagaagaccacagagggacccggacaaccagaggcagccagcagggggagggcgccacgcgccgggagacagcgaa

SEQ ID NO: 144445 - RNA, 74 nt, Homo sapiens
ggggaacgcacaacagccaccgcagcgaacagacccaggaggaaaaacaggggccgaaagaagagccagaggga

SEQ ID NO: 144446 - RNA, 77 nt, Homo sapiens
cgcccggcgcagcggggaccggcggcggcgcccaggcacccggcccgggcgcacaggccgcaagcgggagagaacgc

SEQ ID NO: 144447 - RNA, 74 nt, Homo sapiens
cagagacccaggaggggcccagcgccccccggaacggggaccccagacggcggcaccgggaaggcagaccacag

SEQ ID NO: 144448 - RNA, 71 nt, Homo sapiens
cgcggcggccacggcaacacgagccgcgacgcacaaggaaaaacagagagaaaggccgagcaacaaacacg

SEQ ID NO: 144449 - RNA, 78 nt, Homo sapiens
gagaaaccagcagaaacagacggcaaagaccggagaccgggcccaaacaacaagaagagcccccagagccgagggggc

SEQ ID NO: 144450 - RNA, 78 nt, Homo sapiens
gggagacgacggagcccggaagcgcagaagcggcacgcagcacgggggcaggggccgacccagaacgccagcgccgca

SEQ ID NO: 144451 - RNA, 46 nt, Homo sapiens
aacgcacaagccaaaaccggggggaaacggccgagccgagaaccag

SEQ ID NO: 144452 - RNA, 74 nt, Homo sapiens
gacggaacaggcaaaagaaggaagagaaacaccaaggaaccacacaagaaaagaaagcaaaaggaccagacaca

SEQ ID NO: 144453 - RNA, 107 nt, Homo sapiens
gcggcccacccagcgaccacagccggcgcagacgcgcccgccgagcaccagacggcgcgcccggaggagcgagacggacccggaggagcgccaccaggagaccacgc

SEQ ID NO: 144454 - RNA, 72 nt, Homo sapiens
gagggcccgggcgcggcggcgggacaccgagcccggggaggggccccgcgaggaaaggaacgggagacccgc

SEQ ID NO: 144455 - RNA, 68 nt, Homo sapiens
gaccaggacgaggaaacgaggacggcggggaccggccaccggggcggcggggcgcggaggggaccccc

SEQ ID NO: 144456 - RNA, 77 nt, Homo sapiens
ccaaagaaacaaagaacggacccacaccgaggcacccgaagaagagaccaccaaccaggaaccacccagcagcaaac

SEQ ID NO: 144457 - RNA, 78 nt, Homo sapiens
gcgagcagggccaacaccagagggcgggaacaggagcagacagcccaacgaccagcgaccacacgaaggggcagaaga

SEQ ID NO: 144458 - RNA, 82 nt, Homo sapiens
gaagagcagacccggggcccacgcacagaccccgaagagggccagcccaaggcaagaaaaaaagaccaggagcggcagcgag

SEQ ID NO: 144459 - RNA, 67 nt, Homo sapiens
gcaaaagggacgaagggaacaagggaaccagaagaggccaaccagcacgaacgccagcagcacggca

SEQ ID NO: 144460 - RNA, 79 nt, Homo sapiens
aggccgagggcagcaccgccgcccccgcgcgcgacaccacccccagaggggagagggaacgccgcagaaagaagaaggg

SEQ ID NO: 144461 - RNA, 39 nt, Homo sapiens
aacgacccagaaccggcgagagcacagccgacacagccc

SEQ ID NO: 144462 - RNA, 64 nt, Homo sapiens
agaagaagaaggcgaaggaccccaacggggaggccaacggaagaacacaccgacagagaaccca

SEQ ID NO: 144463 - RNA, 80 nt, Homo sapiens
cagaccggggacaacaaagcgcgggaacaaagcagcccaggcagaccccaggaaggagggccccggagcagccacaccac

SEQ ID NO: 144464 - RNA, 77 nt, Homo sapiens
caaagccgggggcccccacggacgcgcgagacaagaggagccccaggcagaagaacaagggcgacagcggggaaggg

SEQ ID NO: 144465 - RNA, 67 nt, Homo sapiens
cggcggcccggccgcagcggcaacagaacgaaaaacagggcgaggcacgcggaccccagggccggcc

SEQ ID NO: 144466 - RNA, 76 nt, Homo sapiens
gaaacccaaacaacacccgcaccgggcgccccgcagggcccgccacaaaaacggcagcagagccaaaccaggacgg

SEQ ID NO: 144467 - RNA, 88 nt, Homo sapiens
gccagagccggagcgcgaaggccgggacccggccccggcccacaggggggggcaaacccgagagaacggagaaagacgaccgccaacc

SEQ ID NO: 144468 - RNA, 72 nt, Homo sapiens
gggccaggcggagggcacccagcggcgcgcgccccggcgaccaggcggcccacgagaaacccgccgcacggc

SEQ ID NO: 144469 - RNA, 65 nt, Homo sapiens
aaggaacacaacagggacaagaaaaccccaggacacagagcggggagcccgaagcaaaggcaaga

SEQ ID NO: 144470 - RNA, 73 nt, Homo sapiens
cgcaaaaacacagggagaggaggaccggaagaagaggggagaggagagccagcagcccccccaggacaagagg

SEQ ID NO: 144471 - RNA, 67 nt, Homo sapiens
ggaaaacgaagaaggagagcacacccaccagaggcccaagcaccccaaaaagaagagacagccaaaa

SEQ ID NO: 144472 - RNA, 82 nt, Homo sapiens
aaagcagcagaagcgagagaaacgaaacaagaaacccaaccaaacaagcccgcagcagaagaaaaaaaagaacagacagaaa

SEQ ID NO: 144473 - RNA, 80 nt, Homo sapiens
gagcagcgacgggagacagccgggcgcgcaagccaaggagaccgggagagagacgaaggacgcgcaggggcagcagacac

SEQ ID NO: 144474 - RNA, 54 nt, Homo sapiens
ggcccaggaccaaaaaaggagaccacggggggaaggaagcgagacccggcgcga

SEQ ID NO: 144475 - RNA, 78 nt, Homo sapiens
ggcccgaggcggcgagagaggcaggcggagccgaccgggccaggaggaccaggcggggaagacaggcagacaggaagg

SEQ ID NO: 144476 - RNA, 72 nt, Homo sapiens
aacaggccaccgggccaacgaaagaaacgaaaagagacagcagggcaaaacgggccacacacagggcaaaaa

SEQ ID NO: 144477 - RNA, 61 nt, Homo sapiens
cccggacaccacggaccaaaaagacccgaccaggaggccagcaagcgcacccagccacacc

SEQ ID NO: 144478 - RNA, 73 nt, Homo sapiens
caaccaacagagccacagagaagaaaaacagacaagaaaagcggaagccgacaccggaacagaaacacaaaca

SEQ ID NO: 144479 - RNA, 77 nt, Homo sapiens
gcacagaacaacagaagaggagagaggaacccgaagaagaaaggacgacagccagagagcccccggcagggccaagg

SEQ ID NO: 144480 - RNA, 71 nt, Homo sapiens
cggaggagccagcccaggcaacacaccgaaaaaagggaagcggagaggagcagagacgacaccagaccggg

SEQ ID NO: 144481 - RNA, 76 nt, Homo sapiens
gaccagaaaccaagaccaaggaagacgaacgcaccccagagccgacccccaccgcaagacacgaagacgagagaag

SEQ ID NO: 144482 - RNA, 83 nt, Homo sapiens
ggaggcgagaacacgaggagaccggacgcgcggcgaagacggcagacgcagcagcgagggggcccgggcgggggcccggaacc

SEQ ID NO: 144483 - RNA, 64 nt, Homo sapiens
cacccaccagcagcaggccacccgcagccgccaaacaggagcaaagaagaagaagaaggaaccc

SEQ ID NO: 144484 - RNA, 56 nt, Homo sapiens
gccagaggacgcgcaaacccaacccggcgccggcccagacggaggcaaggcacaac

SEQ ID NO: 144485 - RNA, 80 nt, Homo sapiens
gagcgcccacacaccgacagaagggaacaggcacaggacggcgcccaaggcgaaagaggaaccaggaagacacagagccg

SEQ ID NO: 144486 - RNA, 74 nt, Homo sapiens
aaagaacaaaagaagggacaagggggaaaagccgccagacaaccagaagacgacagcacagccgccaaagcgac

SEQ ID NO: 144487 - RNA, 91 nt, Homo sapiens
aaaacgaggacccaagaagcagaaggagaacaagccaggaaaaccccgaaaacgcaagaagcgaacaccggaaacgccaggccacaaggga

SEQ ID NO: 144488 - RNA, 58 nt, Homo sapiens
ccccaaaagacaggcccaccgaagccccaaggcacaaaagaggaggaaagaagagcag

SEQ ID NO: 144489 - RNA, 67 nt, Homo sapiens
aaacagggccacgacccaggaaacaggacggcacccagcagaagacagggggcggggcggggccaga

SEQ ID NO: 144490 - RNA, 76 nt, Homo sapiens
ggcgcgagggagagggacaagccaaggccgcgagcagccgcgacgcagaagagccaacaagaaaggccgccaccga

SEQ ID NO: 144491 - RNA, 66 nt, Homo sapiens
agcgaggaacacagcacacgaccacaaccagaaggaagacggccaagacaagcgcgcacgcggcca

SEQ ID NO: 144492 - RNA, 59 nt, Homo sapiens
caacagggcggcaacaggggcgagaaagggaggggcagcagcaggacagggaacccggg

SEQ ID NO: 144493 - RNA, 79 nt, Homo sapiens
gggagcagccagcgggccggggagcgccgccgccgcccgagggagccagcaacggccccacccccccgaagagaaggca

SEQ ID NO: 144494 - RNA, 71 nt, Homo sapiens
acaagaaggcaagcgggcaggcggacccaggaggcagagaaaacgcgcacaggcacgcgcaccggcgccac

SEQ ID NO: 144495 - RNA, 75 nt, Homo sapiens
ccggccccccacgcgcacacaagggagcccccccaccacccccgaaaagaagcccggcgaggccggagggccacc

SEQ ID NO: 144496 - RNA, 75 nt, Homo sapiens
gagcgacagcccgacaagccaaaaggagaccagaagaagcccggaagcaggaagaggagggcaggcacgcagcca

SEQ ID NO: 144497 - RNA, 83 nt, Homo sapiens
aagccggcgcgccgggggccggccgcgccggccggccgggaccagggcggggcgcagccccgaagcggacaccgcgcccggcc

SEQ ID NO: 144498 - RNA, 72 nt, Homo sapiens
gcacgaggaccaccaggcacggcacggggcagagcagaaaccagcccgagcagcagccgagaaagggggcca

SEQ ID NO: 144499 - RNA, 71 nt, Homo sapiens
aaggaccaaacaaggccaaacggaggaaacccgagcaacccaggccagccaaaggagagaaccaggagacc

SEQ ID NO: 144500 - RNA, 56 nt, Homo sapiens
gcgccaagcgggggccccgaggacggcgacggagggggaagcaggagacaccaaag

SEQ ID NO: 144501 - RNA, 79 nt, Homo sapiens
gcacaccagcgccgcgaaggacaaggggcacccgcgcgcacacgcaggggaggcaagcaggggggcaaaggaaagaagg

SEQ ID NO: 144502 - RNA, 70 nt, Homo sapiens
ccagagaccaggggcaccgcagcgaccacccacacaaacccgggacgggccgagagcgagagagagacca

SEQ ID NO: 144503 - RNA, 80 nt, Homo sapiens
ggccccgggagccgggggcagaggcgcagagccccaggaggggaaaaagaccgagaagcgcagacccaccagggaaagcc

SEQ ID NO: 144504 - RNA, 74 nt, Homo sapiens
agaaggggaaaagcaccaagggaaagcccagccccgggcaagcccaggaggacacacaaagaggaaacacggag

SEQ ID NO: 144505 - RNA, 77 nt, Homo sapiens
gccgagacaaaggcaccaggccaccacagaaacaaaagcaacaaagaggaaaacccgccaggccaagcaacccccaa

SEQ ID NO: 144506 - RNA, 63 nt, Homo sapiens
gacagaagaaagacggcggaccgcgggggagaacggaggagagcacccccaaggggacgaacc

SEQ ID NO: 144507 - RNA, 52 nt, Homo sapiens
ggcgaagcccaccagacggagcgaaccaccgaaggacaacaaccgacagccc

SEQ ID NO: 144508 - RNA, 81 nt, Homo sapiens
agcggagaccggaggcaccagcccacaaacaccccagcaaagaagccggaccgagaaccgaaggaggaaccaaggaaagcg

SEQ ID NO: 144509 - RNA, 67 nt, Homo sapiens
aaacaagcggaagacacaaacagcagggagaagagacaacaagacagaaaccgggagaagcagaaca

SEQ ID NO: 144510 - RNA, 73 nt, Homo sapiens
gccaagccccgcgagcgcacgccaacgacgaggaccgacgcagacacccagaccaggccgaagaagggccggc

SEQ ID NO: 144511 - RNA, 79 nt, Homo sapiens
ggggaacgacgcggcgcgcgcggacgaagagccccccccccaacaccgcgacacgcaggaagccgagacccccgcgagg

SEQ ID NO: 144512 - RNA, 84 nt, Homo sapiens
cgggccccgaggcgaggcgcccggcccccgcccgccgcgcccagagaagggagcacgcacgcgcaagcccccgaaacaaagaga

SEQ ID NO: 144513 - RNA, 74 nt, Homo sapiens
aaaagcagcgagagaacagaaaggcccggacaggaggacacgacggaggcgcaggcaaaagcagaccggaaaac

SEQ ID NO: 144514 - RNA, 40 nt, Homo sapiens
gcggcgcacgccgcccgcccagaggacagcagcggacggc

SEQ ID NO: 144515 - RNA, 52 nt, Homo sapiens
gaaaccgccgcggacccgcacagcacccggacagacgcggcccagaacgaga

SEQ ID NO: 144516 - RNA, 67 nt, Homo sapiens
ccccacccgccgcagcaagcagaggaaaaggaaaccaccaaaacagaggaccaagcaccaaccccag

SEQ ID NO: 144517 - RNA, 72 nt, Homo sapiens
aaccaagcgcggcccagaaggggcaagaagaacaggacagagaccaggggccacaacggaaaccaggaaacc

SEQ ID NO: 144518 - RNA, 61 nt, Homo sapiens
cacaagcggaacgaccccgaagaggggaacgcagagaagaggccgaggacaccggagccag

SEQ ID NO: 144519 - RNA, 70 nt, Homo sapiens
gcgaccagggagacgccccaggacgaaccgaagcgagcagcccaaggggaagccagggaaagaacacagc

SEQ ID NO: 144520 - RNA, 84 nt, Homo sapiens
caaaaaacgggcgcccgcgaccagggagacgccccagggacaaaaagccacacagaggcaccgagccaacacggggacgcccag

SEQ ID NO: 144521 - RNA, 74 nt, Homo sapiens
cagcgcgagccaggacccgcacccagccacaccccaccgcccagagaagggaagagaggagcgagccgaagcca

SEQ ID NO: 144522 - RNA, 75 nt, Homo sapiens
cgagacccccagcgcgccggaggagaacaagagcccgagggacaagagaaaaaaagggcgggcgaacaaaaagag

SEQ ID NO: 144523 - RNA, 74 nt, Homo sapiens
ggagccggacggcagcaggcccgcaggaggcagcacggcaggagacgaggagaggacagcaggacacccggacc

SEQ ID NO: 144524 - RNA, 71 nt, Homo sapiens
aacaagaccaggacccagacaaaccaccaggcagagagacgggaagagccccagcagacagaaccgggagg

SEQ ID NO: 144525 - RNA, 68 nt, Homo sapiens
gccaaaccaacgagagggaggaacagcacccacggggaacagggcgagacaaacgggccgcccccggg

SEQ ID NO: 144526 - RNA, 82 nt, Homo sapiens
aacgaggaacagccacagaagagagaagccagagagacaggagggaagcagccgagaggcgagaaagaagaaagaaaggaaa

SEQ ID NO: 144527 - RNA, 78 nt, Homo sapiens
aaccggcacggcccggccccgcccggcgccgaggacccccgggggagccccccagacccgaaaggagacaagaggaca

SEQ ID NO: 144528 - RNA, 54 nt, Homo sapiens
agcaccgccgagcggaccccaaggcagcagacgacaggacggcagagccccaag

SEQ ID NO: 144529 - RNA, 80 nt, Homo sapiens
gcgcccgccccagccccgaccggcggggccaggacgcggcaacacccaaggaaccacaggaaagccagcgcaggacgggc

SEQ ID NO: 144530 - RNA, 59 nt, Homo sapiens
ccgccccgccccccggagccgcgagcacccaagagagggccgaggcagacaagggaaag

SEQ ID NO: 144531 - RNA, 73 nt, Homo sapiens
agagaagacagcggaaaaaaaaaaacacgggcggacggaacgcacagggaacaccagaggcgggaccacgggc

SEQ ID NO: 144532 - RNA, 61 nt, Homo sapiens
gaccaaaagcaggccaccaagccagcaacaagggacgaccaggacagcgcaaacaaaaacc

SEQ ID NO: 144533 - RNA, 71 nt, Homo sapiens
gcagaaaggaggagaggaagaaaccgaagaacggcggaaggggaagcaggccaacccagaacacaccccag

SEQ ID NO: 144534 - RNA, 70 nt, Homo sapiens
aaagccaacgccggcgaagagagaagagggggaaaaaggaaggccgccggacagcgcagagccaagacgg

SEQ ID NO: 144535 - RNA, 55 nt, Homo sapiens
gccccccgcaacaacccacaaggacccagcaggaccccaggcaacggcagggggg

SEQ ID NO: 144536 - RNA, 78 nt, Homo sapiens
aaggagccaaccgggaaaaggaaagagaagcgaacccaaaaagagacacagccgacgcaagaaagaccagaaaaggga

SEQ ID NO: 144537 - RNA, 68 nt, Homo sapiens
agcacagccagaggagaacaggccacacaggaagaaaaccgaccagggcaacaccaaaaacaaaacga

SEQ ID NO: 144538 - RNA, 73 nt, Homo sapiens
agcgaacaaagcaccggcaggaggagcaaagcccacaggacagcaggaagagaacagcaaaaccagacgccgg

SEQ ID NO: 144539 - RNA, 69 nt, Homo sapiens
gaaacaaagaaccagacggccaacgaccacggccagcagaccaggagaaagaagaaggggagccgacaa

SEQ ID NO: 144540 - RNA, 72 nt, Homo sapiens
gaaaccaagcagaccgaagagaaaggaggacagcacaaaaacacaccaagagagcgcgacagacgcaacaga

SEQ ID NO: 144541 - RNA, 57 nt, Homo sapiens
gggggagcccacaggagccaggggcccaagaaccagcgggaaccgggaaagagaaaa

SEQ ID NO: 144542 - RNA, 46 nt, Homo sapiens
ccggagcgaagaacagcggcagaacggccccaaaaaaaaggcagga

SEQ ID NO: 144543 - RNA, 63 nt, Homo sapiens
aagagcagcggaaaagaccagcacaggggccagcagacccagcggggcggagcagggaggaac

SEQ ID NO: 144544 - RNA, 76 nt, Homo sapiens
accgagagcggaccgagagcgcgaaacgcacgagaaggcgggacccagagagccagcgacagggagacaacgccgc

SEQ ID NO: 144545 - RNA, 57 nt, Homo sapiens
cggacccacgaccccccggccagacagaacacagcacccacccacacccacacccgc

SEQ ID NO: 144546 - RNA, 57 nt, Homo sapiens
gggggaacccggggccagagacacagcggacagccccaggacccacgcccacggccc

SEQ ID NO: 144547 - RNA, 87 nt, Homo sapiens
gcagcgccccggggccccgcgggaccgcggccacggacggaacccggagggcggaccacaaggcccagggaagcaaggcgagagacg

SEQ ID NO: 144548 - RNA, 69 nt, Homo sapiens
gaaaagcaccccccagaacaaaaagcgcgaagggaaccaggaccggggagcaagggcagacgggccaag

SEQ ID NO: 144549 - RNA, 81 nt, Homo sapiens
gacacaccaggccggcaggcgagaaaagcgagaccgcggcgaggaccgaaagagccgccgggcgcaccggcgcgggcgaac

SEQ ID NO: 144550 - RNA, 74 nt, Homo sapiens
ggaaggcacagggagccaagcacccgaacgcagacaccaagggagaagccaaccaaccaggaccaccagaacgg

SEQ ID NO: 144551 - RNA, 81 nt, Homo sapiens
accgggacaggcaagacggccaagcggcccgaggagccccgagagaggagaagacagcacggggagcccacaggccaccac

SEQ ID NO: 144552 - RNA, 78 nt, Homo sapiens
cgcccagcccccgagggcgggaacaggagacccccacccagaagaccagcgggacagcagaccccagaaaggaaacgg

SEQ ID NO: 144553 - RNA, 82 nt, Homo sapiens
cgagccgccacccggcgcaaaagcagaccggaaaacccaccggcaagaccacacccgaggggagcccaggacaccacgaaaa

SEQ ID NO: 144554 - RNA, 77 nt, Homo sapiens
ggaacagcagcccagagggaccacagaaaggagaaggacaaagccgaacagaaccaaaagaccaaccagaaaagagc

SEQ ID NO: 144555 - RNA, 84 nt, Homo sapiens
cccccaacgccaagcagcccaccgacaggcccggaggcagcagaagcgacaaagacagacggaaaagaagagaaccgaggcccg

SEQ ID NO: 144556 - RNA, 78 nt, Homo sapiens
caaccaggccaaggggcgaaccaaaggcagagacggaggggaaagccagccagagaccacggcgaacgccggggagag

SEQ ID NO: 144557 - RNA, 86 nt, Homo sapiens
gacggagcggcgagcccccgcggcgacaggggaggggaggaagcgcccgggacgagaggagggccggcagaccgcccggggggccg

SEQ ID NO: 144558 - RNA, 94 nt, Homo sapiens
ggggccgggagcgaccaacacaagggggccgcaagcgcagcccccccggagaaagaacggaccaaaccaaaaaccacgagcacggcacacccgc

SEQ ID NO: 144559 - RNA, 60 nt, Homo sapiens
gcagaaacggccacagaggaagccaaaaggccaaaacccagagaagaaagaagaagaaag

SEQ ID NO: 144560 - RNA, 73 nt, Homo sapiens
acgaagggggacacaggcgagagacaaaaggcaacccagaaacagaaggcaagaacgcccccacaggagcacc

SEQ ID NO: 144561 - RNA, 76 nt, Homo sapiens
acgcgcggaaggcagcgcccagcagcgcagggcagcacggccccacaacagggaacgaagaccaagccgagcccgg

SEQ ID NO: 144562 - RNA, 77 nt, Homo sapiens
caacggaaccgaagaaaaaaacggagccagccgccagggcaagaaacacggcagggcagagagcgaaacgcgaagag

SEQ ID NO: 144563 - RNA, 39 nt, Homo sapiens
ccccaaagggcgggaacaggacacaagaaggaaagggaa

SEQ ID NO: 144564 - RNA, 83 nt, Homo sapiens
caccggccacagaggagggcacacggccaagggaccagcagaagcaccccacagcaaggagagggccacagcgccggggcaag

SEQ ID NO: 144565 - RNA, 70 nt, Homo sapiens
gcggaagaagcaggaggcaagaaaggggaaccccggagaaaaggccaagaaggcagcgcccaccccacgg

SEQ ID NO: 144566 - RNA, 76 nt, Homo sapiens
aacacaacacagacaccaaaaaaaagccaccaccgaaacgccaaaaagcaggcagcgccaacaaaaaaaaaccaag

SEQ ID NO: 144567 - RNA, 78 nt, Homo sapiens
ggccgagggaacggaccgagcagcagcagaggggaagcagaagaacacccgcgaccacgcaagagggggcaggagggg

SEQ ID NO: 144568 - RNA, 78 nt, Homo sapiens
ccacagggagcgacgcggacgaagaggagaagcacccccagaaggccaaggcaaggccagggaagaccacacacccca

SEQ ID NO: 144569 - RNA, 82 nt, Homo sapiens
accgcgggaacgccaaaagagaaggccccaaccacacaaaggaagcgggccaaccacgagcaaacagggaagacgggccaaa

SEQ ID NO: 144570 - RNA, 79 nt, Homo sapiens
gcgggacccagcagaacccccacgcaagggggccgacgacgagccccgcgaggagcgcagcggagaggccagaacgccc

SEQ ID NO: 144571 - RNA, 68 nt, Homo sapiens
gcaagaaaaaaccacagccgcgagggaaaagccggaagagggcagggcgggagacgcaccagcccaga

SEQ ID NO: 144572 - RNA, 72 nt, Homo sapiens
ggggcccagcccggggccggcgcagggcggaaggacaacagcccgacaaccagacgcccaaaagaaacagca

SEQ ID NO: 144573 - RNA, 54 nt, Homo sapiens
gagcaaacacggaaaggaacaaaaagaaagacgcgagagcgacagaaagggaag

SEQ ID NO: 144574 - RNA, 87 nt, Homo sapiens
gcagcgcggacacgagacgaggacaggacgcggcaaaaaggcagggagaacgagccgcggggacggagggcacccccggcagacggg

SEQ ID NO: 144575 - RNA, 59 nt, Homo sapiens
accggaacggcggcgacaaggggcccgaacagaggggccaagcacaaggcagggacagg

SEQ ID NO: 144576 - RNA, 54 nt, Homo sapiens
ggagcaaaaggaacacaccaaccgccgaaaaaaggacaaagcgaggcgaccgag

SEQ ID NO: 144577 - RNA, 72 nt, Homo sapiens
cggcagcaaagagggaacagaaagacaacgaaacggcaaaccgagccacgcaaaagaaaaggacgggaggac

SEQ ID NO: 144578 - RNA, 73 nt, Homo sapiens
cgccgccgcgggcccgccgccccgccggacacgcaaggagggcagcccggaggagcggcccaagcggcagagg

SEQ ID NO: 144579 - RNA, 80 nt, Homo sapiens
gcgacaacggcccgaaaccccggacgggggcgcacgagaccccgagccggagcggaaaaacccgggcgaccgcaacagaa

SEQ ID NO: 144580 - RNA, 74 nt, Homo sapiens
caccgaagaccaccagagccggaccaggagaacggcggcggggaggaagaagagacagaaagcacagagaagca

SEQ ID NO: 144581 - RNA, 60 nt, Homo sapiens
ggagcggcagacggcaggccagcgcggaaagggagcagcaccggccacacccacagcacg

SEQ ID NO: 144582 - RNA, 74 nt, Homo sapiens
cccgggggcccgacgcacacgggggcggacaccacaagaagggcgccagggaagaacgcaaagcgaggcaacaa

SEQ ID NO: 144583 - RNA, 58 nt, Homo sapiens
ggacggcgagcgggcaccgacacgacgcgggaaccacccccaaccacaggagagagaa

SEQ ID NO: 144584 - RNA, 57 nt, Homo sapiens
gaaccgcgccaccagagacgggaagggacgcaaaaaggaagccccacaaggaccagg

SEQ ID NO: 144585 - RNA, 72 nt, Homo sapiens
aggagaaggacgagacacaaggaagcgacaggcaacagacggacaccggagacacaagaaagagaagaaaag

SEQ ID NO: 144586 - RNA, 74 nt, Homo sapiens
agggggagccaccccgcggaaccccaaacgcagagaaggaggcgcaacagggcaaggcaaacagaaggaccaca

SEQ ID NO: 144587 - RNA, 74 nt, Homo sapiens
gcgaggccaggcaaggaacacccgagcacacacccagaacagaagcaggacgggagaagagaaaccacaacaac

SEQ ID NO: 144588 - RNA, 75 nt, Homo sapiens
gcagcggcagcccaggacggcaccaccggcacaaacgcccaaaggcggagaagagagaaagacaccggcaggcaa

SEQ ID NO: 144589 - RNA, 75 nt, Homo sapiens
gaacagaaaccaagccaacaaaagaagcgccgcagagcaaccggagccaggcaagacgggcgaagcgagggcccg

SEQ ID NO: 144590 - RNA, 77 nt, Homo sapiens
ggacacaaacaagcagcaggaggacaccaaagggagggcaacagagagaaaagcgaacacccaggcgcgcagagacc

SEQ ID NO: 144591 - RNA, 69 nt, Homo sapiens
aaccccgacaccgcgggccgcgcaggcggcccgcccgcacccagcacgggagagggggccccaggccca

SEQ ID NO: 144592 - RNA, 60 nt, Homo sapiens
aggcgaggcacgaccccacccccgaggcccgaccggcagcaccgggaccggaggcccaga

SEQ ID NO: 144593 - RNA, 88 nt, Homo sapiens
ccgagagccgcggggagaaggccacacccagaggacagcagcggacggccggaccaagaggcgccgccccccagcaaacgagaaaaac

SEQ ID NO: 144594 - RNA, 78 nt, Homo sapiens
cgcggggggaccaaaacaggagcagaacggaccagaccacggagaggagacgaccagaaaaccccaaagagagggacc

SEQ ID NO: 144595 - RNA, 70 nt, Homo sapiens
gagacagaggaagaaacggccccccggggcacgggggcaaggccaaagggcaccgggacgagcaaaccag

SEQ ID NO: 144596 - RNA, 79 nt, Homo sapiens
aggacggggcccaggaacggaaaagggcagccgcacggagggacgaaagggcacacagcgacgccagcacccaccagcc

SEQ ID NO: 144597 - RNA, 75 nt, Homo sapiens
gagcagcagccaaccacccacgacaccagcaacgcccaggagcaagacaggggagaggggagcgaaaacaaggca

SEQ ID NO: 144598 - RNA, 67 nt, Homo sapiens
acagaaagaacccaacacaagagagaaacaacaagggcaccaccggcggcacagaaggaaaacaaag

SEQ ID NO: 144599 - RNA, 81 nt, Homo sapiens
cccccgccggcccccaggagaaggagcggcaagaagacgaccccgacgcaggccaggagccgcggacagaagccgagcacg

SEQ ID NO: 144600 - RNA, 79 nt, Homo sapiens
aaagagcgcaacagaaccacggacaaaagggagacaccaccagaacaggccggcgcgcgggaaggcacacaacacaggc

SEQ ID NO: 144601 - RNA, 65 nt, Homo sapiens
aaaaacgaaaccggagcaacccacgacccaacaccacaggacggccggagcagcagaacaagagc

SEQ ID NO: 144602 - RNA, 80 nt, Homo sapiens
cgccccggaaggaggcagccaacaagaaaaacccagcccagcccagagacacagccggagaggagagagggaagaagcaa

SEQ ID NO: 144603 - RNA, 80 nt, Homo sapiens
aacaaacacaaggagccacaaggacgggaagcaccaaagcgcgccaagagggcagagagacagcgaaggacaaaaaggac

SEQ ID NO: 144604 - RNA, 79 nt, Homo sapiens
cggaggagcggagcacacgccgcggaggcccacaagccgcgccgagggccacacacgcgagcacccagagggccggccc

SEQ ID NO: 144605 - RNA, 61 nt, Homo sapiens
cgaaaaaagcagggaagaaggaacggaaaacagccccaaagcagcagaccgaagaaagaag

SEQ ID NO: 144606 - RNA, 80 nt, Homo sapiens
ccacacaggcaagcaggagggcaccccaaaagaaagacacggcacaccgaagaaaaagaacaacaacaagaggaaagaaa

SEQ ID NO: 144607 - RNA, 86 nt, Homo sapiens
agccgccggaggacgagccggacgccgacggcacgagcggacgacgcaagccggagacccacggccgcggagaagagccccagagg

SEQ ID NO: 144608 - RNA, 72 nt, Homo sapiens
gaaacagagcaaaaaccggaaagcacagcagaagaagcacacaaccacagcagcggggacgggcaaccacgg

SEQ ID NO: 144609 - RNA, 63 nt, Homo sapiens
ccgccccgccaccgccggaccaagcccagccccagccgccagcgcccgaacaacagggagaaa

SEQ ID NO: 144610 - RNA, 40 nt, Homo sapiens
gccccggggcccggcggcgggcggccgcccgccggcccgc

SEQ ID NO: 144611 - RNA, 78 nt, Homo sapiens
aggcccaacagacagcgcgcacaaacaggagaagaaaggaagagacgacagccagcaggcaggagcccgcccagaaca

SEQ ID NO: 144612 - RNA, 74 nt, Homo sapiens
cgccacggaccgcgggacaagaaaacagcggacagggacaagcgcacagcggagaaagcagcgcggccaggagg

SEQ ID NO: 144613 - RNA, 76 nt, Homo sapiens
gcccacccgccagggaccccgcagcacggggagagaggccggagcagcgcccccggacagaggaaaagagacagag

SEQ ID NO: 144614 - RNA, 77 nt, Homo sapiens
gagcccaggagccggcggggacgccagcgagccagagccgggcacaaagccgaggggggggaagcccccgagcaagc

SEQ ID NO: 144615 - RNA, 71 nt, Homo sapiens
gacccccggcgcggcacggcacaggaaaacgaggcccacgcgacggaagcgcgggagagcgacgggcaaca

SEQ ID NO: 144616 - RNA, 76 nt, Homo sapiens
cagcgggcggacggccggcgggggcggcggcggccagcgccagccacgaaaacgaagcaaggaaggaagcaaccag

SEQ ID NO: 144617 - RNA, 72 nt, Homo sapiens
gcacagcagagagccaggaggcaggaggaaggaaggggaaaaaacgaggaaccccagagaggacagaagcca

SEQ ID NO: 144618 - RNA, 100 nt, Homo sapiens
agccgccagcgcagaaacacggcccagccccagaaaaggaacacaaggaaagcgaacgcgaaaagaaaagccgagagcagccagaccggcgaagaaagaa

SEQ ID NO: 144619 - RNA, 77 nt, Homo sapiens
accccaaagaaggagagccagggaggggcggcacaggacaacccaaggaagagagagcgcagagaggacagaaagag

SEQ ID NO: 144620 - RNA, 78 nt, Homo sapiens
gcgggaaacgggcgaagcgacgagccgcgaggaggaaaaaccagaagagaaaaaacaaaggggagaggcaccccgcgg

SEQ ID NO: 144621 - RNA, 82 nt, Homo sapiens
agagcaagagacgcacggaggcggcccgcccggaaggcaagcgcagcaacaacagagagcacgggccgagacgcaccagagc

SEQ ID NO: 144622 - RNA, 69 nt, Homo sapiens
ccacaggccgccccaacaccagggaagagacacacccagggcccagggagaccagaaaaaaagaacaag

SEQ ID NO: 144623 - RNA, 81 nt, Homo sapiens
aaaaagagcccgcaagaagaacagagacagcagccaaacccccaggagggcccgacccggccacagcccaaccgccacgcg

SEQ ID NO: 144624 - RNA, 78 nt, Homo sapiens
aggaggcgggggcgccggcagaggaccaggcaccaccggccccggaagggccaaaacccccaaaacaaggaagcacac

SEQ ID NO: 144625 - RNA, 79 nt, Homo sapiens
cagaaaccaggccaggagagccgagagcacccgcaccaagagaagacccggagcaaagaaggacgcagagccagccaca

SEQ ID NO: 144626 - RNA, 76 nt, Homo sapiens
gaaaaccaaccagaagacgaacaaacagcaagaaagaccacaagaccagacaaaccggcgaccacacacggggacg

SEQ ID NO: 144627 - RNA, 72 nt, Homo sapiens
aggaagccacggcagacacacaacccgacccgacgagacaagagcaccaagagagaccaggacacaccacgg

SEQ ID NO: 144628 - RNA, 69 nt, Homo sapiens
cgaggacaagagcggagcccgccacaccgggaaaagccgcagagccaggacaaaaccaggcagaaccaa

SEQ ID NO: 144629 - RNA, 76 nt, Homo sapiens
aggagccgcccccggcaaagagagggggacaaggcaaccagaaaacggggagggaccagaagaagccgaaggaagc

SEQ ID NO: 144630 - RNA, 63 nt, Homo sapiens
gccaggggagcccagcggcgcgccggcagcaggggagccgccaccaaaagcagacggaaaacc

SEQ ID NO: 144631 - RNA, 57 nt, Homo sapiens
aagacaagaaaagaaagaaagccacaccaaaagccaagggcgggacaagggcgcacc

SEQ ID NO: 144632 - RNA, 81 nt, Homo sapiens
gaagccccacgaaggaagaagcaagaggaaaaagccaaggacacgcaggacgaagaaggaggagagcccagaagaaaccaa

SEQ ID NO: 144633 - RNA, 76 nt, Homo sapiens
ggcagcaaggagggacccgaacccacgacacggccggcccagccagcagagccacgccagagcaccggggacacca

SEQ ID NO: 144634 - RNA, 83 nt, Homo sapiens
aaacacaaaccacccaaacaagggaaggacaggccacccggagaaaggccacggccccagcccaccggaccggaccgcgggca

SEQ ID NO: 144635 - RNA, 56 nt, Homo sapiens
agcgccacacaaccgcgaaaacacaggccggagcgcgaagacgcagggaaagcggc

SEQ ID NO: 144636 - RNA, 76 nt, Homo sapiens
ccggcgggaggaacgccacgcagcgccggaaacgccacgaaaccaagagaacccgaaaggagaagccgaagcccaa

SEQ ID NO: 144637 - RNA, 33 nt, Homo sapiens
gcaaggcgacgggcgaccagccccgaacaaccg

SEQ ID NO: 144638 - RNA, 77 nt, Homo sapiens
ccaaagcacagcccgagagccacaccaggcggagaaagggcagaggcccccacgccccacagagaccaccacacacg

SEQ ID NO: 144639 - RNA, 82 nt, Homo sapiens
aagacggacacaacaaggacagaaacgaaggaggcccaaccacaaaaggagccgacggaacccagacggagaacaaaaggaa

SEQ ID NO: 144640 - RNA, 74 nt, Homo sapiens
aaaccggccaggcagggggaggccagcccaagccggccacagaaggcagaacaaagcagaaagcacagacggaa

SEQ ID NO: 144641 - RNA, 75 nt, Homo sapiens
cacgacacgagacgggcacaacgggcgaagggagagggcccaggacgcaagaagcaccggccccccacccaccag

SEQ ID NO: 144642 - RNA, 107 nt, Homo sapiens
agcccggaaaggagaaggaaaagacggcaggaggaagagagagagagggggagcccccggagcgagacaggagccgccagagggacgggagccgaggacccagccga

SEQ ID NO: 144643 - RNA, 77 nt, Homo sapiens
gggacccgcgggacccgcagccccgcgcgggcaccaggccccgagagcagggaccgggccaagacgagcgacaggag

SEQ ID NO: 144644 - RNA, 91 nt, Homo sapiens
aaggcgccgggcagaggaccggaggccgggaagccaacgaccacacgcaaggcgggaggcggcagaagcagccagaggagggcacaggcgg

SEQ ID NO: 144645 - RNA, 70 nt, Homo sapiens
agagcgaccaggggcgagagcgggcaccccccaaacgacgcagccacggagagggaacgaagaaggacag

SEQ ID NO: 144646 - RNA, 59 nt, Homo sapiens
gccacaaagcccagcggccaaacaaccacaagcggagagccagccggcgaaaagccccg

SEQ ID NO: 144647 - RNA, 80 nt, Homo sapiens
gcggcggccgggcgggaagcggaggccggcacgcccgcccgaggcgacggccgcggcgcacaggacaggagaagagggga

SEQ ID NO: 144648 - RNA, 57 nt, Homo sapiens
caggcggcccagccggaagaagaacgcagaaagaggaagaagcaagccggacccacg

SEQ ID NO: 144649 - RNA, 120 nt, Homo sapiens
gaggaaacaggaggccgaggcggcccaagagaggaggacggaagggggaaggggacacagaagccgcagaacgagaaagggaacgaaccgaggaacccggccccacagggcagggggaca

SEQ ID NO: 144650 - RNA, 56 nt, Homo sapiens
gggggacaccgggaacacggagcaaagacaaaggcaggcaggggcagaaggcgacc

SEQ ID NO: 144651 - RNA, 77 nt, Homo sapiens
gcgaggcaccggcgccacaaggcaacacgcccacccgccaacgcaaggaaacaagaagaggaagaaagccaacaacc

SEQ ID NO: 144652 - RNA, 119 nt, Homo sapiens
caagaggcgggcaggagcggcggccaggccagacccgaaggccaggagacccgaccccaaggcgccgaccccgacagaacgggccccgcacccgcggccccggggcagcggaggccggg

SEQ ID NO: 144653 - RNA, 79 nt, Homo sapiens
cacaacccaagaaacgggagagccgacaaggagcgaaccaagaagaagagggagcagaccagccgaccacacaagagag

SEQ ID NO: 144654 - RNA, 71 nt, Homo sapiens
ccccccggggccggccagggaccagcggaacggacaggcgaaaaaaagagcaccggccagcagaaccagcc

SEQ ID NO: 144655 - RNA, 66 nt, Homo sapiens
aaacagacaggaccacgcaagacaacgccacagcagcggaaagggaaacgagacaacacacccaag

SEQ ID NO: 144656 - RNA, 82 nt, Homo sapiens
gaaacgcaggaaacagcagcgaggaggggaagagaggggaaaagaaacaaacaacaagaagaaggacaaggaacgaaggcaa

SEQ ID NO: 144657 - RNA, 74 nt, Homo sapiens
ccaggcgccagcagggccaaccgcagaggccgacgggaagaagagaagccagagcccaaggcccgcggaagcca

SEQ ID NO: 144658 - RNA, 82 nt, Homo sapiens
gcaaagccccagaggacaaccaccccaggacaggagcagagcccggaccgacaggaaagaaggagcccacaaagaaaagaac

SEQ ID NO: 144659 - RNA, 85 nt, Homo sapiens
aggcgcggccgagccccgacggccacccggcggggggaaacaggaagagaacagaacggaagaaagcagaagaggacgaagcgca

SEQ ID NO: 144660 - RNA, 75 nt, Homo sapiens
gcaggccaagcgcccacgccggaccgggcagggaaaggccaccaagacagccagggcaaccccccaccgccgaga

SEQ ID NO: 144661 - RNA, 93 nt, Homo sapiens
cgcccagccggacgcgagagacccgaccagcacggcgaccgaggcagccccccaaagcccggccccacagaggcagcagcgccccgagccccg

SEQ ID NO: 144662 - RNA, 68 nt, Homo sapiens
acccaaaagaacccggaccaagaaaagaaccaaaggaaagcaccaggacaaccaaaaccaaaagcaac

SEQ ID NO: 144663 - RNA, 71 nt, Homo sapiens
gccagccgaagagaaaacaccgaagggacacgccaggacagaacggaaacagaaggacaaggaggacgagc

SEQ ID NO: 144664 - RNA, 77 nt, Homo sapiens
agacggcggaccgagaaagagccgcagacgcacagcaaccaccggacccgaaggccaccacccagaggggccgcccg

SEQ ID NO: 144665 - RNA, 84 nt, Homo sapiens
cgacaagaacgcaggacggccgcggcaccgaaccacaaggaggacgaggcgaagccgacgagcccgaacagacgcaccagcggg

SEQ ID NO: 144666 - RNA, 77 nt, Homo sapiens
gggaaagagaacggcgggccagagcggggcgaccaggaaagagaggaaccccacgggggcagaagaaacagcccaga

SEQ ID NO: 144667 - RNA, 39 nt, Homo sapiens
cggccagagaaacggcagacgaacaccccacgcgcgccc

SEQ ID NO: 144668 - RNA, 56 nt, Homo sapiens
gccggcccggggcccagcagcaggaagggaaggagcaagagaagcaggaaacgggg

SEQ ID NO: 144669 - RNA, 74 nt, Homo sapiens
gagggaaaacccaccgggagcacgaagaggaagacacgcaaaggaggcaagaacaacgcagacagaaaaccccg

SEQ ID NO: 144670 - RNA, 84 nt, Homo sapiens
ggaagagcagagacgccacagcagcaacacggaaacaccaccgaaaggagccacgcacaccgagaaaaagcgacagagaaagaa

SEQ ID NO: 144671 - RNA, 69 nt, Homo sapiens
agacccgagcgaagggggaggagagagggacgaaaccaccagacgggaaccagacgacaaaaggcgcag

SEQ ID NO: 144672 - RNA, 44 nt, Homo sapiens
gaagaaggaggcggagaagaggaccagaggagccaccgcgccca

SEQ ID NO: 144673 - RNA, 57 nt, Homo sapiens
gcaggagaaggggcccggcagccgcccgaaggacaacacaccgcccaaccgggacaa

SEQ ID NO: 144674 - RNA, 73 nt, Homo sapiens
cgcccggaggccgggaagaaacggcaagagagcaggaaccagaaagaaaagccagaggacgaggaaaccacac

SEQ ID NO: 144675 - RNA, 77 nt, Homo sapiens
gcaccaagccccaggagccagccccagaccaaccaggcgcgcccagaccgcagggcaagacaaaagcacgcgagagc

SEQ ID NO: 144676 - RNA, 77 nt, Homo sapiens
agccaaggcagaagcaaagaagcgcggcagcaaacgacgagcagacaggaaacacaggcagcgagacaacgggcccg

SEQ ID NO: 144677 - RNA, 84 nt, Homo sapiens
accccagcgccgggcagcgagccgaccgcgggccgcgcacccaccgccaaggacaaaaggagcccagcgcacagcgcacccgac

SEQ ID NO: 144678 - RNA, 81 nt, Homo sapiens
gagaccgcaacgagaacaaagggccgggagcgaggcgcggaccccaggcaggacccccggccacagccgcgggggcggacc

SEQ ID NO: 144679 - RNA, 74 nt, Homo sapiens
gccaccggggagcgaacacaggccacggaaccgcccagccccaagccccgccacggcgaccgcgagccagcaga

SEQ ID NO: 144680 - RNA, 42 nt, Homo sapiens
ccccagcacaaacgaccgccaggccagcgacgacagagaccc

SEQ ID NO: 144681 - RNA, 73 nt, Homo sapiens
gcccgccacggggaggagaagggggccagaagcgggggagagcagcggcgccagcccgggccacaccgggacg

SEQ ID NO: 144682 - RNA, 52 nt, Homo sapiens
acgaaaaacggcaaccagcaggccgaagagaagggaaaggcaaagagaaaaa

SEQ ID NO: 144683 - RNA, 76 nt, Homo sapiens
aggccgccggagaggagggcccgcccgcggaaagcgaacagacggaggaggcacagacaacgcgcgaggagagcac

SEQ ID NO: 144684 - RNA, 67 nt, Homo sapiens
accagagaccacagaaggacgggagaacaccccacagggaagagggaacaagggggcgcaacagccc

SEQ ID NO: 144685 - RNA, 86 nt, Homo sapiens
cggccaaacccccagccccggcgcccaccgcagcaaggacgccgcagcaggcaagagaagccgagccaggccgcggagagccgccc

SEQ ID NO: 144686 - RNA, 58 nt, Homo sapiens
cggccaagcccaggcggcaccaggagcggagaagccaggaaggcacaaccccgaggca

SEQ ID NO: 144687 - RNA, 80 nt, Homo sapiens
caaggagcgggacggccccggcggcgcggcggcggggacgagaccggagaccggagagaccgggccccccagagccagaa

SEQ ID NO: 144688 - RNA, 57 nt, Homo sapiens
gccaaaaaggacacacggaacacgggccggagcgagggagagcaggaacacagagag

SEQ ID NO: 144689 - RNA, 76 nt, Homo sapiens
cagcgcccgggacgcccaccaggccgggccgcgccccacccccaccaggacacagggccacccaacacagcgccac

SEQ ID NO: 144690 - RNA, 45 nt, Homo sapiens
aaacagcaagaacccaaaaggaagagcaccaccccagaggcaaag

SEQ ID NO: 144691 - RNA, 76 nt, Homo sapiens
ggggggacgggcaggcaaaggcggaaaaaggcaccagagagggaaagggcgggggcaagacccagagaagacaaaa

SEQ ID NO: 144692 - RNA, 81 nt, Homo sapiens
gaggagaccagaacgaacccccccccccggcagaagcacaaacaaccgaaaaaaagccgagggcaagaaaaacccggcggg

SEQ ID NO: 144693 - RNA, 81 nt, Homo sapiens
gggagagcggaagaagaggaggagagccggccccaggagccaaaaccgcaggaaccggagagagagacaaggggaccagca

SEQ ID NO: 144694 - RNA, 76 nt, Homo sapiens
cgccggagcggaaggaaacagggaaaagagagaagcccggaagcaaaaggagcggaggacaccccaaacagcaaaa

SEQ ID NO: 144695 - RNA, 78 nt, Homo sapiens
gggacggcgaggccccagaccacacggcaagccaaaaccccggaagaaagaaccgggaacaaagggccaaagaaagaa

SEQ ID NO: 144696 - RNA, 68 nt, Homo sapiens
aacgaaagcacgaaggacgacaaaaggcacacaagacaaaggcgccgcagcaccccccggacccagcc

SEQ ID NO: 144697 - RNA, 80 nt, Homo sapiens
cgggccgagaccaaccgacagggagaaccgcagaccagaagcagacacggaagagacccaaagaaaagagaagaaaggga

SEQ ID NO: 144698 - RNA, 73 nt, Homo sapiens
aaccaacaagaaaaagaccgggcaaagaaggccagagggcccaaagcggagaggcacgagcacagggacccag

SEQ ID NO: 144699 - RNA, 81 nt, Homo sapiens
cacacaaaaagcggccgaggagcagcaaaagcagacaagggcaccggacccgggaagcgagacccggagaaggcaggacac

SEQ ID NO: 144700 - RNA, 70 nt, Homo sapiens
gagccgggacacgaagaagggacggggacccccaacgggcccgcaggagcagggacggggggaaaagcgc

SEQ ID NO: 144701 - RNA, 83 nt, Homo sapiens
aaaccggacagggccccggagggacaccgccaaacaaggaccgaaaggcggcgcaaggagcccaagagccaggaacaccgagg

SEQ ID NO: 144702 - RNA, 75 nt, Homo sapiens
cgggacggcccaccagccaccccaccgcgcagggagccacagaccagaggcagccggagcaggcgcggcggcggc

SEQ ID NO: 144703 - RNA, 82 nt, Homo sapiens
ggggagggcgcggcacgccggcccgcaggcagagaccacaagaaccaggagagacccagagccagcgcaggggaagccgcaa

SEQ ID NO: 144704 - RNA, 59 nt, Homo sapiens
gaagaccagagcgaaacgaagggaggggggaagacagggcccagcaccacaggacgggc

SEQ ID NO: 144705 - RNA, 82 nt, Homo sapiens
ccaggaggcggagcggcaaaaaccgcgagaaccacgccgacaacggcggaagaggaacgggaacggggaagaagagcggcgc

SEQ ID NO: 144706 - RNA, 64 nt, Homo sapiens
aaggaccgagaccccacaagacgcaccaacgcaagagaagacagaacagaagaggaagaaaaaa

SEQ ID NO: 144707 - RNA, 76 nt, Homo sapiens
gaaggcacagcgggccgagaaagcaaacagaaaggccaaaacccccaaggacccgagccccaaagacagaaaagcc

SEQ ID NO: 144708 - RNA, 76 nt, Homo sapiens
gggcggcagcgccagcccggcgccccccccagccccagcggcaaaggaacagagcacacagaccacaaggcagcag

SEQ ID NO: 144709 - RNA, 78 nt, Homo sapiens
caggaagggggagggccaacgcggagcagacagcaggcccagaggcagagcacacaaccaggaaccaaaaaccgcggc

SEQ ID NO: 144710 - RNA, 69 nt, Homo sapiens
caccaggaggccccgcggggcaaacggacagaaccaacgaacaagggacacagaggccgcaggcccaca

SEQ ID NO: 144711 - RNA, 42 nt, Homo sapiens
aagccaacccaggaggaaaaacggacccaaagacaggaccac

SEQ ID NO: 144712 - RNA, 41 nt, Homo sapiens
gcgaggcagccccaaacaccgacaggaagggcgcaccacgg

SEQ ID NO: 144713 - RNA, 70 nt, Homo sapiens
acagaacgccggagggcggccacgcgggaccaccggcaccaccaaaggcggagaacggaaaagcaccagg

SEQ ID NO: 144714 - RNA, 82 nt, Homo sapiens
cgaagacaccaaagagggggaggggaagaaagcagccgaagccacggagaagccgccgcagcggccggagacaaggaaaaga

SEQ ID NO: 144715 - RNA, 81 nt, Homo sapiens
ccccgggcgaggcacaccccggagccaggaggggaaagggagcagcaccggccacacccacagcacgaccggaacccagcg

SEQ ID NO: 144716 - RNA, 68 nt, Homo sapiens
aggccggccaggcggcaaccagacggggccaagagccaggccccggggccccagcggcaccagcggag

SEQ ID NO: 144717 - RNA, 72 nt, Homo sapiens
gagagaaggccgagacagagaacagcggcagcgaaacagaacagaaggcccagcagcagacaacagcagcaa

SEQ ID NO: 144718 - RNA, 61 nt, Homo sapiens
agcgacagcggcgagcagaacacggcgagcgggcaagcacaaacccagaacgcagaggacg

SEQ ID NO: 144719 - RNA, 76 nt, Homo sapiens
aaaaggggggaaggcacacaacgacccggacagcgaccgcaagagccgggaggcccagcccccgcgcggccggagg

SEQ ID NO: 144720 - RNA, 36 nt, Homo sapiens
gcccgacaacgaaggagaacaaccgcaacgaacaaa

SEQ ID NO: 144721 - RNA, 59 nt, Homo sapiens
gccaaagaccaggagagacgagcagcccagggagcgggagacaggcgggaaaacggcac

SEQ ID NO: 144722 - RNA, 58 nt, Homo sapiens
aaagcaggggccggaacaacacgggcaccacaggacaggacaacgcacaacagggcag

SEQ ID NO: 144723 - RNA, 59 nt, Homo sapiens
accaacaagccacgaccggggagcaggagagaggaccaccagggacaagcagacacaaa

SEQ ID NO: 144724 - RNA, 76 nt, Homo sapiens
ccacaaagcccagaagaagggcaccagcgaagaccggccgaggcaagcggccccccaggcacacaaggccgcggaa

SEQ ID NO: 144725 - RNA, 77 nt, Homo sapiens
cgcggccgcacccccgccccaggcagagggcagcaccgccacgcccggagcgcgaagcaagggccagccccaagcca

SEQ ID NO: 144726 - RNA, 74 nt, Homo sapiens
ggacggggggcgcaaccaccaccaagccgcgcagagcccgggaagcgcagagggaacacggccacgaggggaac

SEQ ID NO: 144727 - RNA, 77 nt, Homo sapiens
gccagcacggagcaccagaaagggaaaccagccacgaagcgaaccaggacaagggccgggagccaagggcagggggg

SEQ ID NO: 144728 - RNA, 70 nt, Homo sapiens
agaccgagcgcaaagagaagcaagacagaggaaggcagcggccggagcgagggagagcaggaacacagag

SEQ ID NO: 144729 - RNA, 71 nt, Homo sapiens
cagggccacgagcaccgcgccggcccagcaccccgagaaccgcaggagccagagagagaagagggaggccg

SEQ ID NO: 144730 - RNA, 76 nt, Homo sapiens
aaccacggacaagaccccaccacgcagagaaccagccgcgaaccacacaggaaacagaaagccggcgaggggaggc

SEQ ID NO: 144731 - RNA, 43 nt, Homo sapiens
gcccaggcgcggacacagccagggcggagaacggaaaagcacc

SEQ ID NO: 144732 - RNA, 77 nt, Homo sapiens
caacaccaaaggaaggcgccaagaacaccagagacaccggacaaggacggacaacccacagaaggagacaaaggaaa

SEQ ID NO: 144733 - RNA, 80 nt, Homo sapiens
cagcaccccgagccaccccaggcgcccagaccaagggaacggcggaaacagaaggccggcaagccgcgagggacaacaag

SEQ ID NO: 144734 - RNA, 82 nt, Homo sapiens
ggcggagcgacgagcaggcggcgcagacaccaacgcgggcgcgaccgggagcggaccccgggggacaagagaaaaaaagggc

SEQ ID NO: 144735 - RNA, 72 nt, Homo sapiens
cggcgagaccccgcagccggaggagggcgccggggcggaacgcaagaaccacccggcaccaccacccccagc

SEQ ID NO: 144736 - RNA, 67 nt, Homo sapiens
gcaccgcaggcagacaaaagggccaaagaagggagaaaaaacagggacagaaccaaaagagcaaagg

SEQ ID NO: 144737 - RNA, 85 nt, Homo sapiens
gcagcagccgcccgccaaccccaggggaccagaggaaccagcccgagcggggaaaaagcaacacgaaagaaaacacggcaggaag

SEQ ID NO: 144738 - RNA, 68 nt, Homo sapiens
gaagaagaagcgagaccacaccaggcagcccccagcagcagaccggaagagaggaaagaagacgagaa

SEQ ID NO: 144739 - RNA, 72 nt, Homo sapiens
agcaagcaccggagggagaagacagggcccgagggcaggacagcaggcaccggcgaagcacagagaggcgcg

SEQ ID NO: 144740 - RNA, 31 nt, Homo sapiens
ggaaaagagacgcaggagggcaggagaaagg

SEQ ID NO: 144741 - RNA, 78 nt, Homo sapiens
caaggacaggcacacaaagaaggagacgggggcacgggagcaggaaggaggaaaaggccaggcccagccggcccgccc

SEQ ID NO: 144742 - RNA, 76 nt, Homo sapiens
gggaggacagacaaacagaacgagagccacagcaacagccgaacaaaccagcaacacaacagcaacggcaccagca

SEQ ID NO: 144743 - RNA, 57 nt, Homo sapiens
caacagggcggcggggaaaagaccaagggaacggaagccccagcccgcgcgagccag

SEQ ID NO: 144744 - RNA, 80 nt, Homo sapiens
ggagcaaaccggcagaacacaggacgcggcaggccaagacccgggggcagcaggggaccacgaccacaagccgaagaggg

SEQ ID NO: 144745 - RNA, 67 nt, Homo sapiens
aaaaacaaaacgaaccaggacggcaagcagccgccgcaaagggacgacgaagggacagccagaaggg

SEQ ID NO: 144746 - RNA, 74 nt, Homo sapiens
ggacgagaaaagcaagaaaaagggagccacccggaagcaaacagggaggagaagaagcagaagaagacaaagca

SEQ ID NO: 144747 - RNA, 62 nt, Homo sapiens
ggacacaggccaggagggggaagagagaccacaggcggagcagcagcagccggagccaggac

SEQ ID NO: 144748 - RNA, 82 nt, Homo sapiens
ccggagcgccagccagcggcccacccggggggcagcaacggcgacaccagcaagcaaaccaggcgagacagcaggagcacca

SEQ ID NO: 144749 - RNA, 75 nt, Homo sapiens
cggagccagcaaaaacacaaacgagggagcaaggacaccaccagggagccaggagagagaccgagaccaaaagac

SEQ ID NO: 144750 - RNA, 65 nt, Homo sapiens
ccaaaagaagaaagggccacgaggagggcacgcggaggagacgaagaggaggccggcagaagaaa

SEQ ID NO: 144751 - RNA, 81 nt, Homo sapiens
cggccggccggacaagcccaggagccgaccagagagcagagccccccccagcgccgaaggcccgacccagcagcccggccc

SEQ ID NO: 144752 - RNA, 75 nt, Homo sapiens
cccggggacaagaaacagagcaaaaaccggaaaaaacaacgaacgagcaaggaagggccaaggcagaccccacac

SEQ ID NO: 144753 - RNA, 77 nt, Homo sapiens
agacagagccccccggaaccagcagcgcagccgggggccagggaagagaggcagcaaacacgcaggacacagcaagg

SEQ ID NO: 144754 - RNA, 82 nt, Homo sapiens
ccaccccgcgggcgcccggacggcgaaggagcaggggcgcgcagaaaagccccaaagcagcagcaacgacacagcagcacgg

SEQ ID NO: 144755 - RNA, 77 nt, Homo sapiens
gcccggccgcccgccagcggccaagaagcccgcccaggccccagggaaaggaccgaggcaggaaagaggccagacgc

SEQ ID NO: 144756 - RNA, 80 nt, Homo sapiens
acagagaagaggaacaccgccggggaccagagagcaaacaccggagccaggggagccgccaccaaaagcagacggaaaac

SEQ ID NO: 144757 - RNA, 75 nt, Homo sapiens
gaaagaggaaaaccagagaaacaagaggaggaggggcggacccagaacgccggaggacccggccaaaccacaggc

SEQ ID NO: 144758 - RNA, 85 nt, Homo sapiens
cggcaaagaacccaaggaaggcgagcggaagaacggcaagaaaaaaagagcaccggccagcagaaccagccggggccggcaagcc

SEQ ID NO: 144759 - RNA, 82 nt, Homo sapiens
ggcaagacaagaggcagccagcggacgggcggacgaaagaaagaaggagcaccaacgcaaagaaaaagaccaagaagaccag

SEQ ID NO: 144760 - RNA, 71 nt, Homo sapiens
gagccccccagagagacagagcaaaaagcggaaccacaagaagaaagcaacgacaagaacccacacgcgcc

SEQ ID NO: 144761 - RNA, 75 nt, Homo sapiens
cccaccccggccgcaacgcccagagagggcggagagaacaccccgaaccgggaggcagagggacacggacgcacg

SEQ ID NO: 144762 - RNA, 68 nt, Homo sapiens
cgaaaggccaaggagcacgcaaagccgggaagacaaagaacaggaccccgacaacagagcagccccgc

SEQ ID NO: 144763 - RNA, 87 nt, Homo sapiens
caacgagacgagagcgcacgacgagggagaagcccaccacgcaacgggacggcgcggcggaaggcgcgccagacgagccacgcgcca

SEQ ID NO: 144764 - RNA, 78 nt, Homo sapiens
aaaccgcaagcaccgaaccgcacagcaagcccaggccaacaggagggagccggaaacaaagaagaggagaaaaagcca

SEQ ID NO: 144765 - RNA, 76 nt, Homo sapiens
ggaagaaaccagcgcaagcccaaaggaccgaaaagcaccagagaaggcggcagacgcagacaaacaaaacaagaag

SEQ ID NO: 144766 - RNA, 76 nt, Homo sapiens
agccagggcagccccaagagagccaggagcgcacacacgacaggagaaaggaggggccacgagggggcgcaggggg

SEQ ID NO: 144767 - RNA, 86 nt, Homo sapiens
gacgacccagacggcccaggcgaccagaaacagaagacccacacacggagaaccacggggaccaagaagcgagcagcccaaacgga

SEQ ID NO: 144768 - RNA, 74 nt, Homo sapiens
ccaaaaggaagacgggaacccggcgcaagggaaagcggcagaaggaaaggagaaggaaaggagaagagggacag

SEQ ID NO: 144769 - RNA, 74 nt, Homo sapiens
ggccacagcagggaaacacacgcgcaaaggagaaccccacaccagaacccaggaaccccgacagcagagacgac

SEQ ID NO: 144770 - RNA, 89 nt, Homo sapiens
cccggcccacaggggggggcaaacccgagagaacgggcagcagcccacagaacagagcaggcccacgccgagagaagacacaagcggcg

SEQ ID NO: 144771 - RNA, 79 nt, Homo sapiens
caccaacaccaggcacacagggcagaccaaccacccgagaaaggaggagaaacaagcagcaccgcaggaggcagcagca

SEQ ID NO: 144772 - RNA, 79 nt, Homo sapiens
gagcgggcacccgacgccccaaccgccggcaagacggcgcgcaggccgcccgggcgcggaggcgccggagacaagcgca

SEQ ID NO: 144773 - RNA, 33 nt, Homo sapiens
aacaaagagagagaaggcccagccagcaccgcg

SEQ ID NO: 144774 - RNA, 77 nt, Homo sapiens
agcgacgagcgagcgcgcgcgcgaaaacccgggcagcggaaaaggaggcgagagcgggcggggggaccaacgaacag

SEQ ID NO: 144775 - RNA, 62 nt, Homo sapiens
gcgaaggggaaggcgccgaagaggacgaaggaaaaccgccagaacagcccaagcccaagaga

SEQ ID NO: 144776 - RNA, 70 nt, Homo sapiens
gccgccagaccacagcacagccgggaaggggagccaccagccccccgaccgcaacccaccaaggagcaca

SEQ ID NO: 144777 - RNA, 63 nt, Homo sapiens
ggcagccacaggagccagacgccagagaaaaagaaggaaagacaacagaaacaagacaggaac

SEQ ID NO: 144778 - RNA, 81 nt, Homo sapiens
agccgcgcagccccggagcacgaacgcaaggagggacaggacggaaggagcggaggaagacacaagagcgagcgaagaagg

SEQ ID NO: 144779 - RNA, 73 nt, Homo sapiens
gggcgccccggacgagagcccggcgggggcgcaggacagggacaagcgcacagcggagaaagcagcgcggcca

SEQ ID NO: 144780 - RNA, 77 nt, Homo sapiens
caagggcgagacggcccacccacaggaaaacaggacagaaggacagccaggggcaagaccagaccgaaaagaagaag

SEQ ID NO: 144781 - RNA, 30 nt, Homo sapiens
aacggcagcagaaccacggggaccggagaa

SEQ ID NO: 144782 - RNA, 89 nt, Homo sapiens
caaggcggaggcgccgcccggggccccgcggcgcaggaggcggggagcgcagagcgggcgagcgcgggcaagcgccgccgcgcggccgc

SEQ ID NO: 144783 - RNA, 60 nt, Homo sapiens
ccggacccacggccgcccggacccccggcgagcggggaaccggcccggcagccggccccc

SEQ ID NO: 144784 - RNA, 59 nt, Homo sapiens
gcgccaaaacgaggcaaggcaggcacgagaagagaagcccagagcaaaacaccccaaac

SEQ ID NO: 144785 - RNA, 81 nt, Homo sapiens
gccgggcagccgaacggagggcgacggagggaggcaaaagcagaccggaaaacccaccggcaagaccacacccgaggggag

SEQ ID NO: 144786 - RNA, 70 nt, Homo sapiens
ccaaagagaaggaagaccacagaagaacggaagaccgaaagagggaaagagggagccagcaccgccgacc

SEQ ID NO: 144787 - RNA, 76 nt, Homo sapiens
gcccgagagcccgagccacgcaggagaaggaagcgccggccaaacgagcacagcaaacgcgaaagagcggaggcgc

SEQ ID NO: 144788 - RNA, 76 nt, Homo sapiens
aggagcacaccaccaacacggcaacgcaggccagcaaccccagccaagcaaggggcggcaccaggaaaaagaaaga

SEQ ID NO: 144789 - RNA, 88 nt, Homo sapiens
acagcgggaaagaaggcaaaacacggcggggccggagcacagcccacggagaaggacgaaagaagccaaggcgcggagccagcagagc

SEQ ID NO: 144790 - RNA, 89 nt, Homo sapiens
ccccccggaggaggagcccgaaaccaccccgacgcccagcccaagagaccccaggggagcaaaggccggaaaccgagcagaaagaaaag

SEQ ID NO: 144791 - RNA, 36 nt, Homo sapiens
gaggggacggccgggccggcgagagaggggcacagg

SEQ ID NO: 144792 - RNA, 79 nt, Homo sapiens
gaaagagaagccccggagccgcaaggggacgaaccgggagaggagccccaccggccaccaggcgaccagaaggcccgag

SEQ ID NO: 144793 - RNA, 109 nt, Homo sapiens
ccgggaaacaagcccccggaccgggaaccggcacaaggcacgggcacggcggacaggcaccgacgagagggcgcaccgcgccggagcccgaccgcggggacccggagcc

SEQ ID NO: 144794 - RNA, 74 nt, Homo sapiens
ggggaggaagggcggcggaccgcggacaccgcgcgggccgccacccgaagaacagaggcacacgaaaacccaac

SEQ ID NO: 144795 - RNA, 73 nt, Homo sapiens
aggcgcaggagcgggacagcaggagagcgcaaagccggcggcaaggaaaaggcgaaagaaggaaccaaacggc

SEQ ID NO: 144796 - RNA, 77 nt, Homo sapiens
gggacaagagagccgaggcgcccccaccacccacaaggcaagaagcaagcaaccaggcgccgcaccagaagaggacg

SEQ ID NO: 144797 - RNA, 63 nt, Homo sapiens
ccagaagcagcaggaggcgcgggcaggcagagcaccagggagccaaggccgcgagacacggca

SEQ ID NO: 144798 - RNA, 71 nt, Homo sapiens
gaaagaaacaaagcaaccaccaaggaaaaaccaaggaaaccaaggaagaggaaccagagaaggagaaacag

SEQ ID NO: 144799 - RNA, 59 nt, Homo sapiens
gaaaaacgcagaagcaaaggagaagaaacaaaaggaagagggagaaaaacggcagcagc

SEQ ID NO: 144800 - RNA, 84 nt, Homo sapiens
ggcccgcaggagaggaaaaggagcgagcagacgacaagccgggagcgggcggccaaccagggaaaagccaacaaggaccgggaa

SEQ ID NO: 144801 - RNA, 65 nt, Homo sapiens
cccgacaccaagcaggggggccaggaggagccccagcacagcagagaaaaaaccacaggcgcgga

SEQ ID NO: 144802 - RNA, 89 nt, Homo sapiens
accagaagcacaaggacagagcacccaccacaggaggcaccgaaaacgagcagacccgaacccgacacgggacagagaaaaccggaagg

SEQ ID NO: 144803 - RNA, 80 nt, Homo sapiens
agcccccaggaacagggcaaaggagagcacaaccacgcagggaagcccaggggcagggcagcgcaagaccccgcacggaa

SEQ ID NO: 144804 - RNA, 79 nt, Homo sapiens
aaaaaggccccccgagaagagacaagaggagcagcagcggcaccgcccccacccggagggccgacaaccacagggaccc

SEQ ID NO: 144805 - RNA, 81 nt, Homo sapiens
ggcccggccggggaagccaagacaggaaggaagggaccacagaccagcacgccggcgccacgaaccgagcgacaggacggg

SEQ ID NO: 144806 - RNA, 61 nt, Homo sapiens
gcgcccaaagagggaagcgcggacacaaagcccaacgagacaaaaggcacaacaaaccggg

SEQ ID NO: 144807 - RNA, 111 nt, Homo sapiens
gcgaggaaccaccggacgaagacagcaaggagacccgccaaagccgccgggcaagaacccaacgccccaccagccaggacgcagggcgccggaggcccagggcgggcaggc

SEQ ID NO: 144808 - RNA, 72 nt, Homo sapiens
caggaacacagacgggggcgagcggacccgcagccccaaagcccaggcagcgcagagccaacagacgagcag

SEQ ID NO: 144809 - RNA, 85 nt, Homo sapiens
ggacacccgagcacagagacgaagaggaccaggagcaaacagaaagaaccagaaaccgagagcagggggcagaaacagacaagaa

SEQ ID NO: 144810 - RNA, 66 nt, Homo sapiens
gacccggggaccgaaccccggcgaacagcaaggcacaaggggcccgggcagagggaaagcagagga

SEQ ID NO: 144811 - RNA, 79 nt, Homo sapiens
ggaccaacggaagacgaagagaagaacgcgagggcgcgcacgcaaaaacccaagaccggaaaacccaagagaacgacac

SEQ ID NO: 144812 - RNA, 79 nt, Homo sapiens
cggcacgaacggccacagcaccccgagaccgcagccccgccccacgccggcagccccacgagccaaagaaagaacgagc

SEQ ID NO: 144813 - RNA, 79 nt, Homo sapiens
ggacccacgcagcaggagcgcccgcccgagccagcccgccagcagccccagccaaaggccaagccgacgccagcgggcg

SEQ ID NO: 144814 - RNA, 52 nt, Homo sapiens
gaggaggaaaggaggacgagaggcggccccaggggggaccaacaagggagaa

SEQ ID NO: 144815 - RNA, 77 nt, Homo sapiens
gcagaacaccaagcacgccagcaccagagaagaaggcaggcccacaccacggggcagggcccagacccgcaagggac

SEQ ID NO: 144816 - RNA, 58 nt, Homo sapiens
gaaggaccaagaaccagaaacgaagagagaagaagaacagggagaaacccgagggaca

SEQ ID NO: 144817 - RNA, 57 nt, Homo sapiens
cagcagcagccaccccacgcccggagcccaaaaccggaaaaccagcaacaggacagc

SEQ ID NO: 144818 - RNA, 98 nt, Homo sapiens
ccaccaagggagaaacggcgcagcagagcgagaccgccaacaggacaccgaagccaaccgaaggaagaaaccaaacgaaacacaacgaccaacgggaa

SEQ ID NO: 144819 - RNA, 79 nt, Homo sapiens
ccaccagacggagacagcggacaccaggaaaaagaacagaggccaacccgacaagaggaccaaggccaccagagaagga

SEQ ID NO: 144820 - RNA, 82 nt, Homo sapiens
ccgcagaacgccacaaccagcgccaccccagagaagaggacgagagacaagacaaccaaaagggaaaccccccgcccccccc

SEQ ID NO: 144821 - RNA, 75 nt, Homo sapiens
cgggggccacaggggcccgacaacggcacgcgcaccccccggaggcggccgagcccacgcgacgaagaacaggag

SEQ ID NO: 144822 - RNA, 82 nt, Homo sapiens
cacagaaagccgagcgagcggcccacaaggccaccacgcagcacagcaaggaggaccggcggcgacgaaccaccccaggagg

SEQ ID NO: 144823 - RNA, 77 nt, Homo sapiens
acgcagcaaccaaaggcaccggccgagaggcaaggaagaaaaaggcacaaacccagcacagagaagacggcgacaag

SEQ ID NO: 144824 - RNA, 74 nt, Homo sapiens
gccgaggacgcggagcccagcaagggacaggcccagaggcacaccacaggagcacaaagagagagagagaggcg

SEQ ID NO: 144825 - RNA, 71 nt, Homo sapiens
aacaaggcccaacccccaaacgcccgagagaagaaaagcccacgacaacagcagagacaaagaaaagaccg

SEQ ID NO: 144826 - RNA, 64 nt, Homo sapiens
agacccacagcgaaagcaacaggcacaacagcaacgccagaaagagacggccccgaaacaaagg

SEQ ID NO: 144827 - RNA, 80 nt, Homo sapiens
aaagcccacagagacacaaccggagcccagagccacgcaaagagggagaagaccaaagaagagagagcaggaccaccacc

SEQ ID NO: 144828 - RNA, 78 nt, Homo sapiens
gaaagcgccgcggcaaaggcacgacgggcccccgagagaaccgaggaccgcggcacagaccgcaacgccacggggacg

SEQ ID NO: 144829 - RNA, 72 nt, Homo sapiens
aaaggacagacagagagagggaaaagacacaacccagcacggcgaggagcaggagagaggagaacggacccc

SEQ ID NO: 144830 - RNA, 96 nt, Homo sapiens
gaaggagccaccaggccgggaagcccacgggggaggggcgaccccggggcccggccagcacgaccgaggaggggcggacagcggaggagaacggag

SEQ ID NO: 144831 - RNA, 78 nt, Homo sapiens
agaaggcccgaggagagaacagggaggaaggagcggacgagcagcagcgaaacagaaaggaaggaaagaaccacagca

SEQ ID NO: 144832 - RNA, 75 nt, Homo sapiens
aggacaagacgcggcgccgacgggccccgaggccgcgggcggcccacagggcgccccacggaggccaagaaagcc

SEQ ID NO: 144833 - RNA, 37 nt, Homo sapiens
gaaaaaaagagcacccgagagaaagccgagggaaaga

SEQ ID NO: 144834 - RNA, 75 nt, Homo sapiens
cgggggcgcggggaccagcagcggagggggccggcgccgacggcggcacggcgaagacgaccccgacgcaggcca

SEQ ID NO: 144835 - RNA, 65 nt, Homo sapiens
gccaaagaggaagcccaccacaaaaacgaaggcggcgggaccagcaccaaaaaacggacaagcac

SEQ ID NO: 144836 - RNA, 81 nt, Homo sapiens
acgccaagaggcggcgcccgaggcggagggacggagagcccacgcaggagacgggaggagcgacaacggagcacacccacc

SEQ ID NO: 144837 - RNA, 79 nt, Homo sapiens
cgcccagccgccgccgccgccgcgccgcagcgccaccgggacagagcagaagggcgaaagaccgggccgcagaagaggc

SEQ ID NO: 144838 - RNA, 81 nt, Homo sapiens
aagcagaagagcaagaaacagaagcgagaggaaccagaaaaagggagcacaaggaagaaaaaacagggacagaaccaaaag

SEQ ID NO: 144839 - RNA, 66 nt, Homo sapiens
cgaggccccggggaagccaccccaccccccaggaacagaacagaagccagaccccccacaccaggg

SEQ ID NO: 144840 - RNA, 75 nt, Homo sapiens
gaagagcgccccaaagcccaaacagcaagagaaaacacaacaaagaacaggaaagaaggaacaccacgcccagca

SEQ ID NO: 144841 - RNA, 80 nt, Homo sapiens
gggaccccggccgccggagccaccgggcgcccagacaccgaacccccgagccggagagagggggagccggggcggcggga

SEQ ID NO: 144842 - RNA, 108 nt, Homo sapiens
gccgcgcggcacacggggcagccaggccgagccaacaaaagaggagcccacgcaggcgcgacgcggaggggaagagaacaccgcggccgcagaggggaggaaccgaaa

SEQ ID NO: 144843 - RNA, 62 nt, Homo sapiens
gaggaacaaaggcggaaacgaaggggaggacacagaagagaaagcaaccagcgagagaaacg

SEQ ID NO: 144844 - RNA, 68 nt, Homo sapiens
cgcagggcgcccccgcccaggccacacacagagaccccacgggaagggcaaggcgagaaagagagagc

SEQ ID NO: 144845 - RNA, 72 nt, Homo sapiens
ccgcacaccagcaaggccgggcggcaggacggagccccggccccacaagaccaaggcgcaagccacagcccc

SEQ ID NO: 144846 - RNA, 40 nt, Homo sapiens
cgcagagggcggagcggcaggccagcaaaggacgcccgaa

SEQ ID NO: 144847 - RNA, 57 nt, Homo sapiens
aggcagcacacaccagagcgaagcgagcccgagccccggagcgaagaagaagcgcaa

SEQ ID NO: 144848 - RNA, 81 nt, Homo sapiens
gaagccggcccggggccgcggacgaggaccagcagaggccagcacgagaacccagggaaagaaaagaggcccggaagagag

SEQ ID NO: 144849 - RNA, 38 nt, Homo sapiens
gcaaaccacaggagaggaggggacggaaagagagccgc

SEQ ID NO: 144850 - RNA, 78 nt, Homo sapiens
caccgacgaacccccaagcgaccaaggaggagccgccagaacgcggaagcgagggagggcaacagagagaaaagcgaa

SEQ ID NO: 144851 - RNA, 69 nt, Homo sapiens
caggccacgcgaagagggaaaagcccggacaagcaacccagaccaacaagcagcaaagaggaccgcagg

SEQ ID NO: 144852 - RNA, 73 nt, Homo sapiens
cgaggcacggcaaggggccggagggccggcccagaacgcagcccagcggcagagccgaggacccgagcggcgc

SEQ ID NO: 144853 - RNA, 72 nt, Homo sapiens
gaaacagagaacaaaaacagggccgagagaacagcagaagagaggaaaccaaaagaagacggaaaaaggcca

SEQ ID NO: 144854 - RNA, 82 nt, Homo sapiens
gcagcgaggcagcgagaaacagaaaacaagagagaaaagaagcgaaagagcaaggaggcacaacacgaacagaaagaggaag

SEQ ID NO: 144855 - RNA, 60 nt, Homo sapiens
agaacacgacgcagaagaagaaaccagaggcacccccagggcagccagagagacacagcc

SEQ ID NO: 144856 - RNA, 80 nt, Homo sapiens
cccagaaagaaaggagcgccccaaaaggaaacagaccgccagcagcagccgaaaacgcacaagaccaacagaccagcgca

SEQ ID NO: 144857 - RNA, 57 nt, Homo sapiens
ggccggcacgcggccacgcagcccgcaaagcccaccccccaaggcagaggggcggcg

SEQ ID NO: 144858 - RNA, 112 nt, Homo sapiens
gcccaaccggccagagcccacggcagcgccggagacaaccagggagacaaggaaagaccacagcaagaccacgcccccagccgggggaccaggccgaacgacccggacacaa

SEQ ID NO: 144859 - RNA, 79 nt, Homo sapiens
cccgggcacacccggcccccggacgcccgaaaggacgcgagagaagccacagcagaaaagacagaacaggccaagaaca

SEQ ID NO: 144860 - RNA, 71 nt, Homo sapiens
acaagcggacgcccccccaccccaccccaacccccacagggaaaggaaccggaccagacaccgagacaaga

SEQ ID NO: 144861 - RNA, 69 nt, Homo sapiens
accgaagagccaagcccagaaggaacgaaaggcaaaacacagcgaagcagccgaggacgcccaggcgac

SEQ ID NO: 144862 - RNA, 84 nt, Homo sapiens
cggcagagcgaaggagcggagccaccaggaacaaccaaagaggaggaaaggacgagcacgaggccgcagcgaggcaccccccca

SEQ ID NO: 144863 - RNA, 77 nt, Homo sapiens
caaagagcggagcgaaaagaaaacagagaacccgaagccccagaggagggcaccgccgagggcaccgcccaccagca

SEQ ID NO: 144864 - RNA, 77 nt, Homo sapiens
cccagcgacacccgcgcccggaggcgaccagccagcgcaaccacaaaccagacaacaaggcacacagcaagggaaca

SEQ ID NO: 144865 - RNA, 78 nt, Homo sapiens
gaagaaggccacaggcgggccccagaagccggcagagggcagccacgcagaaccccagcagcaacaacaaggggccgc

SEQ ID NO: 144866 - RNA, 75 nt, Homo sapiens
agccccaccagccaccgcagccacacccaggcaggcggccaaccacgaaggaccgacagcccccaggaaggaggc

SEQ ID NO: 144867 - RNA, 58 nt, Homo sapiens
aggacgagaacagcaaccagaccccggagacgagaaagccagacgagggaggagagcg

SEQ ID NO: 144868 - RNA, 56 nt, Homo sapiens
ggaagaagggagacaaaggaaaacaaaggcggccccggacgggcaggcagccaacc

SEQ ID NO: 144869 - RNA, 56 nt, Homo sapiens
gccaagaagaaaggccacagcagggcccgaagacgagcagaccgaggagccaggaa

SEQ ID NO: 144870 - RNA, 76 nt, Homo sapiens
aaaccaagccaaacacaagcagaaggagcgaagaagaggaaaccagggaaagcaacaccgaaagaccaagagacga

SEQ ID NO: 144871 - RNA, 96 nt, Homo sapiens
cgaggaccccggcggcagacgcaggcgggaccagagcgagcagacacaggaccgggcgaggaagcgacccagagaggggacacgaggggacgccgg

SEQ ID NO: 144872 - RNA, 68 nt, Homo sapiens
aacccacccgcgcggccggcgccggaaggggcgggacagcggggagccggcccaccggcacaccaaac

SEQ ID NO: 144873 - RNA, 58 nt, Homo sapiens
acaccagcagcaaaaggaacaaggaccggaacagggcgagacgaacaacgcgcgcagg

SEQ ID NO: 144874 - RNA, 71 nt, Homo sapiens
gaacggcagccgacccccagggaagcagccaacaagccaaaggaagagccacggcacaagacggaagggga

SEQ ID NO: 144875 - RNA, 77 nt, Homo sapiens
gcggagcggagacgggagaagaaaagacacgcagaaccgcaacgggagaaggaaacacccaaacagagagggaaacg

SEQ ID NO: 144876 - RNA, 58 nt, Homo sapiens
caaacagcgaagcagccggggaaaaaagcccccagccagcggacgggcagccggggca

SEQ ID NO: 144877 - RNA, 75 nt, Homo sapiens
caaagggggaggagaggccaagcgcggcagggcccccaccggccgaccgcgcgccacggcccccccagcgccgcc

SEQ ID NO: 144878 - RNA, 73 nt, Homo sapiens
accggcacggcagcaaaacaccaccaccccaccacgcggcaccagcaaaccccacagccacggaccaccgcaa

SEQ ID NO: 144879 - RNA, 81 nt, Homo sapiens
gccaggaacagggacagcacccaccccggagggggaccacaagacccacgacagggacgaggaggggagccacgcccaagg

SEQ ID NO: 144880 - RNA, 72 nt, Homo sapiens
accccaggcgcccccaggcccgggacagccccgcccaccaggagacaagacgagggagagggcgccgcggag

SEQ ID NO: 144881 - RNA, 78 nt, Homo sapiens
ggaaggacccccgccggaagcgcagcccggccgggccgccgcccccggggaacacagacgccaaggagcaagcccgcc

SEQ ID NO: 144882 - RNA, 76 nt, Homo sapiens
aaggaagggacaagacccacagcaaagccagcgacagaagccagaaggagcaacaggcgaaaaccgagacagcacc

SEQ ID NO: 144883 - RNA, 74 nt, Homo sapiens
aggcgagaggaagacgacgaggaagagcccgccgaagggcacgaagaacacaaagcaaaaaggaaaagaagaga

SEQ ID NO: 144884 - RNA, 68 nt, Homo sapiens
aacagggccaccgagacccaggaaaacagaaaccagaacaacaggagaacccaggacgaacgaaccac

SEQ ID NO: 144885 - RNA, 51 nt, Homo sapiens
gaagaaccacacgcaggacagccagcaagcagcgagacgacgggaccgaag

SEQ ID NO: 144886 - RNA, 83 nt, Homo sapiens
ggggggcaaacccgagagaacggagcaggggagcagcaagccgggaaacagcgcgcccagaaagccgaacccagagaaccaac

SEQ ID NO: 144887 - RNA, 90 nt, Homo sapiens
caacagcagcagcagcggcccggcagcggagcacgaggcgggcagcagcagccccggggcccggagaggcggacacagagaaagacagaa

SEQ ID NO: 144888 - RNA, 78 nt, Homo sapiens
aacgacccaacacgagcagagacacgggagcaaaaccagaacaggaagacagcgagaagccacgcccaggaagaaagg

SEQ ID NO: 144889 - RNA, 74 nt, Homo sapiens
cacgagacggcagacccagcgccgggaaaagcgacacaccaggcgccaagccacaccagccgcccggagagcgc

SEQ ID NO: 144890 - RNA, 71 nt, Homo sapiens
cgagcagccaggcggcgggccaggcgcggaacagcacaggaagggaagggcaggccagcagccgcgcccag

SEQ ID NO: 144891 - RNA, 75 nt, Homo sapiens
ccaccagcgacaaacaggaaaggggcgcagccgccgcggggcccgcgccgcgaggaggggaagcgcccccgccgc

SEQ ID NO: 144892 - RNA, 81 nt, Homo sapiens
caaaaacaacccaaccacggggaaaaggcaaaaacccacaccgcaacccagcgagagaaagagccaggcaccagccagagc

SEQ ID NO: 144893 - RNA, 81 nt, Homo sapiens
acccaggaggcggagcggacaaggcccggccgcgaggagacccacccagccaacaaacacccgaaggaccacacgaggaca

SEQ ID NO: 144894 - RNA, 81 nt, Homo sapiens
gacggcaggaagaaaacgagccaggaacaaagagcaaggaagaaggagagacgaccacgcaacagaaaaagagcgcaccca

SEQ ID NO: 144895 - RNA, 91 nt, Homo sapiens
caccgcggacgcccgcgagcggcgcacgggccgaccagagggcaccaacaaagcgccagccagcgggcagacgccacggcacgagaaggca

SEQ ID NO: 144896 - RNA, 75 nt, Homo sapiens
cagagaggcacccaaccagaggaccggagcaggaaggggaaaaccgggacaaaggagcccaagcgccggaaggca

SEQ ID NO: 144897 - RNA, 77 nt, Homo sapiens
cggggcggcagcgcggacccgcccggagagagcccaaccggcagccagccggaacacccacacgagaaaaccgaagc

SEQ ID NO: 144898 - RNA, 76 nt, Homo sapiens
ccgaagcgacaccaggcgggaaggaaaaacagaacagcgcccgcgaaaggaacgcagacccaacccagcggcacac

SEQ ID NO: 144899 - RNA, 74 nt, Homo sapiens
gaggcgaaagcggaacgaggaccaggacccaagggaagacaaaggccaacagagcgaacaaaggcagcacccag

SEQ ID NO: 144900 - RNA, 69 nt, Homo sapiens
agaagacggacagggcacacagaaccgaaaaagagcgggcacagaggcacaaaaggagaaagcagaaga

SEQ ID NO: 144901 - RNA, 73 nt, Homo sapiens
ccggcgggcacagggcaagcggccaggcagggaacggcagagccccacaaggagaacacagcaacagaagaga

SEQ ID NO: 144902 - RNA, 76 nt, Homo sapiens
acacaacgcaaggaaagagggacaggcccaggagggcggggccacccaggaggagggcagcacggaccgccagagg

SEQ ID NO: 144903 - RNA, 77 nt, Homo sapiens
agaagcagaggaggcccacaggcccgcccggacaccgagggagcacgagaacaggacaaaaagaaaggcagcacagc

SEQ ID NO: 144904 - RNA, 74 nt, Homo sapiens
gccccagaccagagacagaagcagaggacgccaggaaaccgccagaagcgcggcgagaaaacagacgcagcaaa

SEQ ID NO: 144905 - RNA, 75 nt, Homo sapiens
gcgcggaaggcagcgcccagcagcgcagcaaggcgccaccggaagaaacgggaggggaggagccgggaaagacag

SEQ ID NO: 144906 - RNA, 46 nt, Homo sapiens
gacgcgggcccaaaggacagcccaggagcaaagagccgggggcgga

SEQ ID NO: 144907 - RNA, 67 nt, Homo sapiens
agaaggcagggagggaggggaaagacccacaccaagaggcgcgggacaaccaacacaaccaaagaga

SEQ ID NO: 144908 - RNA, 52 nt, Homo sapiens
cccgggcgccgccaccggcggaaccgaggagcaaggaccgggagaaacgaga

SEQ ID NO: 144909 - RNA, 101 nt, Homo sapiens
acgggaaagagcaagggaaaaagaagggagcggccgaaggagccaccaggccgggaagcccacgggggagagaagagaagagccccgaggcgccaagaaaa

SEQ ID NO: 144910 - RNA, 81 nt, Homo sapiens
gaaccgaacaccaagcacccgcggccaggcacacaggccccgagaaccaagagaacccccaccaaccaggcccggccaacg

SEQ ID NO: 144911 - RNA, 38 nt, Homo sapiens
gggccagccccacaaaggccaacagcaaggggccagag

SEQ ID NO: 144912 - RNA, 79 nt, Homo sapiens
cccagggaagaggacggcagaaagggacacggaagaacggcagcaaaagaagagaaacaacgcagacgaggaggaggca

SEQ ID NO: 144913 - RNA, 79 nt, Homo sapiens
agcgcgacaacacacacacagcgacagcacaagaagcagagaaacagaaaacagccaaaaggacagggacagcaaaaag

SEQ ID NO: 144914 - RNA, 77 nt, Homo sapiens
cgcgggagggcgccgcggggcagccgccgcccccgggcccgacacacacccaaaccaccccaacgggcgggggaagg

SEQ ID NO: 144915 - RNA, 34 nt, Homo sapiens
ccgagcagcgggaacagcaaagagacacaggacg

SEQ ID NO: 144916 - RNA, 77 nt, Homo sapiens
ccaggcggcgcggacccccgggcgcaccagccacccgcggcggggcaggagcccagcggcagacagaaccaggagca

SEQ ID NO: 144917 - RNA, 60 nt, Homo sapiens
accggacgcgacggggcaggaccggccagggaaccaggggcccagcgaagacagcgaaca

SEQ ID NO: 144918 - RNA, 39 nt, Homo sapiens
cacccacgcaggccagagagagaaacagcaccaggacac

SEQ ID NO: 144919 - RNA, 101 nt, Homo sapiens
ccggaccggccgagaggaagacgagccgggaggaacggcccggaaacaggaggacggcagcggggaagaagaaaaggaaccgaggccccccggcgacacgg

SEQ ID NO: 144920 - RNA, 72 nt, Homo sapiens
acgcgggagcgagaccagagcgccacggccacggcccccccggcaacacaacccaagaagacagacaggaga

SEQ ID NO: 144921 - RNA, 42 nt, Homo sapiens
cgcggcccgagccacggccggaggaccggagaggaagacggc

SEQ ID NO: 144922 - RNA, 37 nt, Homo sapiens
gaaagcacacagagaaacgcacagaagagagagaaag

SEQ ID NO: 144923 - RNA, 56 nt, Homo sapiens
agggccaaagaagggagagaggcggaggaagcagaacaagcaccgagccaagaggg

SEQ ID NO: 144924 - RNA, 69 nt, Homo sapiens
ggagcggcgaagagcaaccagcaaagaaggcaccgaaggggcaagacaaaggcccagggaaggcgccac

SEQ ID NO: 144925 - RNA, 40 nt, Homo sapiens
gcggagaccggccggaggcccacagagagaggggcaccgg

SEQ ID NO: 144926 - RNA, 73 nt, Homo sapiens
cacgccgcgcgagggcgggacagccaggcagacgcgcggacaccgaagcccgaggccacaggacacgccaagg

SEQ ID NO: 144927 - RNA, 83 nt, Homo sapiens
gcggccagccggaggagccagggggcccggagagccgggggccggagggcaggcgccagcgcacaaaaacagccagacaccgg

SEQ ID NO: 144928 - RNA, 78 nt, Homo sapiens
agccagagaacagcccccacgcagcccagaaggaaggaaaacacccggcagggaaggaaggaacgcaaccgaagacgc

SEQ ID NO: 144929 - RNA, 95 nt, Homo sapiens
caaagccgcccagacggccaccggcgggaggaacaaaaggggacgcgaagaagcccccaccaccacgagaccgacccaggacgacaccacagcac

SEQ ID NO: 144930 - RNA, 72 nt, Homo sapiens
cagcggagagcgcaaaacgaggcaaaaaaccgcagcggagcggaagaaaccgacaacagacgaaggcgaagg

SEQ ID NO: 144931 - RNA, 84 nt, Homo sapiens
ggaggcaacaccaacaggacagccagagaccgaacagagagaacaagagacgcagccgcacagagaccccacaaaggaaccacg

SEQ ID NO: 144932 - RNA, 76 nt, Homo sapiens
ggcaagcacagcggcaaaaggcgaaggccaggaggcggggagcgcgaacaaacagaccgggagccgcgaggagaac

SEQ ID NO: 144933 - RNA, 73 nt, Homo sapiens
gcggacgaagagccccccccccaacaccgcgacacgcagaacaccgcccagccaagggggagggcagcgccaa

SEQ ID NO: 144934 - RNA, 78 nt, Homo sapiens
caccaaaccaagcaaggaaagaacaagaaaggagagacacaacagccaagcggagcgacaagagcgggaccgacaaag

SEQ ID NO: 144935 - RNA, 80 nt, Homo sapiens
aggaaggagcagcgggaggaagagcacaacgaggaggcggacggagcgagaaggacggagacaagagacaaggcacaaag

SEQ ID NO: 144936 - RNA, 66 nt, Homo sapiens
ccacgagggagcccggcccaggcagaccgggcccagcgagagcccgcgaaggacaccccggggagc

SEQ ID NO: 144937 - RNA, 82 nt, Homo sapiens
gaggccccgggaggccgaggcggccacaacacagcagcccccaggagagcaggaaaagccggagaagccaacaggcggaagg

SEQ ID NO: 144938 - RNA, 68 nt, Homo sapiens
cacgaggagcaacccccaaaagagcccagaaagagacgagggccccaagcggcaagaggggggcccac

SEQ ID NO: 144939 - RNA, 58 nt, Homo sapiens
gcccaccaccaccaagcaagcagagcccccacacccaggcccagcccagccgcaccaa

SEQ ID NO: 144940 - RNA, 60 nt, Homo sapiens
gaccacgccgacagagggaccaagaaaggcccagggaccaaagcccggacaaggcccgag

SEQ ID NO: 144941 - RNA, 69 nt, Homo sapiens
cgcagaaccagggcggcggccagcgccacgcgaaagcgaagccaacaaagaaaggaccggggcaaaacg

SEQ ID NO: 144942 - RNA, 80 nt, Homo sapiens
aacgcggcaccgcagaacgccacaaccagcccaacacacgcgcaggaagcgggaggaccggacgaaagccaggagaaaag

SEQ ID NO: 144943 - RNA, 53 nt, Homo sapiens
aaaacgcggaccaagagaacagccacaggcaagaggaagaacagcagaaccac

SEQ ID NO: 144944 - RNA, 56 nt, Homo sapiens
agacccagaaagcacgggcaggaacccaagggaacaagagccaacaaggccccagg

SEQ ID NO: 144945 - RNA, 66 nt, Homo sapiens
gagcccagaaccgaaccacgcccgggaacaccagagcgcagagaccggaacaggggcgggcggaag

SEQ ID NO: 144946 - RNA, 110 nt, Homo sapiens
ccaaaagacaagggccagaccaccgggaaggaggagagcccccaggaccagggcaggcagcgcaccgcaaaggccccagggagccccgcgccaggcaccagacaggaggg

SEQ ID NO: 144947 - RNA, 81 nt, Homo sapiens
caaaagccaagaggaggacagcgcacacagcaagcacgagcaacaaaaagaaggaagacggagaaaaccagaggaggaaaa

SEQ ID NO: 144948 - RNA, 84 nt, Homo sapiens
gcagcaaagagacacagccaggcagcacacgacagccgcaggaagacaggcggccaacgaagaggaacagagacaaaagcaaag

SEQ ID NO: 144949 - RNA, 82 nt, Homo sapiens
gcaagcggaaagagcggcaagaaacccaccaggagaacccaaaggaaaagcgaccaggacaaaagacccacaccgaaggacg

SEQ ID NO: 144950 - RNA, 87 nt, Homo sapiens
aaccccgggacacggcccaaggaaaaagggcagccccgagaaccacagggacacccgcccccacccgggagagcgaccaagaaccag

SEQ ID NO: 144951 - RNA, 86 nt, Homo sapiens
ggacgcgcccgggacgcgcggcggcaccgggaggccgggccgagcggaaaccagcaggggagcagcaggacacgggccaccaagag

SEQ ID NO: 144952 - RNA, 71 nt, Homo sapiens
caccagcagggaaggagaagagagcaagaaagcaccgcaaggcagagggcagacagacacaggagccgaaa

SEQ ID NO: 144953 - RNA, 83 nt, Homo sapiens
ggaaaagccgccgagaacccgacaggagcccccgccccagccgggggaggagaagagagggacagagaccggaaacaaaagag

SEQ ID NO: 144954 - RNA, 69 nt, Homo sapiens
ccagagaacagcccccacgcagcccagaagcaggagcgagaacccgagcagcgccagagcaacacaccg

SEQ ID NO: 144955 - RNA, 35 nt, Homo sapiens
cagcggccggacgcagaaacccccgaaaaaggcag

SEQ ID NO: 144956 - RNA, 83 nt, Homo sapiens
acccgaaaccgaggcgcgggagccgcaccaccaacgcggccgacaacagccggcgccgccacggaggagacacacagccccag

SEQ ID NO: 144957 - RNA, 55 nt, Homo sapiens
cggcaagacaacaagacggaaggccacacaaaagaacacgaaagacaccagcccg

SEQ ID NO: 144958 - RNA, 76 nt, Homo sapiens
cacgaaggcaggaagcgaagaaaaggacccagaaagcagaaccggaaacacccgagcagaagaaccaacgaaagca

SEQ ID NO: 144959 - RNA, 55 nt, Homo sapiens
gaaccgcgcgcgcaacccccggccggacgcgcagaagaagcccacccagaacgcc

SEQ ID NO: 144960 - RNA, 74 nt, Homo sapiens
caaaacgagggagaacacaccgagccagcagcagaaacagaaggcaccgcagacacccggcgggcgagcgaggc

SEQ ID NO: 144961 - RNA, 69 nt, Homo sapiens
cgaccagagcaggcgggcgccaggcccagcagcccagaaggacccagagggaagacagaaggaagcaaa

SEQ ID NO: 144962 - RNA, 77 nt, Homo sapiens
agacacgaaccagacacagaacgaaaaggagggcccgggcaaccgggggagcaaagcgcaggacaagcgagcacaaa

SEQ ID NO: 144963 - RNA, 71 nt, Homo sapiens
caggagccgggccagcaagggcgggcaacccggcggaacggaagagacccagacgaagagcgcacagaaag

SEQ ID NO: 144964 - RNA, 72 nt, Homo sapiens
ggccaccacagaaacaaaagcaacaaagaggagcaccgggcacgggccaccgggaaacgaccggaccgccca

SEQ ID NO: 144965 - RNA, 71 nt, Homo sapiens
gaacgaaaggcacgaagggaaaagagccgagggacaagacaacaaacagaagaagagacggagcaccgcgc

SEQ ID NO: 144966 - RNA, 77 nt, Homo sapiens
caaggaagcacaaaggcaacgggaccaaagagagaagcccacaggccaagcggggaagacccccagagggaagcagg

SEQ ID NO: 144967 - RNA, 80 nt, Homo sapiens
agcgagggcggccgcgccggcccaggacgaggaacagcaaacaggaaaaagggcgacccgaccaggcggagaaggaggaa

SEQ ID NO: 144968 - RNA, 83 nt, Homo sapiens
ggcgcaaacaacccggaccaagagcaaacgcacaaaaccaaaccgaacgagaccaaaccaaggaggaaaggaacacagaggag

SEQ ID NO: 144969 - RNA, 77 nt, Homo sapiens
gcacagccaggacaccggaaccgggaaaggggaaagaaaggcaaagcgagcaagagggagaccaaccaggcgggaaa

SEQ ID NO: 144970 - RNA, 78 nt, Homo sapiens
gcagccgaacgcggaccagggacccgcgaaagcggggcacaggcgggcacgcgcccagcgggacaccgggcagagcag

SEQ ID NO: 144971 - RNA, 84 nt, Homo sapiens
aaaaccggaaggaaacgggcagccgcccggccgccgcaagcagggaaagaacacagggggccagaggcagccgacccgaccagc

SEQ ID NO: 144972 - RNA, 74 nt, Homo sapiens
acagaaacaaaagcaacaaagagggacggacacaagcccacacgccagccaggaagaaggaccagccagcccca

SEQ ID NO: 144973 - RNA, 74 nt, Homo sapiens
acaacagcaaagaagacaggaagggacggaagccaagccagaacgccacgggccgccccagaccgagcgaagcc

SEQ ID NO: 144974 - RNA, 72 nt, Homo sapiens
gaccgaccacagggaaaacaacaccaagaacaggccggaaaaacagaaggaccaagagccagcccagacccc

SEQ ID NO: 144975 - RNA, 62 nt, Homo sapiens
ggcgggccccgagagcagcagcggcagccggcgaggggggagcccagcaggagcgggaaaac

SEQ ID NO: 144976 - RNA, 83 nt, Homo sapiens
gcgcgggcaggcgggaggcaacggagcaccagccgcgagccaaaaagcgcaggcggcagagggagacgaaaaggagcagccgc

SEQ ID NO: 144977 - RNA, 74 nt, Homo sapiens
cggcggcggcggcggcgcagcagcggacggccaggggagagcgaggccgagcccgcgcagggagcgcccaaaac

SEQ ID NO: 144978 - RNA, 76 nt, Homo sapiens
caggagcacaaaaggggggccgggaccagagaagcggacagcaagcgcccacgaccccccagaaacaacaccgacc

SEQ ID NO: 144979 - RNA, 68 nt, Homo sapiens
agaaggaccaagaaccagaggagcaagaggggggggcccccccgaagaaaggaaccggggagcggcga

SEQ ID NO: 144980 - RNA, 79 nt, Homo sapiens
acggaacagcgaggccagcaggagacggagccacggagcagcgcccacagcagggcagcacaaggagaagggcgcagac

SEQ ID NO: 144981 - RNA, 74 nt, Homo sapiens
gcggggggcgggggaggcgagcgcgccgcccggagccgcgcacacggggagaagaaccaaggacaaacagagcg

SEQ ID NO: 144982 - RNA, 60 nt, Homo sapiens
ccggggacggcacccagaggaccaggcggcggcaaaagcagcgcggagggagagacacca

SEQ ID NO: 144983 - RNA, 76 nt, Homo sapiens
ccacgcacacacggcgcccggccggggcgccacggccacggcgcggcaccggggcgccggcaagaacacgagacac

SEQ ID NO: 144984 - RNA, 59 nt, Homo sapiens
gcgcaggaggagccgaggcgagccaacagcacggggggccgaagaagccagggggagga

SEQ ID NO: 144985 - RNA, 89 nt, Homo sapiens
gccaggaccaccagccagcgggaaaccagcccagagaagacgggagcccccggggcccgcccagcaagccagcgccggacccagggggg

SEQ ID NO: 144986 - RNA, 68 nt, Homo sapiens
aggaagccagccagacccaccaagccccagaagccacagacagcgagcagaagaaaacagaaaaaccc

SEQ ID NO: 144987 - RNA, 78 nt, Homo sapiens
cggacacaagcaggacgccccacacacggaccgcacggaccggccgcccaggccaaccacccacggcacgccaccgac

SEQ ID NO: 144988 - RNA, 38 nt, Homo sapiens
gagagagaagagagagagaggaaaacgagaggaagggc

SEQ ID NO: 144989 - RNA, 70 nt, Homo sapiens
aggcgcgaagccacacacagggcccaggacagaaggcgggcaaggagcgccccccgagcaccccccacag

SEQ ID NO: 144990 - RNA, 66 nt, Homo sapiens
agccagggcagcaggcgggcagaaaggcaggcacaaggcgcggccaacagagacaggagaaagaga

SEQ ID NO: 144991 - RNA, 64 nt, Homo sapiens
accgagaggaaggaccaagggccacaaagaacagagaacgaagcgaaagaaaacaagaagcagc

SEQ ID NO: 144992 - RNA, 59 nt, Homo sapiens
agaaggaccaagaaccaggcgcggaggaccacacccacaagagcccaaaggaaacgccc

SEQ ID NO: 144993 - RNA, 80 nt, Homo sapiens
aaagagaagacagccaggaagggagacggggcacgcccagagcaggccgccagcccgcggagaggagccccggccggagg

SEQ ID NO: 144994 - RNA, 73 nt, Homo sapiens
agaaggacgacgccggcgcgaacaaaaaggggagccccccagacccgaaaggagacaagaggacagccgcacg

SEQ ID NO: 144995 - RNA, 58 nt, Homo sapiens
gaaccgcgacccagaacaacgcaaaggcgcaagggccacgccggaacaccgggcgacg

SEQ ID NO: 144996 - RNA, 62 nt, Homo sapiens
gccgcgccgccgccaccagcccaagagaaagcaagaggagccaggagcacggggggaacaag

SEQ ID NO: 144997 - RNA, 74 nt, Homo sapiens
agccagaccaagaacaaccgcggacacggagaggaagggagcggagcgcaagaagaaggccgggggcacgccgc

SEQ ID NO: 144998 - RNA, 75 nt, Homo sapiens
gaacgccaaacccaagggggagagggagaagccgacagaacaaggccccccacccgccagcagcccgcccaggac

SEQ ID NO: 144999 - RNA, 89 nt, Homo sapiens
ggcgaaggcaaggcacaaagcccgacagggcaacacccgacaaaggagaagaggcgaaagaagagggaaaagacgagcaggagaagaaa

SEQ ID NO: 145000 - RNA, 68 nt, Homo sapiens
aagaaggaaagaggcaaacaaagagaggcaaggcagcacgacaaaggaaacgaaagagcccagacacc

SEQ ID NO: 145001 - RNA, 81 nt, Homo sapiens
gcaagcccagcacacacaggggagaaagaaagggggagaccgagaaagaaaagaaagaaaacaagggaagcaaagagaagg

SEQ ID NO: 145002 - RNA, 75 nt, Homo sapiens
aggagggggcgcgcagccacagacccaggagcgagaacccacaagacagagggcacgaagaaaaggaaagcacac

SEQ ID NO: 145003 - RNA, 75 nt, Homo sapiens
gaaaaagacccacaggcgcaagaacacaccagcgggcacagcacagcagggaggcgagaagagggaaaaggaacc

SEQ ID NO: 145004 - RNA, 79 nt, Homo sapiens
ccggaaggcgcgggcaggagccggcgaggagcaccccccgccggaaaggggcgaccgacggaagaaacaggagacagaa

SEQ ID NO: 145005 - RNA, 70 nt, Homo sapiens
aagagaccaggaagaaagaaaaacacgggacaggaccgagacggcagcagaacggaggggcgacaaaacg

SEQ ID NO: 145006 - RNA, 107 nt, Homo sapiens
gccggcaccgccaccccacaggcccccaccaggccgcggcagacacacggcagggaaccccaccccggaaggcggggacacagacgagaacacgaagaggacccggg

SEQ ID NO: 145007 - RNA, 81 nt, Homo sapiens
ccaaggcgaacagaaaaccacagggaagggcagacaggaacgacacgaagcagaggagccagacccaaagcccagacacaa

SEQ ID NO: 145008 - RNA, 74 nt, Homo sapiens
ccccggccggaggcaccagcggaccaaaccggaaaacagaaagaagaagcacaccagacacagaggaacagcaa

SEQ ID NO: 145009 - RNA, 59 nt, Homo sapiens
gaccgagacgggcaaccaacaagaaacagacacaccgcacagaccccaacaggaacccc

SEQ ID NO: 145010 - RNA, 70 nt, Homo sapiens
ggaaggaccaaacgaaaggaaacgacaaagcaaggagcaaaggagcagcaaaagggggacaagccaaagg

SEQ ID NO: 145011 - RNA, 69 nt, Homo sapiens
ggaaagcagcccgaaaagaagggccagcggaccaaagggagccacagcacagcagaggggaaagaagca

SEQ ID NO: 145012 - RNA, 76 nt, Homo sapiens
gagacgcggcggacaacgacaaggacccagagagggaccagggccaaagaagagccggggggcaggcggacagcaa

SEQ ID NO: 145013 - RNA, 58 nt, Homo sapiens
gaacgcccagcggagggagagggcgacacaacgaaaccagcaggaccaaggccgagcc

SEQ ID NO: 145014 - RNA, 62 nt, Homo sapiens
gcgaggcggcgcggccaggccaccccggggagccaaccaggaacgcacaccagcaccagccc

SEQ ID NO: 145015 - RNA, 71 nt, Homo sapiens
ggggaggcgaacagccggcgcccggacgcgaggggggaggcagacggcagaaaacagacgaagcaacagcg

SEQ ID NO: 145016 - RNA, 66 nt, Homo sapiens
gggacacacccaagcacggaccaaaggaacaaagagcagaggccagcagccaccgacagcccgcgg

SEQ ID NO: 145017 - RNA, 78 nt, Homo sapiens
agcagcgcccgccgccccccgaaccaggacgcgacagcacagccgacacccccgggaccgaaaagcccgccgggaccg

SEQ ID NO: 145018 - RNA, 72 nt, Homo sapiens
gaaggaccaagaaccagggggagaggcaccagcaacagaccaaccgcagcaagcacagagacaggaagcccg

SEQ ID NO: 145019 - RNA, 80 nt, Homo sapiens
ccaccaaaacggaaccccccgaagcgagggaagggcggacacaccgccagaagcggacccagaagaggggagcagcaagg

SEQ ID NO: 145020 - RNA, 70 nt, Homo sapiens
agcccccccggcgggcacagaggaacacaccccaaaacggcccacgccagccagcaggcaacaggcccag

SEQ ID NO: 145021 - RNA, 89 nt, Homo sapiens
cggaggagcggagaggagaggacgacacacaacccaggcaccaaagagccgcagacgcacagcaaccaccggacccgaaggccaccacc

SEQ ID NO: 145022 - RNA, 73 nt, Homo sapiens
aagcgagcgcaaggaggcagggccaaaccaagccgaggcccagcggaacgcccccgggagaagaagggcagcc

SEQ ID NO: 145023 - RNA, 50 nt, Homo sapiens
ccagagggcaaccccgaaagggacggcgacgggcggaggcagggcacgac

SEQ ID NO: 145024 - RNA, 52 nt, Homo sapiens
cccaagaccaagcgcgccacgcgcggcgcgccgaacacgggcagaaggagac

SEQ ID NO: 145025 - RNA, 73 nt, Homo sapiens
ggcaagcgcgcaggcgacccccggcagccaggcgcaccaggcaaaagaaaaaggcagaaagaagccggcacca

SEQ ID NO: 145026 - RNA, 60 nt, Homo sapiens
agaccaccgcccaacacaacacgcaggggggaagaagagcgcaccgaaggcacaagggaa

SEQ ID NO: 145027 - RNA, 73 nt, Homo sapiens
agcaagggaaaaagcccaggacgacagggaggcgaagagcgcaccagacagggaggaagcgcgaaggggaaac

SEQ ID NO: 145028 - RNA, 87 nt, Homo sapiens
gcgccggaggggcccaggggacggggccaccggcggagcggacccacaccccggaccgagggacgcgggcgagagcccgaaaacaca

SEQ ID NO: 145029 - RNA, 73 nt, Homo sapiens
cccagagcaaagaagaaaaggacaagagagggccgcaacggacccccgcaccggggggcccgacccccaccca

SEQ ID NO: 145030 - RNA, 81 nt, Homo sapiens
cggggggcagacaggagcccaagagcggggcccgagggaaaggacacagaggcgcgagccgggaggcacggacaagacgac

SEQ ID NO: 145031 - RNA, 50 nt, Homo sapiens
cgacacaaggaaacaaaaaccgaggccagaaagcaccacacgcagcagag

SEQ ID NO: 145032 - RNA, 75 nt, Homo sapiens
cggcgcgcggggcggcggcggagccggcaggagcggagaggcccaccaggccaggaagagagagaagcagaggaa

SEQ ID NO: 145033 - RNA, 47 nt, Homo sapiens
aaaggagagaggaccacccagaggagcaacggcgcacccccgagcca

SEQ ID NO: 145034 - RNA, 79 nt, Homo sapiens
aagcaccgacagcagcaggggaagcagcggccaggagaaaacagggaaaagcaaaacaacgaaaaaaagccgccaaaac

SEQ ID NO: 145035 - RNA, 53 nt, Homo sapiens
aacaggccaccgggccaacgaaagacagggcgaggagagaggaaccacccagg

SEQ ID NO: 145036 - RNA, 87 nt, Homo sapiens
cgggaacccggaggcccaacggggcgccccacggacgaccaggacgaaggccggcggcagccagcgcgaccaggcaacacgaagaag

SEQ ID NO: 145037 - RNA, 63 nt, Homo sapiens
agaacaggaacgacagaacggaacccgagccacccacagacaaacaccagccacggagaacac

SEQ ID NO: 145038 - RNA, 70 nt, Homo sapiens
cggagggaggggcaggaagaacacgcggggaagaagcaagcgccccaacccagcggaaacagggacggaa

SEQ ID NO: 145039 - RNA, 83 nt, Homo sapiens
cccaacaagcggcggagcaccagggcacaagacgagcacgggcagacggagaaggaagccaacaccggagccagaaagccgaa

SEQ ID NO: 145040 - RNA, 73 nt, Homo sapiens
ggagaacagaggcgagagcggcagcagcaccagcccaagagaagggcagcggagcagaaaaggaaacgaggcg

SEQ ID NO: 145041 - RNA, 68 nt, Homo sapiens
cacagacagaagcaacagccgaccagacagcacccagccaaacccaggcccgagaagaagaggaaaac

SEQ ID NO: 145042 - RNA, 53 nt, Homo sapiens
cacccagagagcccagccccgagggaggcaggaccagagaggagaagaagagg

SEQ ID NO: 145043 - RNA, 61 nt, Homo sapiens
gaccacagcgcgcggcccccacaccacacagagagcgaacgcaggaggagggagacgcacg

SEQ ID NO: 145044 - RNA, 66 nt, Homo sapiens
gacacagaaagacgagaaaaccagccacagaagaaagaacggcccgaagacccccaaagccagacc

SEQ ID NO: 145045 - RNA, 74 nt, Homo sapiens
gggcaggccgccccggaccccacagacaaagagaggacacaggagacggcaccgaggaacccgggaaaagacaa

SEQ ID NO: 145046 - RNA, 63 nt, Homo sapiens
cggaacagcgaggaaaaggagcgacagaaaagcagaaaggcagaacaccaccacacggaacaa

SEQ ID NO: 145047 - RNA, 80 nt, Homo sapiens
gaaaaggagcacggaggcacggcacggcggcggacgaacccccacaggacggagaggccgcccacggagcgcagagccaa

SEQ ID NO: 145048 - RNA, 71 nt, Homo sapiens
gaggaacaggagcaccacgagagcacccagagaagccgggcaaggagaacaacacaaaccgaggggaagag

SEQ ID NO: 145049 - RNA, 53 nt, Homo sapiens
ggacaccaagccccagcaaaggaagacacgagcaggaagccggaagcaggagg

SEQ ID NO: 145050 - RNA, 63 nt, Homo sapiens
agcaaaacacacaaagagggcagcacggggagaaccgagcggaaccacaaacagcagacgcac

SEQ ID NO: 145051 - RNA, 82 nt, Homo sapiens
ccccaagacaaaccaagggcgggggggcacaaggggggcacgagcgaaggccagcggcaccgacagggacaccaccgaaccc

SEQ ID NO: 145052 - RNA, 79 nt, Homo sapiens
ccaacaccagggaagagacacacccagccgaaagaaagacccaagcgcacacgacaaggaagagccgccgagcggaggg

SEQ ID NO: 145053 - RNA, 72 nt, Homo sapiens
ggcaaaaggaagcaaaacgggggacagccaggcagacgccaccagagagaaacagcggaaaaaaaaggagcc

SEQ ID NO: 145054 - RNA, 74 nt, Homo sapiens
gaagggcgaggagacgggcgcacgacagacaccccaaacaaagcaggcccagcggggcgagggagaacagggga

SEQ ID NO: 145055 - RNA, 86 nt, Homo sapiens
gcggagacaagaggcacagaccgcgggagcggagcaaaggccgcaccagcgccagcggagaaaaaggacagaaaacgggccccaga

SEQ ID NO: 145056 - RNA, 82 nt, Homo sapiens
gcgagcgagggggggcgcgccggaaaccggagcgcgcagcagcccgagcgggaagaagccgcagcaagccgcagcggcgcgc

SEQ ID NO: 145057 - RNA, 81 nt, Homo sapiens
aacaggcccgacccgaccccaaaagagacggacgcacaggaaggaaaaagagcacccacgggccagaaaacaagacgaaga

SEQ ID NO: 145058 - RNA, 58 nt, Homo sapiens
cgcagggcgcccccgagggacgaggccacagcagaaaaaaccgggaggaaaaacgaaa

SEQ ID NO: 145059 - RNA, 77 nt, Homo sapiens
cagaagggaagacagaaggagaagaaagaaaaaccaaacacacagaggcacacccagaagccacaggagaagcaaga

SEQ ID NO: 145060 - RNA, 77 nt, Homo sapiens
caacagcccaggccgccgacgcacgagaagaacccgaagagcccaagcagccaagaaaaaggcaaaaaaaaagcagg

SEQ ID NO: 145061 - RNA, 76 nt, Homo sapiens
cacggggaagcgcaaaaacaagacggggcgccccacagaggggcgacggggagacgagcagcaggaaaggaacacc

SEQ ID NO: 145062 - RNA, 78 nt, Homo sapiens
cggcaccagccgcccagacaccaggggagcagcgcagacagagccaaggagggaccccaagaaagcaagcaagaggag

SEQ ID NO: 145063 - RNA, 81 nt, Homo sapiens
agcggacccggggaagaggaggcggcggaggccaggaaaagcaccaaaggaccaaggaagaacggcagccaagacagggag

SEQ ID NO: 145064 - RNA, 79 nt, Homo sapiens
cccaagagcggaacacagccagacggacgacggggaaccccgccaagacaagaaagggggccgaagggggacacaccgc

SEQ ID NO: 145065 - RNA, 69 nt, Homo sapiens
gcgggaaagccacgggaaaagagcgccgaacacaccaaggagcggaaaaaacggagaacgggaacagac

SEQ ID NO: 145066 - RNA, 70 nt, Homo sapiens
ccagccacggacacgaaaacaagaggggagacggacgagcaagcgccggaggaagagcggaaaaggcgga

SEQ ID NO: 145067 - RNA, 76 nt, Homo sapiens
ccccggcccccccaccagaagcccaggcaccaaccagcggacacacggaaaagggacgggaaaagccgagaaagag

SEQ ID NO: 145068 - RNA, 81 nt, Homo sapiens
cgggcagcggcgaggggacggagccggacaggagccgccgccgccaacaggcaaaccgacaccagcgacacaagcgcgagg

SEQ ID NO: 145069 - RNA, 73 nt, Homo sapiens
gccacgaggaacaaagacagcccaccaggaagagcgaaaaggccacgaggggccaaggcgaccacaaagcgaa

SEQ ID NO: 145070 - RNA, 57 nt, Homo sapiens
agaaaaagccgagccgaaggacaagccaacacaaccaggacaagccgaggaaaggag

SEQ ID NO: 145071 - RNA, 71 nt, Homo sapiens
gggaaggaagcggaaaacagcacaaaacccagcaacagaacaagagcgggaccagcaccgccgaagggaac

SEQ ID NO: 145072 - RNA, 64 nt, Homo sapiens
aggaggaaaccccacccaaccagaagcagaagaggaaagaccacagcaagaccacgcccccagc

SEQ ID NO: 145073 - RNA, 57 nt, Homo sapiens
gaacaggggagagaggaacagagcaccggggcgcacaagaccccacacagagggccc

SEQ ID NO: 145074 - RNA, 83 nt, Homo sapiens
gaggccaggaagacccagggcggaaaggaagaggagacagagggccgagaaggacaggacaggagcgccaaaaaagagggggc

SEQ ID NO: 145075 - RNA, 45 nt, Homo sapiens
acgcagggcgcccccggcacccagacagggggcaccggggcaccg

SEQ ID NO: 145076 - RNA, 71 nt, Homo sapiens
aggaccgcacccgcggagacggacgcccgaaacgaacggagaggaaaccaaaaccaggacaaaagcagcga

SEQ ID NO: 145077 - RNA, 38 nt, Homo sapiens
gggggacgggcagaaaaacagaccgcccggccgacacg

SEQ ID NO: 145078 - RNA, 76 nt, Homo sapiens
agcgcggagccaccgggcaccaaagggaccgcagcgccccgccccagacgagcagagcacggcagacgaggcccac

SEQ ID NO: 145079 - RNA, 84 nt, Homo sapiens
cgaaagcgggcccgggagacccaggcgggacagagggagccaggcagagcgagcccggacggccacgacgggcgcggaggcagg

SEQ ID NO: 145080 - RNA, 74 nt, Homo sapiens
cgcccccacccgcccgagccgggagcacagcagaagccgaggagacgaccaaacggcacgggaaagacccaccc

SEQ ID NO: 145081 - RNA, 85 nt, Homo sapiens
ggaagaaacccagacagacgccggggaggcagcgcgggacccagcccaggcggcgcggacggggcggaggggaaagaaaaagagc

SEQ ID NO: 145082 - RNA, 78 nt, Homo sapiens
ccgggccaccgccgccaggcggacaaaagcccgccaaggaacccgcggggcagaccacaccagcacacccagcacggc

SEQ ID NO: 145083 - RNA, 86 nt, Homo sapiens
cagcacgggaagaagagcgccggcggagcccccggcacaccaaaagcagcagcagggacaaacaaccaccccagcggcacgagcag

SEQ ID NO: 145084 - RNA, 68 nt, Homo sapiens
cgggccccagcgccaaccaaaccgaaagccagaaggacaagggagagacagagcgacagagagaaaac

SEQ ID NO: 145085 - RNA, 84 nt, Homo sapiens
gaaaggaggaggcacagagaccccccaaaccccccaccgagcggagccgagccggagaagaggggcgcgacaccaggcggaggc

SEQ ID NO: 145086 - RNA, 68 nt, Homo sapiens
gacaggaggagacaggcgagagaggaggacacgaccggagcaaagaagaacgaggcagcacaacaaaa

SEQ ID NO: 145087 - RNA, 74 nt, Homo sapiens
gaagagaacccccaccgggaccaaacggagaaaggcgcagaagagcaagaccgaagacaacaaaagaaaacaaa

SEQ ID NO: 145088 - RNA, 70 nt, Homo sapiens
ccccccgcagcacccagccggccacggccgccaggcacagagaaggcaaacgggagggcgaggacaccaa

SEQ ID NO: 145089 - RNA, 83 nt, Homo sapiens
cgccacaagaaggcccaggacaagaggcaagcccgagaccgaggacgagaagaagcgcgaggaaggcaaagggcggaccgcag

SEQ ID NO: 145090 - RNA, 43 nt, Homo sapiens
gagagaagcgcggagccccaaggagaggagaggcagcagcagg

SEQ ID NO: 145091 - RNA, 83 nt, Homo sapiens
ggagggcggacgggagggagggcaggaccgccggcacacaaggcccaggggacacccagcaggccagggaagaggcagcccag

SEQ ID NO: 145092 - RNA, 75 nt, Homo sapiens
agaaggcacaggaaaccagcggcgagagagagcaggaagagaaaccacgaggagggaagccagcacccgggccag

SEQ ID NO: 145093 - RNA, 76 nt, Homo sapiens
cgccgacacggggccacggggcccacaggacggggagacagcagcaggaacacagccaccggccacgggccaagcc

SEQ ID NO: 145094 - RNA, 86 nt, Homo sapiens
ccacacgccgccgcggcgcagccagacgggcccgggacacccagacagagagagcgcacgaagaagggcggaggacaaggagaagg

SEQ ID NO: 145095 - RNA, 71 nt, Homo sapiens
cgcagggcgcccccgggaacaaagagcagaggccagcagccaccgacagcccgcggcgaggaaaagcccag

SEQ ID NO: 145096 - RNA, 78 nt, Homo sapiens
gaacgccccgcagccccacccccccgccagcccagccagggagccaaagaagaccagcgggagccacgaagggccacc

SEQ ID NO: 145097 - RNA, 72 nt, Homo sapiens
gacgggaaaagagagaaggacaaggacggagagaagagacagagggacagaacacaggaaaaacaaacacgg

SEQ ID NO: 145098 - RNA, 76 nt, Homo sapiens
cgagcgagggggggcgcgccggaaaccggagcgcgcagcagagaccaagagggccggaagagacaaaggaacggac

SEQ ID NO: 145099 - RNA, 83 nt, Homo sapiens
gaccgccaggcaccgagaagacgggcaaggagccgcagccagaggaacagcggagcaagagaaccagcaacgaaggagggggc

SEQ ID NO: 145100 - RNA, 71 nt, Homo sapiens
cagaaaggcccggacaggaggacacgacggaggcgcaggaagaagagacacgaagagcacggagcggaaga

SEQ ID NO: 145101 - RNA, 72 nt, Homo sapiens
gggaggaggaagagacccaagagcccaacgagaaaaaaccgaagagagggcacaacagaaccagaaaaccaa

SEQ ID NO: 145102 - RNA, 75 nt, Homo sapiens
accagccaaaaagcaagagccagaggacagaaagcagagcaccccacccaccacccgaaacagagcggaaaccag

SEQ ID NO: 145103 - RNA, 82 nt, Homo sapiens
gggagcgaagcgagggcgaagcacgacacagaaggggaggggagggaaaggcccaggaaaaaggcaaccaagaggccccgaa

SEQ ID NO: 145104 - RNA, 76 nt, Homo sapiens
cgggggcagggcaaaacacacagcgagagaaaggcaagcagggcgagagagcacaccacccgggcaaggaaggaca

SEQ ID NO: 145105 - RNA, 77 nt, Homo sapiens
aaaaagaagggagaaaaaaggaccagagccagacacgaagccgaacacccaacaagaaggcaacgacaaacagccaa

SEQ ID NO: 145106 - RNA, 82 nt, Homo sapiens
aacgcaaggacccacacgggagcggggggggcccggaaccgagccccgacaggcagacgaggcagaggacaacagcaaccaa

SEQ ID NO: 145107 - RNA, 72 nt, Homo sapiens
gagacggggagagcggccgacaccgggaaaaagcaaaccaaagaagcaggacacaagaaaagaaaaaaccgg

SEQ ID NO: 145108 - RNA, 83 nt, Homo sapiens
ccaacaacccgacggcggaaggccccaacacccggagcagcgccacaagggacaggcaacgggccgacaagaaagccgaggcg

SEQ ID NO: 145109 - RNA, 79 nt, Homo sapiens
cggcgggacaccgagcccggggaggggccccgcgagggaccggagggccggaagcgggccgggacaacgggcaggagcc

SEQ ID NO: 145110 - RNA, 55 nt, Homo sapiens
ccggcccagccacgacagcacgcggcagggccgaagcaacaagaagcgaaaaccc

SEQ ID NO: 145111 - RNA, 62 nt, Homo sapiens
agaccaggcccgccacaccccggcgccggaaaggcagccaaaggcagagaacgagccgaccc

SEQ ID NO: 145112 - RNA, 79 nt, Homo sapiens
gaaccgggcagcaaggacgcgggccaggacaggacaggaccggacagcccccagccagaggacagaccccaccacgggg

SEQ ID NO: 145113 - RNA, 73 nt, Homo sapiens
cgagaagccaaaccgaagagcagccccccgcccgaacgcagggggaaagggagaaaagaagcagcccacgaac

SEQ ID NO: 145114 - RNA, 70 nt, Homo sapiens
gaacaacagcacggaacagagaaaacaggaccagcccaagccaacacacaggaccccgcgcccacccaac

SEQ ID NO: 145115 - RNA, 73 nt, Homo sapiens
gaagggcgcagaccaaaacccagccccagcacggaggagaggacgcacagacacggggccagccagaacaacc

SEQ ID NO: 145116 - RNA, 62 nt, Homo sapiens
gggggcggagcggagcacacggaggccggagaagcaccaacagaacgccaccggcgaagcgg

SEQ ID NO: 145117 - RNA, 68 nt, Homo sapiens
gaaccacgaagaaacaccacaaaccggacggccaaccaaccaggacaagcgagccagcagggaaaccc

SEQ ID NO: 145118 - RNA, 76 nt, Homo sapiens
gcgagagagggaagcgcccggccagggacgaaaaggagcagcgaggaaggacaacaaaagaccgaaaagaagaagg

SEQ ID NO: 145119 - RNA, 58 nt, Homo sapiens
aagaaggcccaaaccagccagagcggaggagaaggacgggacgcgagagcggaaaggg

SEQ ID NO: 145120 - RNA, 80 nt, Homo sapiens
aagacggcgcacacgcacccggagggcccagcggagacagcccgaagggaggaacagagggaagcgcggcgcgcgcaccg

SEQ ID NO: 145121 - RNA, 68 nt, Homo sapiens
acagggacaaaccacacaaccagcacggagaggaaaaagaaggagagggccggacacaaagggcaccc

SEQ ID NO: 145122 - RNA, 93 nt, Homo sapiens
cagccggaacggcggaccgggacgcacgccagcgaggaggacccccaaaggaaggcaacagcccccaggggagcaaccagggagcaaaacaca

SEQ ID NO: 145123 - RNA, 55 nt, Homo sapiens
cgcaccggagcaaaggaccagccagcgcggcaacagggaccaaggccaaaggagg

SEQ ID NO: 145124 - RNA, 68 nt, Homo sapiens
agcgaccccgaaaaaaagaggagcccgcaagaggccagcgaaaaccgaagaaggaccaacaagagccg

SEQ ID NO: 145125 - RNA, 67 nt, Homo sapiens
cagggcagacagaaaaagggacgagagaaccaaaacaacgcaaaaaaccggaaaagggggaggcaag

SEQ ID NO: 145126 - RNA, 79 nt, Homo sapiens
gaggcacgagagccccccacacagccacacagacaccgccacaggagagagcaaggcacagcccaaccaagcggagcac

SEQ ID NO: 145127 - RNA, 75 nt, Homo sapiens
gggaggaagacagccgccaggcgccacacggcaagcccgggagagcagccagacaggggccagagaacaagccca

SEQ ID NO: 145128 - RNA, 72 nt, Homo sapiens
gccgccgccaagcccggcccggcccgacaccgcgggccgccagacgggaagggaaacgccaagagcgagcgg

SEQ ID NO: 145129 - RNA, 38 nt, Homo sapiens
cgggggcgccagaacacccaggagagacaaagcgaaag

SEQ ID NO: 145130 - RNA, 81 nt, Homo sapiens
agacgccgagaagcagaggccccgagcccggaccgacaggaaagaaggagcccacaaagaaaagaacaccgccagcagcca

SEQ ID NO: 145131 - RNA, 54 nt, Homo sapiens
cgagcagagagcaccagccaaaggaaaaaagaggccccagacgacccgacccca

SEQ ID NO: 145132 - RNA, 90 nt, Homo sapiens
ccgaaccgcccagcgaaggagcccacaggcccaccccacaaggagaccaggccaagggaggcacagcgagaagggaaggaagcccaggag

SEQ ID NO: 145133 - RNA, 80 nt, Homo sapiens
agaaaggggccgggggacggaggagccccggcggagaccacgcaaggccacagggaagaaccgaagacccagaacaggca

SEQ ID NO: 145134 - RNA, 67 nt, Homo sapiens
ccgggagaggcaccaaacggccgggggcccgagaagcccccagggcagcagggcgacagcaagaagc

SEQ ID NO: 145135 - RNA, 69 nt, Homo sapiens
gcaccgggaaggcccgcagcacacaccagaagaagaagaaggggcacaaagacacgaagaaaggagcca

SEQ ID NO: 145136 - RNA, 59 nt, Homo sapiens
ggcgagcggggggacgccggcggagacgcgggcgagaccaggccggacaccccaaaagc

SEQ ID NO: 145137 - RNA, 78 nt, Homo sapiens
agaaggcggagcgaggggaaagcaggggagcacccgcgagggcccaaccccggacgcagaggcgacccgcggcgagag

SEQ ID NO: 145138 - RNA, 79 nt, Homo sapiens
gccacccgaccacacacaccaggaaaaaggacgagcagggggagaagggaagcgccaagaagcaacaagcacaggagga

SEQ ID NO: 145139 - RNA, 63 nt, Homo sapiens
aggagggccccaacggaagccaggagccgaagccaaggaaggaggaagcaccggagcaaaacg

SEQ ID NO: 145140 - RNA, 88 nt, Homo sapiens
agcagcgccggggacgggagcagagagggagacagaggagcacacagaccgaggaggggacacagggggcccacgagaagagcaggcg

SEQ ID NO: 145141 - RNA, 64 nt, Homo sapiens
cggaacaagcaaagggaggacccgaaaaccccgagaggcaaccaaaaaaacggaggaggagagg

SEQ ID NO: 145142 - RNA, 60 nt, Homo sapiens
gcccacaacccaaaaacaaaagggagaacccagccagcaacagacggagccgagccacgc

SEQ ID NO: 145143 - RNA, 66 nt, Homo sapiens
ggccggccccagccggacgcgagaacccagaacggccaaggaggcacgaggaaagccagaaagggg

SEQ ID NO: 145144 - RNA, 62 nt, Homo sapiens
cgggccggcagagcggccaaccacgccgggcagaggaacccgcgggcacagaaccgcagcca

SEQ ID NO: 145145 - RNA, 77 nt, Homo sapiens
ccgcccccaggaccccagggagagcgggcagccccaggggacaggaaacagcaaacgacacagaagaacagagccag

SEQ ID NO: 145146 - RNA, 79 nt, Homo sapiens
aaacccagcgagaccgggccggaacgaaagcaggacggaggagcgaccaccggggagcgcggccacagacgcacaggca

SEQ ID NO: 145147 - RNA, 87 nt, Homo sapiens
acccagccaggaccgcgcggacccagcgagagcaagaccgccgcgcaggaggagaaggcagagcccccccaggcagaagcccgagcg

SEQ ID NO: 145148 - RNA, 72 nt, Homo sapiens
aaggaccagggggaggaggcgaacagacagacgcaacaaaagaggaacgaagaaagacagaacgcgggagag

SEQ ID NO: 145149 - RNA, 48 nt, Homo sapiens
agagggaagcaaagagggcaggcagaaggcaaaggaaaacaaaaggag

SEQ ID NO: 145150 - RNA, 62 nt, Homo sapiens
aggaggccaggacggagagggagaagcccaagggcaagaaagccccacaccgggcccggggg

SEQ ID NO: 145151 - RNA, 71 nt, Homo sapiens
gaccagaaggagcccaagggcaggaaaggagggcgaaacacaagcaccacccccggaagcaccaggagcca

SEQ ID NO: 145152 - RNA, 72 nt, Homo sapiens
gaggcccaagacccacaacaaaagagaaacagccccagaagggagaaggcaccccacaaagcagaagcaccc

SEQ ID NO: 145153 - RNA, 123 nt, Homo sapiens
ggcagggcaccgcgcgaagcggccaaagccgcccagacggccaccggcgggaggaacaaaaggagagccaaaggaggcacgacagcagaggaagagaagcagcgaagccgaggcacagacccc

SEQ ID NO: 145154 - RNA, 77 nt, Homo sapiens
ggggcaccgcgcacgcaggccagcgcaggagaaaacgaaacccggagagagacgagccgaggggggaagccgaaacc

SEQ ID NO: 145155 - RNA, 74 nt, Homo sapiens
gaggcgcgccagccccggcgccgccgcagcggccgcgcgcagcacgcgccgccggcagagacagggggaacaag

SEQ ID NO: 145156 - RNA, 80 nt, Homo sapiens
caccgcacaacaagaggccggcggggcgacagccggcacggagaaggcgaggcaaggcccaacgcagaccaacacccccc

SEQ ID NO: 145157 - RNA, 113 nt, Homo sapiens
agaaaaaagagagagaaaaaggacaaaagccaagaggaggacagcgcacacagcaagcacgagacaacgaagagaggaaagaagcggaaaggagggagcacacaacaaggagc

SEQ ID NO: 145158 - RNA, 77 nt, Homo sapiens
gaaacaaaagacagcacaaagaagccgagacaaacggcaccaagaggagagacagagagaggagaaagcggccaacc

SEQ ID NO: 145159 - RNA, 72 nt, Homo sapiens
agagacccacggccacggccagaggaccccaaggggcaaggccaaagggcaccgggacgagcaaaccaggaa

SEQ ID NO: 145160 - RNA, 71 nt, Homo sapiens
gcaaagcccacagaggccaaggcaagccagagaacacccgccgcgcaaaaggaaaacggacgagaacaagc

SEQ ID NO: 145161 - RNA, 72 nt, Homo sapiens
acgaagcggaccgagaagaccccgaccggagcagcggagccgcggaagagggaaagcagaagagacccgcag

SEQ ID NO: 145162 - RNA, 69 nt, Homo sapiens
ccccagcaacaaagagcgagggaagagccaggccagggcccaggcgacccaggacaagacacgagacca

SEQ ID NO: 145163 - RNA, 74 nt, Homo sapiens
aagagcaggaaaaggagcagagaggggcagccaggacacacagacaaggcagaaacagaggcgggccgacaaga

SEQ ID NO: 145164 - RNA, 72 nt, Homo sapiens
aaggacagggaaaaaccacacaaaaggggccaagaaaggcgcgcgcggagaggaggccacgcccaggcggag

SEQ ID NO: 145165 - RNA, 82 nt, Homo sapiens
cgagcacagagcccgccgccgaccgccgcccgccacacccgccgccaggcacagagccagccgaaaaacccaacacgagaaa

SEQ ID NO: 145166 - RNA, 73 nt, Homo sapiens
ccgcaaaaccagcaagagaggggaccagagagcagccgggaaaaggggaaacacaagaccaaggaagaggagg

SEQ ID NO: 145167 - RNA, 59 nt, Homo sapiens
caggccaccacagaaacaaaagcaacaaagaggcagagcaacacaccaggaagcagagc

SEQ ID NO: 145168 - RNA, 31 nt, Homo sapiens
acacggaccgagagaggagcaaagacacagc

SEQ ID NO: 145169 - RNA, 72 nt, Homo sapiens
caccaaacagagcagcagcagcagagagaaacagcagagcccaaaagcaaagcagggcagcaaagaacacaa

SEQ ID NO: 145170 - RNA, 56 nt, Homo sapiens
agcacccagcaagcgagggaccgggacgccacagccagcgagacgacgggaccgaa

SEQ ID NO: 145171 - RNA, 82 nt, Homo sapiens
agggagacaaagcgaggaggcccaggagcccccaggaagcccccgcccagaacaacacgaggccaccaggcaccggacaggg

SEQ ID NO: 145172 - RNA, 75 nt, Homo sapiens
cccggagccacgacagaagaccagaacagaagagccaccagaaagaaagacgaccgggacccgccacagagaaac

SEQ ID NO: 145173 - RNA, 76 nt, Homo sapiens
aaggggaaggggccgacaaaagcgcagcaagacggccgcgcggcccgcagggagaacggaagccagagaaaaggaa

SEQ ID NO: 145174 - RNA, 82 nt, Homo sapiens
ggcggccggccgacccccgcgcgacggcgacgcgggaggccagacgggcggcagagaagagaagagcacagcgggaggaaag

SEQ ID NO: 145175 - RNA, 56 nt, Homo sapiens
ccacccacaaacaaacacccacggaaccagagacgacaccaaaaaacacagagagc

SEQ ID NO: 145176 - RNA, 51 nt, Homo sapiens
gggcagcccacagaggaaacacaacgcaagaaccacccggcaccaccaccc

SEQ ID NO: 145177 - RNA, 73 nt, Homo sapiens
acggccgcccgccgcagcggaggcaagggaacaagacaagaaaagaaccaaaaccaagacagaacacaggacg

SEQ ID NO: 145178 - RNA, 69 nt, Homo sapiens
cggcccccgggacggcccaaggccagcccgcagacaggaagggaaggggcggagacgggcggaacgcag

SEQ ID NO: 145179 - RNA, 81 nt, Homo sapiens
agccgccagccagcagcccgccagccgccgggagacaagcagaccggaagaccgacggaagaccacaccccgagggagccc

SEQ ID NO: 145180 - RNA, 81 nt, Homo sapiens
ccacaggccccaagccagaagaaacaaccgccaccggggagcgaacacagggccaaaaaggggggacgcgggcgagaagcc

SEQ ID NO: 145181 - RNA, 55 nt, Homo sapiens
cgcccaccaagagaagcagcggccccagccaccccacccggcccgcgcgcccgga

SEQ ID NO: 145182 - RNA, 81 nt, Homo sapiens
cccggggcaggggcgcaagcggcggagggaaagccccaagggagacaaagcgaggaggcccaggagcccccaggaagcccc

SEQ ID NO: 145183 - RNA, 69 nt, Homo sapiens
aggcgcgaggccgcagagcaaagggggcccccagggaggccgcacggcccacgcgagaaaaaagcgcgc

SEQ ID NO: 145184 - RNA, 51 nt, Homo sapiens
ggcggaaacaacgggcaaggaaaacgagccccacccacggccgggaagaac

SEQ ID NO: 145185 - RNA, 65 nt, Homo sapiens
cagccccagagagcgggaccacagcgaaacgaagaaagaagcggcagaagaaagaccaacagaca

SEQ ID NO: 145186 - RNA, 72 nt, Homo sapiens
cggacgagcccggcgagggacaaagaggagggaagcgcaagcaccccagaaaaagcagggcagcagcccaga

SEQ ID NO: 145187 - RNA, 72 nt, Homo sapiens
gagggccaggcagacgcagggggcccggagcagagccagcaaggcggccggggacccccgccgggaccgacg

SEQ ID NO: 145188 - RNA, 72 nt, Homo sapiens
gggggcaggacgagcagccgccgggacggccaggaacggggcgggccaagcagagacgaagaagacacgaac

SEQ ID NO: 145189 - RNA, 53 nt, Homo sapiens
caagaccagagccgggaccccagccagacccgaaacagacaccgccgcgcagg

SEQ ID NO: 145190 - RNA, 68 nt, Homo sapiens
gacaacagaacacggcccaaagagcgacaaacaccaaggaaccaccggacaaacaccggaaaccacaa

SEQ ID NO: 145191 - RNA, 62 nt, Homo sapiens
aaccgcagaagaaaaggacgaaccccagaaaacaggagaaccagccaaaaaagggcagaacc

SEQ ID NO: 145192 - RNA, 86 nt, Homo sapiens
ccaccccacgccgcccgaagccgaagaagccacgcaccgccgggccgggcgggccgaggggggcgggccgagcacccgcaggcccc

SEQ ID NO: 145193 - RNA, 56 nt, Homo sapiens
gagaagacagcgacacgccggcggcagaggacacagccagggcaaacaaaaaaagc

SEQ ID NO: 145194 - RNA, 64 nt, Homo sapiens
acaggcacacagaagaaaacaaacagcaaccaaaaccgacggagggagaggcgcacacaggaaa

SEQ ID NO: 145195 - RNA, 65 nt, Homo sapiens
cgaacaaacaaacacccagaaacaagaggcgggagcgaccccggcaggaaggcgacccaggagag

SEQ ID NO: 145196 - RNA, 76 nt, Homo sapiens
cagaccagcagcaaggcagaaccaccccaggcacccccggccggcgcgaggccagaccgagagagcgacggaaaga

SEQ ID NO: 145197 - RNA, 78 nt, Homo sapiens
gacaccaacgggaccagaaggaggaagggaaaccgaggacacagaaaaaggcaaagcagaaggagaccgaacacaacc

SEQ ID NO: 145198 - RNA, 81 nt, Homo sapiens
cgagccgggcaggaggacaccaccagccggggacgggcgcaccaggggaaggagaaaagacagcaaaacaaaagaaggaac

SEQ ID NO: 145199 - RNA, 83 nt, Homo sapiens
cgggaggcccaggcccccggacggcgcggaccccgacggcgccgggcccccgaggagcccagacagcgcagccacagcccccg

SEQ ID NO: 145200 - RNA, 81 nt, Homo sapiens
accccagcgcgcagggccgccaggggcgccggccagcgagcgccgacacccaacaagaccagcccccagcagagagcggcc

SEQ ID NO: 145201 - RNA, 55 nt, Homo sapiens
caccagcagccaccaggagcccgagagagaaggagcagaggcgaaaagaggggga

SEQ ID NO: 145202 - RNA, 119 nt, Homo sapiens
cgaaaggcgagcaaccaaacagagagaggcagcccacccccccacggggaccgcccacacagaggaagaggaaagggccaaccccggaagagaaggggaaagcagccaggccaagacga

SEQ ID NO: 145203 - RNA, 57 nt, Homo sapiens
gcacccgcggcggggagggcccgaagaggaaggagaaggaaagagcagaaaggagcg

SEQ ID NO: 145204 - RNA, 50 nt, Homo sapiens
aaggcggccccagcgcaggaaggggagccgcacggacagcagaccacagc

SEQ ID NO: 145205 - RNA, 81 nt, Homo sapiens
ccagacggaagggggcccacggacagaaggggacggagagggggcgcccaacccccgaccggaacagggaccaagcggggg

SEQ ID NO: 145206 - RNA, 68 nt, Homo sapiens
caggacggaagccgcgaacccccgaccgggagcccacggggccgggaggaagaaacccccacgcaagg

SEQ ID NO: 145207 - RNA, 80 nt, Homo sapiens
ccggcaacccaggggcggccacgaccaccaggcgccagccagaaccagagaacagcagaggcccaggaaacagccaccac

SEQ ID NO: 145208 - RNA, 76 nt, Homo sapiens
cgggggaccccaaagccccaccccacaacaagggagcaccccccgggagacacgaagcaggaaacacggcaaaaca

SEQ ID NO: 145209 - RNA, 66 nt, Homo sapiens
cacggggacgaaagaaaggaccccgacggagagacaaagaagacggagggggggccagccaccgcg

SEQ ID NO: 145210 - RNA, 53 nt, Homo sapiens
cgagaacagaaacagcgaaccagcagaggccggaagagcgggagcgggagcca

SEQ ID NO: 145211 - RNA, 70 nt, Homo sapiens
gccggagggcacacacaacacagcaacagacagaaacaccagacagcgacaggcaagccgcaggcacaac

SEQ ID NO: 145212 - RNA, 69 nt, Homo sapiens
cgcgcgaggacggaggccgcaggggggccagcccacaaaacacagccagggagaccgaaaaaacagccc

SEQ ID NO: 145213 - RNA, 82 nt, Homo sapiens
gaacccagcacgggaggccgaggcaggcggacacgagaacagagaccgaggaagccagcggaagaaggagagagacaaacga

SEQ ID NO: 145214 - RNA, 75 nt, Homo sapiens
gcaagcaccagcagggaaggagaagagagcaaggcggaacgaggagaaagcacggcaacgcccccagcgccccag

SEQ ID NO: 145215 - RNA, 79 nt, Homo sapiens
ccagaagagcggaccagggcgcgccagcaccgccaccagagcgcccgcgcgggaccccagacagaaggacagagaagaa

SEQ ID NO: 145216 - RNA, 76 nt, Homo sapiens
aggagggagcaggagcggaccggcccggaaggcgaaggaagaacagcccgccaagccgaggcgccagaagaaggaa

SEQ ID NO: 145217 - RNA, 56 nt, Homo sapiens
cgccacagcacaaacacggagaaaccggcaccgccaagccaaggaagaacggaccc

SEQ ID NO: 145218 - RNA, 70 nt, Homo sapiens
gcaacgggcaggaaggaaggaaggcaaagacgagagcggaaaaagacacaaaagccaggaagacaagagc

SEQ ID NO: 145219 - RNA, 69 nt, Homo sapiens
aaaaaaaagccaccagaaagggggagaagagggagacccgaacgaagacgcagcccagacaggaaaagg

SEQ ID NO: 145220 - RNA, 50 nt, Homo sapiens
ccgagcagaggccccagcaggagggggaagcagaccaagaagacagaagg

SEQ ID NO: 145221 - RNA, 69 nt, Homo sapiens
aacggcggccgggcacgccggaaaaggccgaagggcacgaaagaggcaagagagcacaagagaggggac

SEQ ID NO: 145222 - RNA, 84 nt, Homo sapiens
gccggggccgccaggagcccgaccgggagaggacaagaccacgagccagggcacacagaggcacgagaacggggaacagaacag

SEQ ID NO: 145223 - RNA, 103 nt, Homo sapiens
ggcaagaccggacgcggcggccaccaggggccaaaagccaccagcaggggcgacaacagcacaggagaggaacagggcgcaccacagaagagccaaagacggc

SEQ ID NO: 145224 - RNA, 79 nt, Homo sapiens
aaaagccaccgcgcgcgcccgaccgcgcggagaccggaccgcgccacaaggagagggccaggccgagggcccgcccggc

SEQ ID NO: 145225 - RNA, 76 nt, Homo sapiens
aagccgcgcggggacccgacgcccgcacggacagggcagggccgggagcacgcacccggcgcaggagcagagcccc

SEQ ID NO: 145226 - RNA, 72 nt, Homo sapiens
acgcccacagaacaccgagcgccacacagcccaaaaggaagcgagaaaagaagaaaacccaccgaccgagag

SEQ ID NO: 145227 - RNA, 68 nt, Homo sapiens
gcgcgcgcacgcgccaggggcgcagagcaggacgaaacgcacccgaggaggcagaggcagcgacagag

SEQ ID NO: 145228 - RNA, 85 nt, Homo sapiens
agccccgaggagcgggacacaggggcagagaggaaccgccacgaggagcgcaccgggcggggcccccggcaggcggaggaccagg

SEQ ID NO: 145229 - RNA, 74 nt, Homo sapiens
cggacgccacccggcaccgaccagaaggaggcccagggccgacgcggaccgcaggccagcgcgggccgccagcg

SEQ ID NO: 145230 - RNA, 71 nt, Homo sapiens
gggccggggcacagggcaacaggacggacaggaagacccccacagcaccagaggaagcgcaggccccacgg

SEQ ID NO: 145231 - RNA, 56 nt, Homo sapiens
accaaaggagccagcgcggagcaggcgcagagcagagagccaggaacaaaagggga

SEQ ID NO: 145232 - RNA, 57 nt, Homo sapiens
agacgccgcacccccgcgacacaggagcgacagacagcaccaagaagaagcaaacgg

SEQ ID NO: 145233 - RNA, 79 nt, Homo sapiens
gagggaggaacagacaccgagccagcaagcccccaacggaaccagacgccgcaggcccacgcagcggaggcggggaaag

SEQ ID NO: 145234 - RNA, 88 nt, Homo sapiens
cggagcgacggggaggcgcggccaacggggccacaagagaagaaaaacccaagccggaacacagcgagggagacgcacaccgaaagcg

SEQ ID NO: 145235 - RNA, 74 nt, Homo sapiens
gccgacagcggcaccagcagcgcgccccgaagaaccgagcggccagaggccggcccccacccgccagaggaagc

SEQ ID NO: 145236 - RNA, 82 nt, Homo sapiens
gggaaagaagcgccaagaagccaaagacaagacgcaggagaaaacgagacccaagaacacccaaagccggacgagcgggaga

SEQ ID NO: 145237 - RNA, 78 nt, Homo sapiens
gacgggagacgcagcgaagacccgggccaacgggacaagacgccccgaaccaaaaaaaccaagccgccccgacagcgc

SEQ ID NO: 145238 - RNA, 73 nt, Homo sapiens
cagcccccgagggcgggaacagaacccccacgaggaagaaaggccccggagagggaggcaccgggcacgcgcc

SEQ ID NO: 145239 - RNA, 87 nt, Homo sapiens
acaagcccgggggcaaaacccaaaaacccagaaacagaccagaaggaaaacacaccaggcacagaaaggccccccgccaagccaagg

SEQ ID NO: 145240 - RNA, 76 nt, Homo sapiens
gaaaaaagaagaagggcgacaaaggagccaagccagcagaagagacagaaagagaccagaaacgacagacgaggac

SEQ ID NO: 145241 - RNA, 54 nt, Homo sapiens
cgacacggccaaaggcccaaacaaaaagcagagcgccaccaaacgggcgggaag

SEQ ID NO: 145242 - RNA, 103 nt, Homo sapiens
cccgacaccaccacgcgcgggcggcaggcggcggcgcgggaaggaaggagcagagcggccaggcaagaacggaagcacgggcggaggaaagcacaagcagagc

SEQ ID NO: 145243 - RNA, 75 nt, Homo sapiens
cacggggagcaagacggagaagggggacgacaggaggggcaaaaaagagcgccccgcgcaagagccggaggagga

SEQ ID NO: 145244 - RNA, 109 nt, Homo sapiens
caagcaggaaaacggcgagaggacggagggggcccgacaaagcccccaagagagggacgaacacaccaccagcaaaggagccagcccgacacggggaaacagaccaaca

SEQ ID NO: 145245 - RNA, 75 nt, Homo sapiens
cacagccaaaacgacagcgagacgcgaggaaaacaaagagggaaaacggagaaaagcccccccaggccagcgcag

SEQ ID NO: 145246 - RNA, 55 nt, Homo sapiens
cgcacaccacacccgcgccgacaggccgccagggaccacggcaaaacgcggccag

SEQ ID NO: 145247 - RNA, 62 nt, Homo sapiens
gagcccgggcgcgggggcggcggcagggggcggagcggaaggcggacgccgcgggcaggaca

SEQ ID NO: 145248 - RNA, 69 nt, Homo sapiens
caacggaagcgagcagcagagagagaaagggccacagcagcccagcccaccagccggacacccgaagca

SEQ ID NO: 145249 - RNA, 76 nt, Homo sapiens
gccagaccacagcacagccgggaaggggagccaccagcccccggaccacaaaacaaaccacccaacacaagcaaag

SEQ ID NO: 145250 - RNA, 71 nt, Homo sapiens
agcagccaaaagagaaacgaggaggcgggggcagcaggccgcgaagaggccaggaagaggaacccccgagg

SEQ ID NO: 145251 - RNA, 80 nt, Homo sapiens
caggcggcgcggacggggcgggaaggacgagcccccgcggagacagcccgaagaacccgaacgcaagcggcaaccaagaa

SEQ ID NO: 145252 - RNA, 67 nt, Homo sapiens
caacgccggaccagcaaggcggcagcgcaggcaccccccgacagcggagacagacaggggccaagcg

SEQ ID NO: 145253 - RNA, 56 nt, Homo sapiens
aacaaggcaacagaaagagcaacagcagggcaacaggggcagagagacagcgaagg

SEQ ID NO: 145254 - RNA, 67 nt, Homo sapiens
gccgaggaccccccaggggcccacaaaccaacaacgaaaaaaggggacaacaccccagccacacggg

SEQ ID NO: 145255 - RNA, 87 nt, Homo sapiens
ggaaaggacgaaaaggggcggaagaaaaacaaacacacgcaaaggagaaaggaaccgacagggcacacagggaccaagaagccccgg

SEQ ID NO: 145256 - RNA, 63 nt, Homo sapiens
gaagacgaccgacccgcccagcacgaccagccagcagaaccgcaaccaggcggccacagccag

SEQ ID NO: 145257 - RNA, 87 nt, Homo sapiens
gaggagccacaaggagacgccgccgcgcccccgcggagccgaaaaaacagggaaagcagggaagaggcgggacgagaacgccacggc

SEQ ID NO: 145258 - RNA, 54 nt, Homo sapiens
cacgacaaccaccaagcgcggacgaacaggcgggaaggcaaagcgaaaaagacc

SEQ ID NO: 145259 - RNA, 82 nt, Homo sapiens
cggaggagggcaggagcgcgagaaggaaccgacggccacgccgccgaccggcaaggccgcacgcccaaagcggaaacgcgga

SEQ ID NO: 145260 - RNA, 75 nt, Homo sapiens
gggacgacaccacaagaaaagggcgcaggagagagcagacaagcaaaggcagagcagccacaggaagaaaagagg

SEQ ID NO: 145261 - RNA, 76 nt, Homo sapiens
caacaccacccacccaccacgagccaaggagcaccaggaagaggcaacgagacagcccgccccgcacccgcaggaa

SEQ ID NO: 145262 - RNA, 81 nt, Homo sapiens
cccgcccacccacccggcagcgggggcagcagagcggagccaagagcgaaggggaagaccgccggaccaaacagagggccc

SEQ ID NO: 145263 - RNA, 74 nt, Homo sapiens
gccgaaccgacacagggagcaggacaaccacccaacaaccccaagaccaagccaggacacaggaacgccacaag

SEQ ID NO: 145264 - RNA, 95 nt, Homo sapiens
gcaaaaacaagacggggcgccccacagaggggcgacggagggagccgacagcccgcaagacaagacaaaacgggcccgggcaccgaggaagacac

SEQ ID NO: 145265 - RNA, 77 nt, Homo sapiens
caaggcgcaagcgaaaacagaccgcgagcccagagggcggagaacggaaaagcaccaggaagcagagaggaccgcag

SEQ ID NO: 145266 - RNA, 70 nt, Homo sapiens
gaaggggcagaggccaagagcccaacaccacccgagagccccaaggaagaagagagggcgaaggaggcca

SEQ ID NO: 145267 - RNA, 66 nt, Homo sapiens
cccgccccggacggcagaggccgcagaagaagagcacaacacagaagaaacggcaagcaaggacga

SEQ ID NO: 145268 - RNA, 51 nt, Homo sapiens
cccgcgcaggcacacagcaaagggccaagaccaagaccccaggagagggaa

SEQ ID NO: 145269 - RNA, 82 nt, Homo sapiens
cacgagcaacacagcacggcagcccacacaagaagcacccgcgcaggccgcaccacgggacacgagaaaaaaccaccaagaa

SEQ ID NO: 145270 - RNA, 53 nt, Homo sapiens
ccgccgagcggacccggaccgggggaaaagggggccaggaagcaaaaagacca

SEQ ID NO: 145271 - RNA, 43 nt, Homo sapiens
gccccaggaagggagccccggaaggaccgcccggggcccggcc

SEQ ID NO: 145272 - RNA, 67 nt, Homo sapiens
acagaggggcagacagacagcggaacgggagcaagacacaagacccacagggaaggggaacagcgga

SEQ ID NO: 145273 - RNA, 84 nt, Homo sapiens
cgaagcggccgagcaggcgagcgaacgacgggcgaaccgaccaagaacaacacccagagggccaggagaaggcgaagagagcag

SEQ ID NO: 145274 - RNA, 75 nt, Homo sapiens
gcaagcgggggaccgaacaaggcaaaagggggccaggaaggagaaagaaccagagaaggacgggcgagcacggaa

SEQ ID NO: 145275 - RNA, 75 nt, Homo sapiens
cacggacagggacagaccagggacacaacgggaaaccggaccgcggagggaggcgcccggccaccccaagccccg

SEQ ID NO: 145276 - RNA, 80 nt, Homo sapiens
gggacgcagggaggagcgggacaccccggaagcgggaaaggaaaggcaggagaggagcagcaaacaaaagagggccacca

SEQ ID NO: 145277 - RNA, 74 nt, Homo sapiens
agaaggaccaagaaccagagccaacacacagcacaacagagaggccgagggcacagcggagcaggaacaccggg

SEQ ID NO: 145278 - RNA, 43 nt, Homo sapiens
aagaggaaagcagacccaggccagacccacagcggggccgggc

SEQ ID NO: 145279 - RNA, 84 nt, Homo sapiens
ccggaaagagagcaggaagcggaaagcgcccgcccgccgggagcgggagcgacgccagggcccgcaggagagcagggagggcga

SEQ ID NO: 145280 - RNA, 75 nt, Homo sapiens
cccgcgagcggcgcgcagcccagagagagggcgcgagccgcgccggccagaggacagcaacgagaacccagccaa

SEQ ID NO: 145281 - RNA, 33 nt, Homo sapiens
ggagagaacacaacaggccacccacaaaccgag

SEQ ID NO: 145282 - RNA, 64 nt, Homo sapiens
cccaggcagagaaaacacccgagagcaccgccgagcggaccccaagcaccggccacgaaacaga

SEQ ID NO: 145283 - RNA, 71 nt, Homo sapiens
acgaaccaaaagggacggacaaaggaacaggaccaggaaagcaccccacgaacaaccacaggaagagacac

SEQ ID NO: 145284 - RNA, 80 nt, Homo sapiens
gacagcagcgacagggccgggcgccggcgagagccgcaccgccaacccccgagcaagacggggcagcacggacaagggca

SEQ ID NO: 145285 - RNA, 88 nt, Homo sapiens
gccggcgaccccagccagcgcagcgacggggcgcgccggcccaggcgcacacggaagggccaaagagggcgaaaaaaaggagccaagg

SEQ ID NO: 145286 - RNA, 74 nt, Homo sapiens
cagacccaacggacacgcagagaaccaagcagaaggggacccacaggcaacagacaggccaaagaagacaggga

SEQ ID NO: 145287 - RNA, 85 nt, Homo sapiens
aagaggaagacgggcacagaagaagggccggaaccggccgaccgcgccgagccagccgcgaggcacccacgcgagcaccacagcg

SEQ ID NO: 145288 - RNA, 68 nt, Homo sapiens
gaacacacgaggcacagcaggacgggacagccgaaagagaccaaaaagaagagcagccaaaagaagcc

SEQ ID NO: 145289 - RNA, 82 nt, Homo sapiens
caacagagcaggaccagggcggaacgcacccagggagagcgggacggccccaaggccacagaaaaggagaccagccccacgc

SEQ ID NO: 145290 - RNA, 63 nt, Homo sapiens
agaagaccgagagcaccacaaggccaagggcaaggagacaggaaaagcaacggcgcaagaggc

SEQ ID NO: 145291 - RNA, 71 nt, Homo sapiens
cggcccgcgccgcgacaagacgggccgagcccgaggggcaaggcgccaccggaagaaacgggaggggagga

SEQ ID NO: 145292 - RNA, 77 nt, Homo sapiens
accgcggaccgcgcgccacaacagggccacccgcacggcagcaagaggaaagccgccggggccaggggggccgggcg

SEQ ID NO: 145293 - RNA, 58 nt, Homo sapiens
aagagacagccagcacaccccgcgagcaagcaagcccgagaagcaagaccgccccaaa

SEQ ID NO: 145294 - RNA, 77 nt, Homo sapiens
ggaggcggcgggagccgcagagcacacggcggcggcgaagccaagacacgggcccgccgagggcgggacccgcgcag

SEQ ID NO: 145295 - RNA, 77 nt, Homo sapiens
cggcagcaagcccgcaaacgggacaaaaagaggccacaggggagacaaccccaggacgggcgggacaaaggagacag

SEQ ID NO: 145296 - RNA, 67 nt, Homo sapiens
ccagccgcacggcggagaccgaccaggacaagagggccggaagaggaaaagaggacagaacacccca

SEQ ID NO: 145297 - RNA, 70 nt, Homo sapiens
gagccagaacagacggaaggaaagcacgcaggcggacacacaggcggagcaggagcaaaggagcaagaaa

SEQ ID NO: 145298 - RNA, 83 nt, Homo sapiens
acagcagcgccgcccgccgacagccaggcccgggagaaggcggagggggcagggcagaaggaccaggggcgacgaggcccaga

SEQ ID NO: 145299 - RNA, 75 nt, Homo sapiens
aggaaggacagggcggacaaccaacgggcagggaccagacggcaagcccagccaggagccaccaaacggaacccc

SEQ ID NO: 145300 - RNA, 70 nt, Homo sapiens
gaaagaacaccgcagaaagcccccagaagcccagggcggacagaaaggcgaggcgccaaagggagagagc

SEQ ID NO: 145301 - RNA, 58 nt, Homo sapiens
agggggacagccaacaaagagaagagaaaccaagcccggacaaacccgaggcgagaac

SEQ ID NO: 145302 - RNA, 79 nt, Homo sapiens
cccacccggcacccccaccggaggacacaagacacccaagaacgaggccccgcagcaggcagaaagggagaagcccgca

SEQ ID NO: 145303 - RNA, 55 nt, Homo sapiens
ccaaaaacaaagcacaggccagaccacagagcagcaaggacgcacaggccggccc

SEQ ID NO: 145304 - RNA, 57 nt, Homo sapiens
gcaagacgggcccaccgagcaggaaacccgaccgccccaggggcacagcaggaccag

SEQ ID NO: 145305 - RNA, 77 nt, Homo sapiens
ccccccgcgcaggaggcggccagcgggacccgaacacggaagaaagacacgcaggaggccgcggccgagcagcgcca

SEQ ID NO: 145306 - RNA, 72 nt, Homo sapiens
caggccgggcccggaccgcccccgagcccggaggggggagaaaagaggcaaagcaaagaagagggaggaagg

SEQ ID NO: 145307 - RNA, 79 nt, Homo sapiens
gccccagggacagcaacagcggccgggaacgaccgaaacaccagggaccaagaaaggcccagggaccaaagcccggaca

SEQ ID NO: 145308 - RNA, 78 nt, Homo sapiens
gcgggcagacaaccagggagcgaacaccaagaaaaccaccagggagaaaagaagaggaggcccaacagcaggccgagg

SEQ ID NO: 145309 - RNA, 59 nt, Homo sapiens
cggcccccgcagcccagacccgcaccgcagaagccagggcgcgggaacaggacgacacg

SEQ ID NO: 145310 - RNA, 68 nt, Homo sapiens
gacacagaggccgagccagagcccaggaacgcggaagagaccgacaaccggacgagcagaaccggaag

SEQ ID NO: 145311 - RNA, 84 nt, Homo sapiens
ccgccgggagcgggcagcggcggcggcggaagggccggcgagcccggccccgccggcaccaggacgaaggacaggcgggcggga

SEQ ID NO: 145312 - RNA, 39 nt, Homo sapiens
gaacaaagcccacaagcaccggaccacgcaccaggggag

SEQ ID NO: 145313 - RNA, 64 nt, Homo sapiens
aacgaccagcggagggaaggaccacaaggagggggccaaaaaggaccaaaggagagccggagcg

SEQ ID NO: 145314 - RNA, 80 nt, Homo sapiens
gcccagcgccgcgaggggccgacgccacagacgcacggcggccgccggggcaccgcgaccgcacaagcagccgccagcgg

SEQ ID NO: 145315 - RNA, 83 nt, Homo sapiens
gagggaaaagggacgaggaagaagggcaggaccgggcggaggccgccaagacggcacggcacgggcagggcgagggagcaggc

SEQ ID NO: 145316 - RNA, 79 nt, Homo sapiens
caggcgaaggcaacagcccaaaaccgcccggcagccccagcccaagcggaagggaagaaccagcggagcaggccccccg

SEQ ID NO: 145317 - RNA, 83 nt, Homo sapiens
agccgccacccagagcgcacggcgacgccccaggggaaaacccccgggaccagcccgagcgggaagaagccgcagcaagccgc

SEQ ID NO: 145318 - RNA, 80 nt, Homo sapiens
cggccgcaggagggagaccacagcaagacaccgggaccccggaagccaaaaagggcaaaaaacaggcagccagacgaaac

SEQ ID NO: 145319 - RNA, 81 nt, Homo sapiens
gcgggagcccgacacgcgcgaccacgccccggaaagccagcggggaagaagggaagcagagcgcccagcccaggaccgggc

SEQ ID NO: 145320 - RNA, 35 nt, Homo sapiens
ggcagccacagcccgcgggggaggagagacaagaa

SEQ ID NO: 145321 - RNA, 68 nt, Homo sapiens
ccgggagcggcgagggaaaagcgaggcaaggcaggcggagcaaggggaacaaagcggcaaaagaaccc

SEQ ID NO: 145322 - RNA, 40 nt, Homo sapiens
ccagcccagagaacaagagaagaaggaaccagcaaagcgc

SEQ ID NO: 145323 - RNA, 38 nt, Homo sapiens
caccgccagggaagaaacgggaggcgaggcaagcagac

SEQ ID NO: 145324 - RNA, 73 nt, Homo sapiens
aagccccacagaaaacaggagcgcagaggagaaggcagcccaagagaacgaaagcaaaaagcgccgaccagcc

SEQ ID NO: 145325 - RNA, 72 nt, Homo sapiens
gcgggcacccgaccggagcgggccaggcgcggaggagaacaaggagcggcccagagcaaaacagaggaacgg

SEQ ID NO: 145326 - RNA, 72 nt, Homo sapiens
cggaagcaaccagagcccaggaagaggcggcaccacagaaaagcaaggcgaaggaggacaggagacgaccga

SEQ ID NO: 145327 - RNA, 86 nt, Homo sapiens
accacacggcgcggggcaccgcgcgcccaggaccccacgcagagcgccagccgcgcagaagcgacccaggaggcccaccagcaggg

SEQ ID NO: 145328 - RNA, 61 nt, Homo sapiens
cacgcagagggcggagcggcagggaagcgccaaagaagcgacgcgaaagaaagaaagaaaa

SEQ ID NO: 145329 - RNA, 73 nt, Homo sapiens
ccgggccagcggccgcgcacccccggccggaggcaccagcggacagagcgaagaaccccccaagaagacgaaa

SEQ ID NO: 145330 - RNA, 60 nt, Homo sapiens
gaaaaagacgcgagaagccacacggaaaagaaggaggccagcgggacacacaaagaaaga

SEQ ID NO: 145331 - RNA, 78 nt, Homo sapiens
caaccccgggaggcacaagacggaagagggagaccaaagacaaggaaaggaagcggcggcgcggcaaggacccagaca

SEQ ID NO: 145332 - RNA, 65 nt, Homo sapiens
ggggcaccaaggccgcgggcaccgcaacacagggggaacaaccccaaaagcgagaggccaggaag

SEQ ID NO: 145333 - RNA, 36 nt, Homo sapiens
gaggccggcggggcgacagcccggcgaagaagagga

SEQ ID NO: 145334 - RNA, 36 nt, Homo sapiens
gggaggaggggcaggcccggcggacgccgccagcca

SEQ ID NO: 145335 - RNA, 82 nt, Homo sapiens
accagcgcccgcccccgccccgcacaacagccggcagacgggggcaacaaccccgggaaccccggcaccagcccccgcagaa

SEQ ID NO: 145336 - RNA, 82 nt, Homo sapiens
gggccggaggccacgcccccccccaccgagcggcccgccccaacccgcgcgccaggggaggggaggaagcgcccgggacgag

SEQ ID NO: 145337 - RNA, 62 nt, Homo sapiens
ccagacgggggccgccccaagcccgagagagccagaagacagagcacaccagcgggccgccc

SEQ ID NO: 145338 - RNA, 75 nt, Homo sapiens
gacaaaaggagacgagaagaagacaagaggggcaggcgagaaacgggaccgcaaagaacaggagcccacagaagg

SEQ ID NO: 145339 - RNA, 75 nt, Homo sapiens
acacgacccgacaccgcggaggccaaaagaaagccagaggccgcaaaggcaaagaagccgggccaccaagacgca

SEQ ID NO: 145340 - RNA, 65 nt, Homo sapiens
cggagccaggaggggaagcgaggcgggcccgcgggaccaagaacgccaaaagacgaacacaaagg

SEQ ID NO: 145341 - RNA, 90 nt, Homo sapiens
acggaaacggagcagcaaggaaaaggaaaccgcccgcccccagaaaacgacagaagcacgacaacaacgggcagcaagccacaacggaaa

SEQ ID NO: 145342 - RNA, 64 nt, Homo sapiens
aaaccggcaggcgcccggacacagaagaggacagggcggggacaggcccaagcgggccaaggga

SEQ ID NO: 145343 - RNA, 79 nt, Homo sapiens
gccacaaaagccgggcaagcaaccacaacagagaaacaccaccaagaggggggaaccgccacgagcgggaagaagagcg

SEQ ID NO: 145344 - RNA, 74 nt, Homo sapiens
cacaggggaccccccaggccaggcacgcgagaaggggagggggagaaagaagaggaagaagccacaggcaagga

SEQ ID NO: 145345 - RNA, 39 nt, Homo sapiens
agccgcggagccccagacggcggagcggaggcagacaca

SEQ ID NO: 145346 - RNA, 37 nt, Homo sapiens
aggcggccccagcggccgggggaagaccacaagggcc

SEQ ID NO: 145347 - RNA, 75 nt, Homo sapiens
aaacgggagaacacgacaccggcgaggaacggcagcgagcaacagcagaaaagagaagagacccacgcaacgaag

SEQ ID NO: 145348 - RNA, 91 nt, Homo sapiens
gagaggagccgaggagaaaacagcaggcacccaagcgggcggcagggaagacaggagagcggaggcagaaaacaggaaaagaagaaccgag

SEQ ID NO: 145349 - RNA, 81 nt, Homo sapiens
cagccgcggcccgagagcaggcccggccgagcagcccggccaacgcaacagggagcccacgcaagaggggccggggaccgc

SEQ ID NO: 145350 - RNA, 58 nt, Homo sapiens
cccggcggcagaggcggccccagcggccggcggacgaaagaaagaaggagcaccaacg

SEQ ID NO: 145351 - RNA, 80 nt, Homo sapiens
cggccaacaggcggaacgcaggagacacaagaagcggaccagggacgccagaggggaagccgcacgagggagagacggac

SEQ ID NO: 145352 - RNA, 69 nt, Homo sapiens
ggaggagaacaccggcgcaggggggaagaagaaaacaaaccacacaccaagcacaaaaccgaggccgag

SEQ ID NO: 145353 - RNA, 87 nt, Homo sapiens
ccgagaaggccggcgagcgcacgggccccgagcagagcaccgggccggcggcgagcccccggcaccccccgcacggaagaggggccg

SEQ ID NO: 145354 - RNA, 41 nt, Homo sapiens
ggcacgcccccggggcaaaggagaagccgcgggagcggaag

SEQ ID NO: 145355 - RNA, 80 nt, Homo sapiens
cccagagcacgggcggggaagcgcgccacagcaggcgggaaaggagcggaaggcgaaaagagcaggagaggagaggaccc

SEQ ID NO: 145356 - RNA, 73 nt, Homo sapiens
gcacaaaggggaacacagggcaacggggaggcagcccggccgcgcaccacaccgaccaggcgccacagcagac

SEQ ID NO: 145357 - RNA, 73 nt, Homo sapiens
gacccgggccccgacccacgaggggccccgaggcaccccaggcccgccggaagggcggaaaaggcaaaacagc

SEQ ID NO: 145358 - RNA, 90 nt, Homo sapiens
gccagagccaccagcgcagcgcgccaggagcccagcagcaaggcgaccccgcacacacacccaccagccacggcagcccagcggggaccc

SEQ ID NO: 145359 - RNA, 69 nt, Homo sapiens
acacgaccacagcggggcagcccaaggcggaggagcaagacggcacccagccaaacccaggcccgagaa

SEQ ID NO: 145360 - RNA, 82 nt, Homo sapiens
agcggccccaacgagggggaacccccgcggaacccacggagagacggacaaccaccaccagcgagcaaaagaacaaagacca

SEQ ID NO: 145361 - RNA, 61 nt, Homo sapiens
ggcgcgagccgcgccgcgccaagagcgggagcccgacacgcgcgaccacgccccggaaagc

SEQ ID NO: 145362 - RNA, 72 nt, Homo sapiens
ggcgcagacgcgccccaggggcgccagccccaggagggaaggccaggacaggggaacaggcacacgagccac

SEQ ID NO: 145363 - RNA, 82 nt, Homo sapiens
gcggagcacgcgggcgccacgcagcagggagaggcggcgcccagacgagcccaccacggaccacccgcagccagcgagccgc

SEQ ID NO: 145364 - RNA, 67 nt, Homo sapiens
gcgcccaggaaggagccaaagcacaagaagaagacgaggacacacgcggaaagagggaacaggacca

SEQ ID NO: 145365 - RNA, 74 nt, Homo sapiens
gaaagccaaagagcgaagagagaaacaggcaaaagcggaacaagaaagcagaagcggcaagcacgcaggcccaa

SEQ ID NO: 145366 - RNA, 48 nt, Homo sapiens
agggaaaaaaggacacagggccagccgggaccaggcaaagcaaccggc

SEQ ID NO: 145367 - RNA, 81 nt, Homo sapiens
cccacccgcgccgcgacccggagcagggccgccccgaggagagcgacgcccgggcgcgccccggcagagcgagccaaaagc

SEQ ID NO: 145368 - RNA, 72 nt, Homo sapiens
cgcgggcgagcgcaagcagccagacccgccccaaaaggccggaaagcacaagaaacagagagcaggggagcc

SEQ ID NO: 145369 - RNA, 51 nt, Homo sapiens
acgcgagcgggacgcgggcagcagcaggccgggcacacaagccagcccccc

SEQ ID NO: 145370 - RNA, 123 nt, Homo sapiens
ggaggccgcggggacccagcgccaccacaacagcagcaacccgggcagcgccaagccagcagcacccgagaaggagacagggaagagaggagaagaaagcacaggaggagcaccgaaagaaga

SEQ ID NO: 145371 - RNA, 71 nt, Homo sapiens
aaagaacaccaaaccccaaagagacacccagggacccccgaaggccgggcccagaagagacggggcaccag

SEQ ID NO: 145372 - RNA, 48 nt, Homo sapiens
ggaaccagcaacaagccgggaccaggaggagaagcaaccagagaggaa

SEQ ID NO: 145373 - RNA, 42 nt, Homo sapiens
gagcgggagaacggcgagccgaggccaagcagaaccgagcag

SEQ ID NO: 145374 - RNA, 82 nt, Homo sapiens
aaaaggccgaagggcacgaaagaggcaagagagcaccagaggccaacaaacaaaccagggaagaaagagacgagaccgagcc

SEQ ID NO: 145375 - RNA, 78 nt, Homo sapiens
gcagcggaggagggcaaggacaccccgccaggcaaaagaggccaagaggaacccgcacaacagaaagcaggaagaaca

SEQ ID NO: 145376 - RNA, 72 nt, Homo sapiens
gaaacggagccagagaaggcagaagagaggagccagcggggacacgaagggcacgagcagccacccgcacac

SEQ ID NO: 145377 - RNA, 105 nt, Homo sapiens
gacaccgcaagacggggcgggagccggcagccgacggcaaagggcgggggcaaagcggagaccgggaaacaaaggacccacgcaaagccagcgacccaaagggga

SEQ ID NO: 145378 - RNA, 75 nt, Homo sapiens
cggggagccgccggagcgagaaggaaccgccccagaggaggacaggccccaggacggaaaaacaagacgccaggg

SEQ ID NO: 145379 - RNA, 69 nt, Homo sapiens
gaaaccaaagaaaaacgaagcaacccaaggcagagggggacaaacaaagagaaaaagcaaacccagagg

SEQ ID NO: 145380 - RNA, 71 nt, Homo sapiens
gccagcacggacagaagaccacgcacccacgcagggggcccagagagggccgaaccggaggacaagccagg

SEQ ID NO: 145381 - RNA, 79 nt, Homo sapiens
acccaccagcaccccaaagcacgaacgcccggcccagggaagacaccacaccgagcagagagcagaaggaaacagggaa

SEQ ID NO: 145382 - RNA, 73 nt, Homo sapiens
gcagggccggggaaggccaaaggcaggcgaacgaaggagggcgagggagcaaggacaccgcggagcacggagg

SEQ ID NO: 145383 - RNA, 77 nt, Homo sapiens
gaaacacccacgacaacggaagggacacaggcaagcaaagcccgagaaacagccaggccagggagaccagggggcag

SEQ ID NO: 145384 - RNA, 65 nt, Homo sapiens
gccagccccgccccgggcaaagcccacggccgccgagcaggccccggccccaacaggcccgcgcc

SEQ ID NO: 145385 - RNA, 83 nt, Homo sapiens
ggacgacaccaggaagagagggacaggagacgaggaggagaaccagcaaaagcagaagccacggagaaaaacggccaagaggc

SEQ ID NO: 145386 - RNA, 57 nt, Homo sapiens
ggccacgggagcccgaggaggagagcgacccgaggaaagaaacagacaacagcgaaa

SEQ ID NO: 145387 - RNA, 70 nt, Homo sapiens
acgggggaacccggggccagagggcccaaagcgcgcccgccagaagaaccaccagccacgcagcccagag

SEQ ID NO: 145388 - RNA, 72 nt, Homo sapiens
agcagggggcacacaccgagacaccaaaaagcgagccaagcaccgaacgaccggagcgagcacagaggacac

SEQ ID NO: 145389 - RNA, 87 nt, Homo sapiens
gacagcagaggcccccgaaccgcccccgaagaggcaaccccccagggcccagggaccaagaaaggcccagggaccaaagcccggaca

SEQ ID NO: 145390 - RNA, 81 nt, Homo sapiens
cggcccagcgggaggaaagcgcccggcggacaaccagggaagcagaaggcaaggaccccggcaaggagaaacaacagcagc

SEQ ID NO: 145391 - RNA, 74 nt, Homo sapiens
gggcgggccacagcgcgggccggccacaaaaaggcgggggggagaagcacgcgcccgcggagacacacccgcag

SEQ ID NO: 145392 - RNA, 40 nt, Homo sapiens
gcgcgagccccgccgccccaggggagcgggaagacccgga

SEQ ID NO: 145393 - RNA, 76 nt, Homo sapiens
aaagagcgaagcgcagaagcccgaagaaaacagcgggaagagacagccaagacgcagccgagacaccagcccgaaa

SEQ ID NO: 145394 - RNA, 60 nt, Homo sapiens
cggagcgacaaggcccacaaccgaccacgcccaaagacggaggacccagcaaccacccgc

SEQ ID NO: 145395 - RNA, 78 nt, Homo sapiens
agaaaccaagacggcagagagggcgacagcaagaaggagccagcacagaggcaaaagaaccaacaaaggccaaaagag

SEQ ID NO: 145396 - RNA, 66 nt, Homo sapiens
ccgggacccacgagaccacaaccacccccagcaccacccggcaagggaaaaggcacagggcacgaa

SEQ ID NO: 145397 - RNA, 76 nt, Homo sapiens
cgagcgaggacgaggaacggcgaccggggaccccaaaccccggggccggccgcccggccacgagagcgcgggccca

SEQ ID NO: 145398 - RNA, 85 nt, Homo sapiens
ccagggcgcaccgcggaagaggcggggacgaccggggcgggcgacagcgaccgacgccacacggccaaggcgaaccagacaagaa

SEQ ID NO: 145399 - RNA, 73 nt, Homo sapiens
gaagaagaaggaggacaggagagaagcaccggcaccagaccggacagggaggaccaggcaaggagaagcgagg

SEQ ID NO: 145400 - RNA, 81 nt, Homo sapiens
gcggccgcggcggcgcagggcaaggaaggaaagaccacagcaagaccacgcccccagccgggggaccaggccgaacgaccc

SEQ ID NO: 145401 - RNA, 74 nt, Homo sapiens
aaagcggcacgaacagagccgggagcaagaagaacacccagagcgagcaacagcagaaaagagaagagacccac

SEQ ID NO: 145402 - RNA, 68 nt, Homo sapiens
cgggaccaggaaagacaggacaccgggaagcggcgaagagacgacgcgggggggaacccccacagccc

SEQ ID NO: 145403 - RNA, 81 nt, Homo sapiens
cgagggcggccgcgccggcccaggcgcgagaccgcacagcaaggaaagcacccagagaaggaccggaagagcaagacggcc

SEQ ID NO: 145404 - RNA, 80 nt, Homo sapiens
aagaccccggaggggagagggagccccaaggcgcacaccggggaaggagggcgaaacaaaggaccagcacgggaaccggc

SEQ ID NO: 145405 - RNA, 71 nt, Homo sapiens
agcgagggggggcgcgccggaaaccggagcgcgcagcagcagccacgcggcccgcgcgggaggggaaggcg

SEQ ID NO: 145406 - RNA, 77 nt, Homo sapiens
aggagacccgagcaagaggcacaagcaacaaaaagaaacagaacacggcacgagcgcggggaaggaaaacagcaaca

SEQ ID NO: 145407 - RNA, 83 nt, Homo sapiens
cccgggaaggagcgcccggcggagaagaccgaacggccccacagccgggcggggggaaaggaggccaaagaacccgcgcaggg

SEQ ID NO: 145408 - RNA, 70 nt, Homo sapiens
ccgccccccgaccacccagcggcggaggaaggcagaccggccacgcaaccccgcccccgggcagggaccc

SEQ ID NO: 145409 - RNA, 54 nt, Homo sapiens
gaggccacgggagggccgcgcgccggagaccgaaggcccgaaaccgggccgaag

SEQ ID NO: 145410 - RNA, 45 nt, Homo sapiens
cacagaacacacaaggggcaggaccaggaccagcaaggacaaaac

SEQ ID NO: 145411 - RNA, 56 nt, Homo sapiens
gcagcggggccagcaaaacacgagaaccaagcagaaggaagaagcgaacacagcgg

SEQ ID NO: 145412 - RNA, 81 nt, Homo sapiens
ccaacgaaacggcgacgacagagggccagaaaagggggaaggcagggccggcccgcagccgcccagacccagaacagccac

SEQ ID NO: 145413 - RNA, 80 nt, Homo sapiens
agcgggggcagcgacagagccaaaacagagcggaaccgaggagagaggagcacacgcagacacagaaaagcaacgaagcc

SEQ ID NO: 145414 - RNA, 85 nt, Homo sapiens
agcaacacagggcccagcaggcagggccggccaaagcaagacagaagggccccgcccagagcaccacccgagacacaggagccca

SEQ ID NO: 145415 - RNA, 76 nt, Homo sapiens
caaggaaaagagaaacagggaaaaaaacccacaaaaccgagcaccgaacagcagaaagaacaagcacgccgaaagc

SEQ ID NO: 145416 - RNA, 59 nt, Homo sapiens
caccagcccgggcagcgagcgcaaaaccacgcagaggaaggcagccccacagaaggaaa

SEQ ID NO: 145417 - RNA, 85 nt, Homo sapiens
gggccgccccccacgccgagcggccgcgccgaccaccacccggcaccacgaggaccaagaacgcccagcccgcgggcaccggcag

SEQ ID NO: 145418 - RNA, 78 nt, Homo sapiens
accgaaccagcagcaggagaagcagagcaagacagaaaggagaacccgggagcgagacagggaagaaccggcaaggaa

SEQ ID NO: 145419 - RNA, 60 nt, Homo sapiens
gcggaaagcgcacggggaaaacaaggggacccgggaagagagagcccacgaacggcggga

SEQ ID NO: 145420 - RNA, 79 nt, Homo sapiens
caaccgggcaggcgagacgcagaggagacgccggggcccggcgccaccaccggggagccagagcaagaggccaaggccc

SEQ ID NO: 145421 - RNA, 60 nt, Homo sapiens
gacagaccgggacaaaggacagccacgggaagcagagccccgggccgggaaggggaaacg

SEQ ID NO: 145422 - RNA, 62 nt, Homo sapiens
gaacacagaaaccggccccaggcaaggacggggacacaagaccagccagcccagccacagag

SEQ ID NO: 145423 - RNA, 34 nt, Homo sapiens
gaagcacgacaaaagcgaccggaacgcacaccac

SEQ ID NO: 145424 - RNA, 107 nt, Homo sapiens
cgaggggaccagcgcggggcgcagacgaaaggcgccgccagcgaaagaaagggacgcggcacagaacgaagaagaaagcagaagcaagagaaaaaagaaacaccgag

SEQ ID NO: 145425 - RNA, 61 nt, Homo sapiens
aaacgggccaggcaggcggaagggcacagaggacacagcagaaaggaaccaggagccagcg

SEQ ID NO: 145426 - RNA, 68 nt, Homo sapiens
ccccagcgaacacaaagggaggggaaggcggaccgagaacgagggcaggaggcagcacggcaggagac

SEQ ID NO: 145427 - RNA, 80 nt, Homo sapiens
cgagcggacccggaccggggcaggggacgccagccacccggggcccaacggcgggccagaggaaccccagaacccggagc

SEQ ID NO: 145428 - RNA, 81 nt, Homo sapiens
agcgccggagcagcggacccaggcaggcacaacgaaacgaaggagccaaaaccagcacaagggacagaaaagcaaacaacc

SEQ ID NO: 145429 - RNA, 70 nt, Homo sapiens
gccacccagcggggagcacggcgagcagccaggccaggagagagaggaaacagcggaggaggccacaggc

SEQ ID NO: 145430 - RNA, 82 nt, Homo sapiens
ccgacaagccgggccgcgccgaggggaccgcgggacgcaccgcgaccagggccgcaggaagacgcaaaacccccaacaaaca

SEQ ID NO: 145431 - RNA, 76 nt, Homo sapiens
cagacggagccccagagcaggggacagaacacgcccgggggagacggagccggccagaacaggacgagcagaacag

SEQ ID NO: 145432 - RNA, 82 nt, Homo sapiens
ccccaagaagagcaggaaaggccaaaccccaggcagacaccccggccagaacggagagacaccgcaaggagacccacggggg

SEQ ID NO: 145433 - RNA, 74 nt, Homo sapiens
ggagcagccacgcgcccacgacgccagggaggaacacacacaagggcagaaccaaaaggaaacggaagaccaaa

SEQ ID NO: 145434 - RNA, 82 nt, Homo sapiens
gaccgagaccggaccgagagcggaccgagagcgcgaaacgcacgagaaggacaaccagcaacacacaggggcaagaagagcg

SEQ ID NO: 145435 - RNA, 74 nt, Homo sapiens
caagccaaaaagcccaaggaggacagacaagagaaccaccgccggccaggaggagagcgcaccaccaaaaaggc

SEQ ID NO: 145436 - RNA, 83 nt, Homo sapiens
gacgaggacgaggagcggaggagccgcgggcggcgcggcccagccgccagcgcagcccccgggaccggcccgacagagccgcc

SEQ ID NO: 145437 - RNA, 81 nt, Homo sapiens
caaacaggggaaagaggaggcagccaacccacggcaagaaagggccgagaaagaagagaggaagaagaggaggaggaggaa

SEQ ID NO: 145438 - RNA, 57 nt, Homo sapiens
gcagcgggagccgaaaacggaaggcggagagaccaaccaaagcgcacaagaagagga

SEQ ID NO: 145439 - RNA, 78 nt, Homo sapiens
gcccggccccgcagccggaaccacgccagaaggaaacaggagccagaaaaaaaaaaagaaaggacaagggaggccagg

SEQ ID NO: 145440 - RNA, 59 nt, Homo sapiens
gccacccccagggacacaagccacgcggggggaggaaaaaggacaggccacacaacgcc

SEQ ID NO: 145441 - RNA, 60 nt, Homo sapiens
gccagaacggaggaggagccgcagccaaaaggaaggagaaacgcagacaccggaaaggaa

SEQ ID NO: 145442 - RNA, 81 nt, Homo sapiens
aacccagggccggagcggagggaagagaacacgagacccgcacaaaaccccgccccccaggccacacaggggccgagacgg

SEQ ID NO: 145443 - RNA, 58 nt, Homo sapiens
cggcccccacagcacaacagcacaggaggagcccaacacccaggggcacgacgccggc

SEQ ID NO: 145444 - RNA, 69 nt, Homo sapiens
ccggagaccgagaaccagcccaaaccaaggaaaccagcacacaccagacgcagcaagacagaaggacac

SEQ ID NO: 145445 - RNA, 68 nt, Homo sapiens
cggcagacaagaaagccaaacgaggagaggaagacggagggcaaacaaggggaaggaggagggaggca

SEQ ID NO: 145446 - RNA, 87 nt, Homo sapiens
gccccgagacccgagccccaggacccacgcagccacccagcccagcaccacgcgcagccaggaggcccgggaccgggggcgaccgcg

SEQ ID NO: 145447 - RNA, 82 nt, Homo sapiens
cccacggagccagccacccacagagaaccgcccaaagcgcacagagcggggcaacaacccagacggcgaggggaaaaggaag

SEQ ID NO: 145448 - RNA, 75 nt, Homo sapiens
aaggaccaagaaccaggccaggcagcgccaaggaccgggacagacaaacccaaaagaccccgcaacaacacagaa

SEQ ID NO: 145449 - RNA, 75 nt, Homo sapiens
gcaaggcgggggaggcggcggcccagccacgagaaaaggggaagaaggccaaccgggggccaagggggaagggag

SEQ ID NO: 145450 - RNA, 79 nt, Homo sapiens
acaggacccgccaccaaagagccacgccgccaggagcccgaacacagccacgcaaccccaccggccaacacaccggacg

SEQ ID NO: 145451 - RNA, 64 nt, Homo sapiens
cacagaaggaaacaacagaacagcaaaagcgaaggacaacggccaccccgggaagccacgcgcc

SEQ ID NO: 145452 - RNA, 69 nt, Homo sapiens
acaacagcacacgcacccaagcggcagacggcagaaaacagacgaagcaacagcgaacaaaaaagggac

SEQ ID NO: 145453 - RNA, 84 nt, Homo sapiens
gcgccacaagccacacggagggggcagacccaaaggaaacgcacgaaagaaacaggagagcgcagcgaagcccggggaagcaca

SEQ ID NO: 145454 - RNA, 73 nt, Homo sapiens
ccgcccgaaaccagcagacccggggcagcaaacggagggaacacagaggagcacgaagagcagcaaagccaga

SEQ ID NO: 145455 - RNA, 77 nt, Homo sapiens
ccggacgacccaagcccgcgagcaggagagggaggggccacggggccggggagccaccaggagacagcccagacaag

SEQ ID NO: 145456 - RNA, 80 nt, Homo sapiens
agaacagagcaaacagacggaagaggcaaggcagccccggcagaaccagagggacaggcccagcccccacagccagccca

SEQ ID NO: 145457 - RNA, 87 nt, Homo sapiens
ggaaaaacagaacggcaaaccggaaaaaaacgggagaacaccaacaccagcagcagaggcccccagacccgagccagcagaaccacc

SEQ ID NO: 145458 - RNA, 56 nt, Homo sapiens
cgcgcggggacaggaccgggggcccgcccagagcgcggcggcaccgcagaacaggc

SEQ ID NO: 145459 - RNA, 81 nt, Homo sapiens
gcccggcccaggacacagcaccgcgaggcccacggcccgaggagacgggcgaaccgcaggcacgcgcggaggagagggcca

SEQ ID NO: 145460 - RNA, 76 nt, Homo sapiens
acagagagaccacggaaaaggaacagagccaaaccagaagaggagggcccagaagaaaaaggggaaccagaagagg

SEQ ID NO: 145461 - RNA, 56 nt, Homo sapiens
agccagcaccagccagaagccccaccagaaaggagccaaaagccagcgccgacagc

SEQ ID NO: 145462 - RNA, 66 nt, Homo sapiens
aacgccgccaccagcgcagacagccaggcgggcaaccagaaccaaagaaaagaaagaccaacaaag

SEQ ID NO: 145463 - RNA, 71 nt, Homo sapiens
ggaccgcgccgcagagcggaggaggcaggggaagcacaaaagcgcacccgcgccagcgaggaccggaacgg

SEQ ID NO: 145464 - RNA, 81 nt, Homo sapiens
gggcagccgagcgcgcgagccagacagacgcgagcgacaagagaaggaggaaaggcggaggcaaagcggaaaggacagggg

SEQ ID NO: 145465 - RNA, 45 nt, Homo sapiens
cagcgccgagggcgagacggcagcggagcccagggagaaagcgga

SEQ ID NO: 145466 - RNA, 68 nt, Homo sapiens
aaccaggcgccccaggagaaggaccgaagcgacacccccaggcccacacgccggcaccccaagggacc

SEQ ID NO: 145467 - RNA, 77 nt, Homo sapiens
agcgcgcgcacgaccggcgcccggacacccgaggggggggagaaccgccagcgacgggaaggcaggacccacgcacg

SEQ ID NO: 145468 - RNA, 78 nt, Homo sapiens
ccaccaccccaagggcacgagaaggagggcgcggggagcccgcacgagcagcgaacagcaacccccagccacaacgcg

SEQ ID NO: 145469 - RNA, 59 nt, Homo sapiens
ccccaagaacgggaacaggacaacaacaggcggagggcccaccccgcaggccccaagac

SEQ ID NO: 145470 - RNA, 71 nt, Homo sapiens
cgaggaaagaaggaagcagcgaagcagggaggaagaggcaaccaggcccaaagaaggcacgagaggaagcc

SEQ ID NO: 145471 - RNA, 81 nt, Homo sapiens
ggcagcggaccacacagaaaggaggcccaggaaagcaaagcaggagaggggcaaagaccgcggcacggccaggcgaacaca

SEQ ID NO: 145472 - RNA, 74 nt, Homo sapiens
cccggcccgagccacaccgggacgaccaagccgagaccacgcacccagaggcgagggcacacaaagcgggaaag

SEQ ID NO: 145473 - RNA, 74 nt, Homo sapiens
gagcgcggcacgggccccgggccccacgccaggacacgagaggagagggcaagaaagccaagagccaggagagg

SEQ ID NO: 145474 - RNA, 77 nt, Homo sapiens
gggggaaacagcacggccgcgacagaggaggacaacaggacccgagcgaaggagcaggggcccggcggaggcgcaga

SEQ ID NO: 145475 - RNA, 86 nt, Homo sapiens
ggaggagggcggccggcgcagcccgaccagccaagagccggcagcagacgagggaggggcgaccccggggcccggccagcacgacc

SEQ ID NO: 145476 - RNA, 77 nt, Homo sapiens
acaaaaagaagacggacagggcacacagaaccgaaaaagagcgggcgcagagaccacaagaaccaggagagacccag

SEQ ID NO: 145477 - RNA, 77 nt, Homo sapiens
gcagccaaaagggcagcacgggggccaccagacacccaacgagcggacaacgacgcagccccagacgcagacacagg

SEQ ID NO: 145478 - RNA, 75 nt, Homo sapiens
cggacgcacaggaaggaaaaagaccaagacacccaggagaaagacagcggggaaaagaaaaaggagggggcaaaa

SEQ ID NO: 145479 - RNA, 79 nt, Homo sapiens
ggggagcaaaaccaacgccggccggagcagcagcccgagggccccggggcggcggccgcgggcggagcgcgcggccgca

SEQ ID NO: 145480 - RNA, 84 nt, Homo sapiens
acccaaccaacggacaccaccaggggacggcacggacgacagaagcgacgggagaccgccggagcgggcagggcacacaaccgg

SEQ ID NO: 145481 - RNA, 56 nt, Homo sapiens
acagaaacgcccggcccacaacgaggagcgccaggggggccgggcggcggcccaca

SEQ ID NO: 145482 - RNA, 106 nt, Homo sapiens
cggggcaggcagcccggggggagcggccagcaggagcgccggggccggggcgaacgcggccgaaccgaaagggaaccgagaggagacgaggaaacccagcagcaga

SEQ ID NO: 145483 - RNA, 81 nt, Homo sapiens
ccaaacagaggaacgggccccaaagcggaacagcgacgacaaggcggaaacaacacaggcccgagagagaaagggaaagaa

SEQ ID NO: 145484 - RNA, 61 nt, Homo sapiens
aggggaaaagcagagaacacacaaaggaccagaggaaaaggaggaagggcgaaagaggaag

SEQ ID NO: 145485 - RNA, 78 nt, Homo sapiens
gagaagaccaccacaacaagagacaacaccgcgcggaccacaaaccgcgccagaaaagcgacaagggcggacaagggc

SEQ ID NO: 145486 - RNA, 81 nt, Homo sapiens
cagcagcgcgccgccgcccaggccggggggggcacagagccccggaagacagcccccagcgaccagacccagggccagagc

SEQ ID NO: 145487 - RNA, 87 nt, Homo sapiens
aggcagcagcagccgcggagcagagccgccggggagggagccagaagcaacgagggggaaacaggaagagaacagaacggaagaaag

SEQ ID NO: 145488 - RNA, 61 nt, Homo sapiens
cggccacgacccccgaagagccgcgccgccaggaaaggggagcaagaagaaagagcaggga

SEQ ID NO: 145489 - RNA, 79 nt, Homo sapiens
gagaaggaacaagccacaaccacaaaaaggaaagcagagaaggagaagaagggaccagccaccgcagagcgccaagccc

SEQ ID NO: 145490 - RNA, 72 nt, Homo sapiens
cggcccggcagcaaggcgagaagaaagaggccagacaggagggcagaggacaacagcaaccaagaagacgag

SEQ ID NO: 145491 - RNA, 77 nt, Homo sapiens
gcaacaagagcccaacaaggaaacccagaaaaaagagagggacacagggacaacaaaaaggaagcgagaacggaaca

SEQ ID NO: 145492 - RNA, 75 nt, Homo sapiens
agaaccgggaggagaagaaaccgcagaagcaaaagaaggcgaaaaaggcacagggcaggcgaggacacagccacg

SEQ ID NO: 145493 - RNA, 74 nt, Homo sapiens
cggcggcgggcggcggcagcaaggccaagaagcgagagaagaaaaacagaaaaagccaagacagaaacaagaac

SEQ ID NO: 145494 - RNA, 75 nt, Homo sapiens
aggagaggcccaacaggagaagacagaaaggagaggcacagcaaggcaaggaagcacacagcacagcacgcgcac

SEQ ID NO: 145495 - RNA, 71 nt, Homo sapiens
cggccagaacaggcggggggggacggacccgcaccagccgggaaaagagggaagagcagcaccagcagcgg

SEQ ID NO: 145496 - RNA, 66 nt, Homo sapiens
gaaccacggaaaggaggaagaagacaccggggacagacaggaaagccagaggaagaacgcagcccc

SEQ ID NO: 145497 - RNA, 83 nt, Homo sapiens
gaaacggcgacgacagagggccagaaaagcccccacacggggagaaagaaagaaaacaagacaaaacccaaagaaaccaagcc

SEQ ID NO: 145498 - RNA, 54 nt, Homo sapiens
ggagagggcgccacaaaaggccaacggcacccccgaaggccaccgcacacacca

SEQ ID NO: 145499 - RNA, 74 nt, Homo sapiens
gccaagcagccagggagagaagaccggcaggagccagccagacgccaggacccaccccgcaaaagaccaggccg

SEQ ID NO: 145500 - RNA, 74 nt, Homo sapiens
cagcaagcaccggagggagaagacagagccggacgagcgggagaggacaccacacaaaaaacaggaaaagagaa

SEQ ID NO: 145501 - RNA, 72 nt, Homo sapiens
ccaccccaccagcaaagaaggagcggagaacggaccacccagcagcccccacacaccaaccaccgacacccg

SEQ ID NO: 145502 - RNA, 72 nt, Homo sapiens
aaaaaccacccacagcgcaagcagcgaagagagaagcggaaagcggagaagagagcggaaagagcaacagga

SEQ ID NO: 145503 - RNA, 33 nt, Homo sapiens
agcgggcgggccagaagagagggcaccagggcc

SEQ ID NO: 145504 - RNA, 80 nt, Homo sapiens
cgcccccgagccggccccacgcgggcgccccagacaccaggaacccgcccacgccagcgaagccgacaggaccaacgaca

SEQ ID NO: 145505 - RNA, 76 nt, Homo sapiens
gggccccagccccagaacaaacgagagggaaaccgggcagagcacaagcacagacccagacggcagaagaccaccc

SEQ ID NO: 145506 - RNA, 71 nt, Homo sapiens
ccaccagcaggacaggccgacaggcaagggcgcagaggagccagaggccgcccggggccgcacgccccacc

SEQ ID NO: 145507 - RNA, 50 nt, Homo sapiens
cgccccaccccaggcgaaccgagggggcacggggaaccaccagagacaca

SEQ ID NO: 145508 - RNA, 69 nt, Homo sapiens
cgcccccgaggccggcccggccacgccgccaggccaagccggacgaaggaagagacccgaagcgaaacc

SEQ ID NO: 145509 - RNA, 64 nt, Homo sapiens
ggaacaagggcacccaggagaaaccaccgccaaagcagaaacacccgagagacgggggcaccag

SEQ ID NO: 145510 - RNA, 72 nt, Homo sapiens
cgccagcacggggcacagacccagacaagcaccagcagaagcaaacaggcagaaaaagaagaaggaccgggc

SEQ ID NO: 145511 - RNA, 65 nt, Homo sapiens
gacccagaccagcaggaagagcaaaacacgagggcaacagacaagcagagaaagccaccagcagc

SEQ ID NO: 145512 - RNA, 74 nt, Homo sapiens
caaggggaagcggaccccgaaggagaccacaaaggaccagcagaggcagaaaaccagaaggcaccgacaggaaa

SEQ ID NO: 145513 - RNA, 83 nt, Homo sapiens
aggagccccggcggagaccacgcaaggccacaggaggccgagcccgaaacaaccccaccggccccccccccaccagcccagcc

SEQ ID NO: 145514 - RNA, 68 nt, Homo sapiens
cacaggcggagaagagggcgagaccgagcggacaaaaaggaacggaacggagaggaacaccagcaagg

SEQ ID NO: 145515 - RNA, 73 nt, Homo sapiens
cggaagaagccaaaaagccccgacagaacgcggcagaacggaggcaggcagcacgagacacaccacaagaggg

SEQ ID NO: 145516 - RNA, 79 nt, Homo sapiens
acgacaccaccgcagcgacgagcagggcagcggggaagaagaaaaggaaccgaggccccccggcgacacggcgaagacc

SEQ ID NO: 145517 - RNA, 107 nt, Homo sapiens
gcgagggcgaagcacgacacagaaggggaggggagggaaaggcccaggaaaaaggaagccgcggaagccgagcaaagaggggaacaagcccaaaggccggaaaacgg

SEQ ID NO: 145518 - RNA, 74 nt, Homo sapiens
cagagcccgcgacagcggcgagacacacacaggcaacaggagaggaggcgaaggggcccacagagaacggcacg

SEQ ID NO: 145519 - RNA, 68 nt, Homo sapiens
gaaagagacagaagcacggaagaagaagcaggaaagggaagaggacacgcgaccgaacaggaggagcc

SEQ ID NO: 145520 - RNA, 78 nt, Homo sapiens
ccagcaggcgaagcaagcacagccaacagcccacaagcgccccacaaggaaagacgccaaggaagacccagaggagca

SEQ ID NO: 145521 - RNA, 79 nt, Homo sapiens
acgcccgggcagggcccaccccgcgcccgacaggacaggaggaggaaggcgagcgagagagaccgggagaagcagagag

SEQ ID NO: 145522 - RNA, 87 nt, Homo sapiens
ccgcgcccggcagcccgccccgccgcgcccggagcgcaggacccgcggaggggaacaggcgcgccgggggcccgggccagcggccgc

SEQ ID NO: 145523 - RNA, 84 nt, Homo sapiens
agagaagaaagcaaagacagggagaacaagcacgaaagaaggcacgcaagagcacccaaaccgggacaagagagaaaaggagaa

SEQ ID NO: 145524 - RNA, 64 nt, Homo sapiens
agggccaccccacagacggaccaggaagaaacaggcccgccagcaccgacagcaacgaaaagcc

SEQ ID NO: 145525 - RNA, 77 nt, Homo sapiens
caagcagcgccgagcccaggcaagagcccgcgagaagaaacgcgaagacgacgagcgcaccaagaggaacacaggcg

SEQ ID NO: 145526 - RNA, 80 nt, Homo sapiens
aaagggcagggacagcgcaggcagcagcaaggcagagagcggggaccagcgaagaccaccagcaccaccgcaccacggag

SEQ ID NO: 145527 - RNA, 69 nt, Homo sapiens
aaacagcaaagcgaaaccagacaaacgcgggccacagcggagaaggcccgggcaggccaagggcccaga

SEQ ID NO: 145528 - RNA, 73 nt, Homo sapiens
acagcacgggcagagccaggaaggagccacaagaccaagcgccacaagggaggaaagccaggaagcaagccgc

SEQ ID NO: 145529 - RNA, 78 nt, Homo sapiens
gcgcggacgcggaacccggcgcggcggcggcacgaggcaggcgacgcgagaaggagcgcgaaacggagggaagaaaac

SEQ ID NO: 145530 - RNA, 75 nt, Homo sapiens
gaaaagaaagagaacagcaaccacagcgggaagggcaaggaggaacaggaaagggcagaagaagcagaggaaagg

SEQ ID NO: 145531 - RNA, 82 nt, Homo sapiens
aagaacaggggggacggaacacaaaaagggcaaagaggagaagagccgggcccacaggaacggggcacaaaaacaaccaaga

SEQ ID NO: 145532 - RNA, 80 nt, Homo sapiens
gaccgagaccggaccgagagcggaccgagagcgcgaaacgcacgagaaggaggacccgcagacacaacggaggcccgacc

SEQ ID NO: 145533 - RNA, 87 nt, Homo sapiens
cgacacaggcggggccgacgggggagacggagccccaggccaagacaaggggcgcagagcggggggacaggcgcaagaccggagaag

SEQ ID NO: 145534 - RNA, 84 nt, Homo sapiens
aagagccaaaagacgcagagccccagggcggacagcagcccggggcaaccggagccccccaggaggagaccccgaaggggaaaa

SEQ ID NO: 145535 - RNA, 80 nt, Homo sapiens
ggaacaaacgagggcccgggaggaccgacgcagccagagaggcagaaacgaagcgaaaggaaaccaaaaggaaaaaacag

SEQ ID NO: 145536 - RNA, 67 nt, Homo sapiens
aaagaaccgacaaccaagggccccgcggaccaaggaagaacccgaagcaccgaagagccaccggcaa

SEQ ID NO: 145537 - RNA, 83 nt, Homo sapiens
cggagaaggccagagcacacacggccaagagcgggcaccaggaagcgaaggcgaaaccagagacgaccacaagaacccacagg

SEQ ID NO: 145538 - RNA, 80 nt, Homo sapiens
caaaccccacccaggcacacgcacacaacacaaccagagcagaccagccccacagacaaggaccaagaaaggcccaggga

SEQ ID NO: 145539 - RNA, 68 nt, Homo sapiens
acggccccagccagcgacggagacgcccgcagagggaaggggaacaggaccggccacagacagccccc

SEQ ID NO: 145540 - RNA, 74 nt, Homo sapiens
agacaaacgcagaggccaaggccgcagccaagccggaacaggagcggcgagcccaaacgcaagggggaagaaaa

SEQ ID NO: 145541 - RNA, 112 nt, Homo sapiens
ccgaggggccaaccagcgaagagcgacaagccgcggcagccgcggaccaccgccgccaggagcaagaacgaggccaaggaggagggacacagagacagcgaagaaagaacgc

SEQ ID NO: 145542 - RNA, 82 nt, Homo sapiens
cgggaacccccacgcggccagcgaaaacgcccagacgcaaagccccgagcccaaaacagcccacgcagcccgccggcccggc

SEQ ID NO: 145543 - RNA, 79 nt, Homo sapiens
cagcgcgcccccaggaggcgagcccgcggaaccgcagccagaaagccgggggcggcagaccagggcccagccggccaac

SEQ ID NO: 145544 - RNA, 75 nt, Homo sapiens
caagggacccgagagagcgaaagcccgcccgggagaaaggcacccggaagagccaacgggagagggcagcccagg

SEQ ID NO: 145545 - RNA, 80 nt, Homo sapiens
ccgacagcggaggggggaagaccggacccaaaccgaccaggggggcccagggaagaccggagcggaacaacggccccgga

SEQ ID NO: 145546 - RNA, 70 nt, Homo sapiens
gcacaacggccacgacaacaaagaaacagaaacagagggagaagggcccccaagccggcaggggaacgag

SEQ ID NO: 145547 - RNA, 72 nt, Homo sapiens
gaaccaaggaaaaacaagagggacggcccccagcagcccccaaggacacccccggcaccgaggaaaacaagc

SEQ ID NO: 145548 - RNA, 87 nt, Homo sapiens
cccgcggccgcgcgccccgaggaagaggagggcgcgacgcgcaccaacggggagggagcaccgcggacgccccagggcacaccgcgc

SEQ ID NO: 145549 - RNA, 74 nt, Homo sapiens
cggcaacacggacacccacagcggggcggcggcggcggcggcgcggcccaaaagggaccaggcagacgaccaag

SEQ ID NO: 145550 - RNA, 83 nt, Homo sapiens
cggaccgaggggaaggcgcccccgagcccagcgcacggaccagaggagccggaaccggagaggacacagcagaagagaacacg

SEQ ID NO: 145551 - RNA, 78 nt, Homo sapiens
gccgggagcccgcgcagaccggccgacgccgccgccgccgccgccggccccgccacagcggagccggagcgaggcggg

SEQ ID NO: 145552 - RNA, 86 nt, Homo sapiens
cgccacgccccagacaggggaacgcggcgaccgccaagaaaggcagcgaggggagagcggaacaagagagacccggccaaggcggc

SEQ ID NO: 145553 - RNA, 72 nt, Homo sapiens
gacccggggcacgagaccaagccccagacgagagcccccaggacaagggaaggaacacgaaaagagacaaaa

SEQ ID NO: 145554 - RNA, 73 nt, Homo sapiens
ggcgaaaagaggcaagaaggaaagaggccacagacaacaaagcacaggggcccaacagcagaaagcagcacgc

SEQ ID NO: 145555 - RNA, 82 nt, Homo sapiens
gcggagggaacaccaccgccgaccaggcacgcccaaccccgcgaaggaaggggacccaagccgccaggacccagggcaaccc

SEQ ID NO: 145556 - RNA, 52 nt, Homo sapiens
gggcccgggagggacagcccacgcggaaacgagcgagagagaagagggcaca

SEQ ID NO: 145557 - RNA, 73 nt, Homo sapiens
caccgaaccccagcccaagccgcgcccggacaggaaacaaagagcggagaaacaaaacaacaagggaaaagga

SEQ ID NO: 145558 - RNA, 62 nt, Homo sapiens
acacccccagccagcccacacccgccagaagagcacaggcaaaaggccaaaacggaagaacc

SEQ ID NO: 145559 - RNA, 67 nt, Homo sapiens
gggaagaacgaagaacaacggagccgggcaagaacgaaacacaagggacaaaaagcaaccccaagac

SEQ ID NO: 145560 - RNA, 76 nt, Homo sapiens
aggaggaccaaagaccggcccgcagagccaccgggcccaggcggaagcagggcgcgaccggccacagcaaccccgc

SEQ ID NO: 145561 - RNA, 58 nt, Homo sapiens
cccagaagaccggacaaggagcgcaggcacaaaaaaacaggaaaacggaagacggccc

SEQ ID NO: 145562 - RNA, 72 nt, Homo sapiens
gccgcccgagccggcgccaagaaaccaacccaggcaagaaggccagaccaaagaaaagggagagaccaaggc

SEQ ID NO: 145563 - RNA, 78 nt, Homo sapiens
agggaaacggcccccaggaccgcggcccgggcccggacacaaggcggaggagaagggacagcccgggcccggggaagg

SEQ ID NO: 145564 - RNA, 42 nt, Homo sapiens
ggaggcagaggaaacggagaggacaaccagggaagcagaagg

SEQ ID NO: 145565 - RNA, 83 nt, Homo sapiens
ggaacagcaacgaggacccaaccagagaggaacaggagaaagacggggccgagggaagcacgaggggcgacaggacaacacac

SEQ ID NO: 145566 - RNA, 37 nt, Homo sapiens
gaaacacccgaacagcgagccagacacacggccccga

SEQ ID NO: 145567 - RNA, 66 nt, Homo sapiens
ccagccggaacaagagacccgccgacggccaggagaaagccaccaagaagaagccgggacccggca

SEQ ID NO: 145568 - RNA, 72 nt, Homo sapiens
aaggcagggggccggcccacagcacccggccccgcggggcgccaggagagaacagcacacagaggcgcaagg

SEQ ID NO: 145569 - RNA, 77 nt, Homo sapiens
ccaagaccgaaaacagaaggaaagaaggaacggagaaggcaaagaaggcacaaagaggaggagaccccacagcccac

SEQ ID NO: 145570 - RNA, 77 nt, Homo sapiens
acagccgacagacgccaccaaaagcaccagggcgacaaaaggagacaaaaggagaagccaccgagccagcaaaccga

SEQ ID NO: 145571 - RNA, 94 nt, Homo sapiens
cgacagcaaacaaagaggccgcggaggagaagccggaggaggacaacgacaccaccgcagcgacgagcaggcgccgcgaggccgcggccaggcc

SEQ ID NO: 145572 - RNA, 59 nt, Homo sapiens
gcacgcgacccaagcaggaggcaggcgcaagaggcgcagagccagagaccggagacacc

SEQ ID NO: 145573 - RNA, 52 nt, Homo sapiens
ggcagagacgagcagcaacaaggcccagcagaggggagaggacggggagagc

SEQ ID NO: 145574 - RNA, 73 nt, Homo sapiens
ccagcccggcggacaaggagaagaaacgcaaaagaccaagaccagggcaggcgacacgagacccacgccaccc

SEQ ID NO: 145575 - RNA, 92 nt, Homo sapiens
gcacagccggagaagcggagaagacaagagcccgcgggcacgacccggggcgggaagaagcccgccgccaccaccccaccaccagcgcagca

SEQ ID NO: 145576 - RNA, 54 nt, Homo sapiens
gcaggcgcaaggccaggcgacccgacgggccaccgaagacgccaagccacgaac

SEQ ID NO: 145577 - RNA, 84 nt, Homo sapiens
ggaggagacgcagccgccgccgcagccaagcgccccggcgacagcccagacgggcgcagcccagcccgaaagcagaacgacgcc

SEQ ID NO: 145578 - RNA, 74 nt, Homo sapiens
cacaggaaaaacagccacccagaccagccccaggggaacaggacaaccaagggaggcgggagagacagaaaaag

SEQ ID NO: 145579 - RNA, 83 nt, Homo sapiens
ggcaggaaagaaaagcaagcccaggaagcacgaaggaccgaaggagaagaaggagaaggggaggagaaggcaagccggaaaga

SEQ ID NO: 145580 - RNA, 97 nt, Homo sapiens
ccagccgcaccacgagagccgagccggaggaggaccccaagagggggagcgggggagagccaggaaccgcggggcacaaaaccagcaaacagaggcg

SEQ ID NO: 145581 - RNA, 64 nt, Homo sapiens
gccgccaccaggcagagccgaggaagcgaagcagaggcccagaaagagcacgaggcgagcgggg

SEQ ID NO: 145582 - RNA, 72 nt, Homo sapiens
aacaacacccgggcagcgcaagacagcggagagaacccccaccggggagcaacgcaggggcaggaaagggca

SEQ ID NO: 145583 - RNA, 80 nt, Homo sapiens
ggcggcgcgcgacccccgcgcaggacggacgaaggacggcggagagcacagccaccgacgaccaccaccgcagaacgggc

SEQ ID NO: 145584 - RNA, 69 nt, Homo sapiens
gggcagggggcgaggacagcggccgccgaacaccaagcgccgcacaaggaaacagaaccgaagccggac

SEQ ID NO: 145585 - RNA, 76 nt, Homo sapiens
cgcgagaggaagacacccgaccgacaaaagagcccagaccccacagccagccgagggcgagaagcacagaaacccg

SEQ ID NO: 145586 - RNA, 75 nt, Homo sapiens
gaacccaaccgaggacgccccccacaccaccgaccaggaccgggaagccgcaaccggacaagagaaaaaaagggc

SEQ ID NO: 145587 - RNA, 74 nt, Homo sapiens
cgcagccagccaacaggacacaggcgcaccagggcagcagccggcgcacacaacggcgaagacggggaggaaca

SEQ ID NO: 145588 - RNA, 71 nt, Homo sapiens
gggaaggaggcgaacaggaagccgcccggggagaggaaccaaccaccaaaccccaggaaccacccaacggc

SEQ ID NO: 145589 - RNA, 106 nt, Homo sapiens
agaggcccgggagccgccggccaggacgcccccgaggggagaccgcgccccggaggaccaagaacgcccagcccgcgggcaccggcagaaaggaggaggaaaacac

SEQ ID NO: 145590 - RNA, 82 nt, Homo sapiens
ggggggacacgccgcggcgcagaggacgacaccaacaagaagaaggcgacagaggaccacgagaaaagaccagggggcccga

SEQ ID NO: 145591 - RNA, 71 nt, Homo sapiens
cgaagacgaagcacgcgcaggagggaagcacaggggaaggccggaaaggcggcacaggaggagaggaagcg

SEQ ID NO: 145592 - RNA, 76 nt, Homo sapiens
gcggaccgcggggcgccacggccgcacgacgcgcgggcaccgcgcggacccacgaggaagcggccgcggcgaaccc

SEQ ID NO: 145593 - RNA, 76 nt, Homo sapiens
gagcaggcggagcacccaccacggagggaaagaccaggcagccaaaaggcagcaaaggcgagcaaaacaagagaac

SEQ ID NO: 145594 - RNA, 78 nt, Homo sapiens
ccacacgacgaccacggcggaggaaggaccccgccaaaggccaagccgacgccagcgggcgccacccaacaggcgcac

SEQ ID NO: 145595 - RNA, 73 nt, Homo sapiens
agagagccccaggagaaggaacgccaggagcgccgggagacacacgcaaaaagaaaaggaagaaaagagaaac

SEQ ID NO: 145596 - RNA, 88 nt, Homo sapiens
aagacagggagcgagagcggagaagcgggaggagaccacccaaacgcggcacgggaggcgcggaggcggaggccacccagacccggcc

SEQ ID NO: 145597 - RNA, 62 nt, Homo sapiens
agcaagacccaggacaccccgaagccgagaaagcaccgagacaaccaagcaagggccagcag

SEQ ID NO: 145598 - RNA, 80 nt, Homo sapiens
aggcgagaacgcacaggccgcgcagagcgggaccacccgggcacagcaggcacggagggaccaccaggaagaccggacgc

SEQ ID NO: 145599 - RNA, 95 nt, Homo sapiens
cccgccgccaccgcccaggaccgccggccgggggacgagccggagcagcagccaggcagaaccagagaccacagaagaaggaagggccacccagg

SEQ ID NO: 145600 - RNA, 75 nt, Homo sapiens
cacgcgccgcgcccagaagaaaggaaacaggccagaagaagccacacccgaaaaaaacgcccaagagcccaagca

SEQ ID NO: 145601 - RNA, 61 nt, Homo sapiens
acgcagggcgcccccgaggagacaaacaagaagcgaccccgcaacaggcagaggaacgaaa

SEQ ID NO: 145602 - RNA, 101 nt, Homo sapiens
caaacagaggaacgggccccaaagcggaacagcgacgacaaggcggaaacaacacagcaagccacacccagaaccagcagcccgcagaagaaaggcaaacc

SEQ ID NO: 145603 - RNA, 72 nt, Homo sapiens
cgagcggggccgggcgcccggccgcgcaccgaggggggcgggccgagcacccgcaggccccgcagaggcgcc

SEQ ID NO: 145604 - RNA, 81 nt, Homo sapiens
gacgagccgggaggaacggcccggaaacaggaggacggcggaccccgacgcagaccaggcggccagcgcagagccgcaggg

SEQ ID NO: 145605 - RNA, 71 nt, Homo sapiens
ggcgaggccgggcggcgccgccccaccggacccgcagggcggacaggaccaccaggaacaaagagaaagca

SEQ ID NO: 145606 - RNA, 69 nt, Homo sapiens
gaccaagaaccagccccgaagacaaaggcggcagagggcaagggcagagcaagacgaagccgaaaaagg

SEQ ID NO: 145607 - RNA, 55 nt, Homo sapiens
aggagccagacacccgcaaaagagagacgcagaaggagacgacaacgagggagcc

SEQ ID NO: 145608 - RNA, 81 nt, Homo sapiens
gaaccgcaccccacacgacccacaggagccccaggagcccagacaccagccccccaccagcccaccccagcagaacgcgga

SEQ ID NO: 145609 - RNA, 56 nt, Homo sapiens
gagagacgcgggaaccgccagcaaaccacacaggcaagaacggaagcacgggcgga

SEQ ID NO: 145610 - RNA, 76 nt, Homo sapiens
gccgcgaagaaaaccaagaaccgaggaggcgcagccagccagccacccacggaaaaaagcacagccgagacggcac

SEQ ID NO: 145611 - RNA, 68 nt, Homo sapiens
gagcaaaaacccaaaccccccaccagcgccaagagcagggaagacacacccaggaccaaccgaaaaca

SEQ ID NO: 145612 - RNA, 75 nt, Homo sapiens
ggccagcgaccaaaagccagggagaggaaacccccggaacccaggaccacccagacagggagcccaccgagccag

SEQ ID NO: 145613 - RNA, 92 nt, Homo sapiens
gggccgcccaagcagaggaacaccagccccagcagcgcagcagcccaccaccagggacgggccagcggggaacagggggaggcgcccgcgca

SEQ ID NO: 145614 - RNA, 68 nt, Homo sapiens
caggagaaaacccagacagaacaccacgggaggaagaaaagccccgccggagggcaccaccaagggcg

SEQ ID NO: 145615 - RNA, 61 nt, Homo sapiens
gaaacaccacggcggcgccgaggccccaaggaaaaaagaaggggcagagaacacagcaaag

SEQ ID NO: 145616 - RNA, 72 nt, Homo sapiens
cccccacgcgcacacaagggagcccccccaccacccccgacaagccccagccaagacccaccaggcagggga

SEQ ID NO: 145617 - RNA, 63 nt, Homo sapiens
ggggcacacgcccgcacgagcagcggagaaggcagaggggcgggaacaacgggccaaggggca

SEQ ID NO: 145618 - RNA, 77 nt, Homo sapiens
gccggcaagaacggacgggcgccacaagccacacggagggggccgaggcgcagcggggccccacccagcagcaggcc

SEQ ID NO: 145619 - RNA, 65 nt, Homo sapiens
gggccgcccccaccccgcccgacccccaaggagccccagaccgccagagcggaacgaccccagag

SEQ ID NO: 145620 - RNA, 84 nt, Homo sapiens
agaggacgggaccaggcgaagcggccgagcaggcgagcgaacgacggacccaaggccagccagccccaggcaccagcggacagg

SEQ ID NO: 145621 - RNA, 60 nt, Homo sapiens
agcccaaaaccaaagagccaaagacacgcagcggccgaggcaggggaagagagcggcccc

SEQ ID NO: 145622 - RNA, 36 nt, Homo sapiens
aggaaacgcaaggagggcccgcgaaaccccaaagac

SEQ ID NO: 145623 - RNA, 48 nt, Homo sapiens
aaagggccaaagaagggagagaggagaccgaggacaggccggacaccg

SEQ ID NO: 145624 - RNA, 73 nt, Homo sapiens
gagacgacaagggcgaccccggccagagaacaagcagaggaaagacacgccagagaagaacaggacacaacag

SEQ ID NO: 145625 - RNA, 87 nt, Homo sapiens
cgcccgcagccagggcgggggggaggcgcccccgacccaccgagggacggcccgggcacacgccaaagaagagagcaaggaccacac

SEQ ID NO: 145626 - RNA, 76 nt, Homo sapiens
gaccgagagcggaccgagagcgcgaaacgcacgagaagagcgaggaaaacgccacgacagacacaaccaagcaccg

SEQ ID NO: 145627 - RNA, 76 nt, Homo sapiens
gaggcaggaccccagcccagaagacgcggggagagggaaccgcaggacgcagggccccagacagagaaggggcgcg

SEQ ID NO: 145628 - RNA, 75 nt, Homo sapiens
agagcgcggaacaggacgccccgaccgccgcccgccagcggacccgcggcaccgccccgcgcgcgcccggccccg

SEQ ID NO: 145629 - RNA, 72 nt, Homo sapiens
gagggagaacaagaacgcagcggagacccaggaagcgcaccggggccggagcgcacgccccagccaccgcgc

SEQ ID NO: 145630 - RNA, 73 nt, Homo sapiens
gcccaaagcgagccaaagggccggaggaaacaggaacacgaaagaggaaaaacgcacaagaaaccgaagccaa

SEQ ID NO: 145631 - RNA, 67 nt, Homo sapiens
aacccagggggcgaacacggaagacaacggcaagcggagaagagcaaggccgaaccgagaggaaggg

SEQ ID NO: 145632 - RNA, 55 nt, Homo sapiens
ggcaaagcagaggaagaacagaggagaccaggaccaacggccagccacgcagaca

SEQ ID NO: 145633 - RNA, 75 nt, Homo sapiens
ggaccgacggcagcagcgggaagccaacacagaaaccgccacagggaaggacacagacaaaagaccaggagagag

SEQ ID NO: 145634 - RNA, 67 nt, Homo sapiens
aaggcggaaaaagacaccaccaacggaaaacaacacagcggaagccgcagaaggaccggccagaagc

SEQ ID NO: 145635 - RNA, 65 nt, Homo sapiens
cgaaagccccaccgcgccccagcggccacggaggggcggcgcgggcgagggcgccacgggccgag

SEQ ID NO: 145636 - RNA, 80 nt, Homo sapiens
gaacgccgccggaccccgggaggcgaggacggccgccagaaaagcaggacggcagcaagccgggcggggagaaccagagg

SEQ ID NO: 145637 - RNA, 70 nt, Homo sapiens
gcccacgcagggccaacagggcgaaaagccaggagcaaaagacgagcgcgacgccaccagcaacgaaccc

SEQ ID NO: 145638 - RNA, 83 nt, Homo sapiens
gcggacacgagaaagggcgcagcacacacccccacgagccaaccggacgcaggaccgaaccacgaggggaggagagaaccagc

SEQ ID NO: 145639 - RNA, 69 nt, Homo sapiens
aggaggcaaaaaggcggcaaacgccaagaaccaaggaaaagggcaaccggaaaaaaaagccggggcagg

SEQ ID NO: 145640 - RNA, 73 nt, Homo sapiens
aacccgaagcccacagacccacagacaggcccaaacgcccaacaggcccccagaccagaaggagagcggcaga

SEQ ID NO: 145641 - RNA, 84 nt, Homo sapiens
agcaaggaggccccagcggaccgaacaggcccccacagggcaggaagccgccgcccagccaggacggggaggagcagcagccac

SEQ ID NO: 145642 - RNA, 78 nt, Homo sapiens
ggaggaggaagaggcggccggcaagagcggcggagcgcaggggagaaccggaaggaacccagaaccgcgggcagcaag

SEQ ID NO: 145643 - RNA, 36 nt, Homo sapiens
gggacccgacgcccgcacgccccagccggaaaccag

SEQ ID NO: 145644 - RNA, 67 nt, Homo sapiens
aacagaaaacacgggaaacagccaggagagccagagagccaacagggcaacgagcaaccaaaaccac

SEQ ID NO: 145645 - RNA, 40 nt, Homo sapiens
aaacaagaaacaaaacgacaagcccgcccggagcaggccc

SEQ ID NO: 145646 - RNA, 87 nt, Homo sapiens
cccggagacagcccaaaacccggaagagcgccccaggagaaacaaggacagcacagaaggccggcaggcagacaggagcgggagagg

SEQ ID NO: 145647 - RNA, 54 nt, Homo sapiens
acgaggagcaaccaaggccaaagaccccccgccgcccgcgcccgcggcagcagc

SEQ ID NO: 145648 - RNA, 53 nt, Homo sapiens
aaaacaagccggcagaaaccaccaaacagcaaccgcggggggaacccgaggaa

SEQ ID NO: 145649 - RNA, 52 nt, Homo sapiens
caaccccagaccggagccagacagcagccaagggggacgaccaccagccagg

SEQ ID NO: 145650 - RNA, 71 nt, Homo sapiens
cggccgcagcgagagcgaggaggagaacagccagcaaagacaagagcagaccagcagccgcagcgcgacag

SEQ ID NO: 145651 - RNA, 83 nt, Homo sapiens
cacgcaggcaacacgagccccagcaacccaacaccacgacagcgaggcagccagcagcagccaccagagcccaagagcacagc

SEQ ID NO: 145652 - RNA, 67 nt, Homo sapiens
cacaagaaggagagacgcagagccagacaagaccaggagagaggccaggacccccaccagaaccaga

SEQ ID NO: 145653 - RNA, 69 nt, Homo sapiens
gaagacgcagaggaaacggcagcagaacacccacgccgggaaccccaccaaggaaagccggcacccaga

SEQ ID NO: 145654 - RNA, 76 nt, Homo sapiens
agacccgccaggaccaacagaggagcaaaagaagaggggccagacgcaaagcccaggagccgccgcgcccaggcgg

SEQ ID NO: 145655 - RNA, 77 nt, Homo sapiens
agaggcgcagaaagcaaacggccaagagaagaagggcaaggggacgcgagaaaggccgacagaacaggccccgcagg

SEQ ID NO: 145656 - RNA, 74 nt, Homo sapiens
gggcaacgcggacccgggagaacaccagggccggaggaaccacaccggaaagcaacacagagaagggccgaggg

SEQ ID NO: 145657 - RNA, 34 nt, Homo sapiens
caggggagcagaagaacccggacgaggggcagga

SEQ ID NO: 145658 - RNA, 77 nt, Homo sapiens
gcgcgggacgggcaaaggaaaggaaagggcacacggcccgaacaagggaacaccagcacagcggcagaagcaaggcc

SEQ ID NO: 145659 - RNA, 63 nt, Homo sapiens
caaaaccaacgcaaccaccccagggaagacgccacgcccagaccagcggccgcggacaaggac

SEQ ID NO: 145660 - RNA, 77 nt, Homo sapiens
acacgccggaacgccggagcgcccccacgcagacgcgccgccccagccgcccccgacgccggaagaaaacccgagcg

SEQ ID NO: 145661 - RNA, 85 nt, Homo sapiens
ggaaagggaaggagcaagccggcggaagcgacaagaagcagcaccggggagggaggccaggccaacccccgcgcggaagcggcgc

SEQ ID NO: 145662 - RNA, 76 nt, Homo sapiens
cgacaggccgcgacggccggaaggaaaagggaggagcgcggcaagacaaccacgaaaacgaagaggggagaagcac

SEQ ID NO: 145663 - RNA, 68 nt, Homo sapiens
aagcacacaacggcggagcaagcaccacaggcggacaggcggcagaagaaaacgacaccacaccaggg

SEQ ID NO: 145664 - RNA, 42 nt, Homo sapiens
cggcgcccggggagcaggcagacgggagagaagcgccggccg

SEQ ID NO: 145665 - RNA, 82 nt, Homo sapiens
aacgcagcagcgaacaaagaaacggcagcggccaaacgcacccacaaggaccagaaggacccaaggacgaaggcaggggaaa

SEQ ID NO: 145666 - RNA, 73 nt, Homo sapiens
cagaagccacagaggaagacggaccagaacccgcggagccacccaagcgaagaaaagggacggccagagcccg

SEQ ID NO: 145667 - RNA, 60 nt, Homo sapiens
cgagcggagcggcgcggggcgggcggcggccccggcagggcgcgcgggggcacagcccag

SEQ ID NO: 145668 - RNA, 76 nt, Homo sapiens
aacacggacacgaaagcagagaccaggagccgaacacccaccggcccgcaagaaacacagaagcagcccccaagag

SEQ ID NO: 145669 - RNA, 77 nt, Homo sapiens
cagggcagccaccgcgcaaggaggagcggggccgaagccgaggggagagggaacaaggcacagccagagaacaacac

SEQ ID NO: 145670 - RNA, 87 nt, Homo sapiens
gcaggagccagcgggggaggggccccgcgcggaagagcggccggggaaaacgggcgaacccaggacagcagggaagaacggaaacca

SEQ ID NO: 145671 - RNA, 55 nt, Homo sapiens
gcacgcacaagagccccgcgagccaaggccaaagccaccgccccgcgccgccccc

SEQ ID NO: 145672 - RNA, 75 nt, Homo sapiens
cagaagccaagccccagcgccacccgagccacccaacgaggcccacagacaagccgcccccccacccgacggagc

SEQ ID NO: 145673 - RNA, 67 nt, Homo sapiens
cgaccgaacgcgaagagccgccaacgggagaccgaggggccaccagcaggagacagggaacccggaa

SEQ ID NO: 145674 - RNA, 68 nt, Homo sapiens
gagggggggccccgcgcaaagggaaaagaaggaggccagcgggacacacaaagaaagacgaaggacac

SEQ ID NO: 145675 - RNA, 80 nt, Homo sapiens
ccgcgggccagcaccaggaggacggaagcggagccccccccacaggcaaggaagacgccgagcggcggagaaaccaccac

SEQ ID NO: 145676 - RNA, 61 nt, Homo sapiens
ggacaggccagagggaggcaaccaccacagccacaaacagacccggaggagcgcaccgcca

SEQ ID NO: 145677 - RNA, 54 nt, Homo sapiens
gccaagcaggaccacccaccagccaccaggcagccggcacccgcacaacccagg

SEQ ID NO: 145678 - RNA, 76 nt, Homo sapiens
ccccggccggccccgcccccggccgagcgacgagagaggccgcagaagggcagaagaacaggccgggcacaaaaag

SEQ ID NO: 145679 - RNA, 77 nt, Homo sapiens
gcccggaggggaggagcgccgcggcgggccccgggaggcagaagagaagcccgcgcccggaccgacaggaaagaagg

SEQ ID NO: 145680 - RNA, 78 nt, Homo sapiens
gaccgagaccggaccgagagcggaccgagagcgcgaaacgcacgagaagaggacacgagcccagccaggcgagccagc

SEQ ID NO: 145681 - RNA, 68 nt, Homo sapiens
gaaaaggcacgccacggggaaaaacagacagggggggaccaggaaggacggcggccccggaccagggc

SEQ ID NO: 145682 - RNA, 84 nt, Homo sapiens
gcgccacaccgcccaccacgagcaccgaagagcgcgccgcccccgaagggggcagacccaaaggaaacgcacgaaagaaacagg

SEQ ID NO: 145683 - RNA, 71 nt, Homo sapiens
aaacagccccaaccgcgaacggacaaaagacagggggcacaccaggacagagcaaacagaaggggacccag

SEQ ID NO: 145684 - RNA, 71 nt, Homo sapiens
aagacaagccagcacaaaaacagccaccaagacacaaagcgaaacggggaaaaaagaaacagcgagaggca

SEQ ID NO: 145685 - RNA, 76 nt, Homo sapiens
agcaaagcgcaacagaaacagagagaaaagcacacacaccagacgaagaacccagagaaaggaaaccaagcacaac

SEQ ID NO: 145686 - RNA, 82 nt, Homo sapiens
cccccacaaggccaagacagcgaaccgaacccacggcaaggcggagcgggagcaggcgcgcaccgcaccaaggagacaagac

SEQ ID NO: 145687 - RNA, 79 nt, Homo sapiens
agggcaccgagcggcggagagccgggagaaacacaaagagaaaagggggaaggggacaggacgaaaaccgcccaggagc

SEQ ID NO: 145688 - RNA, 76 nt, Homo sapiens
caggacaacgaaaggccagcaccagggcagggacccgggcaggcagcacgaagggagaaggagacccaggagaaga

SEQ ID NO: 145689 - RNA, 80 nt, Homo sapiens
gggggacacagcggaaaacacggaggagaaggacagcagggaagaacggaaaccagagaaagaaacgcccccacacaaaa

SEQ ID NO: 145690 - RNA, 83 nt, Homo sapiens
ccggacccccaggcgccaagcacccgcagcaaagcgaacccgaggaagaagagaaaacaaaaaacgacaaaaaaacagaagaa

SEQ ID NO: 145691 - RNA, 78 nt, Homo sapiens
ccgggaggcgaggacggccgccagaaaagcaggacggagcagaaggcaagaaagggagaagccagaaaagcagaaaga

SEQ ID NO: 145692 - RNA, 56 nt, Homo sapiens
aggaagacaccgggaccaccagggaggagcacaaacgcccaccacacagcagaaac

SEQ ID NO: 145693 - RNA, 69 nt, Homo sapiens
acggcaaaacaaccacaccccaggacacaggcggggccggggagcccgggccagaccccccagacccag

SEQ ID NO: 145694 - RNA, 55 nt, Homo sapiens
aaggagagaagaaccaaagaagcaaaacacgaggaggcgacacccgaagccccga

SEQ ID NO: 145695 - RNA, 77 nt, Homo sapiens
agccagggacggagggccggccgcaccccagaggagggcggcgggggcggcgcgggggagcgggaggagccagagca

SEQ ID NO: 145696 - RNA, 60 nt, Homo sapiens
caaagcaccgagcgcccagggggagacgaaccggcaaggaacagacgaagagcagagcca

SEQ ID NO: 145697 - RNA, 74 nt, Homo sapiens
agcgcagcaagaagggccggagagcgcaggacagaagagcacacccgaagcaggaacacggaccacgcgcaaag

SEQ ID NO: 145698 - RNA, 70 nt, Homo sapiens
gaccccaacacccgccagaccacccaccgggcgagcgaagagcgacagcaccgcaaccgcgaggagcgga

SEQ ID NO: 145699 - RNA, 100 nt, Homo sapiens
cgcacagggcaccagggccgcagaacggagccaaggcccgcccccagcccgcagcgcaaagacgaaggggaaccccaggcacaggcgcaggaagccaaaa

SEQ ID NO: 145700 - RNA, 76 nt, Homo sapiens
gagggaaaaaaggcaaacagagcaggagcacaccccggcaccgagcggacggagagcccagcaacgggagcagaag

SEQ ID NO: 145701 - RNA, 82 nt, Homo sapiens
ccaagggaaaaacaaaaaaggggaaggcaaacggcgcgcacaggcggaacccggcggccagagagcagaaaaaggaaagaga

SEQ ID NO: 145702 - RNA, 80 nt, Homo sapiens
aacgcccagccgggcaccaacggggcccaacaccaacgagaccacaccagccccacgcggaccacccaagaagaccaagg

SEQ ID NO: 145703 - RNA, 81 nt, Homo sapiens
ccgggccgcgcccaccccaggccggggcgcacgcggccccacgcagccagccccgcagcgcacccacaccagaaagcggcg

SEQ ID NO: 145704 - RNA, 70 nt, Homo sapiens
agcccaacccagaggaacgacccaggccaggagagcccagaagagaaggaagcgcacacaaggagaaacc

SEQ ID NO: 145705 - RNA, 85 nt, Homo sapiens
ggcgccgcgaagggaggcggcagaagaagacgaagaagcagaagcgcgccagggcagcaggagagagaacccggccggaaacgga

SEQ ID NO: 145706 - RNA, 86 nt, Homo sapiens
cggagcgcagcgcggccgcacagggccaagacggcagaggcccgcacggacaacacgcccggagagacggacggagagggcgggag

SEQ ID NO: 145707 - RNA, 82 nt, Homo sapiens
aggcgccgccccccagcaaacgagaaaaacccagcgaccgacgaccggccggggggggcacagagccccggaagacagcccc

SEQ ID NO: 145708 - RNA, 64 nt, Homo sapiens
aaggaaggggcacacaaagggacacacaggaagacgaacacggaacgggcgagaagaaagcaga

SEQ ID NO: 145709 - RNA, 76 nt, Homo sapiens
gggaaggaagaagaccaagccagagcaagacccacgaagggcacacaaaggacccaccgggaaaggacagagcagc

SEQ ID NO: 145710 - RNA, 77 nt, Homo sapiens
ggaggcggaggcagaggggaggcgcgaaagggcggagaacggaaaagcaccaggaagcagagaggaccgcagaaggg

SEQ ID NO: 145711 - RNA, 87 nt, Homo sapiens
gccagaaagaggacaggcgcgggcagcgggaagcgaggccccagagcggcaccaaaagaaccacgccgagggaagcagagaaagcgg

SEQ ID NO: 145712 - RNA, 72 nt, Homo sapiens
cggccacggcgccagagccggggacgaaagggaaggacaggcagagcaaacaagccccaaacaacccaaccc

SEQ ID NO: 145713 - RNA, 82 nt, Homo sapiens
cgcgggacggggcgccgcccggggcgaggcagggccagcagcaggcgggagggaaggaccaacgcagcgggcaacaagagga

SEQ ID NO: 145714 - RNA, 83 nt, Homo sapiens
cggaaaacccgccagcacacacccaaaggcacgcgaggcacacagaccccagagcagaaggaggagaacccgaccccaaccca

SEQ ID NO: 145715 - RNA, 65 nt, Homo sapiens
acccagacacacccacaacgcccaagacagggacaaaagggaccggaacggaggcaccacccggc

SEQ ID NO: 145716 - RNA, 65 nt, Homo sapiens
cccgagaaagaaggaaagaaacgaaaagcacggaaagggaggcgcagcccccaagacgggccccc

SEQ ID NO: 145717 - RNA, 51 nt, Homo sapiens
gaacgccaacaaagaaggcccggaaccggaaggggcacgacacgagacacc

SEQ ID NO: 145718 - RNA, 73 nt, Homo sapiens
cggcgagcagccaggccaggagagaaaggggccacagcacccaggcggccgaacccgggccaagcagccgccg

SEQ ID NO: 145719 - RNA, 66 nt, Homo sapiens
acggaaccagcgccgagggggcagcggcaagcaggggagccagccacacagagacagaccaccgaa

SEQ ID NO: 145720 - RNA, 86 nt, Homo sapiens
ccgggggcgcgggcggcggcgccggcaggaagagcgggaacagcccacggcgaccagggccaggccaaggagggcgcccaagacca

SEQ ID NO: 145721 - RNA, 73 nt, Homo sapiens
gcgcgagccacgcagcccccagacagagaacgcagaggacaagcagccaacgggaggcgcccggcagggaaac

SEQ ID NO: 145722 - RNA, 73 nt, Homo sapiens
ccgagccacaagcccacgagaggaccagcggaggagagcgcgcaggagaaagccacaagagcgaagaaggcga

SEQ ID NO: 145723 - RNA, 80 nt, Homo sapiens
gagcgaccgggcgcccggaggccggggaggacagagcgggagccaccagcgccaaagggaagccaggagcccgggggcac

SEQ ID NO: 145724 - RNA, 67 nt, Homo sapiens
cgcccgcccgacccgccaccgccaggccagacagagaacaaacagcggacaaaaaacaacccgcaag

SEQ ID NO: 145725 - RNA, 77 nt, Homo sapiens
gggccaggcggcacaccccccaagaccggcggcccaacccaccgggaacaagcgggaaacggagccaccaacaagcg

SEQ ID NO: 145726 - RNA, 62 nt, Homo sapiens
gcccgacgcagcaaaggcaaacggaaagagcaagacggcagcccaaaccaggaaccagaacg

SEQ ID NO: 145727 - RNA, 54 nt, Homo sapiens
gacccggcgggaccgccggaggaaggcgccgccgggcagagcaagaaacacgcc

SEQ ID NO: 145728 - RNA, 79 nt, Homo sapiens
ggccccggcgccaggccacccggccgcagcagcagcaggggaggaacacagccaagggaccggagacgccaaaggaaaa

SEQ ID NO: 145729 - RNA, 75 nt, Homo sapiens
acagcagacgccggccaaccaaggcgggacagggcgggaggggacgaaggaagcaaggcgaaccacgggaacaaa

SEQ ID NO: 145730 - RNA, 32 nt, Homo sapiens
ggaagagcccgccgaagccgaggaagcaggca

SEQ ID NO: 145731 - RNA, 71 nt, Homo sapiens
agaaaaaaaaaccaacacaagagcaaggcaggaacggaccaaacagcagcgggcgcaacgccacaacaaca

SEQ ID NO: 145732 - RNA, 74 nt, Homo sapiens
acaccaagcaggccccggcagagagcgcagaagacaggacaaaaagcccacacaacaccaggaggaccgaaaga

SEQ ID NO: 145733 - RNA, 87 nt, Homo sapiens
cgagacggagcagagccgcgggcgccggagccgaggcgagcgccgcgcgcaccacgaggaggaaaaccaggaaggacaggaccagaa

SEQ ID NO: 145734 - RNA, 83 nt, Homo sapiens
cggcaaaaggcggcgccgaggagcgggacaacccaggagcagacagagaagcgcgcagcagccccccgaaccaagcccaacca

SEQ ID NO: 145735 - RNA, 78 nt, Homo sapiens
cggccaggcgacgccacccaagacacaaacggcgacacaggaacccagcagaagccagccgccacgccgagccagcca

SEQ ID NO: 145736 - RNA, 66 nt, Homo sapiens
gccagcaagacagaaccgccaaagcgcgcccaaccgcccagacagcccagcccgggccagcagccc

SEQ ID NO: 145737 - RNA, 75 nt, Homo sapiens
cgccacggaccgcgggacaagaaaacagcggcgagacaggcgacaggcgcaaaggggaacaggacccgaccaaca

SEQ ID NO: 145738 - RNA, 79 nt, Homo sapiens
cagcagcaaagaaaaccagcacggaggggagaagggggagaaagccaccacacaacccaaacaagagggaagccgagaa

SEQ ID NO: 145739 - RNA, 59 nt, Homo sapiens
agcgagggggggaagcagggcggaagggcgaaaagcgcgcccccaaacggcgaacggag

SEQ ID NO: 145740 - RNA, 74 nt, Homo sapiens
cgcgcgacaaaacagggcaggcccgcacaggaggaaagccgggaagacaagacagaccagacggaagacagaaa

SEQ ID NO: 145741 - RNA, 68 nt, Homo sapiens
aaagaggcgcaagaacgccagggaaagaagacaagaaacgccgccaaagaaagggaaccagaccacgc

SEQ ID NO: 145742 - RNA, 75 nt, Homo sapiens
cgcgcagcacgcgcagacccaggagccgcacgcgcacggagcaaagcgagccgcccgacgaccccagcccggggg

SEQ ID NO: 145743 - RNA, 67 nt, Homo sapiens
caaggccaaaagccaaagcggaaccaacgccccaagaaccagcaggaaccaaggggagagccagcaa

SEQ ID NO: 145744 - RNA, 69 nt, Homo sapiens
cgaagaaagcagacggggcggcagaccgagagggggccagcccagacgggagggagggcgaggaagacc

SEQ ID NO: 145745 - RNA, 67 nt, Homo sapiens
cgcccccggacgagcacgaggacggggcaaccggggacagcccgccgagacgagccaccaccgaccg

SEQ ID NO: 145746 - RNA, 37 nt, Homo sapiens
accaagcacggaaccaaacggaaggagcggagaacgg

SEQ ID NO: 145747 - RNA, 74 nt, Homo sapiens
cgggagcgggaccccagcaggagcaggagcgggagcggcccaaggaaaggcccaggcacagcagacgcacggag

SEQ ID NO: 145748 - RNA, 88 nt, Homo sapiens
ccgccaagaaccccccacagccccggggaccagaggagaccgccacacaagagaagacccaccgaggaggagaggggaacgagaagcc

SEQ ID NO: 145749 - RNA, 62 nt, Homo sapiens
gcggccgggcaagagccgccgcggaccagaggcagcccaagacaccccgcggcacgccgccg

SEQ ID NO: 145750 - RNA, 56 nt, Homo sapiens
gcccccgagggcgggaacagagccgcccgcgccccacgcgccagaaggccacccgc

SEQ ID NO: 145751 - RNA, 74 nt, Homo sapiens
aaagacccaacagaaacacggaccgaaagagggccaaagagggaggcggccgaaggaggacggcgccacaggcg

SEQ ID NO: 145752 - RNA, 76 nt, Homo sapiens
cgaggagacccaacgcccccacagggacccggcagcaaccccaacaaacgccagaggacccgaccagccaggccga

SEQ ID NO: 145753 - RNA, 81 nt, Homo sapiens
ggaaacacagcagaaacaaagaagcagcgcgaaaggggcccaccagggaggaagaggcaggcgcagcagagagagcagagc

SEQ ID NO: 145754 - RNA, 67 nt, Homo sapiens
cggaccggcgcccggacaacccgaagggccagggcaaaggcacacaaagcaggacgcaagagacaag

SEQ ID NO: 145755 - RNA, 76 nt, Homo sapiens
gagccagagacaagaacaagggcgacagccggccaagaagcaaggaaaggcaagcagaggaccaaccagaggaacg

SEQ ID NO: 145756 - RNA, 78 nt, Homo sapiens
cacgcaagaggaacaagacagagaccccgaggaagacaacgcgagacgacaacaaagaagaagaccggaacaagagaa

SEQ ID NO: 145757 - RNA, 75 nt, Homo sapiens
ggagagcaaagacgagcagacacgcaaagaagcccgaggcgcaagagacaaaaggaagagcacaggggaagaaga

SEQ ID NO: 145758 - RNA, 86 nt, Homo sapiens
ccacccaaggacgccgcagcccagccagccgccaagaacgcagcagcagccgccaagacgggcgaagaagagcagagcagccgaag

SEQ ID NO: 145759 - RNA, 67 nt, Homo sapiens
ccggcccaagacaaacgagagaaaaggcacgacggccaagaaagagcagaccagaaaagaaggcaac

SEQ ID NO: 145760 - RNA, 102 nt, Homo sapiens
gcagaagaccaacacaccagcgcgggaggcagaccggacgcaaggaggaagaggggccgagagaggaggcgggccaaagcacccacacggggcgccaggccg

SEQ ID NO: 145761 - RNA, 81 nt, Homo sapiens
gggccgaaacacagagcaagcacacgacagacaacaacaggcaggaccccaggaaggccagcgcccagagaacgcacagcc

SEQ ID NO: 145762 - RNA, 68 nt, Homo sapiens
ccaccgaaccgacagcgacgacagaccacagacagcacggacccgaaaagggcacaccaacgcacagc

SEQ ID NO: 145763 - RNA, 82 nt, Homo sapiens
cccccccgccaaggcccggcgagagcaagaaagaacaggccagacaaacagcgaagagcagaaaacccaagaaacaaaagaa

SEQ ID NO: 145764 - RNA, 35 nt, Homo sapiens
gccggaagaagcagagcacgggagggaccgagaac

SEQ ID NO: 145765 - RNA, 78 nt, Homo sapiens
caagcaaagaccaagagaagaggacagcagggaagaacggaaaccagagaaagaaacgcccccacacaaaagcgagac

SEQ ID NO: 145766 - RNA, 75 nt, Homo sapiens
caacgccacgacaccggcacccagcaccacccggaggagaccggcagcagacagcgggaagaggcaggccgacgg

SEQ ID NO: 145767 - RNA, 75 nt, Homo sapiens
cccagacgccccaggacaccaccagccggaggaccaaggaggagaaaagaagagcgaaaaaagccgcagaacaac

SEQ ID NO: 145768 - RNA, 80 nt, Homo sapiens
ggggaggcagcgcgggacccagcccaggcggcgcggacggggcgggagaaacaaggaagagcaacgcgcgagggacagaa

SEQ ID NO: 145769 - RNA, 61 nt, Homo sapiens
gaagccggaccccggggaccgagggcgagcgaggggagccgccaccaaaagcagacggaaa

SEQ ID NO: 145770 - RNA, 81 nt, Homo sapiens
cgggagagcgcgccagccggccgcgacgcaaacgccaaggcgccggggagcaggagaagaaggcacccagcgagaccgccc

SEQ ID NO: 145771 - RNA, 57 nt, Homo sapiens
cacgcgcggaaggcagcgcccagcagcgcagggcggagaacggaaaagcaccaggaa

SEQ ID NO: 145772 - RNA, 58 nt, Homo sapiens
cagcagcacagacacgggccaaggggcagagcacaagaacagccggggcggggaaaac

SEQ ID NO: 145773 - RNA, 82 nt, Homo sapiens
gccaaggagccgccaaagccagacgagacccgagggcgcggggccacgcacaggacgcaccggaccgcggcaaccgcacgaa

SEQ ID NO: 145774 - RNA, 73 nt, Homo sapiens
agaaagaaggaaacggaaccaagaacaagcacgcagaaggggaaggcgcacggccaaggaaggccaggaaaag

SEQ ID NO: 145775 - RNA, 92 nt, Homo sapiens
ccaggcagccccgcacgagcggcaaccgaaagccagcagcgggcaaacaacaggccgacacccacacgcggaacgcagagaccagagagaaa

SEQ ID NO: 145776 - RNA, 69 nt, Homo sapiens
aaaggagagacacggaacacaaggaagcaaaagcccagaaaaaaggaaggggaaccacagcaggaacga

SEQ ID NO: 145777 - RNA, 81 nt, Homo sapiens
ggaggcgcaggcagcaacgaggcagcggcaggccagggcagccgcgggcgagggacaggccgagcggagcccaaccagacg

SEQ ID NO: 145778 - RNA, 69 nt, Homo sapiens
aggacgaaggcccacgggcaagacaacggcaagcggagaagagcaaggccgaaccgagaggaagggcaa

SEQ ID NO: 145779 - RNA, 55 nt, Homo sapiens
gagcagcagcgagacccagaccggagagaaacagcaagaaaacagcgggaaccac

SEQ ID NO: 145780 - RNA, 66 nt, Homo sapiens
agcccacacacgccagcagaccaccccgggagggaagggaagaaagagccaaacaggcgagaggaa

SEQ ID NO: 145781 - RNA, 74 nt, Homo sapiens
aaaggaggcaacacacgggaaggcagccgaggcaggaacggggccgaaagacgggaagaccaccggggcggccc

SEQ ID NO: 145782 - RNA, 87 nt, Homo sapiens
ggcgcaagaaggagaacgggagcccaggccaacaagagaagagacacagaaacggaggacaagaagccggacacaaggcgccacggc

SEQ ID NO: 145783 - RNA, 73 nt, Homo sapiens
ggcggaggggcaggaggcgcggacacgcaaaccacacaagcaaaaagcagccagggcaacagacgaaaaaagg

SEQ ID NO: 145784 - RNA, 36 nt, Homo sapiens
gcaaccaaaaccgacggccccggggccagccccacc

SEQ ID NO: 145785 - RNA, 51 nt, Homo sapiens
cggggagccccgcgccacagcgccaacccaaacgagcgagacacacagaaa

SEQ ID NO: 145786 - RNA, 78 nt, Homo sapiens
ccgcgcgaagcggccaaagccgcccagacggccaccggcgggaggaacaaaaggcggcggccggggcagcgccgcgag

SEQ ID NO: 145787 - RNA, 84 nt, Homo sapiens
gcgacccaacaaggcccgggcccccgcccccgacaggagaaagaagaaacaaagagggacccagccaccaaaaggaggcgaagg

SEQ ID NO: 145788 - RNA, 80 nt, Homo sapiens
aaaacaggagaaccagaagaagacaagggaccaggccccaagaaaggacacacagaaaggaggagcccaggaccaccgac

SEQ ID NO: 145789 - RNA, 66 nt, Homo sapiens
ccggggcgccgcgcgccagcccaggaaaggcgccgaagaggacccaaaccaaaaagggggaagaaa

SEQ ID NO: 145790 - RNA, 75 nt, Homo sapiens
agaaacaaaagcgccagagccaagaacgggaaggagaccccggcaacagggaacaggcagcaaaggggaaggccg

SEQ ID NO: 145791 - RNA, 89 nt, Homo sapiens
aggagcagggccccacccggccgcccgcccagcgccgcccccggagggcccacgcagcgccggacaaaggcgggaggcggcagaagcag

SEQ ID NO: 145792 - RNA, 72 nt, Homo sapiens
aaaaagcccgcaggggcgagggagcggccgcgcggggcgcaggcgccccgcggagcgccccaggacggcagc

SEQ ID NO: 145793 - RNA, 72 nt, Homo sapiens
gccgagaagcacccacaagccaagacaacaagaaggacacagggcggaaaaaaaagccccaaggcacaaaag

SEQ ID NO: 145794 - RNA, 77 nt, Homo sapiens
aggaagcccacacagaagagcaggccggaacgacaaggagaacggaaccccccaccacggccacgaacagggacgaa

SEQ ID NO: 145795 - RNA, 59 nt, Homo sapiens
gaccagcaccggcccgaaacgccgaaaaacccaaggagccacaacgaccgagcggacag

SEQ ID NO: 145796 - RNA, 83 nt, Homo sapiens
cagcgcgccgcagccccccaagcggccgcgagaagcagcgggggggcaggcgacgaagggcggagaacggaaaagcaccagga

SEQ ID NO: 145797 - RNA, 75 nt, Homo sapiens
ccaaccagccaaggacccacgggggaaacacaaagaagacaccagaagggccagcaccacgacaacacggcgaca

SEQ ID NO: 145798 - RNA, 83 nt, Homo sapiens
ccgcggaacagcggaggacgaagagcgggacccgagcccgcacaacaacagcaacggaggcgggaccggaacaggcacacccc

SEQ ID NO: 145799 - RNA, 71 nt, Homo sapiens
ggaaagaaaccaggcgaaaggacgacacgaggggccgcgggagagcgggggcgggaggcgggccccggggg

SEQ ID NO: 145800 - RNA, 61 nt, Homo sapiens
cacagccgcaccagcggccgaacggccacgggagccggccccgaggagcaggaagaccgga

SEQ ID NO: 145801 - RNA, 67 nt, Homo sapiens
gaggcggagacaagacggggccacacggcggagaccccccaggcaccccgcgacgaaaggaaaccga

SEQ ID NO: 145802 - RNA, 78 nt, Homo sapiens
gaccgacgcgcggcccgcggccccccagccgcggagaaggagaacgacggcaccggaaggcgggcgccacggaaagga

SEQ ID NO: 145803 - RNA, 92 nt, Homo sapiens
aggccagcgaaggaacccagcccacagcacaggacaaaccaacaaccagcggcccggggcgaggaccggaccgcaaggggccaggagaacgg

SEQ ID NO: 145804 - RNA, 80 nt, Homo sapiens
cacccggccaccccccagggagccgaagccaagggacggccaccccagacagccccagcgccccaggagaccaacacccc

SEQ ID NO: 145805 - RNA, 90 nt, Homo sapiens
cggccgcgcacgaggaggcggcggccgacggggcggcgggagcaggaccgggccaaggggggggaagaagcggaaaggaggggccccggc

SEQ ID NO: 145806 - RNA, 77 nt, Homo sapiens
aaggcacaagaagaccaaggaagcggcccaagaaacaaagccggaagaacaaaaagaaggggggcagaaagaagagg

SEQ ID NO: 145807 - RNA, 65 nt, Homo sapiens
ccgggagaagggggaggccccgcaaccaggcccagagaacagcggggagcgcccgcaggccccca

SEQ ID NO: 145808 - RNA, 86 nt, Homo sapiens
gcgccgcccggggccccgcggcgcaggaggcggggagcgcagagcgggcgagcgcgggaccagaccccacaagaaaacacacaacc

SEQ ID NO: 145809 - RNA, 81 nt, Homo sapiens
cggagagcgcgccgccgccgccgccgccgccacgagcagcgcaccccccacgggcagcagggggagaagcagagaacgggg

SEQ ID NO: 145810 - RNA, 56 nt, Homo sapiens
ggaaggcccccggcgcgagacccgccggaggaacaacccgacccagcgacccccac

SEQ ID NO: 145811 - RNA, 80 nt, Homo sapiens
agaaaccccggacaaggcacgccagacggaaggagggaggcccgggcccggcccgggcgagaccagcaagaggaccgggg

SEQ ID NO: 145812 - RNA, 77 nt, Homo sapiens
agggcccgggcagaggaagcgggggcaccccccaggaaggcccgccgaaggagaagggcaggaagacccagcaggcc

SEQ ID NO: 145813 - RNA, 84 nt, Homo sapiens
aagagcagcaacagagaaggagaaaaggggaaagcaaggaaagggggaagagccaagagagaaaggcgaggcaaggcaggaaga

SEQ ID NO: 145814 - RNA, 81 nt, Homo sapiens
cggggggacccaggcgggccccgcggcgggaacgaagcaaacaagcgccggcggaagcaacaacacagaagaggggaaaga

SEQ ID NO: 145815 - RNA, 63 nt, Homo sapiens
ccgccggcaggcccgcgcaccaggaagccccaacagaagagagaggccaaagggccaagcaca

SEQ ID NO: 145816 - RNA, 81 nt, Homo sapiens
cgggggacaaaagaaagccacaagccagagcggagaccaggaccgagggaacagccaggagagcaagcaaaagggaggcac

SEQ ID NO: 145817 - RNA, 80 nt, Homo sapiens
agggacaggcacaacggcaggagcgaacaagacaacgggagggcccgagcgaccagaaccgcccaggggccggcgccagg

SEQ ID NO: 145818 - RNA, 77 nt, Homo sapiens
ggcgcagaaaccccggacaaggcacgccagacggcggggcggcaccaccgagcccacgggcacggcacccggcaccc

SEQ ID NO: 145819 - RNA, 82 nt, Homo sapiens
agaggaacccagccgacacgacgccgccggcaggcccgcgcaccagggaagaccacaacaagcaagcagcagcacgcgaaag

SEQ ID NO: 145820 - RNA, 69 nt, Homo sapiens
ggccgccaaccagaaagcacccagcagccgaagcaaaccaacacagaaaagccggccagcggggaagcg

SEQ ID NO: 145821 - RNA, 78 nt, Homo sapiens
caggcggcgggaaccacacaggacccaccccccggcgccagcacagacagcccaaagagaaaagaaggccggagcaag

SEQ ID NO: 145822 - RNA, 69 nt, Homo sapiens
gcagccgcagaggaggagcgcagcccggcccgaagcccaccagaggcgaggggaggaggaagcgagcga

SEQ ID NO: 145823 - RNA, 77 nt, Homo sapiens
caagacccgcagacaacaaggccacgcccacaacacccaggcagcacgcggcccccgaaccccgccgccggccagcc

SEQ ID NO: 145824 - RNA, 81 nt, Homo sapiens
ccgacagaagaaagacggcggaccgcgggggagaacggccaggacaggacaggaccggacagcccccagccagaggacaga

SEQ ID NO: 145825 - RNA, 74 nt, Homo sapiens
ggcaacaccagcggaaacagaagcacagcacaaagaggaaaagaaagccacaaggggaacccagaggcccgaac

SEQ ID NO: 145826 - RNA, 62 nt, Homo sapiens
gaaaaaccaaaggaaccaggagagaggagaaagcaggcacggagagaagaacgcggggccac

SEQ ID NO: 145827 - RNA, 83 nt, Homo sapiens
ccgggacggccccgggcggccgggaggagggcaagcccagagccggcggaggaggggcgcaggagaaagcgcagacaccacga

SEQ ID NO: 145828 - RNA, 49 nt, Homo sapiens
gcgggccgacaagggacaggggggcgaggcaagacacgaagacgccacc

SEQ ID NO: 145829 - RNA, 68 nt, Homo sapiens
aaaacgcaacaacagacggccgccaggagacagaccgacagcaacaagaaagaaacgggcacaccaac

SEQ ID NO: 145830 - RNA, 40 nt, Homo sapiens
ccagggcccgcagcaaagaggaaacaggaggaggcaacga

SEQ ID NO: 145831 - RNA, 74 nt, Homo sapiens
gagacgccaagcggggagcgcccgcgacagaggagggaggaaaacaaccgagggcagagaagcgccacgcagag

SEQ ID NO: 145832 - RNA, 75 nt, Homo sapiens
ggccggcgcggaagggggccggcgaggcccgaggccagaggggggggcaccggaaccccagcagccagacccagg

SEQ ID NO: 145833 - RNA, 77 nt, Homo sapiens
gcgagcaggacgaagcgcccgccaccaaggacccaaagacaggaccacgcaccagcagagaaggaaagcaaaccgaa

SEQ ID NO: 145834 - RNA, 80 nt, Homo sapiens
agcagaggggccacgcgggcccgaggcgcaccaagggcgaaggagccggcccaaggaggcagcacggcaggagacgagga

SEQ ID NO: 145835 - RNA, 76 nt, Homo sapiens
gcaacggaccaacacccacagcagggaagagagcgagcggaaaacggccgaaggcaaagcgaccagaccggacccg

SEQ ID NO: 145836 - RNA, 77 nt, Homo sapiens
cggccgcgcgcgggccccccgacagacccaaggacagagaccggagaaaaagcaggaacagagagaaaagcagaagg

SEQ ID NO: 145837 - RNA, 66 nt, Homo sapiens
gcaccgaaagggagaaaggaagggacagagggacggcgaacaggagcccagccacacggagcggag

SEQ ID NO: 145838 - RNA, 47 nt, Homo sapiens
gaaccacacgcaggacagccagcaagcagagaggcaagaagcaaaga

SEQ ID NO: 145839 - RNA, 80 nt, Homo sapiens
aagcgcagcgccacaaacagacgccgcaagggaggcaacccggcgcacccagagcgaagaagaaagcagagggaaccaaa

SEQ ID NO: 145840 - RNA, 74 nt, Homo sapiens
caaaagaacccgcccacacggccagggagcgcgaaggacggaggcccagaagggagaaagccggccaacccagc

SEQ ID NO: 145841 - RNA, 71 nt, Homo sapiens
cggagcgggccggggagaaggcagcgaggcggcagcaccaagcggaagagcagagggccccaaggagaacc

SEQ ID NO: 145842 - RNA, 72 nt, Homo sapiens
ccaacagagcccgcagagcaccaggcccaccggaaagacagagacgccaaaggagggagccaaggggcaaca

SEQ ID NO: 145843 - RNA, 76 nt, Homo sapiens
gccagggcagcaccgggcagcgagacgaaaaacgccacaaaagacaagacacgagaagggccaagaacaagaagaa

SEQ ID NO: 145844 - RNA, 78 nt, Homo sapiens
ggaacacccaagacaaaaaggcaaaacccacgacaagaaggcaccaagacaaaggacagacccgcgaggccagaccca

SEQ ID NO: 145845 - RNA, 68 nt, Homo sapiens
aaggaccaagaaccagacgcccgcgaaccggacacagacacgagagcgcaaggaagcagcaaagagac

SEQ ID NO: 145846 - RNA, 70 nt, Homo sapiens
acagcgccgcgcgaacgaggccggcacagccaaggggggcacacagaaagaggaaccaccaaccccagcc

SEQ ID NO: 145847 - RNA, 70 nt, Homo sapiens
aggggccccaccagacagggaccggcggcaaccggaaggaacggagagagaggcccagcgcaaagaagag

SEQ ID NO: 145848 - RNA, 93 nt, Homo sapiens
gcccgggagcgaagaaagcgagcaccgaagaaggaaagacggcccagcacgacagagacccggaaagcgagcagcaaagacccagcacccaac

SEQ ID NO: 145849 - RNA, 75 nt, Homo sapiens
caggaaccaaaggaaggcagaaccgcggaggcccacccaaccacaggggacccagcccacacccgggaacaccaa

SEQ ID NO: 145850 - RNA, 75 nt, Homo sapiens
ccgcaaccagccacaccaagagaccacaaaagggaagagcggccaagagagaaacacaagagaacaccaggcagc

SEQ ID NO: 145851 - RNA, 58 nt, Homo sapiens
aggccacacagaaggacggcccgacggaaggacaccagaggaccagaacccacgagaa

SEQ ID NO: 145852 - RNA, 82 nt, Homo sapiens
aagagacagagacaggggccaaacccacaggagagcccgcgagccagaccaacacggagcaggagggggaccaaaaccaggc

SEQ ID NO: 145853 - RNA, 78 nt, Homo sapiens
gacacagaagcacggagcccaagccccgagaaccaagaacggaagaccagcccggacccaacgacaggggccagggaa

SEQ ID NO: 145854 - RNA, 51 nt, Homo sapiens
agagaagaaccaaagaagcaaaacacgagcaccagcagcgcgcacccaggg

SEQ ID NO: 145855 - RNA, 49 nt, Homo sapiens
gaggcacccagccgccgcccaggaccccgccccgaggagcacccacggg

SEQ ID NO: 145856 - RNA, 40 nt, Homo sapiens
cccggagaagcagaggaaaagacgagagagaaggaagcgg

SEQ ID NO: 145857 - RNA, 66 nt, Homo sapiens
agagggcgaggggccgagaggccaaacgaccaagaaagcgggacgcggaaaacgggacccgcaggg

SEQ ID NO: 145858 - RNA, 78 nt, Homo sapiens
gagccaaggccaagccccaagcagcaccccaagcagggggagagaagacgcgcaagaccgagcaagacgccgcagccg

SEQ ID NO: 145859 - RNA, 80 nt, Homo sapiens
gccccacggccccccccacggcgggacccccgggccggggcgcagggcagaggcaggaacacccaacgaaagcacacaag

SEQ ID NO: 145860 - RNA, 71 nt, Homo sapiens
agaagaaggaagcaaccaaacggagaaaccgagcaaggagggaggcgagggaaaaagcgggaggaggcggg

SEQ ID NO: 145861 - RNA, 73 nt, Homo sapiens
ggggcgcgcccgccgacggaccacaccaaggagaagaagacccgggcagagacggggagcccccagaaaacag

SEQ ID NO: 145862 - RNA, 65 nt, Homo sapiens
cccgggcgcggaagaagccaaggaaacaaccccgagggggcaagggcacgcacggacacccaggg

SEQ ID NO: 145863 - RNA, 81 nt, Homo sapiens
cgcagcgacacaccaagcggaggggacgccacgcaacgccgagacggggcgacggacccaggcggccaaccggcccaagga

SEQ ID NO: 145864 - RNA, 82 nt, Homo sapiens
cagacccaggcgggggcgccgccgcgccgccgccaccgcggccgagaccgcgcagccggcgggaaggcccggcgggggcaac

SEQ ID NO: 145865 - RNA, 81 nt, Homo sapiens
aacccccggcacgagcgcgcccagcgcccgcagaaggcccaggagaagccccacccgccccaggagccagccggcaacacg

SEQ ID NO: 145866 - RNA, 76 nt, Homo sapiens
ccgcaggcggcagcggccgcacaccaagggcgcccccccggaacggcaccacaagaggccacaaaaaaggaagccg

SEQ ID NO: 145867 - RNA, 75 nt, Homo sapiens
aagacaaaacgaccagaacacaacggaaagaacaccaaaagggccaagaaaaaagcgaacgcaaggggccaagaa

SEQ ID NO: 145868 - RNA, 90 nt, Homo sapiens
acaaacccgaaaaacgagcgaagagccaccagcggcgacgcaggccaaaaccaggaccggagaacacccaccagaccccaaagcccgccg

SEQ ID NO: 145869 - RNA, 74 nt, Homo sapiens
gaggagcaggcggagcacccaccacggagggaaagaccaggcagacgccacaggcacacggacacccacggccc

SEQ ID NO: 145870 - RNA, 100 nt, Homo sapiens
agaggagaacggacaaagaaggacagggaaaaccgacgaccggaagaggccagcccaaggaaaggcccaggcacagcagacgcacggaggcggggacaga

SEQ ID NO: 145871 - RNA, 70 nt, Homo sapiens
acaaagcgaaagcacaccaagacggacgaacacaagccaaagcgagacccacaacacggaggcaagagca

SEQ ID NO: 145872 - RNA, 85 nt, Homo sapiens
gaaagacacggcagcgcaggcagaccgcaggcgcaaggccaggcgacccgacgggccaccgggagaaaagaagcagcccacgaac

SEQ ID NO: 145873 - RNA, 88 nt, Homo sapiens
gcggaggccccagggaagcgcagaaagcaggcgaacccgcggcgcaaaacggaaggaagacccacaagagaccacgcagagacagcac

SEQ ID NO: 145874 - RNA, 54 nt, Homo sapiens
cgcaggagaagaggcggcccacagggagcgccggagccccgaacccagcgggcg

SEQ ID NO: 145875 - RNA, 43 nt, Homo sapiens
cggggaggccacgaacggagacacggcgggacgaccccacaac

SEQ ID NO: 145876 - RNA, 79 nt, Homo sapiens
cccgaggcggcagaccgcccccccagccgcgcggcccccagaccccggcgcggggaacacaagaaacgaagggaaaaca

SEQ ID NO: 145877 - RNA, 79 nt, Homo sapiens
aagacagcacggcggcgggcaaggacggcggcgcccagccggcccgccggggaagcacccaagccagggagcggcaaaa

SEQ ID NO: 145878 - RNA, 72 nt, Homo sapiens
acaccaggaaaccaacacgaggcagcagccgggggaccacggccgagcaaggggagaagccaagcaccgcga

SEQ ID NO: 145879 - RNA, 78 nt, Homo sapiens
agacccgcagagccacagggcagggcagcaaacaacccccgaaccgagaaagaggaccgacagaacccaaccagcaag

SEQ ID NO: 145880 - RNA, 74 nt, Homo sapiens
accaaaagggacggacaaaggaacaggaccaggaacagaacccccacagcagcacgcaggcgccccgcagacag

SEQ ID NO: 145881 - RNA, 83 nt, Homo sapiens
gggaaacgaggcccccgccgggccgggacccccccccgagggaggggggggaccccagagcagggacaaagccaccgcccaac

SEQ ID NO: 145882 - RNA, 89 nt, Homo sapiens
ccaggacacggccacaacaccaagagggacccagacaggagcgcgggaagaagccggcccggggccgcggacgaggaccagcagaggcc

SEQ ID NO: 145883 - RNA, 81 nt, Homo sapiens
gaccccagacgccgcaacggcggacagagccacccagagccccacgaagacgagcagacccgggacgaggcacgccggacc

SEQ ID NO: 145884 - RNA, 79 nt, Homo sapiens
gggccggccgccgcggcccgcgaggccgaggggccacagacaagagagccccaggccaaccacggacgcaggaccccag

SEQ ID NO: 145885 - RNA, 41 nt, Homo sapiens
ggaagaggcggccccgagggaaaacgcccaggcccggaggc

SEQ ID NO: 145886 - RNA, 83 nt, Homo sapiens
accgggggcgggcagccgaggccgggaaccagcgagggcccagaccacacgaccacaaagacagcaagcaagcgacccagacc

SEQ ID NO: 145887 - RNA, 84 nt, Homo sapiens
cagaggacacgaggcggcgggcggagacaggaccgcggcgagcaagagccccggggcccgcgcaaaaccaaccggaagggaaag

SEQ ID NO: 145888 - RNA, 59 nt, Homo sapiens
acaccgaagaggaagacggggcggaagaccaagacacgagagacccacaggaccgcgaa

SEQ ID NO: 145889 - RNA, 93 nt, Homo sapiens
ccccccccagccccagcacccccaaccacagggccccagccccaccccagccccaaaggaggcgcgagagggacgccccggagccaaccccag

SEQ ID NO: 145890 - RNA, 81 nt, Homo sapiens
gcaaccacagagagagagagggagggagaccaccgggaacgcccagcagcccgggaccagccagcccggcccacaggagcc

SEQ ID NO: 145891 - RNA, 75 nt, Homo sapiens
caggcgggaagagcggagagaacaagaaagccaaacccgcccgggggaaaaaaaagggaagaacgcaagaggaca

SEQ ID NO: 145892 - RNA, 62 nt, Homo sapiens
gaccgaggccgggccccggacagaagagggacaagccaagaaacccggaacgaggaaaacac

SEQ ID NO: 145893 - RNA, 99 nt, Homo sapiens
ccagaccgaagggcgaccaccacaacgccgcggacgaccgcacgggcaggacggggggcccgggcgaaaccggaccgggcccggaggagcgaacaaggc

SEQ ID NO: 145894 - RNA, 84 nt, Homo sapiens
gagcaggaaagcccgccaagaggcggaaggccaaggcaccggcccccacgggcggcgcagggggagagaaagggccagccaaag

SEQ ID NO: 145895 - RNA, 70 nt, Homo sapiens
aacccagccgcaccgggagaagaagcacggaaaaaccaacaaagagaaaaaacaaacagaagccagaggg

SEQ ID NO: 145896 - RNA, 74 nt, Homo sapiens
gccagccacacagcgcgaccgagaacgaaagagaccagaggaacacagccgaggacaagcaccccaacagagcc

SEQ ID NO: 145897 - RNA, 67 nt, Homo sapiens
agaggggacagaaagaggccggacggagacagagacagagaggcaaacggaaaaaagaaaacacgcg

SEQ ID NO: 145898 - RNA, 71 nt, Homo sapiens
caaaaaggcacgagggaacgggaaagaacagagaagggggagcgaaaaaggggagacgacaaggacaccgg

SEQ ID NO: 145899 - RNA, 72 nt, Homo sapiens
aagggaccccacagcagcaggggggacacagaagaagaaaaccaggaaagaaacgcagagggacggaccggc

SEQ ID NO: 145900 - RNA, 85 nt, Homo sapiens
cgccgcccacagcaggcgcccgccagggaacagccggcagaaacgaaggaggcccaaccacaaaaggagccgacggaacccagac

SEQ ID NO: 145901 - RNA, 77 nt, Homo sapiens
aagcggaaacagcagagccaccagccaagaccaagcgcgaaagcgccaaaaggacagcagccccagaccagcggcgc

SEQ ID NO: 145902 - RNA, 82 nt, Homo sapiens
agccaggcaacacgacaccggaaaaccaaagacagcacgagcacagaaagggcccccagagaaagacgaaaaagcacgcaag

SEQ ID NO: 145903 - RNA, 80 nt, Homo sapiens
aaggacagacaagacacacccccagaaggcgaaaggcccagcaagagaaacaagagccggagagcacaagacgaagagaa

SEQ ID NO: 145904 - RNA, 80 nt, Homo sapiens
ggggcacaaccacaacacccccgggcccccaagacacaccaccgagcggccggacggcccggcaggaccggggaaacagg

SEQ ID NO: 145905 - RNA, 78 nt, Homo sapiens
gccaacacggcgcgaaagccagggaagacccagcgccaccccccaccagaagcgaggacaaaccaccacccaaaacaa

SEQ ID NO: 145906 - RNA, 82 nt, Homo sapiens
gaccccccgcgagagcgcaaacacccccagacaaaggccccgagccccggccccaaagacccaaaacagagacaccccccag

SEQ ID NO: 145907 - RNA, 67 nt, Homo sapiens
ccacacaaacagaacaagcagcacggcaagcagaggaggaggggcccaagacaaccccaggggccca

SEQ ID NO: 145908 - RNA, 75 nt, Homo sapiens
gagcagcaagcgacagggaaaaacacaccagaagcacagaccgacccgcgagacacgcggacggacggagggcac

SEQ ID NO: 145909 - RNA, 66 nt, Homo sapiens
gcccgcaagacacagaaaccccgcagaaccagaaccaggcggggaggaagagagaaggccacgccc

SEQ ID NO: 145910 - RNA, 70 nt, Homo sapiens
caacaacaaggcccccaagacaaggccgaggagagaagaaggcaagcgacggcccgaacgagcggaggcc

SEQ ID NO: 145911 - RNA, 79 nt, Homo sapiens
caacacaaaccacaaaaacaacaaggccaccaaacgagagcagccaacgagcgaaagcacacgaagaggcagcccagaa

SEQ ID NO: 145912 - RNA, 72 nt, Homo sapiens
ccacgggagccgccgccggagcgagaacacggcagggaggagagagcgaggccacccagaaggccagcccca

SEQ ID NO: 145913 - RNA, 78 nt, Homo sapiens
gcaggaaggaccgagaccaggaggaagacggcgaaggcccaggaagaggagacggagcaccgacccgccgcaaagaag

SEQ ID NO: 145914 - RNA, 78 nt, Homo sapiens
aggcgccgcgcaaggggcccgaggaagcgcgggcggacgacagaggagccgaaccacccaggggaaaggaacaagcca

SEQ ID NO: 145915 - RNA, 78 nt, Homo sapiens
cggccgccgaaccgccacgccagcacgccaacccggacggacaacaccggggagcgcgggacgggcaagcaagcagca

SEQ ID NO: 145916 - RNA, 87 nt, Homo sapiens
ggcgacccggcgagcaccagcgcccccgcccaggagaccagcggccaacgagaccaagacacaccaccccagggggggcccaaccac

SEQ ID NO: 145917 - RNA, 73 nt, Homo sapiens
ggaccacggcaccgccccaggacaggacacgccagccagacgcgcggggggcagaccccggggaccccacgcc

SEQ ID NO: 145918 - RNA, 74 nt, Homo sapiens
cagcgccccgagggccggccccaacaacccacggcagaaggcggcagggagcacgcaccaggagcccacggccc

SEQ ID NO: 145919 - RNA, 80 nt, Homo sapiens
cgaaagccacgaacgaaggaggccagaaaggcaaaccaagcggagaaagacagcaaagaaaaggagaagaaaggaaaaaa

SEQ ID NO: 145920 - RNA, 74 nt, Homo sapiens
acccagaggagagcccaaacagacgacgcaaaaaagaagaggcccagcacaagcggaagccccagggggggaaa

SEQ ID NO: 145921 - RNA, 73 nt, Homo sapiens
cacaggaaggcaccagcaaggacaggcgagacagcagccgcaagaaaaggaggagggacacacgacaggcccg

SEQ ID NO: 145922 - RNA, 61 nt, Homo sapiens
aacggcacgaggaagccccaaagaggaaaagccgcgcggcccggaggaggcacccgagacc

SEQ ID NO: 145923 - RNA, 78 nt, Homo sapiens
cagaaaacaagagaccacagaagcgcgccccagaccaccggcagggaacagccgagcagaccgaggaggcccaccagc

SEQ ID NO: 145924 - RNA, 70 nt, Homo sapiens
cggcaacacaaagccccccacgccaccacagagcaacccgaaggcgaagaaaacccgcgggagagacaag

SEQ ID NO: 145925 - RNA, 74 nt, Homo sapiens
gaaggcgcgagggacaagagcagacgagaagagagaagaggaagaaaggacgggacaccccaggcagcaccggc

SEQ ID NO: 145926 - RNA, 67 nt, Homo sapiens
ccccccagcagggcggacggggggcgcaaccaccaccaagccgcgccagggcccccaaaccaaagga

SEQ ID NO: 145927 - RNA, 39 nt, Homo sapiens
gcaccgggcagaagcccaggggaccgaaaagacgcggcc

SEQ ID NO: 145928 - RNA, 66 nt, Homo sapiens
gcgccacaaaccaggccaagaccacgcgacgcagagcggaaggagaacccaggagaaacgagaggg

SEQ ID NO: 145929 - RNA, 74 nt, Homo sapiens
gcccgcagaccgaagggaggcgggacaccaggacacaggaagggcacaagacacaagaaacccgggaccacccc

SEQ ID NO: 145930 - RNA, 65 nt, Homo sapiens
agaagcaacacgcaaacgagagcgaggcaagaaaaacagcaaagcccagacaagccagggaacga

SEQ ID NO: 145931 - RNA, 54 nt, Homo sapiens
ccacacagaaaacccgcccaaaggggagagacaaccagagcacccggcaccccc

SEQ ID NO: 145932 - RNA, 72 nt, Homo sapiens
gaagcaggaaaaggaaacagaaaaggaaccgaagaagcaaagcgacacaaagaaacagccaacccgcaacaa

SEQ ID NO: 145933 - RNA, 81 nt, Homo sapiens
aagaaaaaagagagagaaaaaggacaaaagccaagaggaggacagcgcacacagcaagcacgagccagcggaccacaagca

SEQ ID NO: 145934 - RNA, 72 nt, Homo sapiens
cgcggagagaggcaccggccgaggcaaggagaaagaacaaaccccgaagacgcaccccgcgaggagccacac

SEQ ID NO: 145935 - RNA, 56 nt, Homo sapiens
agccggagcaccgaggcccagggcaagcgacggaagaaggggagcccgcagcgcaa

SEQ ID NO: 145936 - RNA, 52 nt, Homo sapiens
cccaaaagaccgagaaccacaggccgcggggcacaaccacaagaaccgccca

SEQ ID NO: 145937 - RNA, 44 nt, Homo sapiens
gacgaagccggggacaagacccagggcaaagccggccacaccac

SEQ ID NO: 145938 - RNA, 74 nt, Homo sapiens
gccgcggaccagcagaagaacgaaaaacacaacgaaaagcaccaaacaggcggaggcggcggggaaaccaaccc

SEQ ID NO: 145939 - RNA, 87 nt, Homo sapiens
cgcagccccgagcgggcaggccccagccgccaggaagcgacgacgagaggggaggaggcggggaagaaggggagaggcaaagcagaa

SEQ ID NO: 145940 - RNA, 70 nt, Homo sapiens
ccgaggagagaagaaggcaagcgacggcccgaacgagcggaggccaacaaaacggcccgccacgggcccc

SEQ ID NO: 145941 - RNA, 74 nt, Homo sapiens
gacaagacaaaacgcccaaaggaaacacaaggcagaaacggaaaagagggagaaaagccaacacgggggcaagc

SEQ ID NO: 145942 - RNA, 82 nt, Homo sapiens
accgcagccaccggcacggggcgggcagcggcgccgggcacaggagggaagagcaaggcgggggagcgggaggagccagagc

SEQ ID NO: 145943 - RNA, 57 nt, Homo sapiens
caggaggacaccgagcccagaagacaagacagggagcaacaaaaccggccagagaag

SEQ ID NO: 145944 - RNA, 69 nt, Homo sapiens
gaccaaggagggaacagggcccaccacagcggagaagagaacccgaccgaagaaggaacaggcagaaag

SEQ ID NO: 145945 - RNA, 54 nt, Homo sapiens
cgggccccgcaggacagaaggaagcaccagccccaccccggagccccccaagcg

SEQ ID NO: 145946 - RNA, 112 nt, Homo sapiens
aagagggcagggcccgaggggaccgccgggccagagcaagccgaccccccagacagcaaagaagaagaagcagacgacgccacgggaaaagaacaaagggagccacaaccgg

SEQ ID NO: 145947 - RNA, 74 nt, Homo sapiens
gcagcgggaagggggccacgcccaccgaagccgcaggacgcggacaccggcaggccagcgcaacggaaacagaa

SEQ ID NO: 145948 - RNA, 77 nt, Homo sapiens
ccagaggcggaagaaaagcgaacacagggaggggcagcaggaagaaaggcacagaggaagcccaacgcagcccccgg

SEQ ID NO: 145949 - RNA, 73 nt, Homo sapiens
gaagcgaggccagacagcaagagcacccgacccacaggccagagagggcggccgaggaacaaaccaaagcaag

SEQ ID NO: 145950 - RNA, 76 nt, Homo sapiens
ccgaagagggacgcccgcaccgcccccgggaccgcaggcccacacggcccgggcaaggaaggaccgagcgcgagga

SEQ ID NO: 145951 - RNA, 79 nt, Homo sapiens
cacggcaggaacccgcgaagcgggaaggacccaacgccagcccagcagccagggccacaccacaagaccccagcaccca

SEQ ID NO: 145952 - RNA, 61 nt, Homo sapiens
ccacaaccgaaccagcagcaggagaagcagaggacaggcgaagaaacagagaccacagagc

SEQ ID NO: 145953 - RNA, 56 nt, Homo sapiens
ggccacacccgccagcagccgacaacgccaggccccgacgaccccaggaggaggag

SEQ ID NO: 145954 - RNA, 68 nt, Homo sapiens
ggaaagcaagcacagagcacaccaagacaacaacaaacagggggcgggagaaggccaacaccaaacaa

SEQ ID NO: 145955 - RNA, 68 nt, Homo sapiens
ccgaagagaacagggccggggcacgacgacccaacagcaagggaaaccgccggagaaggaccacgaac

SEQ ID NO: 145956 - RNA, 73 nt, Homo sapiens
gcgcggagggggcggcgcggcaggagcgcggagggacgcggcacccccgcgagcggcgggcgagggcccgacg

SEQ ID NO: 145957 - RNA, 84 nt, Homo sapiens
gaagaggcgccaggacgaaggcccacgggcaaggaaacacccgccaggcaaaaccggcgagcgcggcaaccccacgcaccagca

SEQ ID NO: 145958 - RNA, 99 nt, Homo sapiens
aaacccagaacgcccccgaacggagaagagcgaaccgccagacccccagcgcaggaaacaaagagccccgggaaaagaaaaaaaacgccccaaacgggg

SEQ ID NO: 145959 - RNA, 85 nt, Homo sapiens
gggccaggcgaagcacgagcagaccggcccgaccgcccacagacccaaacaaagggcggagaacggaaaagcaccaggaagcaga

SEQ ID NO: 145960 - RNA, 77 nt, Homo sapiens
agacccaggacaccccgaagccgagaaagaaaaacacaccgacagcagaacacacgcgaaaggaaaccaagcggaag

SEQ ID NO: 145961 - RNA, 80 nt, Homo sapiens
cggacggcgggaccacaagacaacgcggagcggcgaagagcaaccaggcgagaacgcggacaagcaaacaaagaggaaaa

SEQ ID NO: 145962 - RNA, 43 nt, Homo sapiens
gccaggaccggccgaacgcagagggcggagaacggaaaagcac

SEQ ID NO: 145963 - RNA, 76 nt, Homo sapiens
ggacagagaagacgaacccccaaagagaaaaagaaagagcaagaacagaggacaccccacacgcccagggccgcag

SEQ ID NO: 145964 - RNA, 71 nt, Homo sapiens
ggaaccagagcggaccaccagaaagggacagcgaggaaagccagggggagagcaaggaccgcgacgacagc

SEQ ID NO: 145965 - RNA, 54 nt, Homo sapiens
ccggcagaagcggcagcaaacgaccggacagaagacagaccgacagacgccaaa

SEQ ID NO: 145966 - RNA, 79 nt, Homo sapiens
gacacgcgacgcgccaaaacccgcccggaaaggggacaccggcggagacaacagggggaaaacagcaaggaaccggcac

SEQ ID NO: 145967 - RNA, 54 nt, Homo sapiens
cacgagagacgagcaacccccgggaagccaagccgcagggcaccgggaaaccac

SEQ ID NO: 145968 - RNA, 35 nt, Homo sapiens
gagagccaaagcaggggagggagccgggggaccgg

SEQ ID NO: 145969 - RNA, 67 nt, Homo sapiens
agcaagcgaagcacgaccgcaaagaaggccaagacaggaagggacaggggacagaagcacgaaaacc

SEQ ID NO: 145970 - RNA, 65 nt, Homo sapiens
caagagcaaggcccgcccaacacgggacgggcccacgagcacacggccagcgcaggcagggggac

SEQ ID NO: 145971 - RNA, 122 nt, Homo sapiens
ccggggcggaaaggcgcggccccgcgccagagggccggggcccccgggccgaggacccgcagggagcggacgcaagaacgaagacgacccgagagcaaagacagaaggcaccagcggccaag

SEQ ID NO: 145972 - RNA, 47 nt, Homo sapiens
gaaggaccaagaaccagaaccggaacaccaggaacgacacaggagcc

SEQ ID NO: 145973 - RNA, 72 nt, Homo sapiens
cgacacaaggagacgaggggaagagagccagaaaaagacccgcacgccacaaggagcaagaagccaagcaga

SEQ ID NO: 145974 - RNA, 74 nt, Homo sapiens
cacgacagcagagcggggcggccacaagcaaaggccgcaccgaggggaaacacgaaagaaggcaaaaacacacg

SEQ ID NO: 145975 - RNA, 71 nt, Homo sapiens
gaggagaacacagaaccaccaggagagcaaggagaccaacggaagcgagagccacgagagcgacccaggga

SEQ ID NO: 145976 - RNA, 77 nt, Homo sapiens
cacaacacaacacgccccgaagggagagcagcgcgccggcaaccacaaaccgccggcaggggccgggcacgcccacc

SEQ ID NO: 145977 - RNA, 68 nt, Homo sapiens
caagaggcggcgggagaccccaaccgcagagcgcccgacggggaaagagacccgcggacaacgacgcc

SEQ ID NO: 145978 - RNA, 85 nt, Homo sapiens
ccgagggaggaccccggcgcggcggcaggaaaggcccccgccaggcgccgcggcgcgccggagccgaggaaggacagggcgggag

SEQ ID NO: 145979 - RNA, 77 nt, Homo sapiens
ggccggagggccacccccggaagcaaaggccggggcagaccccaggcggagaacggaaaagcaccaggaagcagaga

SEQ ID NO: 145980 - RNA, 77 nt, Homo sapiens
ggggagaggggagcgccggggcggcccaggcgagcgggacggcacgggaaacacgagaccggcgcagcagagcagaa

SEQ ID NO: 145981 - RNA, 78 nt, Homo sapiens
aggaccagaggccgccacaaccgccagacaaccggagccacgccccacgaccgccagccaggacccgaaaagccagca

SEQ ID NO: 145982 - RNA, 77 nt, Homo sapiens
caagaacaaagaggaaaaccaggaaaacacgaaaaaaaagggaaggaaaccccacacagacagaagacaggagccag

SEQ ID NO: 145983 - RNA, 79 nt, Homo sapiens
gccgggggccagacggaccccagcgggaaacgccggagcggaaggaaacagggaaagacacccggcaggcaccggggag

SEQ ID NO: 145984 - RNA, 75 nt, Homo sapiens
accaggcaccggggggcaacacccgagaacggcgggaagagaagacacgagcacaaacgccgccgccggaaagga

SEQ ID NO: 145985 - RNA, 83 nt, Homo sapiens
cccgccaggcccacgcccgcaaaccccacgccggggggccgcccagacaggacccgagccgagacgggacaaaaggaagagga

SEQ ID NO: 145986 - RNA, 71 nt, Homo sapiens
aaacaaaagacggaaaaacccagccggaaaaggcccagaaacaagaacgagaagacagaccggaaacgagg

SEQ ID NO: 145987 - RNA, 77 nt, Homo sapiens
ccgagcaaaggcagagaccgaaaaggaacaaaacagaaaccacggagcaccgaagggcagcggggaagaagaaaagg

SEQ ID NO: 145988 - RNA, 72 nt, Homo sapiens
ccgaggccgcggaacgaccgcagaaagaaggcgacgcacaacacaaggcgaccagacccggcaagacggaaa

SEQ ID NO: 145989 - RNA, 73 nt, Homo sapiens
gccaaaggaaacgccacacccgcgcaggaaaagaaggaggccagcgggacacacaaagaaagacgaaggacac

SEQ ID NO: 145990 - RNA, 54 nt, Homo sapiens
cagaggcaaggggccaccaggaggccagggggcgccagggagcaacagcgagca

SEQ ID NO: 145991 - RNA, 57 nt, Homo sapiens
accggagggggcagggccaggacaccccccaggcacagccacaccccagcggccaag

SEQ ID NO: 145992 - RNA, 70 nt, Homo sapiens
ggacacacaaaggaaaacccgagacaagggaagaaagcacgggaaaaggccgggcccacaggggagagcc

SEQ ID NO: 145993 - RNA, 71 nt, Homo sapiens
aagaagaggcagaccccgccagaccaacaagcggagcacaagaccgcggagaaccccaagaccacagcaga

SEQ ID NO: 145994 - RNA, 90 nt, Homo sapiens
gccaccaccgccaccggaacccgagaccgagcagaacccgaggcgcggcggcgaggccacagagcgagaaagagccgccgagcaggccgg

SEQ ID NO: 145995 - RNA, 79 nt, Homo sapiens
gcaccgggggcgggggcgccagcccaccaagaagggccgagcacagcaagcaaaaggcgagaccaagcgacagacgaca

SEQ ID NO: 145996 - RNA, 65 nt, Homo sapiens
caaaagaggggaacccagacaaccacaccccccggagaagggagcaaaaaagcaggggaagaaaa

SEQ ID NO: 145997 - RNA, 50 nt, Homo sapiens
cccagcagcccacggccaaccgcaaaacgggacaagcccgcacgcgcaga

SEQ ID NO: 145998 - RNA, 78 nt, Homo sapiens
cccgcgccgccgaccccccggcgccgcgccggcggcggacaccccgggccaagaggacaacaagaagcgccggccacg

SEQ ID NO: 145999 - RNA, 128 nt, Homo sapiens
gccgaagggaccaggcagacgggaagaacccagaaagaaaggagcgccccaaaaggaaacagacaacgcacgggaagaacaacgcaggagcccccggggggacgccccaggaacggaccaaggaggag

SEQ ID NO: 146000 - RNA, 75 nt, Homo sapiens
gcaggaaacgcggccaaaccgggagaagcacaccggacggagagccgcggacacagaggcggggcaccaggccca

SEQ ID NO: 146001 - RNA, 78 nt, Homo sapiens
cggccacggcccccacaagaggcagggcgagacaccgcaggacgagccaaaacgaagaacgcgcacaccgcagacgcc

SEQ ID NO: 146002 - RNA, 79 nt, Homo sapiens
gcagacaagagaggaaacaaaaagaaacaagcaagccgccaaaggagaagaccccacggaagaaccaaacagcgcacac

SEQ ID NO: 146003 - RNA, 83 nt, Homo sapiens
cggcggaagggccggcgagcccggccccgccggcaccagacacccggaagcaggcgaacgaaggcaaacgagcagacggccca

SEQ ID NO: 146004 - RNA, 57 nt, Homo sapiens
ccaacccaaggaaggaccaaacggagaaccaggcgcacacagacggggcaaaacggg

SEQ ID NO: 146005 - RNA, 49 nt, Homo sapiens
cgagcgcggcgcccagggacccgcgggagggaccaggaggagaagcaac

SEQ ID NO: 146006 - RNA, 68 nt, Homo sapiens
aaaaagaacaggagagaaaaaccaggaggagggagacaggggcaaaaaacggcagggaagaggcgaga

SEQ ID NO: 146007 - RNA, 57 nt, Homo sapiens
cgaaccagcccaaaaccggaagcagaaagcaaaccccacgagaacaaagcacggcag

SEQ ID NO: 146008 - RNA, 78 nt, Homo sapiens
ggccacccccgccgcagaacacaggaggcgaaaaccaagagacacggcccgcccaaggaagaaaaagacacccgcccc

SEQ ID NO: 146009 - RNA, 72 nt, Homo sapiens
accaagcagagaccccggacaccggagggcgaaggggcacccccacaggcagaccgggaagacgcacggaca

SEQ ID NO: 146010 - RNA, 67 nt, Homo sapiens
ccggggaaagggggaaacacagaccccaagaggaaaccggcgacaccccacacgccggccacaaccc

SEQ ID NO: 146011 - RNA, 76 nt, Homo sapiens
ccgggggcgggcggccggcgcggcgcccggggcccgccacgggagagcgaaggcacgagcgcccagaagaggaacc

SEQ ID NO: 146012 - RNA, 77 nt, Homo sapiens
ggaggggcgacaaggaaaaaaaccgggcagaacggcggaaagggaacgcgcagaaaacaaaggcaaggcgacaaaca

SEQ ID NO: 146013 - RNA, 72 nt, Homo sapiens
ggaacccacgcgcccgggagcacgagagccaacggcacggggcgacccacaacggggacccaacggcgaacg

SEQ ID NO: 146014 - RNA, 94 nt, Homo sapiens
gggaaccggccagagggaaaggaacccggcagagagggccggggcccggagcgggcccggccccgggcccgaggcccccggaccccagggcccc

SEQ ID NO: 146015 - RNA, 72 nt, Homo sapiens
ggagcagcaacgcaagacaccggcacgcaacagacaaaaggacagcgacagacagcaaacacagccagaaca

SEQ ID NO: 146016 - RNA, 74 nt, Homo sapiens
aaaagccgagcgccgaggccgaaacaaggaagagagagacgcaggcgccaccacagaccagagcccgcacggaa

SEQ ID NO: 146017 - RNA, 77 nt, Homo sapiens
cccccgggggaaaagaacgagaacgacacaggaaaagcaggaaaccaagaggacccaagaccccgaaggaagcagag

SEQ ID NO: 146018 - RNA, 75 nt, Homo sapiens
aggccaacacgcgggcagcgaacaagcgggagcaaggagggcgaagagcgaggaggaccaaaacagggaaggaag

SEQ ID NO: 146019 - RNA, 86 nt, Homo sapiens
caccacaagaagggcgccaggacggccggagcagcagaacaagagcggagaccaagggagccccgcagcagcagaagacggccgaa

SEQ ID NO: 146020 - RNA, 76 nt, Homo sapiens
gggggccacaggggcccgacaacggcacgccaagagagagggacccaacaggaagagaggcccagaagaggaggag

SEQ ID NO: 146021 - RNA, 84 nt, Homo sapiens
acggggggcccgaagcaggccgaaaggccgcgggaacgcgcgccgccgacaaggcgcacaacaggccaccagcccccgggccaa

SEQ ID NO: 146022 - RNA, 70 nt, Homo sapiens
aaaaagccaaaagaggaaacgagccgccaaacaggcggagccaagcccccaggaggaaggaaaacccaag

SEQ ID NO: 146023 - RNA, 56 nt, Homo sapiens
agacaagccgagagaaagcaagcaaagagaaggccaaggacaggcgcagagacgca

SEQ ID NO: 146024 - RNA, 78 nt, Homo sapiens
caaccaaaccgacaaaggcaacaaaagaaacggaagcaaacgcagacaaagaacaagagaaggcggagaaaagaacag

SEQ ID NO: 146025 - RNA, 45 nt, Homo sapiens
ccggcgccgccagcccggagggaccgccgcaccagaaagagagag

SEQ ID NO: 146026 - RNA, 33 nt, Homo sapiens
caagcaacggcgggccccaagcaagaacacagc

SEQ ID NO: 146027 - RNA, 59 nt, Homo sapiens
ggccacagaaggcgcgacgccggggaagaaggaaggagaaagacagcaaagaaaaggag

SEQ ID NO: 146028 - RNA, 82 nt, Homo sapiens
aaagggagccaggcacagaggcagcacacaggaaaagaaccaaaaggcaacagcacacgagagcaacacaccaccacagcag

SEQ ID NO: 146029 - RNA, 71 nt, Homo sapiens
ggcaacagcagccgcaaaaacaaggcggaaacaacgggcaaggcacaccggaaaacagaggacagcccgac

SEQ ID NO: 146030 - RNA, 64 nt, Homo sapiens
ggcgcccacgcggccgaccaccggggacagaggcacccgcgagcccacgggcggagccccggga

SEQ ID NO: 146031 - RNA, 69 nt, Homo sapiens
ggaggaaacaagggcagagccagcaaaggaccagagggaaaaggcacccagcggacggggccggaccca

SEQ ID NO: 146032 - RNA, 89 nt, Homo sapiens
cagacgggcgccggcagccccccaggggagacacggcagaccaaacggggacagcgccgaccggaacagggaccacggaagcccaggac

SEQ ID NO: 146033 - RNA, 105 nt, Homo sapiens
cgaccccgaaagaaagcaggaacacgaacaccaagccccgaagcacacagaaagagccaggcccgcgacgccgagagccaaccccgagaacacgcccggaccccc

SEQ ID NO: 146034 - RNA, 83 nt, Homo sapiens
ccgaccacgcaggaacagaggcgcgcgagggcagccgcggcccgggagaacacacaaaccagaccagccagagaagagcagcc

SEQ ID NO: 146035 - RNA, 78 nt, Homo sapiens
cgaaaagcccagaaccccgaaagagagggagagaaaaccaccgcacagaaggagaaaaggaagcggcaaacaagacca

SEQ ID NO: 146036 - RNA, 77 nt, Homo sapiens
cagagaagaacagacgccgcacccccgcgacacaggaacacgacacagaccccggccggaacccagggagaccagcc

SEQ ID NO: 146037 - RNA, 76 nt, Homo sapiens
cgacacgcccggggagcccagcacagcaggacagagagagcaaaacgacgaaggagccaagaggaccgggacccaa

SEQ ID NO: 146038 - RNA, 64 nt, Homo sapiens
cgagacacagaacgcgcccagcaaagcgaaggggaggggcgaccccggggcccggccagcacga

SEQ ID NO: 146039 - RNA, 87 nt, Homo sapiens
gcagaggacacgaggcggcgggcggagacaggaccgcggcgagcaagaccagacccgaacgacaacacgaagaggaagagaacacag

SEQ ID NO: 146040 - RNA, 79 nt, Homo sapiens
cgcccggcggccccggcgccggcaaggggacccaggcgcccgcacgcgagaggcgcgaacagggcccacccgccacgac

SEQ ID NO: 146041 - RNA, 58 nt, Homo sapiens
aggaggaagacaggcagccagggaaaacaagacaaagcaagcagaaagcggggagccg

SEQ ID NO: 146042 - RNA, 77 nt, Homo sapiens
aaaagagagggccacgagagagaaagacacagaacggagcggagcccagaaggggaacggcggaccacaaagagaga

SEQ ID NO: 146043 - RNA, 80 nt, Homo sapiens
caccggaagaccccgaaggaaaaggaggaacgccggcccgagaaagcccgccagcagagaacccccggcccagacagcaa

SEQ ID NO: 146044 - RNA, 72 nt, Homo sapiens
acgccacaagccgccagcaagccccgaggggaggccacgcacgggcggagacgagacccgaggcggaacgca

SEQ ID NO: 146045 - RNA, 71 nt, Homo sapiens
gagaagagagaagaacaccgaaaccagaagggagcaagaaaggagcaggcagagcaaggaaacaagagggc

SEQ ID NO: 146046 - RNA, 82 nt, Homo sapiens
gccgggaggccggccgggccagcacccggccgagacggcggcagcagcggcacaggcaaaagcagaccggaaaacccaccgg

SEQ ID NO: 146047 - RNA, 82 nt, Homo sapiens
ggacgcgccgcggggcgcgggccggccccgcggggagcgcccccggcgcgagccccaggaaaggaaggcccgccgaaggaga

SEQ ID NO: 146048 - RNA, 80 nt, Homo sapiens
gggaaacccacaggaggcaaccacacagagggaagcagagccccgggccgggaaggggaaacggccacgcaggaaccaca

SEQ ID NO: 146049 - RNA, 78 nt, Homo sapiens
gccaggacaccaacgggaccagaaggaccaaaccacccaggacacggagcagcgggagcccagacgccgcgggagcaa

SEQ ID NO: 146050 - RNA, 77 nt, Homo sapiens
gcgccggaacccgggccccgccacacgaaagcaagagaacaaagcacgaacaacgacgaagcacaacaaggggacga

SEQ ID NO: 146051 - RNA, 39 nt, Homo sapiens
gggggggagaggccccaggcccacaagaaaagcgcaggc

SEQ ID NO: 146052 - RNA, 81 nt, Homo sapiens
gcggcgggagcccaggagccgccccgcccggggacgaagagcgcagcccccggcggagaaccacaggcacccaaaaggacc

SEQ ID NO: 146053 - RNA, 85 nt, Homo sapiens
caccacaggcgcccgaaggccggaacaggaagaagccaagaggagaaagaagcgacacccacacgaaggcccacagggacaggaa

SEQ ID NO: 146054 - RNA, 68 nt, Homo sapiens
caggcgcaagcgcaaacccagggaccaggcagacgaccaaggagcaggcggggcaggcccaaaacagc

SEQ ID NO: 146055 - RNA, 38 nt, Homo sapiens
cccagccccgagggaggcaggcaagacgggacgccgga

SEQ ID NO: 146056 - RNA, 76 nt, Homo sapiens
cacggacacaccacccccagacggacagagaacaggcaaaaacaaggcaaaggcccaggaagcaaggaagaggaac

SEQ ID NO: 146057 - RNA, 60 nt, Homo sapiens
agcaccagacacgacaaacacggagaaggggcggacggcagagggcccccaaaagcagaa

SEQ ID NO: 146058 - RNA, 84 nt, Homo sapiens
ggcggggccggcgggagcgcgaacgagcgacggcggaacccggggccgggacgcagcccggcggcagcagacagcgaaccagag

SEQ ID NO: 146059 - RNA, 78 nt, Homo sapiens
ccggagcacagggcggagacaccgaaaccggcgaagaagagccaaagcccaggacggggaaacagcagagagcagcca

SEQ ID NO: 146060 - RNA, 69 nt, Homo sapiens
ggccaaacaagaggcaaggggggaggagcgccgccccccgcacaagaccccgagagaaacggcgagaaa

SEQ ID NO: 146061 - RNA, 68 nt, Homo sapiens
gaccggccgccgggaggacgcagcgcaggcagaaaaaaggacagagacaccaccagaaaaaaacacaa

SEQ ID NO: 146062 - RNA, 76 nt, Homo sapiens
agggcaaggaccgcggcacccacgccgcaccggccacccggcccgacaccagccgcgaaaccaaccgaacaaagga

SEQ ID NO: 146063 - RNA, 78 nt, Homo sapiens
gggcagcggcgccgggcacaggagggaagagcaaggaacgccgagggcagaagcaggcccgagcccaagcaagccaca

SEQ ID NO: 146064 - RNA, 58 nt, Homo sapiens
ggagggacgcagaaaccgagccgaggaaggaaggaagaaagcagacagcaccgacaga

SEQ ID NO: 146065 - RNA, 59 nt, Homo sapiens
aaggagacaccggaggacgaagagggggaggagccagaggagccccaccgcccagcggc

SEQ ID NO: 146066 - RNA, 67 nt, Homo sapiens
ggaaagagccaaagagggaagcccaacccagaaagcacgcagcagagagcaaaagaagacgcggaga

SEQ ID NO: 146067 - RNA, 84 nt, Homo sapiens
ggacagcccgccccccaaggaagcggcaaagccagaaagaggaggccagagcggagagggaaccaaaggagaggggcaagccca

SEQ ID NO: 146068 - RNA, 70 nt, Homo sapiens
cagggggacccgaagcggcaggcgccgaggcgggacgcaaagcagaccgcagaaaggcggaacggaccaa

SEQ ID NO: 146069 - RNA, 67 nt, Homo sapiens
aaaaacccggaccgggcagaagggccccagccacacaacaacagcaacggaggcgggaccggaacag

SEQ ID NO: 146070 - RNA, 74 nt, Homo sapiens
aaacccggcgccaggcacagaggagcgaccggagagagccgaggaaagacacaccggcacgcccgagccgagca

SEQ ID NO: 146071 - RNA, 82 nt, Homo sapiens
cacaggcccggccaggcacaagggcaccacaaagccagacaacacagggacacaacaaacacaaccgccacagaagcacagg

SEQ ID NO: 146072 - RNA, 82 nt, Homo sapiens
caggacgggcggggagccccgggcggcggggaccgccagcccagcgaccagcaggcgggaaagaggaaagaagacacgcaag

SEQ ID NO: 146073 - RNA, 65 nt, Homo sapiens
aggccacaaggagacaacgacaaccagggggccgacacgcggaaggccgggggagcccaccagcg

SEQ ID NO: 146074 - RNA, 75 nt, Homo sapiens
gaagggcaacgcaccccgccagcacgacagcaggcaaaaggacaagagaccacaaaaggaaaaaaagagaaaggg

SEQ ID NO: 146075 - RNA, 71 nt, Homo sapiens
gccgaggcccgccaagggacgcgcagggccacggccaggcagccaacgcggagaaaccaccgacaaagaga

SEQ ID NO: 146076 - RNA, 75 nt, Homo sapiens
cccagccccaagagcgggaacaggcacccccagcaggacagcacacccaaccagacacaccaccccacaacagga

SEQ ID NO: 146077 - RNA, 82 nt, Homo sapiens
acaaacgaaggacgcacacaggacaacagcaccacagacccaagcggaggagaccgagaaaggcccaaaaaccaccagcagg

SEQ ID NO: 146078 - RNA, 74 nt, Homo sapiens
agaaggagaacaaaagcaaagccccagacggacggaaagagaaaggagaccacaagaccccgcgccaccaaagg

SEQ ID NO: 146079 - RNA, 77 nt, Homo sapiens
agcagagcgacgcgcgccgcacggaggcaagaagaaacccaccgcaaagagggacgccaggaacaaaagaacagcac

SEQ ID NO: 146080 - RNA, 85 nt, Homo sapiens
agcacccaaaggcaagacccacccaagcacacccaaggacagcagcccaccaagcacagacaagcacaggcagccagggaccgag

SEQ ID NO: 146081 - RNA, 89 nt, Homo sapiens
cgcggccacccccaaagacaaaagacacagaagaaaaaggggacgaagacacgaagcagaaaaacaaccaccagcgagcaaaaaggcaa

SEQ ID NO: 146082 - RNA, 66 nt, Homo sapiens
cccagaccgcaccacagagcccaggcaaccgcaccaccaaagcacaagaggagagcaagagcaaaa

SEQ ID NO: 146083 - RNA, 73 nt, Homo sapiens
gaaagagcaaaagaaaggagcaggagaagaccagagcaaaccaggcacgaaggaagcacagaagagaaaggga

SEQ ID NO: 146084 - RNA, 70 nt, Homo sapiens
cgcgaccgcgccggacggggagaggggagcgccggggcggcccaggcgagcggcacaccaaccccacaca

SEQ ID NO: 146085 - RNA, 75 nt, Homo sapiens
ccgggccgaaaagcagaagacaaccaaaacaaacgcaccccacgcagaaccagagaccacagaagaaggaagggc

SEQ ID NO: 146086 - RNA, 86 nt, Homo sapiens
gggggaggggagcccgcgcccgccgcgggagagagcaaaacaaacggagagaggagggagaaacaaaggccaaagacgcaggaggg

SEQ ID NO: 146087 - RNA, 86 nt, Homo sapiens
cgaggggcgagaaaggcccacgcagcccccaagcaggagccggaccagaccgccggagcacgccgagaccaccgaggacacaaccg

SEQ ID NO: 146088 - RNA, 68 nt, Homo sapiens
ggaaagaaggcccccgcccgccaacaagccaaaggaagagccacggcacaagacggaaggggaaggaa

SEQ ID NO: 146089 - RNA, 72 nt, Homo sapiens
ccccaaggccagaacgcaccccggggcgaacagcaagacaaccagaagacacgagcaaagccccaagcaaag

SEQ ID NO: 146090 - RNA, 127 nt, Homo sapiens
gggcccgggaccagcccggaacccgcaccaagccgcccacacgccaaccggccagaggacgagggcaaaggacaagccggaacgcgagacccccgcaccaggagcggggaaggggcccaccaaggag

SEQ ID NO: 146091 - RNA, 86 nt, Homo sapiens
gacaccagcccccaaggagcccacagcgcgacgcaccgcgggggaccaaggaggggccaccaggcaggaaaacaagccagggacca

SEQ ID NO: 146092 - RNA, 74 nt, Homo sapiens
aaacagacgaacaccagaaggaaggaaacccggcagaaaaagcccacgccaaggaacaaagccaggagagccaa

SEQ ID NO: 146093 - RNA, 76 nt, Homo sapiens
gaaagccaccgagggagaagagccaggcaacgaaagcaaaccgagagcaggcgaaggccgggacccaggcccacca

SEQ ID NO: 146094 - RNA, 75 nt, Homo sapiens
ggcggaccacacgcagcagaaccacagggagccgcagaagaaaaagggcgcacgggagaccagagagcggccagc

SEQ ID NO: 146095 - RNA, 72 nt, Homo sapiens
caggccccagccgcagaacggccgcagagaaaaccgcacacaaagggaaagaaaaagacaaaggagggaaac

SEQ ID NO: 146096 - RNA, 79 nt, Homo sapiens
gcgggggccggccccggaggcggcggggcggcagagagcggggcggcggcagaaagaccgaccaaggcggaccgccaag

SEQ ID NO: 146097 - RNA, 115 nt, Homo sapiens
cgggcaaccgggagacagagaaacaccagcagcacaagaaaacgcagacccaaccgcggcacccaaaagcaagcgcgggaagcgacacccagaccccacgggagaagcaggagag

SEQ ID NO: 146098 - RNA, 82 nt, Homo sapiens
caccagcaccggcccaggggccgaaaccagagaaacccaggccagcaaagacacacccacaagccacagaaaacaacagcgc

SEQ ID NO: 146099 - RNA, 77 nt, Homo sapiens
caccaggccaccacgcggcgggccggaggcggccagcggcagcgggcgcggccacaggccgcgcacggggccacaca

SEQ ID NO: 146100 - RNA, 75 nt, Homo sapiens
gggcgggagggagcggcgccgcgggaggagcgccagcccgcggcggaaggagacccaggaagaaagggcgaagga

SEQ ID NO: 146101 - RNA, 128 nt, Homo sapiens
gggcccaggggaggcagcccaggagcacacaacccccgcagaacagggggaggacagcaccccagagccagagaccccagaccgcgcccggcccgcgacccaggccggcgcacaacaccaagacaaag

SEQ ID NO: 146102 - RNA, 72 nt, Homo sapiens
cgggaaagcagcacggcaaccggacaaaggaacgcacgaccagcagggccaccgccccagagccagccgaaa

SEQ ID NO: 146103 - RNA, 80 nt, Homo sapiens
gcgcaggagacagagagaggacccagagcagacacaccccagagggcgcaagcagagaaaagggcaaggccagagaaggc

SEQ ID NO: 146104 - RNA, 73 nt, Homo sapiens
acgcaggacacccagaacacgaaaggcacccacagaaggagaacaagcagagcaccggacacgaggagaaaca

SEQ ID NO: 146105 - RNA, 88 nt, Homo sapiens
cgggcgccgcgacgcgagcggccgcaaaggcgcggaggaagcggagcggcgcgcgcgggacaagcaggcacagccagagaacaacaca

SEQ ID NO: 146106 - RNA, 77 nt, Homo sapiens
aacaaggccggccgagagcgagagcccagggaaggaagggagcgaaagccgggaggcgaaaccagcgaggcaaccag

SEQ ID NO: 146107 - RNA, 80 nt, Homo sapiens
gaaaaaaagagaaaccggggaaccacggacaacccagaggacaacgaaggcggggggggcggaggacgccaccccgggca

SEQ ID NO: 146108 - RNA, 91 nt, Homo sapiens
ccggcgagccaaagaggagccggccgcgcgggccgggaggggacggccgccggagccgcgaggccaaagcggaccaacagcgcacccaaca

SEQ ID NO: 146109 - RNA, 77 nt, Homo sapiens
ggagcggaggcacccgaagcgcccggggaggggcgaagaccacaacgcaccccggaggggaggcaccccggcgcagc

SEQ ID NO: 146110 - RNA, 74 nt, Homo sapiens
agagaaagccagcagacccccgagggccgagcaacaggagggcgaccacaagcaaacaggagccagagcggaag

SEQ ID NO: 146111 - RNA, 77 nt, Homo sapiens
aaaacagacacagccagccagccacacggcagaaaaagagagcccccaaaggaagagaggaggagaggaaggacagg

SEQ ID NO: 146112 - RNA, 77 nt, Homo sapiens
cgcagcggggaccggcggcggcgcccaggcacccggcccgggcggcgagccagcccccagaacccaacaccccgcgg

SEQ ID NO: 146113 - RNA, 58 nt, Homo sapiens
ggagggcggcgcgccgagcggcacgcagcacgggggcaggggccgacccagaacgcca

SEQ ID NO: 146114 - RNA, 58 nt, Homo sapiens
caggagcgcggccagagcagaacggcgaggggacggggccgaaagggggcaaacaggg

SEQ ID NO: 146115 - RNA, 76 nt, Homo sapiens
ccacggaacaccaaaggggacaaaccgaagcgcggagagagaagaaaccagcagcgccggcgggaacgccccgggc

SEQ ID NO: 146116 - RNA, 74 nt, Homo sapiens
gcccgaaacccgacaggaaggaaggaaccaagcacccaggaccagggcccgaggagggcggaaccacacgagga

SEQ ID NO: 146117 - RNA, 52 nt, Homo sapiens
aggaaaccacgcaaaaccacccagggaaacacaaagaagacaccagaagggc

SEQ ID NO: 146118 - RNA, 71 nt, Homo sapiens
ggaagcagggagggcgggcccagagaccaagacacgaaagaaagccgacagcaaggaacaaggaagggacc

SEQ ID NO: 146119 - RNA, 71 nt, Homo sapiens
cccaagaccccggaccggaaagcaggcaaaccacagcaaaagagaggaagcagcggcccggaacgcacacg

SEQ ID NO: 146120 - RNA, 71 nt, Homo sapiens
gccgagaacgaagcggccgaacaacaaggaaacaggaccgccaccgaacgcacgggagaagaacgaacaca

SEQ ID NO: 146121 - RNA, 74 nt, Homo sapiens
gcggagcgaacccgagagcgggagcgggcgggccagcgagacgacgggaccgaaggaccccgccagagacaacc

SEQ ID NO: 146122 - RNA, 85 nt, Homo sapiens
cacgggcgcacggaggacgggaaaaccagcagcagaccacagccagacggagcgaaaacggacaccgccaccaccgccgcgccac

SEQ ID NO: 146123 - RNA, 63 nt, Homo sapiens
gagccacgcgaggacgccgagacggcgcacaaaagagcacaaaagcaccaaggcgcacaacag

SEQ ID NO: 146124 - RNA, 56 nt, Homo sapiens
gagcagaaccaagggccccggggccggcgaagggggcgaaagcgaaaaccgaccga

SEQ ID NO: 146125 - RNA, 72 nt, Homo sapiens
gcgaccaaagcgcacggcagcgagaggcaaagaagaggacccagccaggaaggacacccagcaagagacagg

SEQ ID NO: 146126 - RNA, 79 nt, Homo sapiens
gcaaggcgccaggccggaaccagccgcagcccgacgccaggcagcacaaccagacagacacggcccgccacaagaccgg

SEQ ID NO: 146127 - RNA, 76 nt, Homo sapiens
gccaagcaggaccacccaccagccaccaggcccggcaccaagggccggaacgacagaaccacagggcggacaggac

SEQ ID NO: 146128 - RNA, 68 nt, Homo sapiens
accaacccaagcgaagaagagcggaaaacaagggggaacacaagaaacgaagggaaaacacagaacaa

SEQ ID NO: 146129 - RNA, 91 nt, Homo sapiens
gggccagcggagacagcaagaccccagcagcgaccgccacggccccgccaccggccacaagggccggaaggagggccgggcccgaccgccg

SEQ ID NO: 146130 - RNA, 75 nt, Homo sapiens
cgcgccgccgggcaaaacccggaaaaaagcaccccaacaaccagaagggccagaacaaggccagagaaagggaac

SEQ ID NO: 146131 - RNA, 52 nt, Homo sapiens
gggaaccggagagccagaaggaagcggacacggagaccaccaagggacgcgg

SEQ ID NO: 146132 - RNA, 85 nt, Homo sapiens
ggagggaggggggggggcagccccccgcccggccagccgccccgccgggaggacggagaacccaaggagaaacacgggagcaccg

SEQ ID NO: 146133 - RNA, 62 nt, Homo sapiens
gcaccggcgaagccgggccaaaggacgaagaacccacagaggacaagggagagacagagcga

SEQ ID NO: 146134 - RNA, 75 nt, Homo sapiens
ggagcggacgacgccaagaaccccaaaaccaagacccaggccccagacagaacagaggaaaacccccaggggcca

SEQ ID NO: 146135 - RNA, 65 nt, Homo sapiens
aaggaccaagaaccagaaaagcgccaggcaggcaggaaagcgccgggaagaaagccagagccgga

SEQ ID NO: 146136 - RNA, 88 nt, Homo sapiens
gccgccccgccgccccgcgggaggaggagcgcccgcccggcgcgaccccgcgggagccaaggacccgcaccaagagcggaacaagaga

SEQ ID NO: 146137 - RNA, 52 nt, Homo sapiens
cacccgccaaagagcgcaaagcccggcgcacacaagcgcaagccccggggca

SEQ ID NO: 146138 - RNA, 78 nt, Homo sapiens
gaagaccaagcaggagaaccgaccggggcccaccgaggagcgcagacaccgaccacggacacagagaggacccggagc

SEQ ID NO: 146139 - RNA, 84 nt, Homo sapiens
gcgccccaccgcaaccggaggcaagcaccaagagccgaggaaacccagacccaagaccaaccgaggaggaggaggagggagacg

SEQ ID NO: 146140 - RNA, 84 nt, Homo sapiens
cgagccacaaacaccaacaagcgcgggccggcagcccagggggcagacccaaaggaaacgcacgaaagaaacaggagagcgcag

SEQ ID NO: 146141 - RNA, 77 nt, Homo sapiens
gcgcaggacccagacccccccccgagaccggaagagaaagagcaggagcagggaacgagaagacccgagaaaaaacg

SEQ ID NO: 146142 - RNA, 58 nt, Homo sapiens
ccagcgccagggaaagaaggcccggccaacgcaacagggagcccacgcaagaggggcc

SEQ ID NO: 146143 - RNA, 78 nt, Homo sapiens
aggaagaggagagaaaagggccagggagagccggggacgacacacacacggagacagcaagaaagcaccagccaagca

SEQ ID NO: 146144 - RNA, 85 nt, Homo sapiens
ccccgggaaccacgccagaccagccgcccacgaccccgagccacagcagcaacagcagccagagcacagcaagcagaagcacggc

SEQ ID NO: 146145 - RNA, 59 nt, Homo sapiens
gaacggaccgcacgacgggacacgccagcaagacaagaagaagaagcacggcaggcggg

SEQ ID NO: 146146 - RNA, 68 nt, Homo sapiens
gacgcacgaacacccaaccgggcacgggcagaaggccagccgaccagaaacaaaacgaaacaaaacaa

SEQ ID NO: 146147 - RNA, 79 nt, Homo sapiens
caaaacgggccacgagaaccaggccaggaaacaggcagcaaaagagcccagaagaggacggagggaaaggaccccaaag

SEQ ID NO: 146148 - RNA, 63 nt, Homo sapiens
gaccacagcaggaaccagggcacgcgggggaaccgcccaaaagcccgccagaagaaggacggg

SEQ ID NO: 146149 - RNA, 82 nt, Homo sapiens
aaggaaacaacacaaccccacgccacagggaccaagaaaggcccagggaccaaagcccggacaaggcccgagcaccaggacc

SEQ ID NO: 146150 - RNA, 74 nt, Homo sapiens
cagaggccgccacgccgcgccacagaccccagccagggaaagcacaaagcgcggaaaggcaacacggagagaac

SEQ ID NO: 146151 - RNA, 50 nt, Homo sapiens
ggccagagagagacgacaggaaggggaggagcacagaacgccaggaccaa

SEQ ID NO: 146152 - RNA, 75 nt, Homo sapiens
gcggcgagcgcgaaggcacgagcggagggagaacaagaacgcagggagagcgggccgaagaaacagagggaaaca

SEQ ID NO: 146153 - RNA, 78 nt, Homo sapiens
acacgcagcaccgcgggaacaaggcagaccggccagcaagagagccgggaaccagggccccgggcgcgggagccagcc

SEQ ID NO: 146154 - RNA, 73 nt, Homo sapiens
cggcccagcacgaacacacaagcccagcccgggaaagaggcaagggagaacggcagaaccaagggaccaaagc

SEQ ID NO: 146155 - RNA, 72 nt, Homo sapiens
gagccaacagcgcaggggccgcagccaggcgaggccccagcgggaagcgagaaagcaccgcgcccaggcaga

SEQ ID NO: 146156 - RNA, 47 nt, Homo sapiens
gcaacgaaggacagaggggagccagcaaaacagaccgagacaacgag

SEQ ID NO: 146157 - RNA, 77 nt, Homo sapiens
ggacccaaacagggccagcacgccaccgggaaggcggggaggaggccccaaagggcgaggacgcccccgggccaaac

SEQ ID NO: 146158 - RNA, 68 nt, Homo sapiens
aaagacaaaaggaggccaccagaggagcagaaagcgaacaggcccaaagacgcacccacagagaaacc

SEQ ID NO: 146159 - RNA, 73 nt, Homo sapiens
cggaaaaaccaccggcaacaaaacggaggagaggaaagaaggagcaaagcccagggaaaaggacgggagccgg

SEQ ID NO: 146160 - RNA, 72 nt, Homo sapiens
ccagcaggacgggccgagacagacaaaaacgaaaccggagaaacaaaacaagcacgacagggaagacccaga

SEQ ID NO: 146161 - RNA, 34 nt, Homo sapiens
ccagagacacgaagaagagagagaggggcgccgg

SEQ ID NO: 146162 - RNA, 71 nt, Homo sapiens
cgggcacacaggcgccacggacaccaagggcgacccggcagcagcgcggccggccggggggaagcgagcgc

SEQ ID NO: 146163 - RNA, 75 nt, Homo sapiens
aggaggaggaggaggcgggcgcgccggaaggcggcaggagggaaagcaaggaaacgcccccccagaggcccagac

SEQ ID NO: 146164 - RNA, 69 nt, Homo sapiens
cccaggcaagagaacaaacaggggacaaggaccacggaaacgcgaaacagagaaaaagaaagacacagc

SEQ ID NO: 146165 - RNA, 58 nt, Homo sapiens
accagaaccagcccgggaaaggagaaaagagccggaagcaaaccccaggaccaaagca

SEQ ID NO: 146166 - RNA, 77 nt, Homo sapiens
aacggacgcaagcggggaggggaaggagcggcagcccacaagcaggaagaccagccccaggagggaaacagagcacc

SEQ ID NO: 146167 - RNA, 77 nt, Homo sapiens
ccagacgaccgggacaagacggaaccgccgagacggggagaccaccgagcagaaaaaccccagaaaagacggggaaa

SEQ ID NO: 146168 - RNA, 78 nt, Homo sapiens
gggacggaacgacaggcaggagacgcaaaacacgggaggaaggaggcaggcccaggccacccagcccacccacgcaac

SEQ ID NO: 146169 - RNA, 83 nt, Homo sapiens
aggacgccgcagccaggagagcggcccgcggcggagcgggggcgggcgcacccccagaaggagcgacgaaaggaagaagccag

SEQ ID NO: 146170 - RNA, 74 nt, Homo sapiens
agccgcggcgggccccggagggcggggaggaagaggggcgacagacccaggggaggcacaggaacaggcaggac

SEQ ID NO: 146171 - RNA, 69 nt, Homo sapiens
ggaagacggacaccaaaaaggggaaacccggcacaggagacgagggacagaagagcacagggggacgcc

SEQ ID NO: 146172 - RNA, 59 nt, Homo sapiens
gagaggagcgggaaacgggagggaaccagcaacaagccgaaaagaggggacgagaaaaa

SEQ ID NO: 146173 - RNA, 84 nt, Homo sapiens
aaagaaggggaagaagacaaaacccaccagccccagacaccccaacgagagacacagacgcgccccgagcgggcgagcacagaa

SEQ ID NO: 146174 - RNA, 72 nt, Homo sapiens
ggcggaggagggagccagcacagaggccgggaagaaggagggacacagcagcgcggagagcggcccgggacg

SEQ ID NO: 146175 - RNA, 78 nt, Homo sapiens
cgcaacgcgccgcagggaccacagcacgagaggaccccacgggacccagacgagaggaagagagaagacagcagcgaa

SEQ ID NO: 146176 - RNA, 88 nt, Homo sapiens
gcccgcacccaccgagaaccagccaccgacccgggacggcaaaacagaacagaaaggcggagaaaaaagagggggaaaagaccacgag

SEQ ID NO: 146177 - RNA, 89 nt, Homo sapiens
ccggagaaacaggcgccgcgggcccgcgcccggccggacccgggcccgagggggacccgacgaccagggggagagacccgcgccccccc

SEQ ID NO: 146178 - RNA, 72 nt, Homo sapiens
cccgcgccgagcccggggcgaggaggccccaagggcgagcgggaccgaggcgcgcgacgggaccacaggcga

SEQ ID NO: 146179 - RNA, 71 nt, Homo sapiens
agcacaccagcccgaaacccgacaggaaggaaggaaccaagcacccagggacacaacacacacagagaagc

SEQ ID NO: 146180 - RNA, 60 nt, Homo sapiens
cggagccgacgagcggcgggagaagccgcgggagcggaagacaggcccggagcccgacgg

SEQ ID NO: 146181 - RNA, 72 nt, Homo sapiens
cacgcagagcggagaagccccagaccagggagcaaagaagccaaaggcgagcccagaagggaaaccaaaacg

SEQ ID NO: 146182 - RNA, 76 nt, Homo sapiens
gcgaggcgccgcggggcggccgccagcacaagcgcacccgcacaggccggggggggcacagagccccggaagacag

SEQ ID NO: 146183 - RNA, 73 nt, Homo sapiens
gaaggacaagcgcgggacccgcagaggaagaccgcaggaaagcaggaaggcaagaaagccaaggacgaaaccc

SEQ ID NO: 146184 - RNA, 79 nt, Homo sapiens
gagaccccgcggacccaggccaggcagcgcggaggggcgagccagcggccagggagcaggaaccaggaacggagagaga

SEQ ID NO: 146185 - RNA, 79 nt, Homo sapiens
ccgccccgccgcgcccgccggccgacgagggagaaagacggggaggacgcacgacgcgcggcacgggaacgcagccggc

SEQ ID NO: 146186 - RNA, 75 nt, Homo sapiens
aaaacaggagaccacaaccagcgagaaaaaaaagccgaggaaaacaaaggaagacagagcagagcgggaacacgc

SEQ ID NO: 146187 - RNA, 79 nt, Homo sapiens
aaggacaaagcccagaccaggaacgagcaaaaaacggcgcccccgcccagcagaccgaacaggaaggccccggaaccac

SEQ ID NO: 146188 - RNA, 67 nt, Homo sapiens
cgcaccgcaggcagacaaaagggccaaagaagggagaagacacccgaccgcacagccgcaggggaac

SEQ ID NO: 146189 - RNA, 70 nt, Homo sapiens
cgaccggcaccgcggcaagcaccacaaaggaacgccacacgcgaaaaacggaggaacgaaccaaagaaaa

SEQ ID NO: 146190 - RNA, 80 nt, Homo sapiens
cggaaaggagaaccaccaccacagggggcaggcccccgaagaccacacgaccccaaagagggagcaggagaaggaagaca

SEQ ID NO: 146191 - RNA, 73 nt, Homo sapiens
ccagccccgaaaaggcgacccggggaaagacagcccacagccagcaggcccgaccacgaagaagaggacaggg

SEQ ID NO: 146192 - RNA, 56 nt, Homo sapiens
accaggcgaagcggccgagcaggcgagcgaacgacggggaagaacacggaaaccgg

SEQ ID NO: 146193 - RNA, 75 nt, Homo sapiens
gacccgcccggggcagcagggggagcccagaaggacccgagaacagcccggggcggccaagggggcccggcgcag

SEQ ID NO: 146194 - RNA, 77 nt, Homo sapiens
aaggcccggacaaagccgaaaccagggccacgagcagggaggcaagaaccacaacaaccagccaaacgcacaaaccg

SEQ ID NO: 146195 - RNA, 60 nt, Homo sapiens
gcacgaagcggacacccaggcagaagggaccaagaaaggcccagggaccaaagcccggac

SEQ ID NO: 146196 - RNA, 75 nt, Homo sapiens
aaaaacccaaccagaaaagacgggaaacagggccccaacaaagaaaccggaaggcaaaaagccaaaaggacaccc

SEQ ID NO: 146197 - RNA, 78 nt, Homo sapiens
agcgccgcgggccgcaggccgcgagcagcggacgccggccgccgcaggaggcacaagacaagcgcagagaccagaagc

SEQ ID NO: 146198 - RNA, 85 nt, Homo sapiens
ccgcagcccaggcgcgggggcgacgacaggggaggagacaacaggagccaccggacagggacgagagaccggaaaggacaaaaaa

SEQ ID NO: 146199 - RNA, 59 nt, Homo sapiens
cggaaacgcagacgggaagagaagaagacaccaaacaaggacaccaaggacccaagccg

SEQ ID NO: 146200 - RNA, 72 nt, Homo sapiens
agcagaaccgccgacgggaccaccgggaaccgagggggcagccggaccgcacgcggggacggcgcggcgcgc

SEQ ID NO: 146201 - RNA, 74 nt, Homo sapiens
gagaaacggaagcacaagaccgcccggggaacagggcagcaagcgacaggcgcggagcgggaaagacacggagc

SEQ ID NO: 146202 - RNA, 63 nt, Homo sapiens
cgggacaaaaaccagaccagcgaggaagacagccaagcagagaaacgaaggagcgacaaggag

SEQ ID NO: 146203 - RNA, 76 nt, Homo sapiens
gcgacaagaggcggacgcacaaggccagacaccagaaagaaccaaggcgacagggggcaccacagggaacagaacg

SEQ ID NO: 146204 - RNA, 77 nt, Homo sapiens
gcgggaggccaccgccagacagcagcgcccaaggacaagccaagcggcccaaaacccacgagcgaacgaaggaggaa

SEQ ID NO: 146205 - RNA, 75 nt, Homo sapiens
ggaaggccgacagggagacgacagaagagacgggggagcaggacggaaaaggcgcacacgacccggagaacccca

SEQ ID NO: 146206 - RNA, 69 nt, Homo sapiens
gacgggcaccgaagaaggcagaaacaggacaaaggggacgaggccaccagacgaagaaaggggggacca

SEQ ID NO: 146207 - RNA, 78 nt, Homo sapiens
ggaggacccccacgcgacaccagggccgcgggaggaccgcgcggggcacacgcacgggcggagaacggaaaagcacca

SEQ ID NO: 146208 - RNA, 38 nt, Homo sapiens
ccagaacgcggaagcgagggaagggaaccgaaaccagg

SEQ ID NO: 146209 - RNA, 78 nt, Homo sapiens
aaggacaaaaccagaagcagggaacagaagacagagacacgacacagcagccaggcaaagggaaaagaacaaagaacc

SEQ ID NO: 146210 - RNA, 59 nt, Homo sapiens
gcaaacaagccgaccggaaaaaggcagagggcaccacagacaagaaagcccccacggaa

SEQ ID NO: 146211 - RNA, 38 nt, Homo sapiens
aacccagcaccaggaggcgagacagccacggcccaggc

SEQ ID NO: 146212 - RNA, 66 nt, Homo sapiens
aggaaagcccaaacgcagcagaaaccagagacacacagaccacagacagcccgaggaacagaggga

SEQ ID NO: 146213 - RNA, 76 nt, Homo sapiens
ccaggagcgaccgagaaggggccggagcagcaccgagccccaaaacccagaaggaagaagaagaaagacaggaacc

SEQ ID NO: 146214 - RNA, 72 nt, Homo sapiens
gagggaaagagggcccaccacaggaggccagccaggcgagaaaccggagccgagaaagcgacaggcaggccc

SEQ ID NO: 146215 - RNA, 73 nt, Homo sapiens
cggaaacgaggaaaccgggaaagccaccgaaaagagagggagagaccagaggcgcccccacgcgcggaaagga

SEQ ID NO: 146216 - RNA, 77 nt, Homo sapiens
aaaccagcagccaaccagaaaggcgcaccgcagaacgagacgggcacgggaaggaggagagaaagaacccacgcagg

SEQ ID NO: 146217 - RNA, 114 nt, Homo sapiens
acagcagccaacccgccaaaaaagacaagaaaccgcacaagaccgggaggggccaacaaagcccaagcaggggaaggcgaagcacgacagcacggccagaggaacccaagcacc

SEQ ID NO: 146218 - RNA, 75 nt, Homo sapiens
aacaacaacaggacgccacagggaagaacaggagccaggagacagccagagccaaggaagcgagggaaaaagcga

SEQ ID NO: 146219 - RNA, 66 nt, Homo sapiens
gaggccagagggcgaccggaggagcagagaaccggcccaacccgcggcccccagacgaggaacgag

SEQ ID NO: 146220 - RNA, 52 nt, Homo sapiens
gcagcacacccaccgagccgagagggaagcaccagcaccaagaccagccagg

SEQ ID NO: 146221 - RNA, 75 nt, Homo sapiens
gggggaagggccaggcggagggagcaagagaagcccggggcaagaacggggcggacagcggcggcaagccgccag

SEQ ID NO: 146222 - RNA, 84 nt, Homo sapiens
cgggaacccgcggggagcgggacacgaacggacgcccgcaccgggcccccacccgcccggcggccagcgcagagccaggcgacg

SEQ ID NO: 146223 - RNA, 80 nt, Homo sapiens
gcagccccccaagacgggcaggcccacacaaagagggggcggaagagacagccaggcacagaaggaggaaggcagagaaa

SEQ ID NO: 146224 - RNA, 74 nt, Homo sapiens
acagaaggcgccagggaccaagcagagaccagaaaccggaagcgagacgacgcagccagagcagcaagaggcca

SEQ ID NO: 146225 - RNA, 39 nt, Homo sapiens
acgacggcacagggggggacgccaggaaagcaggcagag

SEQ ID NO: 146226 - RNA, 74 nt, Homo sapiens
gagaagcagccgggacagaacgaacaggcaaagcccaaaaggcaaggcacaagggagcgaagaggaaagaaaga

SEQ ID NO: 146227 - RNA, 67 nt, Homo sapiens
gccgccacgcgcagacggagccgagagcaggacgccgccagccaccggcgcgaagccagaccagacc

SEQ ID NO: 146228 - RNA, 80 nt, Homo sapiens
gacgagcagagaacagcaaaagagcacaaggacaaaagccacgaggcacaaagaggagacagccaagcacagggaggaag

SEQ ID NO: 146229 - RNA, 75 nt, Homo sapiens
caaccgcgaggccccgagggcccgggagagaacggagacgacaacgaccaccgggcggccgagggccgcgcgccc

SEQ ID NO: 146230 - RNA, 89 nt, Homo sapiens
gagagaagcccagaagaggaagaagaggaaagaaaaggagcagggaggccacacaggagacacccgccaggacacaaaaggaagaacag

SEQ ID NO: 146231 - RNA, 91 nt, Homo sapiens
agggaacaccgcgaaacccaagaaccaaaaggaccgcaggaggcgcaggccgccagacggaggggaccaaccaggacccagccggggcaca

SEQ ID NO: 146232 - RNA, 80 nt, Homo sapiens
gggcagcggcggccggccggcaccaggcaccgcgcccgacaacgccgacggcgacggcgggaggcggcccgggcaaggcg

SEQ ID NO: 146233 - RNA, 69 nt, Homo sapiens
gacggagccaggaaggccggggagcccaggccaagccaccacgggccggaggcgcacacagagaaagcg

SEQ ID NO: 146234 - RNA, 65 nt, Homo sapiens
cagaaagcaaaacagagcggaggaaaagaaggcacggaaggcagccgccgcaaagggacgacgaa

SEQ ID NO: 146235 - RNA, 68 nt, Homo sapiens
cccggcccccggacgcccggggaaccagaagaggccaaccagcacgaacgccagcagcacggcacccc

SEQ ID NO: 146236 - RNA, 83 nt, Homo sapiens
cgccgccgaccgccgcccgccacacccgccgccaggaaaccccccaggcaagaggcgcaggaccgggaagaccaacaaacgca

SEQ ID NO: 146237 - RNA, 78 nt, Homo sapiens
gggccccgcgccgcgcgcgcgccgggcagggacagcagggacagccgggagagcaggagagacccgcgagggaagccg

SEQ ID NO: 146238 - RNA, 76 nt, Homo sapiens
ccgagggcccgcaaggccacagcacggggacccaaagacaggaccacgcaccagcagagaaggaaagcaaaccgaa

SEQ ID NO: 146239 - RNA, 80 nt, Homo sapiens
gagaaagaaagggcaccgcagcgcgcccgggcgaggcacagcaggagaaaggaaggcgcgagaacagacccagcccgagg

SEQ ID NO: 146240 - RNA, 72 nt, Homo sapiens
caaaggaaccaggccaaagacaaggcgcgcccacacagaggccgaacgcccgacgagcggcacgggaggccg

SEQ ID NO: 146241 - RNA, 82 nt, Homo sapiens
accgggcagagacccaagacaagccagccgaggcaccaccaggcccagagccgcgggagggcaaaagaacagggggaaaacg

SEQ ID NO: 146242 - RNA, 64 nt, Homo sapiens
gagggaggaacgcaacaaaacgacacaaaaggagcagagacacccacaggaccgcgaacaagga

SEQ ID NO: 146243 - RNA, 71 nt, Homo sapiens
ccagccggagaaggagcccacaacaaccacagaaaacaagcgaccagaagaacgcacaaaaagagcgcagg

SEQ ID NO: 146244 - RNA, 79 nt, Homo sapiens
gacaggaccgccccagcccggggcgccccagggcccagggcccgcagccccagccagaggaggagcaccgacccaggcg

SEQ ID NO: 146245 - RNA, 55 nt, Homo sapiens
aaacacgccaacacagggaggcgccacaggagccgcagaagcaaaggcaccgcca

SEQ ID NO: 146246 - RNA, 81 nt, Homo sapiens
ggccggagcgggcggagacgccgggcagccgaacggagggcgacggagggagaaagcccacgccaggaggcaggcgccacc

SEQ ID NO: 146247 - RNA, 74 nt, Homo sapiens
cccaggaggccgagcgcgggaaagcagcgagcccaaaaggcagagcgaggagagaagaaggagggaaagccaaa

SEQ ID NO: 146248 - RNA, 64 nt, Homo sapiens
gcgcgcacggcagccagcgcaagaggcgggcagcacgcggcaaaagcagaccggaaaacccacc

SEQ ID NO: 146249 - RNA, 83 nt, Homo sapiens
gagacgacgaaaaaaggcaccgggaaaacgcagaggaacgagggggagccacgaggagaaggccacgcgggcgccccacacgg

SEQ ID NO: 146250 - RNA, 79 nt, Homo sapiens
acggcccagcccccgcaaggaggccccaccaggaggaggcggaacagcgcagccagccaccagggaaaccgggacacga

SEQ ID NO: 146251 - RNA, 88 nt, Homo sapiens
cggaccaagcgggccacagcacccccgagacgaaaacaggacaccagaagagcagccggccccgaccgacccaacgcgaccaaacgca

SEQ ID NO: 146252 - RNA, 88 nt, Homo sapiens
cacgggcgagcgcagcggagcacagggggggacgcgagcgaagggcgcagggacccccagggagccccagcacgccggacgaggaagg

SEQ ID NO: 146253 - RNA, 91 nt, Homo sapiens
ggaccgggccagggcaggacaaggacaaggccaggcacggccaacaacacgcagggaagaagcgcagaaaacccccagcagaccggcgccc

SEQ ID NO: 146254 - RNA, 80 nt, Homo sapiens
gggaacgaggagaagccgcgcagcccgggagcgcggccgccgcggcacggggaacgcagggcagcgccgcgaagagaagc

SEQ ID NO: 146255 - RNA, 49 nt, Homo sapiens
ccaagaagggccaccccacagacgggcaaggaaacgcgaagcgaaaacc

SEQ ID NO: 146256 - RNA, 69 nt, Homo sapiens
aaggccccccgaacagcaggcgccaccagcccggaggggcagccaccacagcaccccagggcaacaaca

SEQ ID NO: 146257 - RNA, 80 nt, Homo sapiens
cggagcgccagccaagaagacgcaagaggaggaaggcgggaaccaggaggccgaaagaggccacacggcgcagggccggg

SEQ ID NO: 146258 - RNA, 82 nt, Homo sapiens
ccgggcgaggaccaccagggcgccccaaccaccacggcacggcaaagagagagggacgggcaccaaaaaaggcaccacgacc

SEQ ID NO: 146259 - RNA, 74 nt, Homo sapiens
acgcggggcggcgagggcgccacaccggaacaccgggagaccggggagcagccaacagaaaggggcagcgccac

SEQ ID NO: 146260 - RNA, 89 nt, Homo sapiens
ccggccgcgaggccacggagagccgccggagagcccaggagcaggggagacagagggcgaagacaggacggcccaggcagacacggagg

SEQ ID NO: 146261 - RNA, 79 nt, Homo sapiens
cgaaccagcaccccaccacaacaggagaacaagaccacgggggggcgaggaagagacaggcgggggagaagaagcaggg

SEQ ID NO: 146262 - RNA, 48 nt, Homo sapiens
cacacaccagaaggccgaggcagaaccagagaccacagaagaaggaag

SEQ ID NO: 146263 - RNA, 69 nt, Homo sapiens
accgggccacaagagaaagagcacgcgaccggcccgaggaccgccgcacgaccaaacgcagaacccaca

SEQ ID NO: 146264 - RNA, 46 nt, Homo sapiens
cagaaacagccagcagaagaaccacaaggccggacaagacgcagag

SEQ ID NO: 146265 - RNA, 88 nt, Homo sapiens
gagagaaacccacgaagacgcgcggagaaagagaccaccgagacgacgacacgcggaggcgccggaagcccccacccaacaagacccc

SEQ ID NO: 146266 - RNA, 59 nt, Homo sapiens
gggacgccacacagcacaacacaacacgccccgaaggcaagaagaagaaagcaaagaac

SEQ ID NO: 146267 - RNA, 75 nt, Homo sapiens
gcgggcagcaggaggggggagcggccaacccaagggccccagcccgggcccccaacgaggacaacacagagaacc

SEQ ID NO: 146268 - RNA, 81 nt, Homo sapiens
ccaccgcagaccggcaaaggggaacgggacaccaagcagaaccacgccagacaagacccagacggcgaacagacagaagga

SEQ ID NO: 146269 - RNA, 84 nt, Homo sapiens
ggcggcgcccggagggcagcgaggaaccagaccagagacaccagaaagcccagccaggagaagaggaggacagaaaagcagaaa

SEQ ID NO: 146270 - RNA, 63 nt, Homo sapiens
ggcaaaaggaagcaaaacgggggacagccaggcagacgccaccagacggcggaaaacccgaag

SEQ ID NO: 146271 - RNA, 74 nt, Homo sapiens
agcacggggggacgggcaggcaaaggcggaaaaaggcaccagcccgggcaaacgaaaagccaaaaacacaaaga

SEQ ID NO: 146272 - RNA, 79 nt, Homo sapiens
cgcgagcgcaagacacgaaacaccgagagagaccgacaccgagaacagagcaagaggaggagaagagcaaacagaaagc

SEQ ID NO: 146273 - RNA, 66 nt, Homo sapiens
cagcccaacggaaaaacagcacaacaagaaacaggagccagaaaagcgaggagggccgcccagaca

SEQ ID NO: 146274 - RNA, 82 nt, Homo sapiens
gagaaccagagacgaacccaaccagacagccccgagacccgagccccaggagacgagacccaacaggcagaagccaaaggaa

SEQ ID NO: 146275 - RNA, 40 nt, Homo sapiens
cggcccccagagccgggaacaggggaagcaagccccacgc

SEQ ID NO: 146276 - RNA, 32 nt, Homo sapiens
gaaccggaagggagaagaggaaaagggacgga

SEQ ID NO: 146277 - RNA, 56 nt, Homo sapiens
aaagaacaagcggagaagaacagagccagacgaggacagccggcgcgccccgcggc

SEQ ID NO: 146278 - RNA, 76 nt, Homo sapiens
gaagccacccagcgcgaggcaacgaaagcaaaccgagagcaggcgaaggccgggacccaggcccaccaccgcccac

SEQ ID NO: 146279 - RNA, 98 nt, Homo sapiens
cgccgcagccccccaagcggccgcgagaagcagcgggggggcaggcgacgaagggcccggcaggaaccggaacaacccacagggcagagcggagaagc

SEQ ID NO: 146280 - RNA, 80 nt, Homo sapiens
gccgggccccgcaggacagaaggaagcaccagagaaaggacagggacaggaaagaaagaaaaagaaaagaaaaacagaaa

SEQ ID NO: 146281 - RNA, 77 nt, Homo sapiens
aagcaagcgggacagagggaaagggaccaagcccaaagaggagaaagagccaagggaacaggcaaggcgcaccacga

SEQ ID NO: 146282 - RNA, 50 nt, Homo sapiens
agaccgacacagaaaaagagaggaaccgagaggaccagaggccagcacaa

SEQ ID NO: 146283 - RNA, 68 nt, Homo sapiens
cacgaggaagaaccagcgccccaccacccggcgggagcaaccagaagaaagaagcgaaagagagaaga

SEQ ID NO: 146284 - RNA, 81 nt, Homo sapiens
gggaggaggaggaccggagcaccaaacagagaaagccaaggaagggaggaaggacagccacgcagagaagacagaacagac

SEQ ID NO: 146285 - RNA, 85 nt, Homo sapiens
acgacgccgggaccgggaccgccgccgccgccgccaccagaaggccgcgggaaaggcaaaaccccaagaggggacgaaggaggag

SEQ ID NO: 146286 - RNA, 69 nt, Homo sapiens
cacacaccacaggaagccagagaagggagcacggcgccacaggccaaagagcccgggaaacgcagccga

SEQ ID NO: 146287 - RNA, 52 nt, Homo sapiens
cccagcggaccgaacaggcacacagagaaaaaaagggaacaaaacacagcaa

SEQ ID NO: 146288 - RNA, 76 nt, Homo sapiens
agaaccagcaccaaccaaagcaagagaaagagcccagacgcaaagacaagcagaagggaaggaggaagcccccccc

SEQ ID NO: 146289 - RNA, 71 nt, Homo sapiens
gggacggcccaccagccaccccaccgcgcagggaggggggcccgaacagaagcgcccaaacacaaacaagc

SEQ ID NO: 146290 - RNA, 74 nt, Homo sapiens
aacagccacgagagacgagcaacccccgggaagccaagccgcagagaggcgccagccgagagcaccaccgaccg

SEQ ID NO: 146291 - RNA, 55 nt, Homo sapiens
cgacgacgaggaagaggaggcgaggaagaagccaagaaggaagggcagcacgaga

SEQ ID NO: 146292 - RNA, 78 nt, Homo sapiens
cgaggccgaggaggaggggacagcggacccagggcgggagacggaaccaaggggcacaaccagggccaaaccagaaga

SEQ ID NO: 146293 - RNA, 69 nt, Homo sapiens
ccgccagcgccggcgcggggaaagccgcagcggggagaagcccacgcgaaaacaacaaggaaaaaaagg

SEQ ID NO: 146294 - RNA, 70 nt, Homo sapiens
gaaaaaagcaaaaacccaaaagacgaaaaggaacagcaacaaagaggacagaccaccagcacgcagcccg

SEQ ID NO: 146295 - RNA, 37 nt, Homo sapiens
gaggaacaccaggcacaagggcggagaacggaaaagc

SEQ ID NO: 146296 - RNA, 71 nt, Homo sapiens
ggagagcgcccccacgagaccaggggaaggagggcgaaacaaaggaccagcacgggaaccggccgcccagc

SEQ ID NO: 146297 - RNA, 87 nt, Homo sapiens
ccaacccaccgaacgaacacacgggacaaccagcgacgccggagcagcccaacccaggagggggaagacagagaagaccacacaacc

SEQ ID NO: 146298 - RNA, 78 nt, Homo sapiens
gagagaaggcgcaaggcgacgaaaggagaccgcgccgaggagcaagaggggaaacaacagaagaagcaaggaaaacag

SEQ ID NO: 146299 - RNA, 80 nt, Homo sapiens
cagaaacggccacacgaagagcagacccggggcccacgcacagaccccgaagaggaaacaggagccagaaaaaaaaaaag

SEQ ID NO: 146300 - RNA, 68 nt, Homo sapiens
ccgagaggcacagcggcgcgcaccagaggagggcccagagcgcgagggggaagagagaagacagcagc

SEQ ID NO: 146301 - RNA, 78 nt, Homo sapiens
cacaagacaacacgagagcccggagccgagcccgggaaggcggccacaaacccccccacgacaccgaagcagcgacgg

SEQ ID NO: 146302 - RNA, 78 nt, Homo sapiens
agaagagacaggcgagcgacccccggccgaagccggagaaaagacccggccgagggcaaaagcagaccggaaaaccca

SEQ ID NO: 146303 - RNA, 36 nt, Homo sapiens
ggggggcaaacccgagagaacgggaacaagccgcaa

SEQ ID NO: 146304 - RNA, 73 nt, Homo sapiens
ggagagaaacacagagccacacaccaaagcaagagccggagggcgggaaacgcaacagaacgccaacaaacgc

SEQ ID NO: 146305 - RNA, 75 nt, Homo sapiens
caggagaaggaccaagaaccaggcaggagaaggggaaagcaaagcccaacaaaaaaagaaggccaccccagcaac

SEQ ID NO: 146306 - RNA, 79 nt, Homo sapiens
aaagcaagcccaggaagcacgaaggaagagagcaggagaaagggggagccagcgggccagcggcgcacccgcaccaccc

SEQ ID NO: 146307 - RNA, 84 nt, Homo sapiens
accccccgaaccagaggcgaagagcagaggacagagcgggagccaccagcgccaaagggaagccaggagcccgggggcacgggg

SEQ ID NO: 146308 - RNA, 81 nt, Homo sapiens
cgccggcccccgagcacgccggccccgcgcgcgcccgaggccgagcaaggagaaaagccccgcaaccgacgggaagaaccg

SEQ ID NO: 146309 - RNA, 69 nt, Homo sapiens
gcgcggacgccgaggcaccgaggcaccagaggagggcgcccgcgccggcagaggaggcgagcacccgcc

SEQ ID NO: 146310 - RNA, 69 nt, Homo sapiens
gcagaccccgcaaaagggagaagcagaccgcaccaggcgggaccccgaaaaagcccaaacagacaggca

SEQ ID NO: 146311 - RNA, 76 nt, Homo sapiens
ggaagaagaccccgagagcagcgagcagccgagagcagaggaaggaagcacgaacaggcagaaaacccaacgcggg

SEQ ID NO: 146312 - RNA, 76 nt, Homo sapiens
ggcagcgcggggcagcgcgagccgggaaggggaacaaggaagagcgagaaggaagagcacaccccaccagaaccag

SEQ ID NO: 146313 - RNA, 88 nt, Homo sapiens
ggagcagaagaggaagaagcagaacgggcagcgcagccaggagagcagggacgccggcgaacgcagaccaccacaaccacaccggagg

SEQ ID NO: 146314 - RNA, 72 nt, Homo sapiens
agacacacacacccaacccaaaccaaggaaagaccacagcaagaccacgcccccagccgggggaccaggccg

SEQ ID NO: 146315 - RNA, 88 nt, Homo sapiens
cggggggaggccacagccacggacgccgaggccagagaagcggcagggcggggggggagagcgcagcccacgcggaaggaccagcaca

SEQ ID NO: 146316 - RNA, 75 nt, Homo sapiens
aacaaccgccaccggggagcgaacacagaggccagaccggcccgggccgggccaggaggacacgcgcagggccca

SEQ ID NO: 146317 - RNA, 73 nt, Homo sapiens
gccagggaagaccacacaccccacaggaaggcacacagcagcaagagcccaaacgcgagaaagaccaacgcga

SEQ ID NO: 146318 - RNA, 84 nt, Homo sapiens
agggcgccgccacgccgcaggaggcggagcaggacccgagaagacaggccaagaggggagaggagggcacgccgcacccgcagc

SEQ ID NO: 146319 - RNA, 89 nt, Homo sapiens
gaggcacaaacacaacggaaaggcggaagcacagccggggaaagggcgcggggagacagccagagaagagacgaagcgcacagacaaag

SEQ ID NO: 146320 - RNA, 70 nt, Homo sapiens
gggggggaagccgcagcggaaagcaggagcacagggcagcccaaggaccaagggagaagagacccaggag

SEQ ID NO: 146321 - RNA, 73 nt, Homo sapiens
cggagacggcaaggaggagccagaggcaacaaggcggacaagagaagccgccagaagaaccgcaaaaagccca

SEQ ID NO: 146322 - RNA, 85 nt, Homo sapiens
ccagaagggccgaccagaaaggaaccccaagcgacgcaggcagaagcgagacggcaaggaccagacaggaaaagagggcaggaag

SEQ ID NO: 146323 - RNA, 55 nt, Homo sapiens
gggggagccgggccccacaaggagcgcagcaggcacgaggcaggaggaacagcga

SEQ ID NO: 146324 - RNA, 69 nt, Homo sapiens
ccaaacaccggagccgccaccacacaagcgccaaccgaggagaacccggagagagacccaaaccggcga

SEQ ID NO: 146325 - RNA, 111 nt, Homo sapiens
gaagaaagaaagcgagagggcaaaaccaaaggcggaaaaggggcaagggaggccacagagcaaccaaaaaccggccgcaggcacaaaagaagacgggaaaagggccaaacc

SEQ ID NO: 146326 - RNA, 65 nt, Homo sapiens
agggaaggagaaggagggacgcaggcgcaggccagaggacggaagcaaagggcagccaccgaaga

SEQ ID NO: 146327 - RNA, 78 nt, Homo sapiens
gaacgcggggaaggcgaggcacgaccccacccccgaggcccgaccgcacagcaggaggaccgaaggaccacgacggag

SEQ ID NO: 146328 - RNA, 82 nt, Homo sapiens
acagcacaggaagggacccagcgaggagagcgagccggagcgcacccacgaccgcggggacagagagcccgggaggccgcga

SEQ ID NO: 146329 - RNA, 78 nt, Homo sapiens
cggcgcgcgccaccagacgggaagggaagacgggccggagcccaggcgccagcagggaagcaggccgaagccacaagg

SEQ ID NO: 146330 - RNA, 110 nt, Homo sapiens
gcacaggccagcggcccaggagcagaccagaagggagagaccaggacacagagaacaggccggggggggcacagagccccggaagacagcccccagcgaccagacccagg

SEQ ID NO: 146331 - RNA, 52 nt, Homo sapiens
aggacaccagggcggagagaaacgggccaagacgcggaagacccaaccccac

SEQ ID NO: 146332 - RNA, 68 nt, Homo sapiens
acgcacgggcgacccaacgccgaccgccgcccagggcggcgacggcggcgcgaggaccgaccgggccc

SEQ ID NO: 146333 - RNA, 50 nt, Homo sapiens
ggggaggcaaagggaggaggaggaccggaggggaggacggggggaagggg

SEQ ID NO: 146334 - RNA, 74 nt, Homo sapiens
acagaagcaagaggcgaaccaaaccaggaagcaaggaaaagcaacacaagagagacacaggaaacgggcacgcg

SEQ ID NO: 146335 - RNA, 64 nt, Homo sapiens
accacagaccggcaaagcgccgagagacgggagcgggaaaagggcagaaagagaagacagaaag

SEQ ID NO: 146336 - RNA, 61 nt, Homo sapiens
aaaggacagagaagacagagccccacacaaggagagcaagcagggagggcccacgaaggac

SEQ ID NO: 146337 - RNA, 83 nt, Homo sapiens
cgaacaaacccggcaaacgccgccgaaaagaaagggccacacggaagcagcagagggaacccagcagagggcagagaaaaagc

SEQ ID NO: 146338 - RNA, 45 nt, Homo sapiens
aaagggggaaggaaacccgcggccagcgagcccggacgccgaaga

SEQ ID NO: 146339 - RNA, 84 nt, Homo sapiens
cacgaggcgccggcaggacccccagcccgacggaagcaccacgaccagaccccccaaaccccaagacagaggacccacggggag

SEQ ID NO: 146340 - RNA, 73 nt, Homo sapiens
gccgggacacaccccaggaaaaagacagcccgcagcacgaccagcaggaacgggacgaacagcggggacgccc

SEQ ID NO: 146341 - RNA, 65 nt, Homo sapiens
ggacagaagccaccagaaggcgcgggacggaacagaaaccgggcaaagaagaggagccaccagaa

SEQ ID NO: 146342 - RNA, 79 nt, Homo sapiens
acgacgggacaagagaacagccgcgcggcgagcggcccgcacaaggccggcagggcccagcaaagcacagagaccaccc

SEQ ID NO: 146343 - RNA, 80 nt, Homo sapiens
agaggaaagaaagaccccaggaaagcggcgagcccagaacgaagcggcccagcgggcccaccgggcgaaagagaggaaga

SEQ ID NO: 146344 - RNA, 76 nt, Homo sapiens
accgggaaggcggggaggaggccccaaagggcgagaaaggggagcaagaagaaagagcagggaggagggagcgaca

SEQ ID NO: 146345 - RNA, 53 nt, Homo sapiens
cgcccacagccacgggaccggcgcagagccgaaaaccagccccgcccacacac

SEQ ID NO: 146346 - RNA, 79 nt, Homo sapiens
ggggacggaagcccgggacggcaggaagaacaacacagccagccccccgagggagggacaaggaggagagccaggggaa

SEQ ID NO: 146347 - RNA, 73 nt, Homo sapiens
aaggagccgcgagccgaggaggggcgcgaggagggacggaagccgcaaggagcggccaaagcacggaccacgg

SEQ ID NO: 146348 - RNA, 74 nt, Homo sapiens
aagaggcggcgggcaaccccaggaggggagcaacgagaagaagacaacagggcaccggcccaagaccgcgacca

SEQ ID NO: 146349 - RNA, 64 nt, Homo sapiens
aacagaagcagcacacaaccgagaaggcaaagaaaagcaggggagaagcagaccgcaccaggcg

SEQ ID NO: 146350 - RNA, 73 nt, Homo sapiens
gagagcgagaaagccacaccaccaaaacgaaacaaaggaccaaccaaggaagaagagagggcgaaggaggcca

SEQ ID NO: 146351 - RNA, 64 nt, Homo sapiens
agacgagagacaaaaagagggcgaccaaggaaaaaaacacagacccgcggcagaagcaaagaga

SEQ ID NO: 146352 - RNA, 74 nt, Homo sapiens
gacaagccaacggaacaggcaaaagcagaccggaaaacccaccggcaagaccacacccgaggggagcccaggac

SEQ ID NO: 146353 - RNA, 54 nt, Homo sapiens
cagcccgggcgcgcccgcacgcgccagacacaacaagcgcaagaaaaagagaaa

SEQ ID NO: 146354 - RNA, 63 nt, Homo sapiens
gggaacccccacgcggccagcgaaaacgcccagaaagagccgcagacgcacagcaaccaccgg

SEQ ID NO: 146355 - RNA, 72 nt, Homo sapiens
accacacaccaaagcacccgaaaccagacaggaacgccgaagaggccaacccagggaggagcaaacagcggc

SEQ ID NO: 146356 - RNA, 66 nt, Homo sapiens
gacagacgcagggcgcccccgaacgggcgaaaaacgaagaaggaagacgcgaccgaacaaacagcc

SEQ ID NO: 146357 - RNA, 83 nt, Homo sapiens
cgacccccagagaggcgagcacaaccgaccccagaccgcagaaacgccaaaagacgaacacaaagggaaagaggagaggcacc

SEQ ID NO: 146358 - RNA, 70 nt, Homo sapiens
ggacagccacaaagacccccagacacacacacccaacccaaaccaagaacgcaacccaggagccccgggc

SEQ ID NO: 146359 - RNA, 75 nt, Homo sapiens
gaggcagaaccccacagccacaccagccaaaggaggaggcagaaggcaaagcaagcccgcacagccggagacaca

SEQ ID NO: 146360 - RNA, 85 nt, Homo sapiens
aggagacgaccggccagggcccaccgcgcaccggagagcagccgcgggcgaccaaccaggagcgacagggacccgaagcccgcag

SEQ ID NO: 146361 - RNA, 79 nt, Homo sapiens
ggccaggaggacaacgaagaagaggaaagacgccagcagccaccaagaaaacaccagaaagaaacgaacaagagacacg

SEQ ID NO: 146362 - RNA, 78 nt, Homo sapiens
ggcggcggaggaaacaacaggagcgacaaccaagaaaccccacagcggagaaaaaggagaaacccccaagacaaacca

SEQ ID NO: 146363 - RNA, 95 nt, Homo sapiens
ggccgggggcgcccccccccccaggggcagacggacggggggaccaggccgaagagaggagaccggcaggcagggcacggccgacgggggcagag

SEQ ID NO: 146364 - RNA, 76 nt, Homo sapiens
aaaagcggccaaagaaggaagcgcgcaccgggccgcgagggcccggaacaggggcacgcacgaggcggaaccacag

SEQ ID NO: 146365 - RNA, 39 nt, Homo sapiens
cccaagacccacaacaaaagaagagggggggaaaggccc

SEQ ID NO: 146366 - RNA, 76 nt, Homo sapiens
gcggccccgcgccgcgccacccgcccgagagaaggaggccgcagcggggcccagcacgagaggccccccggacagc

SEQ ID NO: 146367 - RNA, 56 nt, Homo sapiens
ggaaccccggagaaaaggccaagaaggcagacaaaacagaggagaccagaccagaa

SEQ ID NO: 146368 - RNA, 61 nt, Homo sapiens
ggcgagccgcgagagggccggcaggcccgggaagggccagcacgggaccgagcccggagaa

SEQ ID NO: 146369 - RNA, 81 nt, Homo sapiens
ggacggccgcgaagaggcgggccgggggggcccagagcaggcggcgcaacgagacaggcagggagaggcgccccgggggaa

SEQ ID NO: 146370 - RNA, 79 nt, Homo sapiens
ccgcccggcgcagcggggaccggcggcggcgcccaggcacccggcccggccgcaggcaccaagaagaccaacaagcaga

SEQ ID NO: 146371 - RNA, 78 nt, Homo sapiens
ggaacgcagaagccaagaaacaaaacaagccagcgagcaaaagggaaaacgagccaggcagacacacaaaaaacgagc

SEQ ID NO: 146372 - RNA, 75 nt, Homo sapiens
ccgccacacaaccgagcaaaggaaccccgagagggcagggcaaagacgggcagaggacagcaggaaaggcagagg

SEQ ID NO: 146373 - RNA, 73 nt, Homo sapiens
aaacagggacaaaccacacaaccagccaaaacaagcagaagcaagaagagaaaaaccgaacgaaagagccggc

SEQ ID NO: 146374 - RNA, 79 nt, Homo sapiens
caaaacagggacagggcgaagcacagaaccagcacgaaggccggggcagaaagaaaaaagagggcccggggccgaggca

SEQ ID NO: 146375 - RNA, 82 nt, Homo sapiens
gcagagcggaggcgcgccacgaaaccgaccgcggcaagagcagacccaaggccggacaaagcaaaccaaaggacaccccgag

SEQ ID NO: 146376 - RNA, 85 nt, Homo sapiens
gggcaccaggaagcgaaggcggggacgcggacgcaacagggaaaggagaccccaacaagccgcggggcaaaagcccgacgccccg

SEQ ID NO: 146377 - RNA, 83 nt, Homo sapiens
cggcccaccaaggaaagggcgacagcaacagccgccggcggaaggaacggcaagaacccgaccacaggacagggaccaagcag

SEQ ID NO: 146378 - RNA, 59 nt, Homo sapiens
ccagcgccacacgaaaccagagccgaaaaggccggccaagcaagaacgaaagcggcacg

SEQ ID NO: 146379 - RNA, 79 nt, Homo sapiens
gaggcggggacgagccgcaggcagaagagcacgggccacaggcacagagcagagcgcccaggcaccgcgagggcagagg

SEQ ID NO: 146380 - RNA, 76 nt, Homo sapiens
ccgccgccgccccgcggcgcggcgcccagaagccggcaaggaacgcaaagaaaccaagaggcacagaagagagaag

SEQ ID NO: 146381 - RNA, 76 nt, Homo sapiens
accgccggagcgaggaccagggcgaacaccggcccaggggccccgggcgggggcaacagaaggggacgacggccac

SEQ ID NO: 146382 - RNA, 80 nt, Homo sapiens
gccccgcggcgaagggaagaggcccagccggcccgcgggggagccccgggagccgcacgagcggaggaagaacaggaaca

SEQ ID NO: 146383 - RNA, 55 nt, Homo sapiens
ggacgaaaaaagggcaagaagccagaagaggaaaggcagacagaagaagagagaa

SEQ ID NO: 146384 - RNA, 75 nt, Homo sapiens
caaagagcaaacagacagggccgcaggcggaggccccagggacacaaaccagaaacgcaagaccggcaagggcag

SEQ ID NO: 146385 - RNA, 81 nt, Homo sapiens
gaaggggaagaggcccacccggagaaccccacggagaaccagaggacgagccgggaggggagacaccgaccccaagcgaga

SEQ ID NO: 146386 - RNA, 71 nt, Homo sapiens
agaggggcgcagagcaagccgacgagaagcaagaacaggagaacggaaaaaacaaagcgaaacagcggggc

SEQ ID NO: 146387 - RNA, 69 nt, Homo sapiens
gcacgaccagaaccaggaggaaccacagcaaggggaaaccggcacagggaagagaaacagagaaaccgc

SEQ ID NO: 146388 - RNA, 79 nt, Homo sapiens
caaggcgccaaacaagaaaaacaaagccaaggaaaccccaacacagagccaagcgccaagagaccggaaacgagagaaa

SEQ ID NO: 146389 - RNA, 83 nt, Homo sapiens
ggcagaaagaagacccagagaaaaacgggagagaaagggaaggaaaagaccaagacccaccccaaaggaggcacggacaaaac

SEQ ID NO: 146390 - RNA, 85 nt, Homo sapiens
cgcggccgggcggcgcggccgcccgggccgggccccaccggacgaagcccaccagaggcgaggggaggaggaagcgagcgaaaag

SEQ ID NO: 146391 - RNA, 71 nt, Homo sapiens
gagaggccagcaacgcaggagaaaaaaaacagcacgggaaggagaagcgcgagggccagacaaggggaaca

SEQ ID NO: 146392 - RNA, 81 nt, Homo sapiens
caccgaacgccagaaaaaacgcggcaagaggaagagcaagcaggcccgagggacaaagaaggcagaccagcggagaacgga

SEQ ID NO: 146393 - RNA, 75 nt, Homo sapiens
ggaccagccgacgcacacaaaggacaacaaaagagaaggaggaaaacaaagagggaaaacggagaaaagcccccc

SEQ ID NO: 146394 - RNA, 73 nt, Homo sapiens
acgcagggcgcccccgcggccgaagcaccgacaaggcaagaacacaagagcgcacagccggggaagcccaggg

SEQ ID NO: 146395 - RNA, 88 nt, Homo sapiens
gccacgcccccgggccgacgccagaagacaaagagccaagaaaccccagaagaacgacgagaccaggacgccaccaaacacaagccaa

SEQ ID NO: 146396 - RNA, 67 nt, Homo sapiens
gaacagcgcgacacaggaggacaaaccggcgaccacacacggggacgacggggaagccggacagcaa

SEQ ID NO: 146397 - RNA, 61 nt, Homo sapiens
ccgcggcccgggcgagcccggagaagaggaagcacccaggccacagaggaggaaagagagg

SEQ ID NO: 146398 - RNA, 79 nt, Homo sapiens
ccgggaagaacacagcccgggaaagcacagaaagccaaaagggccgaaggccaggaggagcaacccgcaacagagacag

SEQ ID NO: 146399 - RNA, 71 nt, Homo sapiens
gccgcagcgcgaggccgggccgggggagaccgcaacccaccagggagacagaacaccacacgccaaggccg

SEQ ID NO: 146400 - RNA, 74 nt, Homo sapiens
cacggacggagaaggcagaagaaaaaacaccagcagcccagcaaccaaaaagaagaccgcacccaaacaaggga

SEQ ID NO: 146401 - RNA, 59 nt, Homo sapiens
ggcggcccggggcacccgcacgggaagcaggcccgccacagcgggccacacccaaaacc

SEQ ID NO: 146402 - RNA, 80 nt, Homo sapiens
aaggacacgacaagcagaccagccagggaggcaccaccggagagcaggacaggaagcggaagaggacgcaaagcaggcgg

SEQ ID NO: 146403 - RNA, 51 nt, Homo sapiens
gaaagacacgcaagccgcggagagaagggagcccggacaggaccaacggag

SEQ ID NO: 146404 - RNA, 79 nt, Homo sapiens
gcccggacccgcggagggcgacagaggcgaggaggaggagccagggcgagcaccaaggagccgcccgcagcgaggagcc

SEQ ID NO: 146405 - RNA, 73 nt, Homo sapiens
ggacgccagaggggaggggaggagaggacacgggagagccgaaccagaagagaaagaagccagcccagaaagg

SEQ ID NO: 146406 - RNA, 31 nt, Homo sapiens
ccacggaaacaagcccaaacaaaaagaggaa

SEQ ID NO: 146407 - RNA, 118 nt, Homo sapiens
cacgagccccgcagcgcagccgccgaccacggcgacggacacgaggagcagaagcaggccaagacaaggggcgcagagcggggggacaggcgcaagaccggagaagcaggagcggaac

SEQ ID NO: 146408 - RNA, 44 nt, Homo sapiens
gccaggacacccggaagcgggaaaggcacccgccgagagagccc

SEQ ID NO: 146409 - RNA, 66 nt, Homo sapiens
gcccgcccacccagggccggaaaagccaacgccggcgaagggggagccacggaccagggggacggc

SEQ ID NO: 146410 - RNA, 81 nt, Homo sapiens
aggaaggcccaccgaacagaggagcgagaaagccggccccagcaccaccaagacgccggggagggccgacagcaaccccag

SEQ ID NO: 146411 - RNA, 36 nt, Homo sapiens
cgagaccgcggccgggaccgagggggaaagaaaagg

SEQ ID NO: 146412 - RNA, 70 nt, Homo sapiens
gaagacgacgcaccgcaggcagacaaaagggccaaagaagggagagagacaaagaccacgccacccagag

SEQ ID NO: 146413 - RNA, 84 nt, Homo sapiens
gcgccgcgggcgcggacggcgggaaccggcccggagcgagaacgcgcgggacaccagcagcgccgccggaccaccgggcagcag

SEQ ID NO: 146414 - RNA, 74 nt, Homo sapiens
aggcagacgccaggcgcaaaagggacagccgcaaagcccgggcccaggccgccaggcacagagaaggcaaacgg

SEQ ID NO: 146415 - RNA, 68 nt, Homo sapiens
gaccaccccgcacaccacccaagaggcgcgaacagggcccacccgccacgacacaggggaagaagacc

SEQ ID NO: 146416 - RNA, 76 nt, Homo sapiens
gaggacccaagagcacagagccacccgacccagacaacaggcacaaagagagaaggaacacccacagggcagacag

SEQ ID NO: 146417 - RNA, 73 nt, Homo sapiens
acccagcagccggaacagggccagcaccgcaagcgaggggagagaccacaacacaggaccgccagacaggccc

SEQ ID NO: 146418 - RNA, 80 nt, Homo sapiens
gagggagggcaggcccagcgccagcccgcacgccaggcgcaaccccgggcaggcacagccacagccgcaagccaagagca

SEQ ID NO: 146419 - RNA, 52 nt, Homo sapiens
acccacacggccgaggcagcaagagaaggccccacgaagagagcagggacca

SEQ ID NO: 146420 - RNA, 44 nt, Homo sapiens
agaggacggacgcgcacaagacaagcgaccccggcacacaaagc

SEQ ID NO: 146421 - RNA, 74 nt, Homo sapiens
aggcgggaccaaacacaagccaaaagaagcaagggaaagaccaggagccagaaaccaaccaaagagggaggaaa

SEQ ID NO: 146422 - RNA, 59 nt, Homo sapiens
gcgccgcgcgccacccccgaccgcacaccccgcaccgcgagccgaccgcggacagcaga

SEQ ID NO: 146423 - RNA, 73 nt, Homo sapiens
gaaccggccccacccgggaggggggagcggcgggaggccaccgccagaacgcggcagaacggaggcaggcagc

SEQ ID NO: 146424 - RNA, 38 nt, Homo sapiens
cgcagcagcacaagcgaagagaaagagcacgaggagca

SEQ ID NO: 146425 - RNA, 74 nt, Homo sapiens
gaagagagccggccggcaaaggagggaacaggaaaagcaggcgccccaaaacagccaaaagaaaaggcgaagac

SEQ ID NO: 146426 - RNA, 71 nt, Homo sapiens
ggccccaaagcggaacagcgacgacaaggcggaaacaacacaggagaaacaacgagaggccagcaggaaga

SEQ ID NO: 146427 - RNA, 79 nt, Homo sapiens
caccccacaggaccccagagcgacagcccgggacaccaagaaagaacgggagccgccaccaaaagcagacggaaaaccc

SEQ ID NO: 146428 - RNA, 79 nt, Homo sapiens
gagaaacgcaagccagacacgcgagaaaagaagcgggcaggaaaggggagagccgacaaaagcaccagcacgccaccca

SEQ ID NO: 146429 - RNA, 76 nt, Homo sapiens
aaaaacaaaacgaaccaggacggcaacaaaccaacacagcgggaaagaaagcagccacgagaagacgaaaaaaaag

SEQ ID NO: 146430 - RNA, 68 nt, Homo sapiens
ggacacccagccgagcaagcgccacagaagcccgcccggaggaaaaggcaacgcacagaaacagaaca

SEQ ID NO: 146431 - RNA, 78 nt, Homo sapiens
cgagcaggaccaccaggccacgaggagggcgcgagaagacaaagggccccagggcagccaaccccgcggcaggcacgg

SEQ ID NO: 146432 - RNA, 70 nt, Homo sapiens
ccacaacagacgcccaacgagggcaagaccagagagccgcggggaaaggaggccccaaggaccagcaccg

SEQ ID NO: 146433 - RNA, 75 nt, Homo sapiens
caccaggccaccgccacgggccgagacacgcagcggcggccagggaccaaggcaaaagccaagaaggcggaagga

SEQ ID NO: 146434 - RNA, 105 nt, Homo sapiens
ggcccccaccacccggaggagcagcccgccccgccgggggagacgacccccgccagggcggagaacggaaaagcaccaggaagcagagaggaccgcagaagggaa

SEQ ID NO: 146435 - RNA, 80 nt, Homo sapiens
gcggaggcggaggcagaggggaggcgcgaaaggcgggccagaaaaagggaaaaccaaaagaaaggaggaaaccaaagcag

SEQ ID NO: 146436 - RNA, 55 nt, Homo sapiens
caacggggcacgaccggggacaccaccccacaacaccgagcaaagaaaagaagag

SEQ ID NO: 146437 - RNA, 60 nt, Homo sapiens
agcagaaagacacgaggaacagcaagccaaacaggggaagccccgggcaacgaggagccc

SEQ ID NO: 146438 - RNA, 73 nt, Homo sapiens
agcagcacacagacacagaggcaagacacagccgagaaagacaaaagaccccacaagacagacaacaagcaaa

SEQ ID NO: 146439 - RNA, 32 nt, Homo sapiens
cagggcgcccccgccccgccccgccgagcgca

SEQ ID NO: 146440 - RNA, 71 nt, Homo sapiens
caccaaagggaccgcagcgccccgccccagagcccaaaaggcagagcgaggagagaagaaggagggaaagc

SEQ ID NO: 146441 - RNA, 85 nt, Homo sapiens
aacaagagacgggacaagacagggcaaaggacagaccaggcagcaccgggaccggaggcccagagcgacggacggagaaccaggc

SEQ ID NO: 146442 - RNA, 134 nt, Homo sapiens
ccggcggcggccgagccgagggcccgagccaagccggcggaggacgagacaggaggaggaacaagaggaggggcgacagagcgaaagaaacgagccaggccaagacgggaaagcacccacaaggggcgcgaggc

SEQ ID NO: 146443 - RNA, 78 nt, Homo sapiens
cgacgcagagccgaggcagaagacggggcccgggaccacaggccccggcccagaggcagcgcaagccacaggaacgag

SEQ ID NO: 146444 - RNA, 79 nt, Homo sapiens
caccgccgccacaccgccgcgcccagcagccgggcggagaacggaaaagcaccaggaagcagagaggaccgcagaaggg

SEQ ID NO: 146445 - RNA, 53 nt, Homo sapiens
gaagaccagcccccaccagccgcagaagaacgcacgaccaaggacacccaggc

SEQ ID NO: 146446 - RNA, 60 nt, Homo sapiens
ggaggaagagccgggcagcccggagcgggccagcgaggggcacagaggcaggcacaaaac

SEQ ID NO: 146447 - RNA, 81 nt, Homo sapiens
ggaacgaaccccacagcccgggaccgggagcccgggaccgggagccggggggccaccccgaccggaggagcggcgcaggcc

SEQ ID NO: 146448 - RNA, 67 nt, Homo sapiens
cgccgggaggcagagcggccagccagcggcagacagaacgggaccggcagcaagagggacagggagg

SEQ ID NO: 146449 - RNA, 106 nt, Homo sapiens
gggcaagacgccaccagaaaaaacaaaagcagcacagcgggccacaggggacacacccagaagggcagaaaagaaaaggccaaacccacccacagcccgcagacac

SEQ ID NO: 146450 - RNA, 75 nt, Homo sapiens
gaaaacacaccacagggagaggccaccgaggcgcaaggagggggggaccgagacgggagcaggccaaggcggaga

SEQ ID NO: 146451 - RNA, 78 nt, Homo sapiens
gccagccgggagaagacagccccgagccccggccccaaagacccaaaacagagacaccccccagcccccgcgccccga

SEQ ID NO: 146452 - RNA, 79 nt, Homo sapiens
ggagccgcggcggccgcggagaggcgcagcagggcagggcccaccgccgagcgacccgcaccgaccaggccgcggaaag

SEQ ID NO: 146453 - RNA, 55 nt, Homo sapiens
acgaagaggaccaggagcaaacagaaagaagcaacggaacaccgacaaggcaaga

SEQ ID NO: 146454 - RNA, 49 nt, Homo sapiens
aagcagcgagagggacacaaaccaaggcgagacaaagacacgaagaaaa

SEQ ID NO: 146455 - RNA, 69 nt, Homo sapiens
cagcggaggacgaagagcgggacccgagcccggagaggcagagcgaaccagaacaagggaccccccagg

SEQ ID NO: 146456 - RNA, 85 nt, Homo sapiens
cgcgcgcccgaggcgaggaggagcgcggcggaaaagcagaacagccgcggcccaagaacggacgcacacagaggcaacagcaaca

SEQ ID NO: 146457 - RNA, 74 nt, Homo sapiens
gggaggaagaagccggcacagcccaggaggcacaagacacagaagcacaacccaaccaagcagaaacaacagag

SEQ ID NO: 146458 - RNA, 60 nt, Homo sapiens
cggagcggggcgcggaaggaggaagaagagccaggggagcacgagggaggggaggaggag

SEQ ID NO: 146459 - RNA, 77 nt, Homo sapiens
gacgacggcaggaagaaaacgagccaggaacaaagagcaaggacgccgccggcaaaaaggcaaaaagagcgcgaaga

SEQ ID NO: 146460 - RNA, 54 nt, Homo sapiens
gagagacccgaccagaaaccccagacgccacaggcacacggacacccacggccc

SEQ ID NO: 146461 - RNA, 84 nt, Homo sapiens
gagaaagcgaaacacaaggaaagcagaagaaaaaccaggagggaagcgaacccccaagacgggaagaagagcaggcagcagcca

SEQ ID NO: 146462 - RNA, 55 nt, Homo sapiens
ggcaagaaaacacgcccagacgaacacaagcccacaacaagggaccggaacgaac

SEQ ID NO: 146463 - RNA, 75 nt, Homo sapiens
aagggcgacgcccgggcgcgcagaacaggcgcgcggcgacacccacccgggaccacaagagccaggccacacgga

SEQ ID NO: 146464 - RNA, 70 nt, Homo sapiens
gagaccccacacccagccgacgaaggaaaaaagccaggggccagcggcgcagcggagaacagagaggacc

SEQ ID NO: 146465 - RNA, 81 nt, Homo sapiens
agggaaggcaccaaaagggggggcaggaaaggggcaacgaggaacaggccaagaaacaacacagccaaggccagcgccacg

SEQ ID NO: 146466 - RNA, 50 nt, Homo sapiens
cagcaggcccagaaacgcacacaagaaggagccaccgcaagcagggcggc

SEQ ID NO: 146467 - RNA, 61 nt, Homo sapiens
gacacccaaccgggccagaagcaggcggagcagcaccaacacacagcgagacggcagggag

SEQ ID NO: 146468 - RNA, 74 nt, Homo sapiens
cccccaacgcgacggaaaggcacgaaagccaggaccagcacaccgcagagaccaacccaaaacccaaccccaca

SEQ ID NO: 146469 - RNA, 69 nt, Homo sapiens
cgggggcgcgccccgcgcgcagggaccgcccgaccagggacagcagacccagaagaccgggcagcccac

SEQ ID NO: 146470 - RNA, 84 nt, Homo sapiens
cggacgaggacagccagggcaggaaggggggggcgacaacggcaccgggcgacaggaagaagacggccaccagaaaaaagaaaa

SEQ ID NO: 146471 - RNA, 71 nt, Homo sapiens
cgccaccaacccgcaggacgccgagaaggggcgcggccagcagcaaagccggcggccccaaagagacggag

SEQ ID NO: 146472 - RNA, 82 nt, Homo sapiens
gggagcccagcaggagcgggaaaaccgagcgcgggagaaggggggaccaagcgccgcaagaacgccgggcccgcaccccccc

SEQ ID NO: 146473 - RNA, 61 nt, Homo sapiens
agagaagcggcaggaaagcgggaagacaaggaggaagagagaccagagggaagccaggggc

SEQ ID NO: 146474 - RNA, 69 nt, Homo sapiens
gggaccccccccacggcaacaggaaaaaggccagggcagcagagcacggagggcaggagccaacacagg

SEQ ID NO: 146475 - RNA, 72 nt, Homo sapiens
aggcagaggaggaccacaaagggaagagccggccaaaaaacaacaaggaagccagagcaagaacaggaaaga

SEQ ID NO: 146476 - RNA, 75 nt, Homo sapiens
ccggcccaggggagagggcgggcccacagagaggagcagccgccccggcagcagcacgcacccaacaaggagccc

SEQ ID NO: 146477 - RNA, 75 nt, Homo sapiens
gggaacagagggaccagacgaaagcaaccagcaagagcgagaagcacgagaaagcaaaccgacaccagcgacaca

SEQ ID NO: 146478 - RNA, 75 nt, Homo sapiens
agaaacccagaagacccagagaacacaccaagacaacaggcacaaagagagaaggaacacccacagggcagacag

SEQ ID NO: 146479 - RNA, 71 nt, Homo sapiens
aaaccggggaaaagagccaaagcagccacacaacagcgggaaaaccaaaagaggccgaacaacgggcaacc

SEQ ID NO: 146480 - RNA, 83 nt, Homo sapiens
cccagaggaagccgagccacaggagaggcccaggccgaccggcgcgcggagaggagaacacagcaacagaagagaccaaccca

SEQ ID NO: 146481 - RNA, 49 nt, Homo sapiens
gccgccccccccggcgggcgccaggcagcaggacacagacggaagggag

SEQ ID NO: 146482 - RNA, 78 nt, Homo sapiens
ggggaaccagaccgaagggcgaccaccacaacgccgcggacgaccgcacgggcagagagacaagagagacaccccaac

SEQ ID NO: 146483 - RNA, 75 nt, Homo sapiens
cccgcgcgggagggcagccaccaaaacagacccgggcagcaccagaacacaaaaggcggaggcaaggcgcgaccg

SEQ ID NO: 146484 - RNA, 41 nt, Homo sapiens
ccgagaacacaccgaaaaccaggcccgcaagccaaggaaca

SEQ ID NO: 146485 - RNA, 77 nt, Homo sapiens
ggacagaagcgaaaaggcggaaaggccggggaaaaaaaccacacggagccgcagacacccacaacggaaaaccagaa

SEQ ID NO: 146486 - RNA, 69 nt, Homo sapiens
acggcagcaagcggggaacgccgcaccacgaaccagaccaagcgggggccaagggcccaggcggaggca

SEQ ID NO: 146487 - RNA, 75 nt, Homo sapiens
aacgcggaaaaccgacacaacagggagcggcaggggaggcgaagaagagcccggacagaaagacgacaaaaaaac

SEQ ID NO: 146488 - RNA, 70 nt, Homo sapiens
cgggcgggaagaggcggcgggcaagaaaagagcacgggccaggacccagaggacacgcgggcccaacaac

SEQ ID NO: 146489 - RNA, 71 nt, Homo sapiens
acgggacacgggccaagggagcgaaaagaacccccaaaaggggcagggcgaggaaaggagacggcaccaac

SEQ ID NO: 146490 - RNA, 85 nt, Homo sapiens
cgagcacccaggcgacgcccaccaagaggacagccccgggggaggccggccggacaggcccggggaccacaacgacaagcagccc

SEQ ID NO: 146491 - RNA, 80 nt, Homo sapiens
gccccggccggcccccgggcggccgcgggggcggcgcaggcgaaacgaccgacaggcaagacggcagggacacaacaacc

SEQ ID NO: 146492 - RNA, 69 nt, Homo sapiens
gacgacaccccggggaggcgaggagagagggcaggaggacgcggcggcggcgaggagaccccggccccg

SEQ ID NO: 146493 - RNA, 59 nt, Homo sapiens
gggcgaagggagagggcccaggacggaagaaacaagccgagggagccgccgcgcagcgg

SEQ ID NO: 146494 - RNA, 68 nt, Homo sapiens
caacaacaacaaaaagaaagcgcgacacaggcgagaggccacagagcgcccacaaagacgaaagaggc

SEQ ID NO: 146495 - RNA, 52 nt, Homo sapiens
caccgcagcgccggggcacgacacaaaaacaggacagcgcccgcgccgaccc

SEQ ID NO: 146496 - RNA, 58 nt, Homo sapiens
cagcccaccgccccagaccacgggagcagcaaccggcgcagcccacagaaggagaccg

SEQ ID NO: 146497 - RNA, 78 nt, Homo sapiens
cccaagagcccaagcaaggccaagagaaaggaggcaagagccagcccgagaagcaggagagaaagaagccaagcgaaa

SEQ ID NO: 146498 - RNA, 79 nt, Homo sapiens
ccccgcgaggagcccggacacgacccacgggccaaaagcgagcaaggaggcggcacgagccagggagccgccgggaccg

SEQ ID NO: 146499 - RNA, 71 nt, Homo sapiens
aacgaaggagcccaagagccgacgggggagaagccacagacaggggacccacagcccggcgaccacgggga

SEQ ID NO: 146500 - RNA, 78 nt, Homo sapiens
gcacgagagccgcaccgccggacccaaagcacggcaccggacaggagccgggaacgacggccccagcagcggcccgga

SEQ ID NO: 146501 - RNA, 61 nt, Homo sapiens
agagacgcagagccacacaaagaaggaggaaagaacaaagcaaagaagcaaaagaagaaac

SEQ ID NO: 146502 - RNA, 98 nt, Homo sapiens
ccgcggcccgggccgcaccagagcgcccggcccacgacacaggaagaagacaggaggcccacaagcggcacccaccaagacaaaccagcaaggccgag

SEQ ID NO: 146503 - RNA, 75 nt, Homo sapiens
aaacagcaacagggacggagaaagacagcaaagaaaaggagaagaaaggaaaaaaacaaccccgggcaccccgcc

SEQ ID NO: 146504 - RNA, 76 nt, Homo sapiens
cccaacagcacccaagcaagcaacccgcccagaagacaacacaggcggacccaaagaaagggaagaaaagacccaa

SEQ ID NO: 146505 - RNA, 56 nt, Homo sapiens
gacgcccaacaccacccacccaccacggcggagaaaagggacagggaagaagggaa

SEQ ID NO: 146506 - RNA, 83 nt, Homo sapiens
acaggcagaggcggaaagaaagaccgacggaccaccagggcggaaaggaccaaaagaacaccccaccagaccacccagcaagc

SEQ ID NO: 146507 - RNA, 71 nt, Homo sapiens
ggagccacagccagcccagcccgccccggcgccccaaccccggcagccccagcagaaaacacagagaaaac

SEQ ID NO: 146508 - RNA, 56 nt, Homo sapiens
cgagagcgcgaaacgcacgagaagcagagagagacacagccgaaagcggacgcaag

SEQ ID NO: 146509 - RNA, 65 nt, Homo sapiens
aaggcaaagaccaaacgcaagaagaccacacgcaaaacgccacaggcacacggacacccacggcc

SEQ ID NO: 146510 - RNA, 76 nt, Homo sapiens
ccagcggggagacgcgcccggcccggggaccacagccgcggcccaggcccaaggaggagagaaagaacccacgcag

SEQ ID NO: 146511 - RNA, 74 nt, Homo sapiens
ggagagccgaaccagaagagaaaggagggccaggcggaggcagccgcgggagcagcggccccccccgcccccac

SEQ ID NO: 146512 - RNA, 56 nt, Homo sapiens
ggaacagcaaccagaaagccagcaagagaccacagaggaaacaggaaaccggaaag

SEQ ID NO: 146513 - RNA, 63 nt, Homo sapiens
accacggacagcaaacagacagcacaaggggggggccgggcgggccggaccggacgcaaaccc

SEQ ID NO: 146514 - RNA, 70 nt, Homo sapiens
gaacaacaaaaaaaaccccagaggaacagcagcccaaacaagcaccaaccggaaacagcgcccccgaacc

SEQ ID NO: 146515 - RNA, 74 nt, Homo sapiens
gaaccaggaggacacgagcaaaaccggccccgaaacaagaaggccgagggaaaaaagaaacagcaaccaaggac

SEQ ID NO: 146516 - RNA, 78 nt, Homo sapiens
gcgccggaggccgccccggccccgcggccggagcaccccccgcggggggccgggacaggcagaaggccgcgggaaagg

SEQ ID NO: 146517 - RNA, 56 nt, Homo sapiens
gagaacacagaccagaaaaaacaaacacacaaacagaccaaaagaagaacccggac

SEQ ID NO: 146518 - RNA, 64 nt, Homo sapiens
ggcgggacgcgaacacagagggaagagaaagcaaacgagcagggcaaggagccgagacagggga

SEQ ID NO: 146519 - RNA, 47 nt, Homo sapiens
agcaagagagaagcacgcgggaaagaaaaaggcaaacgccggaagac

SEQ ID NO: 146520 - RNA, 75 nt, Homo sapiens
aagaagaaccaaccccacagcaacacagaagggaacaagcggacagaaaaagagaacaagccccggccagaaaga

SEQ ID NO: 146521 - RNA, 38 nt, Homo sapiens
cccaggccgccggccccacaggagagaggcgggagaaa

SEQ ID NO: 146522 - RNA, 63 nt, Homo sapiens
accagcagcccccagagcggaacacagggcgcgcacagacggccacagaagcccagccaagga

SEQ ID NO: 146523 - RNA, 76 nt, Homo sapiens
cgccccgcagcgcagccccgcacggaaagccaggccaaggagcgacgcgggcaggaacgcccaggagaaagaggga

SEQ ID NO: 146524 - RNA, 73 nt, Homo sapiens
ggccagcccccacaacggggaccaccgccccagcagacgcggaaggggacaacacccgaaaaccacaaagacc

SEQ ID NO: 146525 - RNA, 56 nt, Homo sapiens
ccggaccaggaaacggaggcgggcccccccagccggcgaccagccaccccacgcac

SEQ ID NO: 146526 - RNA, 55 nt, Homo sapiens
gggacagcagcaagagccccaaagccaccaggaaaaaggaggacaaacgcaaggg

SEQ ID NO: 146527 - RNA, 80 nt, Homo sapiens
agagccaacccagaagagccaaggggcagggcccagccccgaaccagacaagggacccccaaggagccacagcaggagaa

SEQ ID NO: 146528 - RNA, 88 nt, Homo sapiens
gccgcaaaaggccccaggagcaaggcacaacgagccagcgaacagcagaagaagcaacaggaggcgagaaacgcacgacaagaaagga

SEQ ID NO: 146529 - RNA, 95 nt, Homo sapiens
aagcaggggagagagccaccagagggaggcggagcagggcaacaaggagcgcgcagcacgcaggagggaccaagaaccaagagcaagacagaagg

SEQ ID NO: 146530 - RNA, 86 nt, Homo sapiens
gggccggcgcccggggccccggagagcaaagcccgcgacacccgacgaggcgggcgggaagccgcacgggaaccagcgcaagcgcc

SEQ ID NO: 146531 - RNA, 82 nt, Homo sapiens
cgaacaaagacggaagggagccccgggagcccaacagccaccagacgaggaagacccggaaacaggggccacggagccacgg

SEQ ID NO: 146532 - RNA, 68 nt, Homo sapiens
cgacagccacacaacggacaggcaggcacgcggaaagcgaaaaccaaagcggcgggaaaggaaggccc

SEQ ID NO: 146533 - RNA, 83 nt, Homo sapiens
aaaaagccaaaaagaggagaaggggagaaaccaggcagggcaaacagggcccaagaaaggcggcacgcgggaacagaacccag

SEQ ID NO: 146534 - RNA, 92 nt, Homo sapiens
cgggaagaagcagcggacccgccaccacaggcaccggggcagcagggcgacagcaagaagccaagaagaagaacaacaagaaaaccaacaag

SEQ ID NO: 146535 - RNA, 72 nt, Homo sapiens
ggagaaggaccaagaaccagagagcagaaggggaccaaagagagcaaagacaccaggaggcgaggaccaagc

SEQ ID NO: 146536 - RNA, 73 nt, Homo sapiens
caagagaccgcgcgggggaagcagaggggaaaggcagcaagggcccaggacgaaacaagccaggcaaaaggcc

SEQ ID NO: 146537 - RNA, 70 nt, Homo sapiens
ccggacacccagcggccaagaggcccccccccgcaggagaagggaagcgagacaacagagggagacgcca

SEQ ID NO: 146538 - RNA, 63 nt, Homo sapiens
cgcaacagaaacagagagaaacaaaccaggggagggaaacgagaaaaacgacgccagcggcgg

SEQ ID NO: 146539 - RNA, 84 nt, Homo sapiens
aggcggcaaaaaaaaagcgcacacacgacggaaacaggaacacgaaagaggaaaaacgcacaagaaaccgaagccaaggaggag

SEQ ID NO: 146540 - RNA, 73 nt, Homo sapiens
aaacggcgcgagagcggggacccgcgggacccgcagccccgcgcgggcaccagaaggcggaaaggacgaggca

SEQ ID NO: 146541 - RNA, 74 nt, Homo sapiens
cagagacaaggaaaacgcacccccagacgccgacccagaaagccagggacaccaaaccccgagcgccgggagga

SEQ ID NO: 146542 - RNA, 91 nt, Homo sapiens
cacccgagcaaaccccagcaagagcggaggcgcccggcggagcagaggaaccacacgcgacagaacgaagcgcgcggcaggcgcgcgccgc

SEQ ID NO: 146543 - RNA, 69 nt, Homo sapiens
ccccccagcgggcgcgacggaaaacacaaacggagccggaagaaaggaacacaacaggaccgcagccag

SEQ ID NO: 146544 - RNA, 56 nt, Homo sapiens
ggcccggccagcagggagacacaggccagcccagaagcgaggcgaagcagcggcga

SEQ ID NO: 146545 - RNA, 74 nt, Homo sapiens
agcccggaagacccgcaccggagcaaaggcgggggagcgggaggagccagagcacaccgcaccacggccacagg

SEQ ID NO: 146546 - RNA, 82 nt, Homo sapiens
aggaagccccggcccccaagaagggagacagcgacccaggccccaaaccagccccaccggaggaacaggagaggaggcggag

SEQ ID NO: 146547 - RNA, 79 nt, Homo sapiens
ggccaacacgcgggcagcgaacaagcgggagcaaggagggcgaagagcgaggaggagaaggggcgccacgcacccggga

SEQ ID NO: 146548 - RNA, 85 nt, Homo sapiens
gcgaggcggggccgccggggccgccaggagcccgaccgggagaggacaagaccacgagccaggggcaagagcagacccggaccgg

SEQ ID NO: 146549 - RNA, 56 nt, Homo sapiens
ggagcgccgcggcggagcggacggagcggaaccgccagaccacaagaaaagcagaa

SEQ ID NO: 146550 - RNA, 64 nt, Homo sapiens
caccaggaggaccagcggacgacccccgggacagggcaccagccggggaaaggagcgcagcgcc

SEQ ID NO: 146551 - RNA, 73 nt, Homo sapiens
aaagaaaacacagcaagaggcacgcccagagcaagaagggaagaacaggaagagcagagggggaagcccaaag

SEQ ID NO: 146552 - RNA, 75 nt, Homo sapiens
gagacagagagaaacagagaggagggagaaacagcaaccggcaaggggcgaagaagagcagagcagccgaagcgg

SEQ ID NO: 146553 - RNA, 68 nt, Homo sapiens
agcgccggaaaccaacaagaaggggggaagaaagagaaaaggaaaaagaaagagaagaacgagggaaa

SEQ ID NO: 146554 - RNA, 73 nt, Homo sapiens
agcccgcagcacgaccagcaggaacgaaaccggggagcaggcgcagcagggccaccagcaggccagccacggg

SEQ ID NO: 146555 - RNA, 68 nt, Homo sapiens
aggccagcaggcagggaacgggagaccaccgaaagcggggcaaaacggacaacgagaacggcaacggg

SEQ ID NO: 146556 - RNA, 101 nt, Homo sapiens
gccggcggggcccgcgcgcagccggagacccggagaaaggggaagccaagagccggaaacagcagcccgagccgagggcccccgagccccagcaccagcca

SEQ ID NO: 146557 - RNA, 72 nt, Homo sapiens
gcagaagaaaaagggaaagcagcaagcaaggccaaaacagcgcaagccccggggcagagacacaggacaccc

SEQ ID NO: 146558 - RNA, 92 nt, Homo sapiens
ccacgacgccgggaccggccaagggcccacacaccaagaccaaggcggcacgccgggggcgcgccggccgccaggagacgcaccagcggcag

SEQ ID NO: 146559 - RNA, 44 nt, Homo sapiens
cacgcaggccccgcgccaggcaccaagaaggcggagaggaaaga

SEQ ID NO: 146560 - RNA, 68 nt, Homo sapiens
gccaagaggggagggcagggcgagagcccgcgggagaggaaaaagcccaggaccaacaaccgaaaaga

SEQ ID NO: 146561 - RNA, 85 nt, Homo sapiens
ccggagcgcggagcccggccccgcaccaggaggaggacgacagcacggggaaaagaaacaaacaacaagaagaaggacaaggaac

SEQ ID NO: 146562 - RNA, 78 nt, Homo sapiens
gcagcgagagggacagccacggcagcgcagcaccaagaaggcggagaggaaagagagggaccaccgaaaaaccccaaa

SEQ ID NO: 146563 - RNA, 63 nt, Homo sapiens
aagcgcaggcggacggagcccggaagaccacgacacccaggcacgggcgaaacgcccacgcgg

SEQ ID NO: 146564 - RNA, 54 nt, Homo sapiens
aaccagaacgaaaagcgccagaaagccagccagcaggcaacaggcccagaccag

SEQ ID NO: 146565 - RNA, 67 nt, Homo sapiens
agccggccagaagcccagcgccccaccacagggcccagcgagcagaggccacgggcgggcaccaacc

SEQ ID NO: 146566 - RNA, 71 nt, Homo sapiens
acagaaggaacgacgcggaccagaagccagagcgaggacgccggcaggagcgaagcaacgggagagcaaga

SEQ ID NO: 146567 - RNA, 70 nt, Homo sapiens
gaaacgaagcgcacgaaacaccaaggagccacgcacaccgagaaaaagcgacagagaaagaagcgaaccc

SEQ ID NO: 146568 - RNA, 78 nt, Homo sapiens
gaaacggcaagaccaaaaaacacaaaccaggcaacaggcagaaaaagaaccagcggaagaggagaaccggaaccggga

SEQ ID NO: 146569 - RNA, 73 nt, Homo sapiens
cgcggagagggggcgcgagcggggggacagagagccgaaagccgggcaaggggaaagaaggccgaagaaccaa

SEQ ID NO: 146570 - RNA, 68 nt, Homo sapiens
acaagacgccgccccagcggacacaaaccagccgccagggagaaaagacgaggaagcccaaaaaccgc

SEQ ID NO: 146571 - RNA, 57 nt, Homo sapiens
gcagcagcaccagcccaagagaagggcaaaggaaacaggagaaaggcaggaagcgcg

SEQ ID NO: 146572 - RNA, 92 nt, Homo sapiens
agaaagaaagaaaacgagcgcgagagggggaaaagcgagcgacgagcgagcgcgcgcgcgaaaacccgggcagggacgcaggaaacccggaa

SEQ ID NO: 146573 - RNA, 33 nt, Homo sapiens
acaacaccaaaggaaacccacaggagggccaga

SEQ ID NO: 146574 - RNA, 73 nt, Homo sapiens
caaagcaagggacgcaccaacacggaccagcaagacaccccgaggccaaagaacgccaaccgaaagaaagaca

SEQ ID NO: 146575 - RNA, 85 nt, Homo sapiens
gcaaagccagaaagaggaggccagagcggaggaaggaacagagccacagagaaaaagacgccacaacagaagagccagagaaaac

SEQ ID NO: 146576 - RNA, 75 nt, Homo sapiens
accaagccagaagaccacaacagacaagcgaccacagggcgaggcaacaacagaaaaacaagcagaaaaaaacag

SEQ ID NO: 146577 - RNA, 81 nt, Homo sapiens
agagggaagacacaaagccgcgaaaggccgggaagagggagagcaaacggccagcccagaagaagacggcacgggaccccc

SEQ ID NO: 146578 - RNA, 86 nt, Homo sapiens
cgggcggcacgcacgcgggcagggaacaggcggagcggaagcaaacggaaacaagaggagaggcaagaagacaacagcgaaggaaa

SEQ ID NO: 146579 - RNA, 83 nt, Homo sapiens
ggcagcagcggagcggaccccagcccaggcagaaaaggggggcgggccgaaaacagcaggaaaaccacaccaagggaaggaag

SEQ ID NO: 146580 - RNA, 73 nt, Homo sapiens
ggaaccgaccagaaccaaaggcgagacgcagcgaacgcagccaaagaaacccccaacaccagcaagcccaacc

SEQ ID NO: 146581 - RNA, 77 nt, Homo sapiens
gaccgggcccaaaaggccacacgcgacccccgagcggaaaaacgagaagacagaggagccagaccaagagacagcac

SEQ ID NO: 146582 - RNA, 74 nt, Homo sapiens
aagacccgccgcggggcgaacgccccggcgcggccagccggggcagacaacggcaagcggagaagagcaaggcc

SEQ ID NO: 146583 - RNA, 58 nt, Homo sapiens
gacggcgccgcccacggcgagggggggccgcgcggacagagcgacggagaagcacggc

SEQ ID NO: 146584 - RNA, 69 nt, Homo sapiens
gggcccgacgagaaaggacccagcgagcggagagccgggacacaaggagaaacggagagccggacgaaa

SEQ ID NO: 146585 - RNA, 73 nt, Homo sapiens
ggggagaggagcaagcaggccaggaacaggaaagagcagccaaagccaaagaagacgaaaaaagggagaacca

SEQ ID NO: 146586 - RNA, 82 nt, Homo sapiens
ccggggcccccggaccgcagacgggggacgcagggaggagcgggacaccccggaagcgggaaagcgggaaccggggaggacg

SEQ ID NO: 146587 - RNA, 50 nt, Homo sapiens
agcgcagagacacagaacgaagggggacggcagaacagaaagacacgacc

SEQ ID NO: 146588 - RNA, 67 nt, Homo sapiens
ggcaaggagccacaaagaagaaaacacaaaaacgggaaaggagagaacagaaagaccaagcagaaga

SEQ ID NO: 146589 - RNA, 82 nt, Homo sapiens
aagagccaggacaccccgaaagccggaaaacgagccggaggagccaccaacagaagcaggagccaggaaaccaaaacccaca

SEQ ID NO: 146590 - RNA, 80 nt, Homo sapiens
accaggaaaaggccacagggcccgagagccaaaaaagagggaggacagggagcaggggagaagagaaaaaagagacaagc

SEQ ID NO: 146591 - RNA, 57 nt, Homo sapiens
cgcccacgcccgcggcgccacgaccagcggacgaacaggagaaggaacaaaggaaac

SEQ ID NO: 146592 - RNA, 78 nt, Homo sapiens
ccacccagcgccgagggaaggcgccgcgccaggccgggcgggcgaaacacaacacacgcaggacgcaaacgccaccgg

SEQ ID NO: 146593 - RNA, 72 nt, Homo sapiens
agaaagccccggccgccgggaagacacccccccaggcccgaccagcgacgggagcccaaggggagaggggag

SEQ ID NO: 146594 - RNA, 70 nt, Homo sapiens
caggaggcgcggaggacgccccaccgccgacgcccccagccaccaggggagccgccaccaaaagcagacg

SEQ ID NO: 146595 - RNA, 79 nt, Homo sapiens
cgaggcccaaagagcccaggagaagcggagcggcagagaaaaaggccaccgagcgagaacgcggacaagcaaacaaaga

SEQ ID NO: 146596 - RNA, 72 nt, Homo sapiens
cccaggcggcgggcggcgggacgccacaggcgggaaggaacaccaagcccaccgaagaagagacacagcaca

SEQ ID NO: 146597 - RNA, 84 nt, Homo sapiens
agcggcgaggaggggccccagcagcccccgaaggcccacaggacaggagagaaagacggcagccgccgcaaagggacgacgaag

SEQ ID NO: 146598 - RNA, 78 nt, Homo sapiens
gaacagacacggggaagcgcaaaaacaagacggggcgccccacagaggggcgacggaaaccaacaggaaacaggagga

SEQ ID NO: 146599 - RNA, 57 nt, Homo sapiens
cgacaggaggagacaggcgagagaggaggacacgaccggggaaaaagaaaagggcga

SEQ ID NO: 146600 - RNA, 64 nt, Homo sapiens
acggcaaacaagagaaaggccgaaggcgccaacgaacagccaacacacggagcacagagagacc

SEQ ID NO: 146601 - RNA, 85 nt, Homo sapiens
cgagcccgccgcgcgggcccgcccgacgcggaagaagagcgaaagccagggggcgaaacaaaacaaaaaggagcaaaaggagaag

SEQ ID NO: 146602 - RNA, 75 nt, Homo sapiens
ggcaggcaacaaaaaaacggaaaggacgcacccgaacacaagaaaaccgaccaaagaggccaagagacgaacccg

SEQ ID NO: 146603 - RNA, 57 nt, Homo sapiens
aagccagaaaagagagacgaacggaaaagaggaggcgagcgggaacaagcaaaaaag

SEQ ID NO: 146604 - RNA, 91 nt, Homo sapiens
gggcgagggcccgggacagcgcacccacacagccgcagaaagcaacaaagcgagagcacaagaaaacagccccgagcaccagaccacgcca

SEQ ID NO: 146605 - RNA, 54 nt, Homo sapiens
ggcaccagaggagagagacgggcacaacacgggaagcaggacaccaaccgacaa

SEQ ID NO: 146606 - RNA, 81 nt, Homo sapiens
gcggcgaacacaaaaggcgccgaagcaggacccgaagccaaaccaggaggagacacgagaccagaagccaagaaacgagga

SEQ ID NO: 146607 - RNA, 72 nt, Homo sapiens
gcagggggaggcccaccaggaggagcaagaaggagaggaacgaccagaagccgccaggagagaacccacacg

SEQ ID NO: 146608 - RNA, 65 nt, Homo sapiens
acagcgccgcagacgaaaaaggccaaacgccgcaaacccgccaaccagcaagcagaagccgccca

SEQ ID NO: 146609 - RNA, 72 nt, Homo sapiens
gaaacgcaacccgacccgggacaacacacaaaacgccgcaggaggggcagacaaaaacgcggaggggaccag

SEQ ID NO: 146610 - RNA, 83 nt, Homo sapiens
cacccaccaccacaacagcccccccacagccccagcaacaggcgccacccccggcaggagggggagaggccggccaaggcaag

SEQ ID NO: 146611 - RNA, 76 nt, Homo sapiens
cagcccaagcaccacccacgaccgggaccgagacagggaaagacggcgccaggaacaggaaaaggcaggaaaaacc

SEQ ID NO: 146612 - RNA, 60 nt, Homo sapiens
acccacgccgagccgccagagacggcaggcccggccaaaggcgccaccaggggccagaac

SEQ ID NO: 146613 - RNA, 73 nt, Homo sapiens
gagccgacagccggaccgcaacaccgcaacccacgcaggcaagagccgaaagaagcagaggaagaagccccac

SEQ ID NO: 146614 - RNA, 73 nt, Homo sapiens
acagaagagccaaaacccagcagcaaacaccgccccacccggcgcgagagcagggagagcaggaaaccccagg

SEQ ID NO: 146615 - RNA, 74 nt, Homo sapiens
gaccgccgcggcggggcccaaacagcagaggggcagagccccccaagagaacccagggggagccacgccggagc

SEQ ID NO: 146616 - RNA, 53 nt, Homo sapiens
ccgcgcggccccacgggcaacagcaggcgggacacggggcgacccacccaaaa

SEQ ID NO: 146617 - RNA, 44 nt, Homo sapiens
caagcaacaggcagccggcgagaacgccgggagggaagaaagca

SEQ ID NO: 146618 - RNA, 61 nt, Homo sapiens
agaaggagagcgacagcccaagcaccagggcggagaacggaaaagcaccaggaagcagaga

SEQ ID NO: 146619 - RNA, 55 nt, Homo sapiens
ccagcagcccccgaaggcccacaggacaggagagaaagacgaaggaggaagcacc

SEQ ID NO: 146620 - RNA, 81 nt, Homo sapiens
gcgccggacccgggccagcggccaagacggacccaaggccagccagccccaggcaccagcggacaggacagggaggacgaa

SEQ ID NO: 146621 - RNA, 47 nt, Homo sapiens
gaagcacagacgaccaaggcccccagggacaggaaagcgcaaagccg

SEQ ID NO: 146622 - RNA, 58 nt, Homo sapiens
gaccaagaaggggggcgcgacagagggcaaggaagcagcggagaagcgaaggaacgga

SEQ ID NO: 146623 - RNA, 70 nt, Homo sapiens
acgccaaaccccagcaagcaggaagcagaacccaaagaagcgaagcagaaaggacagagcaaaaaagcag

SEQ ID NO: 146624 - RNA, 45 nt, Homo sapiens
gggccccaaacgaccacgaagcacgcacaagcggccgggagggcc

SEQ ID NO: 146625 - RNA, 67 nt, Homo sapiens
acccgaaaagcgccaaggaaaaggacgagaacgccgcgacagaaacaaccgagcggggaaaacgagg

SEQ ID NO: 146626 - RNA, 58 nt, Homo sapiens
gcggcgcagaggagagaaggaggacgacgcccaggaaaagccgcgcggcccggaggag

SEQ ID NO: 146627 - RNA, 75 nt, Homo sapiens
ccagccgcacgccaaggaaacaggggagaaggacggcagaaaacgagacgccggcggcgaaaaaaggggacaaga

SEQ ID NO: 146628 - RNA, 77 nt, Homo sapiens
caaccagcgggggaggggccccagcccgagacagaggaacacgggccacagaacagagcaacccacgcacaccgcga

SEQ ID NO: 146629 - RNA, 85 nt, Homo sapiens
ccgcgcccggccggacccgggcccgagaccgggcccaggaagacagcgacgcggaagcagaagaacaaccccaccaagacagccc

SEQ ID NO: 146630 - RNA, 65 nt, Homo sapiens
ggcagagggaacaggcagcaggaagcacggcgggcgaaacaggcgaagaaaagccacacggggag

SEQ ID NO: 146631 - RNA, 80 nt, Homo sapiens
aggaacggacaaggcaggagcgaaaagcggcaagaacagccagaggaacagaggagaagaaagaaggcgaagaggaaggc

SEQ ID NO: 146632 - RNA, 71 nt, Homo sapiens
acacgcagcagcggccaggaggcaaggaggccacggggccgaagacaccaaccgggcaccagccaaacgga

SEQ ID NO: 146633 - RNA, 80 nt, Homo sapiens
gcacacaccaacgggagacaggagaagggcgaaaagccaggagcaaaagacgagcgcgacgccaccagcaacgaacccgg

SEQ ID NO: 146634 - RNA, 84 nt, Homo sapiens
gaacccaccacccccgcaccagagaacacaggagaaccagggcggacacccgagaggcggacagcgaggcaacagagaagagcg

SEQ ID NO: 146635 - RNA, 82 nt, Homo sapiens
gagaaccaagcggcaaagcaccgaacggcgccgagggaccgagcgagaggcaccaggccgaccggggcccacaagacacaga

SEQ ID NO: 146636 - RNA, 71 nt, Homo sapiens
caccaaaaagcaaacggaccagaccgaccaccaaaaaggcccaacccaagcaaacgacagcagccgacacg

SEQ ID NO: 146637 - RNA, 79 nt, Homo sapiens
agagggccgaaggcgggggggggaggcccgaggcagcgcccgcaaggccaagccggcgaagcccgcgcgcagccccaaa

SEQ ID NO: 146638 - RNA, 72 nt, Homo sapiens
ccgaccccccggcgccgcgccggcggcgcaagcccgagaagcaagaccgccccaaaaagcaagaaaagaccg

SEQ ID NO: 146639 - RNA, 73 nt, Homo sapiens
gaagaaacccgcggaaagaaagccggaaaggaacagaagacagagacagacccagcacggaccccccccccag

SEQ ID NO: 146640 - RNA, 94 nt, Homo sapiens
ggaagagacaggaggcagagccaaacacccagggaccaagaaaggcccagggaccaaagcccggacaaggcccgagcaccaggaccgcagaagg

SEQ ID NO: 146641 - RNA, 57 nt, Homo sapiens
cccagccggcgaccagaggaagcaagggaagaggagagaacaggagacgccagggag

SEQ ID NO: 146642 - RNA, 80 nt, Homo sapiens
cgccgccccgcgcggcagggacgagccgggaggggagacaccgaccccaagcgagagagcagaagacaaggagacaagcc

SEQ ID NO: 146643 - RNA, 74 nt, Homo sapiens
aagacaaaaggagacgagaagaagacaagaggccaagccgacgccagcgggcgccacccaacaggcgcaccgcc

SEQ ID NO: 146644 - RNA, 65 nt, Homo sapiens
gcggaaccacccaccgagggaccagggcggagaacggaaaagcaccaggaagcagagaggaccgc

SEQ ID NO: 146645 - RNA, 78 nt, Homo sapiens
gccaagagaaaaagaaagaacaccaaaacaacaggaacggcccaaaggaggcaaaacaaaggaagaagaagaacagcg

SEQ ID NO: 146646 - RNA, 76 nt, Homo sapiens
cacggccgcggcggggcccccccgcgaccccacgagaccaagggaacggaagccccagcccgcgcgagccaggcgc

SEQ ID NO: 146647 - RNA, 56 nt, Homo sapiens
caaagcgagagagggaagcgcccggcccaaacgaacacaagagacagggaacacca

SEQ ID NO: 146648 - RNA, 88 nt, Homo sapiens
cagaggaggccccccagccagggaacagcgcaagaaggacaaaaagaagcagaggaaagagcgcccagaaggaaggcgagaaacaaag

SEQ ID NO: 146649 - RNA, 80 nt, Homo sapiens
gagaaaaccaggagcccagcaggccggaacgaagcaaaacgacccagcaccccccccgagcaaagagccagaaagacaca

SEQ ID NO: 146650 - RNA, 38 nt, Homo sapiens
ccccggcgcgagccccaggaaagcaccagccccggggc

SEQ ID NO: 146651 - RNA, 79 nt, Homo sapiens
cggcaccccccaaacggggcccggggagggcgaagacaggacggcccaggcagacacggaggaggaggaagaggaggag

SEQ ID NO: 146652 - RNA, 78 nt, Homo sapiens
aacccccccacgccagccaggagaagaagcgagcccagagccgcagcccgacgccaggagaccccaagcgacgacgcc

SEQ ID NO: 146653 - RNA, 73 nt, Homo sapiens
ccaccaagaagacggacagcaccgaaagaaagaagaagaggacaggcccaggaaagggaagaacaaaggaaga

SEQ ID NO: 146654 - RNA, 79 nt, Homo sapiens
cggcgaccggggcgggcgcggcgaggccaaagccaccgccccgcgccgccccccggccaccgcacaggcaagaaagggc

SEQ ID NO: 146655 - RNA, 76 nt, Homo sapiens
gacgaccggcaaccgcgacccaaacacccaacgagacgggcaagaggcaagaaagacacaaagacgagcgaggaaa

SEQ ID NO: 146656 - RNA, 68 nt, Homo sapiens
agcgaccaagacgggcaggggcagcgcgagcacccggaagcaccagggcccgaaaaaggaaccaaacc

SEQ ID NO: 146657 - RNA, 80 nt, Homo sapiens
gcgaggcccacccgccgcgcccaagccccgcggggaagaacggcacgcggaacccgggcggggccggacggggggagaag

SEQ ID NO: 146658 - RNA, 83 nt, Homo sapiens
ggagggggaaaaaacccaaggcgcaaagggaacccgagcgcagaggggaagcagaggacccaggcgaacagcaaggaggggac

SEQ ID NO: 146659 - RNA, 74 nt, Homo sapiens
gaacaacccaaaccaaggcccaggaaaagagcacagaggaagaaaggagccaggccggcacggcagcaagagaa

SEQ ID NO: 146660 - RNA, 84 nt, Homo sapiens
cccaagacagcaagggacagacgggaaaaaagagcaccacagcccccgcgacgagcccccaacgagccaccaacaggaacagac

SEQ ID NO: 146661 - RNA, 67 nt, Homo sapiens
caacagcaccacagcaacccggacagaccagaacacacaagaaccgggagaacgaacaaaccaagcc

SEQ ID NO: 146662 - RNA, 74 nt, Homo sapiens
caggagcgagccaggcagggccgcagggaagaacgagccacggcccgaagggaaacaaagcgaagagacaagac

SEQ ID NO: 146663 - RNA, 71 nt, Homo sapiens
cgcgacacaagaccgaaagagaaacaaaagggaaaaccgcaaaaacaccaagaccagccagaagacagaac

SEQ ID NO: 146664 - RNA, 76 nt, Homo sapiens
gacgaccaacagccagagagaggaggcgacaaagcagcacaggaagaaagccccagcacccagccaaacccaggcc

SEQ ID NO: 146665 - RNA, 70 nt, Homo sapiens
caagacgagcccaccacggacagcaaacaggaccggccgggccgcagcacacaccggccacaccacaccc

SEQ ID NO: 146666 - RNA, 81 nt, Homo sapiens
ggggcgcggcggccgccaccaggcacccggaagagcgcggccgaagaggcagaggagaccaggccccccacacagaggagg

SEQ ID NO: 146667 - RNA, 62 nt, Homo sapiens
ccggcgcggcggggagcgccgcggcccgggacgaggaggggcccaggcccccggggccccac

SEQ ID NO: 146668 - RNA, 85 nt, Homo sapiens
gcgagagaggaagcggcggcgacgccggcggcgccggggcggcgaggcgcgaggagcaggacacaggaggagggcagaccaaaca

SEQ ID NO: 146669 - RNA, 73 nt, Homo sapiens
agcacagcggcaaaaggcgaaacggcagcagcagccccccaaaacaagagcgggagaagaagcaccccagcga

SEQ ID NO: 146670 - RNA, 73 nt, Homo sapiens
ccaggaccaaaagaggaagaagcgggacccgcagggcaaaggggggaagaacaagacgagacacggggccgca

SEQ ID NO: 146671 - RNA, 67 nt, Homo sapiens
cggggaggcgcggccgccccgcgggggacgggaccaggaggcggggccccccggagcgggcgcagac

SEQ ID NO: 146672 - RNA, 87 nt, Homo sapiens
cgcgggcgccgggccaggacggcgagcagcgagcagcgacaggcgcgccagcggcggcggcgaaccggggccgcggcggaagcagca

SEQ ID NO: 146673 - RNA, 65 nt, Homo sapiens
aaaaaacaccaccaacaggaaagcaagggaggggcaaagagaaccaggagaccccaccaccacag

SEQ ID NO: 146674 - RNA, 78 nt, Homo sapiens
caagccccaccggcccggcacccaaccacacgcgggagcgaccgagcccagaggcgggggaccccccgacgcccgggg

SEQ ID NO: 146675 - RNA, 76 nt, Homo sapiens
agcacgcgccgccccgcgcgcgagccacgcagcccccaggacagacgcaaagagacaggagggacggaagcacagc

SEQ ID NO: 146676 - RNA, 57 nt, Homo sapiens
aagcagccccgccccaaaaggggcaagacgccaagagaaaaggcgagagcacaaagc

SEQ ID NO: 146677 - RNA, 52 nt, Homo sapiens
cacaaccaagagaaacaaccgcaagccacagccaggaaacaccagccccccg

SEQ ID NO: 146678 - RNA, 48 nt, Homo sapiens
acaagccagaccaccccagggagaggaaggcagcgagacaggaaacag

SEQ ID NO: 146679 - RNA, 71 nt, Homo sapiens
cccagggaggagaagcacggccacacagggagagcgggccgaagaaacagagggaaacagaaaaaccagaa

SEQ ID NO: 146680 - RNA, 69 nt, Homo sapiens
gcagccaaggaaccgcggcagaaaagccgggcgcaaaggccgaccgaacacacgggaaaaggccggacg

SEQ ID NO: 146681 - RNA, 47 nt, Homo sapiens
cacagggaaagcggagggcagaaaagcaaccaagaacgacacgaacc

SEQ ID NO: 146682 - RNA, 68 nt, Homo sapiens
cgacagaggagggaggaaaacaaccgagggcagaggcacagagagcgcgaaggaccccgacaagaacg

SEQ ID NO: 146683 - RNA, 76 nt, Homo sapiens
ccagaacagcaacgagaaggggaggccaaagagacacagcccaagaggcggggacggacagccaggaccgcgaggc

SEQ ID NO: 146684 - RNA, 71 nt, Homo sapiens
gaagccacggcagacacacaacccgacccgacgaaggccaaggacgaaggagagcacgacaagaagagacc

SEQ ID NO: 146685 - RNA, 75 nt, Homo sapiens
cgcagccagaggcaccggagcaccggagcgggcaacggagacagaaaccaggaggccaagcaagggaaaaagaca

SEQ ID NO: 146686 - RNA, 102 nt, Homo sapiens
acggggcgagccagagagggcccacacgacagaaggacgacgccggcgcgaacaaaaaaagaaggaaccagcaaagcgccacgaagcacaagcaagaggacc

SEQ ID NO: 146687 - RNA, 76 nt, Homo sapiens
ggggccgccacgccgccgccggccggcccccggccaggggcaaaggagaggaagaggaagaggaagaggcagcggc

SEQ ID NO: 146688 - RNA, 69 nt, Homo sapiens
accagcgcaaaggggaggacagacaaacagaacgagagccacagaggccccacccgcggagaacaaggg

SEQ ID NO: 146689 - RNA, 77 nt, Homo sapiens
gcagaaagagaccaaacaggggaaacccgcaaggggagccgccaccaaaagcagacggaaaacccacggggaagacc

SEQ ID NO: 146690 - RNA, 81 nt, Homo sapiens
gaacaaaaacccagagcagcgcggccagccaagagagacaaaggagaaaaaggcagccccggagacgaaaagacaaagcac

SEQ ID NO: 146691 - RNA, 74 nt, Homo sapiens
gaagacaagaggaaacgagcacaggaccacaaacagcaacacagaacgcaagaagagcaaccggcagcacacga

SEQ ID NO: 146692 - RNA, 64 nt, Homo sapiens
agccaggggagcgcagggcacgcgaaaaaagcccaggacccacccggcagagaggacccagcag

SEQ ID NO: 146693 - RNA, 66 nt, Homo sapiens
ggacgagcggagcccgggacaggaggggccccacggagcggaccaggaggagcgaggcggccccca

SEQ ID NO: 146694 - RNA, 76 nt, Homo sapiens
gccaaagcagcagccccgacagccacggaacagggaaccagccaaacgagacagccacggcagaggaaggcacaaa

SEQ ID NO: 146695 - RNA, 66 nt, Homo sapiens
acccgccagaaggcgcacagggaggagggaaaacagccaccgacggggcacacagagaaaaaaagg

SEQ ID NO: 146696 - RNA, 93 nt, Homo sapiens
aacgcggagcacggaggacggggccgggcgaccgggcaccagcaggacccgaggccaggagccaggggcccagaagaggccggaagagcggga

SEQ ID NO: 146697 - RNA, 75 nt, Homo sapiens
aacgagccaaaaagacaagcgaaaaagggcagaccaagagaggaaccagcaggcaaagaaagcaaaagaagagcg

SEQ ID NO: 146698 - RNA, 71 nt, Homo sapiens
aaacgaagaggccgggcaaccaccagaaacaagggacacggccgaaaggcagcggagcagaaaaggaaacg

SEQ ID NO: 146699 - RNA, 69 nt, Homo sapiens
cgacgcgcgggcaccgcgcgcccaagaagacggcagaacacccagcacgcccagaacgaccagaggccg

SEQ ID NO: 146700 - RNA, 69 nt, Homo sapiens
aaaccgccccagccacaaagagaaagagcaaagagccaacgacgcaccagaggaacacagaacccgaaa

SEQ ID NO: 146701 - RNA, 84 nt, Homo sapiens
cgcgagaccgcagaaggagcggagcggcagcagaaggaggaggacccggaaaaagggagacacacaaacgagccagagaaaaag

SEQ ID NO: 146702 - RNA, 74 nt, Homo sapiens
ggaaagagccacgaacacaaaggagggacagcagcaagagccccaaagccaccagacacgagaggcgagggacg

SEQ ID NO: 146703 - RNA, 64 nt, Homo sapiens
gccgaaggagaccacaggaaggaaggcgaaaaaccgaacccgacaggaaggaggcaaaaagagc

SEQ ID NO: 146704 - RNA, 83 nt, Homo sapiens
gcggggacggcgccgagaggagacagaagaaacggcagaggccaaggggaagccagacagacagggccgaccagggcagagga

SEQ ID NO: 146705 - RNA, 76 nt, Homo sapiens
caaccgcagggaccacagcaccgaaaacaccaggaaagacaggagaccaaaaaggaaacccacccaccacccgaga

SEQ ID NO: 146706 - RNA, 71 nt, Homo sapiens
cgaacagacaagcacgccggagggaagagcgagggagaggacagagcagccaggccacgagccagaaccga

SEQ ID NO: 146707 - RNA, 70 nt, Homo sapiens
accaagaaccaggagaccggaaacgagagaaacgaagacgaagaaacagccgcacacagaagaaaacgag

SEQ ID NO: 146708 - RNA, 73 nt, Homo sapiens
acacgaacgaggagccagggggaacacaaaaaaacccccccacaccacccaacggaagcaccgaggcggagca

SEQ ID NO: 146709 - RNA, 69 nt, Homo sapiens
ccaggggaccggacaagaggcacaacaaacggagagcaaagacacaggagaaaaccagaggaaacccac

SEQ ID NO: 146710 - RNA, 46 nt, Homo sapiens
gcacaccgggaaacggaccacaggaaaccacgcgagcagggaaagc

SEQ ID NO: 146711 - RNA, 65 nt, Homo sapiens
ccccaggccaagagggacccacccggcgaggcgcggccagcgaagaagacgcagccagacccggc

SEQ ID NO: 146712 - RNA, 38 nt, Homo sapiens
cacgaccagcgccggaggacaccccgccacccgagcac

SEQ ID NO: 146713 - RNA, 81 nt, Homo sapiens
agcggccagccgagcaagcggaggaccacgccggccggcgggacgagccggagggaaggaggagaagcgaaccgcaggaga

SEQ ID NO: 146714 - RNA, 80 nt, Homo sapiens
gggggccaccaccgaggaggacacccggacgcaggcccggccaggagagcgcgcacgaggcggaaagagcccaccagccc

SEQ ID NO: 146715 - RNA, 59 nt, Homo sapiens
acacgcccaacgacgcccgaaggcaggcgagaacgaaaccaagaggcaaagagagaacc

SEQ ID NO: 146716 - RNA, 41 nt, Homo sapiens
caccagaaaagggacaggacagaggaagcgggcgacaaacc

SEQ ID NO: 146717 - RNA, 67 nt, Homo sapiens
aaggggaacacgaagaggggcaacccaaccgaccaaggcccaacaccaccaccgccaagaggaaccg

SEQ ID NO: 146718 - RNA, 72 nt, Homo sapiens
cgaccggagcgggccaggcgcggagcaacggggcggcacacaaggagcgaagggcagggagaacgccaggca

SEQ ID NO: 146719 - RNA, 79 nt, Homo sapiens
ccacagcacccacgggagagcgcgcagccagcggcccccagggcccgcagaaggagacccaacaccccggccagacggg

SEQ ID NO: 146720 - RNA, 86 nt, Homo sapiens
cggcggagccgagccgaggcccggcggcgcaccgggcggcagcgcagacgggacacggccggccaggagcggccgcaccacaccca

SEQ ID NO: 146721 - RNA, 74 nt, Homo sapiens
gaaggaagaagcaagaggaagaggggaccaccagcccagaagagagaagcagcaaagcccgaacaaaaaggaga

SEQ ID NO: 146722 - RNA, 81 nt, Homo sapiens
caggcgacaaggcgaggccccagccccagccaaaccccccacacgaaccagcaagggaggggcgagggcagcgcgccggag

SEQ ID NO: 146723 - RNA, 73 nt, Homo sapiens
agaaagaaggcccaaaagaggaaacaacaggaagccaccaaggcacagaaggcccagagcggaccgaacgacc

SEQ ID NO: 146724 - RNA, 94 nt, Homo sapiens
ggaagagcagagagaaggcagggcaaaccagaaagacgagagacaagagagacaccccaaccgacaaagagcaccagacagccgggaacgaccc

SEQ ID NO: 146725 - RNA, 70 nt, Homo sapiens
gacgccccaccgccgacgcccccagccaccagacgcaaacagcagacggaagaccccacggcaaaaccac

SEQ ID NO: 146726 - RNA, 75 nt, Homo sapiens
acgcagagacgaaaaagggcaacaggggacaagagaaagggcgacagcaagagggcgcccggaagaggaaaggac

SEQ ID NO: 146727 - RNA, 73 nt, Homo sapiens
gcaaggagcaaacccaagaccacaggaagaaaggaacaggaacgccacacagaccagaccccaacagcagaca

SEQ ID NO: 146728 - RNA, 69 nt, Homo sapiens
gaaacaagaggaggaggggcagaaccgcgcaccagccgaacacgcagggagaggagcaggccaaacgcg

SEQ ID NO: 146729 - RNA, 55 nt, Homo sapiens
ggagacacaaaccacagaggaacaccacgacaaacgaaggccacaagaacaacaa

SEQ ID NO: 146730 - RNA, 69 nt, Homo sapiens
caaagcgcgcaacgccaacccaggcgagaggagcagggccaacccggagaggcaccgccgacacaaggc

SEQ ID NO: 146731 - RNA, 74 nt, Homo sapiens
cgccgccgccgccgccgccgcgcacgccagggagccggacgacggaccccgcaggccaggcgcaggccccgccg

SEQ ID NO: 146732 - RNA, 33 nt, Homo sapiens
gcgggaacggcagggaccgcccagagaggacca

SEQ ID NO: 146733 - RNA, 57 nt, Homo sapiens
cgcgccgacagggcagaagcacaggggggcgcagagaaagcaaagcgaggcggaccc

SEQ ID NO: 146734 - RNA, 83 nt, Homo sapiens
aggagcacacccggagaagcaggagcccaccggcagcccgggcgcgccaggcacagccaagagcggaccggcagcggccagcg

SEQ ID NO: 146735 - RNA, 83 nt, Homo sapiens
cacaacaaaaccaggccacgaacggaggaccgccgcacccaagcgacaggcgggccaggaaacaacaaaacacagaacgaaaa

SEQ ID NO: 146736 - RNA, 78 nt, Homo sapiens
gccggaaaccggagcgcgcagcagacagcaaagcaagccaagagggcccagccaagaagcacggcaagagcagaaacg

SEQ ID NO: 146737 - RNA, 73 nt, Homo sapiens
aaggccagaaagaggagcagagacgccggacaggcagaaaaaaccagcaggccaggaacacaacccaccgaca

SEQ ID NO: 146738 - RNA, 83 nt, Homo sapiens
cggggcgaacacggacaccaacgagcgaagcagaacaaacggacccaggacaaaacgacaccagccaaaccagcagcccccag

SEQ ID NO: 146739 - RNA, 73 nt, Homo sapiens
ggccaaagccccacacgcgcaacgccaggacaaagacaaacacacggagccaagaggggaaggaccccaaccg

SEQ ID NO: 146740 - RNA, 81 nt, Homo sapiens
gcgccccaggccaagagggacccacccggcgaaagagccgcagacgcacagcaaccaccggacccgaaggccaccacccag

SEQ ID NO: 146741 - RNA, 74 nt, Homo sapiens
agggaagagaaaccgagcaacagacaaagcccggggaaaaagaacgaccaggacacagagcggcccaagagaca

SEQ ID NO: 146742 - RNA, 75 nt, Homo sapiens
cacaccgcggcccggaacagccccaacaggggagaccacgcggaaagcgggcgagacgacgggaccgaaggaccc

SEQ ID NO: 146743 - RNA, 78 nt, Homo sapiens
gccccaagaggccagccccccgagggcaacgagaaagagacggaggggcagcagcaggacagggaacccgggagacag

SEQ ID NO: 146744 - RNA, 65 nt, Homo sapiens
ggagcgcccagaggcgagcccggggaggaagaggacccgagccccaaagacagaaaagccccgag

SEQ ID NO: 146745 - RNA, 62 nt, Homo sapiens
agcgacagaggagggaaacgcggagccaggccgagagaacaagcgcaggaggaaagagagcc

SEQ ID NO: 146746 - RNA, 74 nt, Homo sapiens
gaagagagcgaccggagcggggaacacgggagcgcgcaaggaagcgcgggggcaggccgggcgaccagcccgag

SEQ ID NO: 146747 - RNA, 52 nt, Homo sapiens
ggaggacaaccgaggggaggaaggaggacaaaaaggccgaccagaaacggcc

SEQ ID NO: 146748 - RNA, 83 nt, Homo sapiens
ggagcgcgccggaccaagcgggcccagaagcgggagcggggccccgaggcgacggaaggccggaggaggggcccggaacccag

SEQ ID NO: 146749 - RNA, 83 nt, Homo sapiens
ccaaggacacggcacaccgaccgacgaagaccagccacggcgcccgcggagccggccgcgccccagggccccgagccacacgc

SEQ ID NO: 146750 - RNA, 78 nt, Homo sapiens
aggccaccgcacccgagggcaggaaaacagaggccacaggaacaacgaaacgacaaaggaaagacgcacaggaggagg

SEQ ID NO: 146751 - RNA, 55 nt, Homo sapiens
aaccgcgcgcaggcagaagaaggagccagcagagcgccagcggagacacaaccga

SEQ ID NO: 146752 - RNA, 77 nt, Homo sapiens
aaagccggcacgcgcgcgaggacacgccaggaaaaccacgagagggcgacccacagagacagcaggacaaccgcggc

SEQ ID NO: 146753 - RNA, 74 nt, Homo sapiens
gaaaggcacaagcaggggcggaagccacacaggccagaacgaggagaaccgccagcagagaggaccaggaaaac

SEQ ID NO: 146754 - RNA, 77 nt, Homo sapiens
agccgacgcaaagcccccagcccccaggagaaggggggagacaagagccaacagacaaacggcaacaaaaggaagga

SEQ ID NO: 146755 - RNA, 116 nt, Homo sapiens
cccccagcggagacccgccgcaaacagcccgccagacacggcaggccaagaagcaccgagcgggagaagcagaccgcaccaggcgggaccccgaaaaagcccaaacagacaggcac

SEQ ID NO: 146756 - RNA, 70 nt, Homo sapiens
ccccagaccggagccagacagcagccaaggaggacaaaaagcccgggcagacagaaagccacggggccag

SEQ ID NO: 146757 - RNA, 74 nt, Homo sapiens
cccggacccaaaggccagcaaaggcgccagcggaaaccacgccaagaaggcgaggcccagaagcacgggcacag

SEQ ID NO: 146758 - RNA, 81 nt, Homo sapiens
cacccacaaggacccgaagacaggaaagcgaggaccaccagcgcgggggcggggccgacaaaacagacggggcggcgggcc

SEQ ID NO: 146759 - RNA, 59 nt, Homo sapiens
caaggcaagccagagaacacccgccgcgcaaaagaaccccggggacacggcccagacac

SEQ ID NO: 146760 - RNA, 81 nt, Homo sapiens
agagaagacgggacacagagcacaagcaacacaagaagcgaggcccaaggggaaaagggaaaaaaccgcgcgaaaccgggc

SEQ ID NO: 146761 - RNA, 83 nt, Homo sapiens
gggccagcggcgcggcgggccaaggccgcgccgggcgggacgggggggcggcccggccccgcagggccagcgcaccacaaaac

SEQ ID NO: 146762 - RNA, 71 nt, Homo sapiens
ggaagggacacggccgcaaagaggagcaagaaagaaaaagaggaagaggcaccaggaacccaggaagagcc

SEQ ID NO: 146763 - RNA, 77 nt, Homo sapiens
aaccagagagaagagacaggaagaagagagcggaacagcagagcgcacaaggcagaaagaaagcaggaccaggggga

SEQ ID NO: 146764 - RNA, 71 nt, Homo sapiens
caggaaccgggcccagacacgccgcaaaccaacaaaagaaaaccaagagccaggcagggaaagcacgacgg

SEQ ID NO: 146765 - RNA, 86 nt, Homo sapiens
gcccggaaggcaagcgcagcaacaacagagagcacgggagaaagaaggggcaagaggaagaagcagaagcagagagaggagcgaag

SEQ ID NO: 146766 - RNA, 76 nt, Homo sapiens
ggaagaacagcaagggccaacggaagccagagaaagcccgccccgcgcagcagcacacagaagaaacaggacagac

SEQ ID NO: 146767 - RNA, 74 nt, Homo sapiens
agccagaaaaaagcaacagagaaagccacggcaggggccaggacccccaaggaaggggagaggacgcccgagcg

SEQ ID NO: 146768 - RNA, 77 nt, Homo sapiens
ccgacgggccgcgaggggaagaggaagcaaagccaaggcggagaaaaaacagagcggaacgagagagacggagaggg

SEQ ID NO: 146769 - RNA, 66 nt, Homo sapiens
ggaaaccgcaccacggagaacagacagcgaacccacccaacacggcaaaacaaagacaccacaccc

SEQ ID NO: 146770 - RNA, 36 nt, Homo sapiens
agcaggaagggggcccaggcaagacgaccccaggga

SEQ ID NO: 146771 - RNA, 72 nt, Homo sapiens
aggagccagaccagcgcacgaagcgcggaggaacaggaggcccggacccccagcacaagcgcaggccagggg

SEQ ID NO: 146772 - RNA, 78 nt, Homo sapiens
ggccgaaggcgaacgccgcggccaaggagccgccaaagccagacggccagcaacagaagaaagcaagcaccggggaaa

SEQ ID NO: 146773 - RNA, 74 nt, Homo sapiens
caaagcagcaaagcggcaacacagccaggccgggaaagagaaacagacacacgaaggaggaaccaaagaaacca

SEQ ID NO: 146774 - RNA, 61 nt, Homo sapiens
aaagaccacagcccacagacgccggacaagacaacggagccagccagagagggacgggcca

SEQ ID NO: 146775 - RNA, 83 nt, Homo sapiens
cggcagcgaagaagacgaaaaaaacccagacacgagaggcgagggacgacagagcaagcggcagagggcaagcgggaaaaaga

SEQ ID NO: 146776 - RNA, 72 nt, Homo sapiens
gggcacggagcacggcgaggcccagccacacggaggccgggcagagggaaacgggcggagaacggaaaagca

SEQ ID NO: 146777 - RNA, 84 nt, Homo sapiens
cagccaaaccacgaggccacagcacaggcaaccagaagaagccacacacagaagacccaaagagaacacaggagaggcaagagg

SEQ ID NO: 146778 - RNA, 75 nt, Homo sapiens
ggacccagagaagaggaaaaccaccgggcagacgaagggagcagcacgcaaaacggaaggaagagggaagagcac

SEQ ID NO: 146779 - RNA, 73 nt, Homo sapiens
gagaccggaccgcgccacaaggagaggagcggagcgcaagaagaaggccgggggcacgccgcacgcaagaaga

SEQ ID NO: 146780 - RNA, 76 nt, Homo sapiens
gcccgcacgcgcagagacaagcccgcgcgcgagacagagcaagccccgagccccggccccaaagacccaaaacaga

SEQ ID NO: 146781 - RNA, 79 nt, Homo sapiens
cagaagacgaagaaaacaagcaagcgcaggaagagaccagaggacagaccgaagcaaagccaggacccgaaaagccagc

SEQ ID NO: 146782 - RNA, 72 nt, Homo sapiens
gaggacggcacccccggaggcgaaacagaccccgaaaagcccggaaggacaagccagcccaaacgaacaaca

SEQ ID NO: 146783 - RNA, 75 nt, Homo sapiens
ggaacccccagggaagaagaaacccaagcccacccgggaagagacccagacgaagagcgcacagaaagagggaaa

SEQ ID NO: 146784 - RNA, 77 nt, Homo sapiens
gacccagccacaccacccggaagagaaggcaggggacgagggcaagggaagagaagggcccccgcggccgagcccca

SEQ ID NO: 146785 - RNA, 79 nt, Homo sapiens
cggggcgccacacaggccaagaagaccaggggggcccacgcggaggacgcagaacacggcgggcggcccgccaacgacg

SEQ ID NO: 146786 - RNA, 66 nt, Homo sapiens
gccgcgccgaccgccggagaagcgcgcgcgccgcggaccgcgaagcgaacacgagacagaaaacca

SEQ ID NO: 146787 - RNA, 72 nt, Homo sapiens
gaaaccacagaagacaacaagaaaaaaaagaggggggaaggcccagaaaaggcaaagcagaccaggacacgg

SEQ ID NO: 146788 - RNA, 77 nt, Homo sapiens
ccaacagcacacacccaggggcaaagggaccaaaaagaccaagcggaggggaagaaaaccgcaagaaggagaaggag

SEQ ID NO: 146789 - RNA, 82 nt, Homo sapiens
ggggggacgggacagagcggcgggacagcccaagggccagcaccgcgcccaggcagagccagaccacgggacgggcccacga

SEQ ID NO: 146790 - RNA, 76 nt, Homo sapiens
agaggacccccccccccccccaagggccaacggccgccaccaaaaagaagaagggaaagcgcgaagcgcaagccag

SEQ ID NO: 146791 - RNA, 76 nt, Homo sapiens
ggcccacgcaccgggcccggaggacgcgccggaaggggcggccgccggcaggccacccggcaccacggcaggggcc

SEQ ID NO: 146792 - RNA, 80 nt, Homo sapiens
ccccaagagcgggaacagggaaagcacgaagggagcccagcgacacaccagcagcagccaaagaccaaccagccccgagg

SEQ ID NO: 146793 - RNA, 79 nt, Homo sapiens
agagcgcgaaacgcacgagaaggaccccaaagcacaagaaggagccacaacagcacaaggcaaacagaaggaccacaca

SEQ ID NO: 146794 - RNA, 43 nt, Homo sapiens
ggggccaaagggcgaacggcccgcccgaagccccccgacaacc

SEQ ID NO: 146795 - RNA, 75 nt, Homo sapiens
cccagcccgccaggacagagggcagcagaacaacgaggaagacagccccgccccccgccgaccagaagaggcaca

SEQ ID NO: 146796 - RNA, 83 nt, Homo sapiens
gccacaggccagcaagaaagggagcgcggcgacaagaacggcacagccaaagggcaagccgcagggcacgaaagccgaaccgg

SEQ ID NO: 146797 - RNA, 68 nt, Homo sapiens
gaccaagcaggagaaccgaccgaacggcaacgaaaagagacacgacgcaaacccccaagagaaacagc

SEQ ID NO: 146798 - RNA, 77 nt, Homo sapiens
ccccccaccaaaaaacagaacccaccggcacaaccgcacgcaagcgacagcgggccagaagagggaacggcaagagc

SEQ ID NO: 146799 - RNA, 66 nt, Homo sapiens
acagaaggcagaggcagaaccacaggagaagcaaaccaagccagcagaagcgccccggcgcagcgc

SEQ ID NO: 146800 - RNA, 84 nt, Homo sapiens
acgcagagggcggagcggcagggcagaccacggccccggagaccgggcggaagaaaaagcaagagacgaagcgcccacaacgaa

SEQ ID NO: 146801 - RNA, 67 nt, Homo sapiens
ccagcccagccaaccccagggaaacacaaagaagacaccagaagggccagcaccacgacaacacggc

SEQ ID NO: 146802 - RNA, 80 nt, Homo sapiens
aagacccaagaaggaagaaagagaaagaaggaagaaccaggcgcaggagacacaggcaccggaccagcgggaagccgcac

SEQ ID NO: 146803 - RNA, 80 nt, Homo sapiens
gccaaggcacggagcccgcggagaacaccagagcaaagccaccccccgaggaaaaacccccccgaagggcggaccacccg

SEQ ID NO: 146804 - RNA, 74 nt, Homo sapiens
gcccagcaacggacccaacagagcacgcaaaggggaagggacgcaaaaaggaagccccacaaggaccaggcaaa

SEQ ID NO: 146805 - RNA, 73 nt, Homo sapiens
gccccggcccgcgggaagcaggacgcgccgcgccccaaggccggcccggccacccccgggcccgcgccccagg

SEQ ID NO: 146806 - RNA, 70 nt, Homo sapiens
ggaagcgagccaggcgccgccagaccaacgaccccaagaaggggggcagaaagaagaggaggacaacaag

SEQ ID NO: 146807 - RNA, 89 nt, Homo sapiens
cgccgccaccagcccaagagaaaggagacgaccccagcaaagcgaccggaagggggccaacccccaacaaggcccacggagccgggccc

SEQ ID NO: 146808 - RNA, 60 nt, Homo sapiens
agaagcgacaccgaggcagaaccgcaaggacccacgaggaagcggccgcggcgaacccca

SEQ ID NO: 146809 - RNA, 86 nt, Homo sapiens
gcgggacagcccaagggccagcaccgcgcccaggcagagccagaccaccccgccccccgaggcgcagcccgaacccagcagccaca

SEQ ID NO: 146810 - RNA, 34 nt, Homo sapiens
cagacccgagcgacagagaccccccggggcggca

SEQ ID NO: 146811 - RNA, 98 nt, Homo sapiens
caccacgacccacaccccccgcaacccagcagcgccgagaagcccccggaaagccaaggacacgcaggacgaagaaggaggagagcccagaagaaacc

SEQ ID NO: 146812 - RNA, 86 nt, Homo sapiens
cagccccgggagaggagccgcacccggccggcccggccccagccccaggaccccgagcaggccccgggggcgccgagggcacaagg

SEQ ID NO: 146813 - RNA, 58 nt, Homo sapiens
gaacccgaccacgagagaaaaagggggggacagccccagagacggcaaccaaagaccg

SEQ ID NO: 146814 - RNA, 64 nt, Homo sapiens
cacgcccccgccaagccggacacaagagggcaagaaaggcgcgacgggccgaaaagggacgaag

SEQ ID NO: 146815 - RNA, 51 nt, Homo sapiens
acaaaagggccaaagaagggagagaggaccaaagaagccaaccgacacaac

SEQ ID NO: 146816 - RNA, 61 nt, Homo sapiens
cccaggaccccaagcagggaaacagaaccgaagccggaccggggcccagcaaagccaaagg

SEQ ID NO: 146817 - RNA, 80 nt, Homo sapiens
gggggagaccggagacgcaggcaggaaaccagacgccgccacagagaaggaagacaagagaacaagggccagcaaagaaa

SEQ ID NO: 146818 - RNA, 70 nt, Homo sapiens
aacgagcagaccgcagccaagaacaacggcagaaagaagcgagaaaaagacagaaggaggagcagcaaac

SEQ ID NO: 146819 - RNA, 91 nt, Homo sapiens
ggagacgcgagcgggcgaggggcggcggcggcggagcgggagcgggaccgggcgcgggcagagcgcggcggcgcggagacggggagccagg

SEQ ID NO: 146820 - RNA, 78 nt, Homo sapiens
accaggagacccgcacaaccgaagagccgggaagacacccgaagacaagaggaccaagaagaagcaaggcgaagaaaa

SEQ ID NO: 146821 - RNA, 68 nt, Homo sapiens
gccgcacccggccccaggcccaacccaccgaagaggcagcagcagagcgaacaggacgaaaggagaag

SEQ ID NO: 146822 - RNA, 60 nt, Homo sapiens
cggcagcaagaacagagagagaggggacagacgagagaacgaggagcaccgccagaaaga

SEQ ID NO: 146823 - RNA, 76 nt, Homo sapiens
gcccggggaacacaaaggcgcaacagcaacaaggggaagccccagcaggggagccacaaagaaacccccaagaaga

SEQ ID NO: 146824 - RNA, 75 nt, Homo sapiens
caaaggcggagcacacaaaaaacagcgccgcccggagcaaggggaggcaagcaggggggcaaaggaaagaaggca

SEQ ID NO: 146825 - RNA, 93 nt, Homo sapiens
cccagaggcgagcccggggaggaagaggaacccgcagcagcagcagcaggaacaagaggaagccccaagcaggcgggagcagcacgcgccgag

SEQ ID NO: 146826 - RNA, 70 nt, Homo sapiens
gcgcagcaccgggagcccagacaccgaaaacgagaaacgaaagagacacgggggcacaaccgagcccggg

SEQ ID NO: 146827 - RNA, 40 nt, Homo sapiens
ccggaacagcaaacccaaggccaaccgccccccagcagca

SEQ ID NO: 146828 - RNA, 76 nt, Homo sapiens
aggaaacacgaaggcaggaagcgaagaaaaggacccagaaagcagacaacgaagagaggaaagaagcggaaaggag

SEQ ID NO: 146829 - RNA, 82 nt, Homo sapiens
cgggcaccaccaagcgccccgagaccgccggcgcgagcgcaagacacgaaacaccgagagagaaagaagacaagccaccagc

SEQ ID NO: 146830 - RNA, 72 nt, Homo sapiens
gcaagacgacgagagaagacagagaccacccagaaaggcagcaggcgcccaaccaggagcaccaggccaacc

SEQ ID NO: 146831 - RNA, 73 nt, Homo sapiens
gccggcgggagacgcagcgcgacccagcaggccgaaacacaagcaaggaacacaaagaagaaagaaaggaacg

SEQ ID NO: 146832 - RNA, 79 nt, Homo sapiens
gcaccagcccgggcagcgagcgcaaaaaaacaagccaagaccggagcacccgagaaagacgccccacacacgcgcacaa

SEQ ID NO: 146833 - RNA, 73 nt, Homo sapiens
acggcgaaggaccccggccagggccgggagaaagaagaggagagaaagaacccacgcaggacgacagaagagg

SEQ ID NO: 146834 - RNA, 73 nt, Homo sapiens
ccgcaggaccggcacgagaaccaggacccagaaaaggaccagaggacaggcacccccagacccaagaagaggg

SEQ ID NO: 146835 - RNA, 72 nt, Homo sapiens
agaacagcgaaggggaggggcgcagcagcacagacgaagaagggagcagcagaagcaaaaccagaaagggag

SEQ ID NO: 146836 - RNA, 73 nt, Homo sapiens
agagacaggccacgggaggaaaggagcagccgcgacgcagaagagccaacaagaaaggccgccaccgagcagc

SEQ ID NO: 146837 - RNA, 69 nt, Homo sapiens
ggcaagaagggacgggcagaagccaaccaacacacaccccggaggaacacggcagaaccgacggaagaa

SEQ ID NO: 146838 - RNA, 80 nt, Homo sapiens
gaagaagagagaccgaccccccaagaaaccccgccaggaggccacggacgaggcgggcagaaaggcggaagccaaagcag

SEQ ID NO: 146839 - RNA, 81 nt, Homo sapiens
ggaggggagaaaccccacccacacaggaccaaagggagacacacacggggagcaacgagggggaaccaagggcggacagcc

SEQ ID NO: 146840 - RNA, 80 nt, Homo sapiens
caggaagggcaacaccgcgccaagccgggggcacacagagaaggagacccaggggaagagagaaggccacgcccgacccc

SEQ ID NO: 146841 - RNA, 75 nt, Homo sapiens
ggcccgggccgcaccagagcgcccggcccacgacacaggaagaagacaggggcaagacgccaagagaaaaggcga

SEQ ID NO: 146842 - RNA, 34 nt, Homo sapiens
cagagccagagcacacgggcaccgccgaccgaaa

SEQ ID NO: 146843 - RNA, 82 nt, Homo sapiens
gaggccgcggcggccaggccccagacacagacgagcaggggaaggaagagcaaagaggcggaaaaagagaacaacaaggaac

SEQ ID NO: 146844 - RNA, 74 nt, Homo sapiens
cccccaaaaacgcggaagacggggcagcacaaaaagagggaccccgggaagaggacccgcgaggcgcccccccc

SEQ ID NO: 146845 - RNA, 72 nt, Homo sapiens
accggcccgaggggacgggggaacccggggccagagagccacggcgggaagaagcaaacgaagggcaagaac

SEQ ID NO: 146846 - RNA, 84 nt, Homo sapiens
gggccgaagagaggacgggagggcaacgagcacaacaggagcacgaggaggaagccccgaaggacaggaccgcaggggggaaaa

SEQ ID NO: 146847 - RNA, 76 nt, Homo sapiens
agagccaggaggcccccccgccccgaagccagcaccccagcccaccagacagcagacagaggggcgcaggacaagc

SEQ ID NO: 146848 - RNA, 87 nt, Homo sapiens
cgccaccgggacccaagaccgagaaccccgcggaggcaacaggacacaagcggcaggacgccccgggccgccaggagcagacgaagc

SEQ ID NO: 146849 - RNA, 72 nt, Homo sapiens
caggccagcgccccaggccaagagggacccacccggcgggagaaagaagagagaccagaaacgagaggagaa

SEQ ID NO: 146850 - RNA, 77 nt, Homo sapiens
cgagacacgcgggaggcggcgacgggcccgggacagggacaagcgcacagcggagaaagcagcgcggccaggaggcg

SEQ ID NO: 146851 - RNA, 64 nt, Homo sapiens
gaagcacccccggcgccgggacgcccaggccccgcaaagaagggggcgagaagaaaaagggccg

SEQ ID NO: 146852 - RNA, 76 nt, Homo sapiens
ggacgaccggagcagagagcggcgagcaaggcaagaacggaagcacgggcggaggaaagcacaagcagagcccccg

SEQ ID NO: 146853 - RNA, 60 nt, Homo sapiens
gcagcccacgccagacgaccccacccgcgccgcgacccggggcccccggagggccacaag

SEQ ID NO: 146854 - RNA, 80 nt, Homo sapiens
ggaaaaaacaagaaagagccagccaggcggagagggagagcaagacccccgagggaccggcccaaggagccgggagcggg

SEQ ID NO: 146855 - RNA, 75 nt, Homo sapiens
gcggggaaggcgaggcacgaccccacccccgaggcccgaccggcccagggagccacgcgccagcccgccggaaaa

SEQ ID NO: 146856 - RNA, 75 nt, Homo sapiens
gagagccacccggcagaagaggacacagaggagccagaccagcgcacgaagcgcggagaagaagagcacagaccc

SEQ ID NO: 146857 - RNA, 81 nt, Homo sapiens
gccaccccggcaaggagagccgagacccagcccggcggccgcggggcacaggccccgaggaggccccagcccagccacgac

SEQ ID NO: 146858 - RNA, 80 nt, Homo sapiens
cgcgagcggcagcgcggcaggacccgcccgggagcgcccccagcggagaccagaccaggcggaggcgaccccaagcagcg

SEQ ID NO: 146859 - RNA, 37 nt, Homo sapiens
gaaacacagaacgcaggggcggagaacggaaaagcac

SEQ ID NO: 146860 - RNA, 42 nt, Homo sapiens
gcccgcggaggagcgcccgggcacagccagagaacaacacac

SEQ ID NO: 146861 - RNA, 81 nt, Homo sapiens
agacaggcagaaaacgagaggccaccgcagcggcaggacgaaggagccacgggccccgccagcagagcgcacccaacgcac

SEQ ID NO: 146862 - RNA, 76 nt, Homo sapiens
acacgggaacccaagaaacaaacccagacgggcagaagagagagaaagccggaggagaccaccaaaccggagcgga

SEQ ID NO: 146863 - RNA, 69 nt, Homo sapiens
aaaacaagaaccagacaagcggaaaaacagaaccacaggagcccgacagcaacgggagaacagacagca

SEQ ID NO: 146864 - RNA, 69 nt, Homo sapiens
cagaagcaaggacaaccagaaagcaggggaccacaggaagaaaggaaggggcaccacaagacacaaaga

SEQ ID NO: 146865 - RNA, 75 nt, Homo sapiens
acccacgaagggaggaaaagggcagggacagcgcaggcagcagggcagcgcaagaccccgcacggaagcagcaag

SEQ ID NO: 146866 - RNA, 69 nt, Homo sapiens
ggagcccgcgcccgccgcgggagagaggacccccccccccccccaaggaggaacgagagaagcgggcag

SEQ ID NO: 146867 - RNA, 77 nt, Homo sapiens
ggcaggcccgaggaggcgaaccggcgggacagagccacagaaccgccaccagagcccccgaggaaagcacgcacaac

SEQ ID NO: 146868 - RNA, 51 nt, Homo sapiens
gagggaacccgaccggacccagccccagaaggggagaagcagaccgcacca

SEQ ID NO: 146869 - RNA, 82 nt, Homo sapiens
ccccaacaccaccaagcagccccccccacccggcacccgccagcaagcacgcagacagcaagcccgcgccgcgacgcccgcc

SEQ ID NO: 146870 - RNA, 75 nt, Homo sapiens
agacccgagccggacccagggagagcagggcagggaaaagcgccgggcggaccagcaggcgccccggcaaggcca

SEQ ID NO: 146871 - RNA, 66 nt, Homo sapiens
gcgagcagggacagccaagaaccaaaaaggaccacgaaggacaaaaaggccgggaagcacgcggaa

SEQ ID NO: 146872 - RNA, 60 nt, Homo sapiens
gaaagccacaacagggcggcaacaggggcgagaaagggaaagggcccaccggaggcaaca

SEQ ID NO: 146873 - RNA, 83 nt, Homo sapiens
cgcagcaggggggccgggaagcaggccggggacgaaaaagggacagacagccagagggaaacgagagccagaagggaaagaca

SEQ ID NO: 146874 - RNA, 122 nt, Homo sapiens
gcgcgggcagccaacgagcgcggaggacgagggccagcgacggagagggcagaagaggaggaggccgcacgcccaaagcggaaacgcggaagagaccgggagccagcacgaggccacacacc

SEQ ID NO: 146875 - RNA, 90 nt, Homo sapiens
gaaagcaggaggaggggcggcggcgggaagaagacagggcagggcagcagcacgaccgacccagcagccccggcagacccagggaacgga

SEQ ID NO: 146876 - RNA, 77 nt, Homo sapiens
aggaaaaccccagcgaaacaccaagaggcgagaaacagggaaaacagaagcggagaggcccagaacagcagaagcag

SEQ ID NO: 146877 - RNA, 79 nt, Homo sapiens
ggaacaaggagaagaaccaggagacggaggaagaacccaagccagagcccagagggcccagaggagacaggggaaccag

SEQ ID NO: 146878 - RNA, 83 nt, Homo sapiens
gggcagcggcggcccgcgccccggccaccccgcgcgacccggagccccgcaggagccagagaagcaaaagaaacaaggcaaga

SEQ ID NO: 146879 - RNA, 64 nt, Homo sapiens
cgagaccagaagaaagcccccgggcacaggaaagggggagaccccacagaacccccagcaagcg

SEQ ID NO: 146880 - RNA, 75 nt, Homo sapiens
aggcgagcacaagggcccacaaaacagcggccagggagaagacagccccaagcgagaacaaacaacaaaacccag

SEQ ID NO: 146881 - RNA, 72 nt, Homo sapiens
ccggcgcgagcgcaagacacgaaacaccgagagagaacaggagagagcagccgggcggcccagccaaacagg

SEQ ID NO: 146882 - RNA, 77 nt, Homo sapiens
acgccacgcccgcccgggggccaggcaccagggacgggacgggaagcagagcgcagaggcaggcgggccgggggcag

SEQ ID NO: 146883 - RNA, 78 nt, Homo sapiens
ccaagggaaaaccagaccgaaccaggaaggcacaccagcgccggagcggacgagaggagccacgggcccccagggcag

SEQ ID NO: 146884 - RNA, 74 nt, Homo sapiens
gacccaaaaggcgcaggcacccgagggacccgaggagcccaccaagccgaccgcaggcaagggccgggggaggc

SEQ ID NO: 146885 - RNA, 62 nt, Homo sapiens
gggcacgaagaaccagaccaccacgggcgggccccaggacgcaaaggccaggcgccggcagg

SEQ ID NO: 146886 - RNA, 75 nt, Homo sapiens
gaaaggagcccgccggcccaaacgcggacacagcaacaaggacaaccacaccgaaggccaccccaagaagagggg

SEQ ID NO: 146887 - RNA, 83 nt, Homo sapiens
gcagaagggaaggagcagaacggaggggaacacaaaaaggaacaagacaccaagggaaggaaacacaaaccagcacgaagaaa

SEQ ID NO: 146888 - RNA, 56 nt, Homo sapiens
agcaggacaaaccgaagagaacgaaaggacgcacgaagggcagcagcacagggagc

SEQ ID NO: 146889 - RNA, 65 nt, Homo sapiens
gccaggacgcaccgccaccgcggaccgagcgggaccagcaccgccgaagggaacagccgggcgaa

SEQ ID NO: 146890 - RNA, 71 nt, Homo sapiens
gcacaaggagccaaaggacggcccgccaggggcggaggacagacccggccaacgagcagcacaagaggaaa

SEQ ID NO: 146891 - RNA, 81 nt, Homo sapiens
cggcgcacacgggcgcgggccgggccaagccgcccgccaaccggcagcgccgacgacaaaccaggggccagggggacccgg

SEQ ID NO: 146892 - RNA, 72 nt, Homo sapiens
cagaaacaaaagcaacaaagagggaggacccaaaggccaaagacacaggaaccaggcaacgggggcacccgg

SEQ ID NO: 146893 - RNA, 40 nt, Homo sapiens
gcccaacgaggcgagacgcaccaagaacaagcacacaaag

SEQ ID NO: 146894 - RNA, 101 nt, Homo sapiens
gccgccgcgcacaccggcggcgggacgacgcggacagcgggcggagccgacgagcggcggacaagcagaccggaagaccgacggaagaccacaccccgagg

SEQ ID NO: 146895 - RNA, 72 nt, Homo sapiens
agcaagagcaagacaccggacaccgagggcccccaaaaggacagacagggggccggggcaacaagaagcggg

SEQ ID NO: 146896 - RNA, 81 nt, Homo sapiens
aaaccaagcaagagccaggacccccgaaagccagacaggagacagggaaacgaaaaccaccgggcaccacgagcccacgag

SEQ ID NO: 146897 - RNA, 69 nt, Homo sapiens
ggaaacaagaaacaccaacacaaaaaaaaccaacagccccccaggcccgcagaagcaaacaaagacgac

SEQ ID NO: 146898 - RNA, 79 nt, Homo sapiens
gcacacagaggaacagaaaaagaggaacccgcgacccgggcacccagagcagggagggacaaggagcaccaagaaccga

SEQ ID NO: 146899 - RNA, 75 nt, Homo sapiens
agcggcagcgacgagaaccggacagggacaccagcacagggacggaggcgcaggagaaccagggaccagccgacg

SEQ ID NO: 146900 - RNA, 53 nt, Homo sapiens
gaaggcagagaggggaagaccaagagcacagaaagcgagccgaacaggaagca

SEQ ID NO: 146901 - RNA, 66 nt, Homo sapiens
gcccgcgggagagaccagcgccacgagaaaaccagagcgccaagagccacccaggaaggccgcagg

SEQ ID NO: 146902 - RNA, 85 nt, Homo sapiens
caagaaccccaacaagcggcggagcaccagggcacaagacgagcacgggcagacgcccccgggcgacacaggagcaggacagacc

SEQ ID NO: 146903 - RNA, 100 nt, Homo sapiens
gcaagggcgggccacggaagccaccgacaggcccgagggcccgagagcaccgcgccagacagggagaagcccaccacgcaacgggacggcgcggcggaag

SEQ ID NO: 146904 - RNA, 84 nt, Homo sapiens
ccgggcggcggccccgggggcgcccccgcgacccggaccaccgggcgcggcgccccagccgggggaaacaggaagagaacagaa

SEQ ID NO: 146905 - RNA, 113 nt, Homo sapiens
cggccgggacgaggcgcccgggccccgcaccaccccgcgcccccgcgccgccccgaagcccagcaacggggcggcacacaaggagcgaagggcagggagaacgccaggcacag

SEQ ID NO: 146906 - RNA, 68 nt, Homo sapiens
cgcccacgaccccagcaggggaagggccaggcagcgaagaagacaaagaagaaaacaaagccagccag

SEQ ID NO: 146907 - RNA, 64 nt, Homo sapiens
gagaaggaccaagaaccagaggaccagcgggaaaagagaaagggggacgaaggacaacaaccca

SEQ ID NO: 146908 - RNA, 78 nt, Homo sapiens
agcccaaaccccaggccaagcagccaccagcagcccccagagcgggaccacagacaagccccaccccgaggcagaaag

SEQ ID NO: 146909 - RNA, 70 nt, Homo sapiens
aacgggccacaagagcgcagggagcccaccgggcgggccggccaaggcaaccaagggcagaccgcacaag

SEQ ID NO: 146910 - RNA, 84 nt, Homo sapiens
cgggaggagagaaggcagggacacacagcaggagaaacccgcaagcaccaccacgagcgcagacccaggggagcccaccagcca

SEQ ID NO: 146911 - RNA, 86 nt, Homo sapiens
gcgggcggggaacccaggccccgccgaggcggccaggaaaccccccaggcaagaggcgcaggaccgggaagaccaacaaacgcacc

SEQ ID NO: 146912 - RNA, 63 nt, Homo sapiens
cgggcgcaggaccccgccccacgcccaggacagcccagagcaagcacacggaggcccgggagc

SEQ ID NO: 146913 - RNA, 72 nt, Homo sapiens
aggaccaagggaaggagcaacgccacaggggcaccagacaaaacagaggagaccagaccagaagccccgaaa

SEQ ID NO: 146914 - RNA, 73 nt, Homo sapiens
caacaccagcagggaaacgaagggcagaagacaaagcgcagaggggcaagccccagaccaacgccaagaacca

SEQ ID NO: 146915 - RNA, 66 nt, Homo sapiens
cgcggagagagagagaaggcaggagaccagccaacacagggagcagggaaggcaggaaagcagcac

SEQ ID NO: 146916 - RNA, 34 nt, Homo sapiens
acgggagaaacagcaacgaaaggagcagcagaac

SEQ ID NO: 146917 - RNA, 79 nt, Homo sapiens
aagagaaggcgggacacacagcagggaccacccccagcacccccgcgcgaaaagagaagcagaagacacaggccgagag

SEQ ID NO: 146918 - RNA, 79 nt, Homo sapiens
gccgcagcgccgccgcccgcggaagggagcccaagcgcagagaaaacgcgcgaaaagcaggagaagagaaacaggacgc

SEQ ID NO: 146919 - RNA, 93 nt, Homo sapiens
agagaaaggaggagacaagaagcggcgaacaacaagaagacgaagccagaaagggagaagcagaccgcaccaggcgggaccccgaaaaagccc

SEQ ID NO: 146920 - RNA, 82 nt, Homo sapiens
gcccgggcccagagcggaagacaagacggcacacagcggcaggaaaagagcacagggagggagagaccaagaacaagaacga

SEQ ID NO: 146921 - RNA, 53 nt, Homo sapiens
gagggagaacacaggaacaggcgcgggggccgcaaggccaggcgcgcagaggc

SEQ ID NO: 146922 - RNA, 56 nt, Homo sapiens
caagacaccagaaagcaccagggggccccaggacccggacagacccaaaagggaaa

SEQ ID NO: 146923 - RNA, 83 nt, Homo sapiens
gcaagaggcgcaaacaagccaacccaggaggaaaaacgcaaagcagcccgaggaggcacgcaaaacaacagggggcaaacaag

SEQ ID NO: 146924 - RNA, 78 nt, Homo sapiens
ggcgccggccggagaaggccagagcacacacggccaagagcgggcaccaggaagcgaaggcgggagaagaaccaacaa

SEQ ID NO: 146925 - RNA, 58 nt, Homo sapiens
gggaagcaccgagaccagaagaaagcccccgggcacaggaaagggcaccagagcaaag

SEQ ID NO: 146926 - RNA, 84 nt, Homo sapiens
accggagaaagcaaacaagggaagaaacgagcgagcccgggacagcaagagccaagcgccgggacagccagggccagccagggg

SEQ ID NO: 146927 - RNA, 86 nt, Homo sapiens
agcagcccagacgcggcacagagagggccgggagcgcgcagccaggaagaaggaccggggagacaggaacacgggcaagacagcgc

SEQ ID NO: 146928 - RNA, 65 nt, Homo sapiens
ccgcccgcccgagaacaccaggagacacaagggaggcaggcgacaacagaggagaaggcgaagaa

SEQ ID NO: 146929 - RNA, 81 nt, Homo sapiens
caacggccaaccggcaagaccagacgggaacgggagacaagcgcagcgagccccagggaacccgagaaggccaacaaaaga

SEQ ID NO: 146930 - RNA, 79 nt, Homo sapiens
ccaggcccagagaagcgccgggcccgcggaaggggaccacggaccaagcgagcccccaggccacacaacgaggaggcac

SEQ ID NO: 146931 - RNA, 75 nt, Homo sapiens
gaaaaggagccaggacgacacagggagaacccagagagaggagcgagaggaagcggaagaaaaccaacaaaggac

SEQ ID NO: 146932 - RNA, 94 nt, Homo sapiens
ggggagcaccgaagagagccagcaggcccagcgaccacgacaggaacaccgcgcccacaccgcggcggcagccaggacccaagcgccgccacgc

SEQ ID NO: 146933 - RNA, 58 nt, Homo sapiens
aaaccagggccacagcacgcagccccaggcagagagaagaacgagagccaaaggaccg

SEQ ID NO: 146934 - RNA, 45 nt, Homo sapiens
caaaagcaccgaacaccacaccccaaaaggaacaggaggcccgga

SEQ ID NO: 146935 - RNA, 79 nt, Homo sapiens
gagcccggaggggggagaaaagaccccaaaggaaacgagagagagaccacgggggcccgacgagccgccgggaaaggag

SEQ ID NO: 146936 - RNA, 92 nt, Homo sapiens
ggcaaagcagaggacaaacaccggccaacacaccagggccccaccaagaaaccgaccaggcccgcgccacagcacaccaggcaacacgcagg

SEQ ID NO: 146937 - RNA, 48 nt, Homo sapiens
gcgccaagaagcgagaaagagcaaccagacgacaagaccacaacgacc

SEQ ID NO: 146938 - RNA, 67 nt, Homo sapiens
gcgagaaaacacaaaccgaaaggaaaggcagaacaagaagggcaaccaggggggaaggagggagcgg

SEQ ID NO: 146939 - RNA, 77 nt, Homo sapiens
gacccacccagggcagaaaccaggcaggcacacgaagccaagcgaaagacagaggcccagccgaaagaggggaggca

SEQ ID NO: 146940 - RNA, 85 nt, Homo sapiens
ccgaacggccccacagccgggcggggggaaagaccgggaaaaccggaggccagcccacccagagaggccgaaaaccggcgacgag

SEQ ID NO: 146941 - RNA, 50 nt, Homo sapiens
cacgcccgagacagggcagggggaacacccgcccagccgccggacccaga

SEQ ID NO: 146942 - RNA, 57 nt, Homo sapiens
gcacggaagacgggcaggcaggggagcaaaacccgcaggcccaccacaggaagcagg

SEQ ID NO: 146943 - RNA, 81 nt, Homo sapiens
gccccagcccggggcccacacggccgcccggccaccgcgcccgacgagccgcaggcgggaagacaaacccgccccccgggg

SEQ ID NO: 146944 - RNA, 71 nt, Homo sapiens
cccaagcgaagaacccaccgagcgggaaagcgagggacggggacccgaccccggacccgacgcggagagcg

SEQ ID NO: 146945 - RNA, 59 nt, Homo sapiens
cccaggcacaagggagaggacagacaggaccaaaggacccaggagaggaaacagccccg

SEQ ID NO: 146946 - RNA, 54 nt, Homo sapiens
aggaccgcgagaaaacacaaaccgaaaggaaagagagccaagaaggaacagcag

SEQ ID NO: 146947 - RNA, 67 nt, Homo sapiens
gggcagcgggaagcgaggccccaggagaaagacagcaaagaaaaggagaagaaaggaaaaaaacaac

SEQ ID NO: 146948 - RNA, 80 nt, Homo sapiens
agaagcgggccacccacaaaagaacaggagagggaaggcaaaacaacccgcagggcacacgcaccgcaggagaacagaag

SEQ ID NO: 146949 - RNA, 72 nt, Homo sapiens
cacagacagacaagaggcagccaggcagaccacagaaggaaaggaacagggcgaaggcggacgaaaccccaa

SEQ ID NO: 146950 - RNA, 71 nt, Homo sapiens
gcccagcaggaggcccggagcgcaaggagcggagagagacccccggaagaagacccagcccgcaggcagaa

SEQ ID NO: 146951 - RNA, 77 nt, Homo sapiens
gacgcagggcgcccccggcgcaagaaagcgaagagccacgaaaagcccaggggaaaaagggaggccacgggagcgaa

SEQ ID NO: 146952 - RNA, 73 nt, Homo sapiens
aaagggaggcaccacacacaaaaagagaagagcaaccaggccaccaagcacaaacggacgcaaagacagacaa

SEQ ID NO: 146953 - RNA, 61 nt, Homo sapiens
ccggcgcccaaccgcgccccagcgccaggaggccaaagcaaagacaccgaagcgcgaggcg

SEQ ID NO: 146954 - RNA, 55 nt, Homo sapiens
acgagagccagacaggaggaagacaggaaaagaaccgccaggagcaccaaagcag

SEQ ID NO: 146955 - RNA, 70 nt, Homo sapiens
gaaagcaagcgggcggagggccaaagcgaagaagggagcgggaaagcaagcggagacccacgacggcggc

SEQ ID NO: 146956 - RNA, 56 nt, Homo sapiens
gcggggcgcgcggcgccggcggcgcgcggcccccgcgcagaagccggaagagggcc

SEQ ID NO: 146957 - RNA, 84 nt, Homo sapiens
aggccaagccaggcccagcagggccagcaggggcagaggcaagggagacagcaaccaaccagaagagagaagaagcaaaccggg

SEQ ID NO: 146958 - RNA, 81 nt, Homo sapiens
cgccaggccagccgggacggacgccgagcccggggcgcgacggcgcagaccccaacaggaaccccccggcggcagagagca

SEQ ID NO: 146959 - RNA, 70 nt, Homo sapiens
gcaaaaggcagagcgagaccgccggagccgggcacaaaaggggccgcgccggcggcacgcaggcccggac

SEQ ID NO: 146960 - RNA, 79 nt, Homo sapiens
caaggggggcggggggccaccgaacgcgcacgccggcaggaaacccaccagagaaggcgcggccacccaggacccgggg

SEQ ID NO: 146961 - RNA, 77 nt, Homo sapiens
agcacgcacgggaaccggaccaggaggaggcaggaccaaaagggaaaagcaccgggcggagaacggaaaagcaccag

SEQ ID NO: 146962 - RNA, 92 nt, Homo sapiens
ggaggagccacggaaacagaagaaggcccggagcaagcaaagaaagggagacaggcagaaccagacccggagcagacgaggaggagggacac

SEQ ID NO: 146963 - RNA, 104 nt, Homo sapiens
gggaacggccgcggagcgcccggggcggcccggcgcggcacagcgccgccagcagggccgaccagaccgacccgcgagacacgcggacggacggagggcaccac

SEQ ID NO: 146964 - RNA, 73 nt, Homo sapiens
agcaagacaccggacaccgagggcccccaaaaggcagccgccgcaaagggacgacgaagggacagccagaagg

SEQ ID NO: 146965 - RNA, 82 nt, Homo sapiens
agaagcccgggaccccgggagacgcacccccccccccggcggagccccgaaggagcgcaggcagcaggaggccgccggggaa

SEQ ID NO: 146966 - RNA, 65 nt, Homo sapiens
gacgcagggcgcccccgaagcaaaagcccccacccgcaagggggccaccaaagaaccaaccggac

SEQ ID NO: 146967 - RNA, 73 nt, Homo sapiens
ccagcggcgcggaaccggaggcaaggaacagaacccccacgaggaagaaaggccccggagagggaggcaccgg

SEQ ID NO: 146968 - RNA, 58 nt, Homo sapiens
cccgaccgggagaggacaagaccacgagccaggcgagcggccggaagaagaagaacac

SEQ ID NO: 146969 - RNA, 96 nt, Homo sapiens
ccaccagaccccggccgccgaccgcggccccgccggccgccggccgcgcggggggcaaaaacaaccaggcagagagacaagcaggagcgaagcagg

SEQ ID NO: 146970 - RNA, 74 nt, Homo sapiens
ggggagggcaggggcgcagaacaggcaaccaaagaacgccaggaacgaagaacgaccaaaaagaagaacaggga

SEQ ID NO: 146971 - RNA, 78 nt, Homo sapiens
gaccaagggaaacacagcagaaacacccaggccacagaggaggaaagagaggggaaagaagcagccaagccccaagga

SEQ ID NO: 146972 - RNA, 50 nt, Homo sapiens
ccggcccaccaaaccccacccaagagaccagagagaccggcagaggcccc

SEQ ID NO: 146973 - RNA, 80 nt, Homo sapiens
ggccccagggaagagacccgcaaagaccgggagaccaaggccggcgcggcacccacaaagcacgggagaccgcggcagcc

SEQ ID NO: 146974 - RNA, 74 nt, Homo sapiens
acgaccacgagagaaaagagccaaacaaggaaacagaagacggaaaggcggccgggagaggagggacagcagcg

SEQ ID NO: 146975 - RNA, 87 nt, Homo sapiens
gaaaggcaggaggggcgaggaggaggaggaagaggagaccgagacaggggcccggcaccgcgcccgagcccacccacagacagaagg

SEQ ID NO: 146976 - RNA, 69 nt, Homo sapiens
agacccgcccgacacaccggcacgaaaaacccgcaggcaccggcacggaccaccccaacaccgggggag

SEQ ID NO: 146977 - RNA, 77 nt, Homo sapiens
agcgccccggcacggagcagcaaacgcagagacaaaagaaacgggccccgacgagagaagaagaaggaggccgcggc

SEQ ID NO: 146978 - RNA, 70 nt, Homo sapiens
accccgggacagaagcaagcgaggggcagcaggcagcaggcggggagcgaaaggaggagcgccgcaccag

SEQ ID NO: 146979 - RNA, 61 nt, Homo sapiens
agacgaaaaaccgaggcgagacccaaagaaaagggacacagacgccaggcagccggggcag

SEQ ID NO: 146980 - RNA, 59 nt, Homo sapiens
cggggaaaaaaaccgcagggcggagagaccaggggaaagggggacagcgcacaaacggc

SEQ ID NO: 146981 - RNA, 80 nt, Homo sapiens
ggaaaacaaaagcggagcggcccggaaacagccagacaagaaacacacccaacagaccaggacgccaaggaggcccgaac

SEQ ID NO: 146982 - RNA, 57 nt, Homo sapiens
aagcgagcccgagccccggcaacaccaagacacggccacggcaagaggcacaacgag

SEQ ID NO: 146983 - RNA, 43 nt, Homo sapiens
aaacgacacaaagaaccaaccaggaacaccagaaggcaaacgg

SEQ ID NO: 146984 - RNA, 76 nt, Homo sapiens
ggcggcgccaggcagggcgcaggacagagcagccaggccacgagccagaaccgagacacacacaggaccccaaaac

SEQ ID NO: 146985 - RNA, 84 nt, Homo sapiens
aaccagggcagagacacgcccgggcggggagggcagccgggcccgcccaggccgacggaaacgaaggaggcccaaccacaaaag

SEQ ID NO: 146986 - RNA, 75 nt, Homo sapiens
cgagggccacagacaaagaacacgcggaagccgcagaaggaccggccagaagcaagccggagaacagaaagacaa

SEQ ID NO: 146987 - RNA, 82 nt, Homo sapiens
caaaaacacacccagggaggcaagcagagcgcggccaagaacagaggaagggggcggcgcggcagccggcgcccgacaggaa

SEQ ID NO: 146988 - RNA, 58 nt, Homo sapiens
ccaaacgcaggcacaaggcgcagggggaaaggaaagaaaggcaaagcgagcaagaggg

SEQ ID NO: 146989 - RNA, 85 nt, Homo sapiens
aaaccgaggcacggacaacacaccggaggcagggggacacagccacccagcggacgacagcagacgacccgaagggcccggggca

SEQ ID NO: 146990 - RNA, 77 nt, Homo sapiens
acgcgcggacgaggggaagcggacggagagcgagccgccggcgggacgaggacgacacaccgaaacggacaggcagg

SEQ ID NO: 146991 - RNA, 76 nt, Homo sapiens
agggccccgaggcgagagggacccccggaacccagggacaaaacacggggagggccaagaccccacaggaggggaa

SEQ ID NO: 146992 - RNA, 69 nt, Homo sapiens
ccaaggacccaaagcacaggaaccaccgaaagcggcgcaacgagggcccgacccgaaaagcgcagccaa

SEQ ID NO: 146993 - RNA, 81 nt, Homo sapiens
cagcgggaaagcgggacggcagaggaccccaacccacccagcgcaccggcggaagccccaaggggacacggaacccaagga

SEQ ID NO: 146994 - RNA, 77 nt, Homo sapiens
cacagggagggccacgaccccaggaggaggggaagccggacccgccagagggacgaccccggaggaaaagcggaagc

SEQ ID NO: 146995 - RNA, 76 nt, Homo sapiens
cccgcccgggcggagccgccaggcggccaccgaccggagcgcccgagcccaaaaggcagagcgaggagagaagaag

SEQ ID NO: 146996 - RNA, 80 nt, Homo sapiens
ggaggcaaccgcgggggacgggcccaggggcgggacggcccaccggcggaaagagcgggaggccacagagaaggcgggcc

SEQ ID NO: 146997 - RNA, 75 nt, Homo sapiens
aaaacaaccagaaggggagaaggcaggcaccacaaaaaggacagaacagcgcgagccacaaggcaaggaagcagg

SEQ ID NO: 146998 - RNA, 86 nt, Homo sapiens
aggagacagagggccgagaaggacaggacaggagaagacacccgggcgggaaaaaggagcaaagaaaggggaaagagaagaaaaaa

SEQ ID NO: 146999 - RNA, 84 nt, Homo sapiens
gcgcgggagcccgaggcgagaccaccggaggaagcggcgcgagcgccccgccacgcccggcacgcaaagaacgcccacaaggcc

SEQ ID NO: 147000 - RNA, 53 nt, Homo sapiens
cccgcagcccccgccggccgcccaacaccgaacaccacacaagcgggacggaa

SEQ ID NO: 147001 - RNA, 38 nt, Homo sapiens
cagaggagccacacccccagggcacgcgagccagccag

SEQ ID NO: 147002 - RNA, 55 nt, Homo sapiens
acggcggaaaagcggacagccaagcaccacagagggacaggagcaaaaagcccaa

SEQ ID NO: 147003 - RNA, 35 nt, Homo sapiens
gcccgcccaacgccagggggacgagcggaccgaca

SEQ ID NO: 147004 - RNA, 73 nt, Homo sapiens
gaaagcaggagcacagacggagagacccagaaggccaccgagcgacggacagcagggaagccaagaaggaagc

SEQ ID NO: 147005 - RNA, 66 nt, Homo sapiens
caagaaaagagagaccgaacagcagagaacaccagaacaggaacgacagcggaagagggggcgaag

SEQ ID NO: 147006 - RNA, 66 nt, Homo sapiens
gaccaggcccaagcgaaaaagcgggaacgcaggacccaaagccgcgcgacggccacgagccccgca

SEQ ID NO: 147007 - RNA, 73 nt, Homo sapiens
cccgcaggacggaaacccacaggcacacccaagggagaagcagaccgcaccaggcgggaccccgaaaaagccc

SEQ ID NO: 147008 - RNA, 71 nt, Homo sapiens
gagagccggaaacagaagggaaagaaacagaaaaggcagaccgaagaaccgacccagagacacagccagca

SEQ ID NO: 147009 - RNA, 63 nt, Homo sapiens
aagcacgccccagcgccccaccacccagcaggccgggaacgccacacaacagggccccgggag

SEQ ID NO: 147010 - RNA, 54 nt, Homo sapiens
ggggagcacggcgagcagccaggccaggagagacccaagaaggagaagccccgc

SEQ ID NO: 147011 - RNA, 72 nt, Homo sapiens
gcaccgccgcgggccgcgggagaacagagacccaccaagaaaccagaacccggacaagggaagggcccgagg

SEQ ID NO: 147012 - RNA, 74 nt, Homo sapiens
gagacccgccccccagaacaacacacaccagaaacagcgcaccacccgcagggggaaaccggccgaaccccggc

SEQ ID NO: 147013 - RNA, 54 nt, Homo sapiens
gcccccccccgcccgggagaaaaaagcccgagccgggccaaacgaccccgcccg

SEQ ID NO: 147014 - RNA, 69 nt, Homo sapiens
cccggcggggaaaagggaaggaaaagagacgcagggaagcacaaggaaacaggagcaccgggagaaggc

SEQ ID NO: 147015 - RNA, 77 nt, Homo sapiens
acccgacgagcgccgggacccagggcgagccggaccagagggccacccgaaacggagcggcagccaccggggacggc

SEQ ID NO: 147016 - RNA, 76 nt, Homo sapiens
ccagcaggaaacgaacagcaccagccgcggagaaccgaaccaacagccagccaaagccaggcagcacagcacagga

SEQ ID NO: 147017 - RNA, 59 nt, Homo sapiens
ggacggggcgaggcgagcaggacccagcccccgcaaccagcgacaaacccgaaggcgag

SEQ ID NO: 147018 - RNA, 37 nt, Homo sapiens
cccaaacgcggcacgggagaacgagcccgacccagga

SEQ ID NO: 147019 - RNA, 64 nt, Homo sapiens
gccaaggccgccccacccccgccggcacaggaaagagaggagaggagcgccggggcgcacgcag

SEQ ID NO: 147020 - RNA, 78 nt, Homo sapiens
gacaaggccacaaccgcagggaccacagcaccgaaaacaccaggaaagacaggagaccaaaaagccggccaagaacaa

SEQ ID NO: 147021 - RNA, 77 nt, Homo sapiens
gacccaaaaaagagagaaaaggccaaagagagggcgaacaagcaagggggagaggcaccagcaacagaccaaccgca

SEQ ID NO: 147022 - RNA, 109 nt, Homo sapiens
gcgcacggccccggacgaaggaccgcagcacggagcgcagaaccggccgcgcccggcgcgcccgggacgacggcgcggcgcgcccagcacgagccgccaaggacacgac

SEQ ID NO: 147023 - RNA, 79 nt, Homo sapiens
gacccaggaagagaagaaagaggacaacagacggaccagcccaaaaccaggcccaaggaacgagagaggaagcaaagaa

SEQ ID NO: 147024 - RNA, 80 nt, Homo sapiens
gacgcgcacggccgagggcacaagcagaggaaggcacgggaaggagcagacccagaccccgccccccgaggcgcagcccg

SEQ ID NO: 147025 - RNA, 81 nt, Homo sapiens
agaaccgccccagccggaggaagagaagaccgccaaagggacagagcgacaggaccggggaagaaaggacagagcagacca

SEQ ID NO: 147026 - RNA, 101 nt, Homo sapiens
ccccgcgcgcacccagccgccccagcggcgcggcgccgcccacggaaaaagaacgaccaggacacagagcggcccaagagacaaaaagcgggggagcagga

SEQ ID NO: 147027 - RNA, 70 nt, Homo sapiens
gccggcggcgggcggggggcgacgcgccgccgacaggagaggcgccgagagggaggacagagcccaggac

SEQ ID NO: 147028 - RNA, 87 nt, Homo sapiens
cgccgggccccgggccccgaggccccgaccgcggcggagcccgacccacccaaggcaggaacaccaaggacagcacagcgccccgcc

SEQ ID NO: 147029 - RNA, 66 nt, Homo sapiens
caaagccaagcaccccgggagagcaagaaaggacccgcgggacgagcgggaggggcggcaaggaac

SEQ ID NO: 147030 - RNA, 85 nt, Homo sapiens
aggagcgggcgcagagacagcaaagagggagagcccagcagcgccaagccggacacagggaccaagaaaggcccagggaccaaag

SEQ ID NO: 147031 - RNA, 83 nt, Homo sapiens
gcccggcggagcccgggcggcccgcggacgccaggagcccccgggcagcgagagcccggagacagacccaagaaacgcaaaca

SEQ ID NO: 147032 - RNA, 42 nt, Homo sapiens
ggcggcgccccagccccacagggcgcccccggaaccagaaac

SEQ ID NO: 147033 - RNA, 53 nt, Homo sapiens
gcggcggaacaacacacagaagccagcccacacggaacaagcaccgaacaagc

SEQ ID NO: 147034 - RNA, 77 nt, Homo sapiens
gcccagaagcggaggccaaggaaccaggcgacacaacccaaaccacaggaagaggaggcccgaggaccaaggaaccg

SEQ ID NO: 147035 - RNA, 93 nt, Homo sapiens
agaaaagagagaaacagggaagagaccagcgaaagcaggcccaacgaaccagggcgaaaaccacccaaggcccaacccagccaaggcaccgac

SEQ ID NO: 147036 - RNA, 75 nt, Homo sapiens
gcaggcggagggggacacccgggcggggcagagcagcccccagccagccgcgagggccaggacggggggcccgga

SEQ ID NO: 147037 - RNA, 46 nt, Homo sapiens
gagcagcacacccagccccaagagcaacagaacagagaaaaggagg

SEQ ID NO: 147038 - RNA, 36 nt, Homo sapiens
gcccccgaaggcgggaaaggccagagaacaaaccgc

SEQ ID NO: 147039 - RNA, 91 nt, Homo sapiens
cccgcccccgcgggcgccgggccaggacggggccaggccgagggcccgcccggccccaggagaagaaccagccgcagaggaggcgccgggg

SEQ ID NO: 147040 - RNA, 53 nt, Homo sapiens
aagacagaaccgccaaagcgcggaaggagagaaaaggcgaaccgaaagagaaa

SEQ ID NO: 147041 - RNA, 77 nt, Homo sapiens
cgcggccgccgggccgcgcaccgacacgagcgaccgcacgccccgccgcgcagacacaggaagcgccagaccaggcc

SEQ ID NO: 147042 - RNA, 58 nt, Homo sapiens
acaggccgggcacccagccaaaggaaagcaacaacgaacgcacagacgagccggaaag

SEQ ID NO: 147043 - RNA, 58 nt, Homo sapiens
agaaggccggagacaccagcaggaaagccaaagagaggaccggaccccacgcggcagc

SEQ ID NO: 147044 - RNA, 82 nt, Homo sapiens
acaagggaacccaaaccgagagccaagagcagcccagcagccccggcaggccccgcccccgggggccagcccagcgcgccgg

SEQ ID NO: 147045 - RNA, 72 nt, Homo sapiens
acaaacgaagagaaacagagaggcgcagaggaccacgcagcaaggcgcacacagaaaaaggcgcaggcacac

SEQ ID NO: 147046 - RNA, 69 nt, Homo sapiens
ggcagggagcgcggacgcagagaggggcaggcagacaaacgaggagcagacaagggcccacaccaaagc

SEQ ID NO: 147047 - RNA, 76 nt, Homo sapiens
aagaaggccccgaaagaaagccgcgaacccaaggcagacacaacaccacaagcaggaccgacccaaccgaagaaag

SEQ ID NO: 147048 - RNA, 73 nt, Homo sapiens
ccagaaccccaaaggcgaaaagacacgccaaaggaaggcagcaccgccgaggcccggacgaggcacgcgacga

SEQ ID NO: 147049 - RNA, 76 nt, Homo sapiens
ccgcgccgccagcgccgcccccgccaacaggaaaggcagacacaagacgagcacccccgagaaaagaaagagacag

SEQ ID NO: 147050 - RNA, 55 nt, Homo sapiens
aagacccaggacaccccgaagccgagaaaggaacgcaaagaacgaaaaggcccca

SEQ ID NO: 147051 - RNA, 99 nt, Homo sapiens
gaccagccgcaccacgagagccgagccggaggaggaccccaagagggggagcgggggagagccagcccaggcagagccgggcacagaagcggcgggcag

SEQ ID NO: 147052 - RNA, 73 nt, Homo sapiens
ggcccagagcggacacccccggaccgcggggaggcaagcaggggggcaaaggaaagaaggcagaaagggaggc

SEQ ID NO: 147053 - RNA, 71 nt, Homo sapiens
ggccaaaagaaaggcagacgaagggaaagcccagaacagaccgccagcagcagccgaaaacgcacaagacc

SEQ ID NO: 147054 - RNA, 73 nt, Homo sapiens
aaaaccagggagacggaagaaagaagggggacccagccacccaaaaagaaggagaggacagccgcagacagga

SEQ ID NO: 147055 - RNA, 82 nt, Homo sapiens
cgcagcgagcgagaagaggaggacaacagcacaaccggggaacaagacccagaaagaggaacaacgaagaaaaagggaagaa

SEQ ID NO: 147056 - RNA, 77 nt, Homo sapiens
caaacgcgacccagaaggcgaaggggaagccaaagaaggggaccacacaacgagggaagagcgcaccacgcgaaccg

SEQ ID NO: 147057 - RNA, 80 nt, Homo sapiens
gacccagggagagcagggcagggaaaagcgccgggcggaccagcagaaaccaagggagggaaccgggaacggcgcggcaa

SEQ ID NO: 147058 - RNA, 66 nt, Homo sapiens
agccgaagccgcagggaggggaaacgaagcgcacgaaacaccaaggaggcggaagggaagcaagca

SEQ ID NO: 147059 - RNA, 54 nt, Homo sapiens
cgcaccaggcagcaccgcggaggcccagcagggagcacagaagagaagagaacg

SEQ ID NO: 147060 - RNA, 77 nt, Homo sapiens
gacccccagaaacaccgccgagaccagcccaacaggaccaggagcgggagagggccagcgcgagcaaggaaccccgg

SEQ ID NO: 147061 - RNA, 53 nt, Homo sapiens
ggcagacaaaagggccaaagaagggagaaggcgcggggccgagaggccgccgg

SEQ ID NO: 147062 - RNA, 67 nt, Homo sapiens
cagggccgcggggacaggaccccggacgagcccggcgagggggggaaaaaaccagccgaacaaaagc

SEQ ID NO: 147063 - RNA, 42 nt, Homo sapiens
cgcacggaagaaaccagggaccaggaggagaagcaaccagag

SEQ ID NO: 147064 - RNA, 77 nt, Homo sapiens
ggccggagacaccagcagggacccgaccccaccgaccggggccagcaacgggacgcagagacgcacgcccggcacca

SEQ ID NO: 147065 - RNA, 65 nt, Homo sapiens
cagcccccacccgcaagagcagccgcggcgccacgaaaggagccccgggaacacccagagaacga

SEQ ID NO: 147066 - RNA, 63 nt, Homo sapiens
ccaccccgcggcccgcggaaagagccaagccagggccgggcagaggcagcgagcgagccccag

SEQ ID NO: 147067 - RNA, 80 nt, Homo sapiens
agacccgggccggcccccaccagagaccgggcagacagaaggcaaaaaaagaaagcacgacagcaagaggggagacagcc

SEQ ID NO: 147068 - RNA, 79 nt, Homo sapiens
ggacgaggggcccgggcccagagcggaagacaagacgacaccacgccacccaagagagagcaaaaaccgagaaccagag

SEQ ID NO: 147069 - RNA, 81 nt, Homo sapiens
ccacgaggcacacaggaaacacacagggcaaagccccaaagcaaccacgcgacagaacacagacagcaaggaaagcgcaga

SEQ ID NO: 147070 - RNA, 95 nt, Homo sapiens
ccgagccccgggaccgcggagcggagccggccgacgcgggcgcgagggcagaaccggacaagggagccaacgaaaaccacaaaaccagcacagcg

SEQ ID NO: 147071 - RNA, 71 nt, Homo sapiens
gggagagggcgacacaacgaaaccaggagaaaaggacagaagggaagaaagcccgcagccccccagaacaa

SEQ ID NO: 147072 - RNA, 62 nt, Homo sapiens
agacaagaaccccgagaacccacaaccggggagagaaacacccaaggaaccaaagcaggcca

SEQ ID NO: 147073 - RNA, 57 nt, Homo sapiens
gaaacaagaggagaaccaggaacgaggcaaaagcagaccggaaaacccaccggcaag

SEQ ID NO: 147074 - RNA, 82 nt, Homo sapiens
gcggcggcgcgagcgcccaggccacggagcgccgacacggccggcgccggggacgcaaggcccggacagcgagaacgagagc

SEQ ID NO: 147075 - RNA, 71 nt, Homo sapiens
aaaaaaggacccaaagagcaacgaccacaagcagcgaagaaaacaacccgcgcacagaagggagcggcacc

SEQ ID NO: 147076 - RNA, 81 nt, Homo sapiens
ccaacagagaaaaaacacaaccaaagagacaggggccaggccaggggcaggggaagcacccaaccaacgagcgggccacac

SEQ ID NO: 147077 - RNA, 81 nt, Homo sapiens
gacgcgacgcgcgccgaggccacaggaaaggggccgcggcgccgccagacagcgagcgaggcggagaaccaaggcgaaggc

SEQ ID NO: 147078 - RNA, 76 nt, Homo sapiens
gccgggacggaggacgcgcaggcacccacgaggcggcgacggaaagccccccacgggaggccagcagaagcaccag

SEQ ID NO: 147079 - RNA, 78 nt, Homo sapiens
gagaaggaccaagaaccaggagagaaaacagacagaaaagaaccagaaccggccaaaagcgaaaaggcggaagacggg

SEQ ID NO: 147080 - RNA, 111 nt, Homo sapiens
ggaccgccacaaaggaacccgggcggacagcgcccaaagccaggccccggacagcccgggaagccaggaggacaagcggaaagacccaggagcagggaaggcacaaccaag

SEQ ID NO: 147081 - RNA, 81 nt, Homo sapiens
cccgagcccccagccagagaccccgccaggacccgccccaccacaggccccaagacgcagagaagccaccagggggaaaca

SEQ ID NO: 147082 - RNA, 86 nt, Homo sapiens
gacagcaaaaaacaccgacgacccccagagcagccccgagacagcagacgacaccccgacaggagggccgccagcaccagggaaag

SEQ ID NO: 147083 - RNA, 44 nt, Homo sapiens
caaagagcaaagaaacaggccacagggggaaccacaaaaccaag

SEQ ID NO: 147084 - RNA, 74 nt, Homo sapiens
cccaaaccagaagccgacacaagcaccgccggccaggaggagagcgcaccaccaaaaaggcaaacacaccagcc

SEQ ID NO: 147085 - RNA, 81 nt, Homo sapiens
aaaagagcccgcaagaagaacagagacagcagccaaacccccaggcacgggcgcaccacgagcgcacgcgcccacaccagc

SEQ ID NO: 147086 - RNA, 75 nt, Homo sapiens
ccgaaggccagcccacccgaaggagcagggccaaaaccgccgcggcaccggacccggccaaccgggagggaaaaa

SEQ ID NO: 147087 - RNA, 76 nt, Homo sapiens
aggcgcccgcccgcacgggcgcgccaagggcacagagggagagggagaccggcgacggccggcgacacccccaccg

SEQ ID NO: 147088 - RNA, 79 nt, Homo sapiens
gccgccggcgggaccgcagcacggggaaacgaccgccccaaaacgggccggacccgaaaacacaagaacacagcaacac

SEQ ID NO: 147089 - RNA, 72 nt, Homo sapiens
gcacgcgaaaaaccagaccaaacgaaacgcccgcacaggacagcccaaggcggaaaagcgaaggaagccaca

SEQ ID NO: 147090 - RNA, 52 nt, Homo sapiens
ggaccaaagcggaccagagacagaaggacccccaagggcgaaggaagaagcg

SEQ ID NO: 147091 - RNA, 73 nt, Homo sapiens
agagacaaacagagaagaccagaagagcgagggggaaaagcaaaagcagaggggcccaaaacgcccaaagaaa

SEQ ID NO: 147092 - RNA, 86 nt, Homo sapiens
cgggagaaacaacaacgcacacgggaggagccaacagcaggaaggcagggaccaagaaaggcccagggaccaaagcccggacaagg

SEQ ID NO: 147093 - RNA, 80 nt, Homo sapiens
cagaggaacaccggagaccacgcccaaacaggaagcagagagacaaaaaagaggcacagagagaagaaggacagcgcaga

SEQ ID NO: 147094 - RNA, 76 nt, Homo sapiens
ccgcaaggccgcccgggaacgcgacgcgagagaaggacccacggcgcgcgaagggcgccagggaaggaccgcacac

SEQ ID NO: 147095 - RNA, 74 nt, Homo sapiens
cgagcggagaacgccacagccgcgcaaaagagaacggacgagaccaacgcggaaaccagcaagaaaaccagcgg

SEQ ID NO: 147096 - RNA, 76 nt, Homo sapiens
gggagaaaaccaaaaagccccagcaggaccaaccaggccaaaaccagacaacaggcacaaagagagaaggaacacc

SEQ ID NO: 147097 - RNA, 84 nt, Homo sapiens
ccaccagcagacgcagccgagacaccagcccgaaacaccaccaagccccggcacaaagcagaccgccccacgggcgcgcccgcg

SEQ ID NO: 147098 - RNA, 78 nt, Homo sapiens
caacacccgcccccgaaaaaccacggggaagccacccgacagacccacaccaggaccacgacgcgcccgagcagggca

SEQ ID NO: 147099 - RNA, 65 nt, Homo sapiens
ccagaaggagacgggaccccggcccagcagcagcagggggagccagccaccgagacgccgacagc

SEQ ID NO: 147100 - RNA, 70 nt, Homo sapiens
cccagcggcagcagaaagagcagagagacgaagccaggagcagacaagacacccaaaaaagaagaagcaa

SEQ ID NO: 147101 - RNA, 73 nt, Homo sapiens
aaagcgcgaccgcacgaaagaaaaacacaccgacagcagaacacacgcgaaaggaaaccaagcggaagggaag

SEQ ID NO: 147102 - RNA, 91 nt, Homo sapiens
cccgcccagccccaagagcgggacacagacacaccgaccgaccggccagagagaggccacaccccggggcagcagaccgaaaagccagcag

SEQ ID NO: 147103 - RNA, 72 nt, Homo sapiens
ccgacccggggcacccgcgccgccccgcacggcggacccggagcgcacgcaagggcgcgcccggcacacgaa

SEQ ID NO: 147104 - RNA, 89 nt, Homo sapiens
cacggcccaccaagccaacaggggcacccggagccagcccggggcggcagcccggccaagggcagccggggccggaccccgagggcacg

SEQ ID NO: 147105 - RNA, 49 nt, Homo sapiens
gcccaagggaaaagcagcggccgcaagaggggcgcacccaacgcgcacc

SEQ ID NO: 147106 - RNA, 95 nt, Homo sapiens
gaggggggagcccagcaggagcgggaaaaccgagcgcgggagaaggcagaaagcaacagaagcagaagaaaggcggaccacaaggaaaagaaaaa

SEQ ID NO: 147107 - RNA, 61 nt, Homo sapiens
cccgaggaggagcagaggacaagcggcaagaacgaccagcggccccaggggcgccacagcc

SEQ ID NO: 147108 - RNA, 78 nt, Homo sapiens
aaagcccaggaacacaaacagggccgggggcagccccccacccagcaccgcgcacggagcagcccaagcccaggagga

SEQ ID NO: 147109 - RNA, 37 nt, Homo sapiens
gaagacccgagagaggcagccccgggcaaccagcaag

SEQ ID NO: 147110 - RNA, 82 nt, Homo sapiens
ccggcaccgggagaaccaccgccaccgccaccagccggaaccaaaaagaagccccagagccggggccaggagccccaagcgc

SEQ ID NO: 147111 - RNA, 70 nt, Homo sapiens
gggcacagcacgacaaacacgacggacagagcgaagcgaccaagcagaaggaagaagacggcacgggacc

SEQ ID NO: 147112 - RNA, 38 nt, Homo sapiens
aaggaggcaccagacaaggaaacaaagagccccgggaa

SEQ ID NO: 147113 - RNA, 76 nt, Homo sapiens
gaaaccgcgccagcgccgcccagaaggccggcgggggcagggaaggaagggaaaggaaaccaacacggaagacccg

SEQ ID NO: 147114 - RNA, 57 nt, Homo sapiens
aagcgggcgggcccccccacccagagacgaaaaggggaaaggagaaagaagggagaa

SEQ ID NO: 147115 - RNA, 61 nt, Homo sapiens
agaaaagaagaaaacacgaaaaaagccaagcaacaaaggccccccccccgcaaccagcccc

SEQ ID NO: 147116 - RNA, 75 nt, Homo sapiens
gacccccgcccggcgccggcccgggccgccagggcagaaagacagaaccagcacagcaaaaaaggcagcgcaccg

SEQ ID NO: 147117 - RNA, 65 nt, Homo sapiens
gcggcagcaagaacagagagagaggggacagacgagagaacgaggcaccaaacaacaagcagcac

SEQ ID NO: 147118 - RNA, 72 nt, Homo sapiens
agacagccccaagagcgggcgaccacgccacgaccacacgcccaaacggaacgggcgacccagccccagccc

SEQ ID NO: 147119 - RNA, 87 nt, Homo sapiens
cagccccgaggagcgggacacagggcggggagagccgggcacgcgccggagccacgccgcggcaaccaccacacgagcagcaccgga

SEQ ID NO: 147120 - RNA, 87 nt, Homo sapiens
agaaaaccccaagcggaagcaacccgaggggagggagacagcaagccagagggccacagagccgaacacagcagagggggacaagcc

SEQ ID NO: 147121 - RNA, 77 nt, Homo sapiens
gccgccggaaggcccccggcgcgagacccgccggaggaacacagggaagggacccccacacccaaaagcgcgggcac

SEQ ID NO: 147122 - RNA, 88 nt, Homo sapiens
gcagagggaaaaaagagaggagcgaacgagacagaacaggaaaaagggaagcaaggaggggggaagcacaagagggaaacaacaacag

SEQ ID NO: 147123 - RNA, 75 nt, Homo sapiens
ccacaagaaaagccaggcggcagcaccccgagccaccccaggcgcccagaccaagggaacgggcaaagcagaaga

SEQ ID NO: 147124 - RNA, 77 nt, Homo sapiens
aaagcaaccaggaggcagaaaccagcgccggacagagaagcccccaaggagcgcagcacccagccaaacccaggccc

SEQ ID NO: 147125 - RNA, 74 nt, Homo sapiens
cggaagaggcgcggaggcgcaaggaggagaaggaagagggcagcacaggacaggaaagagagacaaaaagcaaa

SEQ ID NO: 147126 - RNA, 42 nt, Homo sapiens
ggaaagggcacaaggaagaggagaggagacgccggagcggga

SEQ ID NO: 147127 - RNA, 74 nt, Homo sapiens
cagagcgcaggaaagacaagccgggagcagacaagagaaacgaaggaggcccaaccacaaaaggagccgacgga

SEQ ID NO: 147128 - RNA, 82 nt, Homo sapiens
ccgaaggcggcaaaaagcagcgagaggaggcgaacagagacacaaccagagggaagcacgcccgggcacagcggaagagacg

SEQ ID NO: 147129 - RNA, 83 nt, Homo sapiens
aggcgcccggagcaccgaaacgccgaaaacgagccgagaaccagagagcacagagaaagcgggaaacggccaaacagaacacc

SEQ ID NO: 147130 - RNA, 73 nt, Homo sapiens
gaagaaacccgcggcgaccacagccaaagcgggcgcgcgaaaagccccccgggagcagccagaacagagaaag

SEQ ID NO: 147131 - RNA, 72 nt, Homo sapiens
ccccaacacagagccaagcgccaaggcagaaccagcaaagcacaaaccacagacagcccccccaagcggcag

SEQ ID NO: 147132 - RNA, 71 nt, Homo sapiens
cagggcccccggaggaagcacacagacccggaggaaccaccccaccacccggacaacaccacgagggaccc

SEQ ID NO: 147133 - RNA, 35 nt, Homo sapiens
cccaccaccgcaaacagcaacgagcaccagagagg

SEQ ID NO: 147134 - RNA, 84 nt, Homo sapiens
caagaagggccgggggcgagccggagcgaccccggcagggaagccgggggaggccacggacaacagacgacagaggacagggac

SEQ ID NO: 147135 - RNA, 73 nt, Homo sapiens
cggcgaggacggaggcgcgcaggcagagcgcaaccccgcccgaagcagaaagaaaagacgcccagagaagaga

SEQ ID NO: 147136 - RNA, 72 nt, Homo sapiens
cgggcagcaccccgcagacaccggcgacaccccggcaggacgccggagcagccacgcagccccaccagcacg

SEQ ID NO: 147137 - RNA, 73 nt, Homo sapiens
caagggaccacaaaaagaaagaggcgggacacccaccccaacagagaagcgcaccaccggcccagcacagaaa

SEQ ID NO: 147138 - RNA, 82 nt, Homo sapiens
cacaagagaacaggcagaaaccacacaccagaaagaacgaggcaaagcgcagaagcacaccagaaccccagcgccgcggagc

SEQ ID NO: 147139 - RNA, 82 nt, Homo sapiens
acagaaaaagaacccagaaagcagaaccaaccggaaggaggcgaggccgaagccggaacggccacaccacgccaaccagacc

SEQ ID NO: 147140 - RNA, 75 nt, Homo sapiens
gggggaacggccaagaaggcaccagacgcccagaggaggacccaccacccggggcagcgccaacaagaagcaaga

SEQ ID NO: 147141 - RNA, 67 nt, Homo sapiens
caaggcaaggcaccggagcggaaaaaccgaacaaggcccaaagcccagccaaggacccgaaaaacga

SEQ ID NO: 147142 - RNA, 38 nt, Homo sapiens
ggcagggcaggggcagagcagggacaaacaaacgcggg

SEQ ID NO: 147143 - RNA, 76 nt, Homo sapiens
ccccaccccgcggagagcggcaacagcaacaaacggaaaccacgggcaggggagaagccccccgcggggaagaacc

SEQ ID NO: 147144 - RNA, 41 nt, Homo sapiens
gagggacccgcgggcccggcaggacggaaaaaggacaagga

SEQ ID NO: 147145 - RNA, 111 nt, Homo sapiens
gcccaaccaaagccccacacaggcaagacaacgacacaagcggggcaggcgagggaggagcaggcggagcacagggcagaccggcaacgcaacccgccgcccccaggcaag

SEQ ID NO: 147146 - RNA, 51 nt, Homo sapiens
acaggcccggccaaacaggaaagcacagacgaccaagacaaaccaagacgc

SEQ ID NO: 147147 - RNA, 73 nt, Homo sapiens
aagcacgcagaaacagcagacggaggccgggagcaggcaaagccgaaaagacgaggcgaggaggcgagacacc

SEQ ID NO: 147148 - RNA, 77 nt, Homo sapiens
ccggccagagggaaccaaccgggaccccaagccaaagaacccacacaaggacaaggggaccagcaacaagaaaagca

SEQ ID NO: 147149 - RNA, 91 nt, Homo sapiens
cgcgggcagcgaacaagcgggagcaaggagggcgaagagcgaggagggcgcaaaccagaagaagaggggggaagaaacgggcggaggaaaa

SEQ ID NO: 147150 - RNA, 80 nt, Homo sapiens
aagggaagcagaagaaaaggagaaggaaagcgaaggggaaggcgccgaagaggacgaagggacaggagccagcggcccag

SEQ ID NO: 147151 - RNA, 83 nt, Homo sapiens
gccccggggacagccagccccgcggaccagaccaggccgcggcccgcaggacgggcaggacgagggccggacagggcccagac

SEQ ID NO: 147152 - RNA, 64 nt, Homo sapiens
acacacggacaacaaacgcacccagccaaacccaggcccgagaagaagaggaaaacccaccacc

SEQ ID NO: 147153 - RNA, 68 nt, Homo sapiens
ccaaaaaggcacgagggaacgggaaagaacagagaaggccggaaggggggcgacgcggaaggcacaac

SEQ ID NO: 147154 - RNA, 72 nt, Homo sapiens
ccagcagcaggggcgccaggccaggaggggaggagggagggccacggcaagggaagcacaaaaagagccgca

SEQ ID NO: 147155 - RNA, 87 nt, Homo sapiens
ggcggccgcccgggagcgagcggaggagcaggcgccggaggcccgaagaggaaaggaggagacccaccgaaggcagggaccgaaggc

SEQ ID NO: 147156 - RNA, 80 nt, Homo sapiens
gaggggaacagacgcagggcagggccccgcccggcggggaaggaacccaaggaccgcaaagaaaacccagagaacaccac

SEQ ID NO: 147157 - RNA, 87 nt, Homo sapiens
ccccaaccgcgccagcggagcgaacccgagagcgggagcgggcgggccaggcgcggcgccggacaaaaacacaacaaacaaaacccg

SEQ ID NO: 147158 - RNA, 84 nt, Homo sapiens
cgacacgggccgcgacagcagccacgaggcgagccagagccgcagcccacacgaaccacagccgccagagccagagcaggggaa

SEQ ID NO: 147159 - RNA, 86 nt, Homo sapiens
gcacccaaccccgcggcccgaaaaagcccaagacagcagaagcagacaccccaggaacagcaaagaaaagcaaagaagacagaaaa

SEQ ID NO: 147160 - RNA, 68 nt, Homo sapiens
agaacgggaggaagcagacacgagcaaagccaggagacacaagacagcgacgcacaaggaaaaacaga

SEQ ID NO: 147161 - RNA, 46 nt, Homo sapiens
gagaccccagaaaaggacaggcggacgggccccgaagcccaagggg

SEQ ID NO: 147162 - RNA, 75 nt, Homo sapiens
ggaccagggggacgcagacggcgcacgcgggaagggaccacagaccagcacgccggcgccacgaaccgagcgaca

SEQ ID NO: 147163 - RNA, 69 nt, Homo sapiens
aagcagggcggagggacagcccgaggcacggaacgaaacaagcagggaaaaagcgcggcaaagcgcggc

SEQ ID NO: 147164 - RNA, 81 nt, Homo sapiens
gaagaggcgaaggccagagcacgagcacgggaagaaggacagaaaacgggccccagacacaagccccaccaagaggacacc

SEQ ID NO: 147165 - RNA, 82 nt, Homo sapiens
gcgcagcgcgcacagaaaaagcgaacagacagacgagggcggggagaagaacaccccacaacgcgcagcccgggggaaacag

SEQ ID NO: 147166 - RNA, 105 nt, Homo sapiens
ccaaaaacaggcaaacccggagaagggagcccagcagcaaaggcagcccccaaggcaaaagaggagaagagcaggcccagaaaaggcaaaaacggcccaacaggc

SEQ ID NO: 147167 - RNA, 74 nt, Homo sapiens
agcaggcccagccagcacccacccacggacagagcccaacaccaccagagcacgggggacacagccagggcgca

SEQ ID NO: 147168 - RNA, 60 nt, Homo sapiens
acaggaccggccccaacgcgaacaggaagcgagcgaacacaacgaggagaggaaacaaag

SEQ ID NO: 147169 - RNA, 87 nt, Homo sapiens
gaagagcagagacgccacagcagcaacacggaaacaccaccgaaaggacggaggcgcaaagaaggcacagaaggagaaacggcacaa

SEQ ID NO: 147170 - RNA, 76 nt, Homo sapiens
gaggagccgccgggggccggcaaggaaacccaaccccagccccacgcgaagagaagaagcaacagacaaaagggcc

SEQ ID NO: 147171 - RNA, 86 nt, Homo sapiens
agcgggagaaaagaaccgacccacaccaaggaccgccgggagagccgcccaccccccacccggacgccgggcgcgcccggcccccc

SEQ ID NO: 147172 - RNA, 58 nt, Homo sapiens
caggggcggcaggaccgaaaggccacagaagaaggaaaaaaggagaaagaaacaaggc

SEQ ID NO: 147173 - RNA, 68 nt, Homo sapiens
aggccagcacccaagacagcaggggggaaagggagcacggcagccagcagaaaggaagcggaagagaa

SEQ ID NO: 147174 - RNA, 81 nt, Homo sapiens
aggggcccccaccacccggaggagcagcccgccccgccgggggagacgacccccgccagcgcaccccccggaggcggccga

SEQ ID NO: 147175 - RNA, 91 nt, Homo sapiens
ggcgcggaaggacgaggcgaggcgagaaacgaggaaagccaggccagaagaaggaaggccggggaggggacaggaaagacacaccacccca

SEQ ID NO: 147176 - RNA, 78 nt, Homo sapiens
cagaggagggcccgggaagaacgagaaggggaacggaaggcgcccaccacagagcaagagagggccaacaaccagaag

SEQ ID NO: 147177 - RNA, 75 nt, Homo sapiens
aaaaccgaagaagaaacggaggaaagagccagcgcccagggaggaagagagaagaaaagcaaggcccaaccagcc

SEQ ID NO: 147178 - RNA, 73 nt, Homo sapiens
aaggaccaagaaccagggccacgaaagaacgaacagcaaacacagcgacaaacagcgagccccgccgccaaag

SEQ ID NO: 147179 - RNA, 81 nt, Homo sapiens
gcgggcccggccggcacggcgaaccacgcgaggggcgggagccgcgcacaccaccacacacggcgacgaggcacaaagcca

SEQ ID NO: 147180 - RNA, 83 nt, Homo sapiens
cgaccacacgcccagggacacccaccccaccccgccccccacggaagagacgacagagacgaaaaaccgaggcgagacccaaa

SEQ ID NO: 147181 - RNA, 54 nt, Homo sapiens
gcgcggcaccgcgaagagccccggcaagagggcgcgggccgggcgccgaacccg

SEQ ID NO: 147182 - RNA, 81 nt, Homo sapiens
gcccagccaagaacggcagccgacccccagggaagcagggaaggagaacagaacccagaggcccaagacaggcgagcaaag

SEQ ID NO: 147183 - RNA, 68 nt, Homo sapiens
aagcacgccgcccagacaaccggcggagaagagaaacgagggcacacgcacagggggcaacaccagcg

SEQ ID NO: 147184 - RNA, 76 nt, Homo sapiens
ggggggagggggaagcgggaaacccacaggaggcaaccacacagagcacgcacgccagccccaggaaggcggagac

SEQ ID NO: 147185 - RNA, 67 nt, Homo sapiens
accagccgggcacaggggaaaaagaaaagggcgaagacccgaagcagcgcaggaacagaagagaaga

SEQ ID NO: 147186 - RNA, 71 nt, Homo sapiens
gggaccgacgccagacaagacggacacacaacaaaccagagcagcgcaggaccaagggggagccgggagaa

SEQ ID NO: 147187 - RNA, 82 nt, Homo sapiens
agagggaagagacagccagcacaccccgcgagcaagagaccacagcagacacagagacgggcggacacaggccgacaggacc

SEQ ID NO: 147188 - RNA, 68 nt, Homo sapiens
gagaggcagggccacaacccagaaacccacacggcaaggccggagcgcgaagacgcagggaaagcggc

SEQ ID NO: 147189 - RNA, 79 nt, Homo sapiens
agggacgggaccaacggggaaccccggagagcccagccaagccagaaccaggggcaacagacacagccaccacaaggag

SEQ ID NO: 147190 - RNA, 73 nt, Homo sapiens
ggcccggccgccacccgggaaagacaggccgacagcggccgcgaccccccaaggccgcggcggccacccaaac

SEQ ID NO: 147191 - RNA, 80 nt, Homo sapiens
gagaccggcccccggcgcagcgacaggcccccgccggcccgcccaggcccacccagcgacaccaagccccaaaccccgac

SEQ ID NO: 147192 - RNA, 93 nt, Homo sapiens
ggaaaccaggcaccggggggcaacacccgagaacggcgggaagagaagacacgagcacaaacgggcggaaaacaccccaaaagccaaaaggga

SEQ ID NO: 147193 - RNA, 91 nt, Homo sapiens
aaccccccggacccagagggcggaaccgacacggcagacagggggaacagaggagcagcggcagaaaaagggccagacgaggcgacacagc

SEQ ID NO: 147194 - RNA, 73 nt, Homo sapiens
cggaggcccacagcagggggcaggaaaggagcagacagaaggcaggagaggaccggaaaagacccaagcgcaa

SEQ ID NO: 147195 - RNA, 51 nt, Homo sapiens
aagaaacacccgaacagcgaaacaacaagaaggagaaagacacaacgacag

SEQ ID NO: 147196 - RNA, 80 nt, Homo sapiens
cagaaccaggacacgcgcacgcgcaagccacccggagaaggccaggagaccacgacagacaggaccgaaaagggaagaga

SEQ ID NO: 147197 - RNA, 68 nt, Homo sapiens
gggcccgaggcaggcggagcacagccacgggccggagaccgcgaccaagaaccgggccagccacccaa

SEQ ID NO: 147198 - RNA, 51 nt, Homo sapiens
gaaaacccagaaaaaagggcaggggggcaacccaaagaagaaacagaaccc

SEQ ID NO: 147199 - RNA, 36 nt, Homo sapiens
ccacagggggccagggaagaaaggaaccacaaaggg

SEQ ID NO: 147200 - RNA, 54 nt, Homo sapiens
gcagagcaggagggaagaggaggcacagaaccaccaccagcgcggaacacagac

SEQ ID NO: 147201 - RNA, 74 nt, Homo sapiens
gcccaggaaaaagggaacaggcggggccccaggacccggacagacccaaaagggaaaaaggaaaaccagaagcc

SEQ ID NO: 147202 - RNA, 78 nt, Homo sapiens
agaggacaggccccaaaggggggagccccccaggaagaaaagaaccaccagaagaaagggagaacccagcaagacaaa

SEQ ID NO: 147203 - RNA, 49 nt, Homo sapiens
caagaggagcaggcagcgggcccaggaccaccaagagagacaagaagcc

SEQ ID NO: 147204 - RNA, 57 nt, Homo sapiens
gacccgaggacaccgcgccaggaaacaagggaagaccaaaagcgaaacggagcgcca

SEQ ID NO: 147205 - RNA, 86 nt, Homo sapiens
cggccgaggcggccaggggaccgggaggggcgaaggcgggcggcagaggcgacaggagagagagaacccggcgagaggaagagaga

SEQ ID NO: 147206 - RNA, 61 nt, Homo sapiens
aggggaaaaaagcagaggccagggcgccggaccaagcccgagccagcaggaacgccacaca

SEQ ID NO: 147207 - RNA, 116 nt, Homo sapiens
gagacgaggccggcgagcggacgccccgagggcccgggcaggcaggggccgccgagcgggaggagaccggagagcaaggggacccgcacacgcaacccgccccagggcaagggccc

SEQ ID NO: 147208 - RNA, 58 nt, Homo sapiens
caaacggcccagcaaccacacaaggccaaaacgaaggaaggaggacccgaggagagag

SEQ ID NO: 147209 - RNA, 80 nt, Homo sapiens
gggccgaagcgcccggagcgggagcgagcggcgcggcccgacccgcagcacgagccaccagcacagaagaagacagaagc

SEQ ID NO: 147210 - RNA, 77 nt, Homo sapiens
caccccacagccgccagggccagggcggaagaggagagcagaagacggaccccgggccccccggaagcacccccaaa

SEQ ID NO: 147211 - RNA, 69 nt, Homo sapiens
gacggaggcaacagccaggggaaacgggaccagaggacccagagagaggaccgaccgcgcgcccaaaga

SEQ ID NO: 147212 - RNA, 69 nt, Homo sapiens
gagaaacccgaaccagggcgcaccacacaacagcagccagaaagagcacaacagcggccccacaagcca

SEQ ID NO: 147213 - RNA, 41 nt, Homo sapiens
agcgcgaaacgcacgagaaggaacgacaaggagaacggaac

SEQ ID NO: 147214 - RNA, 77 nt, Homo sapiens
aacacgcacaaaaaagggcagaagagaagcaggaaggaggcagaggcacaccgaaagcaagggggaacaggcaaagg

SEQ ID NO: 147215 - RNA, 69 nt, Homo sapiens
cgggacccgaaagcccccccagaagaacgcgaaccgaccgagaaagccaaaagaaacccccaaaaccgg

SEQ ID NO: 147216 - RNA, 68 nt, Homo sapiens
caagacacccgacggacacggcggaggagaagaaggggggagccacggaccagggggacggcgacagc

SEQ ID NO: 147217 - RNA, 82 nt, Homo sapiens
cccagcccgggcccccaacgaggacaaccaccaccagcgagcaaaagaacaaagaccaagaccaagaagcgccccagcggca

SEQ ID NO: 147218 - RNA, 76 nt, Homo sapiens
cggaaggaacacccaagagcaagggccaaaagagcagaagaggacggagccagaggccaccagagggaacaaaaaa

SEQ ID NO: 147219 - RNA, 85 nt, Homo sapiens
cggagaaaacccggaaccgcgacggcggcagcgcggagacccacacaagggccacacgaacgagcgccaacagccgcccacaaac

SEQ ID NO: 147220 - RNA, 111 nt, Homo sapiens
aggagcaccagaccgcaacaggagcagacggagaaagagaccacgagcccgaacagaagccgaccacgcagggccagagcggccaacgcagaaagaaaccgcgaaggagac

SEQ ID NO: 147221 - RNA, 80 nt, Homo sapiens
acgccgagcacccaggcgacgcccaccaagaaagagccgcagacgcacagcaaccaccggacccgaaggccaccacccag

SEQ ID NO: 147222 - RNA, 61 nt, Homo sapiens
gcgggccgccgagcggacccggaccgggggcaccagagccaggacaccgaggggaagaagg

SEQ ID NO: 147223 - RNA, 64 nt, Homo sapiens
cgggagcaggaggagcgcggcgcccgcagagcaaacggggacagcgccgaccggaacagggacc

SEQ ID NO: 147224 - RNA, 82 nt, Homo sapiens
agagaccccacggggacacggacaccgggcgcccgaagcaccgggagggcacaaagagaacgcaacccacagagagagagga

SEQ ID NO: 147225 - RNA, 67 nt, Homo sapiens
gagaaggacagcaaaaaaccacgcaagggcacccacaaacgacaagcagagaagaggccccaggacc

SEQ ID NO: 147226 - RNA, 57 nt, Homo sapiens
aaaaccggagacgccaaaaagcgccacgcagagccccgccaggaagacacgccgggg

SEQ ID NO: 147227 - RNA, 79 nt, Homo sapiens
ggaggccaacggcagaagccaccacaaaagcgaaagggcacaccacaggggggcccacgcggaggacgcagaacacggc

SEQ ID NO: 147228 - RNA, 50 nt, Homo sapiens
gcgggaaaagaaagcaacgcgagcccgcacacaacggggcggcacacaag

SEQ ID NO: 147229 - RNA, 69 nt, Homo sapiens
aaagcgggaccagagcaaggagaggaacggccaaaacgggcaagcccaaagagcacagaaaacaggaga

SEQ ID NO: 147230 - RNA, 74 nt, Homo sapiens
gcagcgcccgccgcggcccgggcccccccgccggaaacaggagaacacgagacccgcacaaaaccccgcccccc

SEQ ID NO: 147231 - RNA, 52 nt, Homo sapiens
gaaaaaccggaaagacccacaaaggggaaaggacaagggacagcagccgcag

SEQ ID NO: 147232 - RNA, 83 nt, Homo sapiens
aagcagggcacggaaaaccgcagcaggaagcgggaccaaaaagagccaagcgagaagagagaaccacaaagggcagagcaaag

SEQ ID NO: 147233 - RNA, 82 nt, Homo sapiens
aagcccagcgaagcgggcacggggcgaggacagcagcggacggccggaccaagaggcgccgccccccagcaaacgagaaaaa

SEQ ID NO: 147234 - RNA, 67 nt, Homo sapiens
gcgaggggaacggaggccagagcgcggacagacaagcggaagaacacggaaccaccacaaaaggaag

SEQ ID NO: 147235 - RNA, 75 nt, Homo sapiens
ccccgccggaccccacagcaacaaggagaaagccaaagcgaaggacggaaccccacccagaggcgacccgagaaa

SEQ ID NO: 147236 - RNA, 74 nt, Homo sapiens
gagaagagagccggggcgacacggggaccggaaacgcgccagcaccgcacagccaaccaggcagaacccccagg

SEQ ID NO: 147237 - RNA, 66 nt, Homo sapiens
aaaaccgggccaggagcgcagaggacaagccccaaaacccagaaggaagaagaagaaagacaggaa

SEQ ID NO: 147238 - RNA, 78 nt, Homo sapiens
ggcgagccgcgacggcgccgcccacggcgaggcaggcaggaaaaagcaggggaggaagaggacgaacagacccgcaag

SEQ ID NO: 147239 - RNA, 93 nt, Homo sapiens
agacagcccagacagggccccgggacacggagcgacggcagcccccagcgccagccgcagccggcggacgcacccaccagcaagggacaagac

SEQ ID NO: 147240 - RNA, 51 nt, Homo sapiens
cgcagggcgcccccggaacaagcacaaggaagagcccacagaaaagacccc

SEQ ID NO: 147241 - RNA, 81 nt, Homo sapiens
ccccacggagcgcgcggagcgaacccaccccagggcgcaagggcagacaagcgcgggcccgaaggaccgagccggcggaag

SEQ ID NO: 147242 - RNA, 86 nt, Homo sapiens
aaccgcgggccgccaggagagaagacggggcggccgagcccgggggaggccccggagcgcagccgggcccagcccaccccgcgccg

SEQ ID NO: 147243 - RNA, 61 nt, Homo sapiens
gcagcgcccagcacgggcacgaaaaccaagacacaaagcagaacacgaaacaggaccaaaa

SEQ ID NO: 147244 - RNA, 73 nt, Homo sapiens
caacggccaaccggcaagaccagacgggaacgggagacaagcgcagcgaggcacacagagaaaaaaagggaac

SEQ ID NO: 147245 - RNA, 56 nt, Homo sapiens
aaaggaggaacgccggcccgagaaagcccgccagcagaacggccgagcgaccagga

SEQ ID NO: 147246 - RNA, 70 nt, Homo sapiens
cagcaggacgcaccgccaccaggaccgagacacccccggaccagaaaccggggcgcagcgaggccggggg

SEQ ID NO: 147247 - RNA, 35 nt, Homo sapiens
cacagaagaagcgcagccagagagccaagcgaacg

SEQ ID NO: 147248 - RNA, 88 nt, Homo sapiens
gcggcaggaggcgagccggccgcgggccggggccggggcgccgcggcaggagcgcggggaccccaaggaccggcacggagagggcgcc

SEQ ID NO: 147249 - RNA, 67 nt, Homo sapiens
gccggcaccgccaccccacaggcccccaccaggccgcggcaggagccgggcagagaaaagaacgcga

SEQ ID NO: 147250 - RNA, 77 nt, Homo sapiens
caggaggagcggagcgccgcgcgcccaggccaggacggagggaggccaggggggggcgccggaagcccccgccaggg

SEQ ID NO: 147251 - RNA, 84 nt, Homo sapiens
aaaaaccagagacccccgaagacggaaaaagcaaaagggcccaaggcccgaccaggaacaaagagagaaagacagccaagccag

SEQ ID NO: 147252 - RNA, 38 nt, Homo sapiens
gggaaaaccagaccgaaccaggcacaaggacagagaag

SEQ ID NO: 147253 - RNA, 78 nt, Homo sapiens
cacagaagcaacaaaggaccgcccccagagagagggagacgcaagccacccggacgcgaagaccggagcaggaaagac

SEQ ID NO: 147254 - RNA, 68 nt, Homo sapiens
acagcgacgacgggaaagacgagggaagaaaggaggaccagaaccaaggaccaaggacccaaagcaca

SEQ ID NO: 147255 - RNA, 83 nt, Homo sapiens
acagcaaaccggagccaaaaaggacacaaaggacccgacccaaacgccccagaccccccagagggcccaagaggcagaaagaa

SEQ ID NO: 147256 - RNA, 87 nt, Homo sapiens
cccagcggccgcagcaagcgaggcaagaaagaaaacggcagcaggggaacgaaaaagacccaaaggccgaccccggcgccaccgcac

SEQ ID NO: 147257 - RNA, 36 nt, Homo sapiens
agacaagcagaaaaagaaaaaacaccagcagcccag

SEQ ID NO: 147258 - RNA, 69 nt, Homo sapiens
gcgcaccaagaaacaagaaccaacaccaggaacgcaaggcaggcgaccaaaaggaaagacgggaagaga

SEQ ID NO: 147259 - RNA, 71 nt, Homo sapiens
gcaccccggacaccccgggaccgaagcggcgggcgacacggaaggagaaaccaacacaaggccgagcccgg

SEQ ID NO: 147260 - RNA, 72 nt, Homo sapiens
gagaaaggaaggaaaaccgacgaaggggaaggcgccagcaacaggggggagacccgaaaaaagaagaaaaac

SEQ ID NO: 147261 - RNA, 73 nt, Homo sapiens
ccagaagccggagacccacgcagcaagaacgacccaggcccgagaagcaggggaaacagagcacagcggacag

SEQ ID NO: 147262 - RNA, 72 nt, Homo sapiens
gaaccgaggcaaaagaaagacgagccacgcgccgagaacgcaaaagcgaccacaggaccagacgcacccggc

SEQ ID NO: 147263 - RNA, 54 nt, Homo sapiens
caaggagcaccccaccgaaaagccagccgcacagagcagagaaggagcggagcg

SEQ ID NO: 147264 - RNA, 83 nt, Homo sapiens
gcaggacgggcacagcagagaccaaaggcagggcaaggaaacggccacaacagaccgaaaagggcggaaaaggaccaaggccc

SEQ ID NO: 147265 - RNA, 63 nt, Homo sapiens
gacccaggccacgccgagccgccaggcagcaggacggagaagggaccacagaccagcacgccg

SEQ ID NO: 147266 - RNA, 79 nt, Homo sapiens
gcggaggccccagggaagcgcagaaagcaggcgaacccgcggcgcaaaacgaacagacagcgacgagaaggccacgagg

SEQ ID NO: 147267 - RNA, 90 nt, Homo sapiens
ccccgcccggccgcgggagcccgggcgcgcaccgccgcccccccagacaagaggacaccgcggaggaaggacgaaggggcccagggcgca

SEQ ID NO: 147268 - RNA, 59 nt, Homo sapiens
ggacagggcaggaaccgcagggaaacggagagaaccagagaaaaccaccaaaggccagg

SEQ ID NO: 147269 - RNA, 77 nt, Homo sapiens
cccagacaggggaggacagaacagcagaaacagaaacgcagccagaccacgcacgcacccggaagagcccgccaacg

SEQ ID NO: 147270 - RNA, 79 nt, Homo sapiens
aaacacgggcgacggggcccagcagacagccgaggggagcgcggggcccggcagaaagaagacgaccccgacgcaggcc

SEQ ID NO: 147271 - RNA, 74 nt, Homo sapiens
aggccaaccagcgcccgccccgcgcaggaagaagacggcacgggacccccagcacaggcagcaggccgggagag

SEQ ID NO: 147272 - RNA, 80 nt, Homo sapiens
acaccgacaggaacagggaccacgggggcccggccaacgcaacagggagcccacgcaagaggggccggggaccgcccagc

SEQ ID NO: 147273 - RNA, 78 nt, Homo sapiens
ggaaaagcagccgaccgaaggaaaacccgcccgccgaccggacacccccaacccggagaagaagcaggcgccccccac

SEQ ID NO: 147274 - RNA, 73 nt, Homo sapiens
cgggcggggccgcgcccccccagggaccagcaccggcagagacgaggacgcgcacaggaaaggacgcggaaca

SEQ ID NO: 147275 - RNA, 72 nt, Homo sapiens
gcagacagcggagcgagaccgcccccccgccccccccccgaccagccccaaagagggccgaggaggaagccc

SEQ ID NO: 147276 - RNA, 83 nt, Homo sapiens
cccagcaagagcggaggcgcccggcggagcagaggaaccacacgcgacagcaggaaaccggagaagacacaccacagagcacc

SEQ ID NO: 147277 - RNA, 79 nt, Homo sapiens
gacaagaagccagagcagccgcccaaccgcgggaccaaccacccgagcggcgcggacgaaggacccaaagacaggacca

SEQ ID NO: 147278 - RNA, 73 nt, Homo sapiens
cgccgaggggccccccgagggcaacagcaggcgggacacggggcgacccacccaaaagccccacggggggcgc

SEQ ID NO: 147279 - RNA, 72 nt, Homo sapiens
cggggcccagggaaaagccaagcccaacaggggacaccggccagggcccggacgggcaggcgagagcagaac

SEQ ID NO: 147280 - RNA, 84 nt, Homo sapiens
ccccgccgccgcggacccaggggcgcccacgccagaaaaaacaccagcagcccagcaaccaaaaagaagaccgcacccaaacaa

SEQ ID NO: 147281 - RNA, 86 nt, Homo sapiens
gcccacgaggagcacagccgggccgcgcgaaggaacgcaagcagaaagaccgcaaagcagcagcacgaacaaaaggccgccccacg

SEQ ID NO: 147282 - RNA, 77 nt, Homo sapiens
ggggaaggggcggcaccaaggaggacccacgagacagggacaggcggccaaaagggccaggcccaggcacgggcggg

SEQ ID NO: 147283 - RNA, 67 nt, Homo sapiens
aaaccgaccagggcaacaccaaaaacaaaacgaaccaggacggcaagacacgccgacacagagcccg

SEQ ID NO: 147284 - RNA, 78 nt, Homo sapiens
ggagggcgagaagcaccgcccaaggaccagcaaagaagaaggaacccaagaacaccccaggcaacccgccgcgaaggg

SEQ ID NO: 147285 - RNA, 84 nt, Homo sapiens
acaggacacagcagacagacggagaacaagaaggaggagaaccaggaccaaagcaccagcacagaagggaagaacgccaaagga

SEQ ID NO: 147286 - RNA, 70 nt, Homo sapiens
gcagcaccagcccccaggaaagacaaaacgagcacgcaaggaacaggacacccaaccgcgagaccagcaa

SEQ ID NO: 147287 - RNA, 77 nt, Homo sapiens
cacagcgcgacgggcggacggaggagaaggccggcccacagcccaaaaagaaacaggaccgaaagccagagcgaagc

SEQ ID NO: 147288 - RNA, 75 nt, Homo sapiens
ggggaccaccgccccagcagacgcggaagggccaaaaagcagaaaaacaaaccagcccaagaagcgacaaagccc

SEQ ID NO: 147289 - RNA, 69 nt, Homo sapiens
caacaacgggccggaagggcaaaacacaaggcaagggacgaaaggggcgcccgagagccgaagcacagg

SEQ ID NO: 147290 - RNA, 74 nt, Homo sapiens
ccccccccgcgggagcggaggccgcccccccaggaccgggcagaacacggcagggggagcccgacaccgggaag

SEQ ID NO: 147291 - RNA, 81 nt, Homo sapiens
acgcaccgagaacaccccggggaccaccggcaccaccgcccaaggccacaagcccgggagaggaacgagagccagcgaacc

SEQ ID NO: 147292 - RNA, 84 nt, Homo sapiens
gcccccccacccgcgggccgcggcgcccggggaaagccgggccccgagggcggaccgaggggcaaagaaaaaggagagaaaaag

SEQ ID NO: 147293 - RNA, 78 nt, Homo sapiens
ccccagcacacagaggagagcgacgagaagaaagagaccccaaaccagggccacaggaaagcgggagaacgacaaggg

SEQ ID NO: 147294 - RNA, 79 nt, Homo sapiens
aggaaaagcggcccggcgccaagacccagcacaaacaccgggaaggaggagagaaagaacccacgcaggacgacagaag

SEQ ID NO: 147295 - RNA, 79 nt, Homo sapiens
gacaaagggacgcagggcaaaaaggggaaaagggagagaagcaggaaagccaggggggccaggacgcaggggagcgcag

SEQ ID NO: 147296 - RNA, 57 nt, Homo sapiens
agaccacaacacaaaaccaccaccgggggaagggcaggcgcccagccaaagagaaca

SEQ ID NO: 147297 - RNA, 79 nt, Homo sapiens
ggggaagcagcacgggacccagcccaggccgcacggacggggggggggcgagcggcagagcgggacaagacaccccgga

SEQ ID NO: 147298 - RNA, 77 nt, Homo sapiens
ggcggcgagccggccgcggcagccggaccagcaggccccccggacagccagagaaccaaaggcagaccacacggcac

SEQ ID NO: 147299 - RNA, 85 nt, Homo sapiens
cacggaggacaaggccgggaaccacagccgcacaaacagaggaaccgccaagagcgagagaccgacagagccacaagaaacaaag

SEQ ID NO: 147300 - RNA, 61 nt, Homo sapiens
cccgacagccgcagaacgagacgacccccggccggcgggacagaccccgcgcaggccccgc

SEQ ID NO: 147301 - RNA, 86 nt, Homo sapiens
acggaccgggaaggagcacccaggaccaccagaacggagaacacgagacccgcacaaaaccccgccccccaggccacacaggggcc

SEQ ID NO: 147302 - RNA, 82 nt, Homo sapiens
cgcccgagacgaagaccggaggaacaaggaaagggcaaagcgcccgccggcggcacaacagaaagacccaggcagagcagca

SEQ ID NO: 147303 - RNA, 54 nt, Homo sapiens
cgccacgcgcggaaggcagcgcccagcagcgcagggacagcaaggacaaaccgg

SEQ ID NO: 147304 - RNA, 91 nt, Homo sapiens
agcagcgacaggcacaggaaccgagcagccaaaagccgcgcggcacaacccgcccgagagcacccagccccagcgagcgaccaccagcagg

SEQ ID NO: 147305 - RNA, 83 nt, Homo sapiens
caaccaagaagaggaaaagaacagagccacacaagaaggccagcccagagaaagaggaggagcgccggcgcggcccaggaggc

SEQ ID NO: 147306 - RNA, 76 nt, Homo sapiens
gcccaccgaacagaggagcgagaaagccggccccagcaccaccaagggcaggacggggaggggaaacagcaggaga

SEQ ID NO: 147307 - RNA, 77 nt, Homo sapiens
cacgaacaaagagagagcagcacccggaaagagaaaccccaagccaaaggggcagcggaacgcgccgacgccgcaac

SEQ ID NO: 147308 - RNA, 68 nt, Homo sapiens
agcgggccgaacccagagcgagggggggaccaccgccggccaggggcggaaacaaagcacacaggagc

SEQ ID NO: 147309 - RNA, 76 nt, Homo sapiens
aggagcaaggaggaagcccgagaaacaaaaaccccgagcaggacaccgacgcccggagacagccccggccgagggc

SEQ ID NO: 147310 - RNA, 81 nt, Homo sapiens
gcagaagaaaccagccgaaccagggccaccgcgcaagaaaaggagaacaaccccgccacgcccaagcacccggaagcccgc

SEQ ID NO: 147311 - RNA, 73 nt, Homo sapiens
aaaggccgccaggccgcagacgcgaaggaacggcaaagcgacaaaagaagcgaagccaggaacaagaggcgga

SEQ ID NO: 147312 - RNA, 66 nt, Homo sapiens
gagaaccgcaggagccagaggacagggcccaaaaaggcaacaaacggagaaaggaggagacagaac

SEQ ID NO: 147313 - RNA, 78 nt, Homo sapiens
acagagccccacacaaggaagaggagaaggccgggaacaggcagagaaaaagaaccccaaggcacccgaagaagcggc

SEQ ID NO: 147314 - RNA, 80 nt, Homo sapiens
ccccacgcgcacacaagggagcccccccaccacccccgagcagagacggaggggaaagccagccagagaccacggcgaac

SEQ ID NO: 147315 - RNA, 70 nt, Homo sapiens
gagggaccgaaagagagacaccagcagggcacgacaacgaaagcaaccgagaaaagaggcggcagaagaa

SEQ ID NO: 147316 - RNA, 71 nt, Homo sapiens
cagagaagccggcgagacagccgaacgccggaagcacaaggagcgccaaaaaagagggggcgaagggaaaa

SEQ ID NO: 147317 - RNA, 59 nt, Homo sapiens
ccacagcccagggaaggcaccaaaagggggggcaggaaaggaagagaccagaagagcag

SEQ ID NO: 147318 - RNA, 60 nt, Homo sapiens
ccccacccccaagaaccaacccccaaaggcgggacaggcccaggcaccccgaagccgcac

SEQ ID NO: 147319 - RNA, 78 nt, Homo sapiens
gaaaagggaacaggagaaaaaagggagacagagaaaaggcacagacggaggaggaacgcacagagagaagagaacgag

SEQ ID NO: 147320 - RNA, 70 nt, Homo sapiens
gaagacgacggacagagagacacagaacacgcgcggacagaagcggccgggccaaggacgacaaagaccg

SEQ ID NO: 147321 - RNA, 36 nt, Homo sapiens
accagacggcgccccaagaccagaacagagacagac

SEQ ID NO: 147322 - RNA, 81 nt, Homo sapiens
ggagaaggccgagggccgggagcccgcaccgggccggcagaaacgaaggaggcccaaccacaaaaggagccgacggaaccc

SEQ ID NO: 147323 - RNA, 85 nt, Homo sapiens
cggccgggggcccagcccgggcggcgcggccaggggcaaagaaaaaggagagaaaaagaggcaaaacaacaagaagaaaagagaa

SEQ ID NO: 147324 - RNA, 78 nt, Homo sapiens
gcccgggacggcggcggaccgcgcgagcagggcgcgccccgcagcagagacgaagaggagcagaaccagaagggacac

SEQ ID NO: 147325 - RNA, 74 nt, Homo sapiens
agaaaaccagaagcacaaggacagagcacccaccacaggagaagggagggcaagcagaaagcagaggaaaacga

SEQ ID NO: 147326 - RNA, 67 nt, Homo sapiens
cccagagcacgaaaagaaacaaagcgcaagcggggccgcaaggccaggcgcgcagaggcacccaacg

SEQ ID NO: 147327 - RNA, 79 nt, Homo sapiens
cccaacccagcgcaaaggaagaggaaggaaagagcggccccccggaaaacggcagaacgaggggcgagccgggccaggc

SEQ ID NO: 147328 - RNA, 66 nt, Homo sapiens
ccaggaaaaagacagcccgcagcacgaccagcaggaacgacaacggcaagcggagaagagcaaggc

SEQ ID NO: 147329 - RNA, 75 nt, Homo sapiens
gagcccggggacggcgaggccccagaccacacggcgggaccaggacggaccaacacaagcacccaaaagaccgaa

SEQ ID NO: 147330 - RNA, 56 nt, Homo sapiens
aaacaagcgcacgaaacacgaaaggcaggagaggagccaagcccaacgggacggga

SEQ ID NO: 147331 - RNA, 73 nt, Homo sapiens
aaggacaacagcccgacaaccagaacagaccacgggagaaaaacaagaaacagcagccaaccaggcccgagac

SEQ ID NO: 147332 - RNA, 76 nt, Homo sapiens
gagacagcagccaaacccccagggggacggaagcggcagcgggcagccggcccagcacagggagcagaaccccagc

SEQ ID NO: 147333 - RNA, 79 nt, Homo sapiens
acggggagaaagaaggcaaaggaacccgcgcccagaagggaaggccacggacggggaaacgcaaggcaaccccgcaagg

SEQ ID NO: 147334 - RNA, 75 nt, Homo sapiens
gcgcgaaaacaacaggccggagcacaaaggacacaaggggaaaaagcgccaaaacggccccccgaccacccccag

SEQ ID NO: 147335 - RNA, 76 nt, Homo sapiens
cagccaaccaggcaggccccaccgaaggcggccagacgggaggcagagcagccagaccggccagaaaggcacaacc

SEQ ID NO: 147336 - RNA, 77 nt, Homo sapiens
ccagggaaaggagcagagagagagagcagaagcagagagcgcagaagacaggacaaaaagcccacacaacaccagga

SEQ ID NO: 147337 - RNA, 78 nt, Homo sapiens
gccaagacagcacggcggcgggcaaggacggcggcgcccagccggcccgccgggggcacccaaaggccccacgggaca

SEQ ID NO: 147338 - RNA, 70 nt, Homo sapiens
gaagacagaaccagaaccagccccagacaggacgccccgacaacaaggaccagaccccacaagaaaacac

SEQ ID NO: 147339 - RNA, 35 nt, Homo sapiens
agacagagccgaccaaaagagccggagggaaggag

SEQ ID NO: 147340 - RNA, 77 nt, Homo sapiens
gggagccagaagcacaggcccgggcgaaggggccacgcgacgccacccgaacaagcgaagcgggcaccaaaccggaa

SEQ ID NO: 147341 - RNA, 75 nt, Homo sapiens
aaccgggagcccaggaagcgcagacacagcccgccccggggaagggacaacagcagagaaaggcgggacgacagc

SEQ ID NO: 147342 - RNA, 73 nt, Homo sapiens
caaaaaaggaagcgaaacagcccgcacagcggacgcaaagaaaaagacggcaaaagaaaagcagccgggaccc

SEQ ID NO: 147343 - RNA, 119 nt, Homo sapiens
cacccccggccccgaagacaaaacccgaggcccgggaggagccaacaagcgcacggagccccaagcgcagagaccccagcacccaagagccacccacagaggcacagacacaaaaaccc

SEQ ID NO: 147344 - RNA, 54 nt, Homo sapiens
aagggcaggaagaccagggcaggaagggggcgcacagcaaagaagcaacagcca

SEQ ID NO: 147345 - RNA, 76 nt, Homo sapiens
cagaagaaagccacaggccgagagcaaacagccaagaaaaccggcaagccccagaggcagcacaggaaacccgccg

SEQ ID NO: 147346 - RNA, 75 nt, Homo sapiens
agacaacccccggagccggggccacacccacggaaacaagccaccagaagaacagaagaagaagaaaaaggcgga

SEQ ID NO: 147347 - RNA, 67 nt, Homo sapiens
aacccacccagcacaccccgcgaaaggaggaggcacagagaggaagaaaggacaagaaaggcacgca

SEQ ID NO: 147348 - RNA, 94 nt, Homo sapiens
ggacgcggggcgcaccaccacgggaggggcccgcaggaaggacggaccaggggcaggacacaaacccccaggaacagccaccgggaggagaacc

SEQ ID NO: 147349 - RNA, 58 nt, Homo sapiens
cacaacccgcaaccccccaaaagcgaggaaagagcccgggaccaaggcagcaagggac

SEQ ID NO: 147350 - RNA, 74 nt, Homo sapiens
cggacaagaagggacacacgcgccggcgcgcacacaccacgggcgaggcaacgaggcccacgcggaccggcagc

SEQ ID NO: 147351 - RNA, 79 nt, Homo sapiens
gcgcggccgagaccggccgcagcgccgccgccgccgccagggcagcaggaaccgcacaagaggagaccccaacaaacga

SEQ ID NO: 147352 - RNA, 31 nt, Homo sapiens
agagccagagcacacggacgcggcccagaga

SEQ ID NO: 147353 - RNA, 70 nt, Homo sapiens
aagagaggagggagaacacagaaaccggccccaggggaacaaaccccccacggcccgagcacacagaaac

SEQ ID NO: 147354 - RNA, 76 nt, Homo sapiens
cgggccggccagcgccggaaaccaacaaggagcagaaccaaaaagcgccaagcagccagcgaaaacagcacaggca

SEQ ID NO: 147355 - RNA, 87 nt, Homo sapiens
acaagccccaccagaagagggagggaccaaggaggagacaaggacaccgcgcaaggccggcagaaggccacccaccccaccagagcc

SEQ ID NO: 147356 - RNA, 74 nt, Homo sapiens
cgggggcgcagagcgggcaagagggcaggaagcacaggaacaaaggggccagcccacagcgcacagcaaaaccc

SEQ ID NO: 147357 - RNA, 70 nt, Homo sapiens
gagcgggcacccgcgcggccgcgggcgcgcccgcagcgcccgccacaggaacccgcgcccagaagggaag

SEQ ID NO: 147358 - RNA, 83 nt, Homo sapiens
gcaccggccgaggcaaaggcacacaggcccgagcacaaacacaagaaacgcacgcccgccagcgagaagagagagaagcagga

SEQ ID NO: 147359 - RNA, 67 nt, Homo sapiens
caggagcgaagagcgccgacaagggggccgggacggcgacccacccaaccaagcggagggacagaca

SEQ ID NO: 147360 - RNA, 76 nt, Homo sapiens
gagcgcgagcggcgcgagaaaaacaggccgcgagcaagccgagcgagacgaagagaccagaagcacgcaaagcaaa

SEQ ID NO: 147361 - RNA, 63 nt, Homo sapiens
ccgcccggcgcccagagcaggacccggccgggaccagccgaaagaccacacagggaaacgacc

SEQ ID NO: 147362 - RNA, 50 nt, Homo sapiens
gaaacaagagccgcaaggacagacagcacccacacagccgacagagacag

SEQ ID NO: 147363 - RNA, 60 nt, Homo sapiens
agccccggccccagaagagggcggacacgggccacaccacgaggcgagccaagagcgagg

SEQ ID NO: 147364 - RNA, 59 nt, Homo sapiens
aagccaacgccggcgaagacccagggagaacccaccacgagaggcaaaagccaggaagc

SEQ ID NO: 147365 - RNA, 79 nt, Homo sapiens
gagaggaggccgccagcagaggcggagcccgcagaccgcagaaggccggagacaccagcaggaggcaagcgccaggacc

SEQ ID NO: 147366 - RNA, 83 nt, Homo sapiens
gccccagccacccaggccccgccgcccgggggcgccgcccaccgcgcccgccgccagaggaccaagaacagcagcacgcaacc

SEQ ID NO: 147367 - RNA, 86 nt, Homo sapiens
cagcgggcaggaaagaccgaacaacacgacagcgacacagaggagccagaccaaaaagagccaagcgagaagagagaaccacaaag

SEQ ID NO: 147368 - RNA, 91 nt, Homo sapiens
agcgcgggggcccgcgcagcagcgaccacgaagacgaccccgacgcaggccaggagccgcggacagaagccgagcacggccgagacaaaag

SEQ ID NO: 147369 - RNA, 84 nt, Homo sapiens
cccgagaaggaggggagagccacacaccccgaccacgcggccgagagggcccacgagacgcgaacaaacgccgcgccgccagaa

SEQ ID NO: 147370 - RNA, 73 nt, Homo sapiens
agagagcccggggccagggcgaagcacgccaccagccacggaaagcagagcaacccccgcgacgagcccccaa

SEQ ID NO: 147371 - RNA, 74 nt, Homo sapiens
accgaaagaggaggaaaaacgagccaaaccggaaagaggacccgaacacggaagaaagacacgcaggaggccgc

SEQ ID NO: 147372 - RNA, 78 nt, Homo sapiens
agaacacaagacggaggaacaggaagggacaggaaacgggcaccggggacagcccagaccaaaccccagacaaaaaaa

SEQ ID NO: 147373 - RNA, 84 nt, Homo sapiens
gcgaaccgagcgggcggcgggcgcgcgcaccagggggagaaacccgggaccagaccggaaaaggagaaagaaacaacgagccca

SEQ ID NO: 147374 - RNA, 79 nt, Homo sapiens
cacgccgcacgcgccgccaacggggcgcccaagaacaaaccaccgggagaaccaccaaaagaaacggccagaaaaacca

SEQ ID NO: 147375 - RNA, 67 nt, Homo sapiens
ggaccgaagcgccgggagagccaaacggggacgcaagagaaagaagcaacggggaaaccacccgacc

SEQ ID NO: 147376 - RNA, 56 nt, Homo sapiens
ggaagggaaacccccaaggaagcgggacaccccaaccaaagagggaaggagagaag

SEQ ID NO: 147377 - RNA, 59 nt, Homo sapiens
gccgaggaggcccgcggggcaaccgccacgagacaccaaggaaccagaacccggcgaaa

SEQ ID NO: 147378 - RNA, 72 nt, Homo sapiens
gccgcgcagcccggccgccggcccccaacagcgccggagggcggagagaacagcggacaaaagaagggacag

SEQ ID NO: 147379 - RNA, 76 nt, Homo sapiens
gcaaaagaacgagcaaaggaaaggccacacacaaaaaggcaagagcaacgaaccaaagcaaaggaggccgggggaa

SEQ ID NO: 147380 - RNA, 108 nt, Homo sapiens
gcaaggcaagaccgaacagaaggaacgacgcggaccagaagccagagcgaggacgccggcagcacaagagcaggggggggaggaggaagcgcccccaagacgggcgcc

SEQ ID NO: 147381 - RNA, 72 nt, Homo sapiens
gccggagccgggcggagggggaccccggcccggcagaggcacaaaaaaccgcaacgaacaacaacacacgca

SEQ ID NO: 147382 - RNA, 83 nt, Homo sapiens
ccgggggaccgcgcagcggggacgcgaggacccgggcgggccccacccgggaaacaacagacgggaagagaggggggagcagg

SEQ ID NO: 147383 - RNA, 69 nt, Homo sapiens
cgcccgacccgccaccgccaggccaggcagaacaagcagaacagacgacaaacggaaggagcaaagggc

SEQ ID NO: 147384 - RNA, 98 nt, Homo sapiens
cgacccccgaacccccagcccaaacccggaaacccagcggcccagccggacaagcagaccggaagaccgacggaagaccacaccccgagggagcccag

SEQ ID NO: 147385 - RNA, 82 nt, Homo sapiens
ccgcccagccgccgcaggcgccgcacggaggcgcccggggacggggccgcagggagggggcagggcccagggaccggaaagc

SEQ ID NO: 147386 - RNA, 83 nt, Homo sapiens
ggggagccaagcggagacacaggcaaacgcagaaaagagagccgggcgcggaaacgagaaggccgcgggaaaggcaaaacccc

SEQ ID NO: 147387 - RNA, 68 nt, Homo sapiens
cgccaggcggagcagaccaccggacacaaaaacagacgggaagccaaggaaggccagacacggaaaca

SEQ ID NO: 147388 - RNA, 72 nt, Homo sapiens
acaggaaaaagcccgaagaccaaagcacaggaccagccgaagaccgcaaaaaagccagagccggaacccgaa

SEQ ID NO: 147389 - RNA, 81 nt, Homo sapiens
cacccgcagaacacaaccgcaacaaaggggacaacaggagaagcggaaggagaccacccaccaggcgcaggcccagcagga

SEQ ID NO: 147390 - RNA, 84 nt, Homo sapiens
gggaaaggacaaaaaaaccggaaaaagaagccaagaagcaaaaaagggacgcaagaagaaccaccagggcaaggagagccaagc

SEQ ID NO: 147391 - RNA, 71 nt, Homo sapiens
ggacggggacccgcgacccagccccccacccaacgcgaaggaaggcagagcccacaaacccaagcagcaaa

SEQ ID NO: 147392 - RNA, 78 nt, Homo sapiens
cgacaagggcggggcaaccaaggaaaagacaagacacgggaaaaggcccagcggagacaaagggagcccgcacccagg

SEQ ID NO: 147393 - RNA, 71 nt, Homo sapiens
gggccacggggcccacaggacggggagacagcagcaggaacacaggacccaaagacaggaccacgcaccag

SEQ ID NO: 147394 - RNA, 71 nt, Homo sapiens
gggacgcagagaagcaggacccgggccagggcagcaccggacccacaccgagaccccaccgccaggaagga

SEQ ID NO: 147395 - RNA, 53 nt, Homo sapiens
gcagggcgcccccggggcagggcacagcagccgggaagaagcagagggccgca

SEQ ID NO: 147396 - RNA, 73 nt, Homo sapiens
ccggcgacccaccggcggagcgaccaaagcagggcacccccgaaggacaggcacccggcccacccgcggaggg

SEQ ID NO: 147397 - RNA, 76 nt, Homo sapiens
cagaaccgccgcggcagagaggggcaccccagaggggggagcagcagccaaacagggccaggagggggagagaagc

SEQ ID NO: 147398 - RNA, 76 nt, Homo sapiens
gcgccagcaaaacaagaaacaaaacgacaaggggacaaacggagccggagagcgcgcaagcaagaggagcaggaca

SEQ ID NO: 147399 - RNA, 82 nt, Homo sapiens
cgcagcagggggcagaacccagaggcgggaggggccgggaggcagaggggcagggcccccaaaacacaagaggacggagaag

SEQ ID NO: 147400 - RNA, 82 nt, Homo sapiens
gcgagcgcgaggaaaaggcggcgggagcggcgaagaggaaaaaaaacagaacaggaggggagagggcaggaaccaccgccca

SEQ ID NO: 147401 - RNA, 74 nt, Homo sapiens
aagccgcgagaaccaacccaaagggggggggggaggccaggagaagaaacacgaggagcagagcaaaggaagag

SEQ ID NO: 147402 - RNA, 81 nt, Homo sapiens
ggagccaagaccacagcagcacccaggcgcgcgggccccgacagccgccccacaccagacacaaaacaaagaagaagagcc

SEQ ID NO: 147403 - RNA, 86 nt, Homo sapiens
ccgcaggcggcgcgcgagcggagggaggcggcgcgccccagaccaccggcagggaacagccgagcagaccgaggaggcccaccagc

SEQ ID NO: 147404 - RNA, 48 nt, Homo sapiens
aggaccccaagcaggggcgggccagccaaagaggccagaagaggaagg

SEQ ID NO: 147405 - RNA, 75 nt, Homo sapiens
ccccgggggcaggacgagcgcgcgagggcggagaacggaaaagcaccaggaagcagagaggaccgcagaagggaa

SEQ ID NO: 147406 - RNA, 78 nt, Homo sapiens
cagcgacgggaacgggagcaaaaccgggaacagagggacagaggccacgacaggcacaggcaaacagggacacaagga

SEQ ID NO: 147407 - RNA, 70 nt, Homo sapiens
agaaaaccgcagaacgaccagggcccagggaaccccaaccaaccacccgcgcacccacaacagagcaccc

SEQ ID NO: 147408 - RNA, 81 nt, Homo sapiens
cggacaggccgcagccgccggggcagcaagcagagagcggaaggaccaagaaggaagagcaagaccgagacaaggcaaagg

SEQ ID NO: 147409 - RNA, 84 nt, Homo sapiens
cgccgccgaggaggcgagcagccgggagacaccgccaccgccagggaaacagcacaacggaacaacagggaagacgggggggcg

SEQ ID NO: 147410 - RNA, 56 nt, Homo sapiens
cagagcgagagaaaaggggaagaagaaaacagaggaaaaccgaaggggggcacgca

SEQ ID NO: 147411 - RNA, 57 nt, Homo sapiens
acgcacgagcccggcgccggcaggccccgggccgaagagaagacgggacacagagca

SEQ ID NO: 147412 - RNA, 79 nt, Homo sapiens
ccgccgcacagcccgcgggccagcgccgcgcccgagccccggcgggaggcccgagagcccccagacaggggcacgagga

SEQ ID NO: 147413 - RNA, 76 nt, Homo sapiens
cacagccggaaagcaggaccgcgacggcagcagagcagacagcccaggccaagacagcagccacgaggaaaaagaa

SEQ ID NO: 147414 - RNA, 82 nt, Homo sapiens
ggagaaaaaaacgggaagagaccgccaggaaaagagggacaaaggggaaaaagggcggaaaccggagaaaaaggcaaagcag

SEQ ID NO: 147415 - RNA, 50 nt, Homo sapiens
agcagcagcgcgagcgacaacgggacgggaaaccccgagaaaagcacagc

SEQ ID NO: 147416 - RNA, 84 nt, Homo sapiens
gccacacggccgcaccgcgcgagcacgggcggagcgaacggggcaggaccgcccccgcaggaagaggagcccccccgccacccc

SEQ ID NO: 147417 - RNA, 55 nt, Homo sapiens
ccggggcaaaagggacaagggacaaaccggcgaccacacacggggacgacgggga

SEQ ID NO: 147418 - RNA, 58 nt, Homo sapiens
acgcgcacgggaaccgaagagagccgggcacgccgaccggcgggaaaacaccccgcca

SEQ ID NO: 147419 - RNA, 76 nt, Homo sapiens
accaggaccaccgcggcagcacgcggcggaggcaaaacccaacgaggacgggggaaagaaggaagggaaaaaaacc

SEQ ID NO: 147420 - RNA, 112 nt, Homo sapiens
gaacacgagaccggagaaagacaagccgaggggaggcgggaccggccgaaaccggagaagcgagaaccgagcggccggagcagaaacgagcggaccacggagcccgggaggg

SEQ ID NO: 147421 - RNA, 93 nt, Homo sapiens
ggcgcaggcagaacaccagcacgagcacccagcaagacgagcagcaagggcaggcagagacggaagagaggaaaaagagaaaaaagcaaaaag

SEQ ID NO: 147422 - RNA, 66 nt, Homo sapiens
ggagacaaaccccagacgcgccggagggccaggggccgggagaagcgaacaaagcaagaagaggaa

SEQ ID NO: 147423 - RNA, 79 nt, Homo sapiens
cggaagaaccgagccgggcagccaggacagggcaaccaggcgggaccgcggccgcagggcaccagggcgagaccccgag

SEQ ID NO: 147424 - RNA, 80 nt, Homo sapiens
acacccagcgaccacgcaggcaccccggccccaggaaaagaaggaggccagcgggacacacaaagaaagacgaaggacac

SEQ ID NO: 147425 - RNA, 80 nt, Homo sapiens
agcgccgcgggccgcaggccgcgagcagcggacgccggccgccgcaggaggccaacgagggacggacagcgcgacagggc

SEQ ID NO: 147426 - RNA, 39 nt, Homo sapiens
caaaccccaaccagggacaagggcggagagagacgaacc

SEQ ID NO: 147427 - RNA, 82 nt, Homo sapiens
gagagagcgagcgagggggggcgcgccggaaaccggagcgcgcagcaggggaccaaaagaacccagccaacccgcagaggga

SEQ ID NO: 147428 - RNA, 79 nt, Homo sapiens
ggaagcgcgccgacgcgcccagcagccccgccacgcagcgagcagcaggagagagcccacgcggggcagcaggacccgg

SEQ ID NO: 147429 - RNA, 75 nt, Homo sapiens
gcccgcgagcacaggagggagagaggaccccgggacacgaaagccaggaaaggacaaaccggcgaccacacacgg

SEQ ID NO: 147430 - RNA, 69 nt, Homo sapiens
aggccgaaaagacagagaggggaaaccccgaaaggggggcagggagagaagggcaaggaaggcccaacc

SEQ ID NO: 147431 - RNA, 45 nt, Homo sapiens
cgaggcgggcagccggggcgccaggacaacccccaagaaagggag

SEQ ID NO: 147432 - RNA, 98 nt, Homo sapiens
gcgaagcgccgggcagccgggaacaggcccggagcggccgccggcccaaagggcggagaacggaaaagcaccaggaagcagagaggaccgcagaaggg

SEQ ID NO: 147433 - RNA, 70 nt, Homo sapiens
gaacgaacccaaaaggagccaggagaaaaaggacaggggcgaccgacagacaagaacggaaagcagacaa

SEQ ID NO: 147434 - RNA, 80 nt, Homo sapiens
cacggccccggcggccaaacaccgaggaggggggaagagaggaggagacaccccaggaagaccacccaggggacagcaca

SEQ ID NO: 147435 - RNA, 79 nt, Homo sapiens
cccaccgagagagaggacacgaaacagagaggggaaggagcccagcgacggcggagaagagaaacgagggcacacgcac

SEQ ID NO: 147436 - RNA, 74 nt, Homo sapiens
ggaaagccgggccccgagggcggaccgaggcgaacaagaggcgccagcgggcgcgccggaagaacagcgccacg

SEQ ID NO: 147437 - RNA, 83 nt, Homo sapiens
ggcccggcggggacgagcaggaagcggcgcaagcgggcaggacaggcgcgacgcccccgcagcagaagcagaaggaggaaaac

SEQ ID NO: 147438 - RNA, 61 nt, Homo sapiens
gccgccacggaggcaaagcagccggacagcggccagagagccaacgggccggcaagccacg

SEQ ID NO: 147439 - RNA, 64 nt, Homo sapiens
accgcgccgcagcgacacgaagcccgggcaagacaacaaaacccgcgggcagaaaggagccgag

SEQ ID NO: 147440 - RNA, 82 nt, Homo sapiens
cggcgccaacacaagcgggggacaccccagggccggagcacaccaggcccagcccagcccaaggccaaaaagcaaaggacca

SEQ ID NO: 147441 - RNA, 51 nt, Homo sapiens
acaaacaaggacccagagaagggacaagagacgaagagcaaaagagccgag

SEQ ID NO: 147442 - RNA, 58 nt, Homo sapiens
agaaagaacagaaacagcggaaacagaagagacggagaagaacacccaggaggaagac

SEQ ID NO: 147443 - RNA, 78 nt, Homo sapiens
gccacaccgagcgcgacgcagaggggcgcaccggccaggggagcgccgaccacccggagcgaggcaaccgcagagcgc

SEQ ID NO: 147444 - RNA, 87 nt, Homo sapiens
cccggacagaggcaagcaggggcgccgggggccagagaggcggaagaggaggccgaggggagacggaagcggaagcacacgccagac

SEQ ID NO: 147445 - RNA, 60 nt, Homo sapiens
ggcggccggaaaaaggcgacgggcagaggaaggcggacccaaaaggcgggcgaaaacgcc

SEQ ID NO: 147446 - RNA, 68 nt, Homo sapiens
caacccaggcaaccaacaggggacgcacagaaaagacaaaacaaagacgcgccacaggaagaacgcaa

SEQ ID NO: 147447 - RNA, 78 nt, Homo sapiens
aggagggaacagcccaggagccagagaccgccagagcggaacgaccccagagcgagcccgcagcagcccagaaacaaa

SEQ ID NO: 147448 - RNA, 49 nt, Homo sapiens
ccaaagcagagacagagcacagaaaggcgcagacgaagagaggcacggc

SEQ ID NO: 147449 - RNA, 69 nt, Homo sapiens
cccgggaacggcgggggcacgggcccgagagcacccagccccagcgagcgaccaccagcaggggaaaaa

SEQ ID NO: 147450 - RNA, 77 nt, Homo sapiens
cgcggggggcaacgggacccggccccaaccacccccgccccccaggcaggaagaggagaggcggacgcagggccgaa

SEQ ID NO: 147451 - RNA, 60 nt, Homo sapiens
gcacacgggacaagcggcaacagacaagaacaaccacgcaagaaccagaggcgggaccgg

SEQ ID NO: 147452 - RNA, 74 nt, Homo sapiens
ggagaagaaacgagagagacaccaccagaaacgaaggaggcccaaccacaaaaggagccgacggaacccagacg

SEQ ID NO: 147453 - RNA, 90 nt, Homo sapiens
caacaggaggaagcccaacggaaggcaaacccgaaaccaacacgcaaaagcagacaggcaaaaacacacagaggaagcggaggccaaaaa

SEQ ID NO: 147454 - RNA, 78 nt, Homo sapiens
cacccccagacacacagagacggcacagacagacaagaagaagcccagggagacccagaaagcagaaccacacacaga

SEQ ID NO: 147455 - RNA, 63 nt, Homo sapiens
ggagagacgcccagggggcagagaaaaaggcccaggaagacaaagggaagcgcccgaggaagc

SEQ ID NO: 147456 - RNA, 73 nt, Homo sapiens
cccgacacaccggcacgaaaaacccgcagggcaaggccagagaaggcgggagaaagacacgaaccacagaacg

SEQ ID NO: 147457 - RNA, 71 nt, Homo sapiens
gcgggccccccggcaacgcggcaagccaaagcgccacagggacgcaccaaagaagacagacacgcagaaaa

SEQ ID NO: 147458 - RNA, 68 nt, Homo sapiens
ggccggagacaccagcaggcgccggcgaaagcaacgaagggacgccagaacaagagaaggagagcaga

SEQ ID NO: 147459 - RNA, 75 nt, Homo sapiens
gcgggaaccaccggaaaccgccgcggacccgcacagcacccggacagaacggccgagcgaccaggagaggagccc

SEQ ID NO: 147460 - RNA, 81 nt, Homo sapiens
ggcgcgcacggacgcggagaggggagccgcaggcaaggggaaggccaaggacgagaaagaccccgaaggcaccacagcccc

SEQ ID NO: 147461 - RNA, 63 nt, Homo sapiens
cccagcccgggcccggagcaggacagacccccagccccgccagagcaagccgaaccagaccac

SEQ ID NO: 147462 - RNA, 74 nt, Homo sapiens
gacgcccagccccagaaccgagaaccagccaaaacacacgaacagggaacaagaaacaccgaagaagagcaaga

SEQ ID NO: 147463 - RNA, 70 nt, Homo sapiens
accgcacagacgaccaggcaaggccagagaaggcgggagaaagacacgaaccacagaacgcaacaggaca

SEQ ID NO: 147464 - RNA, 79 nt, Homo sapiens
ccggaacgcgcgcggagggggcggcgcggcaggagcgcggagggacgcaacaaccggccaaggaggcaggagaggaccc

SEQ ID NO: 147465 - RNA, 38 nt, Homo sapiens
aagcgcggccgcaccggccaaggaagaccggacacagc

SEQ ID NO: 147466 - RNA, 82 nt, Homo sapiens
acaaggacccgagaagaccgaacaagccgagagggaaacaacccacgcagaacagaccaagagaggaaagagagagcgccaa

SEQ ID NO: 147467 - RNA, 70 nt, Homo sapiens
cgcccgccccggcacgagcccagcccccggagccaagaagagagcgggcccagagccgacaagcagacca

SEQ ID NO: 147468 - RNA, 78 nt, Homo sapiens
cgaaaagggcgcaccaacaccaccagaaagaaaccacggagccccggaacagccgcccagagggaaggggggacaggc

SEQ ID NO: 147469 - RNA, 88 nt, Homo sapiens
gggcccccagcacccccagccccacccaccgccaggagcccccccagaaggaagaggcccagcagaagggaccgcgagccaccccccg

SEQ ID NO: 147470 - RNA, 65 nt, Homo sapiens
cagaccacagcacagaaacagagaccccccagaaaacagagacaagcaggacaggagggcgaaag

SEQ ID NO: 147471 - RNA, 68 nt, Homo sapiens
acacaaacgagggagcaaggacaccaccagggagccaggagaggagacaggcaaggagccagcaggag

SEQ ID NO: 147472 - RNA, 79 nt, Homo sapiens
cggacaaagaggaggcagggcaccaaccagcggacacacggaaaagggacgggaaaagccgagaaagagaagaagccca

SEQ ID NO: 147473 - RNA, 77 nt, Homo sapiens
gagggacacagccccaaacaggacgaaggcggcgaaggacagcccaaggcggaaaagcgaaggaagccacaagcaca

SEQ ID NO: 147474 - RNA, 74 nt, Homo sapiens
agaaaggcccaccggccgggagggcccagggcggggcccgagcaggacagcaacgaggacagaccccaccgggg

SEQ ID NO: 147475 - RNA, 61 nt, Homo sapiens
aaagacggacggaaccacaaacaaggcgcagagagaaagcacgggaccaggagaggcagag

SEQ ID NO: 147476 - RNA, 80 nt, Homo sapiens
gaagaagggaaggcgcgaggaggaaaggaggacgaggcgcaggggggaagaagaaaacaaaccacacaccaagcacaaaa

SEQ ID NO: 147477 - RNA, 84 nt, Homo sapiens
cagaaaccggagaacaagcagccaccagaccagcaagcaccagccgcgggccaggacccgcccagcccagcaccagcagccaac

SEQ ID NO: 147478 - RNA, 60 nt, Homo sapiens
agcagcacaagcacccagcagcccagcccagacccaagaggagcggaggagccccaggaa

SEQ ID NO: 147479 - RNA, 81 nt, Homo sapiens
cacagcccgcggaggcagcgaggagcccgccgcgccaagacggagcagcggcacgaccggccacgcaagcccaccccgagg

SEQ ID NO: 147480 - RNA, 89 nt, Homo sapiens
cggcagggcaccgcgcgaagcggccaaagccgcccagacggccaccggcgggaggaacaaaagaaggaagaggcccagcagaagggacc

SEQ ID NO: 147481 - RNA, 74 nt, Homo sapiens
gacaggggcgacggcagaggaaggcccacgcggaccggcagcgccaccggaccaccagacaaggacacggccca

SEQ ID NO: 147482 - RNA, 52 nt, Homo sapiens
ccccgaggccgcccggacccagggaaagacacccggcaggcaccggggaggc

SEQ ID NO: 147483 - RNA, 72 nt, Homo sapiens
cagccaaagaaacaagccgggaaagggacaagaagggcaaagccgaagggggccagaagcccaggggcagac

SEQ ID NO: 147484 - RNA, 67 nt, Homo sapiens
agacccagagccggggaagcaagccagaaagccagggacgcagaacgcagggcagacagaagaaaag

SEQ ID NO: 147485 - RNA, 59 nt, Homo sapiens
cacggccggagacccgccgcgaggcgcggacaaggagagcaacacgccacccacaaggg

SEQ ID NO: 147486 - RNA, 78 nt, Homo sapiens
gacaaaaccaagccaaacacaagcagaaggagcgaagaagaggggcagaggccggccccagggggcaaaagcggggga

SEQ ID NO: 147487 - RNA, 81 nt, Homo sapiens
cccggcccgcaggagaggaaaaggagcgagcagacgacaagccgggagcgggcggccaaccagagacaaaaccgacaagcc

SEQ ID NO: 147488 - RNA, 67 nt, Homo sapiens
aggaacgagccaggggaacacaccagaaggagaaaaacagcaggcggaagacaccgggaacgacgaa

SEQ ID NO: 147489 - RNA, 83 nt, Homo sapiens
cggcagccagcgcaagaggcgggcagcacgcgcggaagaacgccccagcccagacacggaacaccggcgcaagagacagaaac

SEQ ID NO: 147490 - RNA, 67 nt, Homo sapiens
agaccagaacaccccagaagcaggaccggccgggccgcagcacacaccggccacaccacaccccacg

SEQ ID NO: 147491 - RNA, 77 nt, Homo sapiens
cagggagaacggagaaacacagaagagggagcaaggcaaacggaccagaccccacaagaaaacacacaaccacaggc

SEQ ID NO: 147492 - RNA, 81 nt, Homo sapiens
cgggagcccacacacaggaccgccccggacaggaggagaaggccgccaagccacggcagagacaacgggaccccaaggcac

SEQ ID NO: 147493 - RNA, 76 nt, Homo sapiens
gccagcgcaggaagaagaacgcgcaggcgaggggaagagagggccagaacgaagcacaacaggcagcgggaaaacc

SEQ ID NO: 147494 - RNA, 75 nt, Homo sapiens
caaacaaggaccgggaaagaggagacaaaccccagacgcgccggagggccagagccagacgagggaggagagcga

SEQ ID NO: 147495 - RNA, 75 nt, Homo sapiens
gccggcgaggaggcgcccggagcggccgccccagcggcaccgccgaggcagacccgaagccagaaacgcacccaa

SEQ ID NO: 147496 - RNA, 78 nt, Homo sapiens
ggcgggaggagccgccccgagcaaggggagaagggaccacgcccacgacggagcgcgcggccacgagaggggcaccag

SEQ ID NO: 147497 - RNA, 74 nt, Homo sapiens
cgaaccgaccgggcgacccagaagcccgagagacaccccaccgagacgcgccacacagggaggcgcgaggcgga

SEQ ID NO: 147498 - RNA, 82 nt, Homo sapiens
ccacgaccgcgcggagcaggcggaggcggaaagaaagccgcgaggacaaggcaagcaggcgcagcaagagccggagacacgg

SEQ ID NO: 147499 - RNA, 74 nt, Homo sapiens
gaacgaagggaaaaaggagaaggggaaaagcacgaaacaaagaaagaaaccaagggggacaaggaggaaaacaa

SEQ ID NO: 147500 - RNA, 78 nt, Homo sapiens
gcggggccgggcgccggcgcgcgcgccccgccccaagcaccgcagaggccgggaagaaggagggacacagcagcgcgg

SEQ ID NO: 147501 - RNA, 63 nt, Homo sapiens
gccgccggaagcggggggaccgcacgggcgaccccgcgggaaaggaagacccagaagcagaga

SEQ ID NO: 147502 - RNA, 35 nt, Homo sapiens
ggacgaagaagccggccgaaaaggaaaaggagcca

SEQ ID NO: 147503 - RNA, 73 nt, Homo sapiens
aaaacgcaggaagccgagcaaaaggaggcacggggggccacgggccccgaccgcccacaagcgcacgggggca

SEQ ID NO: 147504 - RNA, 79 nt, Homo sapiens
gagcaaggccacgacccacgagacaggggcccaagaaaaagcaccggaccacggaccgccggcaccggggagacaacgg

SEQ ID NO: 147505 - RNA, 68 nt, Homo sapiens
agagcaggggagagaaccaacacaccaacgccaaacgcgaaagggagaaagaagaacgcccggaggcg

SEQ ID NO: 147506 - RNA, 64 nt, Homo sapiens
agccggcagcaaaacagccaaaagcaggccggcaccggaggcagaacccaaggggcaggaagag

SEQ ID NO: 147507 - RNA, 77 nt, Homo sapiens
ggagacccagcggcgccgcggagggaccccagagccagggcagaaacccccaccaggcgggcgccacacggcacccc

SEQ ID NO: 147508 - RNA, 82 nt, Homo sapiens
agcgggcgggcggcgcggcagcgccaggagacggacagcgaggaacccgccgcgccggaaaccgcacgaggaaccccaaaaa

SEQ ID NO: 147509 - RNA, 86 nt, Homo sapiens
gcccaggaacgggcgccacaccggacacaggccaggccaccggcgccagagcaagcccgccccgagccaaaggaagaaaagcgagc

SEQ ID NO: 147510 - RNA, 85 nt, Homo sapiens
acgcgccggaggaaagaggaagacaccaggcgcggaggagggaggggggaagacagggcccagcaccacaggacgggccgggaag

SEQ ID NO: 147511 - RNA, 87 nt, Homo sapiens
ggccgagcaggcgagcgaacgacgagacaccaggcgccgagaaggccagcagagaaacaggcaggagaggcccacaggcgcggacgg

SEQ ID NO: 147512 - RNA, 81 nt, Homo sapiens
cacagagcggcccagcacaaccgcagcaagcccagagggaggagagaagggcggcaggggcggacgacggcgggcaccgac

SEQ ID NO: 147513 - RNA, 70 nt, Homo sapiens
aaaaacaaaacgaaccaggacggcaacaaccccgggggccaaggaaacggaagaccaacccagcaacaca

SEQ ID NO: 147514 - RNA, 73 nt, Homo sapiens
ggacaggcagccgaggcgcccccgcgcgagacgaagaagagggaccagacgcggcgcacaagagaacaaacaa

SEQ ID NO: 147515 - RNA, 83 nt, Homo sapiens
gcgccggggcggcggcggcccccgccggcggcgcgcccgggggcccggcggcccccaggcacaaaaagggcaagaaagagaag

SEQ ID NO: 147516 - RNA, 90 nt, Homo sapiens
cgcggagccgcgcagccccggagcacgagccggagacacaggccccacccccaaggggacaccagggagcggcccaggcccgagaaagac

SEQ ID NO: 147517 - RNA, 74 nt, Homo sapiens
ccggcagacccggggaccgggaaggcagcccacagcaagcacgccgacacaaagggaccgccaggcacccccca

SEQ ID NO: 147518 - RNA, 75 nt, Homo sapiens
ggaagcggaggagccccggaggcagagcggcgccaggacaaaccggcgaccacacacggggacgacggggaagcc

SEQ ID NO: 147519 - RNA, 51 nt, Homo sapiens
gagaacacccgcagcacaagagaggggacacgagcaaaaacgacaacacac

SEQ ID NO: 147520 - RNA, 55 nt, Homo sapiens
cgaggcacggacagcggcagcagggcgagggcagacaccccaggagcgggggcca

SEQ ID NO: 147521 - RNA, 77 nt, Homo sapiens
gcaaaaagacccaccaaggaagcagcggccacgccaggaaagaaagaaaccggggaagcccaccggcgggaagcgcg

SEQ ID NO: 147522 - RNA, 79 nt, Homo sapiens
ggaaccgacacggcagacaggaaaacccgaggagagagcccaaaagagccaaagccagcgcaaacagccgaagcaaaga

SEQ ID NO: 147523 - RNA, 75 nt, Homo sapiens
accacccccagcacccccgcggaacaagcaacgaagacagagaaagcgcagacaaaggggaacaggaagcagcgg

SEQ ID NO: 147524 - RNA, 72 nt, Homo sapiens
aacccagccgcacgcccaggacgcggcagggaagaaaaaaaggagcaggccgggcccgccagggcacgcgcc

SEQ ID NO: 147525 - RNA, 70 nt, Homo sapiens
ggacagaacgaacaggcaaagcccaaaaggcaaggcacaagggaaaagcaggacaggagaaaagggaaca

SEQ ID NO: 147526 - RNA, 78 nt, Homo sapiens
cgggaccagaggagaccggagccaccaaaaacgaagaggaaaccggcgcgcacagagcacaccccgggagcccacccc

SEQ ID NO: 147527 - RNA, 60 nt, Homo sapiens
gagagacggcggcggaaaaccccaaaaggacaaagggcacccacagccagcaggcaggaa

SEQ ID NO: 147528 - RNA, 80 nt, Homo sapiens
ggaaaggacgaaaaggggcggaagaaaaacaaacacacgcaaaggagaaaggaaccgacagaaggggaaagacccaagag

SEQ ID NO: 147529 - RNA, 74 nt, Homo sapiens
cagaacagacaacaaagaaacaccacccacaggaagaaggacccaaagagcagacaacaccgcaacaggagcca

SEQ ID NO: 147530 - RNA, 77 nt, Homo sapiens
cagagccaccaggacccaccgcccccacacacaccagcaccagagaaaaggaccaagacaagagccggggcacgagg

SEQ ID NO: 147531 - RNA, 80 nt, Homo sapiens
cgaggcaaggagcgaaggagcaccagagaggcaggagagcggcgacaaaaaggaccggagcacaccccaaggaggaaagg

SEQ ID NO: 147532 - RNA, 106 nt, Homo sapiens
cgacccccagaacgaccacccccgaacgcccaagaaaaagaaaagggcaccagccgaccgcgaaggaggacagcagaccgcgaccagcaccccagcaaaacccggg

SEQ ID NO: 147533 - RNA, 49 nt, Homo sapiens
aggaccgcgaacagacagccaggcacaagacagaagccaaaacaggaac

SEQ ID NO: 147534 - RNA, 81 nt, Homo sapiens
agccagaagcggcaaaagaaaacacaggcagacggacaaaaaagaacaggagaagcgaacacacaaaggccagggcgcccc

SEQ ID NO: 147535 - RNA, 77 nt, Homo sapiens
gagccagccgagggaacaggagcagaaaggaaaggaaaaaccccagacagaggccagccggagacccgggcacagac

SEQ ID NO: 147536 - RNA, 84 nt, Homo sapiens
cggaagggcgcgcgcgacgcgggccgggcccgcgcccagccgcgccaggcccagacacgcagaggagacccgaaccggcaacag

SEQ ID NO: 147537 - RNA, 85 nt, Homo sapiens
accgccggagcaacgaaaagagcccggaaggaagagacaggaggcagcagacggacaccagaacaaggaccgggagaggggacag

SEQ ID NO: 147538 - RNA, 78 nt, Homo sapiens
cggacgccagccccacaacagccggggggggcacagagccccggaagacagcccccagcgaccagacccagggccaga

SEQ ID NO: 147539 - RNA, 80 nt, Homo sapiens
gcaagaaaagcccgggagcagaagggaggcccaagacccacaacaaaagcgaaagacaaacggcaaagaagccaacaaca

SEQ ID NO: 147540 - RNA, 73 nt, Homo sapiens
agagagagcggaaacgagggaaaggggacaagaaaaccagaaacgggggcccgacaagacacaaaaagggaac

SEQ ID NO: 147541 - RNA, 64 nt, Homo sapiens
aaccagccaagagccaccggaacaagcgaaccagacccagggggcagaaggcaggcaaggacac

SEQ ID NO: 147542 - RNA, 73 nt, Homo sapiens
accggacccggcccgggagcaaagggagcgcgaaggacggaggcccagaagggagaaagccggccaacccagc

SEQ ID NO: 147543 - RNA, 59 nt, Homo sapiens
cgacacagccggacccccaccgcggccagccacgggacagggcggagaacggaaaagca

SEQ ID NO: 147544 - RNA, 69 nt, Homo sapiens
agccgagacacccaaccagcgacccacaccacccagggccacaaaggagaacacgagagacacaagaag

SEQ ID NO: 147545 - RNA, 79 nt, Homo sapiens
ccgccgggagccagaagcacaggcccgggcgaaggggccacgcgaaaaccgaaaccagcccccaaggggaaccagccag

SEQ ID NO: 147546 - RNA, 89 nt, Homo sapiens
gcaccgcccgaaaccgcacggcacacagaccgccggcacaggagcggcagggacccggcagcaaccccaacaaacgccagaggcagccc

SEQ ID NO: 147547 - RNA, 66 nt, Homo sapiens
caccaaggaagcaaaagccccagaacagcccaaaaggcagagcgaggagagaagaaggagggaaag

SEQ ID NO: 147548 - RNA, 69 nt, Homo sapiens
ccccacaggccgaggagcaggcagacagccacacacacccccgccggcgcacaccacccgagagcagcc

SEQ ID NO: 147549 - RNA, 76 nt, Homo sapiens
ccagaagaacagcaagcgcacaggccgggcacagggagccccaaaaacagccaagccaacacacgcgcaggaagcg

SEQ ID NO: 147550 - RNA, 74 nt, Homo sapiens
gcggggcagagcaggggccggaagcaccaggacagaaagcaagaacagacgggcagggaaggagcacagagggg

SEQ ID NO: 147551 - RNA, 74 nt, Homo sapiens
agacgcagggcgcccccgacgagccccagcacagcagcagccagaccagcagcaacaggcccagcagccacgca

SEQ ID NO: 147552 - RNA, 76 nt, Homo sapiens
ggcggaagacaggccacccagcggggagcacggcgagcagccaggccaggagaggccaggaaaggcgaacacccca

SEQ ID NO: 147553 - RNA, 74 nt, Homo sapiens
cgccagcacccggcgagacgacaggacaacaggcccaacccaagccagggggcccaggaacagcaggcaacaga

SEQ ID NO: 147554 - RNA, 55 nt, Homo sapiens
ccggccccacacgaccgggcagcgcaagaccccgcacggaagcagcaagcacagg

SEQ ID NO: 147555 - RNA, 87 nt, Homo sapiens
cgagaccagacgcggagccaggccgaggggcggacgcggccggcgagacccggcgaagcagagagaacgggcaaaacggaaaagaca

SEQ ID NO: 147556 - RNA, 80 nt, Homo sapiens
gaaggcaccaggagccgagaggaaagccgaaaccaaaagcaacgacaacaggcagcgagagcccagagaagggaagaaag

SEQ ID NO: 147557 - RNA, 50 nt, Homo sapiens
gcaggacgcgaacccgccacgcggccgaggccaacggcgggaggcgggga

SEQ ID NO: 147558 - RNA, 80 nt, Homo sapiens
caaggcagacgggagcgcaaggcgccccaaggccagacaaaacgaggggacaagcgagcagccaccaaagaaagagcagc

SEQ ID NO: 147559 - RNA, 80 nt, Homo sapiens
gcgagaagacacggccagcggaccgggcagcaaggagggacccgaacccacgacacggccggccagcggaccccagggaa

SEQ ID NO: 147560 - RNA, 75 nt, Homo sapiens
ggggaggggagcccgcgcccgccgcgggagagagaccacgccacaacgacagcaacccccggacgggggccgacg

SEQ ID NO: 147561 - RNA, 71 nt, Homo sapiens
cgcagcaaccgagaagaaacagccgcaaagaaggagagaagacgacgcaccgcaggcagacaaaagggcca

SEQ ID NO: 147562 - RNA, 90 nt, Homo sapiens
cggaggcccccgggcaagaggcgcaaacaagccaacccaggaggaaaaacggaaccagcaccagacagaagacgcagaagagcagcgaag

SEQ ID NO: 147563 - RNA, 65 nt, Homo sapiens
gggcacaggcaggcggaaggccaggggcaagcaccacccgagcaagagagcccagaggaagaaaa

SEQ ID NO: 147564 - RNA, 76 nt, Homo sapiens
aagaagggcaagcaggggccgcgaggccagcgcaacaaccaggcaagcgggaaagcaacggcgcaagcggcggcgg

SEQ ID NO: 147565 - RNA, 79 nt, Homo sapiens
accaaggccgagagccggaacaaacgagggcccgggaggaccgacgcagccaggaaaaagaacgaccaggacacagagc

SEQ ID NO: 147566 - RNA, 50 nt, Homo sapiens
ccgcgaggcgggggcccacacaccaccccggaagggccccacaccaaacc

SEQ ID NO: 147567 - RNA, 75 nt, Homo sapiens
cagcgggccgacagagaaggccaccaaggacagggcagcaaggaggcaaggaggccacggggccgaagacaccaa

SEQ ID NO: 147568 - RNA, 73 nt, Homo sapiens
ggccgcgcgccgcgcccgcgccacagggggaaacagcagcacagacagacaagaggcagccaggcagaccaca

SEQ ID NO: 147569 - RNA, 76 nt, Homo sapiens
ggagaaacagcaacaaaaccgcacggaggggccccccccccgcgcacaggagccaaccccacgccgggagaggcag

SEQ ID NO: 147570 - RNA, 59 nt, Homo sapiens
gcacgcgcccgcacccgggaccagcacaagacccgccgggcaggaggagggaagccggg

SEQ ID NO: 147571 - RNA, 61 nt, Homo sapiens
acgccacgaaaccaaaccagcaccgggcaccacaggcaagaggagaaaaccaccaaaaaaa

SEQ ID NO: 147572 - RNA, 72 nt, Homo sapiens
ccggcccacgcccccgcccgcgcggcacggccgcccccagacagcaaagcaagccaagagggcccagccaag

SEQ ID NO: 147573 - RNA, 74 nt, Homo sapiens
gggaaagggaaaaggccaaagcagcacagggcacaaggccaagacggccaagggagccacagggcccagagcac

SEQ ID NO: 147574 - RNA, 77 nt, Homo sapiens
caaaaaagcaaacacgaggccacggggaaacacagcagaacacagcagggacaggaccagaaggagagagagacaga

SEQ ID NO: 147575 - RNA, 77 nt, Homo sapiens
ccccagcagcacgggcaccagaggagagagacgggcacaagcaaacggagaccgggacagaccaaaagcgccgcaca

SEQ ID NO: 147576 - RNA, 69 nt, Homo sapiens
gaacaacacagggaggccaaagaagaccacgcagggcaggaagcaggggccagcgcggagagacgggcc

SEQ ID NO: 147577 - RNA, 86 nt, Homo sapiens
cagcacacccgccgcggcgccggaccccaaagagcacagcacacaccgcccggcgcggggggggccccagcccggccgaacgggcg

SEQ ID NO: 147578 - RNA, 90 nt, Homo sapiens
caccccacggccagggccaccaaccccaacccggagagcggcgaggaaggaagacccacaagagaccacgcagagacagcacccaaccgg

SEQ ID NO: 147579 - RNA, 78 nt, Homo sapiens
agcagaagaaaaggagaaggaaagcgaaggggaaggcgccgaagaggacgaagacagccaaaggggaagggacgaaag

SEQ ID NO: 147580 - RNA, 70 nt, Homo sapiens
ggaagagaggaggagaacaccggacacaggagggagagaaacacccaaagaacaagcccaaagggcgaga

SEQ ID NO: 147581 - RNA, 58 nt, Homo sapiens
ccgagggagggccgagccagccgcggccggaggagcccccaggccagacgccggggcc

SEQ ID NO: 147582 - RNA, 79 nt, Homo sapiens
cgccggcgaccggccggggcccagagcgaccgcccccgcggaggggggccgccgccgaccggcgcccaccgccggagac

SEQ ID NO: 147583 - RNA, 56 nt, Homo sapiens
agccaagcagcacaacggaagcgccaccgaccgacaaaaagccaacccacacagga

SEQ ID NO: 147584 - RNA, 75 nt, Homo sapiens
cgaacccacaggaaagaaacaggagagccggcaagccgggggggaccgggcgacaagaagaacaaaccagccacg

SEQ ID NO: 147585 - RNA, 70 nt, Homo sapiens
gggggccagcgacccggggccgagaagacacgccccgacgccacaccgcggggggcacgcggcgggcggg

SEQ ID NO: 147586 - RNA, 82 nt, Homo sapiens
cgacacaagacgggcaccgccaagaacgccagaagcgaccaaccgcgcgcaggaaaagagaggagccagccacacggaaaga

SEQ ID NO: 147587 - RNA, 61 nt, Homo sapiens
cggcgccgggcgcggcccggcgacagggacgaaacgcccaccccgggaagcaggacgcgca

SEQ ID NO: 147588 - RNA, 57 nt, Homo sapiens
cagagagaacagcgcagggcacggaaggggcccagcacaggaggccgaaaccaccgc

SEQ ID NO: 147589 - RNA, 82 nt, Homo sapiens
gcacaccggcacgggggaacgcacaacagccaccgcagcgaacagacccagcacccagcaggcagagggaccaagcccacac

SEQ ID NO: 147590 - RNA, 80 nt, Homo sapiens
aaacacagaaaagccagaagcacaggccagggcagaggaccaacagggcagagagcaaggggccaggaaggaacggcagc

SEQ ID NO: 147591 - RNA, 84 nt, Homo sapiens
gagaccacgggacgcgacgcgccccgcccccccgccggcccccccacggaagggagcagcaacaggaacggcacaaagagacag

SEQ ID NO: 147592 - RNA, 75 nt, Homo sapiens
ccgcgaagcaagcagacgaggcacacgcagcaggcggacgggccggcgcagcaggaggagagagggagccaggcc

SEQ ID NO: 147593 - RNA, 69 nt, Homo sapiens
gaacaagaccaggagggaaggcagagaccgccgacgaaaagagagccaagacaggaaaaccaagcagaa

SEQ ID NO: 147594 - RNA, 51 nt, Homo sapiens
aagcaaccaaaggcgcagaagaggaagaaggaagcgaggacgggggcagcc

SEQ ID NO: 147595 - RNA, 80 nt, Homo sapiens
ccgaggaggcgagcagccgggagacaccgccaccgccagccaaaagaagcaagggaaagaccaggagccagaaaccaacc

SEQ ID NO: 147596 - RNA, 73 nt, Homo sapiens
gcccgggacaccaagaaagaacgaagaaagggcaggcgagagagggggaacaggaccaacggaacaacacagg

SEQ ID NO: 147597 - RNA, 91 nt, Homo sapiens
gacggccgggacagagcagcagacgcagcgccagccgcaccccagcgccaagagagaagggagaccgagccaggccaggagagaagaaccg

SEQ ID NO: 147598 - RNA, 76 nt, Homo sapiens
gacccacgcccggcaggagaggacaaagaagacaggcagaggcaccccaggagcgaggaccacagggaccggcaca

SEQ ID NO: 147599 - RNA, 82 nt, Homo sapiens
cacccccgccagcagccgccggagccagccaacgagcgcaccggacaacagagcggcagaaccgaaggaaaagacgcccgaa

SEQ ID NO: 147600 - RNA, 75 nt, Homo sapiens
acggcgccgcacgaggaccaccaggcacggcacggggcagagcaggcccgggcgggaaggacaccccaaaaccag

SEQ ID NO: 147601 - RNA, 70 nt, Homo sapiens
gcggacggaacagaccacagggaccaccgggccgcagaaggacgccccgaagcgcacaccccccagagag

SEQ ID NO: 147602 - RNA, 76 nt, Homo sapiens
aagaaacagcccagagcccaaggaccagcagcaggaacgggaggagaaagcacaggaggcacaacaaggcaagcca

SEQ ID NO: 147603 - RNA, 81 nt, Homo sapiens
gaccgagaccggaccgagagcggaccgagagcgcgaaacgcacgagaagaacaacccgaagagagacggagccgggcacgg

SEQ ID NO: 147604 - RNA, 75 nt, Homo sapiens
ccacaacgcaaaacaacaccaccccgcccgcagcagccggaaacgaaacagcgcagccaggaacaggacgaagac

SEQ ID NO: 147605 - RNA, 61 nt, Homo sapiens
cgcgaccggacgacgagaacccaacaccgagccccagcagagcagagccgggcaggccacg

SEQ ID NO: 147606 - RNA, 74 nt, Homo sapiens
caggacgcagaaccaccaaaagccaagaaacgcagccaagaagagggaaagaagacaggaaacaagggaaggac

SEQ ID NO: 147607 - RNA, 69 nt, Homo sapiens
caagcagcaacaaacacacgccgaaacaaaggggacagcccaccacaagcaggccccaagcccaacaga

SEQ ID NO: 147608 - RNA, 84 nt, Homo sapiens
gagacgagaccaccggcaacaagggaagaaaaccaccgggaaagaagaagccagcaagagagcagcacccggcccaggagcgga

SEQ ID NO: 147609 - RNA, 83 nt, Homo sapiens
cagccgcacaccaccgcgcgcggcggggcggagggggcagggcagaaggaccaggggcgacgaggcccagagcaagagaggca

SEQ ID NO: 147610 - RNA, 72 nt, Homo sapiens
acgccgacaggcagagccgcaacccgcagagagagacacagccgaaagcggacgcaagagcaagaccagccg

SEQ ID NO: 147611 - RNA, 81 nt, Homo sapiens
gaagaagcagcacccagcagcaaagcagccccaaaccagggagccagaccccagaccccgcacaagagagaaaagcccgaa

SEQ ID NO: 147612 - RNA, 84 nt, Homo sapiens
gagagccgcgcacgcacagacaaggaaccagcgagcggacacagcagccggaccagggaagagcggcggcgacggggaaggagc

SEQ ID NO: 147613 - RNA, 80 nt, Homo sapiens
cggagcgcccgggagcaggaggagagccgcaggggcggagaacggaaaagcaccaggaagcagagaggaccgcagaaggg

SEQ ID NO: 147614 - RNA, 61 nt, Homo sapiens
gccagcccgggagagcgccgggagccccgggagcccagggggacggaagcggcagcgggca

SEQ ID NO: 147615 - RNA, 78 nt, Homo sapiens
aagggaagacagaccagaccacgaggccgaagcccagccgaaggagccacaagaccaagcgccacaagggaggaaagc

SEQ ID NO: 147616 - RNA, 66 nt, Homo sapiens
cagcgcgggagccgcacgggccaagggacccccggacagccaacaccaaagccgcgggcacagcgg

SEQ ID NO: 147617 - RNA, 74 nt, Homo sapiens
cacgaagaccgggcgccagggccgccgccccgcccggaaagagcggcgccaccccgggagaaggcgaccgagac

SEQ ID NO: 147618 - RNA, 74 nt, Homo sapiens
aaaacgaacagccaaaagaagaagaaaccgagggaaagaaagcagccacacacccaaccggaaaggcgaggaag

SEQ ID NO: 147619 - RNA, 76 nt, Homo sapiens
cgacaccacaccaagccacaggcagcaccacccgccgggacagcaggagagagggccaaaccgagcgccgccccgg

SEQ ID NO: 147620 - RNA, 71 nt, Homo sapiens
gcaagcgaagaacaaaaccaaaggaggagaagaggagcagacaagggcccacaccaaagccaccagagcaa

SEQ ID NO: 147621 - RNA, 71 nt, Homo sapiens
gaggggcgccgcggcggcgggcgcccccaggagcaacccagggaggaaaagacggcaagaagagaaaaaga

SEQ ID NO: 147622 - RNA, 79 nt, Homo sapiens
cccgccccaacccggggcccgagccggagccgagcgcgccgggggggaaaaaaccggccacagacccgaagaccaccac

SEQ ID NO: 147623 - RNA, 77 nt, Homo sapiens
agcgagacccccaggcccgcggcgccgcaacaggagcgaagcaacagcccggaccaagagacgaggaaaaccccacc

SEQ ID NO: 147624 - RNA, 68 nt, Homo sapiens
gggaggcagccgacgaccacagagaccgaagaggacaccgggccaggaccagagcagacgacaccgac

SEQ ID NO: 147625 - RNA, 74 nt, Homo sapiens
gagagcgggccgaagaaacagagggaaacagaaaaaccagaagggaacggacaagaaaaccccaggacacagag

SEQ ID NO: 147626 - RNA, 70 nt, Homo sapiens
agaccggagccagacagcagccaaggccacacagaggacgaaggaaagccaagggagaggacagagacac

SEQ ID NO: 147627 - RNA, 72 nt, Homo sapiens
cgaggccagcacgggaacgcgaagcgccaaagccagacaacaggcacaacaccgggaaaagccgcccccaga

SEQ ID NO: 147628 - RNA, 71 nt, Homo sapiens
aagccaggaccacaaaaggagacaggagggaccgggcagaagaacgggggacgaaagccagccgaaggagc

SEQ ID NO: 147629 - RNA, 77 nt, Homo sapiens
ggaaaagcccgggccggaaaagccaccccaagcaagacgcggcacgcaacagggcggagaacggaaggagagggacg

SEQ ID NO: 147630 - RNA, 65 nt, Homo sapiens
caccaggacgcgccgaaacaccaaaagcgggggaagaagagaggacgcacccaccccgaagaaca

SEQ ID NO: 147631 - RNA, 60 nt, Homo sapiens
gcagggcggaacccccaccgccggagaagagggaggggagaggacaagggcccggcaccc

SEQ ID NO: 147632 - RNA, 78 nt, Homo sapiens
caaaggggcaggaaagggaagaaggagaacaaaagggccccaggcggcacgacccagagcccgggacggggacggcgg

SEQ ID NO: 147633 - RNA, 40 nt, Homo sapiens
ggaaagaacaggaagaggcacagaaagcccgaggagcaga

SEQ ID NO: 147634 - RNA, 50 nt, Homo sapiens
gcagcgcgcggccagagaaacggcagacgaacacgaaggagggccggcca

SEQ ID NO: 147635 - RNA, 47 nt, Homo sapiens
agaagagagacaacaacagagccgaaagggcggcacaagacccaggc

SEQ ID NO: 147636 - RNA, 58 nt, Homo sapiens
cagagccgaggcagaggaccacccgcgagcgcagaaagggagacagaagagcagcaca

SEQ ID NO: 147637 - RNA, 71 nt, Homo sapiens
gcaggcccccagccgcagccacaacaccggcaggaaccaccaggacagaggggccaccgggcacagagagg

SEQ ID NO: 147638 - RNA, 67 nt, Homo sapiens
caaacaggcggggaccggcgaggagcgaagaacaaacacccgagcgcgaggcggccacagagggagg

SEQ ID NO: 147639 - RNA, 68 nt, Homo sapiens
aaaacgcaacagaaacaacagggcacccccaggagaagaccacagcgacagccgcggaacagaccaac

SEQ ID NO: 147640 - RNA, 74 nt, Homo sapiens
accaaccacccgcaccgaacaggcggcaagaagaacccccggacggagcccccccggcgccggcagcgcccggg

SEQ ID NO: 147641 - RNA, 81 nt, Homo sapiens
ccacccaaagccaagaagcagcgcagacgaagccgccaccacgagagggaccagaaggagaacggaagccagagaaaagga

SEQ ID NO: 147642 - RNA, 94 nt, Homo sapiens
aacaccgggaagaacacagaggaaccagaaaagaacgaggccaggagaggcaaccccgcacaaacccagcgaacaacggaggaggaccccgaca

SEQ ID NO: 147643 - RNA, 77 nt, Homo sapiens
ccgcacgggggccgccgcgccccccggggcagggaacaacggaggaggcccagcaacggcccccgaacccagcccga

SEQ ID NO: 147644 - RNA, 71 nt, Homo sapiens
ccagaacacgggagaaaaaggaaaacgcggaaaaccgacacaacagcgcggaccggaaacaacgggacgaa

SEQ ID NO: 147645 - RNA, 78 nt, Homo sapiens
cagaaggagcaggaaccaaaggagcggcagcaacagccggcagggaaaacgcggcgcaaaaaggaccggccaccggac

SEQ ID NO: 147646 - RNA, 98 nt, Homo sapiens
gcggcgagcgggggcggagaccaggagaccccacggagcgggcgacgagcgacccgggagacacgacggaccaaagggacacagaagacaaagcagga

SEQ ID NO: 147647 - RNA, 62 nt, Homo sapiens
aacccaagcaaacaacagaggcaagggaggaacagcaagaaaaacccacagagcaaccaaga

SEQ ID NO: 147648 - RNA, 74 nt, Homo sapiens
gagcagaacaccggggacccacagaaagccgagccgggccagcccacacaccgcccccccggagacacggaaga

SEQ ID NO: 147649 - RNA, 69 nt, Homo sapiens
cagccacggacgccacagagggaagaccccaaggccaccaccaccacagacagagggaagagcggaaca

SEQ ID NO: 147650 - RNA, 72 nt, Homo sapiens
ccccccgcagggcagaaaggcaaaggcagccaacagccgaccgagcacgagccaccgagaaccgccagccgg

SEQ ID NO: 147651 - RNA, 64 nt, Homo sapiens
ggaccaagaaccaggacgggcacccaagaaaagcccgaaacagggagacggccaagccaaggcc

SEQ ID NO: 147652 - RNA, 81 nt, Homo sapiens
ccgcggggcagcgcggagcagcgaccccggcccggaggaggccagcgggacaagcgggagacaggaaccaaaaagcaacag

SEQ ID NO: 147653 - RNA, 106 nt, Homo sapiens
aagcacaagagagaggaaaaggagaaggccgagacaagagggccgggacagcgcgacgaaggcccaccaccacgagcgcggccaccaaccccggcagaccagagca

SEQ ID NO: 147654 - RNA, 79 nt, Homo sapiens
cacacaggccagaacgaggggggcgaggaagagacaggcgggggagaagaagcagggccaaacgcaggagaaagaacag

SEQ ID NO: 147655 - RNA, 77 nt, Homo sapiens
gaacaacccgcgcccaggccagcgccccaggccaagagggacccacccggcggccggggggggcacagagccccgga

SEQ ID NO: 147656 - RNA, 85 nt, Homo sapiens
aggcaccacgcaccgacagcgccgccaccgagccgggcccaccccccaccaaggaaggaaggcccgccgaaggagaagggcagga

SEQ ID NO: 147657 - RNA, 73 nt, Homo sapiens
ggaggcggagcggacaaggcccggccgcgaggagaaggagcgacagaaaagcagaaaggcagaacaccaccac

SEQ ID NO: 147658 - RNA, 78 nt, Homo sapiens
agaaaacggcaaggaagcgacaaacacccccgggccggggccggccgcccaacaccgggacccaccagccaagcagac

SEQ ID NO: 147659 - RNA, 79 nt, Homo sapiens
ccaacccggaaaggcagaagggaaggagcagaacggaggggaacacaaaaaggaaaacacaagacacccaccgaaagaa

SEQ ID NO: 147660 - RNA, 65 nt, Homo sapiens
ccggaaaaaagggaacgaaagcaaggaggagggagacaggggcaaaaaacggcagggaagaggcg

SEQ ID NO: 147661 - RNA, 81 nt, Homo sapiens
cgccagcacaggaaggagaccacgagccgaggacaaccaacaaaggccaacggcacagaagaagaggccccaggaccggcg

SEQ ID NO: 147662 - RNA, 69 nt, Homo sapiens
ccggcaggcaagacggcagccacagggcagcagagaggcccacagacaagccgcccccccacccgacgg

SEQ ID NO: 147663 - RNA, 80 nt, Homo sapiens
ggcagcgggagcggcggccgcgccagggcgcggggccgcggccgcgcgagcagcgccgcggggcgcgccacccaggcgga

SEQ ID NO: 147664 - RNA, 73 nt, Homo sapiens
cgcggagaaaccaaccacagggcgcaaagaccgagagcagaaacaggacaaagacggcggccccagcccaggg

SEQ ID NO: 147665 - RNA, 75 nt, Homo sapiens
ccaggagcaacaggggcaagcccaaaaggaagacggaagccggaacgccccaccccaccccgaagcgaccccgcc

SEQ ID NO: 147666 - RNA, 67 nt, Homo sapiens
gcccaagggaagcaaccagagccgcagcccaaagcaagaagagcgaggccccgaaagagaaaaaacc

SEQ ID NO: 147667 - RNA, 75 nt, Homo sapiens
cggagcccagcacccgccagcggccagcggagcgggaaagggcccagcgcgcggaagcggccccacgggcaccgg

SEQ ID NO: 147668 - RNA, 73 nt, Homo sapiens
gggcggcaagcaccagcagggaaggagaagagagcaaggcagcggaggaagaccacaccaggagccccaccaa

SEQ ID NO: 147669 - RNA, 71 nt, Homo sapiens
agaaagaaaaacaagaacgaggaacacgaacaggaacccgcaggcccaccagacgagaaaggcggagacaa

SEQ ID NO: 147670 - RNA, 81 nt, Homo sapiens
aagcaggaagcaccacacacaggcacagcaggaccagaccccagcagcggccgacgcgaccccacagacacaaaaaaaaga

SEQ ID NO: 147671 - RNA, 39 nt, Homo sapiens
agccaaggaggaaggggccggggacagagacagcaagaa

SEQ ID NO: 147672 - RNA, 98 nt, Homo sapiens
ggccaggcgcgcgaaacaaggcgagcacggcacccggggggcagcgaaagaaccacggcgggcagacgagccccgacacacaaccaagacgcgcacgc

SEQ ID NO: 147673 - RNA, 84 nt, Homo sapiens
gaggcgccccaacgcgccccgcgcaacgacacagaacagcccgggcccccacagcccagcccaaagccccaccccaagaacccc

SEQ ID NO: 147674 - RNA, 74 nt, Homo sapiens
gaaagcgcgaagaggggaagcaaagcaaaacaggagagagcagccgggcggcccagccaaacaggccccgagag

SEQ ID NO: 147675 - RNA, 56 nt, Homo sapiens
ccgagagaaaccacaaaggaccagaagcagcaccccgacaagagcagaggaggaag

SEQ ID NO: 147676 - RNA, 58 nt, Homo sapiens
ggaccccaaggaagccacggcagacacacaacccgacccgacgagaagacaacgaggg

SEQ ID NO: 147677 - RNA, 47 nt, Homo sapiens
ggaaaagacaagagaccggaaggacaaagaccggaccaagcagccag

SEQ ID NO: 147678 - RNA, 77 nt, Homo sapiens
cccacccagccaccagaacaaccaaacagcacagaagagcaacaagcggaagaccacaacgacgggggcacgagcaa

SEQ ID NO: 147679 - RNA, 77 nt, Homo sapiens
ggcaccacccacgagacgaacaaaaccagccaagcagaggagaaaaagacagcaccccagagccagaaccagaggac

SEQ ID NO: 147680 - RNA, 75 nt, Homo sapiens
ggcagcgcccagcagcgcaggcccccagaagccgccgaacgccgcacccccggggccgaggagcccccacacagc

SEQ ID NO: 147681 - RNA, 54 nt, Homo sapiens
gcgccgaacacgacggcacaggggggaacaccgaccgaggacaacaggagagaa

SEQ ID NO: 147682 - RNA, 76 nt, Homo sapiens
cgggacagcacgagacaggaggggagcgcccagagccaggcccgagacgcggacagggggccagagcaaggaaagc

SEQ ID NO: 147683 - RNA, 82 nt, Homo sapiens
acgaggaagaagaacagccgagagagcaacaagccagcccgggaccgaggacaccccccaggcacagccacaccccagcggc

SEQ ID NO: 147684 - RNA, 77 nt, Homo sapiens
gccaaagccgcccagacggccaccggcgggaggaacaaaaggaaacacggggaacggccaggccgcgcaggcagacg

SEQ ID NO: 147685 - RNA, 81 nt, Homo sapiens
cccccgcgcccaccacgcggcccccgggccccggccgccccccaggcgccggcgcagcagagcacaagcagcacagcccca

SEQ ID NO: 147686 - RNA, 72 nt, Homo sapiens
ggaccgcaaaccacagaaaagcgaaaaacgcgcaggagaccgcaacgacccacccgagccacccacgacaga

SEQ ID NO: 147687 - RNA, 77 nt, Homo sapiens
aagggaagacagcaccgcacgagaagcggggaaacgcagacggccagggaggaccgaacagcagcacaccaacgaaa

SEQ ID NO: 147688 - RNA, 85 nt, Homo sapiens
ggacccgaaacacagacaaggacccaaaggagacaaccagcagcagcagcagcagcagcagagcagcagcagcagcagcagcagc

SEQ ID NO: 147689 - RNA, 72 nt, Homo sapiens
gccaaggggacgagcaaaggaagcgcgaacagcagcgcaggccgacgcccgccgcggccggggaacaggcca

SEQ ID NO: 147690 - RNA, 81 nt, Homo sapiens
caccgacaaggccagagaaagaacaccaaccaaagcgccaaagaaaaggggaaagaaaaagagcccaccaaaaggaacaga

SEQ ID NO: 147691 - RNA, 40 nt, Homo sapiens
ccaaaacgcaacagaaacaacagaagaaaaacagagcccg

SEQ ID NO: 147692 - RNA, 75 nt, Homo sapiens
ggccggccggagccggcggagcaggaccgcacgcggaggcggcgcccgcacacaacagccaagcggagcgacaag

SEQ ID NO: 147693 - RNA, 75 nt, Homo sapiens
gaaacgccaagagcagccgacaggccaaggccgcaacaccggaaggaaagacaggggagacacacccaccaaacg

SEQ ID NO: 147694 - RNA, 71 nt, Homo sapiens
ccgccaagccgaagcagcaggcgcgaggcccggcagacgggccggggcgcaggacaggggaacccaccagc

SEQ ID NO: 147695 - RNA, 82 nt, Homo sapiens
accaaccgacacgaggcccccaccaggcaccacgaccaggaccaacaagcggccaaccagaccaggcacggaccaggaagcc

SEQ ID NO: 147696 - RNA, 89 nt, Homo sapiens
gggccccgagcccgcggcggagccacccgcacacgcacccaggggcagccgcaaggagagaagaagaaggaggccgcggccagaaaccc

SEQ ID NO: 147697 - RNA, 76 nt, Homo sapiens
acacggggccacggggcccacaggacggggagacagcagcaggaacacaggccggcgcggaagaggccggcggcgg

SEQ ID NO: 147698 - RNA, 78 nt, Homo sapiens
gacaaacgcggcgagaaagagagcaaacaaggagcagacggccgcagcaaagcagaaacaccagaagggaggaagacg

SEQ ID NO: 147699 - RNA, 81 nt, Homo sapiens
cgacacggcccgcagcccacccggcagacaacaccaggagaaagacagcaaagaaaaggagaagaaaggaaaaaaacaacc

SEQ ID NO: 147700 - RNA, 81 nt, Homo sapiens
ccgagaggaaacacccccagaagagaccgaggaggagaaggggcggcccggaggccgagaggagcggagagacaagacgaa

SEQ ID NO: 147701 - RNA, 91 nt, Homo sapiens
gaggcggagcccgcagaccgcagaaggccggagacaccagcaggcggcagacgcagacaaacaaaacaagaagccgaagaagaccggggag

SEQ ID NO: 147702 - RNA, 91 nt, Homo sapiens
ccgggagcccccggaggaggagggcgcagacacagcaggcgagcagcgcaaacccccgaaaaagcaaaagcggcaggcgacagaggcggcc

SEQ ID NO: 147703 - RNA, 80 nt, Homo sapiens
cgaccgagaagcgcgagcaagcccccgccgcaccgcacgacacacacggaggcgaacgaaggagggcgagggagcaagga

SEQ ID NO: 147704 - RNA, 66 nt, Homo sapiens
cgacccgggagacacgacgcccggaaaggaaaaacagaggcaaagcagagaagagcgaaaagcgag

SEQ ID NO: 147705 - RNA, 79 nt, Homo sapiens
gcgaagagacccgacagaaaccagacaaagcagaggaacgcccacgagaagaacaagagaagaaacccaccgcaccgag

SEQ ID NO: 147706 - RNA, 71 nt, Homo sapiens
ccgcgcgcccacgccgcgccagacagggcggagaacggaaaagcaccaggaagcagagaggaccgcagaag

SEQ ID NO: 147707 - RNA, 95 nt, Homo sapiens
gaagacgacgcaccgcaggcagacaaaagggccaaagaagggagagaggacggccagcagaagcaggcgagccccccgagaaaaagaagaaacgc

SEQ ID NO: 147708 - RNA, 50 nt, Homo sapiens
ggcacggagccggacacgaaacgcacaacacgaaaggagaagaggacggg

SEQ ID NO: 147709 - RNA, 65 nt, Homo sapiens
cagaacaccagccagaccacacggaaaaggccgaggaggccacacagacaaccacacccagaaaa

SEQ ID NO: 147710 - RNA, 72 nt, Homo sapiens
caggccaggcggccacccgggccaagcagccccgcccagccccaaaggcggaaacagggaaggccggcccac

SEQ ID NO: 147711 - RNA, 70 nt, Homo sapiens
gcaccaaagggacggggcacgccgcaagacaggaaagggccacgggagccgccgccggagcgagaacacg

SEQ ID NO: 147712 - RNA, 68 nt, Homo sapiens
ggaggaaagggcaaaaacacaccagcaacagaaggcgcggcaaaggggacgcccaacgaagagaccac

SEQ ID NO: 147713 - RNA, 103 nt, Homo sapiens
gcgagggcaccccagcacagacaccaggacgggaccagcccccccaggcaaggagacccaacaccccggccagacgggccaccaggccggcgccccacgcccg

SEQ ID NO: 147714 - RNA, 70 nt, Homo sapiens
cgacaacacaagcggccggcagcgggcaagaaaacagacagagcgcgaagcgggccccgaacaggaaagg

SEQ ID NO: 147715 - RNA, 63 nt, Homo sapiens
gcaccaacgagacccgccacacgagaaaccccccaggcaagaggcgcaggaccgggaagacca

SEQ ID NO: 147716 - RNA, 79 nt, Homo sapiens
ccgccgccgaccgccgcccgccacacccgccgccaggcgagaacgcggacaagcaaacaaagaggaaaaagagggcaac

SEQ ID NO: 147717 - RNA, 37 nt, Homo sapiens
gcagagaagcaaagccaggcggaaaacgacccggaaa

SEQ ID NO: 147718 - RNA, 83 nt, Homo sapiens
agacaagacgccggcaagagggagccaagacgagggggcgccgagaaggagcgaggcaaggaggagcgcggccaggggaaggg

SEQ ID NO: 147719 - RNA, 70 nt, Homo sapiens
ggcacagcggggggagaacgacgggagaaccaaccaagaggacccaagaagaccagccgaagcccggaaa

SEQ ID NO: 147720 - RNA, 70 nt, Homo sapiens
gcgcgcgggcgggaggcgcggggccggggccgcgcgcccacccaacccgaggaccagaaaccacggcacc

SEQ ID NO: 147721 - RNA, 72 nt, Homo sapiens
cccggacccagagaccggggggccccagccccgagccggcgaacaagagacggaaagaacaggccaagaaaa

SEQ ID NO: 147722 - RNA, 55 nt, Homo sapiens
accacaggaagaaaggaacaggggcacaacagcaggacgcccagaacagcgcacc

SEQ ID NO: 147723 - RNA, 43 nt, Homo sapiens
cccagaacagggcgcggggcagggagacacccacacagcacac

SEQ ID NO: 147724 - RNA, 54 nt, Homo sapiens
gaaagaaggacagggaacgcggaagcccaagaagacggcagaacacccagcacg

SEQ ID NO: 147725 - RNA, 74 nt, Homo sapiens
caccgagaaaaagggggaagaaccgagcagagagcacgcaacacaacacaggagccggggcgaccgacacaaac

SEQ ID NO: 147726 - RNA, 87 nt, Homo sapiens
gacccggccgcccagagagcgggggggggaccgccggcacgcgacccccccgggcccaaacgcaccccccggaggcggccgagccca

SEQ ID NO: 147727 - RNA, 77 nt, Homo sapiens
agcggacccggaccgggggcagagggcccaccccggagagaccccagggcccccaaggggaccccccggaagaggga

SEQ ID NO: 147728 - RNA, 82 nt, Homo sapiens
cgaaccgaagcgggcgggcccccccacccagaggcaaaagggaaagcaaggggaagggcccaagaagacaccccaccagaaa

SEQ ID NO: 147729 - RNA, 71 nt, Homo sapiens
aagccaacgcagggaagcaagccgaagaagaggggagagaacgcaagccagaccaagagagacacaccacc

SEQ ID NO: 147730 - RNA, 68 nt, Homo sapiens
caccagaagagggagaagcggagacagacacggacaagaacacagaaaaacagcaagggagcggacaa

SEQ ID NO: 147731 - RNA, 79 nt, Homo sapiens
agacaaggaaaggcgaccgagaacaagaaaacccagacaaagaaccaaacccagccaggaaagcaacggcgcaagcggc

SEQ ID NO: 147732 - RNA, 66 nt, Homo sapiens
agaaggaccaagaaccagacgcagcagaagggaaaagagagacaccaaaaaaccaggcacaagcgg

SEQ ID NO: 147733 - RNA, 62 nt, Homo sapiens
cagacagcgagggcgacgagaaggaagaacagaaaaagaagaggaacaggccaaggggccca

SEQ ID NO: 147734 - RNA, 76 nt, Homo sapiens
agaggaggaacaccaggcacaaggcacagcaaggcggggcgggcacagagacaaggcagaaccggggaggagaaga

SEQ ID NO: 147735 - RNA, 71 nt, Homo sapiens
ccagcagcaaggaaggcaggccccccagccccagcgcgcgcgccaggaggcagacgccacgaggaaaccag

SEQ ID NO: 147736 - RNA, 76 nt, Homo sapiens
cccggcagccgggaacggggaaggaacaaccggagcacaaccgagggccacagcaccgcaccagacagcaaacccc

SEQ ID NO: 147737 - RNA, 75 nt, Homo sapiens
acggaaccggagaaaagcaaaccgacaccagcgacacaagcgcgagggaaccacagaggacaggcgagggggcag

SEQ ID NO: 147738 - RNA, 79 nt, Homo sapiens
caaagagccaacgacccggagcggaaggaacgagacaaaagagaagaagaaaacaggaccgaagcggacacaagccagg

SEQ ID NO: 147739 - RNA, 82 nt, Homo sapiens
cgagagaggcaccgggacggaccgagaccggaccgagagcggaccgagagcgcgaaacgcacgagaaggcccgaagggaaac

SEQ ID NO: 147740 - RNA, 71 nt, Homo sapiens
acaacaccggcaggaaccaccaggacagagcgggaaaaccgccacaaagcccccaagccacaagcaacgcg

SEQ ID NO: 147741 - RNA, 72 nt, Homo sapiens
agaacgccggccaaagcacaacagaggcaaagaggaacagggcaaagagaggacccggcgggggcaaggaag

SEQ ID NO: 147742 - RNA, 38 nt, Homo sapiens
cccagggggggaaaccaccggaaaagcgccagcagaag

SEQ ID NO: 147743 - RNA, 68 nt, Homo sapiens
cgcagagccccagaagcgcaaaccacacaacaaacggcaccaacggaaaaagagggacgcggacagag

SEQ ID NO: 147744 - RNA, 41 nt, Homo sapiens
ccacaacccacgcgcaccggacccgcacgaggaccagcggc

SEQ ID NO: 147745 - RNA, 66 nt, Homo sapiens
gcagggggaagcggaggacagagacgaaaaagaggaccgaaggacggcgcgagcaggcaagggcgg

SEQ ID NO: 147746 - RNA, 70 nt, Homo sapiens
acagaggccaaggcaagccagagaacacccgccgcgcaaaaggccaggaggggaggagggagggccacgg

SEQ ID NO: 147747 - RNA, 101 nt, Homo sapiens
gggccgggaaaagggcacgaggccggaaccgcccagccccggagaggggcaacggacacaggagacagccaccaggaacggagaggcagacagccacagaa

SEQ ID NO: 147748 - RNA, 72 nt, Homo sapiens
gaagggcgacagcgcaaggagacgaaggccagggcccagcagcagcccacggggccagcggaggaaaagggg

SEQ ID NO: 147749 - RNA, 71 nt, Homo sapiens
aagcagagcacacagacacagggaggaacacagccaagggaccggagacgccaaaggaaaagcaaagaccg

SEQ ID NO: 147750 - RNA, 86 nt, Homo sapiens
gacaaaagaagagaaagccccaagcgacaggggagggacccagccaaaacggacaagccaaggcacgagccaaagaaacaaacaca

SEQ ID NO: 147751 - RNA, 78 nt, Homo sapiens
cgccccgcgccccgcagggccaggcccccacagagagcacacaaacaaagcgaaaccacggaagaaaagggcaaagga

SEQ ID NO: 147752 - RNA, 82 nt, Homo sapiens
cgagcgggggcggagaccaggagaccccacggagcgggcgacgagcgacccgggagacacgacgagaggacggggacgggcc

SEQ ID NO: 147753 - RNA, 42 nt, Homo sapiens
gaggaggaggaggaggaggaaaaaggggaagaacaaaagcgc

SEQ ID NO: 147754 - RNA, 65 nt, Homo sapiens
ggggacggcgacagcgccgaacaggcgagaggaggagacgacagaaacaagacgccaaaggaagc

SEQ ID NO: 147755 - RNA, 60 nt, Homo sapiens
ccccagacacagcacaaccaagggcgaagaacagaacggagcaaagaaggaggaacggag

SEQ ID NO: 147756 - RNA, 81 nt, Homo sapiens
cccagccgaaggagaaggggggacagagcgggagccaccagcgccaaagggaagccaggagcccgggggcacggggagaag

SEQ ID NO: 147757 - RNA, 72 nt, Homo sapiens
gacacacaagaaggaacaagccagagaaggcccgaggagagaacagagccagcgggccggcaccggcacgag

SEQ ID NO: 147758 - RNA, 80 nt, Homo sapiens
cggcgcccgaggccggccccccacgcgcacacaagggagcccccccaccacccccgaaacagaaggagcggcggacacac

SEQ ID NO: 147759 - RNA, 80 nt, Homo sapiens
cgccgaaaggcgaaggcaaggagagaaggaggacgaggacgaggaggaagaagagaagggaaaagcaaaggagaagagac

SEQ ID NO: 147760 - RNA, 72 nt, Homo sapiens
aacgcagccggggacaccaaacaggccacagcgcagccccaggcgggcaccgagcagggccgcccgccgaca

SEQ ID NO: 147761 - RNA, 52 nt, Homo sapiens
aacaaccagcccacgcaccgcaagcaaaggccgacagacagagaacccaggg

SEQ ID NO: 147762 - RNA, 80 nt, Homo sapiens
gaccccagaaacgggcaagcgcgcaaacccagaaggcgaagcggccaggcccgggcggacgcagagccagagcgccccag

SEQ ID NO: 147763 - RNA, 65 nt, Homo sapiens
gccggcccgaggaaggcaagacccgagaaagagcggcgagggagaccgaggaacacagcgaaaac

SEQ ID NO: 147764 - RNA, 82 nt, Homo sapiens
gccccggaggaagcacccggaccacggggacagcgagaaagggccagccaaagaagaaaaccagagcacagagcggacagac

SEQ ID NO: 147765 - RNA, 72 nt, Homo sapiens
agaaccaggaagcgccacagaaccggaacgcacgagggcggacaccccagggcgcagacaccacccgcggcc

SEQ ID NO: 147766 - RNA, 81 nt, Homo sapiens
cccgcggccaaacgggccgcgggccgagcgaggaggccgaggccgggaggccggcccggaggcggagagaccaaccaaagc

SEQ ID NO: 147767 - RNA, 102 nt, Homo sapiens
aggaagcacacgaccgggcagaaaacacccaggcaaggaccgaaaggcaacaaagaaggagcgaagcaagcagacccgcaggacgccacgaccagcacccag

SEQ ID NO: 147768 - RNA, 77 nt, Homo sapiens
caagcggaagggagcccaagaggaccaggcaccaccagcaccaccccagagcagccgccgaccccgcgaagaagagg

SEQ ID NO: 147769 - RNA, 74 nt, Homo sapiens
ccaggaccggcacgagaaaccagacaagagacccagagaaggagagccaaaagacccacagggcgaggaacagc

SEQ ID NO: 147770 - RNA, 73 nt, Homo sapiens
acagagggacccggacaaccagaggcagccagcagggggagggcacccacagaaggagaacaagcagagcacc

SEQ ID NO: 147771 - RNA, 70 nt, Homo sapiens
cacagccgcacggacccccagaaggggggccggaggagagcagaggaggccggggaagagagacccgaga

SEQ ID NO: 147772 - RNA, 77 nt, Homo sapiens
gccccagcgcccggccccccaccggacacccgcggacccgcgaccggcagcagagccgcccgcaccaccaggcacac

SEQ ID NO: 147773 - RNA, 79 nt, Homo sapiens
gaagaaaacggggacaccccaggcagaacaacaagagggaagaagcggccgaagggagccaccacgggccggaccacca

SEQ ID NO: 147774 - RNA, 72 nt, Homo sapiens
aaaaccaccgcaccagaagaagaaggccagaaaaaaccaaacccgacagcaagagcccaggccggcaggccc

SEQ ID NO: 147775 - RNA, 79 nt, Homo sapiens
gccgccggcccgcaagggcccgcacaccccaggccccaaaagaaaccccccgaaggagaagaaaccagggacgggaagc

SEQ ID NO: 147776 - RNA, 79 nt, Homo sapiens
aaccccagcggagaaccaccgcacaagagccaagaacaagggccgcgagggaaccaagaagaggaaaccagaacacggc

SEQ ID NO: 147777 - RNA, 83 nt, Homo sapiens
gcgaggcgccggagggggacaccaccggaccccgacccgccgccggcccggccgcgcccgggaaaggggaagaaagggcaggc

SEQ ID NO: 147778 - RNA, 84 nt, Homo sapiens
cgacgaaagaaagaagagagaggaaaagaaagaaacaaaagaaacaaagagcaaagaacggcagaacggcgagccagaaacccg

SEQ ID NO: 147779 - RNA, 52 nt, Homo sapiens
cgcggccccacgaggcaggagcgcggaggcccgaggaagaggcccaccccca

SEQ ID NO: 147780 - RNA, 74 nt, Homo sapiens
acacgggaaaagaggaaacagaggcgcgaacagggcccacccgccacgacacaggggaagaagaccaccgcaca

SEQ ID NO: 147781 - RNA, 80 nt, Homo sapiens
gaacaggaagcggacgcgcagcggaacagcggccaaggggccaccacagagcccgcagggacacagcagaacaagcaacc

SEQ ID NO: 147782 - RNA, 84 nt, Homo sapiens
aacgcccgggaacccacgagggcagccggcgggaggaacgccacgcagcgccggaaacgccaccccccgggcgcgccggacagg

SEQ ID NO: 147783 - RNA, 79 nt, Homo sapiens
cccccgggaagaagacacagaaaacagcacaggagcagggagccaaccacaccagcacacaagcccccaaacacccagc

SEQ ID NO: 147784 - RNA, 79 nt, Homo sapiens
gcggcgcggccccgacccccgcccggcgccggcccgggccgccagggcaggcaaaagcagaccggaaaacccaccggca

SEQ ID NO: 147785 - RNA, 68 nt, Homo sapiens
gggagacacaagggcacgaagggaccagagaagacacacaacaaccccacggagccccaccggaagga

SEQ ID NO: 147786 - RNA, 71 nt, Homo sapiens
agcccagcccccagaaaggaggacaacgggacccagaagaggacggcccaggaaaaccccccaaaaaagga

SEQ ID NO: 147787 - RNA, 62 nt, Homo sapiens
ggcgaccgggagccggagcggaacgaggagggcgcccaaagcgcagcggccccggcggccac

SEQ ID NO: 147788 - RNA, 72 nt, Homo sapiens
ggcaggcggcggaaggaaccgcccgccgccacacgcgcaaagcccgggagaggacagacccagcacaaaaca

SEQ ID NO: 147789 - RNA, 74 nt, Homo sapiens
caagcgaaaaagcgggaacgcaggacccaaagcgcagggagaccccaaggcaaaaccaccacacgacaaaaacc

SEQ ID NO: 147790 - RNA, 76 nt, Homo sapiens
cgcccgggagagcgaacgagggcggcgggcgcgagaccgcacagcaaggaaagcacccagagaaggaccggaagag

SEQ ID NO: 147791 - RNA, 56 nt, Homo sapiens
acagggaacagcggggcacacaggcgggaaaacaccgaggcagaccaacggggaga

SEQ ID NO: 147792 - RNA, 79 nt, Homo sapiens
gagccccgagagacacgcccgcccgaggacacgggagcgggcagcggaagcgaggagccaccccacgaaaaagaaagag

SEQ ID NO: 147793 - RNA, 89 nt, Homo sapiens
gaggccacaggacaagcaggccacagcacaccaccaacagggaagaaggagaaagggccaaccccgaagaagcaaacagaaacgaagga

SEQ ID NO: 147794 - RNA, 71 nt, Homo sapiens
cccccgccgcgaccacagggccccaggcacgggccggacggagaaccaggagggaggggacgacacgaaga

SEQ ID NO: 147795 - RNA, 43 nt, Homo sapiens
aaaaacaaagaagacccagaccaagagcgagccagagcaaagc

SEQ ID NO: 147796 - RNA, 55 nt, Homo sapiens
cgccccaacaccagggaagagacacacccagagaccggccacggggcagagggga

SEQ ID NO: 147797 - RNA, 73 nt, Homo sapiens
aacggagacccaaggcaacaagaaccgaaggcaaagggcaaagacccaaagacaggaccacgcaccagcagag

SEQ ID NO: 147798 - RNA, 75 nt, Homo sapiens
ccgacccggaagaccgccgccggccagcaacagaagaaagcaagcaccggggaaagcggcccgaaacaagcagaa

SEQ ID NO: 147799 - RNA, 69 nt, Homo sapiens
gacaagcagcacaccaggcgaaggagccggcggaacaccaccgagcacaggcccgcgggcaccaggacc

SEQ ID NO: 147800 - RNA, 54 nt, Homo sapiens
aaagcccagcaaggaaacaaagggaggcggaaccagagcccagaggcccggaag

SEQ ID NO: 147801 - RNA, 79 nt, Homo sapiens
cggccccagaaagaaaaaagaagaagccccgagcaccaaaacagacagcagacaacagaacagaaaaagccaagcaggg

SEQ ID NO: 147802 - RNA, 74 nt, Homo sapiens
aaagaggaaagaggaagaccgcaaagcaagacagccaaaagggagcaaacagagcgggcacaaaacccgaaagc

SEQ ID NO: 147803 - RNA, 68 nt, Homo sapiens
ccggggcgcccggcgccggccgagaaggcagaggcggccggaaaccccccggaaggggaggaggcggg

SEQ ID NO: 147804 - RNA, 86 nt, Homo sapiens
cagaagcggaacagccacagcagcccccaaggagcgcaaggagaagaagcggccccaacccaaaagcaggaaaacggggaaccaga

SEQ ID NO: 147805 - RNA, 69 nt, Homo sapiens
cgagaaaaccaggggaagaaaggcaggccacggcaacaaaaccagacccaaggagcgccgccggaagca

SEQ ID NO: 147806 - RNA, 82 nt, Homo sapiens
gcagccacgacgggccgagccgccacggccacgagcacccccggagcaaagcggagagagaaacagggggcacgaaacgaaa

SEQ ID NO: 147807 - RNA, 87 nt, Homo sapiens
gccagcccgggcgggccgcgcgggagagcggccggaccccagaagcgagccccggggcggggcaggccggcgggccacgcagagcag

SEQ ID NO: 147808 - RNA, 72 nt, Homo sapiens
aaagaaccccaccaacacacacaggagaggagcaaccggaagggacaaaagaacaaaaaaggagaccgccag

SEQ ID NO: 147809 - RNA, 80 nt, Homo sapiens
ggccgccccggccaggacgcgggagcgccgcgggaagggcggggagcggagccaggccccgaagaacaaaagcggggcga

SEQ ID NO: 147810 - RNA, 75 nt, Homo sapiens
cgacggcgggggagacggccccgcgcgagaccgcccagaggggcccaccgcgcccggcagcggggaagaagaaaa

SEQ ID NO: 147811 - RNA, 71 nt, Homo sapiens
gcaagggcagaagggaagaacaggagggcccccaagccggcaggggaacgaggagggagcgcggagcggca

SEQ ID NO: 147812 - RNA, 73 nt, Homo sapiens
gaacagcgggccgcagccaagcgccgccgggagggacaaggcacacgcgggacggagcccggacccagaccag

SEQ ID NO: 147813 - RNA, 76 nt, Homo sapiens
acccgccgcgggggaacaggcgagcccccggggaacgacacgggggccccgccagagcggcggcagagaagaaacg

SEQ ID NO: 147814 - RNA, 83 nt, Homo sapiens
agagacccgcacgggagaaaaccagcccggcggacaagaaggggggacacaccaccgggaacaagccgccgggccagggaaga

SEQ ID NO: 147815 - RNA, 79 nt, Homo sapiens
ggacaccgcaaccgcaggaccacgcccgaagcggccgccaaggagggcaagacgaggcgccccggcaaggccaccgcag

SEQ ID NO: 147816 - RNA, 73 nt, Homo sapiens
gcgagcacaaacggggcggggccggggaacacacagggacaaagaaacaagcgacggaggacccaaaaacaac

SEQ ID NO: 147817 - RNA, 64 nt, Homo sapiens
agggacggggaaggccggggcgcccggcgccggccgagaaggcagaggcgcacaccccagcgca

SEQ ID NO: 147818 - RNA, 79 nt, Homo sapiens
aggaagaaaaccaggcaccaaaaagcagagaggggaaaggagaaaggaccgcacagacccccaacaccacaagacagag

SEQ ID NO: 147819 - RNA, 95 nt, Homo sapiens
caagagggcccccagcaccacacgacccgcgcccaagccagacagcgagccgaggaacgggccccggggacggcaggcaaaacccacaggggggc

SEQ ID NO: 147820 - RNA, 76 nt, Homo sapiens
ggaaggcagcccagccacgaaggccccccagggaagagagaaggccacgcccgaccccaagcaacaacggggcagg

SEQ ID NO: 147821 - RNA, 52 nt, Homo sapiens
caaaaacagggcccccacgcacgacagaggagaaacgaagacagaccgagaa

SEQ ID NO: 147822 - RNA, 54 nt, Homo sapiens
aggccaagaaggcagcggagagcggccgggaggaagcagagggaaccaggacag

SEQ ID NO: 147823 - RNA, 73 nt, Homo sapiens
caagacccacaacaaaaggccgcgccaacccgacgacccgccgagcaaaaaaagagcccggaaggaagagaca

SEQ ID NO: 147824 - RNA, 75 nt, Homo sapiens
cgggcccaaaagcgagaaccccaagcgaaggaagaagcaaggaaaggagaccggacggagaggagcccaaaaaac

SEQ ID NO: 147825 - RNA, 77 nt, Homo sapiens
ccggccagagaagagaacagggacacggacacccccggaagacagaagagcccgcagagggccagagcaaaccagca

SEQ ID NO: 147826 - RNA, 72 nt, Homo sapiens
agcacaaccgggcgcccggacgggggcaagcggaagggagcccaagaggaccagacaggcgacaagcgcgaa

SEQ ID NO: 147827 - RNA, 86 nt, Homo sapiens
cccaccgccgcgggccgggagcggagcagacccccagccggcgagacagcaaacaacacccaacagcccaaagcaaaggagcaaca

SEQ ID NO: 147828 - RNA, 69 nt, Homo sapiens
gaagagaagaaacccagcgaagggagccggagcaaggcgaacaaaggacaagaaggaccggaaaacaga

SEQ ID NO: 147829 - RNA, 79 nt, Homo sapiens
ggcccaacggccccggcccggggggggggacgggccggacggcgccgggccgccagggggcgccggaccgaaggcgcga

SEQ ID NO: 147830 - RNA, 87 nt, Homo sapiens
aagagagaaacgaaccacaaaaccggcaagcgagacagcagagcccgagaaaggaggagaaacaagcagcaccgcaggaggcagcag

SEQ ID NO: 147831 - RNA, 76 nt, Homo sapiens
ggagcaccccccgccggaaagggagagagaaggcccaaaagccaggggccgacggacaagaggaagaccaggcccc

SEQ ID NO: 147832 - RNA, 65 nt, Homo sapiens
gagacacccggaggcgagggggaccgcgggggaccaacgagaaagaaccacagaaaaccaagaag

SEQ ID NO: 147833 - RNA, 79 nt, Homo sapiens
cgcacaggccccccagcccaacggaccgcagcagcgccaaagccgaacagaggaagcaccaaaagcccacaccaagcaa

SEQ ID NO: 147834 - RNA, 84 nt, Homo sapiens
gcgaaaggcaggcacaaagaaccaagaaaaccgaagaccaggcaccagccggggaaaggagcgcagcgcccgggcggaggagca

SEQ ID NO: 147835 - RNA, 61 nt, Homo sapiens
gccacggaagccgacagacaaccagggcaaggaaagagagaaaccacacaaagacgaaaca

SEQ ID NO: 147836 - RNA, 74 nt, Homo sapiens
ggcaaagaggggggccaaccggcacaaagaccaaggagaaacgacaacagggaaaccagagccagaaccacgac

SEQ ID NO: 147837 - RNA, 89 nt, Homo sapiens
ggagaaggaacgagagaaggaaaaggagagaggcacggaaacaggccgagaagaacgggagaagaaaagacaaaacacagaggcccaag

SEQ ID NO: 147838 - RNA, 86 nt, Homo sapiens
agccccaccacccgccaagaagcggagaggacgacccccggcagaaccaaccagcccaaacagaaccagcaccgcagaccagacac

SEQ ID NO: 147839 - RNA, 75 nt, Homo sapiens
gccgcccagaggccacccagccccagacagagggaagacccacgaaggagagcaccagcccggcggacaaggaga

SEQ ID NO: 147840 - RNA, 78 nt, Homo sapiens
cccaccgggccacgcccacacgaggccccgcagaagccgcacaggaggacaggaaaaggaacgaacaggacgcaaggg

SEQ ID NO: 147841 - RNA, 51 nt, Homo sapiens
gggagaggacggagacaagcagagcagaccacgagagaaccgaccccccac

SEQ ID NO: 147842 - RNA, 61 nt, Homo sapiens
gaaggaccaagaaccagacgcaagaggcgccccaaggaaaggggccaacgggcgccagcaa

SEQ ID NO: 147843 - RNA, 92 nt, Homo sapiens
caggacgggcacagcagagaccaaaggcagggcaaggaaacggccacaacaaaagcgagaagcagaaagccaaagaaagaaagaggaagaag

SEQ ID NO: 147844 - RNA, 80 nt, Homo sapiens
gcaggaagggaaaaggagggacgccgcagggcggggcgagcggagcacggaccgaaaagacgcggccccaaaggaaacac

SEQ ID NO: 147845 - RNA, 41 nt, Homo sapiens
ggcggcagcgcacgcgcagccaggggggccccagcccggcc

SEQ ID NO: 147846 - RNA, 82 nt, Homo sapiens
gaaccccacggagaaccagagacccgaggaagaagagaaaacaaaaaacgacaaaaaaacagaagaaaagagaaaggaaaaa

SEQ ID NO: 147847 - RNA, 59 nt, Homo sapiens
cggcgcgagcacagaggcgaacgggagccaaagggccccgggaccaggagagaagacga

SEQ ID NO: 147848 - RNA, 78 nt, Homo sapiens
aagaacgccaccccgacccaggacccacccagggcagaaaccaggcaggcacacgaagacagcagagaaggaacagca

SEQ ID NO: 147849 - RNA, 82 nt, Homo sapiens
gccaaagaaacaagccgggaaagggacaagaagggcaaagccgaaaccaaagagagcagcacgacagcaaccgaccacgcca

SEQ ID NO: 147850 - RNA, 79 nt, Homo sapiens
cgccgggaccgacaccgcccggagggcgccccccccccgaggcgcccgcagggccaggacgaacggaagccgaagcagc

SEQ ID NO: 147851 - RNA, 74 nt, Homo sapiens
cacgggaggagcgccacacccacacacaagggaccaagaaaggcccagggaccaaagcccggacaaggcccgag

SEQ ID NO: 147852 - RNA, 73 nt, Homo sapiens
accgggcaaggggaaaggggggccggcgcagacggccaaaggacgggacaaaggggcgcgacgagagaccgcg

SEQ ID NO: 147853 - RNA, 76 nt, Homo sapiens
acgcacagaaacagcacaagccaaacggaagccaggcacaccaagcgagaccagacccagcggaccagagaacgca

SEQ ID NO: 147854 - RNA, 60 nt, Homo sapiens
agagcacaaaggaaaacgaggaaagcccaggagacacggcaaacaacgaagagaggaaag

SEQ ID NO: 147855 - RNA, 75 nt, Homo sapiens
acagaggggaacagacaggccccagccgcagacaagggaggcgaggacggacaaaaggaaacggacgggaggcca

SEQ ID NO: 147856 - RNA, 57 nt, Homo sapiens
cgggccgaccaccccgggaccgggagcccgggaccgggagccggggggccaccccga

SEQ ID NO: 147857 - RNA, 74 nt, Homo sapiens
ccgccccggccacccggccagcgaggccaagggaggaaaaagcggcacagaggaagaggcccaccccaggagaa

SEQ ID NO: 147858 - RNA, 70 nt, Homo sapiens
caccagagaaaagaaacggcccccaaagggcgccggagacagaaacgagccccaggaagaccgggagcac

SEQ ID NO: 147859 - RNA, 77 nt, Homo sapiens
caaggcggcgcgcccaggaggccggggggggcacagagccccggaagacagcccccagcgaccagacccagggccag

SEQ ID NO: 147860 - RNA, 77 nt, Homo sapiens
aggaaacgaggccggagaggaaagagacccgcagagccacagggcagagaaacagacacacgaaggaggaaccaaag

SEQ ID NO: 147861 - RNA, 88 nt, Homo sapiens
ccagaccggcgggcaaacccacccggcccaaccacgaacacgaggacccaaagaacaaacccggagagaagaaaaccccagcagggcg

SEQ ID NO: 147862 - RNA, 72 nt, Homo sapiens
aaccccgggcagcccgggaaacccaagcagaaaggggcccggacgccaccaacaacagcagcacagccagcc

SEQ ID NO: 147863 - RNA, 74 nt, Homo sapiens
ccccacgcgacaggcccggacaccaacccgccaccgggagcagacggcaagcgaaccccaagcccgacggggac

SEQ ID NO: 147864 - RNA, 39 nt, Homo sapiens
gagacccccaggaaccgggcaggggcgaggacagcgaca

SEQ ID NO: 147865 - RNA, 68 nt, Homo sapiens
ccgggaaggagcacccaggaccaccagaacggggcggaaggacaaggccacccacaccggcacggacg

SEQ ID NO: 147866 - RNA, 85 nt, Homo sapiens
gcagaacgcagaggggcgcccggcccgcccggcgggaaacaggccccaagacccaagacacgagaggcgagggacgacagagcaa

SEQ ID NO: 147867 - RNA, 74 nt, Homo sapiens
cgccgcccagcaaagcgaaggccgaaccggggcaggaggcgggggccacaagcaacgacgaagagaccgcgccg

SEQ ID NO: 147868 - RNA, 85 nt, Homo sapiens
cgagggcaggacccgcaggccagaccccgggagcccagccaccacagacagcgccggccgcccgcaggacaccgagggcccagcc

SEQ ID NO: 147869 - RNA, 77 nt, Homo sapiens
gccgccgcgaccgagagcgcgggccgcagacgggggaccgccgccgcccagacacagggagggaagccggaccgaga

SEQ ID NO: 147870 - RNA, 73 nt, Homo sapiens
aggaggagaacaaagagggaaggagaggcaggcagagagaaagcaagaagcccccgaggaggagagcaaggcg

SEQ ID NO: 147871 - RNA, 88 nt, Homo sapiens
ccgaacgcagcaggaggcgcagcagcacaagcagaacgggcacggagccggagagcgaaggagcgggaaaaccccgagagcacgggcg

SEQ ID NO: 147872 - RNA, 71 nt, Homo sapiens
cgggcggcagcccgagaccgcagcagcccccgccccgcaccgacgcgggaacgccccgacaagcgaggaac

SEQ ID NO: 147873 - RNA, 68 nt, Homo sapiens
ggagaaaaggccaagaaggcaggagccacacagccagcgacacaggaaggaaaagacgaaagaagaac

SEQ ID NO: 147874 - RNA, 71 nt, Homo sapiens
gacggacacaacggcagaccgcagaacacccagccaggagccgggccacggggggcgggccaggggcccgg

SEQ ID NO: 147875 - RNA, 75 nt, Homo sapiens
gcgcggaccacccccacgaacgaggggagacgaggcaaaaacccccaaagccacgccgcgccacacccacgaagc

SEQ ID NO: 147876 - RNA, 77 nt, Homo sapiens
gagcggacaacgaccggggcaccagggaaaacacacccgagacccagacagagcaaaccggagagaacccaccaacc

SEQ ID NO: 147877 - RNA, 75 nt, Homo sapiens
ccacaggggaagaaccacagggaccaagaaaggcccagggaccaaagcccggacaaggcccgagcaccaggaccg

SEQ ID NO: 147878 - RNA, 65 nt, Homo sapiens
acgccaccgaagagccaagcccagggacagcaaacgggcaacggaacacagcggaacacaaacaa

SEQ ID NO: 147879 - RNA, 56 nt, Homo sapiens
cacaaaagaggagaaaaccgggcgcagccagcaaagcagcgccgggaagagaacac

SEQ ID NO: 147880 - RNA, 90 nt, Homo sapiens
cggagcagggccggaccccgcggcgcccccggcccggagcaacgagcgcagcgccgaaaagaaacgaagccgggcacggacaggacagag

SEQ ID NO: 147881 - RNA, 61 nt, Homo sapiens
gagagccggggcgacacggcaagggacaaagcaagaaaaagcaacggaaaagcccgaggaa

SEQ ID NO: 147882 - RNA, 78 nt, Homo sapiens
gcaaggcgacgccagaggaggaaaggaagacaagccagaagacagcgccagacgaccacaccaacccagagggagaga

SEQ ID NO: 147883 - RNA, 68 nt, Homo sapiens
caggcccgggcgccccccacagagaaagggcccgagggcaggacagcaggcaccggcgaagcacagag

SEQ ID NO: 147884 - RNA, 74 nt, Homo sapiens
gccgacccgcaaccaaggacagagccagggacggacagaaagacgggaacggagccccccgcacaggacaacca

SEQ ID NO: 147885 - RNA, 68 nt, Homo sapiens
aaggggggggggacaaagggaggcaggcgacaacagaggagaaggcgaagaaaacagccaagcaccag

SEQ ID NO: 147886 - RNA, 70 nt, Homo sapiens
cggaaaggagcgccgcaggccgcgggggcagaaaggggagcagcggagacgccgcaccgcagagacagga

SEQ ID NO: 147887 - RNA, 89 nt, Homo sapiens
gcggcagcggcgggccgaggcgaaggagcggccgggagcccgccgcgcggagcgaacaccccaccagaccacccagcaagcccacaaaa

SEQ ID NO: 147888 - RNA, 59 nt, Homo sapiens
cagaggacaagcgacgagagacccgagacgcacagcagccacgaggcggggcaccaggc

SEQ ID NO: 147889 - RNA, 79 nt, Homo sapiens
gcaccgaggccagggggccggccgcgcgccgaggagcgcgagccacaaggagaagagaaggagcgcgggcgcgccacgc

SEQ ID NO: 147890 - RNA, 80 nt, Homo sapiens
accgcacaacaagaggccggcggggcgacagaggaaccgggccgggcagagcgagagaggcagccaggggagccagggcc

SEQ ID NO: 147891 - RNA, 46 nt, Homo sapiens
cacacccaggggaggaggacccagccccaggccaggccagacgggc

SEQ ID NO: 147892 - RNA, 51 nt, Homo sapiens
aacagaggaacagaaacgcgaccagaagacggaagaagcggcggagcagga

SEQ ID NO: 147893 - RNA, 89 nt, Homo sapiens
cacacagccgcgcagcgggcgagaagcgcccggccagccggcggagcccacgacgagcggaaaaggaaagcggcaacggggaagaagac

SEQ ID NO: 147894 - RNA, 67 nt, Homo sapiens
accccaagccgccacgaagggccaccgaaacagggaggcaggacagggaagaagggaaggggaacaa

SEQ ID NO: 147895 - RNA, 80 nt, Homo sapiens
cagcccgagagcgggaacagaccagcggacccaaaaacaaggaacacccggcagcgaggcggcggaacaaaccaggccgc

SEQ ID NO: 147896 - RNA, 77 nt, Homo sapiens
acacagcagcccagccagcccgagcaagaaagaggcccagcgaggcgcaacaaaggaggacgagagaacaacaggga

SEQ ID NO: 147897 - RNA, 79 nt, Homo sapiens
acaggaggagagagacacaacccagacaaccagcccacggggccacaaggagaccgagggaccgcgccaagcgccagcc

SEQ ID NO: 147898 - RNA, 54 nt, Homo sapiens
cagggaccgcgccaacggagggcccgggccccgcgcgcgggggcccgggaaggc

SEQ ID NO: 147899 - RNA, 82 nt, Homo sapiens
gacacgaaaaaagagaaagggccaacggcagaagagcgccacaagcggaccccacaccgcacacagaggagagagggaggag

SEQ ID NO: 147900 - RNA, 73 nt, Homo sapiens
ggcccggcgggcgacggacggccggacaggaccgaaggagaagaaggagaaggggaggagaaggcaagccgga

SEQ ID NO: 147901 - RNA, 82 nt, Homo sapiens
accccgccggaaccccacggcaacgggcgccacgccggccaaccaggaccacggaggacacaacggagagcaaaaaacgagc

SEQ ID NO: 147902 - RNA, 61 nt, Homo sapiens
gcgcgccggaaaccggagcgcgcagcaggcacccgaacgcagacaccaagggagaagccaa

SEQ ID NO: 147903 - RNA, 73 nt, Homo sapiens
gcccgacccaggacaggacccagcgcgggacagccagggcggaaaaccccaggccaagggaggcagcgccgcc

SEQ ID NO: 147904 - RNA, 77 nt, Homo sapiens
aaaaaggaggagagagagaagagacagacagggcccagcaccaggaccggaaaggcagagacccggcgaggcgagag

SEQ ID NO: 147905 - RNA, 85 nt, Homo sapiens
aagcacacaaccccaccgacgacgccacacgagaagcgccaggaggaggaggagggggcgcaagaccaacgggagccgcaaggac

SEQ ID NO: 147906 - RNA, 64 nt, Homo sapiens
ccgagggagggcgcgccgcccgggcggcagagcgggagcagcggaagacaccaaggccagggag

SEQ ID NO: 147907 - RNA, 78 nt, Homo sapiens
cccgaaggcccacaggacaggagagaaagacgggaaaacaaaggcagagaagccagacggcaaaagcagcgggaacag

SEQ ID NO: 147908 - RNA, 72 nt, Homo sapiens
cagagcgcacgaagaaccaagaggaagcggcagaacgacaacaaaccaaaggcaaggccaagaagagagcgg

SEQ ID NO: 147909 - RNA, 52 nt, Homo sapiens
gagagacagagcaacgaaaggagcgggccaggaggagccaaccaccggggcc

SEQ ID NO: 147910 - RNA, 95 nt, Homo sapiens
cacccggaccccgcaacgcggaacccaagaaggcggagagaggaagaaggggagaagagccaccaaaaaacgagaagaaggaaaaaacagcgcag

SEQ ID NO: 147911 - RNA, 64 nt, Homo sapiens
aggcaagggggcacccagcggcacaaaaaggacgccggcaaccaagacccaacaaaccacacaa

SEQ ID NO: 147912 - RNA, 76 nt, Homo sapiens
agcgggcggggccggagagaggagcagccccagagaggggcagggagaagacagaccaagaaagaaccgcgaaaac

SEQ ID NO: 147913 - RNA, 71 nt, Homo sapiens
cgacccggaaggaaaccgcggcccggagcaagaggagagaaagaacccacgcaggacgacagaagaggccg

SEQ ID NO: 147914 - RNA, 82 nt, Homo sapiens
cgaaacgagaccgggcagaggcgcaaggcggagaacacaggaaaacaacaccagggcaagaagggaggccgggaagcacaga

SEQ ID NO: 147915 - RNA, 122 nt, Homo sapiens
cggccgccggcgagacgcccggaccaggaagcggacgcgggacggaagcacacgcggcgcacccaggccacagaggaggaaagagaggggaaagaagcagccaagccccaaggaaccacagc

SEQ ID NO: 147916 - RNA, 73 nt, Homo sapiens
caggcccggacccaaccagagaaagacaaccaaccccaccgaggaggacagagacgcaacggagcagggagag

SEQ ID NO: 147917 - RNA, 76 nt, Homo sapiens
gcgggggcgagccacagccaggacgggccacgaggcaccggccgcgagcaccagcgccccagcacggggaacggag

SEQ ID NO: 147918 - RNA, 84 nt, Homo sapiens
gggcagagacacgcccgggcggggagggcagccgggcccgcccaggccgacgggggcgacagcaagaaggagccagcacagagg

SEQ ID NO: 147919 - RNA, 71 nt, Homo sapiens
aaggaggcagagaaagcaagcaaaggacaagacaccagacaccacacacaagcaccgagaaggcagggaac

SEQ ID NO: 147920 - RNA, 41 nt, Homo sapiens
gagaaggaagaggggaaaaggcgacagacacagcaccggcc

SEQ ID NO: 147921 - RNA, 79 nt, Homo sapiens
gcgggcgccggagccgaggcgagcgccgcgcgcaccacgggaacaaccagcaggagaggaaaaaggcccacgacacccc

SEQ ID NO: 147922 - RNA, 79 nt, Homo sapiens
cccagaggaaagcgagcccaacccgcggccccggcgccaagccgccgcaccccggccagggcagaccagaaacgggggc

SEQ ID NO: 147923 - RNA, 75 nt, Homo sapiens
gcaacccgcgcccgccggagagagaaagcgggacggaacagccccaagccggaaacccaggaacggaaacagaac

SEQ ID NO: 147924 - RNA, 89 nt, Homo sapiens
gcggcggggcccgggcggcagcgcgcccgccaagcccccaaccggacgccgccggcgcgcccgcaaagagagaaaccgccagaaaccga

SEQ ID NO: 147925 - RNA, 75 nt, Homo sapiens
gagagacggagggagacggcagacggcagaccacaaaaggcaggagaagcaagaagaagagaggcaggcacggca

SEQ ID NO: 147926 - RNA, 73 nt, Homo sapiens
gggagacgacacgccaggaggcagcccaaagaaaggacagacaggcaaacacgccaaggaagaaagaagagca

SEQ ID NO: 147927 - RNA, 53 nt, Homo sapiens
gaacagaacccaaaagccgacaaccccagaaacagcacacccccggccgccgc

SEQ ID NO: 147928 - RNA, 62 nt, Homo sapiens
gcacaaccggagaagcagacgccacccccagcccaggagcaaaaacaccacggcagccagca

SEQ ID NO: 147929 - RNA, 74 nt, Homo sapiens
cgaaggcaacaggcacccgacagcagcaaccgaccccaagccgaccgcagcgacgccaaagggaagaacaccac

SEQ ID NO: 147930 - RNA, 90 nt, Homo sapiens
ccagccgcgagggaacggaggggagggacccgccagacccgaggcaggcaggaaaggcaaaggcaacagaacggaccaagaaaacaaacg

SEQ ID NO: 147931 - RNA, 82 nt, Homo sapiens
acagagcggcgggacagcccaagggccagcaccgcgcccaggcagagccagaccgggacagcaggcaggaaaacaagccaga

SEQ ID NO: 147932 - RNA, 94 nt, Homo sapiens
gaaagcgggagagggaccggaacggcggcgacaaggggcccgaacagaggggggaacggcgagggaacccaggaaggagggcgacaaacaccag

SEQ ID NO: 147933 - RNA, 89 nt, Homo sapiens
agggaagaacagccaggcacagggcaggaccgcgaaagacagacaggcccagcagcgagagaagcggggcaccagcgggcacaccaaga

SEQ ID NO: 147934 - RNA, 50 nt, Homo sapiens
agcacgggaaacgagagcagaagggacaaaggccagaagcaggagagcac

SEQ ID NO: 147935 - RNA, 85 nt, Homo sapiens
cggccggcggcgggagacgcgggcgagcggagcgcaacaccgcggggggagacggcgcggccggaggacaacacagggagccaga

SEQ ID NO: 147936 - RNA, 81 nt, Homo sapiens
accgccaggcgggcccccgcggcccgggcgagcccggagaagaggaagcccacccaagggccagagaccgcaaaaccacac

SEQ ID NO: 147937 - RNA, 97 nt, Homo sapiens
cgagaaaagacagcgacagccgaaacagcggaacgcaaccgaaccaaccgggaagcgagagaacaaaacgaggagaagagaaaagaagccaaagaag

SEQ ID NO: 147938 - RNA, 49 nt, Homo sapiens
aaggaaaccgagaggaaccggggcaggaaggaccagcgaagcgcggcaa

SEQ ID NO: 147939 - RNA, 55 nt, Homo sapiens
cccagagcccacacccgcagagcgaggaccggaaggcccaggaccggccgcgccg

SEQ ID NO: 147940 - RNA, 74 nt, Homo sapiens
aggcgaggcaccggaacagacgcaggaagagagaaagacaccccgacagagcaagacaccccccggccgggaca

SEQ ID NO: 147941 - RNA, 69 nt, Homo sapiens
caccagcgcggggacgaacagagccgggaagaaggagcgcagaaggaacggagaagcgagcagacgcaa

SEQ ID NO: 147942 - RNA, 58 nt, Homo sapiens
aaaccggggaccaacaaccaccaagaaacagagaggccccacccgcggagaacaaggg

SEQ ID NO: 147943 - RNA, 74 nt, Homo sapiens
ggaccagacaaacaaaaggggcccagcaaagaagcccagaggaacaaagaggggcgaggcacagacccgagccg

SEQ ID NO: 147944 - RNA, 79 nt, Homo sapiens
cagcaggacggggaggcccggccaagcaaagaccagccagaagaagcaaaaggaaaccgaaggaaagggaagaacagaa

SEQ ID NO: 147945 - RNA, 32 nt, Homo sapiens
ccagcgaaacaccaagaggcacagcgacgaac

SEQ ID NO: 147946 - RNA, 72 nt, Homo sapiens
ggcggcagcaggcgaaggcagggaaacacaaagaagacaccagaagggccagcaccacgacaacacggcgac

SEQ ID NO: 147947 - RNA, 58 nt, Homo sapiens
gcagaaggccggagacaccagcagggccccagcgcaaagcccaaggccacaccaggac

SEQ ID NO: 147948 - RNA, 62 nt, Homo sapiens
ccgcggcccggcaccgccgaacgaggagacggcgaagaacagaggaacaacgccaacgacaa

SEQ ID NO: 147949 - RNA, 86 nt, Homo sapiens
agaacagaagccagagaaggaagcaacgcccagcagagagacagagccaggagaaaccagaaaacagggaagcggggagcggagga

SEQ ID NO: 147950 - RNA, 69 nt, Homo sapiens
cgacccaaagcaaaccaggaagcggcagagaaagaacaaagggcaaaggacacaccgcacaaacggccg

SEQ ID NO: 147951 - RNA, 75 nt, Homo sapiens
ggaacaagggcgacaaaaagggagaaacaggccaaggaaaaggaacagagagagcagaaccgaaacggggaaaga

SEQ ID NO: 147952 - RNA, 76 nt, Homo sapiens
cgaaggagcagccccgggcacccacgagaagaggcgaaagaagagggaaaagacgagcaggagaagaaaacaagaa

SEQ ID NO: 147953 - RNA, 77 nt, Homo sapiens
agaacacagagcacagagaaagaagaggccccagaagcagccccacaaagggaaggccgaagacgcaaccaaccaaa

SEQ ID NO: 147954 - RNA, 35 nt, Homo sapiens
acaagagcggaaaagaacgcaaacccgaacaaaca

SEQ ID NO: 147955 - RNA, 80 nt, Homo sapiens
ccggccgcgcggggccgacgggagcgggcccgcccggagcggcaggagagggaacccccagcaagaggcccaccccaaac

SEQ ID NO: 147956 - RNA, 72 nt, Homo sapiens
gccggcgggcgggggccccgcgccgcggccgagcagcgggaaagaccacagcaagaccacgcccccagccgg

SEQ ID NO: 147957 - RNA, 74 nt, Homo sapiens
cagcgcagcgcccgcgcggccagccgaacgaggcgccggccgcaaagaggcccgggcaggcccgaggcggcgcg

SEQ ID NO: 147958 - RNA, 76 nt, Homo sapiens
ccaagaacaagcacaaagccacagcgaccaagaggaagcacccgcgagaaagaagggcacagcgaaacagcccggc

SEQ ID NO: 147959 - RNA, 83 nt, Homo sapiens
gcgagggcggcccggggcacccgcacgggaagcaggcccgccacaggacagggcagaccgccagcagcacagcaagccacaga

SEQ ID NO: 147960 - RNA, 79 nt, Homo sapiens
ccccacagccaggaccgcagccaggacccaaaggacagccacaggaggaagggaaggaagacaagaaccagcagagaga

SEQ ID NO: 147961 - RNA, 70 nt, Homo sapiens
ccagaagaaggaccggaagcacacaacaggaaaacaaaagaggagaaaggacgacccgggaagcaagggg

SEQ ID NO: 147962 - RNA, 61 nt, Homo sapiens
ggaagaaaaagaagcgacccagggaagagaagagcacggaaaaaggggggggagcccccca

SEQ ID NO: 147963 - RNA, 33 nt, Homo sapiens
aagcaacagcccacagggcagggcgaggaaagg

SEQ ID NO: 147964 - RNA, 75 nt, Homo sapiens
cgcaaacgcaagcaacaccacggaaaaagcaaagccaagacaaaacacagggaccagaaccgagaagcagcccgg

SEQ ID NO: 147965 - RNA, 77 nt, Homo sapiens
gccggaccacaccacccaccgcacggagggaagccggccagaagacggccacccaggggagcgcaaccccagaagac

SEQ ID NO: 147966 - RNA, 82 nt, Homo sapiens
cgggcaaggcagcgagggcaggaagccccggccggacggagcggcaaaagcagaccggaaaacccaccggcaagaccacacc

SEQ ID NO: 147967 - RNA, 76 nt, Homo sapiens
agcaacgcacagcacgacccacccgcggaaggccaaagacagacgggcccagcacacagggacaacgccaggggca

SEQ ID NO: 147968 - RNA, 65 nt, Homo sapiens
cggcaaacaaagcaaacagccaaccacagggccacaaagaaggaagaaaccaaacgaaacacaac

SEQ ID NO: 147969 - RNA, 66 nt, Homo sapiens
gccacggccccccgccagaagccagaggaagccgagcagaagcaggaaaacagagacaaccacgca

SEQ ID NO: 147970 - RNA, 74 nt, Homo sapiens
agagagcgggggggggaccgccggcacgcgacccccccgggcccaaaggaagcgcaagaaagcacagagagcca

SEQ ID NO: 147971 - RNA, 77 nt, Homo sapiens
ggaaaaagcaaagaaaccaaagacaaacgaagaagaggcacagaaagacaagaccgaacaaggagaaaggaacacca

SEQ ID NO: 147972 - RNA, 36 nt, Homo sapiens
agacgcagggcgcccccggagccaaaagacacgcca

SEQ ID NO: 147973 - RNA, 69 nt, Homo sapiens
gaaggggacacacgggccacaaaaaacgccacaaccaaacgcgcaaagcgccaaacgaaaaggaaagga

SEQ ID NO: 147974 - RNA, 72 nt, Homo sapiens
ccagaggagggaaaacgccgaagaaggcccagcagcaggagcagcgaaggggccaaaaacgcccagaagacg

SEQ ID NO: 147975 - RNA, 82 nt, Homo sapiens
gggaaagacgccagcaacggcagaagaagccacccgcgcgcaggagaaggaagcggaaggccagcagaggcagacgcaaggc

SEQ ID NO: 147976 - RNA, 76 nt, Homo sapiens
aagaaaagagggacacaacagcagccacaggaaccgagggcaaaaggaaaaaggaaaccgggcggggcagcacgga

SEQ ID NO: 147977 - RNA, 55 nt, Homo sapiens
acaaagaaagaaccagcaaagaaggcagcacgggggcaggggagagacaaccaga

SEQ ID NO: 147978 - RNA, 65 nt, Homo sapiens
gcacgcccagcaccaccccgggagagaaaggacagggacaggaaagaaagaaaaagaaaagaaaa

SEQ ID NO: 147979 - RNA, 87 nt, Homo sapiens
agcggccgaaggagccaccaggccgggaagcccacggggcagcgaggcacaggccccaccgcgaggcgagccaccccagggaacccg

SEQ ID NO: 147980 - RNA, 72 nt, Homo sapiens
caggacgaaaaaagggcaagaagccagaagggcaggcagggccaaagacccagggacaggacgggcaacagg

SEQ ID NO: 147981 - RNA, 67 nt, Homo sapiens
agagccagagccgagaagcagacaagagagccaggaccgacggcgggacaaagcgcaggagaaaccg

SEQ ID NO: 147982 - RNA, 84 nt, Homo sapiens
ggggaagaggcccacccggagaaccccacggagaaccagaggccggcgcggaagaggccggcggcgggacggccccacgggacc

SEQ ID NO: 147983 - RNA, 75 nt, Homo sapiens
aaacacaccaaaccacagaacaaggacacgcgaaaaaaaagcccaggaagggaaagcaaggaacgccggaagacc

SEQ ID NO: 147984 - RNA, 68 nt, Homo sapiens
caaagcccagccccaggcacagaccccagcgagagccgaaagaagcagaggaagaagccccaccgcac

SEQ ID NO: 147985 - RNA, 72 nt, Homo sapiens
cgcagaaccccaaccagacgcgcaacgaaagaacaaaaccacgcagcaacagggcgaaagacaagacaccgc

SEQ ID NO: 147986 - RNA, 59 nt, Homo sapiens
aggggccggggcccccaagggcacagaagagagaagaagcaaaccgggaccggaagcac

SEQ ID NO: 147987 - RNA, 107 nt, Homo sapiens
agcaggcaggaagacacgcccacaagaagaaccaccacggcccaaacccagaggaccgcggggacccaaggcacacaacccacagagccacacgaaagaggagcgag

SEQ ID NO: 147988 - RNA, 41 nt, Homo sapiens
cccggcgcacgcaccccagaacccaagaaggcagaagccag

SEQ ID NO: 147989 - RNA, 80 nt, Homo sapiens
cagcagacagggaccggcgcgcaggccacgacccccagagcaacaggccgggaagaaggagggacacagcagcgcggaga

SEQ ID NO: 147990 - RNA, 73 nt, Homo sapiens
cgcaaacgaaaaagaacgacagagcaaccaggaaagaagagggaccagcaccaaaaaacggacaagcacaacg

SEQ ID NO: 147991 - RNA, 86 nt, Homo sapiens
ccaggcagagccgaggaagcgaagcagaggcccagccacaaacccccccacgacaccgaagcagcgacggcacagcgggaagaagg

SEQ ID NO: 147992 - RNA, 74 nt, Homo sapiens
agcaggacgcgccgcgccccaaggagaagacaccaagacgcccgagccaccagcaagaccggaaacagagaaaa

SEQ ID NO: 147993 - RNA, 78 nt, Homo sapiens
cccggaccagccgccccggcgccgagggaggagcaccgcaaaccgccacgggaccgagggaagaaccggccagggggg

SEQ ID NO: 147994 - RNA, 78 nt, Homo sapiens
gacgccgaggggaaaggcgaacccgagggaggagcccgcgccaaagaagagacgccgcaggaagcacaagaaaaaaaa

SEQ ID NO: 147995 - RNA, 79 nt, Homo sapiens
gccccagcgccaccaaagaccgcgacgccagaccaagcggcgacaaggcccccccgcgaagaaggaagaacgagcaagc

SEQ ID NO: 147996 - RNA, 62 nt, Homo sapiens
caaaggggcaagaccagaaggccaggcaggacgacgcggagcagggacacgcaccgaccaga

SEQ ID NO: 147997 - RNA, 87 nt, Homo sapiens
acggaagcgcagggagaaggaagaggggaaaaggggaggacgagaagcggcgcccgcggaagggcgccccgcggagcacccgagcaa

SEQ ID NO: 147998 - RNA, 81 nt, Homo sapiens
caggcccaggcccagacggggacaggaacaggggccccggaaccgcagaccaacgccgggcaccagacccggaggagcagc

SEQ ID NO: 147999 - RNA, 74 nt, Homo sapiens
cagcaaggccgggaggcacgccccgccgcgaccaaggcccacgaggccccgggggcccggaacaggagcgaagg

SEQ ID NO: 148000 - RNA, 85 nt, Homo sapiens
ccgggacagcgaggagcgagggacccccaccaggagagaacgccgcgccgcgcgacaacggcccggcaggcaaggccggccgcgg

SEQ ID NO: 148001 - RNA, 83 nt, Homo sapiens
ggagaccccgaaaacggaagcgcagggagaaggaagaggggaaaagggagaacaagaaaagcgaagccaagacaggagaagag

SEQ ID NO: 148002 - RNA, 84 nt, Homo sapiens
cggggccacagccgcgggggccaccacacggcccaaaaccgcaggcaacagagggaaaagacaaacggagcaggaaaaagaaca

SEQ ID NO: 148003 - RNA, 73 nt, Homo sapiens
cacccgaccaacaccgggagaagagacaaaccccaaacaccccaacagcaccagggaccaaagacagagacaa

SEQ ID NO: 148004 - RNA, 103 nt, Homo sapiens
cggaggcccgggcgcggggaagcagccgccacggaggcaaagcagccgaacccgaaacaagagagacccaaaagggccagagcagggagacaaaagagaaagc

SEQ ID NO: 148005 - RNA, 79 nt, Homo sapiens
gccaacgccgcccaagagagcaagaccgggcccacgaggaaccgcgacggacccgcacagcccaaccagcagccgccag

SEQ ID NO: 148006 - RNA, 77 nt, Homo sapiens
agccccgagagcgggaacagcagcaaagaccacagcggcaccaccgcgaccaggaagagccaagacaagagaggaca

SEQ ID NO: 148007 - RNA, 63 nt, Homo sapiens
ggaacgacccgaggggggagagcgcgggggcgacggccgagcaggcagcaaagcaccgccgag

SEQ ID NO: 148008 - RNA, 83 nt, Homo sapiens
agcaccggcgggagcgggcaccggcgaggggcgcggaggcgcggaggcagagcccacaagccgcaccagagcagcgaaaccag

SEQ ID NO: 148009 - RNA, 56 nt, Homo sapiens
aaaacgcaccggagaaaaaaacggagaacggcgaggggacggggccgaaagggggc

SEQ ID NO: 148010 - RNA, 75 nt, Homo sapiens
aacaacaaccggaaacacgaaggaacccaaagggaggaggcgaccagaaggacaaaagcgcccgacaggaagcag

SEQ ID NO: 148011 - RNA, 85 nt, Homo sapiens
gccaccgcggggcccaggccgaggccgagggggacccagccggaaggcacggggccgaggacaggcaacagcggaaacagagaag

SEQ ID NO: 148012 - RNA, 73 nt, Homo sapiens
aagcccagaccgccaccaaaaacaaagaggagagaaggcccagcgaccgcgaaaccgagcaggagaaccagac

SEQ ID NO: 148013 - RNA, 73 nt, Homo sapiens
gccggagaagcaggggggccaggaggggagaggaggcaggcccgcggagacagacccagcacggacccccccc

SEQ ID NO: 148014 - RNA, 67 nt, Homo sapiens
aaccccaggaaacggccagccaaccaggaaaccgccagacggccgcaccagaaggaaaggcgacggc

SEQ ID NO: 148015 - RNA, 83 nt, Homo sapiens
ggcccacccggagaaagggcccccgaaggaaagagaggccggggaaagccggagggcagagcagacgaagagagccaacgacc

SEQ ID NO: 148016 - RNA, 54 nt, Homo sapiens
acccaaccgggggaagaccccagagaggggagagccgaccccgcgaggcacccg

SEQ ID NO: 148017 - RNA, 76 nt, Homo sapiens
aaagagagaaccggagagcacccaacagccgaagcaaaacgagggcagagaggcaaaacaaaggcgaagacacgga

SEQ ID NO: 148018 - RNA, 78 nt, Homo sapiens
ccaggaaacacgcagagaagggcacaccccaggaaggaagacccccagaaacagcccaggcacgggagacgcaaccac

SEQ ID NO: 148019 - RNA, 76 nt, Homo sapiens
gcacaccggcgagccaagccgcagccggcaggccggggaccacgagcagcacaaggaaaacgagagaaacgaaggc

SEQ ID NO: 148020 - RNA, 38 nt, Homo sapiens
gccacaggccagcgagagcagcccgacggccaggaggc

SEQ ID NO: 148021 - RNA, 70 nt, Homo sapiens
gagcaccgacgacaaaccccaccagccaggagcgcacccagcgcagaaaacaccgggaaaggcccaaacc

SEQ ID NO: 148022 - RNA, 87 nt, Homo sapiens
gagaggacaggcggaggccccagggaagcgcagaaagcaggcgaacccgcggcgcaaaacgacaaaacagaggagaccagaccagaa

SEQ ID NO: 148023 - RNA, 74 nt, Homo sapiens
cgagcaacaaccgccgagcgggcccagcggcgcggaaccggaggcaaggaacaggaagaagccaggcaccacca

SEQ ID NO: 148024 - RNA, 84 nt, Homo sapiens
cacacaaaaccaggcgaacgaagaagcgggccacccacaaagcgccaacaagagcgaagacaacggacaggaaccacccaaaaa

SEQ ID NO: 148025 - RNA, 71 nt, Homo sapiens
gaaacaccacggagaaaaacgagcagcggcgagacacagaaagggccggacagcacgcacgacggcacggg

SEQ ID NO: 148026 - RNA, 75 nt, Homo sapiens
aagggaaagaggccggagagaagagacagagacaggggccaaacccacaggcgccaaagggggaacaaacgacgg

SEQ ID NO: 148027 - RNA, 71 nt, Homo sapiens
gacaaaaagaagacggacagggcacacagaaccgaaaaagagcgggcgaaaccggacggggaagaaaaacc

SEQ ID NO: 148028 - RNA, 53 nt, Homo sapiens
cgcccccgagcccggaggggggagaaaagagggcgaaccaaagaaggaaggcg

SEQ ID NO: 148029 - RNA, 54 nt, Homo sapiens
aaaccacggccaacaggaagaaagccgaagaaagcgggcaaagcggaagcaaag

SEQ ID NO: 148030 - RNA, 78 nt, Homo sapiens
agggggcacggcaggcaaggacacgaaacacccaggccgagacaagagacgaggcgcacggcccaggcggcacgaacc

SEQ ID NO: 148031 - RNA, 64 nt, Homo sapiens
aggaggaaaagccgcagggggccacaggaaaacaagggcaagcaagggccgacaaaaaaccgcg

SEQ ID NO: 148032 - RNA, 76 nt, Homo sapiens
aaacggccgagccggcaacgcaaaaggaagcagggaccgcgaaaagaaggaggccagcgggacacacaaagaaaga

SEQ ID NO: 148033 - RNA, 73 nt, Homo sapiens
agccgagcgagaccacgcaccacgggcggggcaagggggggaaagagaaacccaaggagcgacccccaaaccc

SEQ ID NO: 148034 - RNA, 56 nt, Homo sapiens
ggaacggggcgggccaagcagaggggaacaccaggaaaaggagaccccaaggccgg

SEQ ID NO: 148035 - RNA, 78 nt, Homo sapiens
gaacaccaggacccgcacaggaagaagccgaggccagaagacacgcaaggcccagaacaagggcacaacacagaagaa

SEQ ID NO: 148036 - RNA, 85 nt, Homo sapiens
gagacagggcacaccaaacccacgcacccaggccacagaggaggaaagagaggggaaagaagcagccaagccccaaggaaccaca

SEQ ID NO: 148037 - RNA, 76 nt, Homo sapiens
caagaggaccccgcgcaaccggcacaacaggcagagacacacgaagagaagagcccggaaaaggagaagaaaaaag

SEQ ID NO: 148038 - RNA, 70 nt, Homo sapiens
gccaaagccaggcaaacaaggaaacagaaagcgagaaggaaaccgacccgcgagacacgcggacggacgg

SEQ ID NO: 148039 - RNA, 84 nt, Homo sapiens
accccggggcgcgccggaggccgaccgggagcacgcagcggggagccaggaacgggggacaaggagaggcacacacacagaacc

SEQ ID NO: 148040 - RNA, 80 nt, Homo sapiens
aggcaaccgcgcccccagagcccagaacgcaaggagggacaggacggaaggagcggaggaagacacaagagcgagcgaag

SEQ ID NO: 148041 - RNA, 103 nt, Homo sapiens
gcccagcaagaggagcagccagcggcagaccaccagccccgccagaaacggcgaggaaagagaggagccccggaaagaaaaggacagacccggccagaaagga

SEQ ID NO: 148042 - RNA, 83 nt, Homo sapiens
caagagcggcacgggaacagcggcgagaccagaccaggacaaagcaaaccaagccaggcccgaagagcacccagacagggacc

SEQ ID NO: 148043 - RNA, 82 nt, Homo sapiens
cggcacaagaaaagagaccagcaggagcagagcggcaggagcggaacgcccgaaccgggcggaggaaccgcgaacggaagga

SEQ ID NO: 148044 - RNA, 65 nt, Homo sapiens
acgcaggaaaaagcggggacaggagagacaacggaggcaagaaagacggagaagcgagaagagac

SEQ ID NO: 148045 - RNA, 83 nt, Homo sapiens
gcgccgccccgggcggccgcgggcggggaccagggagacggaacccccggagccccaggacccgaagaccagaccaaaaccga

SEQ ID NO: 148046 - RNA, 73 nt, Homo sapiens
ggccgaccagagaacagggaagagcggccaagagagaaacacaagagaacaccaggcagcaccacccccacag

SEQ ID NO: 148047 - RNA, 59 nt, Homo sapiens
caggaaaagacagagggaaagggagcagcaccggccacacccacagcacgaccggaacc

SEQ ID NO: 148048 - RNA, 71 nt, Homo sapiens
gcaccccaagaccggaggggaggagcacagcagccgggccggcgaaaaaccgcgaacccaaccggcaacca

SEQ ID NO: 148049 - RNA, 68 nt, Homo sapiens
accacacgcaaagagaagaagggggaaaaagggaccgcgggccaaaaggaccacgcaacaacgggaag

SEQ ID NO: 148050 - RNA, 75 nt, Homo sapiens
ccgcggaaaggagggcggcccggaccgggagacacggccagacgcccccaggacagagagaggcagaagaaaaag

SEQ ID NO: 148051 - RNA, 84 nt, Homo sapiens
gcaaaaacccacaccgcaacccagcgagagaaagccagagacccagagcagcagcgaagagaaggcccagcccccccgccaccc

SEQ ID NO: 148052 - RNA, 53 nt, Homo sapiens
cgcagggcgcccccgggcccgaggccaggagccaaagagcccgaacgcggcaa

SEQ ID NO: 148053 - RNA, 50 nt, Homo sapiens
ggagaaggcggcccaccccagagcaccggcagaagcggcgcgggcccccc

SEQ ID NO: 148054 - RNA, 73 nt, Homo sapiens
gcaacagcaagaaacggaaagacccgccaagagagaaaccaacaagcgggacaagacgacagaaaccgccgaa

SEQ ID NO: 148055 - RNA, 72 nt, Homo sapiens
cagagggcacacggcacagaccaggacaggccgccagggggacagaaggagcaggcaaaagcgccaaaacaa

SEQ ID NO: 148056 - RNA, 71 nt, Homo sapiens
aggcacaggaaagaagacgggacagcaggccaaaaggaaaacgaaccaggcccagcaggaggcgaaagcaa

SEQ ID NO: 148057 - RNA, 64 nt, Homo sapiens
gcgcgccggagggaaaggaaagcggacaacccgggacacccgacgcaaacagcagacggaagac

SEQ ID NO: 148058 - RNA, 78 nt, Homo sapiens
aggaaccggcgggcgccggagggaagagaggaggggagggagaagggagaagacgacggaagaggaagaggcggaaca

SEQ ID NO: 148059 - RNA, 69 nt, Homo sapiens
cacgcgcggaaggcagcgcccagcagcgcagaggagagcaggccacaggaaaccgaagcccccccagcc

SEQ ID NO: 148060 - RNA, 74 nt, Homo sapiens
cccaacaggagcacaagagaccacagacacaaccgcaacccaccaaggagcacaggacgaagaggaaggaaaaa

SEQ ID NO: 148061 - RNA, 86 nt, Homo sapiens
cacgcagaggaaggagcagcgcaaggcgaccaggccgcgggaagcgcggacgccccaccaacggcgcggacccgaccgcggaaccc

SEQ ID NO: 148062 - RNA, 85 nt, Homo sapiens
ggccggcgcccccgggcccgcggagcagggcgccagggaaggaccgcacacaagccgcaccggacacgcgcggagcgggaggacc

SEQ ID NO: 148063 - RNA, 84 nt, Homo sapiens
agaacgcaacaccaaggcacaccaccccaggaagaaaacaccggagcccaagacaccaaaacagacgcaggcaagaggcagaag

SEQ ID NO: 148064 - RNA, 63 nt, Homo sapiens
gagacccgcgggacccgccgcggcgagcgccaccgcaggagacaccaggcgccgagaaggcca

SEQ ID NO: 148065 - RNA, 81 nt, Homo sapiens
cggcgaccggcccagcgcagcgggcccggggcgggggccgggaggaacgaagcgcggcccgcccggagcggcagcaaacag

SEQ ID NO: 148066 - RNA, 77 nt, Homo sapiens
acaaagccgcgaaaggccgggaagagggagagcaaacggccagcccacaccgaccacgacaccccgggcgaggaaga

SEQ ID NO: 148067 - RNA, 70 nt, Homo sapiens
aaagcgaaaacacacggaagagcgcggccagcaccccaacgggccaaaggggccaccacagagcccgcag

SEQ ID NO: 148068 - RNA, 84 nt, Homo sapiens
acagggacagcgcaccacaaggaaagaagccagccccgggaaccaccacgacccggcaggccccgggccccgcacgcccccaag

SEQ ID NO: 148069 - RNA, 70 nt, Homo sapiens
ggcagcgagaggaccaacaaagacgaaacggcaaaacaagggacccccgaacccggaacaggcacccacc

SEQ ID NO: 148070 - RNA, 48 nt, Homo sapiens
gaccgacaccgcaagaccccgaagcccagccggagagagggaggggcg

SEQ ID NO: 148071 - RNA, 105 nt, Homo sapiens
cggacgaggacaaaggaacagcacagggcgcaacaagagcgacaaacgcaggcgcccagacaccagcacaacccccagaacgacgggcaggaagagagacggccg

SEQ ID NO: 148072 - RNA, 86 nt, Homo sapiens
gccacccggagccccgacagaacccaagccgagcaccccgccagcgccaccagacagcacggccccccaccccccagcgggggcca

SEQ ID NO: 148073 - RNA, 76 nt, Homo sapiens
gcacagaaccgcagcagggacgcgggcacgggaccggcgaggacgaaagaaggaacacacggacgcccagaaagag

SEQ ID NO: 148074 - RNA, 82 nt, Homo sapiens
acaccaacagcaccgcgcaggaggggccagagacaccacaccaaacagaagcaagaaggggggaagcagagaagcaagcaac

SEQ ID NO: 148075 - RNA, 59 nt, Homo sapiens
cgcagaggaacaaaaaaaggagagccggcagccccgcccgcagacagaagagcccaaga

SEQ ID NO: 148076 - RNA, 75 nt, Homo sapiens
gccaccagcacggaccaggaggcgagcaacagggcccgaggccaggagccaaagagcccgaacgcggcaacaacg

SEQ ID NO: 148077 - RNA, 43 nt, Homo sapiens
aagccaacccaggaggaaaaacgccaccagaggagcgaagcga

SEQ ID NO: 148078 - RNA, 81 nt, Homo sapiens
cgaacagacgcagccacaagcgaggagcagacgagggccaggccggggcgaccaacggaaaccggacaagcagaagaacag

SEQ ID NO: 148079 - RNA, 58 nt, Homo sapiens
caccccccacagaaagggcggaaacacagaggccaacagcaagagcaaccagggacca

SEQ ID NO: 148080 - RNA, 85 nt, Homo sapiens
ccgcccccaagagagaagaggcagcgcaccgcagcggcagcggcccagacgggcagcgggacgggcccgcagccaccagggcaaa

SEQ ID NO: 148081 - RNA, 59 nt, Homo sapiens
gcccggcgcggcacagcgccgccagcagggccgaccaggaaaccaccccacccaacccc

SEQ ID NO: 148082 - RNA, 67 nt, Homo sapiens
cgcccggcgccggccgagaaggcagaggcgaggcggccccagcaccacccgacacgccccggacgga

SEQ ID NO: 148083 - RNA, 75 nt, Homo sapiens
cacagggaccacaagagcaggaagcaacacccggccccggggccagcaggaagaaaacgaagcagaaaagggagg

SEQ ID NO: 148084 - RNA, 74 nt, Homo sapiens
cggagagcgagaagacaggccccgcgagcccagccaccgcagccgccagcagccaggagccggacgagaaacca

SEQ ID NO: 148085 - RNA, 79 nt, Homo sapiens
ccgccgccacaaaggcagcagcacgggacgcacggcccggggggagacagccacgggaaggcccagcccccggacacgg

SEQ ID NO: 148086 - RNA, 81 nt, Homo sapiens
gcggagcacgaggcgggcagcagcagccccggggcccggagaggaaagaccacagcaagaccacgcccccagccgggggac

SEQ ID NO: 148087 - RNA, 76 nt, Homo sapiens
cggcagcggagggggccgggaagagggcgacaaggaagccggcaaagcaccaggcacagcaagcgccgaaagacca

SEQ ID NO: 148088 - RNA, 70 nt, Homo sapiens
aaagccaaagagcgaagagagaaacaggcaaaagcggaacaagaaagcaggaggccgagagggcaccacc

SEQ ID NO: 148089 - RNA, 91 nt, Homo sapiens
aagcagaacgagcaacgaagacaaggagacagagagagaaaagaaccaacaagaacccacccggcggaagaggaccaagaagggggcagcg

SEQ ID NO: 148090 - RNA, 62 nt, Homo sapiens
caggcgaagcggccgagcaggcgagcgaacgacggacaggccggaagaccagggcccaggaa

SEQ ID NO: 148091 - RNA, 67 nt, Homo sapiens
caaccagccaggaacaggcacacgcaaggcgaccacaccaagcggcaagaacggaagcacgggcgga

SEQ ID NO: 148092 - RNA, 37 nt, Homo sapiens
ccgaccccggcgcacgccagagagacggggcaccgcg

SEQ ID NO: 148093 - RNA, 75 nt, Homo sapiens
agagaagaacagacgccgcacccccgcgacacaggagagaggaagagagcaaaacgaagaacagaaagaagaaaa

SEQ ID NO: 148094 - RNA, 70 nt, Homo sapiens
gacagcccaccaggaagagcgaaaaaggcaggaaccgcagaacgaagccacaaagggacggagacacaaa

SEQ ID NO: 148095 - RNA, 74 nt, Homo sapiens
cagaaagcaccccacagggggagaggcaccagcaacagaccaaccgcagcaagcacagagacaggaagcccgcc

SEQ ID NO: 148096 - RNA, 83 nt, Homo sapiens
aagcccgacacaggagcgggcagaggagcagggaggccacaggggccgacaacacagagcaaggcagcgacacacaagagcag

SEQ ID NO: 148097 - RNA, 62 nt, Homo sapiens
acggggacgcaccacgagaacccagggaaaacgacccacccagcgagcaaaaaaacaccaca

SEQ ID NO: 148098 - RNA, 44 nt, Homo sapiens
aggcaggaccagcgcagcgcgaaccccccgcggccagccggagc

SEQ ID NO: 148099 - RNA, 66 nt, Homo sapiens
cgcaacgcagaaaccacaagaggagcggagcaccacacagagagagacaaggaggacacgaagaaa

SEQ ID NO: 148100 - RNA, 73 nt, Homo sapiens
agagcgcgaaacgcacgagaagaccagaacacacaagaaccgggagaacgaacaaaccaagccaacacccaga

SEQ ID NO: 148101 - RNA, 75 nt, Homo sapiens
ggcaagacaaggacagaggggaagggcacaagccacgcacgacccgagaggaaccgacccgcaggcggcggcgac

SEQ ID NO: 148102 - RNA, 81 nt, Homo sapiens
cagccaggcccgagcgccaggaggaggaagaccgaccgccgccgcgcaccgcaaacaaaggaggagaggcccaagaccagc

SEQ ID NO: 148103 - RNA, 58 nt, Homo sapiens
ccacggggagcggccggagggcgggaagaagagagcggcaggccagacgcaggggcaa

SEQ ID NO: 148104 - RNA, 69 nt, Homo sapiens
gaaccgcgcgccacccacaaccagagacggacagggccccccggaaagacagaagggccgggcacgccc

SEQ ID NO: 148105 - RNA, 60 nt, Homo sapiens
gacaaccccagggaaggggcagcacaggaacacgacagagaggaaggacacggaaagaac

SEQ ID NO: 148106 - RNA, 69 nt, Homo sapiens
cgcagggcgcccccggcaacgcagagcagaacggaaaagcacgcaaacaaagagcaggaaagcacccgg

SEQ ID NO: 148107 - RNA, 82 nt, Homo sapiens
cagcaccccgaggcccgacccaggacggaagcaaccccaaaaagacgcaacaaaacggggaggacagaaggggaacagaaac

SEQ ID NO: 148108 - RNA, 60 nt, Homo sapiens
aaacgccgagaagcccaaagggccaagcgacagagaagcgacggaacagaaggagggaga

SEQ ID NO: 148109 - RNA, 61 nt, Homo sapiens
gcgcccaaaagcccacggcgagggacagaagagaagagcgaaagccagggggcgaaacaaa

SEQ ID NO: 148110 - RNA, 69 nt, Homo sapiens
gcagcgcaggggcgggaaagacccaggagaagccgcccaaagaacggacaaaggccgagaaccgagaaa

SEQ ID NO: 148111 - RNA, 81 nt, Homo sapiens
gagaagccggagaccaggaaggcaccaggggccccagcgccgcagacaacggagcaaggcagagggggcgagggaggaaag

SEQ ID NO: 148112 - RNA, 72 nt, Homo sapiens
ggggggaaccagcagcgcccacaccaccaaacagggccggcagagacgcaacggcggggaccgagccacagc

SEQ ID NO: 148113 - RNA, 78 nt, Homo sapiens
ccaaacgacgcagccacggagaggccggggggggcacagagccccggaagacagcccccagcgaccagacccagggcc

SEQ ID NO: 148114 - RNA, 73 nt, Homo sapiens
ggcaccaaggaggacccacgagacagggacaggcggccaaaaggagaccggaaaccgagagaaacgaagacga

SEQ ID NO: 148115 - RNA, 76 nt, Homo sapiens
gcgacgcaccgagaaaggaaggaaaaccgacgaggcgaagcggccaggcccgggcggacgcagagccagagcgccc

SEQ ID NO: 148116 - RNA, 73 nt, Homo sapiens
aacgagcgccgaccgagaagggaaggccagcaaaagaaaaaacgaacggagcaagaagaaacagccgcaaagg

SEQ ID NO: 148117 - RNA, 67 nt, Homo sapiens
gagacagaaagaggaaaaacccaagagaaacaacggacacccccgggaacccaccaaaaaggacacc

SEQ ID NO: 148118 - RNA, 76 nt, Homo sapiens
cgcgacccgggacccgcccgcccgcgggagacgagacagaacaccacccggggaaccgaaccagagaacccccggc

SEQ ID NO: 148119 - RNA, 71 nt, Homo sapiens
gcaagggcaagagagaaggggaggcacacccgaccgagcagcagaaaaaggggaggggccaaagggagagg

SEQ ID NO: 148120 - RNA, 76 nt, Homo sapiens
agcgcccaacgcgagacccagccaccgcggccgaaaggaccccaacgcccgcaccacggaaaacaaagagggaaaa

SEQ ID NO: 148121 - RNA, 61 nt, Homo sapiens
ccgccgccgagcgaggccagacagaaaagggagccaggaccccagagaggagacccagcgc

SEQ ID NO: 148122 - RNA, 84 nt, Homo sapiens
gggaaagaaaacgaagggaaggcggggaaccgagaagaggcgagggaaccacagagaagcgggcccaacgaaccgaagagaaaa

SEQ ID NO: 148123 - RNA, 76 nt, Homo sapiens
cgaccgcagaccaaagagcagcagccacccaacaccgcccacccccggccccaggcccaccaggggcacgagccag

SEQ ID NO: 148124 - RNA, 77 nt, Homo sapiens
accccaccagaaaccaagcacgaaagcagacaccccaaagcgacaagccaaaagcccacccagcccaaagcagcagc

SEQ ID NO: 148125 - RNA, 76 nt, Homo sapiens
agcaagcccaccgccacccccacaacgagcaaccacaggccgcaacacaacgagaagggacacagcaggacaggaa

SEQ ID NO: 148126 - RNA, 56 nt, Homo sapiens
cgcacccagcccagcagccacagaggaggaaagcggacagaagaagccaaaacgcc

SEQ ID NO: 148127 - RNA, 80 nt, Homo sapiens
aaagaaccaaaagccccaccacccgaacgggcaacaccacacagcaacacggaggagcacgcccggaaaccgaacacgag

SEQ ID NO: 148128 - RNA, 79 nt, Homo sapiens
ccgccaggcccgcaggaccgccggagacagggcaagaccgacagcccccaggaaggaggcggcggccgcgagagcccag

SEQ ID NO: 148129 - RNA, 72 nt, Homo sapiens
acaccaagaaaagcgcaaagccagaagaccgaagacaggagcgaagacaacagagcgccaaggcgggaaccg

SEQ ID NO: 148130 - RNA, 77 nt, Homo sapiens
cggcgccggcggcgcgcgacccccgcgcagagacgagagccgaggcgccggaaacaacagccaacaaaaccaagccg

SEQ ID NO: 148131 - RNA, 52 nt, Homo sapiens
cggacccggacccaaaggccagcaaggaagcgagaaacagagagacaggcca

SEQ ID NO: 148132 - RNA, 77 nt, Homo sapiens
gaaaagccacggcaggacaaggggcagaccacaaggagagaagagagggagccacaaggaaccccagaaacacaaag

SEQ ID NO: 148133 - RNA, 76 nt, Homo sapiens
cagcggagccaaaccccaaagccggcgcagagaagcccaaacgagaagagaggagaggaggaacaaggaagaagaa

SEQ ID NO: 148134 - RNA, 68 nt, Homo sapiens
aacgccgcccggacccgccgcaaggccggaggcgcaggggcggaggagcagcaagccgccacgccgcc

SEQ ID NO: 148135 - RNA, 112 nt, Homo sapiens
cagacgaggagggcgcaccgccagccaggcccggacgaggaggacgcgcccgccaccgacacacaaaggaacccaaagcacaaaggcggaggcgggcccaacgccagcgcaa

SEQ ID NO: 148136 - RNA, 78 nt, Homo sapiens
ggcgcaggcccacggagcgcagccgccgagaggaccacccgcacccaggggacgcacggcccaaccccgagcaaggac

SEQ ID NO: 148137 - RNA, 76 nt, Homo sapiens
gcgggaaaagcacacacgcggagacagacaggcacagcagcgggaaaggaaaccaaaccaggaaagaaggacaagg

SEQ ID NO: 148138 - RNA, 74 nt, Homo sapiens
gcgaacaaagcaccggcaggaggagcaaagcccacaggagcagggccgagagccaggggaaaggccagcgcaga

SEQ ID NO: 148139 - RNA, 86 nt, Homo sapiens
cgggcagagagcgcagacaggacaccaaacaccgccgccgaccccaagaagaagcggaagaggagccgcggaaccaagacacaagg

SEQ ID NO: 148140 - RNA, 81 nt, Homo sapiens
gggaccgccgccgccgccgccaccagagaaggagggggcagagcacggcaggcagaaggggccaacccgggggaacgcacc

SEQ ID NO: 148141 - RNA, 63 nt, Homo sapiens
ggaaggacaacagcccgacaaccaggggggacacaggacaacgagagaagccgaagcggggga

SEQ ID NO: 148142 - RNA, 82 nt, Homo sapiens
aaaacggggacgcgggaacacgaacaacagggcaagagaacagcacccggacaaccagacacccaggacccccggggccaac

SEQ ID NO: 148143 - RNA, 75 nt, Homo sapiens
gaaaacagagcgcaaaaacagggcggagcggcaggaagccaaggaccaaagaaagcgacacccgcgcacgcagcg

SEQ ID NO: 148144 - RNA, 80 nt, Homo sapiens
ccacggaagaccggcggccacaaggccgcccagccgcacgcgacgacagacgcgaccggaaaggagagagagacagaacc

SEQ ID NO: 148145 - RNA, 100 nt, Homo sapiens
cgaaggagcagcccaggaccgagaccggagcagccggggcggagcggaaggacagaaaacgggccccagacacaagccccaccaagaggacaccccagga

SEQ ID NO: 148146 - RNA, 69 nt, Homo sapiens
gagggggacacccgggcggggcagagcagcccccagccagccgcgaggcgggagacccccagacaggcc

SEQ ID NO: 148147 - RNA, 79 nt, Homo sapiens
aagccccacaccaccacccgcagaccccccagcagggccgccgcaacgcgcagaacaccgaagaagcaggcacaccccc

SEQ ID NO: 148148 - RNA, 50 nt, Homo sapiens
cggaaccagagaccacgggcccagacgcagacaaacgagaagagagaaga

SEQ ID NO: 148149 - RNA, 75 nt, Homo sapiens
gcaaccagcgagcgcaggcagcaagagcaggaggagacgcacagcacaggaccagagggcaaacaacccccaggg

SEQ ID NO: 148150 - RNA, 73 nt, Homo sapiens
ccgcaggagcacaacaagaggccagcccaggggcgccgacagcgagagcgcaccgcggcccggcaacaagggc

SEQ ID NO: 148151 - RNA, 76 nt, Homo sapiens
gagacaaaacaagcccccaggaaccacggacgccaacagcccagagagaaacagaaaaggaacaaccaaacgacac

SEQ ID NO: 148152 - RNA, 58 nt, Homo sapiens
ggccaccaaggacagggcagcaagaacagaagacagagacacgacacagcagccaggc

SEQ ID NO: 148153 - RNA, 64 nt, Homo sapiens
gaggacagcaggacccaaggagagcagcggaggcgacgcgcccagaagacggcagcccagccac

SEQ ID NO: 148154 - RNA, 66 nt, Homo sapiens
ggcgacccagcaaaaaggacaaaacagcagcaacaagcaacagcgccaggggacccaaagaaaacg

SEQ ID NO: 148155 - RNA, 90 nt, Homo sapiens
aaaagcaccccacgcacaaggagcgagcagaacacacagagccaccaggaccagaggagcgagagcagcaagaaccacacccagcagcaa

SEQ ID NO: 148156 - RNA, 74 nt, Homo sapiens
cgcgccccgagagaacgaggaggagccccacccgcgcagaaaagcacaacaggaaacaaccgccagggaggaaa

SEQ ID NO: 148157 - RNA, 75 nt, Homo sapiens
gagcgagaccgaaggcaccgacacacgcccccaggcagcgcccggggaaccggccgcaggcccccgggaaaccga

SEQ ID NO: 148158 - RNA, 81 nt, Homo sapiens
agaaaaaagaaccagcaaaggcggagaagccagggcgacaacaagagaggaaacgaggcgggaagacgaaacgccaaaaca

SEQ ID NO: 148159 - RNA, 78 nt, Homo sapiens
gccagccgaagaaggcgagcaggggcgggagagccccgcagaagacgccgacgagacaacccagccagccaacaacaa

SEQ ID NO: 148160 - RNA, 81 nt, Homo sapiens
gcacccgggacggcgccgaccaccccgcaccaagcaaagcgaagacggaagaacgccccagcccagacacggaacaccggc

SEQ ID NO: 148161 - RNA, 69 nt, Homo sapiens
accccacgccaccgaagagccaagcccaggaccacccgagcaggaagacaccagaaaagcgcagagcag

SEQ ID NO: 148162 - RNA, 66 nt, Homo sapiens
gaaagccaagaacaggaaacaaaacgggagagagcagaacaacagaacacgaaagaacccgaacac

SEQ ID NO: 148163 - RNA, 72 nt, Homo sapiens
acgagcagacacgcaaagaagcccgaggcgcaagagacaagaaggcaaacagggggcaccgacccgcacgca

SEQ ID NO: 148164 - RNA, 74 nt, Homo sapiens
cgaagcaaaggagcaagcggccgagccgagggcacaaaaccgccccagccaggaggcagcagccaaggaaagcc

SEQ ID NO: 148165 - RNA, 72 nt, Homo sapiens
ccgacaaccccagaaacagaaaaggggacaagccacaagagaagagacaacaggaaggacaaaacggaccgc

SEQ ID NO: 148166 - RNA, 80 nt, Homo sapiens
cagggcggaagcgggggggggcaggacccaaggccagccagccccaggcaccagcggacaggacagggaggacgaaggcc

SEQ ID NO: 148167 - RNA, 81 nt, Homo sapiens
cccagagaagccgcaggacagcagccccgagcacgggccgaggcccaccgcgacacaccgccaggcgcggggaggcccagc

SEQ ID NO: 148168 - RNA, 73 nt, Homo sapiens
cggaaggacgaggcgaggcgagaaacgagaccggagagaacagaaaaaaagcggcccgggaccaggaaagaca

SEQ ID NO: 148169 - RNA, 77 nt, Homo sapiens
ccaaaccaagaggcggccagcaggaggcgagaagacggcccgccacgggccccgcagccgcgcccgagcgcccgagc

SEQ ID NO: 148170 - RNA, 71 nt, Homo sapiens
gaggaaccacgaccgcgcgggaagaacaacgcaccccgaaagcgccacgaaaaggaaaggaacagcgagcg

SEQ ID NO: 148171 - RNA, 56 nt, Homo sapiens
gcgaagaacaagggccgcaaacccggggagggacggacacagggagcgcaagcgac

SEQ ID NO: 148172 - RNA, 69 nt, Homo sapiens
gacgggggcgcaacaggccacagaacccaaaagcccgacaaagaagaacaacaagcaagccccaaacca

SEQ ID NO: 148173 - RNA, 71 nt, Homo sapiens
cgccccccaggcccacaaccagcccagcagcagcaagcagggaaaagacagcaacaaagaaaagaggagca

SEQ ID NO: 148174 - RNA, 52 nt, Homo sapiens
cgagcccccaccgggccggacccgagccccagaccagcggcgccggagcacc

SEQ ID NO: 148175 - RNA, 76 nt, Homo sapiens
gcgcggcagaaaaaccagcccggcgcagcggccaaccagagaggaaagccgaggacagccacacacgccccgggca

SEQ ID NO: 148176 - RNA, 79 nt, Homo sapiens
cggacgcgcagcaggcggggaggacgaggggcccgggcccagagcggaagacaagacggaagaagcgggacgagcagag

SEQ ID NO: 148177 - RNA, 92 nt, Homo sapiens
acggcacgggaccacccgcaaggacccggaaggccggggggccgagacgcccgcggcggacggagcaccacccccacacccaaacggccggc

SEQ ID NO: 148178 - RNA, 80 nt, Homo sapiens
cagggaacccacccaagggaagaaaagaggagagaagacagcaaccaaagggaagggaacagggaacgcaccccacaacc

SEQ ID NO: 148179 - RNA, 52 nt, Homo sapiens
cgagccccccagccgcgaagagacccgacagacagggcagaaaagaacagac

SEQ ID NO: 148180 - RNA, 51 nt, Homo sapiens
gcagcgcccagcagcgcaggccaccccaggccaccagcaagaccacccccc

SEQ ID NO: 148181 - RNA, 99 nt, Homo sapiens
gggacaaaagggggaccagccaggccgaggaaccagaacacacagcaggaggagcagcggggaagagacccccgacgacagagaagagccgcagggaca

SEQ ID NO: 148182 - RNA, 119 nt, Homo sapiens
ccagagggagcggcgcccccccccccccggcgcggaccccgcggcgccgccgcccgcagccccgagaccgcagggcagcggggaagaagaaaaggaaccgaggccccccggcgacacgg

SEQ ID NO: 148183 - RNA, 69 nt, Homo sapiens
gaaaaaagggagacagaaaagcagagcaaagggagagaggaagggaagcaaacagaacggacgcgaaac

SEQ ID NO: 148184 - RNA, 60 nt, Homo sapiens
ccagaaccagcaggagggagagagggaaggccgcccgcggggaacccccaacgcaggagc

SEQ ID NO: 148185 - RNA, 78 nt, Homo sapiens
aaacgaagcaaaagacagcgaggagcagcagcagcccagcaggcgcggcccgccaggacacggcaaagagacccccca

SEQ ID NO: 148186 - RNA, 85 nt, Homo sapiens
gggcgggggcggcacgacggaggcacaaggaggacgccggcgccgccagaacgagaaagggaacgaaccgaggaacccggcccca

SEQ ID NO: 148187 - RNA, 71 nt, Homo sapiens
caaaccggagaaggagccaagaaagagaagacagaagcaacaagggagcaggggagagggacaccaacccg

SEQ ID NO: 148188 - RNA, 79 nt, Homo sapiens
agcccaaaccccaggccaagcaaccaccagcagcccccagagcggaacacagccacggacggagccagggaaggggacg

SEQ ID NO: 148189 - RNA, 74 nt, Homo sapiens
cacaccacccaggcaaacgaccaaagacaagaaggcccgccgccccggggcacgccaggcaaccaagacaacaa

SEQ ID NO: 148190 - RNA, 74 nt, Homo sapiens
cccggacaaggaccggccccaacaaaggaggcaaaaagggagcgggaccacgcgggcgccccagaaaggccgac

SEQ ID NO: 148191 - RNA, 75 nt, Homo sapiens
ccacgccgccaagcaggcagaaccagcggcacaacagcaacaacagggcagagaaggcagagcgcccgaagaaga

SEQ ID NO: 148192 - RNA, 83 nt, Homo sapiens
agggacgccggggccgggccaggagcagagggggcgaggaagagacaggcgggggagaagaagcagggccaaacgcaggagaa

SEQ ID NO: 148193 - RNA, 70 nt, Homo sapiens
ggaacagcagacaagacgagcccaccacggacagcaaacaggggaccccacaccacaaaccgaggaaaga

SEQ ID NO: 148194 - RNA, 77 nt, Homo sapiens
ggcggcggcgcgggcgagcggcgagccgaaaagcgagcgcgaggaaaaggcggcgggagggaccagaccgaccaaga

SEQ ID NO: 148195 - RNA, 104 nt, Homo sapiens
gccgcccaagccgcacagccgcggcggcagcagcaggagagcgggcgacgcacgaggcacacaggaaggaggggagcagggacgcgcggcggcggggccgggag

SEQ ID NO: 148196 - RNA, 77 nt, Homo sapiens
gcccgcggccgccggacggccgggcgcggagaggaggagggaacccggcccccgagcacgagccaaagccacaagga

SEQ ID NO: 148197 - RNA, 61 nt, Homo sapiens
agaaagccggagacgggcggggacccaaacaggcacgaaaagaagagcggaaggacacaaa

SEQ ID NO: 148198 - RNA, 76 nt, Homo sapiens
cagggcccaccacccccccgccacgcagggccgaggaagccaagaggagcgcacgcaaagcagggagaacccaaag

SEQ ID NO: 148199 - RNA, 68 nt, Homo sapiens
aaggcgaggcaccggaacagacgcaggaagacaacggcaagcggagaagagcaaggccgaaccgagag

SEQ ID NO: 148200 - RNA, 68 nt, Homo sapiens
gggggaaagggaccacagaccagaaaagaggaacacaacagcgagcaacagcacagcaaggagagaaa

SEQ ID NO: 148201 - RNA, 79 nt, Homo sapiens
gcacaaggccagagccggaagggggcagccccggagaggccccggggggcaagggcggaggaccagccgaggcccgacc

SEQ ID NO: 148202 - RNA, 61 nt, Homo sapiens
gacccagccggggggcacagccgggcaccagaaacgccacacgggcgggagcccacccacg

SEQ ID NO: 148203 - RNA, 76 nt, Homo sapiens
gccggaggccgagcggaggagcaagcaaagccagaaaagcaaaccaaagggagcaacaagaaagagggcggagcgg

SEQ ID NO: 148204 - RNA, 79 nt, Homo sapiens
gcgggggcggcggcggccagcgccagaccggaaacaggcacagaacagaaggaaaggacgaagagcccaggaacaccgc

SEQ ID NO: 148205 - RNA, 78 nt, Homo sapiens
ggcaaggagaagcaaccggcgccaccagcaaccagagggccagagggaaggacaggcagagaccccccaagggccaga

SEQ ID NO: 148206 - RNA, 72 nt, Homo sapiens
aaccgaagaccagggaaaggcaagagaaagcagacgaggaagcgccacgcagagagcaaggcgagggagaac

SEQ ID NO: 148207 - RNA, 62 nt, Homo sapiens
cgcgggggcgcgcgggggcgggcccgggacgcggaccgaccaacgggcagagggagcggcca

SEQ ID NO: 148208 - RNA, 88 nt, Homo sapiens
cgggcagaaccccaggaaggggggcggcagcaggagggccccgacgaagcgaggcaccgcagcaccaggcagagcagaaccccggggc

SEQ ID NO: 148209 - RNA, 59 nt, Homo sapiens
ggcacccggaggcccccgcgcccaggagaagcaggagagccgccgccccagccaccggg

SEQ ID NO: 148210 - RNA, 70 nt, Homo sapiens
ggcaggggcaggccaggaccgacagcccccacaaggcgggccccaagaggggccgcacggggaggacccg

SEQ ID NO: 148211 - RNA, 81 nt, Homo sapiens
cgccagccagagccaaagaggggacaacgaccccagaccaggacacagaggaggaaagcccaaggaacgcgaggccggcgc

SEQ ID NO: 148212 - RNA, 91 nt, Homo sapiens
ggggacgcccgcgcgacgagcaggggcggcggcgcaggagggggaagacagagaagaccacacaaccgaaggggccgggcaggacggcccg

SEQ ID NO: 148213 - RNA, 73 nt, Homo sapiens
cgcgcggaccagaccccaggcgcagggccggaaagagggcgggcccgcacggagcgcggggagaaaccggaga

SEQ ID NO: 148214 - RNA, 83 nt, Homo sapiens
ggccggcaaccgagggacccgcgccaggccggccgagcaccccgcgccgcgccagcgcggcaccaccggcggacagcgagccg

SEQ ID NO: 148215 - RNA, 80 nt, Homo sapiens
gaaaaggagcccggaagagagggccccccgccccccccccccacgcggggggaccggcaaaagaggcggcaaggcagccc

SEQ ID NO: 148216 - RNA, 74 nt, Homo sapiens
aagacccaccagcggggggaccgcagagcagccaaggggcgcgcggagcggcagacgacccgggcaccaggggc

SEQ ID NO: 148217 - RNA, 79 nt, Homo sapiens
ggacggcgacagcccgcaccagaaaaccgagaaaacgggacaaagagccagcccgagcagcacccggcccaagcagagc

SEQ ID NO: 148218 - RNA, 70 nt, Homo sapiens
cggaaaaccggcccccaacgacaaaagcagagccgcaaaaagaaaaggcagaggaaccaacaaaccagac

SEQ ID NO: 148219 - RNA, 88 nt, Homo sapiens
agccgcccaagccgcacagccgcggcggcagcagcaggagaggacaaagcaaaacaggacaccagagaaaaggggacccaggaaccgg

SEQ ID NO: 148220 - RNA, 55 nt, Homo sapiens
agacaagacagcgcaaggcagggcacgagacaaggaaagcacaaagagccagacc

SEQ ID NO: 148221 - RNA, 84 nt, Homo sapiens
acaggcccaggcagaccgcagcaaacccagcggaacacggcccgaacccccggggacccgcccaacaacgggacaacaacagga

SEQ ID NO: 148222 - RNA, 87 nt, Homo sapiens
cacggagggaaagaccaggcagcacaacaccccgacccccaaggaggcagaggagccaccaggcacgcaacagcacccagcacccag

SEQ ID NO: 148223 - RNA, 37 nt, Homo sapiens
cccgggcacagcaggcacggaggacccccagaggacc

SEQ ID NO: 148224 - RNA, 79 nt, Homo sapiens
ggacaacagcccaacaacacccagagaggagccgagagagacgcagagcaacagacaacagacggggacacacacaaag

SEQ ID NO: 148225 - RNA, 64 nt, Homo sapiens
acgaaccaggcagcccaaagggagaaaaacaggaaaagaaagacgcacagggagaaaacccgaa

SEQ ID NO: 148226 - RNA, 102 nt, Homo sapiens
gcgggcagcgaacaagcgggagcaaggagggcgaagagcgaggagggcagagacaggcaacagacggcaacgaaaggcacaaaaacgcaacacaaagaggca

SEQ ID NO: 148227 - RNA, 61 nt, Homo sapiens
cgcaaaacggaagaaaccccccaggcccgcgccgggcaaagcggggccgacgcagccgagg

SEQ ID NO: 148228 - RNA, 53 nt, Homo sapiens
gccaggcaccccccacagaaagggcgagagcaaggaagagacacggccacggc

SEQ ID NO: 148229 - RNA, 78 nt, Homo sapiens
ggccgccgccgcgaggcgcgcgagcagaaaaagaggcgaccgagcggaagcagaggaaacccgcccagcccgcagccg

SEQ ID NO: 148230 - RNA, 76 nt, Homo sapiens
cggggggcgcgcccagagccccgcgcagcccagggaagagagcgcccagaacaccagcgaagacgcggaaccaggg

SEQ ID NO: 148231 - RNA, 75 nt, Homo sapiens
aagaacgaaggcaacgcaagggaacggagacaagaaaacgcaggcaagcaaagacagaagcccgggggcaaaaca

SEQ ID NO: 148232 - RNA, 68 nt, Homo sapiens
caacccgccgcgcaccgacccgacgcgccggcccacgcgcggccaaggccagcgcgggccgccagcgg

SEQ ID NO: 148233 - RNA, 50 nt, Homo sapiens
ggggaggccccagcgcagcagagcgccaagacgccacccgagggaccagc

SEQ ID NO: 148234 - RNA, 71 nt, Homo sapiens
aaagcagaaagccacagaaaaagcccaaacaacgcaaaccgaccaacggcggagagggcgagcgacaccac

SEQ ID NO: 148235 - RNA, 77 nt, Homo sapiens
ggacggagaaaaagagcaccccaaagcagacaaggaagccacaagaaggcaaggcaaacagaaggccacacagggac

SEQ ID NO: 148236 - RNA, 75 nt, Homo sapiens
gaaggaagacgccacacaggaaacagaaaggccgggcgccgccgaaccagcaaagacagaaagagcacaagagag

SEQ ID NO: 148237 - RNA, 74 nt, Homo sapiens
gccccaacaccagccgccgccccgcagccccccgcagcacccagccggccacgccagagcccgggcgcgggaag

SEQ ID NO: 148238 - RNA, 103 nt, Homo sapiens
gaagagccgggcgcgaagaacaccgagggaacaggcacggcccggacccaacaaaccaccgaccaggagcgcaacacacgcaacagcccccagacacaggcag

SEQ ID NO: 148239 - RNA, 69 nt, Homo sapiens
caggcaacgaggagacggaagacaacccaggcacgcaggaaagacagggaagacaaggaacggaggaaa

SEQ ID NO: 148240 - RNA, 68 nt, Homo sapiens
acgcccaggaagcgcacgaggaaaagcacagaaagacaaacgcgcaggcaaagaggagcaggagggaa

SEQ ID NO: 148241 - RNA, 70 nt, Homo sapiens
gggacggaccacgcccgcaccagcaaagcaccacaggggaaaacaagcagaaccggggaccagccaacag

SEQ ID NO: 148242 - RNA, 83 nt, Homo sapiens
cggcgcggaaggacgaggcgaggcgagaaacgagagggccaaacaagaaggcccgaagagaccccagcggaggagacccaaac

SEQ ID NO: 148243 - RNA, 77 nt, Homo sapiens
cagcccacaagaaacccaggaaacagccccagacgccggccccagcaccgggcccagcgagcggacagggcagccgg

SEQ ID NO: 148244 - RNA, 64 nt, Homo sapiens
gcccgggcgccccgcagccccccaacaccgcccgccaggacgacgaaacacccaggccccgagc

SEQ ID NO: 148245 - RNA, 70 nt, Homo sapiens
cggccaggaggagccggcgccgcggccgccgcaaggaaacacaacgagaagggacccgagaaggaggcaa

SEQ ID NO: 148246 - RNA, 74 nt, Homo sapiens
aggaagggacaagacccacagcaaagccagcgacagaagccagacacacagccagacgggaaaaccaaccgaga

SEQ ID NO: 148247 - RNA, 72 nt, Homo sapiens
ggaggggaccagagaccaaaaaaaaaacgcgaacaccgacggagccaggcgccggcgaaagcaacgaaggga

SEQ ID NO: 148248 - RNA, 56 nt, Homo sapiens
agagaagaaccaaagaagcaaaacacgagccgagacgggcccccaccccacaggag

SEQ ID NO: 148249 - RNA, 72 nt, Homo sapiens
gaaaacgaagaggcaaagagaaaaacacacccagacggagaaccgcaggaaagccggaaacgaaacagcgca

SEQ ID NO: 148250 - RNA, 42 nt, Homo sapiens
cacgcccccggggcaaagggaggaggacaggagaacgggcgg

SEQ ID NO: 148251 - RNA, 67 nt, Homo sapiens
aagccacagcacaggcacagaaggcggcggaagcgagaaagggacaggccaaagagagagaaagacc

SEQ ID NO: 148252 - RNA, 79 nt, Homo sapiens
acagaagaaagagcagagaaaaggcgacggcggagacagaagagaggagagcccacaaacggcaacagccagggacagg

SEQ ID NO: 148253 - RNA, 53 nt, Homo sapiens
cggcaaccccgggcggccgcaccgccagaacccgccagagaggaacacgagcg

SEQ ID NO: 148254 - RNA, 53 nt, Homo sapiens
agggcggggagaaggcaccaacagggcaaaagcagaccggaaaacccaccggc

SEQ ID NO: 148255 - RNA, 76 nt, Homo sapiens
accgggacgaccaagccgagaccacgcacccagaggcgaggcacgaagggcagcagcacagggagcccccggagac

SEQ ID NO: 148256 - RNA, 73 nt, Homo sapiens
aacacccagcgggaaagcggccaggaaccaggaaggcgacagaagggcgcagggcgccggccgagcccgggaa

SEQ ID NO: 148257 - RNA, 77 nt, Homo sapiens
caccgaagccaaagcaacggcccgggaaaccccagccccccgggccgaaagaagaaaacccgagcagagaaaacaac

SEQ ID NO: 148258 - RNA, 65 nt, Homo sapiens
cgcaccaccggagcaaacaaccgaggaccaccggcaccacaccaccaaagggggaggaacagcaa

SEQ ID NO: 148259 - RNA, 75 nt, Homo sapiens
agaaaaccgacagaagcagcagcaccacagaggcgggacagaccaaagacgagcccccaggacaggcacacccgg

SEQ ID NO: 148260 - RNA, 81 nt, Homo sapiens
ccacccgcgggccgcggcgcccggggaaagccgggccccgagggcggaccgaggcacaacccgaaggaccagaccccacca

SEQ ID NO: 148261 - RNA, 66 nt, Homo sapiens
ccccagaagcagcagacggcacacgcagcagaagcccggagccgagggacagagaaaaacacgaca

SEQ ID NO: 148262 - RNA, 57 nt, Homo sapiens
gcgccacggcgggccgcgggaggacaccacccacagaaaaaggagggagcgacgaag

SEQ ID NO: 148263 - RNA, 53 nt, Homo sapiens
agcaaagcggcggacaacagaagacaggcaaagacaggaacagagacaacaaa

SEQ ID NO: 148264 - RNA, 64 nt, Homo sapiens
ggaaagcagcgcaggagccaagaccacagcagcacccagggccgcccccaaagccaaccaagga

SEQ ID NO: 148265 - RNA, 92 nt, Homo sapiens
gcgcagcggggacgcggacgcacggaaggaagcagccaccccgccaggccccccgcccgccgcccccggaggaggacgagagccgaagggcg

SEQ ID NO: 148266 - RNA, 69 nt, Homo sapiens
aacgaacccccccccccggaaggagcagagaaacagcacaaggaccggacgcggcgagcgcgacagcca

SEQ ID NO: 148267 - RNA, 87 nt, Homo sapiens
caagcaccagaggcccgagcagccagcacggaggagaaggagaggaacgcgcggaggaagaagaagaaagcgccggcggcggccagc

SEQ ID NO: 148268 - RNA, 79 nt, Homo sapiens
ggcgaacaaaaggaaggacagagagacacagcaagccagaaaccagacgcaccacaggagcaggagccacaaagagaga

SEQ ID NO: 148269 - RNA, 43 nt, Homo sapiens
agagagaggacaagaaccccaggcccaaggagaggccagaggg

SEQ ID NO: 148270 - RNA, 69 nt, Homo sapiens
cgaggagaccgaaggcaacgcgaagagggaaggagaacagagggaaaaagaccagagaaagggggggag

SEQ ID NO: 148271 - RNA, 79 nt, Homo sapiens
cgaagcggcaccgaggccggggccaacgagccaacgccaggcgccgcccacaggcacacaacaaagaagaaaaggggga

SEQ ID NO: 148272 - RNA, 74 nt, Homo sapiens
agagaaagcccacagaaacacagaacagcagaaccaaaaacaggaggagccaggcaagcaccagcaacaccaag

SEQ ID NO: 148273 - RNA, 59 nt, Homo sapiens
cggcggaccccggcaggagacgaggacgcgcacaggaaaggacgcggaacaagcaggca

SEQ ID NO: 148274 - RNA, 34 nt, Homo sapiens
ggaaaagagcaaacgagcaacaggccaacccaag

SEQ ID NO: 148275 - RNA, 63 nt, Homo sapiens
gcagggcgaagggacaagagcccagcaaaaagaggagaagcacccccccagaagaaaagagaa

SEQ ID NO: 148276 - RNA, 73 nt, Homo sapiens
aaccccgaccgcagcccccgggcacgaccccggacacgggcaggcagacgacaaggagaaaaagaagcagaag

SEQ ID NO: 148277 - RNA, 75 nt, Homo sapiens
gcgggacaccccggaagcgggaaagacggacaggcaaagaggcccccaagcgagcacgccgggaaaccacaccaa

SEQ ID NO: 148278 - RNA, 80 nt, Homo sapiens
ggccccgagacagaagccgcgcagaaggccagacacagaaccaggaaagcaccaccacaaagaggagaagccccagacga

SEQ ID NO: 148279 - RNA, 88 nt, Homo sapiens
gccccgcagcccagcagccccgcagcggcgccgaggacaggcagccgaggcgcccccgcgcgagggaccacgccagcaaggcgccaac

SEQ ID NO: 148280 - RNA, 71 nt, Homo sapiens
gccccccacagcgaaccagcgccacgccaggaggcccgaaccggaaggagacgcagaaacccaacgcggaa

SEQ ID NO: 148281 - RNA, 59 nt, Homo sapiens
agcccggcgacacaaggacggccaggccgagacgcaccagagccggaccggggacgcga

SEQ ID NO: 148282 - RNA, 81 nt, Homo sapiens
aaaacagaaccgaccccccgggaaacaagagacgacgggaagggagggcaagagccaggggagaccaccagacacaaccac

SEQ ID NO: 148283 - RNA, 83 nt, Homo sapiens
ggaagaggaggaggaagaacgggagcagaaaacagcccccgcagaaaaggagagaagggagggcccaaccccagccggaagcc

SEQ ID NO: 148284 - RNA, 57 nt, Homo sapiens
gggaaccaaacaaggacaccccaaggacggaaggacggccgacaacgcccccaaacc

SEQ ID NO: 148285 - RNA, 56 nt, Homo sapiens
cgacaaagggaccagcggaggaggcgcgccagacgaggcggagcaggacccaaaga

SEQ ID NO: 148286 - RNA, 79 nt, Homo sapiens
ggccgggccgcccgcaagaaaacaagcagccgcacgacgcacggcccaggaccgcacaaggaacggagcacagccaacc

SEQ ID NO: 148287 - RNA, 86 nt, Homo sapiens
ccgcacacggacagaccccaggccggcggcccccagccgccgcccacgcagcagggacagcagcagacccggggaaggaggcgaaa

SEQ ID NO: 148288 - RNA, 74 nt, Homo sapiens
cacaccccacaggaccccagagcgacagcccgggacaccaagaaagaacgcacaacaaccagaggccccaccgg

SEQ ID NO: 148289 - RNA, 48 nt, Homo sapiens
ccaccagaaaccaagaacagacggcaacaagcggaccgaacccagacg

SEQ ID NO: 148290 - RNA, 125 nt, Homo sapiens
acagagaagaaagaagaaggaggaacagggccagcagggagagacagagacgagaagcaaaggcgagcacacagagaggggaagggcagcagcagcagagaaccaaacccaaagcgaacacaaag

SEQ ID NO: 148291 - RNA, 72 nt, Homo sapiens
gaacagaacaggcccaggggcaaccaggcagacccgaccccagcgcccgacggagcagcagcgccgggaagg

SEQ ID NO: 148292 - RNA, 75 nt, Homo sapiens
cgaacgagcggaggccaacaaaaagacccagggccacggggcgcgcggcagcgaggcacacgggcgcggccggac

SEQ ID NO: 148293 - RNA, 72 nt, Homo sapiens
gacgcccgcaacaacagaaacagcaccagacccccagagaaagagggcacacagggccccaagcagagggca

SEQ ID NO: 148294 - RNA, 81 nt, Homo sapiens
gaagaagggaaagaaacccgggaaaaagagaaagagaagacaaaggaggagggacaaggcccaggaggccaccagcacggc

SEQ ID NO: 148295 - RNA, 84 nt, Homo sapiens
cacaacaaccacggcggaaccagagcccaaaaccggagagaaagaacaaagacccgacagcaaacgaagaaaaccaaaacaagg

SEQ ID NO: 148296 - RNA, 77 nt, Homo sapiens
ccgggccggaacgagacgcacgaaccaacaggcaggaaacccaaggaccggagcgcgggaaggagcaccccggcggg

SEQ ID NO: 148297 - RNA, 73 nt, Homo sapiens
aagagaccaagaaacgccaagccaaccccgacagccagacaagaccccaacgaagggccagaaaagggagagg

SEQ ID NO: 148298 - RNA, 73 nt, Homo sapiens
gagggacaacacagacccaccagcagaggacagagcgaagaaccccccaagaagacgaaacccccgggccaca

SEQ ID NO: 148299 - RNA, 65 nt, Homo sapiens
cgacagccacacaacggacagccccacagccaggccgggagccgcgcagagcgcaggcggaggag

SEQ ID NO: 148300 - RNA, 74 nt, Homo sapiens
gagggaagcgggccaccgcccggcccccaagacggcccccgggcgggaaggcaggggccacacgccacacagcc

SEQ ID NO: 148301 - RNA, 76 nt, Homo sapiens
gaacgcccgacccacaggagaggcagcggccccgcgaagcggagaacacccaccaaggcagacaccgcgcgggagg

SEQ ID NO: 148302 - RNA, 65 nt, Homo sapiens
aagcaaagacagcaaagcacggggcgaaaagcggcgggagcgaccccggcaggaaggcgacccag

SEQ ID NO: 148303 - RNA, 81 nt, Homo sapiens
ccgcccggcgccccagccgccccgagagggggcaccccagacaggagaacgggacagggcagacgggaggagagaaagagc

SEQ ID NO: 148304 - RNA, 77 nt, Homo sapiens
cgggccagcgacaaaaagagcggcggagaaaccaccacaaacacgaggccagcaacgaccaacaagacagacccgcc

SEQ ID NO: 148305 - RNA, 74 nt, Homo sapiens
gggaaaggagcagagagagagagcagaagcggagaaccccgccaaccagaggcaagcacaaaccagaggaaccc

SEQ ID NO: 148306 - RNA, 86 nt, Homo sapiens
acggagggggacacggcgagcgcaggaggggccaggaaccgggcaccccgggccaggacgccgaggaggagcaggccacagaacag

SEQ ID NO: 148307 - RNA, 86 nt, Homo sapiens
gggacaaccagcgacgccggagcagcccaacccagggcaccgagagggcgcgagggcgcgcacaaccggcccagcaggcacccgag

SEQ ID NO: 148308 - RNA, 102 nt, Homo sapiens
ggacacaacgagggaccgggcacgaaacgcgcgcccccgaaggcggccaacggccagaaaaggcacacacacccgcaggagagcgccggagaaaggaagaac

SEQ ID NO: 148309 - RNA, 53 nt, Homo sapiens
gggcagggacagcgcaggcagcaggaaggggaccaggagacgaaaagagaaag

SEQ ID NO: 148310 - RNA, 81 nt, Homo sapiens
cagaaaagcccagagcgagagcccacagaagaggccgcggcaccccggaagaacggccacagacggcgccgcgggccggac

SEQ ID NO: 148311 - RNA, 61 nt, Homo sapiens
gacagcgcaggcagcaggaagagccccacaacacgcaggaaccaacaggaggaaaagccgc

SEQ ID NO: 148312 - RNA, 83 nt, Homo sapiens
aaagaggagccagaggaggcagaggaaacggagaggcagaaggaacgagggagcacggagggaaaagaagccgccgacccccg

SEQ ID NO: 148313 - RNA, 80 nt, Homo sapiens
aacaacagccagccccagaaacaaagaggaagagcagcaccagaaaccgcaaacaggcgggcaacacaacaaggcgcgga

SEQ ID NO: 148314 - RNA, 72 nt, Homo sapiens
ggcagcacccaccccgagccccggcacccagcaagggcgaagagagaacacgcacggaaggaaggagaccac

SEQ ID NO: 148315 - RNA, 82 nt, Homo sapiens
aaccccgcccgcagcgacacaccaagcggaggggacgccacgcaacgccggcagagccagagcccaagcccccgcagggagc

SEQ ID NO: 148316 - RNA, 79 nt, Homo sapiens
cgcgagcaagcccccgccgcaccgcacgacacacacggaggcacgcagaagccagcggacgcccgcaacggggaccggc

SEQ ID NO: 148317 - RNA, 72 nt, Homo sapiens
ggaaaacacacggaaaagacgcagccaagcagaagagcaagcaggggacccgccaaggagaaaaaaggagaa

SEQ ID NO: 148318 - RNA, 60 nt, Homo sapiens
ggcagagacgccgggacggcagagaacccacaaagaggcgacgcaggcaccaccgggaac

SEQ ID NO: 148319 - RNA, 66 nt, Homo sapiens
ccgcaccgcagggccgccagagccggggcaaggacaccagcagccgcaacggcacacacgcccgcc

SEQ ID NO: 148320 - RNA, 78 nt, Homo sapiens
gccaggcagcgggggagagagccgggaagcacggggcagccagcacgggagcaagcaaggaccggaaagagccaagcc

SEQ ID NO: 148321 - RNA, 57 nt, Homo sapiens
ccaagcagggagaagacacggcggacgcgggggggaagaggagaaggcgcgacagac

SEQ ID NO: 148322 - RNA, 73 nt, Homo sapiens
cgagccgcagaaagccagcaacagggaagcgcaggcgcagcaacgccaaaaagaaaccgaagaagagaagaac

SEQ ID NO: 148323 - RNA, 67 nt, Homo sapiens
ccgcggccggccacgcggaggaaagaagaaggacaaagagaggaaaaaaaccaccgaaaagcaaaag

SEQ ID NO: 148324 - RNA, 72 nt, Homo sapiens
gagaccgccggccgcagggagggcagggccggcagccgggagacaggcagacacgaggcgaaccgacccaac

SEQ ID NO: 148325 - RNA, 79 nt, Homo sapiens
cacccagagagcaaaaggcagcgaaacaccacagaaagaaccaagaacccaaaggaacaaaccgggaaaacaaagcaag

SEQ ID NO: 148326 - RNA, 53 nt, Homo sapiens
cgagaaggcagaggcggaggaccagccaaaagagccgggggaaagccaccaga

SEQ ID NO: 148327 - RNA, 72 nt, Homo sapiens
gagcgggcagcgccagaccgcgacaggcccgaaaaaaacccaggcggcccagggcgagaacgcggacaagca

SEQ ID NO: 148328 - RNA, 53 nt, Homo sapiens
accacccgaaagaaaggcaccacaacgcaaggaacaagacagggagccacaac

SEQ ID NO: 148329 - RNA, 78 nt, Homo sapiens
acgaaggacaacgagaagaaccggaagccgacccggagccgagcaaccagagacgaggacgcgcacaggaaaggacgc

SEQ ID NO: 148330 - RNA, 80 nt, Homo sapiens
cgagggaggcagcagaccgcacaaccccagaagcgcgcccgggaggagggacaggcaagaaggaagaaggcagaggcgca

SEQ ID NO: 148331 - RNA, 80 nt, Homo sapiens
aacccgacgccaagagaagccgagagaggagacgaaggagaaacacgagcccccaggacaggcacacccgggaaaaccga

SEQ ID NO: 148332 - RNA, 70 nt, Homo sapiens
aaaccgcccgagggaccaggaggggcagcagcaggacagggaacccgggagacagcaacagacggaggaa

SEQ ID NO: 148333 - RNA, 54 nt, Homo sapiens
cagggcgcccccgggaggacagagcccaggaccaagagcacaacaacacggacc

SEQ ID NO: 148334 - RNA, 78 nt, Homo sapiens
cgggacagcggaaggcccgccccgagcggcgcaccccgagaaggaccagacggcagggccggaccggagcaggagacc

SEQ ID NO: 148335 - RNA, 70 nt, Homo sapiens
ccgcccggagcacgaccgaggcggagcaagaaagagagccagaagaggcgagaagcagacgcccgccgcc

SEQ ID NO: 148336 - RNA, 79 nt, Homo sapiens
gaggagccagaggcgccagccgcgaaggggcggcgcgcgccgggcgccggaggggcgacccgcgggagggagacagaga

SEQ ID NO: 148337 - RNA, 74 nt, Homo sapiens
agggcggcagggccgccgcagacgaccggcggccagagcgcgcccgcagccggaggcgcagaccggggacagca

SEQ ID NO: 148338 - RNA, 81 nt, Homo sapiens
ggcaaaggcaagagaacagcagcgccgcccgccgacagccaggcccgggagaaagggaacaggcacgccccacccgccagc

SEQ ID NO: 148339 - RNA, 38 nt, Homo sapiens
cagaaagcaagaggaacccagccccaccaaagccacca

SEQ ID NO: 148340 - RNA, 54 nt, Homo sapiens
ccgaaggcaccaaaagcaagaaacacaacgaaaggaaaagcaaaaggaccggac

SEQ ID NO: 148341 - RNA, 78 nt, Homo sapiens
ggggcaccaaacgcggcaacgcccccgggacagcacgccccggaccccaaaaggagaagaagcaccagccgacgcgaa

SEQ ID NO: 148342 - RNA, 64 nt, Homo sapiens
caccccgaagccgagaaaggagcgggaggggggacgggagcaggagaccggcccccagagccag

SEQ ID NO: 148343 - RNA, 83 nt, Homo sapiens
ggagcccagggaagcagccgaccagccgcggagccgggggcaggccaaaacagaagaggcaaagcccagccacagcagcagcc

SEQ ID NO: 148344 - RNA, 63 nt, Homo sapiens
cgcagagcaagcgcggggaaccaaggagacgcccggcacgcaggggaacggcgagggaaccca

SEQ ID NO: 148345 - RNA, 81 nt, Homo sapiens
ccaggaacacagacgggggcgagcggacccgcagccccaaaaaggaagaggcccagcagaagggaccgcgagccacccccc

SEQ ID NO: 148346 - RNA, 75 nt, Homo sapiens
aaggcgacaaccacagccgaaaagaaaaggaagccaggggagacagcccgaagaaagggcaaaaagagagacgaa

SEQ ID NO: 148347 - RNA, 63 nt, Homo sapiens
caccccaggaggacccccagaggagggagaagaccaaagaagagagagcaggaccaccaccgc

SEQ ID NO: 148348 - RNA, 77 nt, Homo sapiens
gggaaagggggacagcgcacaaacggcaaccagggaccgaaagcaaagaggagccgcccgccgcccaggcggaggca

SEQ ID NO: 148349 - RNA, 40 nt, Homo sapiens
agaagaaacaggagcagcaagaagagccagcgccacaagg

SEQ ID NO: 148350 - RNA, 66 nt, Homo sapiens
cgggcgggccggaggcgacagggacaaggcccaggaggccaccagcacggccacgggcggcacgga

SEQ ID NO: 148351 - RNA, 61 nt, Homo sapiens
ggagacccagccccgagcaccgcgacacacaccccgaagcgacccggaaccgggaaaccag

SEQ ID NO: 148352 - RNA, 32 nt, Homo sapiens
agcaagggaccacaaaaagaaaaggcgcggcc

SEQ ID NO: 148353 - RNA, 78 nt, Homo sapiens
gagaaacaaaggcggggcgcagccggagcagggagaaaaaaggcacaaccgaacccccacaggagcgggcagccacca

SEQ ID NO: 148354 - RNA, 64 nt, Homo sapiens
gaggaagaccagaggaagcgacagagagaggcagacagcggggaagcacagccgagcccgcccc

SEQ ID NO: 148355 - RNA, 70 nt, Homo sapiens
aggcgggaacccgaagaagaccaccgggagagagggaaaaaacaaccccgccggaccaaaccgaaaccgc

SEQ ID NO: 148356 - RNA, 77 nt, Homo sapiens
ggaacacgcccgggacaagacaccccaggagcccagccacagccaccggacccccaggacagccgagaaggcgcgcc

SEQ ID NO: 148357 - RNA, 71 nt, Homo sapiens
cggcgacaaagaagagcagcccagggccgaacaaacgcaagaaaccggccccagaacaacaagacgccagg

SEQ ID NO: 148358 - RNA, 69 nt, Homo sapiens
gacaacacacaagaggacaagaggagagaaaacgcaaggagccacagaagggggcaccaccgcaccacc

SEQ ID NO: 148359 - RNA, 70 nt, Homo sapiens
accgaagcggaaacacaaggagcaaggcaacaccaaaaagagacccagcccaaagaaagccagggcgaaa

SEQ ID NO: 148360 - RNA, 84 nt, Homo sapiens
gcggcgagacaaaggcgacgccagaagaggaccacagcaaaaaaaaagacgagcaagggggagcccaccagcgcccagcggcga

SEQ ID NO: 148361 - RNA, 94 nt, Homo sapiens
acgagaaaaacaaggagcggacacgagccgagggaggggaaaggcgcaggggagaacggcagaaccaagggaccaaagcgggacggcaggccac

SEQ ID NO: 148362 - RNA, 81 nt, Homo sapiens
cagccccacccaccgccaggagcccccccaggccggcaagaagccaacggagaaccaaggccaagaccagaaccagcccgg

SEQ ID NO: 148363 - RNA, 78 nt, Homo sapiens
ggcgaagcgacgagccgcgaggagggcagagcggcgggaaaccaccaacaacacccccaaaccaaaacagccggaagc

SEQ ID NO: 148364 - RNA, 106 nt, Homo sapiens
gcgccccaccagggcggcgaagagaaacaacggggcagagaacacagaaaacagggccagacgggaagaaacgagaagggaccaggggcggaagcggaaaacagag

SEQ ID NO: 148365 - RNA, 71 nt, Homo sapiens
ccccacccacccgagaacagcagaaaccacaaacagcccgcagggcaacggaagcagacaaaaaagggcag

SEQ ID NO: 148366 - RNA, 71 nt, Homo sapiens
caccacccaaaaccagcaagcaaaagacccacaggaccgaagacgcaaggaccaaaaaacaaagggcggaa

SEQ ID NO: 148367 - RNA, 75 nt, Homo sapiens
aacaaacagggcacagggagacggaaaacgagaggaacaagccaagcagaacgcaaggagggacaggacggaagg

SEQ ID NO: 148368 - RNA, 74 nt, Homo sapiens
agccaaaaagcacaacaccgggcaaccacggggcggcgccggccccaagggaggcgaggacaacgggcagcccc

SEQ ID NO: 148369 - RNA, 70 nt, Homo sapiens
cgagcaaaaggaagcaacccagaagagcgaaggacccagcgaggagggacagccaaaacacgcacaggac

SEQ ID NO: 148370 - RNA, 59 nt, Homo sapiens
cgggaggcaaacaggggcgaaccccagccggagccaaccaaccccagggaggcaaacag

SEQ ID NO: 148371 - RNA, 77 nt, Homo sapiens
cgagaacggacgcaagcggggaggggaagacacggcacagcgaggagaacgcacccaaccagagaaaggagaaacac

SEQ ID NO: 148372 - RNA, 61 nt, Homo sapiens
cccgccacaagcaacgcgggaagagaaggaaacaacagccaggccagggcgaggccagccg

SEQ ID NO: 148373 - RNA, 78 nt, Homo sapiens
cgaccggaccgcaggacgggagaccaagggaagaaggcggaacaccggaggcgggaaagagcgagccacccccggcgc

SEQ ID NO: 148374 - RNA, 75 nt, Homo sapiens
gggaggaagagcacaacgaggaggcggacggagcgagaaggacggagggggccaccgaagcaccacacccggggc

SEQ ID NO: 148375 - RNA, 49 nt, Homo sapiens
ccagccacgccacacacgagggggggagccgcacgacccgaacgccaga

SEQ ID NO: 148376 - RNA, 57 nt, Homo sapiens
gcaggaggagaagaacacacagcgaagaaaggaccaggcgggcccgagacaagcggc

SEQ ID NO: 148377 - RNA, 75 nt, Homo sapiens
ccccacgccggaggaaccgagaagagcagagcggagggagccccagacacggaacagaccaaacgcgaagaaccc

SEQ ID NO: 148378 - RNA, 86 nt, Homo sapiens
cccgcagagagcagccgggcgccagcggggggcccagagcaggcggcgcaacgagacaggcagggagaggcgccccgggggaaggc

SEQ ID NO: 148379 - RNA, 62 nt, Homo sapiens
gggacccagcaacccaggacccacccaggaggcagaaacacgccgcgcgccacaccaggccc

SEQ ID NO: 148380 - RNA, 67 nt, Homo sapiens
acaagccggacccgagagaacgaggaaccccagagaggacagaagccaaccaggcagcagaggaccc

SEQ ID NO: 148381 - RNA, 78 nt, Homo sapiens
ccggcacgggcgacagcaggcacagggacgagggggcggaaggaagcacaaacaccagcccgaacgagacgagaaacc

SEQ ID NO: 148382 - RNA, 74 nt, Homo sapiens
gccgagaggcgccagcccggagcagggcaggcacgcgaaggcggggaaacgccacggaccaagcgcacacaggc

SEQ ID NO: 148383 - RNA, 38 nt, Homo sapiens
ccaaaggcgggagcagggaacggaggggaaaggaggac

SEQ ID NO: 148384 - RNA, 85 nt, Homo sapiens
gagaaacaaggcgccggagcagcccaccgggggacggcacggcaggcggacgcccggggccccccggaccacgaggagcaccgag

SEQ ID NO: 148385 - RNA, 88 nt, Homo sapiens
aggacagcgcaggagccccggcgcacgcggcgcgcacagacccaggaaacgggggcgcacaggaaacagaaaaaacagcaaagggagc

SEQ ID NO: 148386 - RNA, 42 nt, Homo sapiens
gggaaggagagcagccagcagagaaaggacagggacaggaaa

SEQ ID NO: 148387 - RNA, 82 nt, Homo sapiens
cggaaggagaacaaagggagaagaggaagcccgacaacgaaggagaaagacagcaaagaaaaggagaagaaaggaaaaaaac

SEQ ID NO: 148388 - RNA, 79 nt, Homo sapiens
ggacaggaggccccgagaccgaggccaaaagaaaggaagaaaacccccaaaaagccaaaaggccaagacaagaagaagg

SEQ ID NO: 148389 - RNA, 82 nt, Homo sapiens
agcgcgcacccgcacccgcaggccgagggacggccaagaagcgcaaggccagggggacccacggggagcgagggaggaggac

SEQ ID NO: 148390 - RNA, 63 nt, Homo sapiens
gacggcgagcgcgagcggcgcgagaaacagggccggaaagagggcgggcccgcacggagcgcg

SEQ ID NO: 148391 - RNA, 61 nt, Homo sapiens
aacaaaacacacaacagaagggaaggggaaggagaccacaaaggggcaaagaaaaaggaga

SEQ ID NO: 148392 - RNA, 74 nt, Homo sapiens
cggaccacagcaggggggcgggcagacagaacaagaaagggacaccaaggcccccaagggggcaaggcaacaca

SEQ ID NO: 148393 - RNA, 53 nt, Homo sapiens
cgcgcggccagaggccgcccccgcaagcaggcccgcgcgggagcgacacgaca

SEQ ID NO: 148394 - RNA, 59 nt, Homo sapiens
cgaaaaggaagcggaagggccccccccgagcccacacaaagcgaggggaagcggcaaca

SEQ ID NO: 148395 - RNA, 77 nt, Homo sapiens
ggcccgcgcgcccggccaagaggcaaaggggaggacgcagcaaaccaccagaagaacagccagcaaagacaagagca

SEQ ID NO: 148396 - RNA, 67 nt, Homo sapiens
aaagcgaaaagccccagggccaccagcaaccagacacacaaccaccagaaggagagaagaacagaag

SEQ ID NO: 148397 - RNA, 61 nt, Homo sapiens
ccagcaagacgacgaagaacagcaggcagccagacaccccagcccgaacccacacccgccc

SEQ ID NO: 148398 - RNA, 79 nt, Homo sapiens
gcaaccgcagaagcagcggcaaccagaccggggcagagacgccggcccaccagccagcggggagccgcccaccccacaa

SEQ ID NO: 148399 - RNA, 71 nt, Homo sapiens
aacgaagaaggcccagcccaccagggacaagagacaaaaggccacgcaagagagagcgcagcacacagaga

SEQ ID NO: 148400 - RNA, 74 nt, Homo sapiens
aaagggccaaggaaggcgcaaaaggcaaaggcacacccaaacgcaaagggccggcccagggagaacgcaaaacc

SEQ ID NO: 148401 - RNA, 84 nt, Homo sapiens
agggccagccagagcggccgcagcagggaacccaggaagcgacgagcggggcgcagaagaagcacgcacagaggcacagcggag

SEQ ID NO: 148402 - RNA, 73 nt, Homo sapiens
gcacagacagaacccgcaccagcgggccaaaggagaaacaagaaggagacaacaacggccaccgggcgaagaa

SEQ ID NO: 148403 - RNA, 37 nt, Homo sapiens
caacaccagagggccccagggaaaccgccggagaagg

SEQ ID NO: 148404 - RNA, 78 nt, Homo sapiens
ggccgagcccggccgccagaccacagcacagccgggaaggggagccaccagccccccgagaaaaacggcagcagccaa

SEQ ID NO: 148405 - RNA, 73 nt, Homo sapiens
gagaaacgaaacaaggcaccgagcacaaaggagaaaaccagaacgagagcccagacagagaaagcagacacga

SEQ ID NO: 148406 - RNA, 84 nt, Homo sapiens
ccggagcggccgggggcggccacgggagagccgggccggcggacgcggcgccacgcagcagagcaaaaggagaagccaaaccaa

SEQ ID NO: 148407 - RNA, 81 nt, Homo sapiens
aacccgacccgacgagacgccccgggccgccaggagcagacgaagcccgcggagcaagccgcgccaggcccagcagaacag

SEQ ID NO: 148408 - RNA, 73 nt, Homo sapiens
cggcccaaaacacagcgcaccacacacagagggaaacggaaaggaaccccgagacagacaagacagcgcagca

SEQ ID NO: 148409 - RNA, 86 nt, Homo sapiens
gagaacggcgggaagagaagacacgagcacaaacggaaccccaaggagcagccccagcccgcaacagcacgcggaccagacagcga

SEQ ID NO: 148410 - RNA, 77 nt, Homo sapiens
caggaagccaaggcaccgggacgcgcacccccgcgccgcacggggacgaggcgcggacgcagacagacccgacaaag

SEQ ID NO: 148411 - RNA, 68 nt, Homo sapiens
agaagaagacaagagaaccgccgcgcccgggaaaggaggaaagaaagagaagaagagcaaccaagcaa

SEQ ID NO: 148412 - RNA, 73 nt, Homo sapiens
cagcggacacggccgccgggccgcgcccacgggcagcgagcccggcgaagaagaggagcaccaagggcgggaa

SEQ ID NO: 148413 - RNA, 84 nt, Homo sapiens
accaggggagccggagagcaggcgaggccaggccgccgagcaggcaccagcaggaggagacagccagaagcaagcggagcgaag

SEQ ID NO: 148414 - RNA, 66 nt, Homo sapiens
cccccgcagcaaacagggcccaccaggaaaaccagagacccagacacgcgaaggaacgaaaggcca

SEQ ID NO: 148415 - RNA, 51 nt, Homo sapiens
gacacggccagacgcccccaacaccgaaaacgagaaacgaaagagacacgg

SEQ ID NO: 148416 - RNA, 71 nt, Homo sapiens
ggcagcaccgcaccagaacaacaggcggcccgggcggagggacacggaggggccggaagagacaagaccgg

SEQ ID NO: 148417 - RNA, 72 nt, Homo sapiens
ccacccagagcgcacggcgacgccccaggggaaaacccccgggaccagaccgaaacaaggaccccccgggag

SEQ ID NO: 148418 - RNA, 85 nt, Homo sapiens
ggcaccgggacggaccgagaccggaccgagagcggaccgagagcgcgaaacgcacgagaagaaagagccgcagacgcacagcaac

SEQ ID NO: 148419 - RNA, 80 nt, Homo sapiens
aggccaagaaaacccccaaccgaccggcaagaaaagaaagggagaccagaagagaaccggcccaccaagccgagaacacc

SEQ ID NO: 148420 - RNA, 66 nt, Homo sapiens
cgacagcccaggaaacaacaacagcggcacgccgagcaaggaggaggacccaaagacaggaccacg

SEQ ID NO: 148421 - RNA, 107 nt, Homo sapiens
aagacgaaacgcagaaccgacaccacagcaaaggagacaaacaaggaccagcgagccgggggacccaacagggaagcccccagaggcccaagcagaagccacaccgc

SEQ ID NO: 148422 - RNA, 72 nt, Homo sapiens
aaggaccaagaaccagggggccgccccgggggcccagacaacgaccgaagaaagaagagaaccagaaagcac

SEQ ID NO: 148423 - RNA, 76 nt, Homo sapiens
accacagggcagcggagagcgggcccgcgggaggaacgacccagggcggccagcggcaccgagggcaaccgggcgc

SEQ ID NO: 148424 - RNA, 55 nt, Homo sapiens
agacccacagcgggggcgcagaaacaacgaagcaagcccaagggcgcaggggcaa

SEQ ID NO: 148425 - RNA, 85 nt, Homo sapiens
cgcgccacgacggggacgcccgggggccgcgcacgggccccaggaagagacaccaggcgccgagaaggccagcagagaaacaggc

SEQ ID NO: 148426 - RNA, 57 nt, Homo sapiens
caaggcccccgaagggcggcagcagcggagggaagacgacaaccgcggcccaagcgc

SEQ ID NO: 148427 - RNA, 78 nt, Homo sapiens
gccagggaggcggcggcgggaacgagggcgagcagaggacgacaggccgggaggaggacgcacccagacccagccaac

SEQ ID NO: 148428 - RNA, 72 nt, Homo sapiens
cagaggggcccggaggcacaggcgccaaagaccgacccaccaggacaaaaggagggccgcccccagggaaca

SEQ ID NO: 148429 - RNA, 76 nt, Homo sapiens
gaggccgaaccggagcagagcagggacccaggacaagggccgccagagacgcggacagggggccagagcaaggaaa

SEQ ID NO: 148430 - RNA, 96 nt, Homo sapiens
gcgccggcgggccccgccaccggaaggaacaaaggcgaccacagcagacgggcaagaccccccaacaagaaccagagacgagcggcgaggagaagc

SEQ ID NO: 148431 - RNA, 82 nt, Homo sapiens
gaggaggacacagaagaacaacaacagaagaagagaagcaggaaagagagaggaagagccgcgggcagggaaagcagccaca

SEQ ID NO: 148432 - RNA, 83 nt, Homo sapiens
ccaggccccccacagaaaaggaaagccccaggaccaaaaccacacagggacgaaaagaacacagaagcgccagggagcaacga

SEQ ID NO: 148433 - RNA, 72 nt, Homo sapiens
gggggcaacggagaaaacccggaaccgcgacggcggcaggaccgccagaagcagcgcgacggagagccaagc

SEQ ID NO: 148434 - RNA, 64 nt, Homo sapiens
gaaacaagagaggaacggagcaagaagcgacacaaggagaaaagaccgaaggacacagcccgca

SEQ ID NO: 148435 - RNA, 61 nt, Homo sapiens
cgcagaggggccccgcgggagcagcacgggcggacgcggaaggaggcggggcaggcccaac

SEQ ID NO: 148436 - RNA, 59 nt, Homo sapiens
cccaggacgagaacagcaacagacgaaggcccaccaccacgagcgcggccaccaacccc

SEQ ID NO: 148437 - RNA, 65 nt, Homo sapiens
caaaaagcaaacggaccagaccgaccaccaaaaccgggccccgaggaccgagacaggagcacccg

SEQ ID NO: 148438 - RNA, 78 nt, Homo sapiens
cggcgcccggggcccccaggcgaggccgggcccacacacagaccccgcgacacaaccgcggacgcgcgaccagaggcc

SEQ ID NO: 148439 - RNA, 64 nt, Homo sapiens
ccaaaaccaagcacgacagccaccaggaacgaaccagaaaaccggagagccccagagcaacaca

SEQ ID NO: 148440 - RNA, 79 nt, Homo sapiens
aggcggcccaggagcggcggcgaagaaggaggcaggcacgggagccgaaggcaagaaggcggcggccaccagggcgggg

SEQ ID NO: 148441 - RNA, 65 nt, Homo sapiens
acccggcgccgcggcccaaaaggggaagggacaagaaaggaagaagacaccaaacgaaagaggac

SEQ ID NO: 148442 - RNA, 74 nt, Homo sapiens
acaacgaaagagacagcacaaaaaggggcaccaccacgaggcgaggggccaaccaaggaggcgaggggcccccc

SEQ ID NO: 148443 - RNA, 78 nt, Homo sapiens
cgagcgagccgaaagagaaaaagcggaaggccacacgcaaacaaggacagacaagccagagcgggggccagagggagg

SEQ ID NO: 148444 - RNA, 75 nt, Homo sapiens
ccggcccagcacgcccggaagccagacgcgcagccaaccgcaggcagcaggggaaccgcgcgaaggacacaccac

SEQ ID NO: 148445 - RNA, 70 nt, Homo sapiens
agcgagaccaacaccaacacgagggcggcggaaaaagccgccacacgccaaaggcgccggcgaaagcaac

SEQ ID NO: 148446 - RNA, 35 nt, Homo sapiens
caagcagcaggaagacgaggagggcagcaagggac

SEQ ID NO: 148447 - RNA, 40 nt, Homo sapiens
gagaccggagaaagcaaacaaaaacgaaggaggcccaacc

SEQ ID NO: 148448 - RNA, 77 nt, Homo sapiens
aagcccgaaggaccagagcaaggaggacggaacccgcgacacagggagaccagggaaaagacagcacagacccagac

SEQ ID NO: 148449 - RNA, 81 nt, Homo sapiens
ggaggagagccccagcacagcagccgccgccgaggaagggggagccagcccggcgacagagggaacccggaaaaaccgcgc

SEQ ID NO: 148450 - RNA, 90 nt, Homo sapiens
cacaaggcggacacacaagcaccacaccggcgggcaaggaggcaaagacgggcgcccgagaaggcggaagggccaccagcggcacccagg

SEQ ID NO: 148451 - RNA, 75 nt, Homo sapiens
aaagacccacgcacgcccgcgggcaaggaaaggagcacaccgaggaggcaagagcgcaaacgagaacagcacgca

SEQ ID NO: 148452 - RNA, 88 nt, Homo sapiens
agacacaccaggccggcaggcgagaaaagcgagaccgcggcgaggaccggacggcggccccggaccagggcgaaagaggccaagagga

SEQ ID NO: 148453 - RNA, 75 nt, Homo sapiens
cagccccgcaaagcccggcgagcaagggcaaggacacggggaaaagacagacaggaaaccacggcgcgagccccg

SEQ ID NO: 148454 - RNA, 69 nt, Homo sapiens
cagggggaaacacagaacgcagggaagccggacaagacagaaagaggggaacaagcagacacaggcgcg

SEQ ID NO: 148455 - RNA, 77 nt, Homo sapiens
cagcgccacccgaggcccgcccgaagaacacagccgcaagaaccaggaccggaagaaagcgaccagagaccgaggac

SEQ ID NO: 148456 - RNA, 79 nt, Homo sapiens
cagagaagaaacaacacaggagcaaagaaggacgcagagccagccacacagccccacaggcccagccacagggaacccc

SEQ ID NO: 148457 - RNA, 73 nt, Homo sapiens
acccacacaagcgaaggcgcgcaccggaagcaccagcgaggaaggggaaaaagaaaagggcgaagacccgaag

SEQ ID NO: 148458 - RNA, 77 nt, Homo sapiens
gggaacccggaaagagaggccacgcacccaaggcagacagcagaaagcagagagcccagaagaaaccaaagccacac

SEQ ID NO: 148459 - RNA, 80 nt, Homo sapiens
ggagcccccagaccccggaggccggcgcccaggacagggcagaccgccagcagcacagcaagccacagagagggccggca

SEQ ID NO: 148460 - RNA, 56 nt, Homo sapiens
cccccagaaaggaggcaccaaagagcagagacaagccagcgccgaggcacaccggg

SEQ ID NO: 148461 - RNA, 42 nt, Homo sapiens
ggcaagcagaacgggccgaagccggaagcacgcaaccagaag

SEQ ID NO: 148462 - RNA, 85 nt, Homo sapiens
gacgcgggagcgccgcgggaagggcggggagcggagccaggccccggacaaagcgaaagggaaaaaacaaaaggagccacaccgg

SEQ ID NO: 148463 - RNA, 71 nt, Homo sapiens
gggcgcgggcaaggacagagcagaggacgcgcaggggcacccccacggagcccggccaggacaaggacaag

SEQ ID NO: 148464 - RNA, 80 nt, Homo sapiens
gaaccaaaccagaaaggaaaagggacagggagaaggcccagccaagaagagaagacaaggaggcacaaggcacaaagcag

SEQ ID NO: 148465 - RNA, 74 nt, Homo sapiens
gcacaccggccccacgcacgacgagagggacagcacggcaaggaaccggaaaaacacccgggagccggaggggc

SEQ ID NO: 148466 - RNA, 71 nt, Homo sapiens
cagacgaacagggaagaaggaaaaagaggcacagagccccaggagacacacaaaccaaaagagcagaagga

SEQ ID NO: 148467 - RNA, 72 nt, Homo sapiens
ccggacgggagcaagcgacccggccggacccaccgaccagccaaggagaccgggagagagacgaaggacgcg

SEQ ID NO: 148468 - RNA, 106 nt, Homo sapiens
agaaaaccaccagggcagcacggccgcgggccgcacgggacagccaagcggacgcacgacgaaaaagaggaagccgaaccaggaaaaaggaaaggagcgcccgaaa

SEQ ID NO: 148469 - RNA, 83 nt, Homo sapiens
gccggagacgagaccagaggccgaaccgggcgacaagaggccgggcgccccgcaggacacaaggagacagaacagacagaaaa

SEQ ID NO: 148470 - RNA, 67 nt, Homo sapiens
cgaaaaagggacaaacggaagcaaggaaaacaaggccaggcgggagagaaagcaacaaacggggaag

SEQ ID NO: 148471 - RNA, 94 nt, Homo sapiens
ccccaaggcaacaagcccacccgaaaccacaaggccgaccccaacgagcggcccgcgacccgcggccggcagcgacaccaagaacgcacgaacg

SEQ ID NO: 148472 - RNA, 80 nt, Homo sapiens
cagggagaaggcgccgggaacacgggacagagcagaagggcgaaagaccgggccgcagaagaggccccaacccgggccag

SEQ ID NO: 148473 - RNA, 55 nt, Homo sapiens
gaagacggggagccagcaggcagccgaggccaccaagcaggccagggaaggaagc

SEQ ID NO: 148474 - RNA, 82 nt, Homo sapiens
aaagccgaaggggcggagggaagggaaccggaaggcgagaggcggaggaccccgacccagacaagagaacaaaaaacggggc

SEQ ID NO: 148475 - RNA, 70 nt, Homo sapiens
gagagggccggcagggcgggcagaagccccccagggaaagcccaaccagcagacacgccaaaacacagag

SEQ ID NO: 148476 - RNA, 73 nt, Homo sapiens
cggcaagacaacaaaaccagaggaccggcaacaacccgaggacgaaccaccccgcgccagcagcacagcacgg

SEQ ID NO: 148477 - RNA, 82 nt, Homo sapiens
accaagaggggggagacggggaggacaggccagcgcggccaagacccgccgcaagacgggccagcagccagaagaacaacac

SEQ ID NO: 148478 - RNA, 81 nt, Homo sapiens
ccccaaccgcgccagcggagcgaacccgagagcgggagcgggcgggccaggaaaccaaaccccccaaaggcccaggacagg

SEQ ID NO: 148479 - RNA, 56 nt, Homo sapiens
ccgaccgggagaggagagcccccaggggagccggcggaagaagaggacgaacgaca

SEQ ID NO: 148480 - RNA, 75 nt, Homo sapiens
ggcgggcgcgcccagagccgccgggcgaaaaaagcacgcagaggaaacgagcgcgcgaggagaagaaccaagaga

SEQ ID NO: 148481 - RNA, 54 nt, Homo sapiens
ggaaaaacacaccagcacagggagagagagagaggccagggagagagaagagga

SEQ ID NO: 148482 - RNA, 73 nt, Homo sapiens
ggaggacccacaggcgccgcccggcaccagcaaaggcagcgaaaaacaaggccagcagggaggccccaagaac

SEQ ID NO: 148483 - RNA, 64 nt, Homo sapiens
cgcaacggcgaggaagagacgacagcaaggcgggacggcccggaacgaccgaccgaccacccca

SEQ ID NO: 148484 - RNA, 115 nt, Homo sapiens
agagaacaagacgaagaacagaaggcgacaaggccaagaccgccagcaaaggaagacgaggaaagaaaccgacggccccaggagagagccagcaggcagcaggacgaaggagaac

SEQ ID NO: 148485 - RNA, 79 nt, Homo sapiens
ccgacacacaacgaagagacgaacgaacaggggaaaacggaaggagccagaagccccagggaccgcgcccccaaccacg

SEQ ID NO: 148486 - RNA, 80 nt, Homo sapiens
gcggcgccggggggcgcgccgcgaccgcccgccgggccggcgcggacggaagcacaggcgcaccagcgagcccgcgccgc

SEQ ID NO: 148487 - RNA, 76 nt, Homo sapiens
acgccccgcggaaaagacagagaggggaagaaaaacaaggcggaacaagcaacgcacacggcgccacacgaggcca

SEQ ID NO: 148488 - RNA, 85 nt, Homo sapiens
aaagaggccgccacagcgggccgagcacagaggacggacggaccccgcaagcaggcaaccgaccgaacggcgccccggccgaccg

SEQ ID NO: 148489 - RNA, 60 nt, Homo sapiens
acaaaagcaacaaagagggcggacccggacgacaccaaagagacccccacgagaaaggcg

SEQ ID NO: 148490 - RNA, 77 nt, Homo sapiens
gaacagcgagcggagccggcaggaaggggaccgggcggcggagcggcggaagaagagagacggggcacggagccagg

SEQ ID NO: 148491 - RNA, 74 nt, Homo sapiens
agagaagaacgaaaaaagagaacggacaaagaggaggcaggacgcaagaggcgccccaaggaaaggggccaacg

SEQ ID NO: 148492 - RNA, 73 nt, Homo sapiens
cggaagaagcaggaggcaagaaaggggaaccccggagaaaaggccaagaaggcaggcaccaagcagccgaaga

SEQ ID NO: 148493 - RNA, 79 nt, Homo sapiens
agagcggggagacccggggggggaggagaggacccgccacccaccggaaggacgcagcggaaagaccccacagacaacc

SEQ ID NO: 148494 - RNA, 55 nt, Homo sapiens
cagaacccaaaagccgacaaccccagaaacaggaaaccgcaagaagcaagcgaac

SEQ ID NO: 148495 - RNA, 92 nt, Homo sapiens
agcaaacacgaggccacggggaaacacagcagaacacagggcacagagcagaggacaccacaggaaggaggcgcagagagaaggccaggcgg

SEQ ID NO: 148496 - RNA, 57 nt, Homo sapiens
aaggggaggacgcagcaaaccaccagaaggccggacacggcagcggcccccgggaca

SEQ ID NO: 148497 - RNA, 75 nt, Homo sapiens
cgcagggcgcccccgggaacgccgcagaaagaagaaggggcaagaacagccacagcagagacaaaaaaccagccc

SEQ ID NO: 148498 - RNA, 69 nt, Homo sapiens
acacaccacgggcgaggcaacgaacccgagacgcggcggggcgggaaagaggcggccccacacccgaag

SEQ ID NO: 148499 - RNA, 78 nt, Homo sapiens
gaggacgcgggccgaggagagcggaggagggggaaggaacgggagaggaagacaagaggaaacgagcacaggaccaca

SEQ ID NO: 148500 - RNA, 74 nt, Homo sapiens
caaaccaaccaccacaaagaaccaaaaaccaggaccaaaaaggaagggaccccaaagaacacagcgccgaggcc

SEQ ID NO: 148501 - RNA, 56 nt, Homo sapiens
acagaaaaggacggaaaagaagcgggaccccacaccagccagggaacaacggcccc

SEQ ID NO: 148502 - RNA, 70 nt, Homo sapiens
accccggggggagcgagaagccaagaccagacacaccacaggagggggcgaggaagagacaggcggggga

SEQ ID NO: 148503 - RNA, 88 nt, Homo sapiens
gccggccgcggcggccgcgcagggagcccgaggcaacgccggggcgcccgaggcggaaggcgcagaacggcggccaaagcgccagaca

SEQ ID NO: 148504 - RNA, 71 nt, Homo sapiens
aaaagggaggggggaggcaacgggcagcggcgacagggcgggcccagaacagaacccaggagcccccgcag

SEQ ID NO: 148505 - RNA, 71 nt, Homo sapiens
ggaggaaccggccagggccgcaggcaccaagaagaccaacaagcagaagagccaagacaaaaaggaggggc

SEQ ID NO: 148506 - RNA, 67 nt, Homo sapiens
gggaaggcaccgagacgaagaaggccgcacgagacccccgcccagccaaagcaacagagcacgacca

SEQ ID NO: 148507 - RNA, 43 nt, Homo sapiens
cgcgagggggcgcagaagcgcagcgagaagaaaccggaaggga

SEQ ID NO: 148508 - RNA, 80 nt, Homo sapiens
gacccagcagggacccaaggggggagcgggaacacccaaaagcgagcgcaaggaggcagggcgaaaccaagaggagggaa

SEQ ID NO: 148509 - RNA, 80 nt, Homo sapiens
aaaaacggcagggaagggaacgcacggcagacaagaaagccaaacgaggagaggaagaggcacaacgggagacaagacaa

SEQ ID NO: 148510 - RNA, 70 nt, Homo sapiens
acaccgggaaggggccagacgaacacaagccacacaacggggaccggaggagagaacaaccaagcggaaa

SEQ ID NO: 148511 - RNA, 103 nt, Homo sapiens
aacgcggggagggggcgaacgcaggggagaggagaagagagcggcggaagggacacccgagaacaccccagggagaaaggaaaaaaagccacagggcccggag

SEQ ID NO: 148512 - RNA, 75 nt, Homo sapiens
acaaagagcggcagacgccaagagaagaacaacaaacggcaaagaacacgacgaggccggggggggcacagagcc

SEQ ID NO: 148513 - RNA, 63 nt, Homo sapiens
cgagacacaaccgcaccgcggggacgaaaacgccggagacgaaaagagcaaggaggccccagc

SEQ ID NO: 148514 - RNA, 48 nt, Homo sapiens
caagggcaccaaacacccagaacaacaaagaggggagagcagaaaaga

SEQ ID NO: 148515 - RNA, 78 nt, Homo sapiens
agaaagaagaacaaaacgacaggagcacccaggaaggggcccagaagcagaaccaagagacccccgagcccccagccg

SEQ ID NO: 148516 - RNA, 75 nt, Homo sapiens
ggagaccccgcagcagaagagggaaagcacaccgagcgccaaacaccgaagaacaaagaaacacgaaacacaaag

SEQ ID NO: 148517 - RNA, 83 nt, Homo sapiens
acagcgcggagaccccagacccccagcgcggcacgagaaagacagcaaagaaaaggagaagaaaggaaaaaaacaaccccggg

SEQ ID NO: 148518 - RNA, 78 nt, Homo sapiens
ggaagggcagacgcccacccgggcccaagacaagagcgcgcggggcgcgcccgggacacagaagccaggccagccgca

SEQ ID NO: 148519 - RNA, 76 nt, Homo sapiens
caaacgacaacagggcaaaaaaagggcggaaaccgcacaggagacaggccagggaaggacacaccgcggaaagaac

SEQ ID NO: 148520 - RNA, 71 nt, Homo sapiens
gaacccgaaaggagagccaggcagcgagcgggagcagacagggaaccgaaggcagcagaaaagaaggccag

SEQ ID NO: 148521 - RNA, 76 nt, Homo sapiens
aaccccacagcaagaggacgaacagccagcaaagacaagagcagaccagcagccgcagcgcgacagccaaaaacgg

SEQ ID NO: 148522 - RNA, 49 nt, Homo sapiens
ggagccccacaaaagaaagccccggcgccacaagcaacaccaagcaacg

SEQ ID NO: 148523 - RNA, 78 nt, Homo sapiens
gcgcccgagggacccgcgggcccggcagagcaaggcgcggaccaggcgggcgcgacggggcagaggagcagcggccgc

SEQ ID NO: 148524 - RNA, 54 nt, Homo sapiens
aaaagaacccggagagacccagaacaagagggcagacagagcgaccgcccaaca

SEQ ID NO: 148525 - RNA, 69 nt, Homo sapiens
cggaaaaagaaaacaacacccgagcagcgcgaacacgaaaacgaagagacaaaaagcggggaagggggg

SEQ ID NO: 148526 - RNA, 84 nt, Homo sapiens
cccccgcagccccgagaaagccagccccacagaaccaagaacaggccaacagcaccaggcccacaacacacgacgacgagaagg

SEQ ID NO: 148527 - RNA, 76 nt, Homo sapiens
gaaacgagccaaaaaaccccagggccagaaggcagagcggcagacgagggccaccagagggcccccacaccaggcc

SEQ ID NO: 148528 - RNA, 68 nt, Homo sapiens
cgcgccggcccgggcacgcagcccacgcccagagcaagggcgccggccccggcggaggcagggcggac

SEQ ID NO: 148529 - RNA, 98 nt, Homo sapiens
gggaggagcggcagccgcgaggaggcgcgggagggcgagaacgaccccgagacggagaagacagaggagccagaccaagagacagcacaggcgagcga

SEQ ID NO: 148530 - RNA, 86 nt, Homo sapiens
gggacgcggcggcgccggccccggggagaaacgccaacaaggagagccgccagaacgagcacagccagcagaacaagcgaagcaca

SEQ ID NO: 148531 - RNA, 62 nt, Homo sapiens
gagaaacgcacaaaaaacaggaccagccccgaaaagagaggaccagaaccagaccggaaagc

SEQ ID NO: 148532 - RNA, 85 nt, Homo sapiens
gggagagcgcgccagccggccgcgaggcacacaggccccgagaaccaagagaacccccaccaaccaggcccggccaacggcccca

SEQ ID NO: 148533 - RNA, 69 nt, Homo sapiens
gccgcccgcggcgccacccacaaacagggcgccaccccggcccagcccggaacaacgcgaagggacgga

SEQ ID NO: 148534 - RNA, 77 nt, Homo sapiens
gcagcgggccagacccaggaccgcgacacgcccccggccggaaaaacccgggccggaaccacaaggaaaagccccca

SEQ ID NO: 148535 - RNA, 77 nt, Homo sapiens
gaggggaacacccagccccagaaacagaaggaaagcgcaaacccagcaagcgacagaaccggcgaggcaggagagga

SEQ ID NO: 148536 - RNA, 74 nt, Homo sapiens
agcgagaaccggaaaacgacgccccaacggccaaacaaacccgaccccggaggagaccaccaaaccggagcgga

SEQ ID NO: 148537 - RNA, 42 nt, Homo sapiens
gaaaaaaacaaaagaccagccacacaagaggcaggaacgaac

SEQ ID NO: 148538 - RNA, 74 nt, Homo sapiens
cggcgcagccggagggggccggagacaggcggaacaaaaccgacagaccccacccagcaaaccaccggacggcc

SEQ ID NO: 148539 - RNA, 68 nt, Homo sapiens
gggagccggaagagcgaaagggaccggagacagcagcagaagcagaaaaaggcaaacgagaagaagga

SEQ ID NO: 148540 - RNA, 67 nt, Homo sapiens
gggggccccgaaaaaagagagggggggaccgaccgcaacagaacggacccgaccggaacacgaaaga

SEQ ID NO: 148541 - RNA, 67 nt, Homo sapiens
agaagaaaggccccaggagacagaagagcagcacaggggaagagacagaaggcaggacagacaagac

SEQ ID NO: 148542 - RNA, 51 nt, Homo sapiens
agcagagaaccccccgcaggccgggggcgaggaagagacaggcgggggaga

SEQ ID NO: 148543 - RNA, 78 nt, Homo sapiens
gggagacagggacggaaaaacagacagacagggaagggacccccacacccaaaagcgcgggcacagaggcaacgggag

SEQ ID NO: 148544 - RNA, 76 nt, Homo sapiens
caagggcaagcacaaccgagcaaaccaaacggagcgcgggaaccaggcgaaggcaccagaaaaaaaaagaacaggg

SEQ ID NO: 148545 - RNA, 72 nt, Homo sapiens
cccagggccgggacacggcaaaggggggcacggagcaacaggaaagaaaagaggccggaacacccgccaaaa

SEQ ID NO: 148546 - RNA, 72 nt, Homo sapiens
gaccggggggggagcaggcccagcaacggcccccgaacccagcccgagggagcgcccaaacggaaccgccac

SEQ ID NO: 148547 - RNA, 38 nt, Homo sapiens
ggaggagccggacgggccaggaacacaacagcgagcaa

SEQ ID NO: 148548 - RNA, 69 nt, Homo sapiens
acagaaaggaagaccagcagaagcaccagcacacagggccgacggagacgcacacggacccccagaaac

SEQ ID NO: 148549 - RNA, 86 nt, Homo sapiens
cgcagccgggccggcccgaccccaccggccaacgccaagagaaaccaccaagagccaggaaggcaaaggccgagagagagccccag

SEQ ID NO: 148550 - RNA, 75 nt, Homo sapiens
gcggcgagcgcccgggaaccccaggcccgggggcacaaggggcaggggaaccgcccaaaagcccgccagaagaag

SEQ ID NO: 148551 - RNA, 80 nt, Homo sapiens
gacgccgcgcagcacccagacagcaccacgcccggggggacgcccccaccacaccgggagggcggagaacggaaaagcac

SEQ ID NO: 148552 - RNA, 82 nt, Homo sapiens
ggacaacaaggaccgcacagcgaacacacaccaaaaacagaaggagacagaggaccgccagagcggaacgaccccagagcga

SEQ ID NO: 148553 - RNA, 74 nt, Homo sapiens
gagggaaccacgagagacgcggagcaccgaaggaagagaaacccagccaagaaaagaagaggacccaagaagac

SEQ ID NO: 148554 - RNA, 73 nt, Homo sapiens
cgcgacagcgaaggacaagaccgacaaggacagcgaccacaccggagaaagaggacggggcgccgccggcccc

SEQ ID NO: 148555 - RNA, 71 nt, Homo sapiens
agaggacccgaagccacagccccaagggccagcgagacagaccgaaacccaaagaaaaggagcgcgcccaa

SEQ ID NO: 148556 - RNA, 75 nt, Homo sapiens
gcagacaaccaggacaacccgggcaggaaagcagagagcgaagacgaacaagaaccaagaccaggaaacccgaac

SEQ ID NO: 148557 - RNA, 76 nt, Homo sapiens
aagcacaagcaaagggacaccaccagcagccacaggaaaaggccgagacaggcaaccagacggagggaacaaacag

SEQ ID NO: 148558 - RNA, 73 nt, Homo sapiens
cgaagcccccagaaagacaccgagaggacggcaggaaagcgagaaggaaaggacgcgaccgaccccggaagaa

SEQ ID NO: 148559 - RNA, 60 nt, Homo sapiens
cgaggcagggaggacccacccccgggggaaaagaacgaggaggaaggcgaacaaggaccg

SEQ ID NO: 148560 - RNA, 36 nt, Homo sapiens
aagaagccgggacccgcggcgcgcgcggcgggcccc

SEQ ID NO: 148561 - RNA, 55 nt, Homo sapiens
gcccaggccccccgccccgcgcagcagggggagaggcaccagcaacagaccaacc

SEQ ID NO: 148562 - RNA, 72 nt, Homo sapiens
gcggggagacccggggacccccgacgccaggcagcgcccccaaacgacacaagaggcaaacaggacaaaccc

SEQ ID NO: 148563 - RNA, 74 nt, Homo sapiens
gaggagaaacagcagaaacgcaccaggccaaagaaagagaagaccccaacaacaggagagagcaagcgagcagg

SEQ ID NO: 148564 - RNA, 72 nt, Homo sapiens
aaaggaaaaacaggccggaaagcacaggaaaaaccaaaggaaccaggagggcgccccagaccgcccggcagc

SEQ ID NO: 148565 - RNA, 79 nt, Homo sapiens
cccagagaagccgcaggacagcagccccgagcacgggccgaggcccaccgcgacacaccgccagaaccgggggagaccc

SEQ ID NO: 148566 - RNA, 77 nt, Homo sapiens
gggggcccgcccggggcggcaaggaccgagcagccccgccacccggcaggaaaagcccaggcggggcaggcccagca

SEQ ID NO: 148567 - RNA, 87 nt, Homo sapiens
ccggcggccgagggggcacagaagcgggcggcggcgcgccgccccgggcggccgcgggcggcaggacagcggccgaagccagagccg

SEQ ID NO: 148568 - RNA, 69 nt, Homo sapiens
caaacaagaacagaaaacgggaagagagggaacacgcaggagggaagaaaagagacagcccggggaccc

SEQ ID NO: 148569 - RNA, 61 nt, Homo sapiens
ccaaaaggaggcgccgaaaaaaggcaacaccggaacaccgaacaaaagccggacacaagag

SEQ ID NO: 148570 - RNA, 61 nt, Homo sapiens
ggaagcccaaggaccccaacaacagcccaccccgggcacgaccaagagccccaaaacccag

SEQ ID NO: 148571 - RNA, 36 nt, Homo sapiens
ggcacaaaaaccgacgagccagaaaacagaaacgcc

SEQ ID NO: 148572 - RNA, 76 nt, Homo sapiens
agaaaaacaacaaacacccggaaagaaaacagccgaccgacagcggcagccaagaaaagaacgcccccagcggccc

SEQ ID NO: 148573 - RNA, 77 nt, Homo sapiens
cgaaggaaaaggaggaacgccggcccgagaaagcccgccagcagccagcaagagacgggagaagggccgcggacagc

SEQ ID NO: 148574 - RNA, 53 nt, Homo sapiens
aaccgccacccaggcccaagaagagccgagagcgccggaggaccacacccggc

SEQ ID NO: 148575 - RNA, 67 nt, Homo sapiens
cggagccgcgcagcgccccaccccacaggccgccgccggcgcccgcgagcgaagaagagagggcgaa

SEQ ID NO: 148576 - RNA, 64 nt, Homo sapiens
gccaaggagaagagaccaaggcgcaggaacagcgacggacgcccaggcaggcgacgggagcgga

SEQ ID NO: 148577 - RNA, 62 nt, Homo sapiens
cacagcagggacgccgacccagccgaccaaaagagcaagagaaagaaggacgccgagagagc

SEQ ID NO: 148578 - RNA, 45 nt, Homo sapiens
ccaagacacgccagcacgaccggcaaaaagagcggcgccaccccg

SEQ ID NO: 148579 - RNA, 69 nt, Homo sapiens
cgaccaagggcacaagaccacaggcgacagaggagacacgaagcgccacagaagaagcaaaaccaacag

SEQ ID NO: 148580 - RNA, 66 nt, Homo sapiens
ccccccccccccagacccacgaaaagcgcccaggaagcggaaaaacaaaagagccgcccaacgacg

SEQ ID NO: 148581 - RNA, 77 nt, Homo sapiens
aggcacaagcaacaaaaagaaacagaacacggcacgagcgagggccccaaggcggcagccccgaccgacggggcaac

SEQ ID NO: 148582 - RNA, 78 nt, Homo sapiens
ggagagaagagaagccgaagacggagaaaaaggaacagggaggggagaaaaaacaccagcagcccagcaaccaaaaag

SEQ ID NO: 148583 - RNA, 55 nt, Homo sapiens
aggcgaaaggcaagagggaaagggagaaggaacgcccagaggaagaagaccaaga

SEQ ID NO: 148584 - RNA, 74 nt, Homo sapiens
ccgacagccgcagaacaacagagagaagggcgggagaaaccaaggaaagagaaaagcgggaggcgagggaacag

SEQ ID NO: 148585 - RNA, 66 nt, Homo sapiens
gccggaaacggacaaacaggcacaggaggcaggagaagagcagaggcagcagcaaaagagaggcac

SEQ ID NO: 148586 - RNA, 56 nt, Homo sapiens
gccaccagcagccaggaaggaagaggcgagagggagaaccagacaccccaacacag

SEQ ID NO: 148587 - RNA, 57 nt, Homo sapiens
gcggggacaggacggcggggcgagccagggcagagcaaacaaagcaaaaaacaaaaa

SEQ ID NO: 148588 - RNA, 71 nt, Homo sapiens
ccccggcccaagggcgaccccagccgggcccgcgaagggccacggcacggcaaggagagaaacggagggcc

SEQ ID NO: 148589 - RNA, 58 nt, Homo sapiens
gacggaccgggaaggagcacccaggaccaccagaacgaggcagcgagaagaaaaagaa

SEQ ID NO: 148590 - RNA, 74 nt, Homo sapiens
agcagccagaccaagaacaaccgcggacacggagaggaaggggagcaacagcgagcaacaggcaacgaaaacag

SEQ ID NO: 148591 - RNA, 74 nt, Homo sapiens
cgcacgacaaggagggcggaacggcggaaggccccgagccccggccccaaagacccaaaacagagacacccccc

SEQ ID NO: 148592 - RNA, 76 nt, Homo sapiens
caggaggacgaggagagacagaagaagcggaggccggcaaagccaagccaaggacaaaacgacgcgaaaaagaaac

SEQ ID NO: 148593 - RNA, 78 nt, Homo sapiens
gcgcggcacgcgccgcgggacccgaggcgagccaagcagggcccggccaggccccaccgccacaagcaggggaacacc

SEQ ID NO: 148594 - RNA, 86 nt, Homo sapiens
ccggacgggcacgggcgaccggcccgcgagggacaagacgcagaggaagggggcggcgggaggcccagccgggacagcacggggcg

SEQ ID NO: 148595 - RNA, 96 nt, Homo sapiens
caaagggagagcaggagccccacgccggcaggaaggggcccagagacgggaaacggcgaggaaagagaggagccccggaaagaaaaggacagaccc

SEQ ID NO: 148596 - RNA, 52 nt, Homo sapiens
acaagaacgggcacggccacgaaaacgaagcaaggaaggaagcaaccaggaa

SEQ ID NO: 148597 - RNA, 64 nt, Homo sapiens
caagaacagagagagaggggacagacgagagaacgaggccgcacagcgaccacaggggaaacgg

SEQ ID NO: 148598 - RNA, 80 nt, Homo sapiens
cacccaaaaccgcccaaacaggaaaggagaacaccgaaggagaagccaagccaggcccaggaaggagccgacgcgacgag

SEQ ID NO: 148599 - RNA, 51 nt, Homo sapiens
cagggcccgcggacacgaaaacaccgggaaaggcccaaaccggcgaaaacc

SEQ ID NO: 148600 - RNA, 80 nt, Homo sapiens
ggcgcgcgcccagcgccgccccgcgcgcgcccgccacggcgccgagccgcggccgagggagcggaggcacgcgccaggag

SEQ ID NO: 148601 - RNA, 74 nt, Homo sapiens
ccgccaggagcaaagggcacgaagaacacaaagcaaaaaggaaaagaagagaagaagaggcaggagcacaccaa

SEQ ID NO: 148602 - RNA, 107 nt, Homo sapiens
acgccccggagcggcacgccaaggagcagcaggagcagacggccgaggaaagcacggcagcaggagccccagcgacccggggaggggagcgaacaaggagggcagga

SEQ ID NO: 148603 - RNA, 85 nt, Homo sapiens
cagcaaagggaacccagacaccagaagcgcaagcagaagcaagggacaagggccacacccccagccaaaacagagggagacgaga

SEQ ID NO: 148604 - RNA, 74 nt, Homo sapiens
gaccagagacaagacaaagaggggagcagacggcaggccagaccccggcagggaggcgcccgcacagcgagacg

SEQ ID NO: 148605 - RNA, 79 nt, Homo sapiens
gcgccgcaagaagcggagaggagacagcggaccgggcggagcgcgggcgcggagacacagcggccagagcagcgaccgc

SEQ ID NO: 148606 - RNA, 81 nt, Homo sapiens
gacgcagggcgcccccgcgggacgacccgggacagcccacggggcagaccagcgaccaccggcacagccgcagagaaacaa

SEQ ID NO: 148607 - RNA, 74 nt, Homo sapiens
ggaacaagagagcaggaggaacaaggccccaggccgaggagcgccgggcgcacacgcacagcagcagggccggg

SEQ ID NO: 148608 - RNA, 81 nt, Homo sapiens
gccccggacccgcggcgccggcccggagcggagccgcgacggcagcggcaagaagaagaaacgcagaaggacagaaagcac

SEQ ID NO: 148609 - RNA, 73 nt, Homo sapiens
ccaggacccagaccggacaacccccagcaagagcgcacaggaaaacacggggggagaaaaggccaagggcagg

SEQ ID NO: 148610 - RNA, 79 nt, Homo sapiens
cccaggaagagaacggaaggagaagaaaaggagggacccaccgagaaccaccgaaggagacacacaagcacaacaccac

SEQ ID NO: 148611 - RNA, 81 nt, Homo sapiens
gcccggaccagccgccccggcgccgagagaaagccgggcgaccccccagcgccccagacagcagcgccccagaagaccacc

SEQ ID NO: 148612 - RNA, 74 nt, Homo sapiens
gaaggccgaacaaggcaggcaggagagccgagccgggaccggagacaccagggcccgccccaccgggggccacc

SEQ ID NO: 148613 - RNA, 75 nt, Homo sapiens
aagcgcgggaacagcagcagcaggaagaaacaaccagcaggaggagccagaaggggagcccggagcaaccaggag

SEQ ID NO: 148614 - RNA, 73 nt, Homo sapiens
gaccccgggccaccccaaagccaagccaccaccgccgggacagcgaacgggcacgacggccagcgaaacagag

SEQ ID NO: 148615 - RNA, 88 nt, Homo sapiens
agacacaccaggccggcaggcgagaaaagcgagaccgcggcgaggaccgagcggggcccggcgcacccaccaccgccgcccacggcag

SEQ ID NO: 148616 - RNA, 79 nt, Homo sapiens
aggaaggaggacagaaggaccccaagcagcggacacccccgccaggaccaaccaaacccgcaaaaccacaccaccagcc

SEQ ID NO: 148617 - RNA, 72 nt, Homo sapiens
gccgaccccgacccccgcgagccgagcgcccagacggagacggccccgccacccaagagcccgggaagcgca

SEQ ID NO: 148618 - RNA, 80 nt, Homo sapiens
caagccccagcgacgaggccgcaagcacgaccgccgcccggaccgagggaaccaaggacacgcgaagaggaagaaacgag

SEQ ID NO: 148619 - RNA, 78 nt, Homo sapiens
caggagcgggacgagagcgccggaggccgagcggaggggaaacccagacgacaaggaaggccaagggacccacgacca

SEQ ID NO: 148620 - RNA, 56 nt, Homo sapiens
gggaggcaaggggggaccagacaggcggcaagagggccccaaggcggcagccccga

SEQ ID NO: 148621 - RNA, 41 nt, Homo sapiens
cggaacagcaaacccaagacagaacaagcgagggaggcggc

SEQ ID NO: 148622 - RNA, 59 nt, Homo sapiens
gcggcggagcggcagggcggcgcgaggaggcggcacacagagaaaaaaagggaacaaaa

SEQ ID NO: 148623 - RNA, 71 nt, Homo sapiens
cccaaacgcccccgccacggccgccgccccgcaggggaaagcgcgagcgagcacccggagcagcagagcac

SEQ ID NO: 148624 - RNA, 90 nt, Homo sapiens
ccaccgccgcccgccgggaggaccgagccaagagggcagccgccgaaggaacgcgacggcggcgcccgcagcggggaagcgaggggcagc

SEQ ID NO: 148625 - RNA, 82 nt, Homo sapiens
agccgggcccccccgcccagcgcgaggaacgcaagcacaggaccagaaacgaaaggcagcagaagaggaaagccagaaagac

SEQ ID NO: 148626 - RNA, 66 nt, Homo sapiens
ccagcccgcgccagaaacacgccaaacagagccccaaggagcagcggccgagagagaagaggcaga

SEQ ID NO: 148627 - RNA, 84 nt, Homo sapiens
cagacaagcacccaacaaaccaagagggagcaccgaagacgagcagcagcacgcagcagccccagagcagccagcgccagccag

SEQ ID NO: 148628 - RNA, 82 nt, Homo sapiens
caagagaggagccccggccgcccggacgagcgagaccgcaccagagggacgaacagcggggacgccccagcagaccgcccag

SEQ ID NO: 148629 - RNA, 76 nt, Homo sapiens
gcagaggggagcagcgccggggccgccgaccaacacccgaggcggacgcagagacagaacacaagcagacacccaa

SEQ ID NO: 148630 - RNA, 74 nt, Homo sapiens
agaggagcgagcggcgaggcgcggcccggcggccggaaagacaaaccggcgaccacacacggggacgacgggga

SEQ ID NO: 148631 - RNA, 79 nt, Homo sapiens
gaaggaccccaacgcccaccaaagaggaaagcgaggaggagcgagcgcgagaggaccagggaacgggacacacagacgg

SEQ ID NO: 148632 - RNA, 74 nt, Homo sapiens
gaccaaggggggggcacccccacaacgaagaagcagagggaaccggaggaaagcaagaaacaaaggaacgaaca

SEQ ID NO: 148633 - RNA, 78 nt, Homo sapiens
ggcgagcgggggccgggcagccacgccgccccaccccccaagaacccggaagaccgagaagccggcaaaccgaaagga

SEQ ID NO: 148634 - RNA, 74 nt, Homo sapiens
cacagagcaggaacgcagccggggacaccaaacaggccaccaccaccacagacagagggaagagcggaacacca

SEQ ID NO: 148635 - RNA, 78 nt, Homo sapiens
cgaaccaaccgaaaacagaaacaaacacaccaggagaggggacgcggggcgcgcccaggcggcgaaccgggcgcaagg

SEQ ID NO: 148636 - RNA, 85 nt, Homo sapiens
agaagagcggagcagggcggagagggcgaccgaggacagcagcggacggccggaccaagaggcgccgccccccagcaaacgagaa

SEQ ID NO: 148637 - RNA, 43 nt, Homo sapiens
gacgagagcaaggagaggcagggggaggacacaaccccagaga

SEQ ID NO: 148638 - RNA, 83 nt, Homo sapiens
gcaggaaggacggaccaggggcagacacaaggaggaagagcgagagaagaagcagaaggcaaacacagccccccagcaagccc

SEQ ID NO: 148639 - RNA, 60 nt, Homo sapiens
gacaggagagagcgccaaggaccggcaagggagagaagagacgaggaggaggggagaccg

SEQ ID NO: 148640 - RNA, 81 nt, Homo sapiens
gcagcacccccccaggagaccggcagcggccagccccccccacgacaacaggcacaaagagagaaggaacacccacagggc

SEQ ID NO: 148641 - RNA, 57 nt, Homo sapiens
ggcagcccgcggcagcacggaggccggaggcggagacagcggcaggacccagacccc

SEQ ID NO: 148642 - RNA, 76 nt, Homo sapiens
gccaacccacggaggaaggggcccggcacaaggaaaggcagggcacacaggcccgagcacaaacacaagaaacgca

SEQ ID NO: 148643 - RNA, 81 nt, Homo sapiens
agcaccagaaggaagagcgcccgggaaagaggaaaacccaaagggcccaaaggaccagccaaaacccacccaagccacgca

SEQ ID NO: 148644 - RNA, 68 nt, Homo sapiens
aaagcaagcacagacgaagcccgaaaaccaggggggggacccagcacagagggaagcccgcggcggga

SEQ ID NO: 148645 - RNA, 71 nt, Homo sapiens
ggggacgaagggaacaggaaacagcagaagaaagaagcgacaaaacagccccagcagaaacaccaaagaaa

SEQ ID NO: 148646 - RNA, 58 nt, Homo sapiens
ccgacgcacccagcacgggccagaacccaaggagaaaggcggcgcgaggagaccgcag

SEQ ID NO: 148647 - RNA, 80 nt, Homo sapiens
ccggccagcgaagcggagccagggcacaagcgccagccaacaagggagacaccaaggcccgggggagcccagaaccgcgg

SEQ ID NO: 148648 - RNA, 60 nt, Homo sapiens
cagaaaccccggacaaggcacgccagacgacagcgcgcgaagaaacacacggaggacaca

SEQ ID NO: 148649 - RNA, 113 nt, Homo sapiens
ggacaacaaacacaacacagacaccaaaaaaaagccaccaccgaaacgccaaaaagaagacaccgagggccagggaccaccgagcccaccacaagaccagagacggagcgacc

SEQ ID NO: 148650 - RNA, 69 nt, Homo sapiens
gacccggccaaaaaaggggaagccacggaccgagcacaagaagggcagacaagacagcagaggccgcaa

SEQ ID NO: 148651 - RNA, 68 nt, Homo sapiens
gcacgcgcggacgcccaggaaccacgggcacgggagaaagaccagcggggacgaagggaggaggggac

SEQ ID NO: 148652 - RNA, 79 nt, Homo sapiens
gccgccgcagaccgacgccgcaggccccagcagccgaccgaggggaggaccagagaaaccagcaggccaacggcaggaa

SEQ ID NO: 148653 - RNA, 89 nt, Homo sapiens
aacaaaccaaggccaacagccggaacgcgagaccgggagacggcagaacgcaaacgacaacaagcccagcaaagacacacgcccccccc

SEQ ID NO: 148654 - RNA, 77 nt, Homo sapiens
cggggccccagagccagcccagccacgaccgacgcgcaacaggcgggagaaaaacggaacagcacgcacaaagacaa

SEQ ID NO: 148655 - RNA, 77 nt, Homo sapiens
cacgaggaggaggcagacaggacggagagaaggacgaggacacggaggccaaagaagcggcgggagcccaaagggcc

SEQ ID NO: 148656 - RNA, 84 nt, Homo sapiens
ggccgcgcgccgcgcccgcgccacagggacagagcagaagggcgaaagaccgggccgcagaagaggccccaacccgggccagac

SEQ ID NO: 148657 - RNA, 74 nt, Homo sapiens
gggccgcccagaggcagaaggaccgccaacagcagacaacaagaaacgacagcagacagaaagaacagaaacca

SEQ ID NO: 148658 - RNA, 77 nt, Homo sapiens
gacgcgagcagccaagggggagcagccacagggcagaccccggccaaaggcaccgggaaaacgcagaggaacgaggg

SEQ ID NO: 148659 - RNA, 64 nt, Homo sapiens
cacaagggaacgggcggccccggagagagagccgcgcacgcacagacaagaagccacagggaaa

SEQ ID NO: 148660 - RNA, 60 nt, Homo sapiens
gcgcagaccggggagggaaagaaaagccaggacaaaaccaggcagaaccaacacgaaccc

SEQ ID NO: 148661 - RNA, 59 nt, Homo sapiens
accaagcgcgcgaccaagacccccacccaaggggacaacggggaaggcgggaaggaaga

SEQ ID NO: 148662 - RNA, 83 nt, Homo sapiens
gagggccagaccccccggggccccgggaccaacgcgcgggccggggcgaggccccgacaagcagaccggaagaccgacggaag

SEQ ID NO: 148663 - RNA, 80 nt, Homo sapiens
ccgggccccaggacaccgagagcggccccacgacccgggcccagacaggaagggcgagcacgggccagcccggccacagc

SEQ ID NO: 148664 - RNA, 77 nt, Homo sapiens
ccagcccccaggagcgggaacagaacgacgaaggaagggaccccacaagcccacacagcagcagccacgggggcacc

SEQ ID NO: 148665 - RNA, 51 nt, Homo sapiens
gcaaacgagcgccaacggagaaaaaaaggagacagacaacagagacgcggg

SEQ ID NO: 148666 - RNA, 77 nt, Homo sapiens
gacacgccgagagacccaagaaacagacgacgacaacagggagacggacccaggagcgcgacagccaaacacacacg

SEQ ID NO: 148667 - RNA, 37 nt, Homo sapiens
ggggaggacccgaccagcggaaaggcagccacagcag

SEQ ID NO: 148668 - RNA, 58 nt, Homo sapiens
cggcgggcggggcaccccagcgcgagaccgaggcacgggcaggcacagcagaccagaa

SEQ ID NO: 148669 - RNA, 111 nt, Homo sapiens
ccacagagggggaaagccaaggaaaaacggagagccacaaaaaaggaagcgaaaagaggacagaccccaggaccaagacccgcaaccaggacacagcagaagcagaagagg

SEQ ID NO: 148670 - RNA, 81 nt, Homo sapiens
gcgcagagccggaggggcgcgggacacacccccaggaggcccggcagagcagggcgaccggaggggaagcggcagagaagg

SEQ ID NO: 148671 - RNA, 85 nt, Homo sapiens
aaaaacaggccggaaagcacaggaaaaaccaaaggaaccaggcagcacaacaagacgcagcgggaggggagccagcgaaggccac

SEQ ID NO: 148672 - RNA, 81 nt, Homo sapiens
gcgggcaacaccaggcaccagcaaggggggcacacacaggcggaggagggcgcaacggacaccacaaccccgccccaggca

SEQ ID NO: 148673 - RNA, 63 nt, Homo sapiens
gagcaacgcccagcgggccggcgcccggggccccggagaggggccagaaggccccccaggcaa

SEQ ID NO: 148674 - RNA, 79 nt, Homo sapiens
cggaggacaaccgaccggcggccagggcccgagggcaagaaagggaggagaggcaggccgcggggcccagcgcgggaac

SEQ ID NO: 148675 - RNA, 54 nt, Homo sapiens
gaaagccaagcaaaaggcggaaaaaccgagagcaccccagccgagcccagagcc

SEQ ID NO: 148676 - RNA, 60 nt, Homo sapiens
acagccaacaggagcccaccagcagaaggagccccaggcgggaagcaagggcgaccgacc

SEQ ID NO: 148677 - RNA, 50 nt, Homo sapiens
ccacagacacgccagggagacgcccaggaacaaaagcccagcccggcagc

SEQ ID NO: 148678 - RNA, 74 nt, Homo sapiens
gagggcgggccgaggcggaaaggggcgagccaagcaagacaagagcagccgagcggacaccgaaaaggccccga

SEQ ID NO: 148679 - RNA, 75 nt, Homo sapiens
agggcccaccgcaaggacggagaaggggcacaaggccaagacggccaagggagccacagggcccagagcacggaa

SEQ ID NO: 148680 - RNA, 36 nt, Homo sapiens
ggaacaggaagagaaccgccgcgacggaccagaaag

SEQ ID NO: 148681 - RNA, 83 nt, Homo sapiens
ccaagccgcacagccgcggcggcagcagcaggagagaaacgccggaccgaacacgcccccgacgaccagagagacccggcccc

SEQ ID NO: 148682 - RNA, 81 nt, Homo sapiens
ggcagcgcaggggcgggaaagacccaggagaagccgcccaaagaacggaggagacacacagccccagacgggaggaaaaaa

SEQ ID NO: 148683 - RNA, 96 nt, Homo sapiens
gggaccgccagccgccgcgcccacagccagcagcgggaccgacgaggaacaagcagaaagcacgaacaacgagaacaagacacgagcaaaccccac

SEQ ID NO: 148684 - RNA, 77 nt, Homo sapiens
cccgcccaggaagggacccgagcacggccccgacccgaaggggacgccgagagagcccggccgggcaccggaagaga

SEQ ID NO: 148685 - RNA, 75 nt, Homo sapiens
aacaccgcgcgaagcccgcgcacgcccaggcgcggggcgaagggcgcgggcgccagcaagccagacaacaggcca

SEQ ID NO: 148686 - RNA, 82 nt, Homo sapiens
cagggcgacggccccaccccggccacgggacggcggcgcggagaaggcaggccacccccgccaggcgaggccccccagccag

SEQ ID NO: 148687 - RNA, 66 nt, Homo sapiens
agggagggcgaacgccagggggaccagacgcaggccaagaaagccaaaaagagcggaaagaacaaa

SEQ ID NO: 148688 - RNA, 76 nt, Homo sapiens
ggaagcgcaacgggaggacgccgaaaccccagggacacagcccagcgagaaggaggggagccgggcccgcagggcc

SEQ ID NO: 148689 - RNA, 64 nt, Homo sapiens
gcagcgacgagaaccggacaggccaccccagcagacaggccaaggcccgggcaagccaacacgg

SEQ ID NO: 148690 - RNA, 70 nt, Homo sapiens
cggcgccgcgccggcggcgccaaacgaaacggaaaggaggacaccggaccagacgaagagacgaccaacc

SEQ ID NO: 148691 - RNA, 61 nt, Homo sapiens
agaaagagcccggacggaagaggaggagaccaagcgcacagccagccgggcccagcaaccg

SEQ ID NO: 148692 - RNA, 74 nt, Homo sapiens
cgcccgccgcaggccacccgggaacggaggaggggagcccgccagaacaagccaaagcgggcacagcagcacac

SEQ ID NO: 148693 - RNA, 57 nt, Homo sapiens
agccaacccccagaagcgcacgggaacggcacaaaggaaccaagagccgcaggaaaa

SEQ ID NO: 148694 - RNA, 76 nt, Homo sapiens
aagcaaagcaccaaagacgagaaagaaacagcagaaggaaggcagagcccacaaacccaagcagcaaagaaagagc

SEQ ID NO: 148695 - RNA, 72 nt, Homo sapiens
cccgccccagccgcagacagccaggggaccgacggcaaccagcagcaaccagaaccccgaccccacccgaag

SEQ ID NO: 148696 - RNA, 77 nt, Homo sapiens
gacgagccgggacaagagagccgggcgcaccagccacagcacccacggccaccagggcaagaggagcagcagcggcg

SEQ ID NO: 148697 - RNA, 78 nt, Homo sapiens
gaaaccacccacacccaccaacagaaacagacccaaacacgaggaccagggaaggaaaaccaaaagagaaagaagaac

SEQ ID NO: 148698 - RNA, 80 nt, Homo sapiens
aacacggaaggacagcgaggagacaaaggcggaaggaacccaaggaccgcaaagaaaacccagagaacaccacccgaaga

SEQ ID NO: 148699 - RNA, 71 nt, Homo sapiens
cgcccggaacaaccggaccgaacgacacggcggaaacgacgcaggaggaccagaagcaccagaaacaggaa

SEQ ID NO: 148700 - RNA, 74 nt, Homo sapiens
cggagcggacaggaggcaacagcgaacacccacccccggacgccgcacaaaagaggccggaagagcgggagcgg

SEQ ID NO: 148701 - RNA, 79 nt, Homo sapiens
ggaaggccacccaggaagaagcgcaaccacccaaaaggccgggcccaaagaggaaggaccaaaaaacagaaaccaacgg

SEQ ID NO: 148702 - RNA, 61 nt, Homo sapiens
aaagcccaacaagaccggcaaggcagggagccgaggccagagcagaaaccagcccaggaac

SEQ ID NO: 148703 - RNA, 77 nt, Homo sapiens
agagcgaaaaccagagacagcaggagaagcccacccgccccaggagcaaagccccccaaaaggcagcggggccagag

SEQ ID NO: 148704 - RNA, 52 nt, Homo sapiens
acccccaacaccaacacccagacggcaaccagcaagcagaaggaaaagagca

SEQ ID NO: 148705 - RNA, 68 nt, Homo sapiens
cgcggggccgcccgcccacccagggccggaaaagccaacgccggcgaaggcagagggcccaccccgga

SEQ ID NO: 148706 - RNA, 67 nt, Homo sapiens
caaaagacagcaccgacagcagacagggacaaccacgccccccggacagccagagaaccaaaggcag

SEQ ID NO: 148707 - RNA, 78 nt, Homo sapiens
ggaagggaggagacccgaccccagaagagggggacaggggagcacgacagccacggaaggaaaaacacgacgcagcac

SEQ ID NO: 148708 - RNA, 57 nt, Homo sapiens
caggaggccagggggcgccagggggaggaagaaccaagcggcagaagaaaacgcgag

SEQ ID NO: 148709 - RNA, 74 nt, Homo sapiens
gcagagaccaagcaggggcgaagcacgggaggggagagagaaccggcacaccggagcaacccagaacacagcgg

SEQ ID NO: 148710 - RNA, 73 nt, Homo sapiens
caggccaccccgggaacggagacaaccaagggcaaaagagacggacaagcaaggcaggagaaagcaagcaagc

SEQ ID NO: 148711 - RNA, 114 nt, Homo sapiens
cgggcccaggaaaaagaggaaagggacgccggggccgggccaggagcagagagcggacgagaaccaccaccgaccaggcaccggagaccagagcaagggcaagacggccgaggc

SEQ ID NO: 148712 - RNA, 51 nt, Homo sapiens
gaaggacccagcgaggaggggaaacacaaagaagacaccagaagggccagc

SEQ ID NO: 148713 - RNA, 85 nt, Homo sapiens
accgcccggcccggccccccagaggaggaaccacaagagccagaagggagaagaaccaacaacggaaaaccagcgggacaaggca

SEQ ID NO: 148714 - RNA, 69 nt, Homo sapiens
agaaaggacccagcagaccgcaaggcacccacccgcgaaccacaaggcggaaacaaaggacaaaggaaa

SEQ ID NO: 148715 - RNA, 60 nt, Homo sapiens
aaagccgcgaacccaaggcagacacaacaccacaagcagaccagaggaggccccccagcc

SEQ ID NO: 148716 - RNA, 80 nt, Homo sapiens
ccggagaaggccgcaccaccaaaccaagcaaggaaagaacaagaaaggagaggaagaaccgaagacaacccaagacggca

SEQ ID NO: 148717 - RNA, 52 nt, Homo sapiens
cacagaccccaagagccaggaaccagccggagagagaggaagagccccggag

SEQ ID NO: 148718 - RNA, 86 nt, Homo sapiens
gcacagaagaagcacaagacaagggccaaaacaggacagaaagaaggaaaaagcagaaagccagaggaagggaccgcccgaggacg

SEQ ID NO: 148719 - RNA, 61 nt, Homo sapiens
cgggcccagggggggagagccccggcaggaacacagaaacgccccgggccagccgccaagg

SEQ ID NO: 148720 - RNA, 60 nt, Homo sapiens
ccgggccccacagagagcccggcagcgacaagcccagcccccaggggccggagacaacgc

SEQ ID NO: 148721 - RNA, 72 nt, Homo sapiens
accggagcgccgcggccacggccccccgccagaagccagaggagcgagagaccaacgggcaagcaaccgagg

SEQ ID NO: 148722 - RNA, 74 nt, Homo sapiens
agcaaccccaagacaagaaaaccaagcacagcgagaagggaacagaccgacgagggaagagagaggggcaccgg

SEQ ID NO: 148723 - RNA, 80 nt, Homo sapiens
cacaagccagccggacagcaacaggcaaaggaagggaagaggccaggaggcaaaaaccagacagccaccagaacagacaa

SEQ ID NO: 148724 - RNA, 53 nt, Homo sapiens
agaagacgagaaggggccaaagggggaacggagccaaaaggaaaagcgaagcc

SEQ ID NO: 148725 - RNA, 73 nt, Homo sapiens
agacgcggcacagagagggccgggagcgcgcagccaggggcaacaggaaaacaacccagagaacccaaacccc

SEQ ID NO: 148726 - RNA, 73 nt, Homo sapiens
agccaccagggaagcaaagcaaagggggcccccccgagaggaaaagaagcacaaggaccgaggaaccacgcca

SEQ ID NO: 148727 - RNA, 85 nt, Homo sapiens
ggccgggcccacacagcggagggcccccgaagacagcgcagcccgggacagagagccgaaagccgggcaaggggaaagaaggccg

SEQ ID NO: 148728 - RNA, 81 nt, Homo sapiens
ccgcggccccgagcgcgcgggagcagagcaaaccaggaaccccgggaccagaagccagaggggcccaaaaaggaacggcgg

SEQ ID NO: 148729 - RNA, 78 nt, Homo sapiens
agcagcggacgagggagggccgccgcgcccaggagggcgggaagaagcgagagccaaaccagacaaagggagcaccag

SEQ ID NO: 148730 - RNA, 76 nt, Homo sapiens
ccgcagcagggggcagaacccagaggcgggaggggccgggaggcagaggggcagggggcaccggagccaggcaggg

SEQ ID NO: 148731 - RNA, 57 nt, Homo sapiens
ggagagccacaacaccgcagaagaaagacgcaagaggaccggggcccaagggcccga

SEQ ID NO: 148732 - RNA, 75 nt, Homo sapiens
cacgcacagaggagaaaaagggaagcaaacaggaggaggcgcaccaggaagggcagaagacagcagccacacagc

SEQ ID NO: 148733 - RNA, 75 nt, Homo sapiens
accgagacggggagcccaaagcaaagggcggagaacggaaaagcaccaggaagcagagaggaccgcagaagggaa

SEQ ID NO: 148734 - RNA, 77 nt, Homo sapiens
gcgacggaggcggcggacaggcgacagcgaccgcggcagaccggccgaggcaagcggccccccaggcacacaaggcc

SEQ ID NO: 148735 - RNA, 82 nt, Homo sapiens
gggcccggagcccagggccggaggacacccacaggcggcccgcggacccggcagggacgccgagccccgaggacagaaaggg

SEQ ID NO: 148736 - RNA, 83 nt, Homo sapiens
aaggacaaaaacagagcaaagagggcacaaaccagcaccgggagagaaggagagaagcaagcacgcccggagaggaaacagac

SEQ ID NO: 148737 - RNA, 57 nt, Homo sapiens
cgaaggggaaaggcacccgaagggaccacagaccagcacgccggcgccacgaaccga

SEQ ID NO: 148738 - RNA, 59 nt, Homo sapiens
gagcgcccgcaccacaccccacggagacccgaccaccggaagccacggcccggaccccc

SEQ ID NO: 148739 - RNA, 123 nt, Homo sapiens
ccagggcggggggggcgcccagcacgaccccgggcagcccaacgagaaccggagggcaccggagggacaagaacccaagaaacaggaaaaaacccaaaacaccaaaaggaccagcgagaagac

SEQ ID NO: 148740 - RNA, 80 nt, Homo sapiens
cagcacgcacggacacccgagcacagagacgaagaggaccaggagcaaacagaaaaacagggcgaggccaccgaaacccc

SEQ ID NO: 148741 - RNA, 65 nt, Homo sapiens
agggaggacacagagccgggaagacgccgaagggcgggagcgaggaggaaaacccaaacgcagag

SEQ ID NO: 148742 - RNA, 66 nt, Homo sapiens
caaacagcagaggggcagggagaaagcacaccagccacaaccaaggacaaagaagaaaacgacgaa

SEQ ID NO: 148743 - RNA, 75 nt, Homo sapiens
aacaaacaagcggccacccgaaaggacaagagaaggcacagaaacccacaagaaaaaacggaacgaaaagagagg

SEQ ID NO: 148744 - RNA, 76 nt, Homo sapiens
ccgaaggagacaaccgaggccgcagagcccaggaaacgacaagcaagcggcaaagaagaagcaagaggaagcagag

SEQ ID NO: 148745 - RNA, 78 nt, Homo sapiens
cgccgggacacaccccaggaaaaagacagcccgcagcacgaccagcaggaacgcaaaccaagccaggcccgaagagca

SEQ ID NO: 148746 - RNA, 52 nt, Homo sapiens
ccccagccgcgcccgggagagcaagccaggggggaagaagagcgacaagaag

SEQ ID NO: 148747 - RNA, 39 nt, Homo sapiens
acgggcgcccagccaggccccacacacccgcaccacacc

SEQ ID NO: 148748 - RNA, 68 nt, Homo sapiens
caacagaaaaaggaagcgaggcaaaggaaaaaaagacaccaccaggagcgccagagagacccaccaag

SEQ ID NO: 148749 - RNA, 90 nt, Homo sapiens
gcgggagccggcggcgagcggcagagccgaggaaacccagacccaagaccaaccgaggaggaggaggagggagacgcgcccaggcagaaa

SEQ ID NO: 148750 - RNA, 72 nt, Homo sapiens
cacgccagcagcgcgacggcagggaagagcggccaagagagaaacacaagagaacaccaggcagcaccaccc

SEQ ID NO: 148751 - RNA, 71 nt, Homo sapiens
gcgggccggcagaagaccacggaaagcagaaacccacaaaccccagagcaagccaacgcaaggcgcagaaa

SEQ ID NO: 148752 - RNA, 70 nt, Homo sapiens
agcaaccacacccgcccccggagagagcacgaaggacccagcagggcaccagggcgggccggccccagcg

SEQ ID NO: 148753 - RNA, 56 nt, Homo sapiens
cgaacaaggccaacaccagcaggaaagagcacaacagcggccccacaagccagccg

SEQ ID NO: 148754 - RNA, 59 nt, Homo sapiens
ccgcggagcggacccagcaagacggccggcggggcccggaaacacaacccagaaagggg

SEQ ID NO: 148755 - RNA, 88 nt, Homo sapiens
gcggagcgaggcgcgcccggagcgcagagaccggaagcacagccccgaggggcgaagccaccaacgccgacgggggagcagcaaagaa

SEQ ID NO: 148756 - RNA, 70 nt, Homo sapiens
agagacccagggcaaacccaagggaggacgggccaacgcacggcccggcagagccagcaccccccgcggc

SEQ ID NO: 148757 - RNA, 79 nt, Homo sapiens
gccgagcccaaggcaagacccaaggcgacgaccgacaggggggaaagccggagcgaagaacaccacagggacgccaggg

SEQ ID NO: 148758 - RNA, 110 nt, Homo sapiens
ggggccggccgcgcgcgcggcggaagggccagacagcaaggcggcagccccccagcaaagccaagacaaggacagaaaaagaagaaaagaaggaaagcgaggcgacagcg

SEQ ID NO: 148759 - RNA, 62 nt, Homo sapiens
acaccccacgggagggcaggcagaccgaccaaacagggagcagcggacaggagacaggaacc

SEQ ID NO: 148760 - RNA, 69 nt, Homo sapiens
ggcccagaaggggaaagaggagcacccacagcagccgccagaacggggggcagccaaggaaggacggca

SEQ ID NO: 148761 - RNA, 70 nt, Homo sapiens
cgggagagaggacccccccccccccccaaggagcagggccgagagccaggggaaaggccagcgcagaaac

SEQ ID NO: 148762 - RNA, 65 nt, Homo sapiens
gggaaccccccgccggacaagggaggcggaagaaggaaccccgaagagaccaccacccggaacgc

SEQ ID NO: 148763 - RNA, 71 nt, Homo sapiens
gaggaggggcccggcggcggggaggaagcagggaagacaccgagggaagagagagaaaagcccacggcagg

SEQ ID NO: 148764 - RNA, 71 nt, Homo sapiens
aaaagaagaagaagaccacaaaaaagagacccacagccagcaacaccgcaagggcagacgggggaggagga

SEQ ID NO: 148765 - RNA, 86 nt, Homo sapiens
cgacgcagccacggagagggagcgcgagcagcgggagcgggagcaacgcccgaggccccagagcggaaggagaaggcccggcacag

SEQ ID NO: 148766 - RNA, 82 nt, Homo sapiens
aaaaaacagagccgagaaaggaagggcgggaccaacagggagccaggggccacaaagcgggcacaggccgggcacagcaaaa

SEQ ID NO: 148767 - RNA, 53 nt, Homo sapiens
ggagaaaaaacacaaagaacaaagaccaccccggaaagggacagcagaccaca

SEQ ID NO: 148768 - RNA, 82 nt, Homo sapiens
cgccggagcagcccaacccaggcagacagaacaagaaagggacaccaaggcccccaagggggcaaggcaacacaagcacaag

SEQ ID NO: 148769 - RNA, 83 nt, Homo sapiens
cggagacgccgggcagccgaacggagggcgacggagggagaaagccgggggcggcagaccagggcccagccggccaacgggcc

SEQ ID NO: 148770 - RNA, 64 nt, Homo sapiens
cggccgcagaacgggaccagccgcggaacccagcgggaggaagaagaggccgccagcagcagag

SEQ ID NO: 148771 - RNA, 84 nt, Homo sapiens
gcgacaaagggacaaaagaccagaaagagccagacaaaacgcggacaaaaacaacagcgaccccaaggaagacaaggagaaccg

SEQ ID NO: 148772 - RNA, 61 nt, Homo sapiens
caacacgggaggcggagcgcagccagaccgcacccacccaggagaagagaggcagcaaagg

SEQ ID NO: 148773 - RNA, 79 nt, Homo sapiens
aaggaagcgcacaggaagccggaaacgcccaagaaaagaggaggaggagagggaaccagagcgccgggaagcggaagca

SEQ ID NO: 148774 - RNA, 62 nt, Homo sapiens
gaggccagcgcggccagcagaagggggcaccagccgaagccaggcaagcaagaaccaacaag

SEQ ID NO: 148775 - RNA, 57 nt, Homo sapiens
gcaggagcgaagcaacagagaacaaggacggcacaaaccagcaacagaagccaggca

SEQ ID NO: 148776 - RNA, 74 nt, Homo sapiens
cacaagcacaaccccaaaaaaggccagaggaggacagcacgagagacaagaaagaaaggccaaggggagagccc

SEQ ID NO: 148777 - RNA, 76 nt, Homo sapiens
cgggacaacccccgccggggcaccgcagagagggcccaaaccgacaaagaggcacggacaaaccagggaacaccag

SEQ ID NO: 148778 - RNA, 77 nt, Homo sapiens
gaaaacgaggaggaaaaccagcgacgaagggaacagcacgcaaaagcaaaaagcaaagggaccaggggaaacccaaa

SEQ ID NO: 148779 - RNA, 54 nt, Homo sapiens
gaagagaccaccaaacaggcggagaggagcaaccggaagggacaaaagaacaaa

SEQ ID NO: 148780 - RNA, 74 nt, Homo sapiens
gacagagcccagaacaacaccgaaggggacacagccaaccacccacccagcacgagagccggccagccgcagag

SEQ ID NO: 148781 - RNA, 62 nt, Homo sapiens
gacgcgacacaagcacaaaagcggaggaaaaggccaagaaaggagcgagggacggcggcgag

SEQ ID NO: 148782 - RNA, 74 nt, Homo sapiens
aagccagagcgaggacgccggcagcagacagagacccaccaaggggggaaaaggacagcgacacagggaggacc

SEQ ID NO: 148783 - RNA, 56 nt, Homo sapiens
acagggcaagccaaagagcagcccgaagagggggaagaagcgcgcagcgagcacac

SEQ ID NO: 148784 - RNA, 60 nt, Homo sapiens
ggaaaaggcaaggcacaacgccacgaggcacaccccagcaagcgcaagccccggggcaga

SEQ ID NO: 148785 - RNA, 75 nt, Homo sapiens
ggaaccgaaaaaggccacaggagaggagaaaggggaaacaaaggaacagaagagccgcaagcaggaagaaaagag

SEQ ID NO: 148786 - RNA, 83 nt, Homo sapiens
agagaaaggacaacacaacagacacgcggcacaggagaaggaagcagagccaaagccgcaacgcgcagccaacggcaaagaag

SEQ ID NO: 148787 - RNA, 80 nt, Homo sapiens
cggcggagaccccggaaggacgggcggggggagaaccgcccagacacgacggcagagccgcagcaggcgagaggcagaac

SEQ ID NO: 148788 - RNA, 78 nt, Homo sapiens
gcccacccaccccagcagacaagcacacccacccgggcagcggggggacgcgacagagcagcagaggcggccaggcag

SEQ ID NO: 148789 - RNA, 68 nt, Homo sapiens
aggaaggaggagacgaagaaaggagacaaggccgacgcgcacgaacacgggggcaaagacagggagag

SEQ ID NO: 148790 - RNA, 39 nt, Homo sapiens
cagcccgaaacaccaccaagaaaacagaaacgccggaga

SEQ ID NO: 148791 - RNA, 65 nt, Homo sapiens
aacgaacaccacgcaccgcagccgcgagagaggcaagccggggccgcgccaggcccagacacgca

SEQ ID NO: 148792 - RNA, 81 nt, Homo sapiens
ggaagacaaaaaggaaagaaacgaaggagagaccaggaaacaggacacaaggagggccaggacacaccagaggagggggga

SEQ ID NO: 148793 - RNA, 84 nt, Homo sapiens
cggaggcaaacggcaaagggagagcaggcggggcaagcagaaacgagccaacggagaacaacaaaaagccggagcagcaaacgg

SEQ ID NO: 148794 - RNA, 72 nt, Homo sapiens
aggcggagggggacacccgggcggggcagagcagcccccagccagccgcgagacagaagcgaaggggacagg

SEQ ID NO: 148795 - RNA, 70 nt, Homo sapiens
gaggacgccggcgagcccccacacccggaccgaccacaacgcgaccggaaaggagagagagacagaacca

SEQ ID NO: 148796 - RNA, 94 nt, Homo sapiens
gagcccggccgccagaccacagcacagccgggaaggggagccaccagccccccgggcggagaacggaaaagcaccaggaagcagagaggaccgc

SEQ ID NO: 148797 - RNA, 83 nt, Homo sapiens
agcggcccccggagggggcagcccgggagaaccgcggcggccggagcgacaacgaagagaggaaagaagcggaaaggagggag

SEQ ID NO: 148798 - RNA, 70 nt, Homo sapiens
gaacacagagagagaagccaggagccaccaacaccaaaaagcgaagccaagggaacagaagcacccgcag

SEQ ID NO: 148799 - RNA, 69 nt, Homo sapiens
cggccgggggcggcggccgggggcccagcccgggcggcgcggccaggcacccggaaacaagccacgaag

SEQ ID NO: 148800 - RNA, 83 nt, Homo sapiens
cagacgggccccaagaggccagccccccgagggcaacgagaaagagacggaagaaagaacgggacccagagggaccggaccgg

SEQ ID NO: 148801 - RNA, 38 nt, Homo sapiens
agccgagaagccaacagaggggggaccgcggggccaaa

SEQ ID NO: 148802 - RNA, 80 nt, Homo sapiens
cccggaaaacaacaccagaagaaagccaacccgcaggacgcgcagacaagacaaaacgcccaaaggaaacacaaggcaga

SEQ ID NO: 148803 - RNA, 80 nt, Homo sapiens
gaagacagaccaggggagacaaaacccaagacacgcggcgagcccagaacgaagcggcccagcgggcccaccgggcgaaa

SEQ ID NO: 148804 - RNA, 67 nt, Homo sapiens
cagaggagccgaaagcgcccccggagcagaggagccaaagcaggaaccaaccgggagccccccaaga

SEQ ID NO: 148805 - RNA, 72 nt, Homo sapiens
aaggaagagccaccagcgacaaacaggaaagcagggagaaccagggcgcagggcagcaagacacgaggacaa

SEQ ID NO: 148806 - RNA, 99 nt, Homo sapiens
ggaaaacgacgcccacggaggaagaggggaggccgcccgagggggcgaagggaaggcccgaacaagacaggaacgccggcccggacgggagcggcaggg

SEQ ID NO: 148807 - RNA, 75 nt, Homo sapiens
aaaagagaccagggccccgaggccgcgagggccaggcgccgggccagccagggccccaggccccggggcaaccag

SEQ ID NO: 148808 - RNA, 60 nt, Homo sapiens
acagaaccgcccaaaaaggcaaagaaaccacgagccaggacacagagaggcgaaacggag

SEQ ID NO: 148809 - RNA, 61 nt, Homo sapiens
gcaccaccgcccggcccccaggcgagcccgggcgccaccagccgggacagcccagcaacgc

SEQ ID NO: 148810 - RNA, 80 nt, Homo sapiens
ccccgcagcgacaacaggaggccggaagacccaaagcgaggacagccaggaacccaacgaagacggccacacaggccagc

SEQ ID NO: 148811 - RNA, 34 nt, Homo sapiens
agcgaaagcaaggaagcggggaggcagggcggac

SEQ ID NO: 148812 - RNA, 130 nt, Homo sapiens
gaagggggaaccgcaagcggccaagcacaaagagcgccccacgagagaacggcacacgcgagcggcccggggccaggcccgggagcacaaggcccagcacagagggagccgggggaagacgcccacccaa

SEQ ID NO: 148813 - RNA, 72 nt, Homo sapiens
accggcgacaggggccagccaaagcagagcgcagcggggccagggaccagacaccacgcaagcgaaaaaccg

SEQ ID NO: 148814 - RNA, 68 nt, Homo sapiens
gccgggaacccccacgcggccagcgaaaacgcccaggggggagaaaaggccaagggcaggagacacga

SEQ ID NO: 148815 - RNA, 76 nt, Homo sapiens
cacagggacgaagagacagagagagaagaagaggagaaggccagcccagaacaaagcaggccacggaaggagcaca

SEQ ID NO: 148816 - RNA, 55 nt, Homo sapiens
caaaggaacgaacgggaccagagggggacagcaaaaccccacccaagggccagag

SEQ ID NO: 148817 - RNA, 81 nt, Homo sapiens
cgggggccccgacccccccgcggacgggaacgacacacgcacgcccgcccgccacgacccccggggacaagagaaaaaaag

SEQ ID NO: 148818 - RNA, 78 nt, Homo sapiens
cggcagaaggcccccgcacgaagccggacccgggacccccaaaccgggaggcaggcaggaacggcaaacagccccaca

SEQ ID NO: 148819 - RNA, 72 nt, Homo sapiens
aacaagacacggagcaaggaggaaaacacacgggggccggaaaaggaaagcacacaaagagaagcacaaacc

SEQ ID NO: 148820 - RNA, 73 nt, Homo sapiens
gcggccgacgcggcccgccaccggcgcaggggagggcggagaacggaaaagcaccaggaagcagagaggaccg

SEQ ID NO: 148821 - RNA, 78 nt, Homo sapiens
cccgaggagaggaagagaggagaagacagcacggggagcccacaggccaccacccggcagaggagaccacaaccccca

SEQ ID NO: 148822 - RNA, 83 nt, Homo sapiens
ccccgagagcgggacgcaggggggagcaccaaaggaaccagacagcaaaggaagagaggaaaggaccaaagccgacagacaga

SEQ ID NO: 148823 - RNA, 37 nt, Homo sapiens
acccaacgagacgggcaaggaacgagggacaggcaac

SEQ ID NO: 148824 - RNA, 77 nt, Homo sapiens
gacaagaggggaaagcaggagagaagaccagaagggaggagaagcggcacgcagaggggagcgaagaagggagccac

SEQ ID NO: 148825 - RNA, 75 nt, Homo sapiens
gagcggcagcacagccgcggccggcgcaccgcggcagaaggccccaagcgccgcgggccaccagcccgcagcacc

SEQ ID NO: 148826 - RNA, 77 nt, Homo sapiens
gcgaggccgggaccggagcaccggcagacccggggaccgggaaggcgagaacgcggacaagcaaacaaagaggaaaa

SEQ ID NO: 148827 - RNA, 76 nt, Homo sapiens
aggcagaggccccagccagcagcggccgcagaggcgagcggcaggcgaaggcaccagaacacagaaagacggaaga

SEQ ID NO: 148828 - RNA, 73 nt, Homo sapiens
cgaagaagaaaccggcggccaaaaaaaaaaaaggaagcacaccaagggaaccaaagagcaaggcgagaaccag

SEQ ID NO: 148829 - RNA, 108 nt, Homo sapiens
ggaggagcgcaggagggggggcacaagaagagaggcccaccaaaagacacgggaaacacccgggagcagacagaaagcagaaaaagccgacccaaacccccaacccag

SEQ ID NO: 148830 - RNA, 39 nt, Homo sapiens
accaccagagcagcaacaagggaccaagaaaggcccagg

SEQ ID NO: 148831 - RNA, 70 nt, Homo sapiens
caggcacgcgccaccaccccagaagcaccagggaccaaaagaggagggaaaaaagaaagaagacgaacca

SEQ ID NO: 148832 - RNA, 64 nt, Homo sapiens
caaaaaaccacgcaagggcacccacaaacgacaagcagaggcacaaagaccaagacagggacgc

SEQ ID NO: 148833 - RNA, 72 nt, Homo sapiens
cccccgaggacgcgcaggcaccaacaggcgacggaacgcgaaaagaccaggagaaggaaggaggcggggcaa

SEQ ID NO: 148834 - RNA, 83 nt, Homo sapiens
aacgaccagacggcagggaggcacaaaggggaacacaggccgagaaacagacaacccacagaacaaagcggaccaaggcaccc

SEQ ID NO: 148835 - RNA, 72 nt, Homo sapiens
cgggccccaacacccagagacgaaagaaaaacacaccgacagcagaacacacgcgaaaggaaaccaagcgga

SEQ ID NO: 148836 - RNA, 74 nt, Homo sapiens
aaaaacggagagccacaaaaaaggaagcgaaaagacaaggccaaaagcagcacaccaaacgcaaaggggacccc

SEQ ID NO: 148837 - RNA, 70 nt, Homo sapiens
gaagggagagccgaagagcaacggagaacccgagcggggaaacgaccagggcaaccaaccaacaaaacag

SEQ ID NO: 148838 - RNA, 101 nt, Homo sapiens
gaagaacgagagagaaaagagaggcaaccacagaagagccaaaaccaaaaccaccccaaacagaaaagcaccggagaacagggggagggggacaccgccgg

SEQ ID NO: 148839 - RNA, 63 nt, Homo sapiens
gaagaaacgcaccggaaaggccaccaggcgggaggcagcaccgggccgaggacggcagccaag

SEQ ID NO: 148840 - RNA, 75 nt, Homo sapiens
cccggacagagcccgggcgcgcaggaacaaggccgcgcccagcccggcggaggcgggcggaccccaggagaacag

SEQ ID NO: 148841 - RNA, 81 nt, Homo sapiens
gaacgcgcaacagggccgcacgcaaggggacagaccagagcaggaccaaaggcgcacagagccgaaccccaccaggggcca

SEQ ID NO: 148842 - RNA, 74 nt, Homo sapiens
cacggagagaagaaggagagaaaaccaaaccggaccgaggcgcaggggggaagaagaaaacaaaccacacacca

SEQ ID NO: 148843 - RNA, 82 nt, Homo sapiens
aagccgcacagacggaagcaaggaacaaaccgaagaacagcgggaaagaaggcaaaacacggccgcacaaacacgcagaggc

SEQ ID NO: 148844 - RNA, 66 nt, Homo sapiens
cggaagaaggcagacagggaccggagacgagacacacacacgaggcggcagaagaagccaggaaca

SEQ ID NO: 148845 - RNA, 78 nt, Homo sapiens
cggggacccgcgacccagccccccacccaacgcgccggcacagccacaccgagaagaccggcccaagaaccccaccgc

SEQ ID NO: 148846 - RNA, 52 nt, Homo sapiens
cagcccggcacagccacaaacggcagaacagccggccaccaccgcccagcgc

SEQ ID NO: 148847 - RNA, 73 nt, Homo sapiens
acgacaccggcgaggaacggcaggccagagcacagagaccaaaacgacaccagaagaggggcccagccgcaaa

SEQ ID NO: 148848 - RNA, 57 nt, Homo sapiens
ggccagaagaagacacaaggagcggcgggaaaaccgccacaaagcccccaagccaca

SEQ ID NO: 148849 - RNA, 73 nt, Homo sapiens
accaccgggaagcgccggggaacgcagaggacagcgccaaacccaagaagaagagcccagggcacaaccaagg

SEQ ID NO: 148850 - RNA, 58 nt, Homo sapiens
cccgccggaccccacagcaacaagaggcagcgagaagaaaaagaagagagagacacgg

SEQ ID NO: 148851 - RNA, 90 nt, Homo sapiens
gacacaggcccaggaggacgacgggaccgggaccgcgcggacccggccgggagaagcagcagcgcaagaggcgaggggacggcggggagc

SEQ ID NO: 148852 - RNA, 69 nt, Homo sapiens
acaggggcggcgacggcgcaggcgaagcgaaacaggagcacaggcggaggcagcggaggccccgccgcg

SEQ ID NO: 148853 - RNA, 73 nt, Homo sapiens
gacgcccgcgccacacgccaccgcaggccagcgcagaagacgagaagccaggaggagaagcggcccggcaaga

SEQ ID NO: 148854 - RNA, 75 nt, Homo sapiens
ggccgggccaggccgcccggagcggcgacgaggggcgccacacgcgcagggccagaaacacagggacaagcacgg

SEQ ID NO: 148855 - RNA, 74 nt, Homo sapiens
cccgagagcagacacggccacaggaagaaggagaaaaacagaacaaacgaggccgcaaaaagcgcagagaacgc

SEQ ID NO: 148856 - RNA, 61 nt, Homo sapiens
gcgggggggggaccgccggcacgcgacccccccgggcccaaagcacacagagaaaaaaagg

SEQ ID NO: 148857 - RNA, 75 nt, Homo sapiens
gaccccgcggagacagcgagacccgccaggagcaaagggccccaccaccaaacgcaaagaccgccagagagaagc

SEQ ID NO: 148858 - RNA, 85 nt, Homo sapiens
cggccggagcgcagcggagcagggcgggaggagaccgggaggaggacaggacggaaagaacaaccaagaagggagagaaacgcag

SEQ ID NO: 148859 - RNA, 66 nt, Homo sapiens
gcggaagaaggaaccccgaagagggagagaacagaaggagcacagaaaagagagcgcgcagggaag

SEQ ID NO: 148860 - RNA, 84 nt, Homo sapiens
cagcagcaacgcaggggcgagccaggcgccagcaggaccacagacacgagaggcgagggacgacagagcaagcggcagagggca

SEQ ID NO: 148861 - RNA, 68 nt, Homo sapiens
ggcagacaaaagggccaaagaagggagagagggcacacgaaaagcagcagccagagcaaaccgcgaag

SEQ ID NO: 148862 - RNA, 75 nt, Homo sapiens
caggaacgaaaaagcacgacgccgcaagacccggccagaccccaacagacacgggccagacccgaaaaacccccc

SEQ ID NO: 148863 - RNA, 106 nt, Homo sapiens
ggggccgagggagccaccgaaccggccaacaacgacaaaaaaccacagaggccgaggcccaccgcgcgaccccaaacgccgcacacagccaggaagccacagacgc

SEQ ID NO: 148864 - RNA, 77 nt, Homo sapiens
gcccccgccggcccccccccccgcccgggcccgcgcaacccgccagagggacgcagccgcaagcacaacaaccagag

SEQ ID NO: 148865 - RNA, 67 nt, Homo sapiens
ggcaagggggcagggggaggagcagaaacacagcaggacagaacgggaccagacacacgcaaggaca

SEQ ID NO: 148866 - RNA, 63 nt, Homo sapiens
ccaggcggcccgagaaaagcaggagaagcggagaaacgcccaggccaaagaagagaacggggc

SEQ ID NO: 148867 - RNA, 72 nt, Homo sapiens
cacagccagcccagcccgccccggcgccccaaccccggcagccccaggaacagcacaccgagcaagaaacag

SEQ ID NO: 148868 - RNA, 53 nt, Homo sapiens
acagccccaaggcaaaaacacaaagaaccgcaaagaaggcaagaaagacacaa

SEQ ID NO: 148869 - RNA, 77 nt, Homo sapiens
ccaccacaccaagacaccaggggagaccgaagaaggaggccgaccaggccgacaaagcagacgcccgcaaacgaccg

SEQ ID NO: 148870 - RNA, 69 nt, Homo sapiens
cgaggccgcacgaaacccgcggcggaagcagcaacagacggaaccagaagagacaagaggaaacagcaa

SEQ ID NO: 148871 - RNA, 79 nt, Homo sapiens
ggcgaagacacaaggaaaaagcaaagcgcacggccgggcaacggagcagcgccaagagacagcccaacaaggaccaggc

SEQ ID NO: 148872 - RNA, 60 nt, Homo sapiens
caccccgaagccgagaaagacgaagaacggaagcgccccagaggagagggcggagagacg

SEQ ID NO: 148873 - RNA, 68 nt, Homo sapiens
gaagcgaagacagagaacgaagcgaccaaagcgcacggcagcgagagcaaccaccgaaacgggcgaaa

SEQ ID NO: 148874 - RNA, 82 nt, Homo sapiens
ggcgaggagacggagcacggcccccgaggacggaggcacagcgcagcgacgagaggggaacggcagagcgaaacaaacaaga

SEQ ID NO: 148875 - RNA, 76 nt, Homo sapiens
ccagaagaaaaggaacggaagagacagcaggaaaacggagaaggagcggaagagcaagaacgcagggaggaaagga

SEQ ID NO: 148876 - RNA, 76 nt, Homo sapiens
ggacagcgcacacggcaaggccggggggggcacagagccccggaagacagcccccagcgaccagacccagggccag

SEQ ID NO: 148877 - RNA, 80 nt, Homo sapiens
cccagcagccgcggcagaccaagaagccagagagggcggggagacaaggaggccgagagaccgcagggaaaagcacaggg

SEQ ID NO: 148878 - RNA, 70 nt, Homo sapiens
cgagccgccaccagcccccacagccccccagggagacgaggccaagcccgccaggccggccggcccagcg

SEQ ID NO: 148879 - RNA, 61 nt, Homo sapiens
gacagcaggagggcggagacaacagaaacagaaacgagggaaacagcggccgagcgaagcc

SEQ ID NO: 148880 - RNA, 54 nt, Homo sapiens
gccccaagagacccaacagaccagagcaggagcccgggaccccgcgagacgcag

SEQ ID NO: 148881 - RNA, 78 nt, Homo sapiens
gcagaaaggcacgaagaaaagagaaggaaaaacagaacggcaaaccggaaaaaaacggaggaagacggggcccaaaga

SEQ ID NO: 148882 - RNA, 69 nt, Homo sapiens
gacagcgcaggcagcagggacacaaaagcaaccgagagggaaacaaccacgcgaaaaggagacacagca

SEQ ID NO: 148883 - RNA, 47 nt, Homo sapiens
cccacacaacggacaacaagcagggcacgagacgaagcgccaaggcg

SEQ ID NO: 148884 - RNA, 96 nt, Homo sapiens
cgccgagcagagagaaacagaacgcgaacagacagaggggcgaagaaggacccaaagacaggaccacgcaccagcagagaaggaaagcaaaccgaa

SEQ ID NO: 148885 - RNA, 67 nt, Homo sapiens
aagcaggacaaggcaggggcccccaagcggccgcggccgggagagagaaaagccccgggaaaagggc

SEQ ID NO: 148886 - RNA, 66 nt, Homo sapiens
ccgggagggaaaaaaacaggcaggaggaggaacaggaagcacagcaagaggaccagccggagaggc

SEQ ID NO: 148887 - RNA, 66 nt, Homo sapiens
agcgacagcagagcgcccaaagcgaccaaggagaccagaacacagcacagggaaagagcagacacg

SEQ ID NO: 148888 - RNA, 76 nt, Homo sapiens
agaggcacaccacacacggaggcgacgagacggagacagcaaacagaaagcacccccaggcaagcacccagaagaa

SEQ ID NO: 148889 - RNA, 82 nt, Homo sapiens
gcgacaggggaacagacagaaggagcaggaaccaaagggcgcagccacaggccgcacggaaaaccaggagcccaagacgccg

SEQ ID NO: 148890 - RNA, 77 nt, Homo sapiens
cacaccgaccgcaacaggacccagagccacacgcacagacgccgggaccggaaagcagcaagcccgagaaaccacca

SEQ ID NO: 148891 - RNA, 78 nt, Homo sapiens
gcgggggcagggccagggcgcaggggagaaacaaggcgccggagcagggggggccccagcccggccgaacgggcgcac

SEQ ID NO: 148892 - RNA, 58 nt, Homo sapiens
ccgcgcggaggcgcggccgacgcgcccgggcacccggagcacaccgaagcggacaaca

SEQ ID NO: 148893 - RNA, 73 nt, Homo sapiens
cgacgcacaaacccaggagaaaaacaccgaacacagagggaagagacaggagaaacgggacgccaaaaggaac

SEQ ID NO: 148894 - RNA, 78 nt, Homo sapiens
acgagaccgcaccgcacggcggagcccgcacgcggcgggcaggagagacagagagaggagaaagcggccaaccccaga

SEQ ID NO: 148895 - RNA, 81 nt, Homo sapiens
gcggagaggcccgacagaagaaggagaggaggcgggagggcagcagaagaggccaccaaaaagacccggcagaagaagcag

SEQ ID NO: 148896 - RNA, 79 nt, Homo sapiens
gaaacgccccgaaaagacgggcaacagcggagcccaaacacgcgccgcaccagagcggcgggaccagggacagacacgg

SEQ ID NO: 148897 - RNA, 82 nt, Homo sapiens
cagcgcccggagaggaagaggcaagacgaaaccagcaccgaggccgcccccaccgagaggacaccagagcaggaagaggaga

SEQ ID NO: 148898 - RNA, 71 nt, Homo sapiens
gaagaagaacgacccgcccggggcagcaggccgaaaaccgacagcacaagcccagacccgagccaaagcga

SEQ ID NO: 148899 - RNA, 41 nt, Homo sapiens
cgcccccagacaccggcgggacgccccccaaaccgcgcaag

SEQ ID NO: 148900 - RNA, 56 nt, Homo sapiens
aggaacggccaaacacgaagcaaggagaaagacgagagcaccaaaccaacaaggac

SEQ ID NO: 148901 - RNA, 68 nt, Homo sapiens
aaggacaccccaaggacggaaggacggcaagccagacaacaggccaaagccagggagggccagcccca

SEQ ID NO: 148902 - RNA, 44 nt, Homo sapiens
ggggcgggaccggcgccaccgcagaaggaccacgggcgcgagga

SEQ ID NO: 148903 - RNA, 36 nt, Homo sapiens
gaccccacgccaccaggaaaagcaacggcgcaagag

SEQ ID NO: 148904 - RNA, 58 nt, Homo sapiens
cgccacacagcacaacacaacacgccccgaagggcccagccccggaaggcaggaaggg

SEQ ID NO: 148905 - RNA, 58 nt, Homo sapiens
aagaagggccgcggagacagcaggacgcgggaggaggaccaccaacccagcagccgag

SEQ ID NO: 148906 - RNA, 85 nt, Homo sapiens
agccgggcccgcgccggcaggccggcccggggcgagccccagccacccggggacacggcaccaggcggccagcgcaagacccgaa

SEQ ID NO: 148907 - RNA, 49 nt, Homo sapiens
acagaacggaacccaccccacagggaccaaaccacagcaaaaacaccag

SEQ ID NO: 148908 - RNA, 74 nt, Homo sapiens
cgaggccacagaaggcgcgacgccggggaagaaggaagggaggagagaaacaggagagagacagagggaaagga

SEQ ID NO: 148909 - RNA, 78 nt, Homo sapiens
ggagcccaaggaagcagaggagagaaacagaacgggacagcaacacaaggaagagcggccagccccggagggagaccg

SEQ ID NO: 148910 - RNA, 77 nt, Homo sapiens
gccaagaggagaacagaagccagccgacaagggcagaacgaacaggaacaaagccagacgacaacggcaagcggaga

SEQ ID NO: 148911 - RNA, 81 nt, Homo sapiens
ccggggcaggagggccggcggagcgccaggccgcaccgaagagcaaaagagacggaaaaggacacacgcccgggggaacaa

SEQ ID NO: 148912 - RNA, 67 nt, Homo sapiens
gcggagaggcccaccaggccaggaaacagaagacagccgaaccaagggcgacaaccagagacaagca

SEQ ID NO: 148913 - RNA, 81 nt, Homo sapiens
accacacacaaggcgacaccacaacccgaagaacgccacagccagcacaggaggacacaaggcagaacaccagcgaacaga

SEQ ID NO: 148914 - RNA, 80 nt, Homo sapiens
ccaaccccaggaagccagcgggggcagccagccgagggccaccgggaaggacagaagaaaacacgagccacgaagaccgc

SEQ ID NO: 148915 - RNA, 54 nt, Homo sapiens
gcagacaagcacgccgcccagacaaccacgcccccgggacgaaaagaagcagga

SEQ ID NO: 148916 - RNA, 74 nt, Homo sapiens
caaacaaggaaaaccaacaacagggggaaaaaaaccccgcacagagaccccgggcccccccaaggggccccacc

SEQ ID NO: 148917 - RNA, 40 nt, Homo sapiens
gcaggcagcaaccggcccaagacggaaggcacccacaaag

SEQ ID NO: 148918 - RNA, 56 nt, Homo sapiens
gaagaaggaggcaggcacgggagccgaagaagaagcgggaccaccgaagagaccag

SEQ ID NO: 148919 - RNA, 72 nt, Homo sapiens
ggagacagagagcccggacaacaggacccgaacacggaagaaagacacgcaggaggccgcggccgagcagcg

SEQ ID NO: 148920 - RNA, 71 nt, Homo sapiens
aagacgaagggacccacacccagagaacaaaggcgaacgccgacacacagcccaaaggggcaggacaagac

SEQ ID NO: 148921 - RNA, 65 nt, Homo sapiens
agaagcaagccggaggaccaccagccagagcaaagcacacgaagagagcgccagcccgaggagcc

SEQ ID NO: 148922 - RNA, 85 nt, Homo sapiens
cggccccggaggcggcggggcggcagagagcggggcggcggcagaccacaggagcagcaacccagccccggaaccacgccagggg

SEQ ID NO: 148923 - RNA, 60 nt, Homo sapiens
aagggccaaagaagggagagaggagcacggaagcccgcacgcaggcccgccaaacccagc

SEQ ID NO: 148924 - RNA, 67 nt, Homo sapiens
ggcgacgcacacgagcggaggcgaaggggagccacgaagcccccacccacaggcgacagaggcaccg

SEQ ID NO: 148925 - RNA, 77 nt, Homo sapiens
agcgcagcaaagcgcccagccgccgcccgcgcccgcggccggggacaggagacaaaccagcaggcagaaaacaacga

SEQ ID NO: 148926 - RNA, 90 nt, Homo sapiens
agaaggcacgcgcccggacagacaggcagcagggagagcaacaagccccggccccagagccagccggagagcgcagcccagagacagcag

SEQ ID NO: 148927 - RNA, 76 nt, Homo sapiens
aaggcagccggaaacgagggcccgaagacaccccgccaaaaggacagaggaccacggagacagcagagagccagga

SEQ ID NO: 148928 - RNA, 96 nt, Homo sapiens
cagcagcagcagagcaggcagggcagaagaaaaggaaacccggcaaagaagaaagacagcgggaaggacgagcagacagaagggacagcagccgca

SEQ ID NO: 148929 - RNA, 55 nt, Homo sapiens
gaccgagagcgcgaaacgcacgagaaggcccagcgaccgcgaaaccgagcaggag

SEQ ID NO: 148930 - RNA, 79 nt, Homo sapiens
caccgccggaacagcaaacccaagggggacgcgagcgaagggcgcagggacccccagggagccccagcacgccggacga

SEQ ID NO: 148931 - RNA, 75 nt, Homo sapiens
ggccggccacagggagcacaaggacagagcgggagccaccagcgccaaagggaagccaggagcccgggggcacgg

SEQ ID NO: 148932 - RNA, 55 nt, Homo sapiens
ccagcaaaacacccaggaaaaagagcgagacaggggcaaggagccacaagccacg

SEQ ID NO: 148933 - RNA, 72 nt, Homo sapiens
ccagcccgccagacccgaggaggaaaacccagagcgggagcgccggcaggcaagcggcaccacgacaacccc

SEQ ID NO: 148934 - RNA, 75 nt, Homo sapiens
caggagcccacgcccagcaacacagagggagcaggagacaggcagccgcaaggagcaacagcgagcaacaggcaa

SEQ ID NO: 148935 - RNA, 79 nt, Homo sapiens
gaccccggacacgggcaggcagaaaacgaaggaaggaggacccgaggagagagaagacggaaaggaaacacggaagcac

SEQ ID NO: 148936 - RNA, 77 nt, Homo sapiens
cggccggcgaccaccgacaccggcccgagcgagacacgggaagcgcggaagcacaaccaggccgaagaagagccaag

SEQ ID NO: 148937 - RNA, 74 nt, Homo sapiens
agaaacgcaccaccaaggcgcgcggccgcaagaaaaggacagacgcaacacaggaaacaagagcaccaaaacac

SEQ ID NO: 148938 - RNA, 73 nt, Homo sapiens
acccagaagaagaaagaacgccccggcccgaccccgaggaaccagcgacagaccgggcacccagcgaaaaccg

SEQ ID NO: 148939 - RNA, 75 nt, Homo sapiens
cagggcccggggaagacgcagaaagaaccggaagacagaggcggagaaggacagggcgaaccccgcgccccgcag

SEQ ID NO: 148940 - RNA, 80 nt, Homo sapiens
cccagcaccccacgcccggccgacaagcacgcaaagccagccgccgcgccaagaaacgcgcggccgggccgaccaaagcc

SEQ ID NO: 148941 - RNA, 75 nt, Homo sapiens
gggccccgggcacaccaacaagccacgaccggggagcagaaaggaagcggaagagaagaccggcaacaagaaaaa

SEQ ID NO: 148942 - RNA, 64 nt, Homo sapiens
aaaaacacggaagaagagaagaggaacaaaaggagagccgcccagagaaagcacaaggacaaca

SEQ ID NO: 148943 - RNA, 84 nt, Homo sapiens
ccgcaccagccgcccaagccgcacagccgcggcggcagcagcaggagagcgccgggaggaaccgaggccacagagaggcacccc

SEQ ID NO: 148944 - RNA, 73 nt, Homo sapiens
agaggcggaaggccaaggcaccggcccccacgggcggcgcagggggaggaaggcggccgggaggcgacacgga

SEQ ID NO: 148945 - RNA, 75 nt, Homo sapiens
ccgccgagcggaccccaaggggcgaagaccacaacgcaccccggaggggaggcaccccggcgcagcccaggagca

SEQ ID NO: 148946 - RNA, 77 nt, Homo sapiens
gacgaagaacagaaggcgacaaggccaagaccgccagcaaaggaagacgagggacggccgcagggggaagggcggag

SEQ ID NO: 148947 - RNA, 65 nt, Homo sapiens
agccgagccccccagacaaggggcaggcccggacccaggggcgcaaacccggagccacccacccc

SEQ ID NO: 148948 - RNA, 85 nt, Homo sapiens
caaaaaaaaccccaaagaacccgacggaaagccaggccagaagaaggaaggccggggaggggacaggaaagacacaccaccccac

SEQ ID NO: 148949 - RNA, 72 nt, Homo sapiens
ccgacaccagcggccgacaccaacccccgcggacccagggagaaaccccccagagggggccggggaccgaga

SEQ ID NO: 148950 - RNA, 69 nt, Homo sapiens
aacgggaagagagggaacacgcaggagggacagccagcaggggcagaagcagcagacggaacgagggca

SEQ ID NO: 148951 - RNA, 69 nt, Homo sapiens
gggacacaaggaaaccccaggggcaggggagggcgaggaacgaaagcagggggcgaacacgaacaggag

SEQ ID NO: 148952 - RNA, 71 nt, Homo sapiens
aggccaaccgagcaccggaaaaccccagcccacaccagagcgcaagaggcagcagacccaaaccaacagca

SEQ ID NO: 148953 - RNA, 70 nt, Homo sapiens
gaaggccggggcgcccggcgccggccgagaaggcagaggcggcccgccggagagggaacagcccgacggc

SEQ ID NO: 148954 - RNA, 62 nt, Homo sapiens
aaagggcagaaccggccaaaacaccagcagagccaaagggcccagaagcccacgacgcgggc

SEQ ID NO: 148955 - RNA, 69 nt, Homo sapiens
aggggccggcaacaccagacaccaaggacagcccgcaagggaggacagaccgacacgccagaaggcaga

SEQ ID NO: 148956 - RNA, 76 nt, Homo sapiens
cggccaggccccagacacagacgagcaggggaagaaacacaggggaaacacgagagagcaacagccgacagagcgg

SEQ ID NO: 148957 - RNA, 77 nt, Homo sapiens
gaagggccccacaccaaagaaacccaaaaagaacgacccccacgcaaacagggaggccacagagcacaacgcagagg

SEQ ID NO: 148958 - RNA, 52 nt, Homo sapiens
ggcaagacaagagcacacagggcacgagggcccaaaacgacagacgcgaaag

SEQ ID NO: 148959 - RNA, 84 nt, Homo sapiens
cagggagcgccgcgcgaccaggaggcggcggcgccgccggcgacaagcagaccggaagaccgacggaagaccacaccccgaggg

SEQ ID NO: 148960 - RNA, 75 nt, Homo sapiens
gaagcacggggcccagaagccaaacaccgacaaccgaaccacgcacaccccaccaggacagggcagaccgccagc

SEQ ID NO: 148961 - RNA, 61 nt, Homo sapiens
gcgccggagcagcggacccaggcaggcaagagaagcacgacccagacccccagcagggcag

SEQ ID NO: 148962 - RNA, 80 nt, Homo sapiens
cgagaccccacggagaccccaggggcaagacaggcgagagcaacgccaaacagagcagccccagcagccgaggcccgggc

SEQ ID NO: 148963 - RNA, 130 nt, Homo sapiens
ggaacaccagcagcacggaaccaccggacgaagagcaggccagcccggacccggaggcccccagcccagagcccgaaccagaggaagagacagccgaggacagacgagaccgggacacgaggccaccagg

SEQ ID NO: 148964 - RNA, 86 nt, Homo sapiens
ccggggacacgacgccccaaaccgccaggagaaaaaaggggaggagccccagccccgcgacgaggaggaagcggagcggagcgcga

SEQ ID NO: 148965 - RNA, 56 nt, Homo sapiens
ggagcagacacagacagcagagggagaaggaggggcagagggaaaaagaaaagaaa

SEQ ID NO: 148966 - RNA, 76 nt, Homo sapiens
gacagggaccagcgggaaggcagacagcgagggcgacgaggaccgggagaggggacgaaggcgaaccagcaagaca

SEQ ID NO: 148967 - RNA, 80 nt, Homo sapiens
cgggagccaggacaagaacgcaagaaggaacaacacaaaccacgagaagcaaaaacagaggaagagccaaggacaagaac

SEQ ID NO: 148968 - RNA, 70 nt, Homo sapiens
agaggcgggaggggccgggaggcagaggggcagggggggaagcagaccaagaagacagaaggggcccgcc

SEQ ID NO: 148969 - RNA, 36 nt, Homo sapiens
gggacacccggagaggggccgggggaaaaaaagcaa

SEQ ID NO: 148970 - RNA, 80 nt, Homo sapiens
ccgccggaacccgcaggaggaccgagcgacagcgcacggcagcggcaccacggcgacgcacaagcggggaggccgcaagg

SEQ ID NO: 148971 - RNA, 78 nt, Homo sapiens
ggagaaaccacccaaggcccaaaagcgcaaaccaccaaaaacaacacccagaaagaggacagcacgcagaaaaccccc

SEQ ID NO: 148972 - RNA, 105 nt, Homo sapiens
cgggacaaggaaggacaaagcaacaagcgccgccagggcacaggcaggcggaaggccaaaagaaagcagaggccaccaaaggcaagaagcggcccgccaagacgc

SEQ ID NO: 148973 - RNA, 74 nt, Homo sapiens
gaagccgccgacggaaaggcaaaagcaacgggagagagacgggagaagacgggagggcccaaacccccacaagg

SEQ ID NO: 148974 - RNA, 59 nt, Homo sapiens
acagccgacgggggagacgggcggaaaacaacacagaaggacagaaaacgggccccaga

SEQ ID NO: 148975 - RNA, 67 nt, Homo sapiens
gagcaacccaggccagccaacgccaagccagcacaaaggggaccaccaggaaaacgggcaccacgcc

SEQ ID NO: 148976 - RNA, 53 nt, Homo sapiens
cgcggggcacgggagcagaaaacaggcaaaagccccccaggcgccaaagcggc

SEQ ID NO: 148977 - RNA, 79 nt, Homo sapiens
agcgcgccccgggccgcaagaagggagccaagcgacacgcaaggagggcagcccggaggagcggcccaagcggcagagg

SEQ ID NO: 148978 - RNA, 72 nt, Homo sapiens
cgccacacagcacaacacaacacgccccgaaggaggcggagcacgcagagaagaaacacgaacaccagccca

SEQ ID NO: 148979 - RNA, 88 nt, Homo sapiens
agcggcggaggcgacggggcggcccggagccggcgcgaaccggcccccgcagcgggacccggcgccaaggggccaagggagagcgggg

SEQ ID NO: 148980 - RNA, 65 nt, Homo sapiens
ggcaaggcggcggacggcgcgcgcccgaggcgaggaggagcgcggcgggaggaacagacacagac

SEQ ID NO: 148981 - RNA, 67 nt, Homo sapiens
agagaagaaggagggaaagccaaacaacggacaaagaccagggaagggacggaaaaggcgcacacga

SEQ ID NO: 148982 - RNA, 81 nt, Homo sapiens
ggggccggcaccccgacccacagaccgcgaccgcacaagcagccgccagcggaaccaagcggcgcggcacacgagaccagg

SEQ ID NO: 148983 - RNA, 77 nt, Homo sapiens
cggggagcgcccgcgacagaggagggaggaaaacaaccgagggcagagacccgacaagagcgggaacgcgacgggaa

SEQ ID NO: 148984 - RNA, 72 nt, Homo sapiens
ccaaaacccaacaccaccgacggcaacaggacccaaagaacaagccacacgcccacaaggaagaaggaaaca

SEQ ID NO: 148985 - RNA, 117 nt, Homo sapiens
gcaacggggcacaacgcggccggcgcccgcacccaccgagaaccagccaccgacccggcgaaaccaagaggagggaagcaggcagacgcgaggccggccaacaagacagcgaacaca

SEQ ID NO: 148986 - RNA, 59 nt, Homo sapiens
ccgaccggcgccgggagaccgggcaaaagcagaccggaaaacccaccggcaagaccaca

SEQ ID NO: 148987 - RNA, 87 nt, Homo sapiens
ggggcacaccgaccagccgcacgccgaccggcgccgggagaccgggaaagcgggaaggcgcgacgcgcccagaagaggccgacggga

SEQ ID NO: 148988 - RNA, 78 nt, Homo sapiens
aaaacaagccggaaaggaggaaaaagaagaccagcgacaaaagagaaacccggcagggaccagaggagacaacaaaga

SEQ ID NO: 148989 - RNA, 65 nt, Homo sapiens
aacacgaggagagggacacggaggaaacaggagccagaaaaaaaaaaagaaaggacaagggaggc

SEQ ID NO: 148990 - RNA, 56 nt, Homo sapiens
gaggaccagacgggaacccggccccccaccccaccaagggaggccaacagacccaa

SEQ ID NO: 148991 - RNA, 66 nt, Homo sapiens
gccgcccaagccgcacagccgcggcggcagcagcaggagagcaagaggagccaggagcacgggggg

SEQ ID NO: 148992 - RNA, 57 nt, Homo sapiens
caccggacggagggagaggcgccagcccaccagagcggaccgcgaagagagacacgc

SEQ ID NO: 148993 - RNA, 73 nt, Homo sapiens
aaagcgacaagccacaggacaccaagccacaggcccagcccaggcacccaaaagcaagcgcgggaagcgacac

SEQ ID NO: 148994 - RNA, 79 nt, Homo sapiens
aaccggacacaggccaggagggggaagagagcgggagaaccaccacagacgacgagcagaagagagcggagagcgggaa

SEQ ID NO: 148995 - RNA, 66 nt, Homo sapiens
agacgcagggcgcccccggggccccggcgcggagcggcgcccaagacagcaagggacagacgggaa

SEQ ID NO: 148996 - RNA, 79 nt, Homo sapiens
ggaccgggaccggggcgcccagacgaccggaagagcaccgaccaagcccaccaagggacgccagcacccaaccgccaca

SEQ ID NO: 148997 - RNA, 83 nt, Homo sapiens
caaacgcccagagcgcggaaccgccacgggcacagaagagacgaaagggcgagggacgaagaaagaaagaaccgagagaacga

SEQ ID NO: 148998 - RNA, 73 nt, Homo sapiens
cacaaaccacagaagaggaacccgggcaaaagaaaacaggaaggagcaggaccccgccagaaacagacgaaaa

SEQ ID NO: 148999 - RNA, 63 nt, Homo sapiens
cgagaaagccgcagccccaaacaggagacgggagagagaaggggggacaccggaggaaggaaa

SEQ ID NO: 149000 - RNA, 80 nt, Homo sapiens
ccagccgccgcacgcgggggggaggacacgacaccaggcgaaccggccacgcacccccgaagccgccccaaaagcacgca

SEQ ID NO: 149001 - RNA, 53 nt, Homo sapiens
gagcgaagggcgccggggagcaaagaagccggacacaagagggcaagaaaggc

SEQ ID NO: 149002 - RNA, 88 nt, Homo sapiens
cgggcgggccgcgcagcccccgggcaggaggacgcggcggcggcgaggagaccccggccccggaggccccgcacccccccagccgcgc

SEQ ID NO: 149003 - RNA, 53 nt, Homo sapiens
cagggcagaaccagaaggaaaaagcccaggaccaacaaccgaaaagaggagaa

SEQ ID NO: 149004 - RNA, 84 nt, Homo sapiens
gcgacgcccacacgacccgacccagagcagaccagaagccagccagcaccgcaccaccccagagcaacaaggagacgcgccgcc

SEQ ID NO: 149005 - RNA, 83 nt, Homo sapiens
ggcaggacgcgcggaggaaacacccaggacacggccacaacaccaagaggaagccgacggccacgcggacggaggacgccgga

SEQ ID NO: 149006 - RNA, 75 nt, Homo sapiens
cggcgggcgagccgagaaccacacggccgcacaaggggcacccgagcacgaaaggaccgcaccaagggcagcgca

SEQ ID NO: 149007 - RNA, 75 nt, Homo sapiens
gccacacggacccccggaggacccagggccaggagcgccggaccagcgcgagcgccacggcacggccccacccgg

SEQ ID NO: 149008 - RNA, 80 nt, Homo sapiens
gagacgagaccgaaccggcaccgcacaccggaccaggaaacggaggcggaggagacggaggcagagagaagagggagagg

SEQ ID NO: 149009 - RNA, 60 nt, Homo sapiens
acaaccggcaagggccgcaagaccgaggagacgcaaagggcagggccagcgcaacacccc

SEQ ID NO: 149010 - RNA, 72 nt, Homo sapiens
cggccaccagcgcaggggaccccgaaggacccaccgcacacacaaggccacgcgcagagcgaacaccaccgc

SEQ ID NO: 149011 - RNA, 54 nt, Homo sapiens
caaagcgacagacagacaaagggaggagagaaagaacccacgcaggacgacaga

SEQ ID NO: 149012 - RNA, 77 nt, Homo sapiens
ggaagagagcaccagacgacagggggcacagagagcagcccgaagagggggaagaagcgcgcagcgagcacacgaac

SEQ ID NO: 149013 - RNA, 54 nt, Homo sapiens
cgaggcaacggggccccgaggccacggcccgggccaagcaacaggcgcacgcgg

SEQ ID NO: 149014 - RNA, 78 nt, Homo sapiens
cccccacaagacgacacccgacgagacggccgccacagcccagacggcgaaagcgggccaagagacccccgcccgccc

SEQ ID NO: 149015 - RNA, 72 nt, Homo sapiens
caaaaggccgaggaaaaagaaggacacaaaagggaagccgagaaaagcgggcacaccgcgacaggggggcag

SEQ ID NO: 149016 - RNA, 77 nt, Homo sapiens
gcccccagccgcagccacaacaccggcaggaaccaccaggacagaggcagcggaacgcgccgacgccgcaaccagca

SEQ ID NO: 149017 - RNA, 69 nt, Homo sapiens
ccaagcaagaacacagcagcaagaccacaggccagcggccaaagccagaagacgaacaaggggcccacg

SEQ ID NO: 149018 - RNA, 42 nt, Homo sapiens
gggaacagcccccaccggagcgggaacagcaagaaagaaagc

SEQ ID NO: 149019 - RNA, 81 nt, Homo sapiens
cgcaccgccgagccgcccgggccgggcgcgcagggcaccacggggaccagccaaggcgcgagggcaacacccccacaaaga

SEQ ID NO: 149020 - RNA, 77 nt, Homo sapiens
gccgccccgcccagagcccaacggcgccggacaccgagcgccaaggacaagcaaggggccaaggagccaaggaggaa

SEQ ID NO: 149021 - RNA, 84 nt, Homo sapiens
cagccgggcaaaccagaggcggccccggcgcgcgcaggggaccgagcggcgccccaaccggggaagccacaggcacagccagca

SEQ ID NO: 149022 - RNA, 90 nt, Homo sapiens
gggacccaaacccacaggcgaaaccaaggacaggcgcgggaggagcgcaggacgaggacagaggccaggggcccagggcaggacccagcc

SEQ ID NO: 149023 - RNA, 74 nt, Homo sapiens
cagaaccacgaaaaaccagacagcaccacaggagcggaaccaaggacagggaggagagaaacaggagagagaca

SEQ ID NO: 149024 - RNA, 79 nt, Homo sapiens
cggggccagggaacccggcaccgccccaggggaggggcgaccccggggcccggccagcacgaccgaggaggggcggaca

SEQ ID NO: 149025 - RNA, 86 nt, Homo sapiens
ggaccagaccgcaggcccacacaccagccgagcccgaagcccgacccgcaggcagcccaggacagggagccaaacacagaccaagc

SEQ ID NO: 149026 - RNA, 81 nt, Homo sapiens
gcgagccaaaaagcaaagcaccaaaccggcccggaggaggacaagaggcccagggggcaaagaggggggaacccaaaagac

SEQ ID NO: 149027 - RNA, 56 nt, Homo sapiens
gccccccagccagggagcggggcaccaagcccgcccccggagggaccacggaggcg

SEQ ID NO: 149028 - RNA, 67 nt, Homo sapiens
agacagagccgaaggccggcagaagagccccaaggcagcgaaaccaaagaagaaggcagaagccagc

SEQ ID NO: 149029 - RNA, 42 nt, Homo sapiens
gcggagccgacgagcggcggacacagaagcagcaacaaagaa

SEQ ID NO: 149030 - RNA, 53 nt, Homo sapiens
agggaccacacagaaacgaacgaagacccccaggggacaagaaccagcagaac

SEQ ID NO: 149031 - RNA, 68 nt, Homo sapiens
gggccccagaacagacacaagcccgccggagcggaagagagcgcgcccagcgggcgaccccaccccga

SEQ ID NO: 149032 - RNA, 75 nt, Homo sapiens
cagcagaagcgaaaaggcaccaacagaaaccaccacccccccaagaaggcaagcccggaccggacacaagccaac

SEQ ID NO: 149033 - RNA, 81 nt, Homo sapiens
cagccacgcagcggcgggcagccgggcaccgcaagacggacccgaccagggagaccgaaggaccaccggcagcgggaaaaa

SEQ ID NO: 149034 - RNA, 80 nt, Homo sapiens
ggaaggagcccagccccagacaccaccaccagagaaccggcaacaaaggaaacgggacagaggaagaggagaaagaacaa

SEQ ID NO: 149035 - RNA, 74 nt, Homo sapiens
agcacacggaacaaagccccaggaggggcagagagcaggcgagcgagagcaacgagcgccgcacagggcccgga

SEQ ID NO: 149036 - RNA, 75 nt, Homo sapiens
cagcgagcacggaggggaaggcacggacgcaacacggaacagacgcaggaggggaacagaccgaggacagcggcc

SEQ ID NO: 149037 - RNA, 58 nt, Homo sapiens
aaggagacggaacgcacagaggaacgagcgagcggcagagcaacccacaggagggcca

SEQ ID NO: 149038 - RNA, 112 nt, Homo sapiens
ggggacaggcccccggcgcgcggggcgcccgggggagcaacccggcgaggagccaaccgacccgaggaggaccagaagaccccggcaagcccagaagcccggacgcccggca

SEQ ID NO: 149039 - RNA, 56 nt, Homo sapiens
ggaacaagcaccacagaggccagccagaccaaggacagccaaggaagccaagacca

SEQ ID NO: 149040 - RNA, 73 nt, Homo sapiens
aaaagagggaacagcggcccagggcaggcaagcaaaaaggaaaacaggaaacacacaacaaagggcaagacaa

SEQ ID NO: 149041 - RNA, 74 nt, Homo sapiens
gcagagacgaaccaggcaaagagaaaccacaaccccagaacgaacaaagacaacagccggaacgccccaaaaaa

SEQ ID NO: 149042 - RNA, 71 nt, Homo sapiens
gagaaggggagcaaaccccggaaccaggaaaaacaggcggaccagaacggcgaggacgggcagaagccgga

SEQ ID NO: 149043 - RNA, 81 nt, Homo sapiens
ccggccgagccacggagcaaggggccagccgggagaagaggcacaaggacaggcacagagaacagaacaaaaaaaaaccag

SEQ ID NO: 149044 - RNA, 85 nt, Homo sapiens
cgaccaggcggacccacgcgcgggaaccaggggcagagggaccaccgacaggcacggcgcagaagaacacggcggagccggcccc

SEQ ID NO: 149045 - RNA, 75 nt, Homo sapiens
cccccgaaggaccgcggacccgccccgggacagcgaggagcgagggacccagccgccggccgacgagacacgccg

SEQ ID NO: 149046 - RNA, 85 nt, Homo sapiens
gccccgaacgaagggccaagaaggagaagcagcgcggaaaagcagaagggcccggagggccaaggaggcagccccacaggccgac

SEQ ID NO: 149047 - RNA, 40 nt, Homo sapiens
gaaggggacgcaaaagaggaacacgccaaaaagaccaggg

SEQ ID NO: 149048 - RNA, 84 nt, Homo sapiens
cgagagcacgcccggcgcagcccagcccgacccagcacaacagcccagcggcagcacaccccgccaaaccaaccgccaaggccg

SEQ ID NO: 149049 - RNA, 84 nt, Homo sapiens
cgccaccggcccgacccaagggcccaaaagcacaagaacggaggcagaagacgaggcagacgggcccgcgcacagagacaggac

SEQ ID NO: 149050 - RNA, 94 nt, Homo sapiens
ccaaagggacagagacaaccaagagacaccaccagaccccacaagaggagccaggagcacggggggaacaagaccgccgggacggaagacggga

SEQ ID NO: 149051 - RNA, 65 nt, Homo sapiens
agcgccagggcacagcccaaagagaaagaaaggcaccacaaagggcagcgcagcccggaggggga

SEQ ID NO: 149052 - RNA, 85 nt, Homo sapiens
ccccagggcccccaggggggccagccccagagcggagacaacagcaggagcaagaaacaggcagccaggcggacacagagcagaa

SEQ ID NO: 149053 - RNA, 68 nt, Homo sapiens
agggggggcgcgccggaaaccggagcgcgcagcaggacaggagagacaacggaggcaagaaagacgga

SEQ ID NO: 149054 - RNA, 73 nt, Homo sapiens
caagaacccaccacccagcagcagggcacaagacggaacagccccaagccggaaacccaggaacggaaacaga

SEQ ID NO: 149055 - RNA, 72 nt, Homo sapiens
ccccacccgacccggcaccacacgcagaacgggcggacgggcgcccagccagaccaacaaacgaagacccca

SEQ ID NO: 149056 - RNA, 90 nt, Homo sapiens
cggccgaggaagcccgagagccgcgagccccagggcgcccggagcgccccccaggcgggcacagaacgccccccaccccaccacaaggag

SEQ ID NO: 149057 - RNA, 42 nt, Homo sapiens
gaagcgacgagccgcgaggaggaaaaaggacacagcccagaa

SEQ ID NO: 149058 - RNA, 94 nt, Homo sapiens
acgagcaccgcgccggcccagcaccccgagaaccgcaggagccagagggaggggccaaagggagagggacaacacacgagcacaaacacaagcg

SEQ ID NO: 149059 - RNA, 76 nt, Homo sapiens
cagaaaaagaggcagaaggaaagaagaaagaaaaagaggacacgaaagcaggaaaggaaagaagcgaaggagggag

SEQ ID NO: 149060 - RNA, 69 nt, Homo sapiens
aggacgagaacagcaacagcaccagcacacagggccgacggagacgcacacggacccccagaaacaccg

SEQ ID NO: 149061 - RNA, 84 nt, Homo sapiens
cgccgagggcggaggaggccaccgaggacacccggggagaagccaaggagcgcgcccaagcacggagcaccaccacccacccca

SEQ ID NO: 149062 - RNA, 74 nt, Homo sapiens
aaaccggcgggaagaagaccagcgggggacagaggcgacacgccaagaggaaacggccaacaaaaacagaacag

SEQ ID NO: 149063 - RNA, 71 nt, Homo sapiens
caaaagagaaagcacagaaaccaaagccagccagcaggagaaaacgcagccgagggaagccaagcgccgag

SEQ ID NO: 149064 - RNA, 79 nt, Homo sapiens
gagcgcgaaggccgggacccggccccggcccacaggggggggcaaacccgagagaacggggacccaggaagaaaaaaag

SEQ ID NO: 149065 - RNA, 58 nt, Homo sapiens
gcgaggaggaaaggaggacgagcccgccaaggaacccgcggggcagaccacaccagca

SEQ ID NO: 149066 - RNA, 81 nt, Homo sapiens
caccaccgcgaggggcgggcgaggcaccggagacccgagcaccccaacgggcaggaccagaggcagacggaaaacggacac

SEQ ID NO: 149067 - RNA, 55 nt, Homo sapiens
gccgcagacgcgaaggaacggcaaaggaagaagaagcgggaagcgccacccagag

SEQ ID NO: 149068 - RNA, 84 nt, Homo sapiens
cggaagcggcgagggagccagacggccccggcgcgaagaccgcagcccgcgcccgacagcgggaagcccgggcccagcggggca

SEQ ID NO: 149069 - RNA, 71 nt, Homo sapiens
gacaaaagggccaaagaagggagagagcggagcaacaccccgcaccgggaaccgcggaacccgcaggccac

SEQ ID NO: 149070 - RNA, 62 nt, Homo sapiens
agaaaccgcccccagaacacaacagggcaaaggccccgacagaaccaccaaaaggccagggc

SEQ ID NO: 149071 - RNA, 74 nt, Homo sapiens
acaaaaacgaagggagcagccggacacagacccaggccggcggacgacgggcccacggaagcacgggcaaggac

SEQ ID NO: 149072 - RNA, 60 nt, Homo sapiens
agaaaggggaaccccggagaaaaggccaagaaggcagcacacaccacgggacacagggga

SEQ ID NO: 149073 - RNA, 76 nt, Homo sapiens
cggacaagccagcaaaaccacggccccaggagggaggaacagaggacaccaacgggcggggagggaaggccaaaca

SEQ ID NO: 149074 - RNA, 75 nt, Homo sapiens
aaggccgcaccaccaaaccaagcaaggaaagaacaagaaaggagagggagaaaccccaacacagaaaagcccacc

SEQ ID NO: 149075 - RNA, 83 nt, Homo sapiens
gaggaggaaccggagaccccgaaaacggaagcgcagggagaaggaagaggggaaaagccggcaggagcggacaacggaggaga

SEQ ID NO: 149076 - RNA, 79 nt, Homo sapiens
gaaagagaggacgaacaccagaaggcagcagccagcaaaccaggcgagacagcaggagcaccaaaccccaccaaaacgg

SEQ ID NO: 149077 - RNA, 79 nt, Homo sapiens
gggaggcaaagacgacaccgggcgccgaggcgccacaaaagcagcgcccagccacggacgaggagagcagggaggcaag

SEQ ID NO: 149078 - RNA, 79 nt, Homo sapiens
gacgggcgcaccgcgacagcgggagcacaggcccgggagggagagaaacccagaacagccagcaaagacaagagcagac

SEQ ID NO: 149079 - RNA, 69 nt, Homo sapiens
gaagaacaaaaaagaaaggagccggagaggcggaccgccaagaacggaaaacaagacgacccagaaacg

SEQ ID NO: 149080 - RNA, 79 nt, Homo sapiens
ccgacaccagcggccgacaccaacccccgcggacccagggagaaaccccccaggcagaggcaagggcgacggccacgca

SEQ ID NO: 149081 - RNA, 74 nt, Homo sapiens
ggcgccggccaaccgcgcggaggaggaaacaagggcagagccagcaaagacagggaggccgcacagaggaggag

SEQ ID NO: 149082 - RNA, 44 nt, Homo sapiens
accccccagcccgcccagaccgccagcagcagccgaaaacgcac

SEQ ID NO: 149083 - RNA, 70 nt, Homo sapiens
cagaaaggaacaacccaaaaaacaacaaccggacacagagacaagaggaaaagggagaaccaacaaagag

SEQ ID NO: 149084 - RNA, 75 nt, Homo sapiens
aacagcagacccaagagcagcggaaaagaccagcacagaggcagcgagaagaaaaagaagagagagacacggaca

SEQ ID NO: 149085 - RNA, 70 nt, Homo sapiens
cgccggagacagggagaccaagagacagacaccgccccgagacgagggcgacccgggccaggcgaaccga

SEQ ID NO: 149086 - RNA, 82 nt, Homo sapiens
ggcaccgggccgggcgccagggacgcgcgcgcgccagcgccgggcacgggcgaggaaaagggccagggacgaagccccgggc

SEQ ID NO: 149087 - RNA, 73 nt, Homo sapiens
agaaggggcacgagccccccaggaggccaggggaagaacaagccccggcagagaaaaacgccagccaagacaa

SEQ ID NO: 149088 - RNA, 62 nt, Homo sapiens
ggagcagaggggacagaggcaccaaggaccccaagacagggcaggcgccccaacccaagcca

SEQ ID NO: 149089 - RNA, 41 nt, Homo sapiens
accggaaagagaaacagagaacaacccgacaccgaaaacga

SEQ ID NO: 149090 - RNA, 74 nt, Homo sapiens
aagagagggacggcaggaaccggagacccacagaccagcaaccaccgaaacgggcgaaaaagaagaacagcaaa

SEQ ID NO: 149091 - RNA, 86 nt, Homo sapiens
gcagggcaccgcgcgaagcggccaaagccgcccagacggccaccggcgggaggaacaaaaggcggaggcaaggcacgaccggccac

SEQ ID NO: 149092 - RNA, 67 nt, Homo sapiens
aaagccaaagcacaagaaagaacaggaccggcagcacagcagcaggaagcgacacaaacccgccggg

SEQ ID NO: 149093 - RNA, 61 nt, Homo sapiens
ccacgagagccaagcgacaaggagacacggaacaaacgacaagacgggccccgccgacgag

SEQ ID NO: 149094 - RNA, 82 nt, Homo sapiens
cgacgcccggcgccagcacacgcagggcagcgcaagaccccgcacggaagcagcaagcacaggcagcgcagagccagagacc

SEQ ID NO: 149095 - RNA, 70 nt, Homo sapiens
aggcaacgaacaaaaagacacaacacgcgacacaaaggagacgccacccgacagcagcggggacgggccc

SEQ ID NO: 149096 - RNA, 78 nt, Homo sapiens
gaaccccggagaaaaggccaagaaggcagcacaaaagaccccacagcgagagagagcaaacgaaacaggcaaacgaga

SEQ ID NO: 149097 - RNA, 43 nt, Homo sapiens
agaaggaccaaaacagcagggcaagaaggaacagacaaaaacg

SEQ ID NO: 149098 - RNA, 40 nt, Homo sapiens
ccccagacccccagcccaggacggccagcagaagcaggcg

SEQ ID NO: 149099 - RNA, 73 nt, Homo sapiens
ggcaaagcagccaccaggagccacgcggggacgcgccaggacgcaagggcaacgggaagcaaaagagagcaag

SEQ ID NO: 149100 - RNA, 76 nt, Homo sapiens
agcaccagagccccaacagccccgcggccacagcgcaagaaacaacggacacccccgggaacccaccaaaaaggac

SEQ ID NO: 149101 - RNA, 75 nt, Homo sapiens
gagcacgaaggggagaaaagggaaggccccaagccaagaagcgccagaaccagacagccagaaggcaagaggaac

SEQ ID NO: 149102 - RNA, 33 nt, Homo sapiens
aaccagacagaccagacagggagacggaagagc

SEQ ID NO: 149103 - RNA, 78 nt, Homo sapiens
ccgcgcgacacgaaggcggaagaaaagagacagaagcaggaccggcccacgccaagggcccgccccaccgggggccac

SEQ ID NO: 149104 - RNA, 75 nt, Homo sapiens
acccggcacagaacgaccaggggggcccaccggacaggcaaaacagagggcagcagacaaccaacacaccacaac

SEQ ID NO: 149105 - RNA, 97 nt, Homo sapiens
cagccgagccggcgcggcccgccaaggaacgggcggcacagggagggacccaccgagagacaagggggggccgaagaagccagggggaggaaagcag

SEQ ID NO: 149106 - RNA, 60 nt, Homo sapiens
cgcagcacaccccacaccagaacccagcagcgccagcacggcaggaacacagcacccacc

SEQ ID NO: 149107 - RNA, 46 nt, Homo sapiens
acgccaggcagcgcccccaaacgggagagcacgagggggggacacg

SEQ ID NO: 149108 - RNA, 50 nt, Homo sapiens
caagcagcaacaaacacacgccgaaacaaaggaacagagacagacccggg

SEQ ID NO: 149109 - RNA, 57 nt, Homo sapiens
gccaaggacccagccggagacggcaggcaggagaagggcaccggggaggaccgcgcg

SEQ ID NO: 149110 - RNA, 79 nt, Homo sapiens
gccggcgccgccgcccccgggccgcggccgcagggcccggcaacacgagcccgcggagcaggaggccgagaccccaaca

SEQ ID NO: 149111 - RNA, 79 nt, Homo sapiens
cgcgccggcaggccggcccggggcgagccccagcgccacccgacagagaaaaacaaaagggacagcgcacggagaaaaa

SEQ ID NO: 149112 - RNA, 69 nt, Homo sapiens
aaaaccacccagacaaacgaaaacagaagcaacaagagagacaagcccggggaggccacgcacgggacg

SEQ ID NO: 149113 - RNA, 79 nt, Homo sapiens
caagaaaggggagcccaccacgagcgcccccagggagcacaagcgagagcccccccccggaggagagagagagagaccc

SEQ ID NO: 149114 - RNA, 50 nt, Homo sapiens
cggggcggcgccggccccaaggggagacgcaagccacccggacgcgaaga

SEQ ID NO: 149115 - RNA, 75 nt, Homo sapiens
ccgcgccccccgcccccccaccgacacagcccagccgcgaaccacacaggaaacagaaagccggcgaggggaggc

SEQ ID NO: 149116 - RNA, 61 nt, Homo sapiens
gcggaaagcccacagcagcagggaagggagccagcggccggcgccggcgcacacacgccgg

SEQ ID NO: 149117 - RNA, 56 nt, Homo sapiens
ccccaggcacccccggccggcgcgaggccagggggacgcggaagagacagcagaac

SEQ ID NO: 149118 - RNA, 59 nt, Homo sapiens
acggagcagccgaggacgggaccccagggcagcgaagcaggcaggcgacacgagaccca

SEQ ID NO: 149119 - RNA, 69 nt, Homo sapiens
agaaggaccaagaaccagggcggagcggcaggaagccaaggaccaaagaaagcgacacccgcgcacgca

SEQ ID NO: 149120 - RNA, 77 nt, Homo sapiens
ccggaagcggagccgccgccccgcaagcgaaaggagcaaagagaaaacgacgccaaaacgagggccaagaaggccaa

SEQ ID NO: 149121 - RNA, 75 nt, Homo sapiens
cgaacgagcgaggccacgccgcccaggagacccccgcgcaccaccagggcccaaaaaagggaaccgcacagcgag

SEQ ID NO: 149122 - RNA, 74 nt, Homo sapiens
cgaagcagaaagcaaggaaacgagcagaagccgcgggccgcagaggcaacagcccacggaagaagacccagcag

SEQ ID NO: 149123 - RNA, 70 nt, Homo sapiens
ccccacggagaaagagacccgccgacacagccaccaagaaggcacaagcagaacgggaaaaggggcggaa

SEQ ID NO: 149124 - RNA, 71 nt, Homo sapiens
agacccacccaaccgcacacgcagacaagcaggcaggagagaagagacccacgcgagaaccaggcgcgaac

SEQ ID NO: 149125 - RNA, 75 nt, Homo sapiens
gagcgcaagcaggaacaaggacagcgcacgaaggcagaacaaagagcgccaaacgagggaccacggcggggcaga

SEQ ID NO: 149126 - RNA, 76 nt, Homo sapiens
accgacacgaacggaccggagaaggcggcgaggaccgcaggcaggcgaaggggagcaagggagaaaagcaaaggga

SEQ ID NO: 149127 - RNA, 71 nt, Homo sapiens
gcaaacacacaagaggggacaagaccagaaccaggacccaagggaaaagagacgcaaaccacgaggacaga

SEQ ID NO: 149128 - RNA, 97 nt, Homo sapiens
ccagcagcgcacaaaagggaggagacagccgccgacgccagcgaaaacagaggccacaggaacaacgaaacgacaaaggaaagacgcacaggaggag

SEQ ID NO: 149129 - RNA, 56 nt, Homo sapiens
ccagaaagcagaacaggccaccgggccaacgaaaggagaacagaacaaacacgggg

SEQ ID NO: 149130 - RNA, 62 nt, Homo sapiens
ccagaagaggcggaggcggggcaaccagccgaaaaagcagggaagcagccacacacgggcaa

SEQ ID NO: 149131 - RNA, 52 nt, Homo sapiens
gaaacgagcagaaaggcacccaggcacagaagcccaggcccgagccagccgc

SEQ ID NO: 149132 - RNA, 69 nt, Homo sapiens
gaagcccaccacaaaaacgaaggcggcggaagaagcggaggaagccacgagaaccaggaagggggaaaa

SEQ ID NO: 149133 - RNA, 81 nt, Homo sapiens
agcggcgcagcccacgccagacgaccccacccgcgccgcgacccgggcaaccccgcggccagcgcgaggaggaggaggccc

SEQ ID NO: 149134 - RNA, 72 nt, Homo sapiens
cggaccagcagaggacagagaagacgaggggaagcacgagcaagaagggagaaaaaccggaacaagaagcga

SEQ ID NO: 149135 - RNA, 67 nt, Homo sapiens
cgacaccaacgagcccaggcacagagagcgcgaaggaccccgacaagaacgcgcccccagccgaaaa

SEQ ID NO: 149136 - RNA, 54 nt, Homo sapiens
acagaagcacggaagaagaagcaggaaagggaacaaacggaagaaaaagaagag

SEQ ID NO: 149137 - RNA, 78 nt, Homo sapiens
agaaaaaaaaaacccagaggcaagaccccaacgaaacgaagacaagacgaagaggagaggcacagagaagaagaggcc

SEQ ID NO: 149138 - RNA, 76 nt, Homo sapiens
gggcccagcacgcggggcaggcggaaaaccagagacccagacacgcgaaggaacgaaaggccaaaaggcaaaagac

SEQ ID NO: 149139 - RNA, 72 nt, Homo sapiens
cagcagccacgaggcgagccagagccgcagcccacacgagcccaaaaggcagagcgaggagagaagaaggag

SEQ ID NO: 149140 - RNA, 68 nt, Homo sapiens
ccaggagcccgagagagaaggagaccagcgagcacagaccccaaagagcagaccgggaagagaaacaa

SEQ ID NO: 149141 - RNA, 58 nt, Homo sapiens
ggccacgagcggaaggaagcacccaacagaacccagccaagaaagccgcagcggggag

SEQ ID NO: 149142 - RNA, 79 nt, Homo sapiens
gcggccaccgggaccggcggggagcgacgccagcgcccaacaggggcccgggcagagggaaagcagaggacggaacaac

SEQ ID NO: 149143 - RNA, 75 nt, Homo sapiens
acacaagaggaaagaagacccaagcgggcaacagagagagccagaagaaaggaacagaacggagcaacacacagc

SEQ ID NO: 149144 - RNA, 65 nt, Homo sapiens
aacagaagcagacgagaacggcagccaaggaaccgagcggcggaggagaaagagaaggaaggcag

SEQ ID NO: 149145 - RNA, 80 nt, Homo sapiens
caacagaggagagaaaaaacagagcgccagacaaagacacacccaagcaacaacggagcgagaaggaaaggaaacgaaaa

SEQ ID NO: 149146 - RNA, 79 nt, Homo sapiens
gaacgcgcacgacaccggaagagccagccacccccacaccaagaagcccaccagaggcgaggggaggaggaagcgagcg

SEQ ID NO: 149147 - RNA, 74 nt, Homo sapiens
cagcagacaccggggacccccagccccaggcgaggacaccagcggcagggccagggggggggggcggaaagccc

SEQ ID NO: 149148 - RNA, 75 nt, Homo sapiens
caggagcggcggccaggccagacccgaaggccaggagacccgaccccaagcacgacagccgaaggagaggaggcg

SEQ ID NO: 149149 - RNA, 76 nt, Homo sapiens
ccgcccaggaagcccccgaagcccccgccgccgcgagaaggaggagcaaaaaggacagagcacagagccagcacag

SEQ ID NO: 149150 - RNA, 70 nt, Homo sapiens
cagaccagcgaacagaaagagacccaggcacagaagaggacgcaaaagaaggacaaggagaacaccacac

SEQ ID NO: 149151 - RNA, 86 nt, Homo sapiens
aggaagaaaaggccagggggaaggaaaggaaacgacgcgggcgcaggccccagcaggaaggcagccaacacacgccccaaagacag

SEQ ID NO: 149152 - RNA, 61 nt, Homo sapiens
aggaaccgggaccagaaaagaggggcagcaaaagaaggggcccgaaaacacggcacacagg

SEQ ID NO: 149153 - RNA, 76 nt, Homo sapiens
acagacgcagggcgcccccgaccaaaccggaccacccaaaaagccgaagacccccaagaccacagccagcaagcac

SEQ ID NO: 149154 - RNA, 75 nt, Homo sapiens
cacgacgcgccgaacgccggccacacagaaggagagagagaccccccacacagggaaagggagcagcaccggcca

SEQ ID NO: 149155 - RNA, 78 nt, Homo sapiens
ggcagaaaacgcgagaaagagacaggcagaaaggccagggaagggacaaccaccaggagacgcaaagaagagaggcca

SEQ ID NO: 149156 - RNA, 60 nt, Homo sapiens
cgagacgggcggagaggagaaggggagccgccaccaaaagcagacggaaaacccacgggg

SEQ ID NO: 149157 - RNA, 71 nt, Homo sapiens
gagagaccaagaagaagaaacaccagacagccgaagagcaacagacccaccgcgcacgagaaagagaagag

SEQ ID NO: 149158 - RNA, 70 nt, Homo sapiens
caggaccgcggcggcgaacacagcgacagagccaacgcaaaaccagaccaacagccacaggaccagaaca

SEQ ID NO: 149159 - RNA, 72 nt, Homo sapiens
ggaagcagcaccggagaagcaaagggcaccaaaccggagaagggaacggaaggaaagccaagaccggaaaaa

SEQ ID NO: 149160 - RNA, 86 nt, Homo sapiens
aggaagcgaaggaggcgggagcggagacccgcgcgccaggcgcgcccgggagcaaaagaaaaggccaaaacgaaaaaccaaacaga

SEQ ID NO: 149161 - RNA, 76 nt, Homo sapiens
gaaaccaagcagaccgaagagaaagccaaagcaaacagagcagaccaaccagcagccaagcaacccagcagcccac

SEQ ID NO: 149162 - RNA, 68 nt, Homo sapiens
aagcacacccgaaaagcgccaaggaaaaggacgagaacgccgcgacagaaaggcgacgggacaaacac

SEQ ID NO: 149163 - RNA, 82 nt, Homo sapiens
caaaggcaccaggccaccacagaaacaaaagcaacaaagagggagaacggaagccagagaaaaggaagagagagcaagagag

SEQ ID NO: 149164 - RNA, 70 nt, Homo sapiens
gacagacggacaacagcccaacaacacccaacggagccaccaccaccccgagagacggaccggaccaccc

SEQ ID NO: 149165 - RNA, 71 nt, Homo sapiens
acccccagggccaaaggcaagagaaagagaagaccaggcgacgccccagaggcaaaccgacaccagcgaca

SEQ ID NO: 149166 - RNA, 39 nt, Homo sapiens
gaggcaaacgagaccgggaaggggggggaccagcacgaa

SEQ ID NO: 149167 - RNA, 82 nt, Homo sapiens
gacaagcgcagagccagagaggaccagaaccagaccggaaagcaccaggcaaagaaaaaaacaggagccaagaaggccagac

SEQ ID NO: 149168 - RNA, 97 nt, Homo sapiens
aaaaaagaaaacgcgcgagaagagagacgagagagaagaggagagagaagagcaagcagaagaggaacagaagaagcagagcagagacggagcagca

SEQ ID NO: 149169 - RNA, 79 nt, Homo sapiens
ggagggggcacaaggaaaaagacgcacagacagagcgggagccaccagcgccaaagggaagccaggagcccgggggcac

SEQ ID NO: 149170 - RNA, 79 nt, Homo sapiens
cgcgccgccgccgccgccgccgccacgagacgcgccaggagagaggggcggagagcccggaaggagagccgacgccggg

SEQ ID NO: 149171 - RNA, 52 nt, Homo sapiens
aaggaccaagaaccagacggaacacgcgaacacgcaaaaggaagcggcaggc

SEQ ID NO: 149172 - RNA, 76 nt, Homo sapiens
ggcagacacacaacccgacccgacgaacggaggacccccaggcaccagcagcaaggacgggacaggagaagagagc

SEQ ID NO: 149173 - RNA, 54 nt, Homo sapiens
cccaaccgaagaaaacaaggcagccagcccggcgcgcgcaggcacccacggagc

SEQ ID NO: 149174 - RNA, 71 nt, Homo sapiens
acggcgggccaagacacccaaggagggaaacggcagggcgaggcgggaccagaggcggcaagaaccagggc

SEQ ID NO: 149175 - RNA, 80 nt, Homo sapiens
gacggagaaaggggcccgggaaaaggaagcaccgccggcgagacacgaccccggcagggagaaccggaaacaacaagacc

SEQ ID NO: 149176 - RNA, 70 nt, Homo sapiens
cacccagaagacaaagcccagaggagagccgaacaggaaccgagaccggacagaaacgaagacagacaaa

SEQ ID NO: 149177 - RNA, 39 nt, Homo sapiens
cccccaaccccgggaaaaaggagcaagcaagagcgcgga

SEQ ID NO: 149178 - RNA, 81 nt, Homo sapiens
gacaaccgggccccagcccagaccagccagccccccacacaagaacggagcacgagaaaagcacccagagaggaaagccca

SEQ ID NO: 149179 - RNA, 71 nt, Homo sapiens
gggcccagaggcccagggaggcaggggcagaaacagagaaggaacaggcccagaaggggaagacccccagc

SEQ ID NO: 149180 - RNA, 65 nt, Homo sapiens
aggcccgaggcgcccgccccgcccaccacaaccggcccgcagccagccaagacaccccccaggca

SEQ ID NO: 149181 - RNA, 79 nt, Homo sapiens
cggccgacaacacagggcgggggggacagaggaggcacaggagggacaaccgcacccgagacaagggccagcgggaagc

SEQ ID NO: 149182 - RNA, 75 nt, Homo sapiens
cggcgcggccgagagccgcggcccggcggaaaggacagcagacccgacagaagcaaggggagacaggcgcccgcc

SEQ ID NO: 149183 - RNA, 56 nt, Homo sapiens
acgggccaagggagcgaaaagaacccccaaaaggggccaaccacgacaacagaagc

SEQ ID NO: 149184 - RNA, 63 nt, Homo sapiens
gcggcccaggcgccgcggcgaggagcgagcgcgcgaggggcggccgagcccggaccaagagac

SEQ ID NO: 149185 - RNA, 77 nt, Homo sapiens
gagaagcaggagcccaccggcagggaaacacaaagaagacaccagaagggccagcaccacgacaacacggcgacaga

SEQ ID NO: 149186 - RNA, 34 nt, Homo sapiens
gcccggcagcagcagagaccgcagaccagggccc

SEQ ID NO: 149187 - RNA, 88 nt, Homo sapiens
gccgcaccgccgcgccccgcaccccccgagcagcccggggaccagcacgcagagaaggagggggcagagcacggcaggcagaaggggc

SEQ ID NO: 149188 - RNA, 83 nt, Homo sapiens
gaccaggccgcccacaccagaagcagagccgcaaagagacccacccgccaaggccccccgggagggccaggcgccgccgcagg

SEQ ID NO: 149189 - RNA, 110 nt, Homo sapiens
cgcaagacgcaacacaaacgagaaagacagcccgaacggagaaagagacagaagccgggcaccggcccagagagcagggacacacgagggccggaaccaaacgaaaggcc

SEQ ID NO: 149190 - RNA, 79 nt, Homo sapiens
ggccgcgcgaacgcacaggagaccaccaccccggcgccaccaccgacgagcgaagagcaaggcacgcagcacgggggca

SEQ ID NO: 149191 - RNA, 68 nt, Homo sapiens
gccccaccgccgacgcccccagccaccaggcgacggggacgaccagcgggagccggcgcgcgcgacgg

SEQ ID NO: 149192 - RNA, 75 nt, Homo sapiens
ggaccgagcccagcccagccagacaccccagcgccccacggcgaaccgggaaaaggcgcccacggaccccccaac

SEQ ID NO: 149193 - RNA, 78 nt, Homo sapiens
aacgagggcccaggggccccagaaccagaagaggagcacaggaacaaacgagggaaagccccaggaacagaggggaga

SEQ ID NO: 149194 - RNA, 73 nt, Homo sapiens
cgccgggcgcgcgcggccccagcgacgagagcccgggagggaccccgacggagagacaaagaagacggagggg

SEQ ID NO: 149195 - RNA, 81 nt, Homo sapiens
ggcagcaagaacagagagagaggggacagacgagagaacgagaacaccgcccagccaagggggagggcagcgccaaacagc

SEQ ID NO: 149196 - RNA, 73 nt, Homo sapiens
gaaagaggcggcggcgcgccgcggccggccacgcgacacgagacgacccgggccaggggacggccccagcacc

SEQ ID NO: 149197 - RNA, 78 nt, Homo sapiens
aaagacaggagcccggaaggaagagacagagaccaagccaaacccccagggagcacggcccaggcagccaagaaggca

SEQ ID NO: 149198 - RNA, 41 nt, Homo sapiens
ggaacgaaagcagcaggggcagccaaaggaaaccgaaaaac

SEQ ID NO: 149199 - RNA, 74 nt, Homo sapiens
aacgggcccacacaacccaggcaaccaacaggagaagagacaacgggaaacacacaaagcccagaaggaacaac

SEQ ID NO: 149200 - RNA, 79 nt, Homo sapiens
aaaacagcccgcagagggacaagcggcgccggaccgaaggcgcgaccacgacgagaagcgggggccgcagcggggcacc

SEQ ID NO: 149201 - RNA, 84 nt, Homo sapiens
ggacacggcgcggcgcggcgcgccggagcgcgacccggccggcgccggacagaccggagggggaagaaaacaaccaacagagcc

SEQ ID NO: 149202 - RNA, 78 nt, Homo sapiens
cccccaagggcgggaacaggagggagcggccgagcacccaacgccagccggcccccaggacccgcccggggaccgggg

SEQ ID NO: 149203 - RNA, 63 nt, Homo sapiens
caaaaaagggaaagaacggagaaagggcaggggcagcccagaaacaggacagcacgccggaag

SEQ ID NO: 149204 - RNA, 90 nt, Homo sapiens
ccaaagaaacaaagaacggacccacaccgaggcacccgaagaagagaccaccaaccaggggagaaaacgcaggccacaaagacaggacca

SEQ ID NO: 149205 - RNA, 80 nt, Homo sapiens
ccggagcaagcagcgacgccagcggcggagaaccgacgaaagagaggagcgccggcccaggcggaggcaaggcagacccc

SEQ ID NO: 149206 - RNA, 84 nt, Homo sapiens
aagggcagaaggagggccacaaagggcaaagaggacaccagaggaccagaacccacgagaaacagacgagccaaccagacccca

SEQ ID NO: 149207 - RNA, 72 nt, Homo sapiens
ccgcgcggggacgcggacggggagcaccgaaagccaggaaagaggcaggcgaaggccgcacacacccgagag

SEQ ID NO: 149208 - RNA, 72 nt, Homo sapiens
ggaagaaagagcagaggaaagaaaagaaacaccgaaccgccacccaggcccaagaagagggccacgaccggc

SEQ ID NO: 149209 - RNA, 82 nt, Homo sapiens
ccacccaggcagcaacggcaagaaccgccggcagcgcgacaggaaccccccgagacccagccaaaagcaccccgcgccacca

SEQ ID NO: 149210 - RNA, 52 nt, Homo sapiens
cggcagaaacagaggacaaggcagcaaagaagagaacgaagcggacaccaaa

SEQ ID NO: 149211 - RNA, 76 nt, Homo sapiens
caagaagggcaaagccgaagccacccagagacagaacgccaccaagacaggccaaaaaccggagacaacggaaaca

SEQ ID NO: 149212 - RNA, 65 nt, Homo sapiens
aacggaaacacaagagaccagaggacgcaccacccgggaagcacgcagaaacagcagaggaggcc

SEQ ID NO: 149213 - RNA, 43 nt, Homo sapiens
agggaggaaaacaaccgagggcagaaacaccccaccagaccac

SEQ ID NO: 149214 - RNA, 78 nt, Homo sapiens
ccacgccagcagcagacccgccccgcagaaaaggcggacaagacccagcacaggacacgaagcgaccccaacaggaag

SEQ ID NO: 149215 - RNA, 69 nt, Homo sapiens
acgcaaggaacaaaaggaaacccaccaaggagcaggaccagaagcggaaggccagacggagggcgcgcc

SEQ ID NO: 149216 - RNA, 77 nt, Homo sapiens
caacgggacgggaaaccccgccgcagcaagagagagcaaggagcaggcgcagagcagagcagagcagggcggggagg

SEQ ID NO: 149217 - RNA, 83 nt, Homo sapiens
gacacaagaggaagcggaaaccagggccacagcacgcagccccaggcagagacaaagcaggaggacacaagaagggaggaaag

SEQ ID NO: 149218 - RNA, 84 nt, Homo sapiens
cggaggcgaggcgacgggggaggccgagaaccgcagggacggccgagagccaaaagccgaaagccacaagagacccggacagaa

SEQ ID NO: 149219 - RNA, 75 nt, Homo sapiens
gagagggagagccagaaccaacagagccaacacaagcaccagaggcccacgcggaccggcagcgccaccggacca

SEQ ID NO: 149220 - RNA, 82 nt, Homo sapiens
ccgcaagagggcaacacgcacggcccggcccgccagaagaggcaggaagacgaaagagaaggacaaccaagggccacggaac

SEQ ID NO: 149221 - RNA, 81 nt, Homo sapiens
caacaagacaccagcagacgaagcccccacccggagcgcaccacaaccgaggccaggagcacagaaacacccaccaggagc

SEQ ID NO: 149222 - RNA, 46 nt, Homo sapiens
ggagaggagaggcaagaggggcacaagaacgaacagggcaacaacg

SEQ ID NO: 149223 - RNA, 78 nt, Homo sapiens
gcgccgagcgaccaggagccggggcggcgcaggaggagccgaggcgagccaacagcacggaagaaccacacggccaac

SEQ ID NO: 149224 - RNA, 57 nt, Homo sapiens
gacccaccaaggaagcagcggccacgccagaacccagagggaaacagccagacgggg

SEQ ID NO: 149225 - RNA, 66 nt, Homo sapiens
aacagaagcgaagcgcgcaggagcagagagagacggaacagagaagcaacccaacagacaggcaaa

SEQ ID NO: 149226 - RNA, 69 nt, Homo sapiens
cgaggagagcagagccagacaacaggcaagaacggaagcacgggcggaggaaagcacaagcagagcccc

SEQ ID NO: 149227 - RNA, 64 nt, Homo sapiens
gccaccccggcccccccaccagaagcccagcaacacagcacccggcggcaaaccaaacaaaacc

SEQ ID NO: 149228 - RNA, 76 nt, Homo sapiens
gaacaacgagagcaaagggacgaaaaaggacagccgacacagcccccgaggagcagccacaccagccccaggcgcc

SEQ ID NO: 149229 - RNA, 72 nt, Homo sapiens
gaggacgccacaaacacccaccacagcagagagagccaacggaccacaacagagaaccaaggacgggaagca

SEQ ID NO: 149230 - RNA, 70 nt, Homo sapiens
ggagacccggggacccccgacgccaggcagcgcccccaaacgggccacggcacccagcggggaggacacg

SEQ ID NO: 149231 - RNA, 71 nt, Homo sapiens
cgcgagggggagggcgagaggggaagaggcgccgggacaggcaacaaacaacaggcagacgaaagaacggc

SEQ ID NO: 149232 - RNA, 69 nt, Homo sapiens
gccacagggggggcggcggggcgggaggaacgggggagcccacaggagccagagagacgggggcaccag

SEQ ID NO: 149233 - RNA, 83 nt, Homo sapiens
gcggcggcgcgcggccgggcggcgaggaagaggaaggaaggagcgcagcggagcaggaggagaagaaaccccaagaccagagg

SEQ ID NO: 149234 - RNA, 74 nt, Homo sapiens
gcaaagaagggaaaagcagcggaccgccccgggacaaaaaaagggagcgggaaacgcacaacagagaacagaaa

SEQ ID NO: 149235 - RNA, 85 nt, Homo sapiens
ggccaggccgccgccgagccgagagcccagcaagaccacgacacgagagcgccgccagccggaaggagacacggccaccgggacg

SEQ ID NO: 149236 - RNA, 35 nt, Homo sapiens
ggcaccgaacgcaacagagaggagcacggcagcca

SEQ ID NO: 149237 - RNA, 44 nt, Homo sapiens
cgcccggggaggcgcacggggaagcgaccccgaccggcccggac

SEQ ID NO: 149238 - RNA, 78 nt, Homo sapiens
agagacccacagaccaggcacccgcaggagaggccccaacaagggcgccgaaaaaaacagcaagaggacaaacaaggc

SEQ ID NO: 149239 - RNA, 76 nt, Homo sapiens
cgacaaccccacaccaacgagaggcaacgcgaggagggcaacgagacgggggcgaacaaaggacacagaaagaggg

SEQ ID NO: 149240 - RNA, 81 nt, Homo sapiens
cccagacaccgacgggccgcgaggggaagaggaagcaaagccaagacgcccccgcaaaacggcccaacacgaagcggcacc

SEQ ID NO: 149241 - RNA, 55 nt, Homo sapiens
ggccggaggcaaggggccagaggacagaggacagaacagggggcgggagagggga

SEQ ID NO: 149242 - RNA, 40 nt, Homo sapiens
gaagcccccccgcaaacagcaggagcagaacggagcccgc

SEQ ID NO: 149243 - RNA, 69 nt, Homo sapiens
acaagacggagcagcaaaagagccgggagagagcggaaaaagaacgccgcggcgcggagacacaaacac

SEQ ID NO: 149244 - RNA, 59 nt, Homo sapiens
gacacccaaagaaggccaaaaagcgcaccacacagagaggggaggggagcgcaggacgc

SEQ ID NO: 149245 - RNA, 79 nt, Homo sapiens
cggcgcaggcgaagcgaaacagggacagaccgagaaagggaggaaggcagcaggagaagaacggaccgcacacaggcag

SEQ ID NO: 149246 - RNA, 76 nt, Homo sapiens
caagagggccaagccagaaaacagaaacgaaacagaacagagagaagcccagagaggaagacgaggaagcagaaga

SEQ ID NO: 149247 - RNA, 79 nt, Homo sapiens
cgccacccggcagccggcgacgcacacaccacgcaggggaaggcgcgagccccgcgcgggcagagcgccacagaccgac

SEQ ID NO: 149248 - RNA, 69 nt, Homo sapiens
accccacgaccgcgaccccaagcaggaaagaagaaacaacagaaggacaggcgaccaacgacgaagagc

SEQ ID NO: 149249 - RNA, 40 nt, Homo sapiens
gcccggggcagaccaggcagaggccggaccacggaaagac

SEQ ID NO: 149250 - RNA, 75 nt, Homo sapiens
gacagaccaagagagagaccagccccaaacagcccaagacggaggagagcaaacacacacggagaaagcgacggc

SEQ ID NO: 149251 - RNA, 72 nt, Homo sapiens
ccggcacgggcggcgggcccggggacgcgcgggagagacacaggacacccacccgccggggacagacgcgga

SEQ ID NO: 149252 - RNA, 72 nt, Homo sapiens
cccaggcgcccagaccaagggaacgggcccaagcgggggcgagaggaaaaaagagagccaaaggggaaaaaa

SEQ ID NO: 149253 - RNA, 87 nt, Homo sapiens
gcgcccgggggcggcgccaggccggagcgcggcacggagacggcggcagcgcggacaggggcaggccccagaagaagggacacgaga

SEQ ID NO: 149254 - RNA, 66 nt, Homo sapiens
cgacgcccagacccggcaggcaagacggcagccacagggcagcagagagacacagcccgaagaccc

SEQ ID NO: 149255 - RNA, 54 nt, Homo sapiens
gcgcgccggcaaggcagccaacggagaaagggagccgggcagacgcccgaaccg

SEQ ID NO: 149256 - RNA, 51 nt, Homo sapiens
accaagaaccagaaacaggaagcaacaccggagaaagacaccacagggaca

SEQ ID NO: 149257 - RNA, 71 nt, Homo sapiens
aaacacaaccccacagggccagcgcaggaagagcggagagcagccccaaaaccagaaaacaaaggggagag

SEQ ID NO: 149258 - RNA, 99 nt, Homo sapiens
gacaccacgcagacacaacacgggggggagagccacaggcagcggcgagccagccaggggaagcccccccaagaaggggcccgcagcaccacaaccgcg

SEQ ID NO: 149259 - RNA, 33 nt, Homo sapiens
agcaaaaaccggagagcagaggcagggcggacc

SEQ ID NO: 149260 - RNA, 77 nt, Homo sapiens
ccggcagggcaagcggcgacacacgacggaagccgaggccgccagcgccaagaaaaaaacaaggccaaagccagccc

SEQ ID NO: 149261 - RNA, 69 nt, Homo sapiens
aaccggcaggcgcccggacacagaagaggacagaacccgggcggggccggacggggggagaaggaaaag

SEQ ID NO: 149262 - RNA, 66 nt, Homo sapiens
agcggcggccagggaccaacgaagaggaagaaacgccgaaaaaaacccaggagagcccagagaacc

SEQ ID NO: 149263 - RNA, 41 nt, Homo sapiens
gaaaggagaggggaacggccagaagcggaaaaacaagaagg

SEQ ID NO: 149264 - RNA, 72 nt, Homo sapiens
aacaggaaagaccgaccaggacacgagcgggaacgcaaacgaaggccccacaggcagacaaaaagaagcggc

SEQ ID NO: 149265 - RNA, 70 nt, Homo sapiens
cccagcgcacaagaccaaaggaacgggcacaaccacggggcagagaaagggcaacggggagacggacaag

SEQ ID NO: 149266 - RNA, 80 nt, Homo sapiens
accacgacggcgccacaccgagcgcgaggcgcggagagcaacgccgggacagcgcaagggggcccccaaagggaagccaa

SEQ ID NO: 149267 - RNA, 69 nt, Homo sapiens
gccaaccgaggcccccacaccaggaagcaagcagcacgaaaggcgcaaagggaaaaccccccaagaggg

SEQ ID NO: 149268 - RNA, 79 nt, Homo sapiens
ggcggcgcggcagcaagggcggcggggcggcggcggcagcgcaggacagccagcagaacccgaaaaacaaagaagccac

SEQ ID NO: 149269 - RNA, 103 nt, Homo sapiens
cggcgcgcgcggcgcgggacgcgcgcgggcacccacggagccccggggcggcaaaagcagaccggaaaacccaccggcaagaccacacccgaggggagcccag

SEQ ID NO: 149270 - RNA, 84 nt, Homo sapiens
ggaggccgagccgggaccaggcccgggggcggcggccacgccaaggacgggccccgagccccggccccaaagacccaaaacaga

SEQ ID NO: 149271 - RNA, 34 nt, Homo sapiens
cgcgggcgccgcccaggagaaaggagagcagcag

SEQ ID NO: 149272 - RNA, 73 nt, Homo sapiens
gggagagccggcgcaaaaccgaagccaccaggcccgaaaaaggagcaagaggagcccgccagaagaccgggaa

SEQ ID NO: 149273 - RNA, 84 nt, Homo sapiens
cgccgccgccgccgccaccaggaagcggggagaccaggccagggcagcccgcccggaaaccacagcagcccagcacacagaagg

SEQ ID NO: 149274 - RNA, 87 nt, Homo sapiens
cgacaccgcgggggcagaaggcagcagaccccgaacagcagccagaaagacccagagaagcgagaagcagagacaaaggaaccaaaa

SEQ ID NO: 149275 - RNA, 76 nt, Homo sapiens
agagggagccaacccccccacgcgcacgccgggggcgaggagacaaaaaagcccaagcgcaaaggaaaagccaagg

SEQ ID NO: 149276 - RNA, 87 nt, Homo sapiens
cagaacagaaagaagaaaacaagggaggagaagacaagcaaaaagacgggaaacggcaaagcacaaaccacgagaagcaaaaacaga

SEQ ID NO: 149277 - RNA, 75 nt, Homo sapiens
agccaggccacaaacaaacaaccgccgaggaccgcccgccgaggacgaaagaaagaaaacagcccgaacacagga

SEQ ID NO: 149278 - RNA, 75 nt, Homo sapiens
aaccgcggcgcgcggaacggccgcgccgccgcccgggacagcccggagaaacgaaccggcccagaagacaacagg

SEQ ID NO: 149279 - RNA, 72 nt, Homo sapiens
caggcgggaaaagagagcgcccgaaagaagcgaaaacggacagacaaagagggcagcccagagacgaaaaag

SEQ ID NO: 149280 - RNA, 71 nt, Homo sapiens
aaaaaccgaaagagccaggggaaaagcccaaaggaacccaaacaggccacaaagcaaccgaacccagcaag

SEQ ID NO: 149281 - RNA, 66 nt, Homo sapiens
gcgcagaagaagcaccgggggaaagcccacagagaggaccggagccccacaaaggacggcacagcc

SEQ ID NO: 149282 - RNA, 73 nt, Homo sapiens
caacgggcaggcgaacgagggaccaagcacgccagaaaggaaccagccaggaaaggagaggaaacggagaaaa

SEQ ID NO: 149283 - RNA, 71 nt, Homo sapiens
ccagaaggaacgagaacggacccagagaagaaagaaaaagccagcagaggacgacccaggggaggagaagg

SEQ ID NO: 149284 - RNA, 66 nt, Homo sapiens
gcaaaacacaagaagaagagcgccacagcggcaaacaggcagacaggacaggggggacacagccgg

SEQ ID NO: 149285 - RNA, 75 nt, Homo sapiens
gcgccaaagcgagagagggaagcgcccggccggaggcaggggaaaggagacagacccagcacggacccccccccc

SEQ ID NO: 149286 - RNA, 54 nt, Homo sapiens
cagaaagccccggggaacagaaggagaaaggcaaaacggaggaggcagggagag

SEQ ID NO: 149287 - RNA, 35 nt, Homo sapiens
aaaaaccgcacagacgcgccagcagcgcagcgccc

SEQ ID NO: 149288 - RNA, 75 nt, Homo sapiens
gccggcgaccgaggggagagggaacgcagcgaaagcggaacggagcggaaacccaggagcgaaaaagacaacacg

SEQ ID NO: 149289 - RNA, 95 nt, Homo sapiens
gggacccgcccgcccgcgggaggaacaagacgccaaggagacgccgcagagacccccgggagcggagccgcagccccacgagcgcgcgggccccc

SEQ ID NO: 149290 - RNA, 82 nt, Homo sapiens
ggaccggccgagaggaagacgagccgggaggaacggcccggaaacaggaggacccgacaaccccggaacgcgggcaaaaggc

SEQ ID NO: 149291 - RNA, 72 nt, Homo sapiens
gcagaaccccaaaaccagcagaccacagacccacagcgaaagcaacagaaggccaggcaggacgacgcggag

SEQ ID NO: 149292 - RNA, 70 nt, Homo sapiens
gacagggcccgggcacaaaaaccgacgagccaggggccgcaaggccaggcgcgcagaggcacccaacggc

SEQ ID NO: 149293 - RNA, 78 nt, Homo sapiens
ccccggccgcaggagggagaccacagcaagacaccgggaccccggaagccaaaaagaacagcagaccagaggcccagg

SEQ ID NO: 149294 - RNA, 109 nt, Homo sapiens
ccagaaccaccagcaaccaaggacccccaaaaccacaaacgccacgcagaacagccaccaaggaaaacgggacccggccgcaggaaagggaccaaccgagaaagggcgg

SEQ ID NO: 149295 - RNA, 46 nt, Homo sapiens
aaagggccaaagaagggagagaggggaacagaggagcagcggcaga

SEQ ID NO: 149296 - RNA, 75 nt, Homo sapiens
cggaccaggagggcacccccgggacgggacaaacagcaggggccaagaaagaaggagagggggcgacaggacacc

SEQ ID NO: 149297 - RNA, 86 nt, Homo sapiens
gaacgccccccagcccgagcgcgcccgagggcgagaagaagacccggcagcccaaggagcaggggccagcagccgcggaggcacgg

SEQ ID NO: 149298 - RNA, 77 nt, Homo sapiens
cgcgccccccccaggcccgccgcccccgccaagaaccacgcgaggggggagagaccgcagagcagcggccggcacag

SEQ ID NO: 149299 - RNA, 82 nt, Homo sapiens
gcgggccggccgcggcggagggaaaaaggaagaggagaaggaaagcccgaacccgcagaagggaggcggagaagagaggaac

SEQ ID NO: 149300 - RNA, 51 nt, Homo sapiens
cagaaccgcggaaacaacgccgcaagaccgggaacaccaccaggagggccg

SEQ ID NO: 149301 - RNA, 92 nt, Homo sapiens
ggccgcggcggagggaaaaaggaagaggagaaggaaagcccgaacccgcaggggagaagcagaccgcaccaggcgggaccccgaaaaagccc

SEQ ID NO: 149302 - RNA, 69 nt, Homo sapiens
ccaagccggacaagaagaaaaaagaaacacgaaaaaagccgcaaaaagaggaaaacggacgagaacaag

SEQ ID NO: 149303 - RNA, 74 nt, Homo sapiens
accagaacaacacagaccagaagaggggcccaggagggccagaacccagcaaaagcaaaaaccagagcaaccca

SEQ ID NO: 149304 - RNA, 80 nt, Homo sapiens
cgacaggcagagccgcaacccgggcgccacccagcccagcaagagcaccggggcggcagcagggggagcccagagagagg

SEQ ID NO: 149305 - RNA, 62 nt, Homo sapiens
cgagagaacgagcacccccgaagcacccaggcaacagcaagagaaaagcccacagaagaggg

SEQ ID NO: 149306 - RNA, 74 nt, Homo sapiens
ccgaaaacccgacccccaggcggcgcccagacccacacccagcaaaccgcaacccaccaaggagcacaggacga

SEQ ID NO: 149307 - RNA, 68 nt, Homo sapiens
gagggggccggcgcccgcggcagggggcagcacgccgaaggagagaccagacaacaggccagggaagg

SEQ ID NO: 149308 - RNA, 63 nt, Homo sapiens
gcaagacagcggcaccggcgggcaggcacggcagggcaggggaccggccggcagacagaaaac

SEQ ID NO: 149309 - RNA, 77 nt, Homo sapiens
acgagggcggcggaaaaagccgccacacgccaaagcccccggcccgagaagcggcccccgaaaacagcaccgcagag

SEQ ID NO: 149310 - RNA, 72 nt, Homo sapiens
ggggccaagaaccgcaaggcacccgaagacagggcaggggagggaaccgcagagacgggacgccacagaccc

SEQ ID NO: 149311 - RNA, 74 nt, Homo sapiens
gacaaacaggggaaacagaccgacagacgggaaaccacaccaccacgaaggacagagcaggccccggagcggca

SEQ ID NO: 149312 - RNA, 74 nt, Homo sapiens
gaccgcaggccacaaccggccaacccccacccgcgcagagaagggaccggcccggacggaggaaccaaccgggc

SEQ ID NO: 149313 - RNA, 79 nt, Homo sapiens
cgccgccgcccaggcccgaagcgcggacgcggacgagaaagggcgcaaaaagaaagaaaacaaaagccagccaaaaaca

SEQ ID NO: 149314 - RNA, 75 nt, Homo sapiens
cagcgcaggaaacaaaacaccagcaagcgaggcaaaacccccaagcccccggagcgcagcacacaaagaaccaag

SEQ ID NO: 149315 - RNA, 52 nt, Homo sapiens
agggccaaagaagggagagagaggagcggaggagccccaggaaggcgccaaa

SEQ ID NO: 149316 - RNA, 72 nt, Homo sapiens
ccaaacggaaggaacggaggcgggacagaggaaaaccagcaggaaaaagacacaccagagccagacaagcag

SEQ ID NO: 149317 - RNA, 71 nt, Homo sapiens
gggcccaaaggacagcccagggcaaggccagagaaggcgggagaaagacacgaaccacagaacgcaacagg

SEQ ID NO: 149318 - RNA, 77 nt, Homo sapiens
ccaaaaggggaacagagaaacaacaggccgagcaaggagagaacgcgagggaaggcaccgcggaaccgagcagcagg

SEQ ID NO: 149319 - RNA, 73 nt, Homo sapiens
agaaggaccaagaaccaggggagaagcagaccgcaccaggcgggaccccgaaaaagcccaaacagacaggcac

SEQ ID NO: 149320 - RNA, 74 nt, Homo sapiens
ccaaaacagggagggccccgacagcggaaccaacaagggcaaacaagggagccagaacccacaggagggccaga

SEQ ID NO: 149321 - RNA, 64 nt, Homo sapiens
cccaacggcgggccccggcgaggcagcgcggccgcagcagccccaaaccaggggacagggaaag

SEQ ID NO: 149322 - RNA, 86 nt, Homo sapiens
ccagaaccaccgggcagcggagacggcgaaaaccaaagaagaaaagcaccccaagagacgagacaaagcagggcgagccaaagccc

SEQ ID NO: 149323 - RNA, 66 nt, Homo sapiens
gaacaaacgagcacgcaacaacggggcggcacacaaggagcgaagggcagggagaacgccaggcac

SEQ ID NO: 149324 - RNA, 80 nt, Homo sapiens
agggaagcgcagaaagcaggcgaacccgcggcgcaaaacggggaacccaccgagggcgaaagaccggaaaaggagagcca

SEQ ID NO: 149325 - RNA, 60 nt, Homo sapiens
gggccaggcacacggggagacgcacgaccagaaacaccccggaggcccgacagagaccga

SEQ ID NO: 149326 - RNA, 61 nt, Homo sapiens
cggcggagcaccgccccggcagaagcggcagcaaaggccaacacgcccgggaggaagcgcc

SEQ ID NO: 149327 - RNA, 81 nt, Homo sapiens
gaaggagcagcccaggaccgagaccggagcagccggggcggagcggagggcaggaagcacaggaacaaaggggccagccca

SEQ ID NO: 149328 - RNA, 82 nt, Homo sapiens
cgcccaggagggagggacacagccccaaacaggacgaaggcggcgaagagacgcgaggaagagaaaagacaagaagcaaaag

SEQ ID NO: 149329 - RNA, 55 nt, Homo sapiens
aggcacacaccaccagggcagaccaagacacaggggagacagaagacaacaagga

SEQ ID NO: 149330 - RNA, 79 nt, Homo sapiens
ccccccccaacccggcaccccacagcccagggaaggcaccaaaagggggggcaggaaagggggaggcccggaacacggg

SEQ ID NO: 149331 - RNA, 75 nt, Homo sapiens
cagcaaccaagaacccacaagaagggaaaagcagcgcgggaaagcaacaaaacgaagccgcaaaaccacgggaaa

SEQ ID NO: 149332 - RNA, 80 nt, Homo sapiens
ggagaaaagaacaacaacgggcaaaagaagacaaggaacagaacaacgggaacggagccccccgcacaggacaaccacca

SEQ ID NO: 149333 - RNA, 53 nt, Homo sapiens
gcggagcagaggcgccgcgagcggagaccaccgggggccgagggaggaccggg

SEQ ID NO: 149334 - RNA, 72 nt, Homo sapiens
aaaaagaagagagagacacggacaagaacagaaaacagcggagcaagagcaccgaaagaagcacaaagaaag

SEQ ID NO: 149335 - RNA, 76 nt, Homo sapiens
gggcgccccccacacaaggacaggaccgcaagcccgcagggacgaggccccaaggccaagcaccagaaggccaaca

SEQ ID NO: 149336 - RNA, 74 nt, Homo sapiens
accgagccagggagaaacgccggaccgaacacgcccccgacgaccagagagacccggccccagcccacgagggc

SEQ ID NO: 149337 - RNA, 78 nt, Homo sapiens
gagagccagccgaaggccaagacccggaggaaggcgggggagaaggagaggaacaggaagaggccgaccacggggcca

SEQ ID NO: 149338 - RNA, 75 nt, Homo sapiens
ggaagcaagacgcgaagccacccagcgccggagccaaccgccgaaaaaaggacaaagcgaggcgaccgagaaagg

SEQ ID NO: 149339 - RNA, 58 nt, Homo sapiens
gaagagaacccacaaagaagaaaacacccaggggccaagccagggaagggcggaaccc

SEQ ID NO: 149340 - RNA, 98 nt, Homo sapiens
gacggccccggaggagagccgccggggaaaacacagggaaaagaggcaaacggaaagcacccaagcgcagaacagccgagaggaaaaggcaaccccca

SEQ ID NO: 149341 - RNA, 54 nt, Homo sapiens
gccacggaggccagccccaacacccggacaccagaggaccagaacccacgagaa

SEQ ID NO: 149342 - RNA, 86 nt, Homo sapiens
gcgccggacggaacgaggaaggcccgggacgcacaccgagacgaacacagaacagcacgaccagaggggaagccaagcaaacgcag

SEQ ID NO: 149343 - RNA, 78 nt, Homo sapiens
cgggcccggggacacgcgcgggcgggagcggcccacgacgggacacgccccggaggggggagcccggcccagcccccc

SEQ ID NO: 149344 - RNA, 90 nt, Homo sapiens
ccaccagcgaccccagccggaagccgcggacagccgggccgaacgcggaaagccagcgggagcccccgaccccaggagggcaagaccaag

SEQ ID NO: 149345 - RNA, 60 nt, Homo sapiens
cgcgacggcgcgcggcgcgaggagccgcccagcaaaacccaacgggaacccgccggaaaa

SEQ ID NO: 149346 - RNA, 76 nt, Homo sapiens
ccccgaagagggggacacgacccggagcacccgaccccgagggccggaggacgcggggaaccagaccgggccagac

SEQ ID NO: 149347 - RNA, 78 nt, Homo sapiens
gcgggggagggcggagcggcgcggccccagcccccgggggggcccgaggcccggacaagcagagccgacccaacggga

SEQ ID NO: 149348 - RNA, 54 nt, Homo sapiens
ccacccggcgccgcggcccaaaagacggcaaacagaagggcgcaggaaaaggcg

SEQ ID NO: 149349 - RNA, 60 nt, Homo sapiens
gcgggggggcagcagaagcccagagcccagacgcagcccaggaccacaagccagaaaaca

SEQ ID NO: 149350 - RNA, 83 nt, Homo sapiens
gcaacggaggcaaggcgaaaaacaacgccgcagggaagaaggagaaagggccaaccccgaagaagcaaacagaaacgaaggag

SEQ ID NO: 149351 - RNA, 82 nt, Homo sapiens
aaggagggcaggcaaacggccggggcgacgggggccagaaacccagaagccagaagaacagaacaggaagcacacgaagcag

SEQ ID NO: 149352 - RNA, 81 nt, Homo sapiens
ggccggacgcaacgcggcgggcgagacgccagagaaagacaagagcaccacagcaaaacccaaaaagaacgaaggaggagc

SEQ ID NO: 149353 - RNA, 75 nt, Homo sapiens
cgcccagacaccaggagagcgggggagcaggcaggcagggcggagggagaagaggccaggagagggagcagggag

SEQ ID NO: 149354 - RNA, 77 nt, Homo sapiens
cccccccccaagcgcaggccacgcaagcccacagggacacaaagcgcgggaaagaaccccgcacccggaacaccagc

SEQ ID NO: 149355 - RNA, 80 nt, Homo sapiens
caagccaccaccgccgggaaagaaggcgccaccaaccagccaagagaacagggaagaggacaggggcggccgaggcagga

SEQ ID NO: 149356 - RNA, 59 nt, Homo sapiens
cgagcgagggggggcgcgccggaaaccggagcgcgcagcagcaagacagacggcgccaa

SEQ ID NO: 149357 - RNA, 81 nt, Homo sapiens
gaggacgaggcggcggccgcggggaggaggagggggcaaccagaggggccaacggacgacaggcgggacaggaccccaaaa

SEQ ID NO: 149358 - RNA, 79 nt, Homo sapiens
gggggagcagaacacgaccgcagccaccccgggacgaggacaggagaaacaacgacacgccaaaaccggccgggccaaa

SEQ ID NO: 149359 - RNA, 83 nt, Homo sapiens
gagaagcagccacgaggcgggccaaccgccccccagcagcaggcacgggcgaaccccgagccccgccccacgcccgccggggc

SEQ ID NO: 149360 - RNA, 81 nt, Homo sapiens
aagagccgggcagcccggagcgggccagccacgaaccgacggggaccccaagaggaaggaaccggagacgcagccagcaga

SEQ ID NO: 149361 - RNA, 73 nt, Homo sapiens
cgggaacacgaagacagcaacggcaggaccaggacccaagggaagacaaaggccaacagagcgaacaaaggca

SEQ ID NO: 149362 - RNA, 72 nt, Homo sapiens
gggaaaagcagcgccccagaaagggccaaggagacggaagaagccaagaagaagcaagaaaacagaagcaga

SEQ ID NO: 149363 - RNA, 77 nt, Homo sapiens
caaaggaggaaacaccaccagaaaagggagcccaccacgaaagcagcaacagggcgcgccagagcaaaaggcacaca

SEQ ID NO: 149364 - RNA, 80 nt, Homo sapiens
acaacaagcacaaacacagcccacaggagcagaacggggagcaaaacaacaaccagccaaacagaacaaaggaagaggaa

SEQ ID NO: 149365 - RNA, 78 nt, Homo sapiens
gcggagcaaaaaaagagcccgcaagaagaacagagacagcagccaaacccccagggggagagcccaacaagcgagaaa

SEQ ID NO: 149366 - RNA, 79 nt, Homo sapiens
ggacacccagccacacgcggagaagaggaggacgggaagcacaaagacacacaaaagaaaccggaggggacggggaaag

SEQ ID NO: 149367 - RNA, 72 nt, Homo sapiens
acgggccaagagcaggacagcacgagcagacagacaagaagaagagacaggaagaaggcggcccaaacaaaa

SEQ ID NO: 149368 - RNA, 75 nt, Homo sapiens
cggaggaggaggagaggagaggaccgagaagacagggacagagaaacaggcgccaaacgacagagaccccaccac

SEQ ID NO: 149369 - RNA, 74 nt, Homo sapiens
ccgcccggaccgcgcagaaccagggcggcggccagcgccacgcggaacccagaaccgcggaccacagcaaacca

SEQ ID NO: 149370 - RNA, 75 nt, Homo sapiens
ccgacagggacacagggagccccagacccacagcgagagaggaacgaggggcacagaaaccagaaaaacggagcg

SEQ ID NO: 149371 - RNA, 76 nt, Homo sapiens
gaggaggccgaggccgggaggccggcccggagggggcgaggaagagacaggcgggggagaagaagcagggccaaac

SEQ ID NO: 149372 - RNA, 49 nt, Homo sapiens
cgcagggcgcccccgacaaacagggggaaagagcaagaagaccgcacac

SEQ ID NO: 149373 - RNA, 73 nt, Homo sapiens
agccgcaaccggaccggcgagcaaacaggaccagaagccaaagaggcgagggcccgcaaacaaggccccaaga

SEQ ID NO: 149374 - RNA, 80 nt, Homo sapiens
gccccccgagccacaaacagaacaccagcaggaaaaaagagcggcagaaggccaaacggccgagcaggcgagcgaagaga

SEQ ID NO: 149375 - RNA, 61 nt, Homo sapiens
caaaacaccagaaccaaccgaacagccacaggaagagggaacaaagaaggaaacaggagaa

SEQ ID NO: 149376 - RNA, 70 nt, Homo sapiens
agaaggaaccgggggaaagggaagcaaccaggggaaaagaagaacaccacagagaaccccgaaaggaaaa

SEQ ID NO: 149377 - RNA, 60 nt, Homo sapiens
agacggaaacaaggcaacagaaagagcaacagcagggcaacaggggggcaagagcagacg

SEQ ID NO: 149378 - RNA, 64 nt, Homo sapiens
agaaaggacagggagagaagccaagaaagacagaccacaacaagaaaggggcccccgaaggaaa

SEQ ID NO: 149379 - RNA, 88 nt, Homo sapiens
cccagcagccccgcagcggcgccgaggacaggcagccgaggcgcccccgcgcgaggacaagcccaaccagggaccaggccaaaaccag

SEQ ID NO: 149380 - RNA, 80 nt, Homo sapiens
aacagaagaagacgaggcgaaggccgaaccccggagccgacgaagaggcagagaccccggagcaacgaccccgcaaagcc

SEQ ID NO: 149381 - RNA, 72 nt, Homo sapiens
gcggcgcgcaggacccagacccccccccgagaccggaagagaaagagcaggccaacacgcggcaccagagag

SEQ ID NO: 149382 - RNA, 78 nt, Homo sapiens
agggggaaggaagcaggcccaggcgaacagaacagccgggaaacgccaggaacggccaacggccaaacccgaccggag

SEQ ID NO: 149383 - RNA, 72 nt, Homo sapiens
agagagaagaacaccgaaaccagaagggcgaaagagcaagaagaaagaagccaagaaggaacgaagcaagac

SEQ ID NO: 149384 - RNA, 81 nt, Homo sapiens
cccgcacacgaagagacgccgggcaccccaacacgggaccaggaggcaaaagaaacaaaagaacagaaggacagacccaga

SEQ ID NO: 149385 - RNA, 67 nt, Homo sapiens
cggcagcaagaacagagagagaggggacagacgagagaacgaggaaccagcagcacaaacacggggg

SEQ ID NO: 149386 - RNA, 75 nt, Homo sapiens
gccacccacggaccagcagcgccgagggaaacccggagaccaaaccgccacaacagcagccagaccccgagccgg

SEQ ID NO: 149387 - RNA, 72 nt, Homo sapiens
aacacaaggggaagccggggccgcccagacgaaggagcaagggcaacacccggagagaagagccgcaaccaa

SEQ ID NO: 149388 - RNA, 51 nt, Homo sapiens
gccgccccgcgggggacggaccaagggggaggaacaggcgcaaagaccccg

SEQ ID NO: 149389 - RNA, 70 nt, Homo sapiens
gcaccaagccaggaggccaccaacccccgcggccggcacccccgaaggaccagcccgcccccgccccggc

SEQ ID NO: 149390 - RNA, 52 nt, Homo sapiens
aaggaagaagccagcgagcggggcgcgcggcccaaccccacaaacgggcgcc

SEQ ID NO: 149391 - RNA, 73 nt, Homo sapiens
gcagagcagcgaagaggccaagacaccacggcaagaaagaggccacgccgggccagaaaaggggaagaaagac

SEQ ID NO: 149392 - RNA, 83 nt, Homo sapiens
cggaagaaaaaagcagccggggccccgagaagaaagacccaggcaaagacacaccagaacacagcagcggagcagcgccccag

SEQ ID NO: 149393 - RNA, 78 nt, Homo sapiens
gagcaagagggaccccagaaacgaccgcaaaggcacccggggcagaccggaccaagcgggaccagcaccgccgaaggg

SEQ ID NO: 149394 - RNA, 80 nt, Homo sapiens
cccacaaagaccagaagcaacgcgacacagcaaaggcgaaaggaagaagacggcacgggacccccagcacaggcagcagg

SEQ ID NO: 149395 - RNA, 74 nt, Homo sapiens
caacaggacgaagagaacgcccgggaccgagcacccgccccgggcaccaacagcaacaccgccggaaccggacg

SEQ ID NO: 149396 - RNA, 77 nt, Homo sapiens
agcgcggagcgcggagccaccgggcaccaaagggaccgcagcgccccgccccaggagcaggccacagaacaggacac

SEQ ID NO: 149397 - RNA, 78 nt, Homo sapiens
ccgcgcgggagacccgagggagccacgaaaacaacacacggagagacaagagcaacaacaggacgacgcggagagcaa

SEQ ID NO: 149398 - RNA, 85 nt, Homo sapiens
ccgaacgcagggagcgccgcggagaggggccggcgcccggcggggacgcagaacccaggagaaacgagagggacagcaaggaaga

SEQ ID NO: 149399 - RNA, 72 nt, Homo sapiens
cgacccagccaaagacagccaccgagcgacagggaccaccagaggagccgcccagcaaaacccaacgggaac

SEQ ID NO: 149400 - RNA, 64 nt, Homo sapiens
acgccgcccggcccagggcagcgccagagcacaggagaaagacagcaaagaaaaggagaagaaa

SEQ ID NO: 149401 - RNA, 60 nt, Homo sapiens
gccaccagcccaacaccaccgggaagcagcagaccagccacgaagaccgggcgccagggc

SEQ ID NO: 149402 - RNA, 80 nt, Homo sapiens
gcggagggaggacaaggagcggaggcacggaggaggaagcgacaagaagcagagccagcacgccgggacaacccaagaag

SEQ ID NO: 149403 - RNA, 78 nt, Homo sapiens
ggacccggagccacccacaggacccgccaccaaaggggagagaagagaagagccccgaggcgccaagaaaacacagaa

SEQ ID NO: 149404 - RNA, 79 nt, Homo sapiens
ccaagaagaccacagagggacccggacaaccagaggcagccagcagggggagcacacgaccgcgagagggcgaagaacg

SEQ ID NO: 149405 - RNA, 90 nt, Homo sapiens
ggccaccaggaggccagggggcgccaggcggccgggcaaagggcagcacccggaagaggacgaccaaggaccccagaaccccaagaaaca

SEQ ID NO: 149406 - RNA, 79 nt, Homo sapiens
agaaggccaaccgcacagacagccaacaaacaccaagcggaggcacaaagagagacggaacgcagaaagaccacaaggg

SEQ ID NO: 149407 - RNA, 80 nt, Homo sapiens
aagaaaggcgcagccgcaagaggggcacacgcccgcacgagcagcggagaaggcagccggcacccgcacaacccaggggg

SEQ ID NO: 149408 - RNA, 60 nt, Homo sapiens
aagcccgccagaaccgaggggcccccaggaccaacccgaggcagggccacacccagcaca

SEQ ID NO: 149409 - RNA, 78 nt, Homo sapiens
cgagcggcagaccgaccaccccccaggggcccgaggcagccgggagacagccccccaggaaccgcgccgcgagaaaca

SEQ ID NO: 149410 - RNA, 73 nt, Homo sapiens
gccgccggacagcgcagagccaagacggagaaacaagggacaccggagggaacggcaccggaagaaaccacca

SEQ ID NO: 149411 - RNA, 72 nt, Homo sapiens
agccgacgcggggcagcgccgcaccgaggcagcccgcggcaccgggggacagacggccggggcaaccggcga

SEQ ID NO: 149412 - RNA, 78 nt, Homo sapiens
gccccggagaaccacccggaggagacggggcagacaacggagcccgggaagagagaagaagcaaaccgggaccggaag

SEQ ID NO: 149413 - RNA, 75 nt, Homo sapiens
cgccaagggggcgagagccaccggaaggccgcgggggaaggaggacgcagagagggcacacggggcgaaggagaa

SEQ ID NO: 149414 - RNA, 70 nt, Homo sapiens
ccccgcagggacgaaggggaacgggaaaggaacaacgggcaagaaagaggcacaggacgagacacaacag

SEQ ID NO: 149415 - RNA, 82 nt, Homo sapiens
gcggggccccaagccaaagaagaggaaagagcccggaagacgcggcgccggaggcaaagggagaagccggacgggaggccgc

SEQ ID NO: 149416 - RNA, 79 nt, Homo sapiens
aaaggaagagagcacgcagccaggaaaccacgagaaccgagcgaagcgccaggaacacaagaaaaaagcgagccggaag

SEQ ID NO: 149417 - RNA, 78 nt, Homo sapiens
cccccggaagggcaccgcgacgacaccccggggaggcgaggagagagaccaggcccgcaagccaaggaacaagaacgg

SEQ ID NO: 149418 - RNA, 90 nt, Homo sapiens
cgcccgggcgagcccgcggggacgccgccggccagcagagcgaggcacccgccggcgccccccggcacaacccgcgggcaccagccccgg

SEQ ID NO: 149419 - RNA, 69 nt, Homo sapiens
gaaccgggggaaaaggacaccgaaccggaacagagcggacggccaaggaggaggagcgcagcacccagg

SEQ ID NO: 149420 - RNA, 84 nt, Homo sapiens
ccgccccgccccgccccagcgcccgccgcaaggcgggggaggcggcggcccagccacgaggaaaaagcaaaagggcccaaggcc

SEQ ID NO: 149421 - RNA, 59 nt, Homo sapiens
gcaaacagggcgcggagaaaacccagcgcacagggacagaaaggcagaagcaaacccac

SEQ ID NO: 149422 - RNA, 76 nt, Homo sapiens
acagccgacacccccagacgggcagcaacgcacagcacgacccacccgggaaagaaaacaagccacccagacaaga

SEQ ID NO: 149423 - RNA, 72 nt, Homo sapiens
cggacgggaaacaaaagagcgcgcaagaacagcacagacagggccagcggagcgaagccacagaacaaaaac

SEQ ID NO: 149424 - RNA, 53 nt, Homo sapiens
gagacaaggaccgaaacagaaacggaacaccaaggcacgacgccccacgggag

SEQ ID NO: 149425 - RNA, 78 nt, Homo sapiens
acccccggccgaagccggagaaaagacccggccgaggacaaggcgagggaaaccaacacaagacggcagccaaagaaa

SEQ ID NO: 149426 - RNA, 59 nt, Homo sapiens
acacaacaccaaagggcacagaagcgcgaaagccgccacagaaaaccccagagccagga

SEQ ID NO: 149427 - RNA, 87 nt, Homo sapiens
ggcgcgcggacgcgggcggcgcgggggagcgcgaggaggcgcaggagacgaccgcaacggcagggggcccgggcagagggaaagcag

SEQ ID NO: 149428 - RNA, 77 nt, Homo sapiens
agcagaacaggccagcccgagacgcgccagcacaccccgaccgcgccagaccgcacagagaggagcaccgggcccag

SEQ ID NO: 149429 - RNA, 73 nt, Homo sapiens
aaccaccccgacacaacaccaccaacggcccgagcacacgcaagagaccacaggcagcccccgggaaggccca

SEQ ID NO: 149430 - RNA, 61 nt, Homo sapiens
ccaaagaagggagagagggaaccgggcccaaacaaaagggggaccgacagacccaaccgac

SEQ ID NO: 149431 - RNA, 57 nt, Homo sapiens
cggccccagcgcaggaaggggagccgcacgaccgagggcagaggcaacccggaggac

SEQ ID NO: 149432 - RNA, 74 nt, Homo sapiens
gcacagccgccgcccagccgccacgccgcgaacaagcgaaagcggaaccaagcagggagccgaggccggaagaa

SEQ ID NO: 149433 - RNA, 64 nt, Homo sapiens
accaccccaaaagcaccggccccgcacagcaaaccaggccggagcgcgaagacgcagggaaagc

SEQ ID NO: 149434 - RNA, 84 nt, Homo sapiens
gggccacccgcccgcgacacacgaagcgggaggcaaaggcacaagcgccccagaggacacacgccaagccaccaggagagaacg

SEQ ID NO: 149435 - RNA, 80 nt, Homo sapiens
agagggcccgccggcggccgcggcccgcccagcacggacagccgagcagagaccacaagaaccaggagagacccagagcc

SEQ ID NO: 149436 - RNA, 76 nt, Homo sapiens
agggccccgagccagagcccagcagccgagggcgggccgaggcggaaagggggaaaaccagaaccaagcaggacaa

SEQ ID NO: 149437 - RNA, 62 nt, Homo sapiens
ccgggcgcagacggcgagaccccgcacaggcggcacacacacaagccgcaccaggccgcacg

SEQ ID NO: 149438 - RNA, 58 nt, Homo sapiens
aagaccaaaacccacggaagccgcagcagccagaggagagcggagcgaagaggggagg

SEQ ID NO: 149439 - RNA, 74 nt, Homo sapiens
agagaaaaaaagaagaagagcaaaggacacaagggagaagcaaaaagcgacggaaacgcggcccacccgacaaa

SEQ ID NO: 149440 - RNA, 73 nt, Homo sapiens
cagcagggcgccgcccaaggaacccgagacaagaccagccagcggccccgagaaacccaagaacagaccgcca

SEQ ID NO: 149441 - RNA, 105 nt, Homo sapiens
ccagaggggacgaacggacgccgcacccacccgaacagcaaccgccgaagaaaagaaaccggaaggcgaaacagcgcgccgaagagcggaaacaccgcggaagaa

SEQ ID NO: 149442 - RNA, 81 nt, Homo sapiens
cgggacccggccccggcccacaggggggggcaaacccgagagaacgggcagcagacgacaggacggcagagccccaagaaa

SEQ ID NO: 149443 - RNA, 60 nt, Homo sapiens
aggccagaaggacagaaacgggaaccagggacgaacagcggggacgccccagcagaccgc

SEQ ID NO: 149444 - RNA, 71 nt, Homo sapiens
cacagcacgcagggccgggagaaaaaccgccgcgcagggaccacgggagaaaaaggcgcacagcacccgga

SEQ ID NO: 149445 - RNA, 74 nt, Homo sapiens
cagcaggcaacggggaaaaaccccagccacccaagaagcgccacacagcccaaaaggaagcgagaaaagaagaa

SEQ ID NO: 149446 - RNA, 86 nt, Homo sapiens
aaacgcgcggccacacagcgccgcggggcccaggccgggagccgaccggcacagcaggacagaccgaaaagcaacaacaacggaga

SEQ ID NO: 149447 - RNA, 78 nt, Homo sapiens
caagaccggccacgcaacccacccccgggcaaggaccgcccagcccccaggggagaagaaaggagcggcagggaagcc

SEQ ID NO: 149448 - RNA, 73 nt, Homo sapiens
acgccagccccacaacaagccgaagaacacaaggaggcgagagaaagaagccccgggcacagcagcaggaccc

SEQ ID NO: 149449 - RNA, 71 nt, Homo sapiens
ccgcggcagcggcgcccgagcggcagaccgaccaccccccagaaacgccaagggaccacggaacagcgcaa

SEQ ID NO: 149450 - RNA, 78 nt, Homo sapiens
cagcccagcacacgggaggcaaacgaaaaccggaacagcagcacagcaaaggcccaggaggcaagagcgagaagagcg

SEQ ID NO: 149451 - RNA, 84 nt, Homo sapiens
aaacccgggacggccacggcaacaaaccagccagcacgggggcccagccagccagcagcgaggggggacggaggcggcacgggg

SEQ ID NO: 149452 - RNA, 77 nt, Homo sapiens
ccggggcccgaccgcagcgcgcagcgcgcacagaaaaagcgaacagacagacgagaacccgccacagcacacgaaaa

SEQ ID NO: 149453 - RNA, 89 nt, Homo sapiens
gcagagacacgcccgggcggggagggcagccgggcccgcccaggccgacgggcaagagcgaaggagaaaggcaacaaggcccgagcggg

SEQ ID NO: 149454 - RNA, 103 nt, Homo sapiens
gaacaaagcagaaaacgcggcaaagaaaacaggaagagcagacccgaaagcaaaggaaacgggcaaagacaaccccacgcggcgcggcgagaaccggggggcc

SEQ ID NO: 149455 - RNA, 89 nt, Homo sapiens
cccggaaggcacagccccagcagcggcagaagaagcaacacgcaaacgagagcgaggcaagaaaaacagaagaggaagccaggaagggg

SEQ ID NO: 149456 - RNA, 85 nt, Homo sapiens
agaccagggcccacgaagacgaaaccacggccccggccccaacaggcccgcgcccagagccccgcagggggacaacccacggcac

SEQ ID NO: 149457 - RNA, 75 nt, Homo sapiens
ggaccccggcccggcagaaggccgaaggaagcacccaagagaggaagcaccgccgggacaccaagaacaggcagg

SEQ ID NO: 149458 - RNA, 68 nt, Homo sapiens
ggggaccagccaaggcgcgaaaaagcaaacgccagcagaccacacccagacacagcccccaggcccca

SEQ ID NO: 149459 - RNA, 50 nt, Homo sapiens
aaggcacgccagacgcgagacgacgggaccgaaggaccccgccagagaca

SEQ ID NO: 149460 - RNA, 82 nt, Homo sapiens
cggagcagagccggagccagagccaaaggccaggacagaaacgccgagagccaggacacggccaaggccggcgagaacgccc

SEQ ID NO: 149461 - RNA, 41 nt, Homo sapiens
gaacaagggacaccaaacaccagaggggaggaaggaaccgg

SEQ ID NO: 149462 - RNA, 74 nt, Homo sapiens
aaagcggacacccgcccgccgacaaaaggccagaaggccaccaaagaggaccccagcaacccgaggaggcgccg

SEQ ID NO: 149463 - RNA, 85 nt, Homo sapiens
gaggagcccgcgcggcgcggagagagacaagagccgccagagcgcggccgccaaggggaagcaagcaggaccaccgacagaccaa

SEQ ID NO: 149464 - RNA, 74 nt, Homo sapiens
ccagcgccaggcgaggcggacgcgcccaggcgaggcaggagaccgcaacgacccacccgagccacccacgacag

SEQ ID NO: 149465 - RNA, 80 nt, Homo sapiens
aaaagagaaaagagaaaaggagaaggaaaagggaaggacaaggaaacaaacacaaacgggcaccgccgggacccgagagg

SEQ ID NO: 149466 - RNA, 73 nt, Homo sapiens
cagggcagggggccagccggaccagcaccccaccacgacacgggaggacgacaccaaggaccccgcacagagc

SEQ ID NO: 149467 - RNA, 75 nt, Homo sapiens
ggacaagacaagcacggagccggacaggacaagaggcagggcccccagaccgcagaaaccgaagcgaaagacggc

SEQ ID NO: 149468 - RNA, 81 nt, Homo sapiens
caaccccaagcaccacaaaaaccacgagagcccgcccaacaaacagaggacaggagccagaaaaggagaccaggaggcaag

SEQ ID NO: 149469 - RNA, 86 nt, Homo sapiens
ccgccccggaccggccgagcggacgccaggaggggcgcgaaggcggagacgcccgccgagcgcccagcgccagggagccaccccag

SEQ ID NO: 149470 - RNA, 61 nt, Homo sapiens
ggcgccaccagcccggagggaagccccgcccacggcccccaccaccaccagcgcaccccgc

SEQ ID NO: 149471 - RNA, 80 nt, Homo sapiens
caaacgcaggggcgggccagggaaacccccacagcacccccccgaccacaaagcacccgcaacacacagcccgaccccac

SEQ ID NO: 149472 - RNA, 72 nt, Homo sapiens
gaaaggagacccaccaagccaggaaacggacccgagcggggaccgagaaagacccccgaggaaccacgcaga

SEQ ID NO: 149473 - RNA, 38 nt, Homo sapiens
ggccgagcaggcgagcgaacgacggcggccccgcgagc

SEQ ID NO: 149474 - RNA, 84 nt, Homo sapiens
ccgagacccccagcgcgccggaggagaacaagagcccgagcaaccaaccagggcacccagccggaggggggacacccccggggg

SEQ ID NO: 149475 - RNA, 78 nt, Homo sapiens
caccaaccccgcacaacccgagagaggaagaggaggaggaggagaggaagcagggcgggaagcggggaaaggaaaaca

SEQ ID NO: 149476 - RNA, 74 nt, Homo sapiens
agcgcggaagaagcaggaggcaagaaaggggaaccccggagaaaaggccaagaaggcagaggagcagcaagagg

SEQ ID NO: 149477 - RNA, 80 nt, Homo sapiens
aggggaacagacgcagggcagggccccgcccggcggggaagggcccaggcaccacaaccaggggccagaggcgaggcgcc

SEQ ID NO: 149478 - RNA, 79 nt, Homo sapiens
agccggcccgcccggagggaaaggccgcaaggagaacgcagaaagccaacaggcagaccagagacagcgccacgcaccc

SEQ ID NO: 149479 - RNA, 74 nt, Homo sapiens
gggcggccccgaggaagcaaggccgcggggggagaccccaccaccgagccccacagccgaaacccacgggcgcc

SEQ ID NO: 149480 - RNA, 91 nt, Homo sapiens
cgaagcaaaggaacgcgccggaagaaaaggccggcgccagagagccaggagaacacaggagggagacgcacacgacacggaaaagaaaaga

SEQ ID NO: 149481 - RNA, 68 nt, Homo sapiens
acccagacccgcccgccagaaccgcgcgccacccacaaccagagagcagcaccagcagaagagggccc

SEQ ID NO: 149482 - RNA, 69 nt, Homo sapiens
ccacgcagaacccgggagaggagaccagaacgaacccccccccccgaaggccgcgggaaaggcaaaacc

SEQ ID NO: 149483 - RNA, 52 nt, Homo sapiens
ggagcacagaagagcgaggaggacaaaggccacaagagacacaacggaaagc

SEQ ID NO: 149484 - RNA, 68 nt, Homo sapiens
cgcccaaaaaagagcaggaaacgaaggaaacgagcgagagagaagagggcacaggggcgacagaagga

SEQ ID NO: 149485 - RNA, 58 nt, Homo sapiens
ggacgcaggccaaacaaaacgaacgaaaacaaacggaagagagggcagcaagaaagaa

SEQ ID NO: 149486 - RNA, 80 nt, Homo sapiens
caaggcaacagaaagagcaacagcagggcaacaggagcaaaggcagaagcacggaaagaaaggagaaaccaaaggaccgg

SEQ ID NO: 149487 - RNA, 55 nt, Homo sapiens
cgcacccggggacaagcgcgggaacggcgcggaaggaaggagggccccggagcag

SEQ ID NO: 149488 - RNA, 76 nt, Homo sapiens
agccagcaacacccaagacacaagggcgacaccagaaagcgcgcgaccggggggagagacgaagcccgacacggcc

SEQ ID NO: 149489 - RNA, 91 nt, Homo sapiens
cccgcggcgcgcccgacggggcggccgggggccagagaccaaggcgcgcccggcgggccggaccaagacgcccagcggcagcaggagaggc

SEQ ID NO: 149490 - RNA, 44 nt, Homo sapiens
caccgcgcccccgcggccgcccgcgcacagccaggaaaagcggc

SEQ ID NO: 149491 - RNA, 60 nt, Homo sapiens
gggagcgaggaaccagaacgaaaagcgccagaaagacaagggaggcgaggacggacaaaa

SEQ ID NO: 149492 - RNA, 66 nt, Homo sapiens
agaaacaggaggacgaccagagcaacaccaacagcggcagagaagaaaccgaaacacaaagaagga

SEQ ID NO: 149493 - RNA, 83 nt, Homo sapiens
ggagagaggccgcgccgggcagaggaggccggcacgaagaccgcccacagaaggccgcgccccccagagaggagaagagacac

SEQ ID NO: 149494 - RNA, 83 nt, Homo sapiens
cgagggcggcgcgggagcagcacccacagccaaggcgggagccacgaaaccaaagagccaggcgacccccgcgcccgaggccc

SEQ ID NO: 149495 - RNA, 78 nt, Homo sapiens
ccgcccccgcgggcgccgggccaggacggcgcgggccaggcacgacaccgcaacgacacagcagcgaagcgccggaga

SEQ ID NO: 149496 - RNA, 76 nt, Homo sapiens
cacccgcacccggagggaaacgggcaagaggccccagcccggaaaaggagccagcaggacaggcacacccgggcag

SEQ ID NO: 149497 - RNA, 82 nt, Homo sapiens
ccgagaagaaggcccgacgaaaggacccggcaaagagagaggcacacgccgccgaaggccaggagcagaggccaacgcccca

SEQ ID NO: 149498 - RNA, 50 nt, Homo sapiens
gccaggagcgcagaggacaggcaggcgccccaacccaagccagaggaggc

SEQ ID NO: 149499 - RNA, 82 nt, Homo sapiens
gaccgagagcgcgggccgcagacgggggaccgccgccgcccagaaagagacggcgccgaggaagcacaggcaacaccacccg

SEQ ID NO: 149500 - RNA, 76 nt, Homo sapiens
gcccccaggggagccggcggaaaagaggcggccacccacgagccgacggcaaacgccagggagccaccaagggcag

SEQ ID NO: 149501 - RNA, 78 nt, Homo sapiens
agagcagacagaaccgcccacagaacaccggcacagggaccgacacaagaagcagccagaacagacgggaaaagaaac

SEQ ID NO: 149502 - RNA, 80 nt, Homo sapiens
aaagcagcacgcgaggaggaaaggcaccccaccagggggggaccaggcgcagcagcgacagaacaagcggcgccagaaag

SEQ ID NO: 149503 - RNA, 82 nt, Homo sapiens
cgccggcgcgggaaacgggcgaagcgacgagccgcgaggaggagacggcgaagaacagaggaacaacgccaacgacaagacg

SEQ ID NO: 149504 - RNA, 74 nt, Homo sapiens
gggcagggggacgacaggaaaacaacgagagaacgcaggacgacgggccaccagagaacccaggagccgcagac

SEQ ID NO: 149505 - RNA, 82 nt, Homo sapiens
gggcggcccgaggacaccggagaggggcgccacgccgccgggccgcagggacagcaggaagccagaggagaaaaaagggccc

SEQ ID NO: 149506 - RNA, 75 nt, Homo sapiens
ccggagaggggcggcgccgcgcggccgaggccagcaacagaagaaagcaagcaccggggaaagcggcccgaaaca

SEQ ID NO: 149507 - RNA, 72 nt, Homo sapiens
caacccaaagcaccaaagggcacacagacagcaggacaaccgccaacacaccaggagagaaagacaaagaaa

SEQ ID NO: 149508 - RNA, 54 nt, Homo sapiens
gccgcgaggaggaggcccgcggcggcggggcaagcacagagaaagacgcaagaa

SEQ ID NO: 149509 - RNA, 72 nt, Homo sapiens
agcacggcgcaacaggaccacagcaagacgacaagcacgggccccacccccggcagaagcggccacacagca

SEQ ID NO: 149510 - RNA, 81 nt, Homo sapiens
gagcgaggccgagcaacaccgcgagccgcgcggcgcggggccccgcggcggagagaagagaggagcaggaggcacgccacc

SEQ ID NO: 149511 - RNA, 69 nt, Homo sapiens
ggaaaggcaaaaggacagaaaagcgcccaggaagcggaaaaacaaaagagccgcccaacgacgccgaca

SEQ ID NO: 149512 - RNA, 83 nt, Homo sapiens
ccagaaacggggcgcgggggccgcgcgaagacaggaccagggcacggagacgcaaacagcagacggaagaccccacggcaaaa

SEQ ID NO: 149513 - RNA, 62 nt, Homo sapiens
caagaggcgcccccaagaacgcccgagagagccgcccgagacacgagccccaaggggaagca

SEQ ID NO: 149514 - RNA, 93 nt, Homo sapiens
cagaaacaaaagaacaagagggaaggaagaggccacaaaaggcacgagaagaaagcgccaagacaagacccaaccgcccaagcaggggcccag

SEQ ID NO: 149515 - RNA, 70 nt, Homo sapiens
aaacgcagcagagcgaagcgagaaagcacgaaacccggagccacaggggggcaaagcagcggaccggaca

SEQ ID NO: 149516 - RNA, 82 nt, Homo sapiens
gcgccgccgcgccgccgcccgcccccggcgggggggcgcgcgcgccgggagagagcgagggccaggaggagaaagacacagg

SEQ ID NO: 149517 - RNA, 67 nt, Homo sapiens
agagaagggaagggggggaagaccccaggcgaccacaccagacacagggcagacagggacagaaaca

SEQ ID NO: 149518 - RNA, 43 nt, Homo sapiens
cgcgcccgccgcgggcccggcaggagaccccgaagcagcacag

SEQ ID NO: 149519 - RNA, 67 nt, Homo sapiens
cagaaagcgcccaggacaggaccaggaggggaaaccacgagcggggagaaacagcaaggagaacaaa

SEQ ID NO: 149520 - RNA, 71 nt, Homo sapiens
agagcgcaaagcacggaggcagaaggccgcaaggacgaagagcaccggaaaggagaagaacagcacagggg

SEQ ID NO: 149521 - RNA, 72 nt, Homo sapiens
gaaggaccgaagggaaccaaagaaagcggagaaaacaaagaaaagaacgaagaacggaacaacccgcccccg

SEQ ID NO: 149522 - RNA, 76 nt, Homo sapiens
accaccgcggcagcacgcggcggcagacgcacacaggcccgaacaagcgacaaaaacgagaaaagcagaaaagaag

SEQ ID NO: 149523 - RNA, 59 nt, Homo sapiens
gggaaacggcacaccaggcggcaggggcaaccagacgggccaagaaacagagcgaagcg

SEQ ID NO: 149524 - RNA, 37 nt, Homo sapiens
ccagccgcaccgaggcgaaagcccccggccacgcagg

SEQ ID NO: 149525 - RNA, 82 nt, Homo sapiens
gggcggaagaccaagggcgacacgcggcaccacccaagaagcgggccggggaggccagcgccaagaaccacaaggagaagga

SEQ ID NO: 149526 - RNA, 77 nt, Homo sapiens
aaaagcaggggccggaacaacacgggcaccacaggagggaaaaccccgaccaaaagaagcaggacacaggagaagcg

SEQ ID NO: 149527 - RNA, 74 nt, Homo sapiens
cgcggcccccggacagcagaaaccaagcagacaacgcagagggcgacgccaacaagccacagcggaggaagccg

SEQ ID NO: 149528 - RNA, 51 nt, Homo sapiens
cgacggcgcggggagagagccaagcaaccaagccagacccagcaggacgac

SEQ ID NO: 149529 - RNA, 71 nt, Homo sapiens
agacagcccaaacgccccacgaccaggaaggagaaaagacagcaaaacaaaagaaggaacgggaccagcgg

SEQ ID NO: 149530 - RNA, 76 nt, Homo sapiens
gccgcgcccgaccccgcccgcacgccagcgaaggccagcaaccaccccccagcagcccccccaccccccggggaac

SEQ ID NO: 149531 - RNA, 69 nt, Homo sapiens
ccgaccgcaacagaacggacccgacggaaaagaagaaaacagggaaaggaggcaaacacgagaagaagc

SEQ ID NO: 149532 - RNA, 57 nt, Homo sapiens
ccaaggaccaagaaggggggcgcgacagcacaggccccagaacagaagccgccccgg

SEQ ID NO: 149533 - RNA, 74 nt, Homo sapiens
ggagcaccccccgccggaaaggcgcagcaaacgagagcaaggaaaggaggaagcaagagggaacgggcaaccca

SEQ ID NO: 149534 - RNA, 72 nt, Homo sapiens
ccacagcagcagcggaagagccggaagaccaggaaggagccggggcgccggggagcaaaagcagccagaagc

SEQ ID NO: 149535 - RNA, 60 nt, Homo sapiens
gccgaccgagacgggcggagaggagaaggcaacgcggcaagcaaccgggcagcccgggcg

SEQ ID NO: 149536 - RNA, 81 nt, Homo sapiens
cccaaggaaccgccgaccccaagaggaaagggaaagggagcagcaccggccacacccacagcacgaccggaacccagcgac

SEQ ID NO: 149537 - RNA, 75 nt, Homo sapiens
ggaagacaggccacccagcggggagcacggcgagcagccaggccaggagagggagaaagaagagagaccagaaac

SEQ ID NO: 149538 - RNA, 53 nt, Homo sapiens
ccccaaggaacccacgcgagccagcaaccagagaagagaacgagcggaagagg

SEQ ID NO: 149539 - RNA, 72 nt, Homo sapiens
acagggggacggacacgcccagccccgggcacggaaaggaagaaaacaggcgaaacaaggcacccccagcgc

SEQ ID NO: 149540 - RNA, 63 nt, Homo sapiens
gagaaaggaaggaaaaccgacgaacgcagaaaacagacacacagcggagacaagcagggccgg

SEQ ID NO: 149541 - RNA, 76 nt, Homo sapiens
ggggcgccaccaccccagccggagaccccacgcacacaagagagggccgggcgggaagaaaggaaagaggagaaag

SEQ ID NO: 149542 - RNA, 79 nt, Homo sapiens
ccccacggaggccagggcgacccagcccccgcccgcagccggacgacacgaccgccgcccgcgggaaggagggaagacg

SEQ ID NO: 149543 - RNA, 67 nt, Homo sapiens
caaacggaccagaccgaccaccaaaagcaaccaaacgggccgagggcagaacgcaaggacccaagga

SEQ ID NO: 149544 - RNA, 63 nt, Homo sapiens
ccccacgccggaaagcggaaacccggcggcacaccccaaagaacaaccgccagaggcagcgga

SEQ ID NO: 149545 - RNA, 73 nt, Homo sapiens
cgccccggacaccgcggcgggggcccgcgagcggaaccggcggcgccggacccaggcaagcgggggaagcacc

SEQ ID NO: 149546 - RNA, 62 nt, Homo sapiens
cgcgccgcacagccccgcgcccgaggacccaaagacaggaccacgcaccagcagagaaggaa

SEQ ID NO: 149547 - RNA, 82 nt, Homo sapiens
caccgacccaccgcgcccgggccgccggcaggcggccgcagcaacccgccgggaaaccagccaagcaaccggaaagaggcag

SEQ ID NO: 149548 - RNA, 84 nt, Homo sapiens
gagggagacggacggagagaacgaggaggaaggagagaaaaggcgccacggagcacccacgggccagaaaacaagacgaagagg

SEQ ID NO: 149549 - RNA, 56 nt, Homo sapiens
cggccgggccgccacgcccccgcaaaggggggcccacgcggaggacgcagaacacg

SEQ ID NO: 149550 - RNA, 57 nt, Homo sapiens
cagagccggcaccacaggaagccgagcagaacggaagaagcgggaaccagaggaccc

SEQ ID NO: 149551 - RNA, 55 nt, Homo sapiens
gcaaaacacaagagagcagggaggagccggacacaagagggcaagaaaggcgcga

SEQ ID NO: 149552 - RNA, 76 nt, Homo sapiens
gcagagagagggcagccgccccccaggcagccggcacccgcacaacccagggggccgaacccagaccaacaaaagg

SEQ ID NO: 149553 - RNA, 36 nt, Homo sapiens
gaggcaagacagccggcagccaagaaaaccaggccc

SEQ ID NO: 149554 - RNA, 54 nt, Homo sapiens
aaagagaccgccagcgccgcaagcagcaagacaacccccagccacaacgcgaac

SEQ ID NO: 149555 - RNA, 56 nt, Homo sapiens
gcaggggggaaaaggcgggcacaggccgaccgcgcggagggaaggaaacgcaagag

SEQ ID NO: 149556 - RNA, 72 nt, Homo sapiens
aggggagaacaacgggaaggagggagaagaaggaaaaaggggggagacacaccgacaaaccaccaagaaggg

SEQ ID NO: 149557 - RNA, 85 nt, Homo sapiens
cagccaaagcggcgacaacgcaccgagcagggaagaagagaaagccgaaaaagacaaggggaggacagcggaaaaaccggagacg

SEQ ID NO: 149558 - RNA, 75 nt, Homo sapiens
ccggaaaaccaaccagaagacgaacaaacagcaagaaagaccacaagaccagggagcagagcgcagcacggagcg

SEQ ID NO: 149559 - RNA, 74 nt, Homo sapiens
ccgagacgggcggagaggagaagcgccccagcaaaccaccccaaccgagccagaggacgaaagcaaaagacgcc

SEQ ID NO: 149560 - RNA, 74 nt, Homo sapiens
accaggcgaggggcacaaaaagcacaaaccaacaaaaccagcaacaccccaacaggaggagagaaagaacccac

SEQ ID NO: 149561 - RNA, 60 nt, Homo sapiens
ggcgccagcccgggccggggaagaggcccgcccagcgaccagcgcaagccccggggcaga

SEQ ID NO: 149562 - RNA, 59 nt, Homo sapiens
gccgagacgaaaggcaggaaccaaccgggagccccccaagagacccaggggaagaccca

SEQ ID NO: 149563 - RNA, 37 nt, Homo sapiens
gcacccgcgacccagaaggcagaaacagcaaagaaaa

SEQ ID NO: 149564 - RNA, 73 nt, Homo sapiens
cccaagccccaccgcgagcaagaagacagcggggggcacagccgagggaacagcccacagcggcccggacaca

SEQ ID NO: 149565 - RNA, 70 nt, Homo sapiens
aggcccggaccccaagaccaagcgcgccacgcgcggcgcgccggcggaggcggcggggaaaccaaccccg

SEQ ID NO: 149566 - RNA, 53 nt, Homo sapiens
gcaagccacgcggaacaccgaacaaaaggccgacgaggaacagcagccgcacc

SEQ ID NO: 149567 - RNA, 82 nt, Homo sapiens
caggccaagcgccgaacccgaggggaagaaagaacagccaggccgcagacagcacccaccgcccagcaggcgaccgaggagc

SEQ ID NO: 149568 - RNA, 63 nt, Homo sapiens
ccggaggaagcggcgcgagcgccccgccacgcccgacgcaacaaggaggaacaaaaggagaac

SEQ ID NO: 149569 - RNA, 76 nt, Homo sapiens
gccaaagcagacagcgggacagcgcgagaagggcgacaacccggaaaccacaaaaggaaggaccaaagaaagacca

SEQ ID NO: 149570 - RNA, 57 nt, Homo sapiens
cggagcggcgaagagcaaccaggggaaaggacaagggacagcagccgcagaagacga

SEQ ID NO: 149571 - RNA, 62 nt, Homo sapiens
cagcaaacagggcccaccagggggcggaccggcacaagggggcccaaaagaacggagagacc

SEQ ID NO: 149572 - RNA, 40 nt, Homo sapiens
acaggagcgaagacggacccagagagagaagcccagaaac

SEQ ID NO: 149573 - RNA, 93 nt, Homo sapiens
gaaagaccaaaacaagggcgcggccgcgcccaggagcacggacgccagaacggccgacggaccgggggggccgaagaagccgcgcgcgcccaa

SEQ ID NO: 149574 - RNA, 52 nt, Homo sapiens
agagaacgaagcgaccaaagcgcacggcagcgagagggcacccagaggaccg

SEQ ID NO: 149575 - RNA, 87 nt, Homo sapiens
aaaaaagaaaagaagagagagagaagcaacggaccccaagcagagagcccgagcccaagcgcacgacaccagaggccgaagaacgaa

SEQ ID NO: 149576 - RNA, 70 nt, Homo sapiens
gacgcaggcgcacggagacccgccggcaaacgcagaaccggcgcggccaagcccggaccaaagacacgac

SEQ ID NO: 149577 - RNA, 57 nt, Homo sapiens
caagagaggagggggagcaggaggagagggaagcagccggcacccgcacaacccagg

SEQ ID NO: 149578 - RNA, 70 nt, Homo sapiens
caggcgccacgaaccaaagacagaaggcgcgggagaaaagccacccccacagaccgcaaccacccccgca

SEQ ID NO: 149579 - RNA, 77 nt, Homo sapiens
cgcgcccgccccaacccagccacaggggcagagagaagagcacacagaaggccaggagcgacagagcggggaacacg

SEQ ID NO: 149580 - RNA, 59 nt, Homo sapiens
agaggaagaacaagaagagaaccgaagcaagggccggagcgcgaagacgcagggaaagc

SEQ ID NO: 149581 - RNA, 79 nt, Homo sapiens
gcgccgacggcgccaaacacaggggcaggacccgaggcgccagcagcagcaagaccgggggaccaggcgaacgaggcag

SEQ ID NO: 149582 - RNA, 74 nt, Homo sapiens
cagagcgcacggcgacgccccaggggaaaacccccgggaccagaacgacaaggaaaaaaaaggcaacagcaagc

SEQ ID NO: 149583 - RNA, 81 nt, Homo sapiens
aagaaccggggcgaagaagaagagaagagagaacagagcacacgcacaggagagggcgcaagaagaccccgaccagccgcc

SEQ ID NO: 149584 - RNA, 86 nt, Homo sapiens
gaacaaagcgccaaacccgcggaaccagcagaagaacaggaagagaacaggccagggggggcccgggcaccggcgccggaagaaag

SEQ ID NO: 149585 - RNA, 63 nt, Homo sapiens
agggacgggagcgaggagccggacaccgcgggccaggaagagcggggccagagagagcagaca

SEQ ID NO: 149586 - RNA, 75 nt, Homo sapiens
ccacggaaggggcccccggggaggccgacccaccaggccccggggcagaagagcggcgccgaggagaaggaaaaa

SEQ ID NO: 149587 - RNA, 76 nt, Homo sapiens
agcgcaagcgccaagacccggagacgaccaaacagcaaagagggaccgaccggccagaacccacgaaaaaaccgag

SEQ ID NO: 149588 - RNA, 61 nt, Homo sapiens
cagaaccccagcaccgaaagggaccgaaaggagagcaaaggacacgaacaagaaggcagca

SEQ ID NO: 149589 - RNA, 76 nt, Homo sapiens
gcgcggccgcgccagacagcccgaccagcaggacccgcaggcgagagagaaggcagaagccaggcgcaggccccgc

SEQ ID NO: 149590 - RNA, 78 nt, Homo sapiens
ccggcaagggggcaacgaggaagccaagagcgcggccggaaagcagggggaagaaggagccgcagccagaaaaggcca

SEQ ID NO: 149591 - RNA, 71 nt, Homo sapiens
cagaggagaaaaggcggacagcagcgcaggcaaaaaacagagcccaaaaggcagagcgaggagagaagaag

SEQ ID NO: 149592 - RNA, 69 nt, Homo sapiens
cccgaaggcgggaacaggaggcacgcagaccaccgaaaggccggagaggggaagggcacgagaagaaaa

SEQ ID NO: 149593 - RNA, 73 nt, Homo sapiens
gagccccgaaaaggaacgggcggagacgccagcgacgaaccgaagacaagagccacagcccagacaagcacag

SEQ ID NO: 149594 - RNA, 61 nt, Homo sapiens
ccggcacagcacgcccggcaccccgaccagcgaaaagccagccgcacagagcagagaagga

SEQ ID NO: 149595 - RNA, 87 nt, Homo sapiens
aggagaaggagaggcgcggcgaaacagcaagaacgccggcagggaggccacagcaccagggaacagaaaaaaccaagaagaacagaa

SEQ ID NO: 149596 - RNA, 64 nt, Homo sapiens
ggggaccccggagcccagaagacagagggcgaggacggaggggggaggagcaggcccccaccgc

SEQ ID NO: 149597 - RNA, 91 nt, Homo sapiens
agccgggagcaagaagaacacccagagaaaaagcggggaaaacaaaaaaaagaaggagggaagagggggccaggaccaggccccaccccac

SEQ ID NO: 149598 - RNA, 67 nt, Homo sapiens
caccagcacgcccacccagagaccacaaggccccacgagcggagaaacaggcaaggacaggcaagcc

SEQ ID NO: 149599 - RNA, 80 nt, Homo sapiens
gaagagaagaagaagcaggagaacgaaacggagccagagaaggcagaagaaagagcaaggcacagcgacaacacgaacgg

SEQ ID NO: 149600 - RNA, 79 nt, Homo sapiens
accaacgcagcagggaagaaaaggcagagaagcaccccccgcccggaggggagaggccacaaggcgaacaaccagcccc

SEQ ID NO: 149601 - RNA, 74 nt, Homo sapiens
aaaaagaaaaaaaaagggagagaagaagcaagaccaacacgcgcaagaggaaccagagaaggagaaacagcagg

SEQ ID NO: 149602 - RNA, 76 nt, Homo sapiens
cccgaaggcccacaggacaggagagaaagacgaaacaacgaacgagcaaggaagggccaaggcagaccccacaccg

SEQ ID NO: 149603 - RNA, 86 nt, Homo sapiens
cgggagaagcagggaaggaggccgagccgggaccaggcccgggggcggcggccacgccaaggacggcccccggccacgcagggcgg

SEQ ID NO: 149604 - RNA, 73 nt, Homo sapiens
caaacagaaaaaggagaccaaggggagaacaacaagaagaaacccaccaagagaaaacgggcacaccaagcag

SEQ ID NO: 149605 - RNA, 85 nt, Homo sapiens
gaagcagaaaacccggccagggacaggaaagaaggaaaaaagcggggaaaacaaaaaaaagaaggagggaagagggggccaggac

SEQ ID NO: 149606 - RNA, 63 nt, Homo sapiens
ggacaggaccccgccgaagccaccaaaaccaccaggaacagggaagcaacgcaaagcgaaccg

SEQ ID NO: 149607 - RNA, 40 nt, Homo sapiens
cccaaacgcggcacgggagggggcgcggggcagggcgcgg

SEQ ID NO: 149608 - RNA, 100 nt, Homo sapiens
cccgagccacgcgggggcccgaggagaggagaggaacaaggacaggaaggagagggacgagggcaacagacccaccaggcaaccccacccagacgcacaa

SEQ ID NO: 149609 - RNA, 63 nt, Homo sapiens
accacaccaagagacccaagaggacgaaacagaggaccgcagagagagaggcagcgaaaaaag

SEQ ID NO: 149610 - RNA, 77 nt, Homo sapiens
cagaacagagagaagcccagaagagcaacgcaaggaaaaagaaaagacaaagagagcaggagccgcagaaaggggag

SEQ ID NO: 149611 - RNA, 75 nt, Homo sapiens
cagccgagaacccgccgcggcgcccgcccagaggcggagaagaacccaaccaaaaccaggcggcaaccccggggc

SEQ ID NO: 149612 - RNA, 40 nt, Homo sapiens
acccgagaaaggggacgggcgagccagcccccacccagag

SEQ ID NO: 149613 - RNA, 65 nt, Homo sapiens
cacgagacaggggcccaagaaaaagcaccggacgggcaaagaaaaaggagagaaaaagaggcaaa

SEQ ID NO: 149614 - RNA, 84 nt, Homo sapiens
cacggagcgggcgacgagcgacccgggagacacgacgacgggacaaggaggacaaccccgacgaagcaggggagcggagcagag

SEQ ID NO: 149615 - RNA, 42 nt, Homo sapiens
ggacgccaaacacccaaagcccaacaggccaacacagcaagc

SEQ ID NO: 149616 - RNA, 80 nt, Homo sapiens
aggccccccagccagcagaacggcacaaaaagcaaacaagaaaacaggcaacagaccccgaagggacgcccaacaacaga

SEQ ID NO: 149617 - RNA, 77 nt, Homo sapiens
gccaaacaagccgaaaccacacgaagcacagaacaggacccaggaccagaccggaaacagaacgccaagagaggaag

SEQ ID NO: 149618 - RNA, 82 nt, Homo sapiens
acgagcacaaccccagggccgcacgggggcgaccaggccgccagccggggcaagaaggaccacgaggagcaacggcgagccg

SEQ ID NO: 149619 - RNA, 64 nt, Homo sapiens
ggggacgcaaaggccaaggggcggcaaaaagaggaggggaggcacggagagggagaaaccggca

SEQ ID NO: 149620 - RNA, 78 nt, Homo sapiens
gcagaagaagcacccagcaagcgagggaccgggacgccacagccaggaacgggaaccagggaacaagcagcagccgag

SEQ ID NO: 149621 - RNA, 84 nt, Homo sapiens
aacccaagcgacccccccgagggacagccggagaccaggcccgggccaccgagaccagcagccagcccccggggagccacagga

SEQ ID NO: 149622 - RNA, 80 nt, Homo sapiens
cacacagcggcccagaagccacagcgcgcggcacaggaacagcagccccaaggaaacaggaacacgaaagaggaaaaacg

SEQ ID NO: 149623 - RNA, 73 nt, Homo sapiens
cgccaaagcgcgagggaaaggaggcccagaaagagaaacacgccccagcgaaaggacgcccaccacgagacaa

SEQ ID NO: 149624 - RNA, 78 nt, Homo sapiens
ccacaccccgacccccgaacccccagcccaaacccggaaacccagcggcccagccggaacagggaagcggaaccaaaa

SEQ ID NO: 149625 - RNA, 42 nt, Homo sapiens
ccaaagccgggcggacgcggagcgggcaaaggaagggagggg

SEQ ID NO: 149626 - RNA, 51 nt, Homo sapiens
cccacccaaaacgggcccacaggcccgggcaaagcgccgcagaagcccacg

SEQ ID NO: 149627 - RNA, 77 nt, Homo sapiens
ccccagccgcagccacaacaccggcaggaaccaccaggacagagagccaagaggccacgacagaagaacagcaacag

SEQ ID NO: 149628 - RNA, 64 nt, Homo sapiens
gccgcggggaggcacggaacgggagcccgggagacccggcaggggagaacaagcgggggccggc

SEQ ID NO: 149629 - RNA, 61 nt, Homo sapiens
agaagagcaaagggcccgcagaacgacacccacggagaaccagggaagcacgggaaagcaa

SEQ ID NO: 149630 - RNA, 76 nt, Homo sapiens
aacgaacagagacgaggcggaacagagaaaagaaaggccaaaacagaagaggcaaagcccagccacagcagcagcc

SEQ ID NO: 149631 - RNA, 108 nt, Homo sapiens
agaggggaacaggacagaagaggaggaccaccggagcgaggaaccggaccccggcagcaggcaggaaccgcagaacgaagccacaaagggacggagacacaaaaccac

SEQ ID NO: 149632 - RNA, 74 nt, Homo sapiens
gacaacgccggagcggcgggcgcggcagaacagagagaagggcgggagaaaccaaggaaagagaaaagcgggag

SEQ ID NO: 149633 - RNA, 77 nt, Homo sapiens
cgccagacgccccaaacaaacagccggggggggcacagagccccggaagacagcccccagcgaccagacccagggcc

SEQ ID NO: 149634 - RNA, 83 nt, Homo sapiens
agggccggagaggcagaggcaagggcagcaggaaagacgagaccgggcacgccaacaaccgacgaccgcacgacggccggggc

SEQ ID NO: 149635 - RNA, 73 nt, Homo sapiens
ggccgacggccacacggcggccgcagggcgccggagccccccagaccaagacacaaaagagaaggacaaaaag

SEQ ID NO: 149636 - RNA, 71 nt, Homo sapiens
gcaggaccgggcagaacaacgaacagaagcacaaccagagccggccccggaaagaccacagcaagaccacg

SEQ ID NO: 149637 - RNA, 71 nt, Homo sapiens
gaccgaaacaccagaacccaccaaaaaccaccaccaacccgaccccgggaaagcacagccaccagggccag

SEQ ID NO: 149638 - RNA, 74 nt, Homo sapiens
aacgggacaccaacggagacaagggcaacacagaggggaaaaggcgggccgccaccaccaggccaggggagcgc

SEQ ID NO: 149639 - RNA, 71 nt, Homo sapiens
ccagccagagaacaggcacccaggccacggcccacaaagaaacacggccaagggacgaccgccgccgaagg

SEQ ID NO: 149640 - RNA, 68 nt, Homo sapiens
caaagggaaggagcacacggaagccaggaggaaaggacgggcacgaacgaccccgcgcacagcacaca

SEQ ID NO: 149641 - RNA, 77 nt, Homo sapiens
agcaggacaggacgagagaagacacaagagcaccggagaggagaggcaagaggagacccaaagcaaagccaccagag

SEQ ID NO: 149642 - RNA, 78 nt, Homo sapiens
gcagcccgggcccaggccccggcagcgccgggacaagagaccggaccacgggccggggcccacccagcacagaccgcg

SEQ ID NO: 149643 - RNA, 66 nt, Homo sapiens
acaagcccgaagcaacgcaagacgaaacaaccaggccacagcccgagaggaggcgaccgcgccgcc

SEQ ID NO: 149644 - RNA, 37 nt, Homo sapiens
gcacacgcacccaagcggaaacaggagccagaaaaaa

SEQ ID NO: 149645 - RNA, 102 nt, Homo sapiens
cggcaacgaaaagagcccgcgaggccgacaagagccacccggagcaggcgaccacccccccggaccgcacccgacgccagaagaccaagaccgcagaccgac

SEQ ID NO: 149646 - RNA, 59 nt, Homo sapiens
agcgaaaccggaaaccagccccccaaaagggagagagaaggagagaagaggcagaggag

SEQ ID NO: 149647 - RNA, 75 nt, Homo sapiens
gaccagagcgacccgagcagcgcagaccccgcagaacaagcagaacagacgacaaacggaaggagcaaagggcgg

SEQ ID NO: 149648 - RNA, 36 nt, Homo sapiens
acacccaacgagcggacaaggaagcgagaaccagga

SEQ ID NO: 149649 - RNA, 79 nt, Homo sapiens
agcagcccccagcggccacagcagaggggacagggagcccagcccgagagccaaagcaggaggagcagaagcagcgagc

SEQ ID NO: 149650 - RNA, 75 nt, Homo sapiens
cccccgcagaccaaggacacccaagagggcgagcaggacgaagcgcccgccaccaaggcgcggggaggcccagcc

SEQ ID NO: 149651 - RNA, 80 nt, Homo sapiens
ccgcgcaaaggccccggcaagaaggagagccgaacaggaaccgagaccggacagaaacgaagacagacaaaccaaaagac

SEQ ID NO: 149652 - RNA, 77 nt, Homo sapiens
cgaccacccgcggccccagccagcagcgggcagcagaggagaagccccaaacaggacagcagacacacggacgcacc

SEQ ID NO: 149653 - RNA, 62 nt, Homo sapiens
agaagcagccaagcaagcaacaaaggcaaccagacacacaaccaccagaaggagagaagaac

SEQ ID NO: 149654 - RNA, 64 nt, Homo sapiens
gacagaccggaagggaaaacaaccagagaggacaaccaaaagcaccgaaccggaacaaagccca

SEQ ID NO: 149655 - RNA, 89 nt, Homo sapiens
ccacggagggcaagagccggagggccagaggacagacaggccaggagcgaagagacgccgaaagcgagaagaaagagcagagaaggagg

SEQ ID NO: 149656 - RNA, 78 nt, Homo sapiens
aggggcagggggccacgcggacgcgcaaccacccgccagaacgacaaagaggaggggcaaagaaaaaggagagaaaaa

SEQ ID NO: 149657 - RNA, 67 nt, Homo sapiens
accggacagcagaggaaacgagggacaacacagacccaccagcagagccagcaacagaagaaagcaa

SEQ ID NO: 149658 - RNA, 78 nt, Homo sapiens
gcccgccgcgcgcggccaagccagccggccccagggccagcccgcaacccccggcgaccacgggcccggcaacagcgc

SEQ ID NO: 149659 - RNA, 78 nt, Homo sapiens
gagcaccagaccggaggagagcgacacagacaaggggcgcagagcccgggggaagaggagccgaaggagacgcgcagc

SEQ ID NO: 149660 - RNA, 64 nt, Homo sapiens
cgaaacacaaggaaccaggcacagggcgagagaagacgccaagccacgaacccgcgaccaggcg

SEQ ID NO: 149661 - RNA, 78 nt, Homo sapiens
ccaagaacgagacccaccagaacccaagcggagccccgcagaggggggaccacaggccacccaccgggggccccaagc

SEQ ID NO: 149662 - RNA, 73 nt, Homo sapiens
gcgcacaagaaagcggcccacgagagcccagcagccagagcggcggggaggcagcaaccgccccaacggaaag

SEQ ID NO: 149663 - RNA, 76 nt, Homo sapiens
gaagaacaaaaaagaaaggagccggagagccaccaacaacaccagggacacaacagcaaggagcagaaaccgaaac

SEQ ID NO: 149664 - RNA, 79 nt, Homo sapiens
gaaacaacacaaaacccaccaagaacgaaccccggggagagcaggacaccaaccagaagacggagagagcacccgcaaa

SEQ ID NO: 149665 - RNA, 73 nt, Homo sapiens
gggaaaagccaaagaacaccagcaggacagcagacccagagggacaagacagagacgaaaaagaggaccgaag

SEQ ID NO: 149666 - RNA, 74 nt, Homo sapiens
agcgacaacccccagaagagaccaacgccaccaaccaaccgaaaagaaacgaagccgggcacggacaggacaga

SEQ ID NO: 149667 - RNA, 76 nt, Homo sapiens
aacggcagcagaacgacaccaggggggaaaaaccacacaggcaaagaacgcgcaaaacaggacgaaaacaaagggg

SEQ ID NO: 149668 - RNA, 79 nt, Homo sapiens
gcaacccccaccaaaagccccaagaaccaccggaaccacaagaagaggaggaacccgcacagacaagacagcaacgcag

SEQ ID NO: 149669 - RNA, 97 nt, Homo sapiens
gggacccaaaacagacccacaaacaggagacccaacaccacggacacaggggaaagaaacccggccgcaagagaggagccccacgccagaagaacag

SEQ ID NO: 149670 - RNA, 105 nt, Homo sapiens
cgaggaaggacggcagagcgcaggacgccacagcaagaggaccccaccaggggaaacgaggcccagaagcaagggcgcgaggacacagggagcccaggaccaccc

SEQ ID NO: 149671 - RNA, 77 nt, Homo sapiens
acaagaggagaaccaggaacgagcacccagccacaccccaccgcccagagaagggaagagaggagcgagccgaagcc

SEQ ID NO: 149672 - RNA, 72 nt, Homo sapiens
cacagccgggaaggggagccaccagcccccgccgccgaggcacagagaaccgaccagaacgcagcaacaaag

SEQ ID NO: 149673 - RNA, 43 nt, Homo sapiens
caggcgacacagccacggaagccaaagagcgaggaaaacaacc

SEQ ID NO: 149674 - RNA, 56 nt, Homo sapiens
cgaagagacgccagaagaacgaggaggagaaggaaagaaggcgccaccaaccagcc

SEQ ID NO: 149675 - RNA, 57 nt, Homo sapiens
gccgccacagcacaaaccacaggacaaagcagaaaacggagaagaagagcagggcca

SEQ ID NO: 149676 - RNA, 72 nt, Homo sapiens
ccgcacagacagcgagacacccaccagaagagggagaagcggagacaaggagcagagggcacccagagaaaa

SEQ ID NO: 149677 - RNA, 82 nt, Homo sapiens
gaaagaagaaaacaagggaggagaagacaagcaaaaagacgggaaacggcaaagaggaggggccaagggagaagcacgagcc

SEQ ID NO: 149678 - RNA, 74 nt, Homo sapiens
gggaccacaccgacagcggacgccccagcacccccagcgggcagcgaccacagggccgagaagcgcgcggcgca

SEQ ID NO: 149679 - RNA, 74 nt, Homo sapiens
agggcggagagacccgggggcgagcacaaacggggcggggccggggaacacacagagcaagcccccaacaccag

SEQ ID NO: 149680 - RNA, 63 nt, Homo sapiens
gggcagaagggcaccaccggcagaaggccgcccgaccacacggagcacagcaagcgggagcag

SEQ ID NO: 149681 - RNA, 65 nt, Homo sapiens
gccgcggcagcaagaacagagagagaggggacagacgagagaacgaggggaggggcgaccccggg

SEQ ID NO: 149682 - RNA, 68 nt, Homo sapiens
gaccagcgccccccgcacgggaggcaccagagacaccggggaaaagcaaggaccgacggagcgaagag

SEQ ID NO: 149683 - RNA, 68 nt, Homo sapiens
ggaggaccgacaggagagaacacaacaggaggggacacaacccaagacgagaaaccggcaagccaagg

SEQ ID NO: 149684 - RNA, 85 nt, Homo sapiens
ggaggggggcgcaacgccagcgcccaggcgcaagcggggccaggggcaacaggaaaacaacccagagaacccaaacccccagaca

SEQ ID NO: 149685 - RNA, 68 nt, Homo sapiens
gggcccagaaaacggacaaaggaaggaaaaggaacagggaagagccaggccggcggggcacgcccgaa

SEQ ID NO: 149686 - RNA, 39 nt, Homo sapiens
ccaaaggagaaccgcaggaaagggacagacaggacgaga

SEQ ID NO: 149687 - RNA, 97 nt, Homo sapiens
gaggaccgggggggagggggcccggcaggacgaggacgaaggccgagaggccgcgaaccagggcgcgggagcagcaacccaagagaggaccggagcg

SEQ ID NO: 149688 - RNA, 68 nt, Homo sapiens
ccacagaggggcgacgggagcagaaaagcgcccccaaggaaaacagaaacgggaaaagagcacgaagg

SEQ ID NO: 149689 - RNA, 74 nt, Homo sapiens
agcccgaagaaacgccaggccacaaaagaaagaaaccgcgaggcagggaaagaagacgggaacgccaggaacca

SEQ ID NO: 149690 - RNA, 119 nt, Homo sapiens
ccacagcagccggcacaaaaaaccgacaaagcccgaagggccgccagagcggaacggcgcaccccgccccacccccacaaaccggccggacacccacggagcggcaccccacagccaac

SEQ ID NO: 149691 - RNA, 77 nt, Homo sapiens
gacccggacaaccagaggcagccagcagggggagaaaccagaaacaacagagcagacggaaaaacaaccaagaagaa

SEQ ID NO: 149692 - RNA, 76 nt, Homo sapiens
cgcagagaccccaaaccccggcccgacaggagcacagaccgaggaagccgacaggaccgggggcacggaggggaag

SEQ ID NO: 149693 - RNA, 68 nt, Homo sapiens
agaacaaaaacacgcagggcgcagagccaaaaccagaacacacaagaaccgggagaacgaacaaacca

SEQ ID NO: 149694 - RNA, 78 nt, Homo sapiens
ccaggggacacaacagccccacacccaggccacacccacccaacagacgcacaggaacagagacccagaccggacccg

SEQ ID NO: 149695 - RNA, 52 nt, Homo sapiens
gcccaagagagcaagaccgggcccacgaggcaaaccgacaccagcgacacaa

SEQ ID NO: 149696 - RNA, 82 nt, Homo sapiens
caccaggggaggaggaaaacacacagacgaaggcaaaagagccgcccgacacacggccaaaacggaggagaacaagaagaag

SEQ ID NO: 149697 - RNA, 121 nt, Homo sapiens
gagccaggggcccgagggcggggaccggcggcgcggaggagcgaggcagcgacaggacgggaacgggcgacacaccaaagaaaaaacacaccaagcagaaacggagccaaggggcaggcaa

SEQ ID NO: 149698 - RNA, 40 nt, Homo sapiens
cagcagcagaaaagaccagacaggccggccaacaggaccc

SEQ ID NO: 149699 - RNA, 78 nt, Homo sapiens
caccagaggagaagacgagcagaagaaacgaggaaagaaccaaggaagacacccgccgacacaccaaacaaaaaagac

SEQ ID NO: 149700 - RNA, 75 nt, Homo sapiens
cccgagcaaagaagagcccgaacaaacaaacacccagaaacaagaggaaagaacacaggcccaaagaaaaacacg

SEQ ID NO: 149701 - RNA, 78 nt, Homo sapiens
gccagagaaaaaagcaggagcccaggcgacagccccaccggcaaaggcagaaaagagaccccggacggacgcacagca

SEQ ID NO: 149702 - RNA, 68 nt, Homo sapiens
caggaggacggagcccaaccgcaacccgcgccgcgccgcgccgcgccggcaccaggagaacaagagac

SEQ ID NO: 149703 - RNA, 74 nt, Homo sapiens
agaaccacgaccgggccggcgcaggcggcgcggagagggggcgcgagcggggggagcgccgccgccagccgcca

SEQ ID NO: 149704 - RNA, 68 nt, Homo sapiens
acgcgagcacacacaacgcgagcacacccccagaagcgaaccggaacaaacaggacacaggagcggag

SEQ ID NO: 149705 - RNA, 53 nt, Homo sapiens
ccgacggcccccgacgcagcgcaccagaacccagggggagagcagcccaccgg

SEQ ID NO: 149706 - RNA, 90 nt, Homo sapiens
aggaagggggccggggggacccgcccccggccggccgcagccaggagacgggcgcacccagagagaacgggacccggaggaccagcgagc

SEQ ID NO: 149707 - RNA, 74 nt, Homo sapiens
ggggaagcagcagccaggaagcagcagcggagaaacagccacccgagcaaagacccaagaacaagcggcaacac

SEQ ID NO: 149708 - RNA, 71 nt, Homo sapiens
cgggaggacggaaagaagaagaccagcagcgaaaacggaaacacaagagaccagagggcggaggaggacga

SEQ ID NO: 149709 - RNA, 72 nt, Homo sapiens
gccaccccggcaaagcgcccagcagccacacagggcgggaccaccaggagcagagcggaggccaccagccca

SEQ ID NO: 149710 - RNA, 71 nt, Homo sapiens
agcacgagcagaccggcccgaccgcccacagacccaaacaaaggacagaaagcgggacacaagcaggagca

SEQ ID NO: 149711 - RNA, 77 nt, Homo sapiens
aggaaaaagaagaccagcgacaaaagagaaacccggcagggggacaggagccaggccaagagaaagaaacacagaag

SEQ ID NO: 149712 - RNA, 31 nt, Homo sapiens
gagaaccacaaaccaagcacggggcagagga

SEQ ID NO: 149713 - RNA, 84 nt, Homo sapiens
cgacccagcgccgaggggggggaaccacacgcggagcaggccgcggcggagccggggagcggagacgcaggagcccagggggcg

SEQ ID NO: 149714 - RNA, 68 nt, Homo sapiens
caagggcggcccaagccggacacgggagagacggagcccgcggaaggccccccggaaaccacgcgccc

SEQ ID NO: 149715 - RNA, 84 nt, Homo sapiens
gggggcccccgagaacgccaaagaacggcacagccaacaagagaacggagcggacaccagaccaaccagacccagagccaaaga

SEQ ID NO: 149716 - RNA, 74 nt, Homo sapiens
cccaggacagcagcggacaacaagcaggagacgacaacgagggagccgcggaagaaggccggcccccaaaaaga

SEQ ID NO: 149717 - RNA, 61 nt, Homo sapiens
aagaccgggagcagcccaggaggccccccgagccacaaggacaaggcacgaggcgcggcga

SEQ ID NO: 149718 - RNA, 60 nt, Homo sapiens
gccgcggccggggcaggagcgcaggggggccaggaggagccccagcacagcagagaaaaa

SEQ ID NO: 149719 - RNA, 69 nt, Homo sapiens
gcccggcgccggccgagaaggcagaggcgcgggaggccaccgccccaccagcaggcaacgccacagacc

SEQ ID NO: 149720 - RNA, 70 nt, Homo sapiens
gcagcaggcagcaaccggcccaagggccgaccaagcagaacccgagaagagccgagaaacacccgacaaa

SEQ ID NO: 149721 - RNA, 62 nt, Homo sapiens
gcccggaaaggaaaaccggaaagcacgagaggccaagacaaggccgagaccgcgggaagaag

SEQ ID NO: 149722 - RNA, 68 nt, Homo sapiens
cagcacagcgccccacaggggcccccaggcacacggaagcaggcgaacacggaggcgcgcacgaggcg

SEQ ID NO: 149723 - RNA, 56 nt, Homo sapiens
gcgggccgccagacgggaaggggcggagaacggaaaagcaccaggaagcagagagg

SEQ ID NO: 149724 - RNA, 79 nt, Homo sapiens
ccacacgcccccccgcggacagggcagcaccagcaccgacgcgacagggagggccggagaagaggaaaacggccacagg

SEQ ID NO: 149725 - RNA, 68 nt, Homo sapiens
ggacagcagaggaaacgagggacaacacagacccaccagcagagacaaagcggcgcacgcacggagac

SEQ ID NO: 149726 - RNA, 84 nt, Homo sapiens
agggaggaggcgcgaggggccagaaacccgagacaagcgcccagcacagggaacgaagcccaaaaggcagagacggaccgagac

SEQ ID NO: 149727 - RNA, 76 nt, Homo sapiens
aaagcaacggaaacgaagaaggcccagcccaccagacagggaggccgcacagaggaggagcaccaaaccgagggag

SEQ ID NO: 149728 - RNA, 48 nt, Homo sapiens
gggcgggaccgcgccgacggcagaacagagagaccgagagaagcgcac

SEQ ID NO: 149729 - RNA, 80 nt, Homo sapiens
caacaacagagacaagcgcacaggcccgcgcagcgcagcaggagagaagaaaacgggccaaaacacaagagaaccaccgg

SEQ ID NO: 149730 - RNA, 75 nt, Homo sapiens
cgcgggcccaagcacaccggagcaacaaccggcgggccgaggccgcaggaggagggaggaagaaggccccagacg

SEQ ID NO: 149731 - RNA, 54 nt, Homo sapiens
gggagcgaagagggaaccagcgcgcggcagccgcgacggggaccccgggcccgg

SEQ ID NO: 149732 - RNA, 83 nt, Homo sapiens
ggggcccacccccgcaccccaacaagaggaaagacacaccaccaagaagccagcaagcggccagccacacgacagcagcagca

SEQ ID NO: 149733 - RNA, 51 nt, Homo sapiens
cgaacagaggcaaaggcggcaccaggacgccgaaaagcgaccggacgcagg

SEQ ID NO: 149734 - RNA, 64 nt, Homo sapiens
agggggcaaacaagccgaccggaaaaagaaggagagaaccaggagaccgaagcaaccaacaagc

SEQ ID NO: 149735 - RNA, 75 nt, Homo sapiens
accggccagcagcccgccaggcccagcgagcgacggcaaaagcaggacccaggccaagccaccaagcgacagaag

SEQ ID NO: 149736 - RNA, 59 nt, Homo sapiens
ggcgcggcgagggagcagcaccagggaggacgccccggaggagccgccggcccaggcgg

SEQ ID NO: 149737 - RNA, 85 nt, Homo sapiens
cacggagggaccgcagagagaggcgcagaaggaccgggagcacagccgccgaccacccgaagggccccccaagcccagggaccgc

SEQ ID NO: 149738 - RNA, 42 nt, Homo sapiens
ccgggccaacgcgacaccaagcgccgggcacaggcacgcagc

SEQ ID NO: 149739 - RNA, 79 nt, Homo sapiens
gcccaccgcaaggacggagaaggacagcccaagcacaaaacaacccaaaagaagagccggccaaaggaaaggcgggcgg

SEQ ID NO: 149740 - RNA, 61 nt, Homo sapiens
gaaccagaggaacgggacaaagcggccagggagcacagaaagagaaaagcccggaaacgca

SEQ ID NO: 149741 - RNA, 66 nt, Homo sapiens
caggccaaaagggcacagaaaccggcgaaaagaagaggaagcaaagcgaggagaagcaagggacag

SEQ ID NO: 149742 - RNA, 53 nt, Homo sapiens
ggaaaaccgacacaacagagcaagaacgaggccaaggaggagggacacagaga

SEQ ID NO: 149743 - RNA, 76 nt, Homo sapiens
cagaacaagcaggaaaggaaaaggcggagcacccgagagccaccaaaggcgccgccggagagggaaagaaccgcgc

SEQ ID NO: 149744 - RNA, 73 nt, Homo sapiens
gagcgggcaagaggggaacgcgcgcacggcgcccggcgcaggccaaagggcccccgaaccagcgaaaacaaac

SEQ ID NO: 149745 - RNA, 51 nt, Homo sapiens
gaggaccccggagagcaaggaagaaagcagcccagaaccaaaagagcagaa

SEQ ID NO: 149746 - RNA, 77 nt, Homo sapiens
caccaagcgggagcagcgcaaacccaggccacaacacccggcccaaagaggcgaggagaagggaagcccacacgagg

SEQ ID NO: 149747 - RNA, 74 nt, Homo sapiens
gagaggggcaagaagaagagggaaagaagggagaagcgaggagcacaagacacagcaggccagagaagacagac

SEQ ID NO: 149748 - RNA, 75 nt, Homo sapiens
cgagacgcgcagaacgcggagagcccagccaagccagaaccaggggcaacagacacagccaccacaaggaggggg

SEQ ID NO: 149749 - RNA, 82 nt, Homo sapiens
accaccagccagagccccagaccacgagagcccaagccccagagaggggcgacagcaagaaggagccagcacagaggcaaaa

SEQ ID NO: 149750 - RNA, 70 nt, Homo sapiens
acggacagagagacacaggagcaaacagcaagagggaaacagaaaaaggacaaggagcaagaccacacag

SEQ ID NO: 149751 - RNA, 78 nt, Homo sapiens
caacagaggagcggccacgaaaacgagagggcggagaacggaaaagcaccaggaagcagagaggaccgcagaagggaa

SEQ ID NO: 149752 - RNA, 85 nt, Homo sapiens
cagggacaggacaggaaaggccagggagaaccaagggcccaccggagcagcccgggaaaggccaggagagcgaaaacgccacaac

SEQ ID NO: 149753 - RNA, 59 nt, Homo sapiens
gagcacgcagccaaccccagcaagagaccgaaggagcagacgaggcacgagcgccagcg

SEQ ID NO: 149754 - RNA, 84 nt, Homo sapiens
cccgcgagccgccgagaacccgccagcgagcgcgacacggagcgccaggaggcagcacggcaggagacgaggagaggacagcag

SEQ ID NO: 149755 - RNA, 80 nt, Homo sapiens
gggccccggcgcagccacgcaggcgcaccgcagacagaggccgggaagaaggagggacacagcagcgcggagagcggccc

SEQ ID NO: 149756 - RNA, 74 nt, Homo sapiens
aacccccacaaagaacagaagcaaggaagcgggcaagcgaggggaaaaggaaggaaaccgggccagggagacgg

SEQ ID NO: 149757 - RNA, 73 nt, Homo sapiens
cggagcccgagggcggccgagccaccgcagacagcgggcacgccggcaccaccccagaggcaccacgaagacc

SEQ ID NO: 149758 - RNA, 51 nt, Homo sapiens
acagcaaaccgggccacaggagcccccgcaaggggccggcacgggaaaaca

SEQ ID NO: 149759 - RNA, 39 nt, Homo sapiens
cgcagcggggaaggaagcagaccccaccaaagagaaaca

SEQ ID NO: 149760 - RNA, 72 nt, Homo sapiens
caagaaaaccagcaccaacgacaacaacaagagccaaaaggagaagcgaacaaaaaaaaccccaaagaaccc

SEQ ID NO: 149761 - RNA, 81 nt, Homo sapiens
gaaaagaacccgccaaaacacagcgaggagacagaggaaaaagagagccacacccggcacacagggagaagcccgagggaa

SEQ ID NO: 149762 - RNA, 73 nt, Homo sapiens
cacaacaagcgaaaaggcacagagaacccacagcaaaacaaacggagagaggagggagaaacaaaggccaaag

SEQ ID NO: 149763 - RNA, 79 nt, Homo sapiens
cggcggaggacagaaggaacgaaggacccccccagccgggccaccgcagagagggcgagaggagcgcccggcagaccag

SEQ ID NO: 149764 - RNA, 69 nt, Homo sapiens
gaaaaccacgcgggcgcacccccgccagccgacacaaccagaaaggccccaagacgcagagaagccacc

SEQ ID NO: 149765 - RNA, 59 nt, Homo sapiens
ggcccagccccgacacaggaacaagccagccagcaccacccaacaccagccagaccggc

SEQ ID NO: 149766 - RNA, 72 nt, Homo sapiens
cacggagacgaagcagcaacaacccaaaagacagcaccgacagcacagcagaaaggccgccccgccaacccc

SEQ ID NO: 149767 - RNA, 89 nt, Homo sapiens
accggagagccaccaggcccggagcaaacagccagacagggaagaaggagaaagggccaaccccgaagaagcaaacagaaacgaaggag

SEQ ID NO: 149768 - RNA, 80 nt, Homo sapiens
ccaaggcgagggcgaggaagcagccaaaagcgaggcccgggcagcgggccagcgggaggggccccggcccgcccagggag

SEQ ID NO: 149769 - RNA, 73 nt, Homo sapiens
ggaaagccggcaagagggagaaggacaccaggcagaggcaagcaggaagcaaaggagaagaacacaacgaaaa

SEQ ID NO: 149770 - RNA, 42 nt, Homo sapiens
accggaccccggacgcgggaaagggaagcacgccagaacacc

SEQ ID NO: 149771 - RNA, 62 nt, Homo sapiens
agagggggggaccgaccgcaacagaacggacccgacgacaggaaggagcagccacagaggag

SEQ ID NO: 149772 - RNA, 106 nt, Homo sapiens
gagcggcgaagaagcgggacccgggaggaagcagagagagcgggagacgagacaacagggcagccagagcgggaaaggaggcaggccgggagaaacagcagaggcc

SEQ ID NO: 149773 - RNA, 83 nt, Homo sapiens
cccgccccagcgggagagggcgccgcagacccggcagggcacggaccgccaggccgaggaccagggagaaaaacagacggaaa

SEQ ID NO: 149774 - RNA, 78 nt, Homo sapiens
gcccgcccccacacgccagcgcacaccggggccaccccaaacccacgccaaaaagggaaaaaagagagccacgacgaa

SEQ ID NO: 149775 - RNA, 63 nt, Homo sapiens
cacagccccagcgagaggccaaccaggccccgagaccgcggccaggagccaagaagaccagac

SEQ ID NO: 149776 - RNA, 47 nt, Homo sapiens
cccgggacaagacgccagaggggcacagagagcgcgaaggaccccga

SEQ ID NO: 149777 - RNA, 82 nt, Homo sapiens
gggaaaggagcacggccgaagccgggggggcgaaggacgacaagagcggggcccggcgcacccaccaccgccgcccacggca

SEQ ID NO: 149778 - RNA, 52 nt, Homo sapiens
ggcagacaaaagggccaaagaagggagagagacaacccagaaaagaaaaggc

SEQ ID NO: 149779 - RNA, 75 nt, Homo sapiens
cgacgacccagcaggacgaggagggcccagacgcccggagacaacccggaaacacgaagcaaaaacaacccccgg

SEQ ID NO: 149780 - RNA, 78 nt, Homo sapiens
gggcgcgcgaacgcccaggccggccagccgacccagccaggcccagcaccagcacggccaagcagggcccagccccca

SEQ ID NO: 149781 - RNA, 68 nt, Homo sapiens
agacgcagggcgcccccggagagagagccgaagacccacccagaggaaaaggaggcccggaagagacg

SEQ ID NO: 149782 - RNA, 84 nt, Homo sapiens
ccccgcggcgccgccgcccgcagccccgagaccgcaggcgcgggggcaggcagggcgcgcgggccaaggcccggccaacggccc

SEQ ID NO: 149783 - RNA, 83 nt, Homo sapiens
gccgggccaggccccacaggccggggcgcgcccacaggcaaccagagggcagcagagaaaagcccaaccacgagaaccagcaa

SEQ ID NO: 149784 - RNA, 80 nt, Homo sapiens
gcaggcacaaaaggcgcccacagccacgggaccggcgcagcaccgcaggcagcagaagaccggaggaccggggcgaggga

SEQ ID NO: 149785 - RNA, 59 nt, Homo sapiens
aaagaggcacggcggcagagagccaagaggaaggaagcccaacaggagaaaaaccgcgg

SEQ ID NO: 149786 - RNA, 69 nt, Homo sapiens
cgcccgcgaccccgcgaggcgcgaacagggcccacccgccacgacacaggggaagaagaccaccgcaca

SEQ ID NO: 149787 - RNA, 67 nt, Homo sapiens
caaagcccgaacagcagcagcgcgagcgacaacgggacgggaaacaaaaaggcacaaacccagcaca

SEQ ID NO: 149788 - RNA, 67 nt, Homo sapiens
caagcccggccagggcccgaacgccgagcagaggaaggaagacccacaagagaccacgcagagacag

SEQ ID NO: 149789 - RNA, 71 nt, Homo sapiens
gaagacaaagccccgcacacgggagggaaagagggaaaacagaaaccccagaccccagaaaaaacgaggaa

SEQ ID NO: 149790 - RNA, 81 nt, Homo sapiens
aacccgagaaacaccacaacacacaagcgcaccaggagaacgccaacgaagccaacgcaaagcaaagcgagcccccagacc

SEQ ID NO: 149791 - RNA, 65 nt, Homo sapiens
cggcgagaacggcagcggcgagggcccacggcagcgccccgggcacgcaggaaagacagggaaga

SEQ ID NO: 149792 - RNA, 75 nt, Homo sapiens
aaaaaccaaagccagcagcaggacaaacggaacacacacccaaagcaggaggagcagacaagggcccacaccaaa

SEQ ID NO: 149793 - RNA, 75 nt, Homo sapiens
cggacccagcagagggccgaagagaggagcggagaacacagcaaccgccaggggagaaagcaccaccgaggggcc

SEQ ID NO: 149794 - RNA, 72 nt, Homo sapiens
cccacaaaacagagccaggccaggcaagaacgccccggcaaggacggaggcaggcaccaccaacagcgggga

SEQ ID NO: 149795 - RNA, 89 nt, Homo sapiens
cggaggaggagagggcggggaagaggcggcagccgaggccgcgaacgcacaggaggcgaaggggagcaagggagaaaagcaaagggaag

SEQ ID NO: 149796 - RNA, 72 nt, Homo sapiens
gggaaacaccaaagcagcaggcgagaggcagaacccggaaagaaggaagggaccaccacaaggcacaggaac

SEQ ID NO: 149797 - RNA, 68 nt, Homo sapiens
cacggccaaagaggagcggcacgacaaaagaagcagccaggaggcgaaacgcggaggaaagcaggaag

SEQ ID NO: 149798 - RNA, 63 nt, Homo sapiens
acaagagcgcaccggccgaggagcaacaagccgggcgggaagacacagaaggagcagaacaga

SEQ ID NO: 149799 - RNA, 57 nt, Homo sapiens
ccgagcgaacagagaacagcgccggaaaaccaccaccccagaggagccgcggcgccc

SEQ ID NO: 149800 - RNA, 53 nt, Homo sapiens
gaagaggcaaagacccaggaaaggagaccggaaacgagagaaacgaagacgaa

SEQ ID NO: 149801 - RNA, 77 nt, Homo sapiens
gaaccagcacccacagggagggggccaagcaccccaggagagaagcagaagagggacagaaagacagagcaaccacg

SEQ ID NO: 149802 - RNA, 72 nt, Homo sapiens
ccggcaaggccagaaaacccgcgagcaggaaccccaggaaacggccagggaaggagaacagaacccagaggc

SEQ ID NO: 149803 - RNA, 83 nt, Homo sapiens
gacgggcccagcgaaccacgccaaaagaaccgcccagacccagaacgaaagcgaacgcgaaaagaaaagccgagagcagccag

SEQ ID NO: 149804 - RNA, 64 nt, Homo sapiens
acaccaacaccaggaagagaggaagcgggggccgagaccacacagggcagcgcaagaccccgca

SEQ ID NO: 149805 - RNA, 71 nt, Homo sapiens
acccccgggggcacggaccgggggacgcgccggagccgcagcccaaagcaagaagagcgaggccccgaaag

SEQ ID NO: 149806 - RNA, 79 nt, Homo sapiens
cggaggacccggcacgaggggcacccagccggccgggcagccggcacccgcacaacccagggggccgaacccagaccaa

SEQ ID NO: 149807 - RNA, 76 nt, Homo sapiens
caacaagaagaggaacacgaacaaccacgccacggggacaaggccagggcccagcagcagcccacggggccagcgg

SEQ ID NO: 149808 - RNA, 75 nt, Homo sapiens
agcgccaccgccgaccgaagccgcaaaacacaaagcaagccagaagaacacacacacagcacaggaagaaaggag

SEQ ID NO: 149809 - RNA, 73 nt, Homo sapiens
accaggccaccacagaaacaaaagcaacaaagaggaggccaaaaccgaggagcagccaccccgggagccccgc

SEQ ID NO: 149810 - RNA, 66 nt, Homo sapiens
gccgcaaggcacaaagacagcaaaacgggcgggccaccaccaaccccgggaaaggaggaaacgcac

SEQ ID NO: 149811 - RNA, 71 nt, Homo sapiens
gcgggacagcaaaaccagcacagaaagaccaaaaaccgggacagggagagaccccgagaagcaggcaagga

SEQ ID NO: 149812 - RNA, 43 nt, Homo sapiens
agaagcagagccaccgggaacacagcccacagcaaggcgggcc

SEQ ID NO: 149813 - RNA, 76 nt, Homo sapiens
gggccggagaggagcagaaggagcaaaaggcggacaggcagaaccgacaggcacagggccagaaggaagaaaacca

SEQ ID NO: 149814 - RNA, 68 nt, Homo sapiens
acgggagcggggcgcgcagacccaagggcccaaaaaagggaaccgcacagcgagacaccccacacaga

SEQ ID NO: 149815 - RNA, 81 nt, Homo sapiens
gacagggcaggcaccgaggaagcgacagggcagcaggagcagagagaccaagggaaaccgagaaggccaggagcaacaggg

SEQ ID NO: 149816 - RNA, 73 nt, Homo sapiens
gcagcgcaaccggggagaagagggaccacaaggcaccaagcggggggggcggagaacggaaaagcaccaggaa

SEQ ID NO: 149817 - RNA, 80 nt, Homo sapiens
gccacacagacaccgccacaggagagagcaaggcgagaaccgaggggcacagccgagcccccacgaaggacggagacccc

SEQ ID NO: 149818 - RNA, 91 nt, Homo sapiens
gaacgagcaaaacgggcgcaacgaccaaaggaacagggaaagcacacgaacagagacaggcagggaaggaggcccaaaagcgacaggcaaa

SEQ ID NO: 149819 - RNA, 71 nt, Homo sapiens
ggaaagccaaacaaaagacgaaaggcgcagaaacgaccgagagagcaaaggagggcgggggcggcagaggg

SEQ ID NO: 149820 - RNA, 76 nt, Homo sapiens
aaaaacaaagcagcaaggagcagagaagacccgagaccaaaaccacaacggagagaacagcacacagaggcgcaag

SEQ ID NO: 149821 - RNA, 71 nt, Homo sapiens
agccgaagaagcacagagaacgcgcacgcaacaacagcagggccgcaagagacaccacaaaaggacacccg

SEQ ID NO: 149822 - RNA, 76 nt, Homo sapiens
caagaacacaaggacacagacaaagaaccaccaaccacagccgaggaaacacaaaacagaaaaccgcagacaagaa

SEQ ID NO: 149823 - RNA, 62 nt, Homo sapiens
cagaaccacacaaacggggaccaggccacagcggcgggcaggcagagacgcgcgcaggccaa

SEQ ID NO: 149824 - RNA, 54 nt, Homo sapiens
agcgcagcaagacggccgcgcggcccgcaggaccccaccaacaacgaacgcggc

SEQ ID NO: 149825 - RNA, 91 nt, Homo sapiens
ggcgcagcgggcacgcggcgccgaggcgcggcggcaggacgggaaccacgcgagcgcagccagcgcgccggagagcagccaagaaagccac

SEQ ID NO: 149826 - RNA, 77 nt, Homo sapiens
cacagaaaaggacggcccacacccacgcaaagacagccccacagaggaaagaggcagaaaacaaagccaagaggaaa

SEQ ID NO: 149827 - RNA, 81 nt, Homo sapiens
gacccagaaacacacagaagaccacacagggccaagcgggggacaccagaagcaaccagaccaccaaccagcgagagacaa

SEQ ID NO: 149828 - RNA, 81 nt, Homo sapiens
cccccagcgcgccggaggagaacaagagcccgaggcaagagaagccgagccaggccgcggagagccgcccgcgcccaccgc

SEQ ID NO: 149829 - RNA, 99 nt, Homo sapiens
agcccacgaaggggacagcgcagccggcccagagccgggcccggggaccgagcgaccagcagcccaaggccacagccggccaggccgcggggaccccac

SEQ ID NO: 149830 - RNA, 80 nt, Homo sapiens
gcagggcagcccgagaaccacaaaaaagaaaagacccgcacggcgcgggggcagcggcgccgcaagcacgcgagcggcca

SEQ ID NO: 149831 - RNA, 65 nt, Homo sapiens
cgaaggcaccacggcgagacacagggaccaagaaaaaacacaccggaagcgagcacagacccccc

SEQ ID NO: 149832 - RNA, 72 nt, Homo sapiens
cacagcaaaccgggccacagaagagaccgacagcccacagacccagacagagggagcggagacaacgaaggg

SEQ ID NO: 149833 - RNA, 77 nt, Homo sapiens
ggcggacggaggagcaggcgagaagagaaggcaggaagagaacacagaagaagaggagaggaaccagcaagggcgac

SEQ ID NO: 149834 - RNA, 71 nt, Homo sapiens
gggcagaagcgggagccgcaacccagaagccgaaaagcaaggcccccacaagcaacccgccacacgccacc

SEQ ID NO: 149835 - RNA, 79 nt, Homo sapiens
gcgccgcccccccggccagcaacagcgagggcacagaacggcacccacgaacccgccgagagagaagcaaaaaaacagc

SEQ ID NO: 149836 - RNA, 71 nt, Homo sapiens
ccccgagggaaaacacgcagccaaaggagggaggcaaccaacaagagaacggaagagaggacagcgagaca

SEQ ID NO: 149837 - RNA, 82 nt, Homo sapiens
gcaaaagagcggccagaggcaccagggagacagcggggccacggaccacaagggacaacaccacagagagcgcaggagggcg

SEQ ID NO: 149838 - RNA, 80 nt, Homo sapiens
cgggagcaacgcacgccacacccgaaccggaagacggaaaccaaaaggaggaaagagaaagacaagaagcgagaggaaca

SEQ ID NO: 149839 - RNA, 85 nt, Homo sapiens
gcccggccaagaggcaaaggggaggacgcagcaaaccaccagaagaggggcaccccccaccccgggacaccccagggcaccacag

SEQ ID NO: 149840 - RNA, 58 nt, Homo sapiens
gccacccgcgcgccgccgccgaggagaaagccacagaaagcaaggagagagaacagcc

SEQ ID NO: 149841 - RNA, 72 nt, Homo sapiens
accccacggggccggacacaggcccacaagagagggaaggagaaaggcagacgagggacagccacggccacg

SEQ ID NO: 149842 - RNA, 75 nt, Homo sapiens
cagccgggcgagaggagcgggcgcccccccgccagaaagcccgcgccgaccccgccgccccccagcgcgcagggc

SEQ ID NO: 149843 - RNA, 82 nt, Homo sapiens
gagcaccacggaccccaaggaagccacggcagacacacaacccgacccgacgaaaaaacccacccgaacacccacacacccg

SEQ ID NO: 149844 - RNA, 50 nt, Homo sapiens
acggaaaacggcacgaaggagacaaggaagaacgccgaacagccaaaagg

SEQ ID NO: 149845 - RNA, 60 nt, Homo sapiens
accagccaagacaacaagaacgccgccgccgcacaaggaagagagggcaggaacaccaca

SEQ ID NO: 149846 - RNA, 65 nt, Homo sapiens
cagaaagaaaggccaaagcagcaggggcaccagcgggcacaccaagaagcgccccgcaagaccca

SEQ ID NO: 149847 - RNA, 82 nt, Homo sapiens
agacggaggcgaacggcaggcgccggcgggccggccgccagcaagaggggcaagaaaggaccccgcaaaagaacaagaagcc

SEQ ID NO: 149848 - RNA, 78 nt, Homo sapiens
cggaagcaccaggacagaacccgaggaaaggaggccaacagaaagaacccagcaccgcaagcccacagagagaagaac

SEQ ID NO: 149849 - RNA, 80 nt, Homo sapiens
ggagggcggcggcccaccaaggaaagggcgacagcaacagccgccggcggaagacaaggaccacagagcaggagaaacag

SEQ ID NO: 149850 - RNA, 68 nt, Homo sapiens
gccaagaaccgacacgccgggggggccggggagccaccgcggacggcacggagcgagcagaggaggag

SEQ ID NO: 149851 - RNA, 78 nt, Homo sapiens
cggagaagggacacggcaggcgccaggacccgagggcccagccagacccaccccccagcagcacggggggcccgcacg

SEQ ID NO: 149852 - RNA, 73 nt, Homo sapiens
cacagccgccaaggggcaaccgcccaccaccagaccccgggacccgcaagaccgcgcgccagccagcaggccg

SEQ ID NO: 149853 - RNA, 74 nt, Homo sapiens
gacgacccagaccccaggacaggaagccccgaggaacaaaaacaaacacacagaccaaaagagaccacaaggga

SEQ ID NO: 149854 - RNA, 70 nt, Homo sapiens
gcagaagcccggagacacagagaaccagcacgggaagagaaggaaggcgaaagcagacaggaaaccgccg

SEQ ID NO: 149855 - RNA, 91 nt, Homo sapiens
ggagccagccaccagagcccggcaagaccaacgcagagccaggaaaacgaagcccagaaggcaacgggcgaccaggagagaagaggaaaag

SEQ ID NO: 149856 - RNA, 73 nt, Homo sapiens
acggggaaaaagcggccaaagaaggaagcgcgcaccggggccagaggggcaagcgagcaagacaagaaaagcc

SEQ ID NO: 149857 - RNA, 85 nt, Homo sapiens
gagggaacaaccgcacacgaggagacgccgcgccaagcgagaacgcggccgccgggggaaaacaccccaggagaagcacgcacgg

SEQ ID NO: 149858 - RNA, 76 nt, Homo sapiens
gacaagccggacccgaggcagccgaaagaacgcaggaaggagaaacacagaaaaggggagcggacgggcccaggag

SEQ ID NO: 149859 - RNA, 74 nt, Homo sapiens
agccaagcccggaagacgcgaccgggcaccggcggggccagagaacccaaaagcaaacccaagaccgaaagaaa

SEQ ID NO: 149860 - RNA, 76 nt, Homo sapiens
cgccccggacgggggcccaagcccccggaagagggccggagacccagagccgggcaccgaggagcaacacccccag

SEQ ID NO: 149861 - RNA, 71 nt, Homo sapiens
gaccaccccagccacaccgcaaaccaggagaggagccaagcccaacgggacgggaaaacggccacagccaa

SEQ ID NO: 149862 - RNA, 71 nt, Homo sapiens
gcaggggcacgcggagaggaagcgccggaaacgggagaagaccgcgcgaaccagagaggggaacaacagag

SEQ ID NO: 149863 - RNA, 71 nt, Homo sapiens
gcaaacacagacaaaaggagagacgccagaagcaaacagcaaaaccgccggagcgaacgaagcagccccaa

SEQ ID NO: 149864 - RNA, 73 nt, Homo sapiens
aagaggaaaaggggagcaggaggcgacaagaggacgcaagacgagagaagaaagaggaggagaaaaggacgaa

SEQ ID NO: 149865 - RNA, 77 nt, Homo sapiens
gagcgcacggcgacgccccaggggaaaacccccgggaccagagccaagacaccacccaccaaacacaggcaaaaccc

SEQ ID NO: 149866 - RNA, 75 nt, Homo sapiens
cccgacagcagagacgacgcggcaagcagcggaagaggacgacgcgacacaaacaaaagacaagaggaaaaggga

SEQ ID NO: 149867 - RNA, 86 nt, Homo sapiens
accccggagggggaccacaagacccacgacagaaggaaggcccgaagccacagagcggaaggagaaggggagcgcgccacaagaag

SEQ ID NO: 149868 - RNA, 73 nt, Homo sapiens
gcagagcggcgaccaccagaagacaagggcaaaccagacagaaccgacggggaaaggaaagcagcccgaaaag

SEQ ID NO: 149869 - RNA, 72 nt, Homo sapiens
cgaagcgccgccggccccgccgccaagaggagcgagcggacccgcgaggacaccgaaaacgagaaacgaaag

SEQ ID NO: 149870 - RNA, 83 nt, Homo sapiens
gggaagagaagacacgagcacaaacggcaccaggagaacaagagaccccccggaggaggggccagccgcagccggcgagaaag

SEQ ID NO: 149871 - RNA, 79 nt, Homo sapiens
agagggcaggaagaggggcaacccccgaagcccaggagaagaagaagcgacaagaagcacggcgaggaccgggcccacc

SEQ ID NO: 149872 - RNA, 56 nt, Homo sapiens
caacgaacagaagcacaaccagagccggccccgacaaaacagaggagaccagacca

SEQ ID NO: 149873 - RNA, 68 nt, Homo sapiens
cggccacacgcgacgggggagccgcggcgaccaggacgggaaggaggacaggaccacaaccgaagaag

SEQ ID NO: 149874 - RNA, 80 nt, Homo sapiens
ggagagacgagaggaaaccggaccaggcagacacaccgacgaaaagaagcgggccgacaagaaagccgaggcggggcggg

SEQ ID NO: 149875 - RNA, 73 nt, Homo sapiens
cacaggaaaccagcggcgagagagagcagaaaacccccgagacaaacacagacccaaggaacgaccagagaga

SEQ ID NO: 149876 - RNA, 81 nt, Homo sapiens
caccaccaccaccacagagcgggaagaggggcgagaaagcccaggagcccaacaccgccaccggccccgagcagccacccg

SEQ ID NO: 149877 - RNA, 73 nt, Homo sapiens
gccccgccagaagagaaaaagcccaggcaaaaacacccaaccaggcacagagaaagagaccaacaaaggaagg

SEQ ID NO: 149878 - RNA, 78 nt, Homo sapiens
ggaagccgaaaagacagcagacgaagccaaggccagcaagaaagaaggacaccccgcaaaaagcgagccagcagagaa

SEQ ID NO: 149879 - RNA, 84 nt, Homo sapiens
gcaccgcgcgagcacgggcggagcgaacgaaaccaggaaaaggacaaaggaccgggaggacacaaagccgggcgaagaacgaga

SEQ ID NO: 149880 - RNA, 102 nt, Homo sapiens
cggcggagaacagcggggcgcggcaccgagggccaggccagaaccggagaggacacagcagaagagaacacgcccgaaggagcccagagagcggcgggaacg

SEQ ID NO: 149881 - RNA, 69 nt, Homo sapiens
aacagagacccgcccacgcagaagaaggagccccccgagagcaaaccagaaaaccagaagccccggaac

SEQ ID NO: 149882 - RNA, 79 nt, Homo sapiens
aaggccgccgcagcacccgccgcgcgccgaccgcccgcacaccgcggggcggagaacggaaaagcaccaggaagcagag

SEQ ID NO: 149883 - RNA, 86 nt, Homo sapiens
cccagggaaaggagacaaggaccgaaacagaaacggaacaccaagacggcaccaaacggcaaggaggaaaaaaccagaaaccagac

SEQ ID NO: 149884 - RNA, 86 nt, Homo sapiens
gggccagagcgaggcgccccgcccgcggaccgcggcagcccagagcagccagacgcagagacggcgagcaaagcccgggaaaaaga

SEQ ID NO: 149885 - RNA, 108 nt, Homo sapiens
cgggacagcgaggagggcacaggaccaccacaggagagagagaggacaagaaccccaggagggaggaagaggcgcggcaagggcgcggcaagaaaaccggggccgccc

SEQ ID NO: 149886 - RNA, 88 nt, Homo sapiens
caaaaagagcacaaggcagaaagaagagccagacagcacagagagcgaggggaagccaacagcgggacaaacggacagcacggcgagg

SEQ ID NO: 149887 - RNA, 74 nt, Homo sapiens
acgggggagccggaccgcccccagccgacaggaaggccaggaacgggaccagaaccccgagggccggcgcagcc

SEQ ID NO: 149888 - RNA, 74 nt, Homo sapiens
agcccaaggcaaggagaggacggacaaggacggccaccgccgcgcaggcacaaacagggagaaacaggaggaga

SEQ ID NO: 149889 - RNA, 94 nt, Homo sapiens
ggaaacggagcaggagaagccccggggggaagagcgccaccggcggcccgcaagaagaccgagaagggggccaaagggcgagggcacaaaaaac

SEQ ID NO: 149890 - RNA, 67 nt, Homo sapiens
cgaagagaaagaagcagcaagcggcgaagacgcaagagggggacggaagcggcagcgggcagccggc

SEQ ID NO: 149891 - RNA, 70 nt, Homo sapiens
cccgcgccgccgaccccccggcgccgcgccggcggcgggggggccccagcccggccgaacgggcgcacga

SEQ ID NO: 149892 - RNA, 68 nt, Homo sapiens
cgaggaaggcaccaagcccccagacaaaccgaaggcgacagagacaggaggagggggcccacacgggg

SEQ ID NO: 149893 - RNA, 78 nt, Homo sapiens
gggcccgagaggaggcggagaccacccaaaccccccaagaaggggaccagcggggagaagaacgcgcagaacacaccc

SEQ ID NO: 149894 - RNA, 59 nt, Homo sapiens
cagggaacaggaggcgcccgccggccgcgcgcggagcggaccagaagggagacggaccc

SEQ ID NO: 149895 - RNA, 68 nt, Homo sapiens
agaaagaaggggccggcaacaccagacaccaaggacagcccgcaaggcgggaaaacggcacaaggcga

SEQ ID NO: 149896 - RNA, 82 nt, Homo sapiens
aagcacaaaacagcagacccaagagcagcggaaaagaccagcacaggggaaaaagaaaagggcgaagacccgaagcagcgca

SEQ ID NO: 149897 - RNA, 73 nt, Homo sapiens
acagccaccaaggagaggagcccaagaggcacgcaccccacaaaaaaagaaggagagaaaaggcgaaccgaaa

SEQ ID NO: 149898 - RNA, 76 nt, Homo sapiens
cagcgccggccacccaaagcacgggggcaacagaggggaggcaagcaggggggcaaaggaaagaaggcagaaaggg

SEQ ID NO: 149899 - RNA, 75 nt, Homo sapiens
cagagcagaggacgcgcaggggcacccccacggagcccgaccgaggccaaaagaaaggaagaaaacccccaaaaa

SEQ ID NO: 149900 - RNA, 68 nt, Homo sapiens
cgacccgcccggggcagcagagcaaacacgaaggagagaaagagaaggagcacaaagaacaacagccg

SEQ ID NO: 149901 - RNA, 72 nt, Homo sapiens
ccgggacccgagcggccaaaggccagacagcaacagagaagagaaccccagaaacacaaaacaccgaggggc

SEQ ID NO: 149902 - RNA, 60 nt, Homo sapiens
ggcgaacaggaacaaagagagagaagcgccacgcagagccccgccaggaagacacgccgg

SEQ ID NO: 149903 - RNA, 54 nt, Homo sapiens
caacagaacagcccacccaaacaagaacacgacaggcaggagggcccagagaag

SEQ ID NO: 149904 - RNA, 38 nt, Homo sapiens
gaaagaaaggccaaagcagcaggaggacaacagcccag

SEQ ID NO: 149905 - RNA, 71 nt, Homo sapiens
ggcaggcccaaaaggagcgcgcgcggaagagacagacaggcggggggcacaaagcagggacaagaaggcgc

SEQ ID NO: 149906 - RNA, 82 nt, Homo sapiens
ccgagagaagggaagagcgagccggaaccggacaaagccgcgaaaccaagggacacagagagggcgaaccgaccaagaacaa

SEQ ID NO: 149907 - RNA, 47 nt, Homo sapiens
ccaaaccgggacaagacaaagaacgcaaacccaagcggcaacacggc

SEQ ID NO: 149908 - RNA, 64 nt, Homo sapiens
caggagaggacccggccacaccaccgcagggccgcacaaacacgcagaggcaagaagagaggca

SEQ ID NO: 149909 - RNA, 63 nt, Homo sapiens
ccgcgggaacagccagcaaaggcaggggaggaagccacccgagagcaccgcacccaggcggaa

SEQ ID NO: 149910 - RNA, 37 nt, Homo sapiens
cccgagaccgggacacaggcacacaaggccaacagaa

SEQ ID NO: 149911 - RNA, 69 nt, Homo sapiens
ccgcgcgcacacccccaacacggaccaggacacggaggagaacagggcaccgaagggggaggacaaaag

SEQ ID NO: 149912 - RNA, 83 nt, Homo sapiens
cccgcgcccgccgcgggagagaggcaaaagcagaccggaaaacccaccggcaagaccacacccgaggggagcccaggacacca

SEQ ID NO: 149913 - RNA, 75 nt, Homo sapiens
aagaaaggacagggagagaagccaagaaagacagaacggccgagcgaccaggagaggagcccccgcccgaagacc

SEQ ID NO: 149914 - RNA, 72 nt, Homo sapiens
gcgcggcccgcaacacccccgaacgggcgcgggccaagcacgccacccggaagaagacgaccccgacgcagg

SEQ ID NO: 149915 - RNA, 57 nt, Homo sapiens
ccgaaagcacaccacgagcgacccggggaaagacggggccagacaaccaggaagcag

SEQ ID NO: 149916 - RNA, 86 nt, Homo sapiens
ggaggacagccgagaggaggccacccagaggagaaggccaccccgccggaggcacaggccagaggggcccaggagggcgcgagggc

SEQ ID NO: 149917 - RNA, 40 nt, Homo sapiens
ggcgcgagggcagaaccggggagcaagaggcagacagacc

SEQ ID NO: 149918 - RNA, 66 nt, Homo sapiens
acacggaccgagagaggaagagagacagagagcccagcgagaaagggcaaaagaaaggcagccaac

SEQ ID NO: 149919 - RNA, 72 nt, Homo sapiens
caaggcgaccgcagccccccgcccggaggccgggaaggagggaaagaaaccacgccaaaacacgaaaaacca

SEQ ID NO: 149920 - RNA, 71 nt, Homo sapiens
ggcgcgggacacacccccaggaggcccggcagagcaggacagcagaccacagcccggcaggcccaaaaacc

SEQ ID NO: 149921 - RNA, 53 nt, Homo sapiens
acgcaccggacgaaggacgggaacacaacagcgagcaacagcacagcaaggag

SEQ ID NO: 149922 - RNA, 72 nt, Homo sapiens
gccgcgccgcagggcgcccggccgccaggccagcgagggcggacggcagacaggcagcaaccggccccgccc

SEQ ID NO: 149923 - RNA, 76 nt, Homo sapiens
caggagccacgcaggagggggagcaccacggggcccggcgacaggcaaacaaccaggacgagaccggacggcaccc

SEQ ID NO: 149924 - RNA, 68 nt, Homo sapiens
cccagcaaagcccaagcaggacgacgacgggggagcccccaagcagaaccgcccaaaaaccgaggcac

SEQ ID NO: 149925 - RNA, 75 nt, Homo sapiens
gaaaggccacagggaagggcggcggcccaccggggaccgaggccggggagacgagcaaaacacacaaaggcccag

SEQ ID NO: 149926 - RNA, 90 nt, Homo sapiens
cccagaagaggcagcagcggaaggcagcgggagccgaaaacggaagggaaaggaagacaggacgcgccaacgagacagcaagacaaacca

SEQ ID NO: 149927 - RNA, 79 nt, Homo sapiens
aggaaagaccaccaccccgccagaagaggaaaaagaaggaagaaccgccaaaaagagggaaaaacgggcgccaggaacc

SEQ ID NO: 149928 - RNA, 82 nt, Homo sapiens
gaaaaccaaccagaagacgaacaaacagcaagaaagaccacaagaccaaaaagacagaggcgagaccggacaggaaagcccc

SEQ ID NO: 149929 - RNA, 104 nt, Homo sapiens
cacaagaacccagccaaagccccaagaagaacggaaaagccagccaggacagcccgccagagcgccccgcccccggcccccgcggaggagcaaaggccacgcac

SEQ ID NO: 149930 - RNA, 79 nt, Homo sapiens
aaaagagaagaccagaccaaggcagggaggcgcacgaggaaaacagaaaagcagaaaaaagaagagaaaagaaacccga

SEQ ID NO: 149931 - RNA, 84 nt, Homo sapiens
acaggacggcggggcccgaagcccccggcgggcgcgcgcgcgggacgcggcggaggaagcagaacaagcaccgagccaagaggg

SEQ ID NO: 149932 - RNA, 87 nt, Homo sapiens
ggaaggaggggccagcccccaggaggaggagaacggggcgaggaggaagaagaagaaacgccgaggaggagaggaggaagagaaggg

SEQ ID NO: 149933 - RNA, 75 nt, Homo sapiens
cccacaggggggggcaaacccgagagaacggggaggagcgcggcaagacaaccacgaaaacgaagaggggagaag

SEQ ID NO: 149934 - RNA, 74 nt, Homo sapiens
ccagcggcaccacccccagcaccaccccagccccgcgcccgcagcgcgcagacaggacaaccagcggaggcacg

SEQ ID NO: 149935 - RNA, 82 nt, Homo sapiens
agagaggcaccgggacggaccgagaccggaccgagagcggaccgagagcgcgaaacgcacgagaagacccgcaaccgacaca

SEQ ID NO: 149936 - RNA, 34 nt, Homo sapiens
gccgcacccaagccacagagacaccaagccaaga

SEQ ID NO: 149937 - RNA, 77 nt, Homo sapiens
gaaggcaagaagacaggaacgggacacacaaaccccaaccagggacaagagacgaagaggagcagaaccagaaggga

SEQ ID NO: 149938 - RNA, 42 nt, Homo sapiens
cggcaggacgaggacgaaggccgagcaccacgccagagccaa

SEQ ID NO: 149939 - RNA, 77 nt, Homo sapiens
aacccagaagagccaaggcagaaaacagcccggaagcgcccggcgccgcacgagacaaccaggcacagggaaacgcc

SEQ ID NO: 149940 - RNA, 83 nt, Homo sapiens
accacagaccggcgaagcagggcaagcgaaccaggagaggcagccagacaaccaagggcagcaggcggaacagcagacagagc

SEQ ID NO: 149941 - RNA, 60 nt, Homo sapiens
aaggcgagggacacccccaaggagccgcgcggaaaaaaacagaggcgggaaacacggcaa

SEQ ID NO: 149942 - RNA, 72 nt, Homo sapiens
aggagggaaaaagagggacagcagagaccaccgaagacgcacgccaagacagaacaaaccaggggagggaaa

SEQ ID NO: 149943 - RNA, 74 nt, Homo sapiens
gaaagaggagaggcacccgaaagccaggccagaaaacagacgggaaaagccggcagcaaaagcacccgaccgcc

SEQ ID NO: 149944 - RNA, 84 nt, Homo sapiens
aaaaaacaaaaaggaagccccggcaccagacgggaacgccaggaaccagcaagagcaggagagagaggaaccaggaccgagcga

SEQ ID NO: 149945 - RNA, 70 nt, Homo sapiens
acacagggaaaagccaaccggcccgaagaacacaggggcgaaacccaaggcaacgggagggcaggccccc

SEQ ID NO: 149946 - RNA, 55 nt, Homo sapiens
cccgcgccgcggccgagcagcgggccgaggcagagcgagaccagccacccagccc

SEQ ID NO: 149947 - RNA, 92 nt, Homo sapiens
gaaggacacagaagggaacgaagaagcgccccgacaccaggaaaacccagaaagcaaggcaaaagaaggaccccagcaggaaaagcaaagca

SEQ ID NO: 149948 - RNA, 60 nt, Homo sapiens
ggaaccagcagaagaacaggacggacaaaagcgcaaccgcaaaggggggacagaggggca

SEQ ID NO: 149949 - RNA, 78 nt, Homo sapiens
aagaggcggcgcagccaccccgcgggaacgcccagcgcggaaaccacaagaacggggaaccggggagcgggaacgacc

SEQ ID NO: 149950 - RNA, 70 nt, Homo sapiens
caacgggcagcggcagcggaccccagagccagagcacacgggccacggaaaggggcccagaaggggccag

SEQ ID NO: 149951 - RNA, 58 nt, Homo sapiens
gcaggacccaaggagagcagcggaggcgacgcgcccagaagggggaggggggcgaaac

SEQ ID NO: 149952 - RNA, 70 nt, Homo sapiens
gaaaaacacccgggaagggaacagagcagacccggacggaacaggcaaaagacaaagcaaacgccagaag

SEQ ID NO: 149953 - RNA, 79 nt, Homo sapiens
acgggcccaggcagcccgcagaggggccgggcaaggagcggcaggcacccaggcccgcgcccgggggccgccgcccggc

SEQ ID NO: 149954 - RNA, 73 nt, Homo sapiens
gcgcccccgagaccccgcggaacgcccaccgcggagagcagcacgaccccagcacagaaacccacagccgcgc

SEQ ID NO: 149955 - RNA, 76 nt, Homo sapiens
gaaggcaaaccaacccagcacaaacccgaaaaacgagcacagggggacgaaacgaacgacagaaacccaagcagag

SEQ ID NO: 149956 - RNA, 64 nt, Homo sapiens
cggagaccccaagccaacaagccaaaggaagagccacggcacaagacggaaggggaaggaaaac

SEQ ID NO: 149957 - RNA, 82 nt, Homo sapiens
cggcggcgcggggcgaggacggcggcggaccggggcagccccgcgcccggccaggcgggaagcggagaaaaccaggacccaa

SEQ ID NO: 149958 - RNA, 101 nt, Homo sapiens
gggacgcacgagcccggcgccggcaggccccgggccgggcccagcggggccccacagacgagcaggagccgccccagaggccaagaacagacccggaaccc

SEQ ID NO: 149959 - RNA, 86 nt, Homo sapiens
gaagaaaggccaggaaggcaccacgaggacacgaaaaccacagggacaggacacgggccccaaggggcacccccgagcccccgcag

SEQ ID NO: 149960 - RNA, 39 nt, Homo sapiens
ccacggaaagggaccgggaacagagagacggggcgccag

SEQ ID NO: 149961 - RNA, 73 nt, Homo sapiens
caacagccagcaccaggcccgaaagccaccccacaggccgagaaacacagccggacaacaagcgagaagacaa

SEQ ID NO: 149962 - RNA, 78 nt, Homo sapiens
gagcccagccgaggaccgcgaagaggaacaaggaagaagacggcacgggacccccagcacaggcagcaggccgggaga

SEQ ID NO: 149963 - RNA, 77 nt, Homo sapiens
cacccagcggggagcacggcgagcagccaggccaggagagcgagaaccccgcccacagggagagccaccggaacacg

SEQ ID NO: 149964 - RNA, 85 nt, Homo sapiens
gccaagggccaggaagcagagagaacaggcggaacgagcgagcccgcacacaagcccggacagggaagacccgcaccaggaagca

SEQ ID NO: 149965 - RNA, 73 nt, Homo sapiens
caacaaggcaccagacacaccaaccaaggagacgcgacacgggaaaggggcggcaccgaaggccagaggaaag

SEQ ID NO: 149966 - RNA, 72 nt, Homo sapiens
ggaaggacgggcgcggacccagaggggacggcgccgcaggagaagccggaggaacgccgaccgaaccggggc

SEQ ID NO: 149967 - RNA, 59 nt, Homo sapiens
caacacggaggaaaaaggaggggaccgaggaaccgaggcagaagcacggagccacacaa

SEQ ID NO: 149968 - RNA, 79 nt, Homo sapiens
gggaaagaggcgggacgggcggggagagcgcggacagcccagaagacgcgcgcgcaggacgagccgccggcccaggcgg

SEQ ID NO: 149969 - RNA, 108 nt, Homo sapiens
cgggaccacggcagaaggagcggaaggcggagcgaagagccggaccaagcgccagacgcaggagagagagacgccggaagaaagaaaggagacggaagcaacagccaa

SEQ ID NO: 149970 - RNA, 32 nt, Homo sapiens
aacggaaaaaacagggggcacagagcggagag

SEQ ID NO: 149971 - RNA, 60 nt, Homo sapiens
cggagagccccggaggagcggagagcgagcggcaacccggaggagccgcagcccaaagca

SEQ ID NO: 149972 - RNA, 76 nt, Homo sapiens
cggagcgacggggaggcgcggccaacggggccacaagaaaaccagaaggcaccgacaggaaaggaaaaggagaacc

SEQ ID NO: 149973 - RNA, 53 nt, Homo sapiens
cacacgccgccgcggcgcagccaggacggaggggggaggagcaggcccccacc

SEQ ID NO: 149974 - RNA, 77 nt, Homo sapiens
accccgaccagcgcgccaacagcccggcgaaggccaccgaggaggagacaggccgcaggagggaagcgcacggaaac

SEQ ID NO: 149975 - RNA, 58 nt, Homo sapiens
gcggaaaagaccagcacaggaaaaggccacgaggccaggggagcaggggcgggcccag

SEQ ID NO: 149976 - RNA, 75 nt, Homo sapiens
gaagccgaaccaacggagagaagcagaaccggaaaaggcccagaagaaacacaggaaggagagaaaagaaacacc

SEQ ID NO: 149977 - RNA, 106 nt, Homo sapiens
aagaaaccaggaacgggaacggcgaggacaggaaggagcacacaaacgggaccccaccacacagcagaaggagcacgaggcagccccggccaaggaccgggggcag

SEQ ID NO: 149978 - RNA, 76 nt, Homo sapiens
gggccggccagaccggagaccgagaaggaaggacacaaacccccaggaacagccaccgggaggagaaccgaggaag

SEQ ID NO: 149979 - RNA, 75 nt, Homo sapiens
gccacaacgaaaccaggccacagggaccgcaggcccgagaacacgcagacagccgacgagaagaagaaaagaaga

SEQ ID NO: 149980 - RNA, 55 nt, Homo sapiens
caggccggaacaacccaacaaacagacaccccgaagaaccccaaagaaacccaga

SEQ ID NO: 149981 - RNA, 48 nt, Homo sapiens
gagggcacaacggcaaaggagccagggagaacaaggaacgaccaagca

SEQ ID NO: 149982 - RNA, 77 nt, Homo sapiens
aaaggggagggaacccaacaggacaccgagccgcccgcagcagcaacagccacgaggcccgcggggcaccgacggag

SEQ ID NO: 149983 - RNA, 84 nt, Homo sapiens
ggcggcggcggccgcagcgagggcgagagggaaacggccgaggggagcccaagggcgggcccggcgggcccgcgacacccagaa

SEQ ID NO: 149984 - RNA, 64 nt, Homo sapiens
gagaacacgaacaaagagcgaccgagaaaaaccgaaagagccaaacagcagacagacacagcag

SEQ ID NO: 149985 - RNA, 61 nt, Homo sapiens
gcgcaagaggcgggcagcacgcgggcgggaaggaagagccaaccgcgcaacgaaccgcacc

SEQ ID NO: 149986 - RNA, 52 nt, Homo sapiens
aaggccaaaacccccaagaggggcgcacccaacgcgcaccgagaagaacgag

SEQ ID NO: 149987 - RNA, 80 nt, Homo sapiens
gggggagcggagacaaggagacccaagaaggagacaagagcggcgcacgccgacaggcaccggcccgaccagccacgaca

SEQ ID NO: 149988 - RNA, 80 nt, Homo sapiens
gggagcgaaggcgaggggcagcggcaggagagccggccgcgacaggacggcccggcgagcgaccgccgggggaacgcccg

SEQ ID NO: 149989 - RNA, 73 nt, Homo sapiens
ggaccgcagcgccggcgaggacggaacacgcgaacacgcaaaaggaagcggcaggcacgggacccaaggggcg

SEQ ID NO: 149990 - RNA, 78 nt, Homo sapiens
caagacacaccaccccagggggggcccaaccaccaggacgaacagagaaagaagcggcacggaaggaaacggcccagc

SEQ ID NO: 149991 - RNA, 69 nt, Homo sapiens
ggcccacaaccaagccacaaaagacacgccacaaccgaacgacccaacccaacacgaggcaccggggac

SEQ ID NO: 149992 - RNA, 84 nt, Homo sapiens
gagaggacggcaccagccaggaggcaaacgagagcgccagggacggaagcgacagcgcaggaggcggggcaagggccggcccca

SEQ ID NO: 149993 - RNA, 69 nt, Homo sapiens
cggggaggaggaggacaggagcgaacagacaacacaccccccgccaacaccgggcacaaaaacaaagag

SEQ ID NO: 149994 - RNA, 80 nt, Homo sapiens
gggcagaggcggaggccgggccacggcggaggcgcgggacaccaaccccaaggaccgccagccccacagcggcggccgcg

SEQ ID NO: 149995 - RNA, 75 nt, Homo sapiens
ccccaagaagaccacagagggacccggacaaccagaggcagccagcagggggaggggcccgggggaagccggaac

SEQ ID NO: 149996 - RNA, 77 nt, Homo sapiens
gaaacaacagaaagagaccgccacagaacacagcaaggaacacagaaaccagggaacagaccaaggaaaagagccga

SEQ ID NO: 149997 - RNA, 51 nt, Homo sapiens
ggggcgcgcccgccgacgagacccgccgcacaggggcgccggcgcagggcg

SEQ ID NO: 149998 - RNA, 47 nt, Homo sapiens
cggcaaacagggcccggcagccaacaacagccagagcgccggcccag

SEQ ID NO: 149999 - RNA, 81 nt, Homo sapiens
cgaccgggacggccggcaggccgccgccgagcgacccacggcagggcaaccccaccgcggaaggcaggcacacagacgaga

SEQ ID NO: 150000 - RNA, 79 nt, Homo sapiens
ccccccccgcaccagcgccaacgggaaggacgcaagcacccggaaccgcacggacacgacagggcagggcacggaccgg

SEQ ID NO: 150001 - RNA, 83 nt, Homo sapiens
gacagcgaggagcagcagcagcccagcaggcgcggcccgccagggggaagaagggaagccagcagagccacagcccacaccag

SEQ ID NO: 150002 - RNA, 79 nt, Homo sapiens
gcgccccacagaggggcgacggggagggcgaaacccagcaggcgcacacacaggaccgaggagagaaacccaaccccac

SEQ ID NO: 150003 - RNA, 78 nt, Homo sapiens
aaacaagaaaaacaaagccaaggaaaccccaacacagagccaagcgccaaccgccagggagaaaagacgaggaagccc

SEQ ID NO: 150004 - RNA, 47 nt, Homo sapiens
gagcgagcgcagcagcagcccaggggacacgagcaaaaacgacaaca

SEQ ID NO: 150005 - RNA, 69 nt, Homo sapiens
gccccacaggagcggaagaagcggacgaaaagaacaagcgcccggagacagcaacgagggaagcggaga

SEQ ID NO: 150006 - RNA, 71 nt, Homo sapiens
gcaacaccgagcacggcagcccggaggccggggaacggcagcaaaaccgcacggagacgccaaacgcaaca

SEQ ID NO: 150007 - RNA, 82 nt, Homo sapiens
cgggcccaaagacgagcggccggaagaaccgagaggagcagacaagacggccagcaggacagcaggaagagaacagcaaaac

SEQ ID NO: 150008 - RNA, 76 nt, Homo sapiens
cccaaagcgagcgaagcagggcgccgccacgccgcaggaggcggagacaaccgagagagacgccgcgcgcacccca

SEQ ID NO: 150009 - RNA, 82 nt, Homo sapiens
gcgggagcggcggcaagaaaaagccagccagaagaggcgcgcgcgcggcacaccgggaaacccagacgacaaggaaggccaa

SEQ ID NO: 150010 - RNA, 75 nt, Homo sapiens
cggggcacccgcaggggcagacagcacaaccagcgggcggagaacggaaaagcaccaggaagcagagaggaccgc

SEQ ID NO: 150011 - RNA, 78 nt, Homo sapiens
cgcggccccccgcgggagcccccagcagggaagcaccaaccccacaagacccacaacggggcccagagagacgcggaa

SEQ ID NO: 150012 - RNA, 73 nt, Homo sapiens
agaaggagcaggaaccaaagggagccggcggcacaccggcccccccagccagaacgcccaccacaccaggccc

SEQ ID NO: 150013 - RNA, 54 nt, Homo sapiens
acgcgcggaaggcagcgcccagcagcgcaggacaaaaaggacccgacagcacac

SEQ ID NO: 150014 - RNA, 85 nt, Homo sapiens
ccgccacagagccgaaagaaccaaaacccgggcagaagaggagaggaggaagcagcagaagagaagaagaagcaggagaacgaaa

SEQ ID NO: 150015 - RNA, 59 nt, Homo sapiens
aaggaaaaaaccggccgaagagaggcaaaaaggggcacaggaaacccaccagagaaggc

SEQ ID NO: 150016 - RNA, 64 nt, Homo sapiens
acaagaagagcagcgcaccccacgcagacccgcccagcggcccacgaggggaggcagcggcaga

SEQ ID NO: 150017 - RNA, 72 nt, Homo sapiens
acaccggaggagcggggagggggacacacaaccgcccagccggcgagggacgccgcaggggcagccagccca

SEQ ID NO: 150018 - RNA, 58 nt, Homo sapiens
caagaggaaaccagaaggaggcaggagcagccgggaaccagccaccccaacagggaac

SEQ ID NO: 150019 - RNA, 54 nt, Homo sapiens
gggaaaaaacgaccaagacaaacaaaagcaggacaagaacagaagggagaaacc

SEQ ID NO: 150020 - RNA, 65 nt, Homo sapiens
agagcaggccaaacgcagcaagaagaagaagcagcgccagagaagcgaggcaaaccccacagaag

SEQ ID NO: 150021 - RNA, 75 nt, Homo sapiens
gacgaagccaaggccagcaaggaaaagcagacaagagaacagggggacgccaggagcgcgaagcaccggacaaaa

SEQ ID NO: 150022 - RNA, 77 nt, Homo sapiens
agagaccgagcagccgcaaggcaacagcggaagagcaacaaggaccagaagaaccagcagcagaaaaaacagcagac

SEQ ID NO: 150023 - RNA, 52 nt, Homo sapiens
gaaggaccaagaaccaggacaaagcagccagaccaaagcacagcgccagaga

SEQ ID NO: 150024 - RNA, 77 nt, Homo sapiens
gcacgggcggagcgaacggaagaaccaccaagccaaacgcacaaagggagcagggagaggagccgggaaagggaggg

SEQ ID NO: 150025 - RNA, 82 nt, Homo sapiens
gcgcagcagaggacagcagggagagagagaaaaggccgccagcaaccaagcccagaaacaagccacagcagagagaggagaa

SEQ ID NO: 150026 - RNA, 83 nt, Homo sapiens
ggagcgcgaggcgggccgaggcccccagaagagaaggacaacaaggaaaaccacaacaggaaggggcaaaggagcaaagccag

SEQ ID NO: 150027 - RNA, 79 nt, Homo sapiens
ggaagcagaagcagaaacccagcccaccagaggacccagaaaggagccagaacgggaaggcgaaagacacacagaagcc

SEQ ID NO: 150028 - RNA, 72 nt, Homo sapiens
cagaagcagaggacgccagagagaacccaagagaggagaggaacagaagaagaaacaaacagaggcaccgaa

SEQ ID NO: 150029 - RNA, 86 nt, Homo sapiens
ccggccccggcagcgggccagcccgcccgcaagcgcaaaaccaacgcaacacccagcaaagccaagccaaccccacagcgcagcca

SEQ ID NO: 150030 - RNA, 78 nt, Homo sapiens
cacacaagcgaaggcgcgcaccggaagcaccagcgaggaagaagcgaaaaggcaacaccaagacaaggcagacaaaac

SEQ ID NO: 150031 - RNA, 78 nt, Homo sapiens
ccggggcgcggagggccgagggagggccgagccagccgcggccggaggagcccccaggccgcgccaacgcccacagaa

SEQ ID NO: 150032 - RNA, 80 nt, Homo sapiens
accccgaggcaggaacagcacccggacggacacgagaccagcacccaagagccaacaggcggacgaaagaaagaaggagc

SEQ ID NO: 150033 - RNA, 71 nt, Homo sapiens
agagaaaccggggaaccacggacaacccagaggacaacgaaggcggccccccagccccagcgcgcgcgcca

SEQ ID NO: 150034 - RNA, 59 nt, Homo sapiens
cacagggagacggaaaacgagaggaacaagccaagcaggcgggaacggacagggcaaag

SEQ ID NO: 150035 - RNA, 60 nt, Homo sapiens
aagcggcgcggagcagcagcagcggaggcaccgccccaacccccccccgcccggagaacc

SEQ ID NO: 150036 - RNA, 69 nt, Homo sapiens
cgggaggagcgccacacccacacacaagggccacacgggggcgagccacccaggccgcgaagcaaagac

SEQ ID NO: 150037 - RNA, 81 nt, Homo sapiens
gaccgcagaaggccggagacaccagcaggcaaaagcagaccggaaaacccaccggcaagaccacacccgaggggagcccag

SEQ ID NO: 150038 - RNA, 83 nt, Homo sapiens
gcggaggacgccccaccgccgacgcccccagccaccagcgccacgcagagccccgccaggaagacacgccggggaacgaagca

SEQ ID NO: 150039 - RNA, 66 nt, Homo sapiens
ccccgagaccgagaagcccagaaggacagaaaacgggccccagacacaagccccaccaagaggaca

SEQ ID NO: 150040 - RNA, 86 nt, Homo sapiens
cgcgcgcccggccaagaggcaaaggggaggacgcagcaaaccaccagaaggaaaagaaaagccaaccaagaccccaaaacggagcg

SEQ ID NO: 150041 - RNA, 65 nt, Homo sapiens
cggcacacgcagcagaagcccggaccaaggacgacagagggggcagagacaagaagcaacgaaga

SEQ ID NO: 150042 - RNA, 73 nt, Homo sapiens
ggaccgcacggggcagcaaacaggcagaagcgcgaagccggagacacacagaagacgaaagacgaaagaagaa

SEQ ID NO: 150043 - RNA, 79 nt, Homo sapiens
caggcgggcccccgcggcccgggcgagcccggagaagaggaaggacccaaccgcggcacacagaaaacccggacccacc

SEQ ID NO: 150044 - RNA, 56 nt, Homo sapiens
agcagcggacccaagggacaggacgacgccaacagaggagaagaagagggaccaag

SEQ ID NO: 150045 - RNA, 63 nt, Homo sapiens
cgacgccaacaggcggcgcccagggcgccaccgccgccgcagagcaggccgaaaagaggaaga

SEQ ID NO: 150046 - RNA, 70 nt, Homo sapiens
ggcggcccgcccgccaaagcgcccagccaacgacccacgcagccgcccgacaagcagaccggaagaccga

SEQ ID NO: 150047 - RNA, 76 nt, Homo sapiens
gcggcgcgacgggcgcgcggcccgggccacaggccaagggccccgagccccggccccaaagacccaaaacagagac

SEQ ID NO: 150048 - RNA, 81 nt, Homo sapiens
ggcccccaccacccggaggagcagcccgccccgccgggggagacgacccccgccagaacgaagcgcgcggcaggcgcgcgc

SEQ ID NO: 150049 - RNA, 81 nt, Homo sapiens
ccgcggaaccacgccgccacgacccccagaggacacgagcccagccaggcgagccagcgccaaagaaaaagaacaagagga

SEQ ID NO: 150050 - RNA, 83 nt, Homo sapiens
cgcgcgcggcgcgggacgcgcgcgggcacccacggagccccggggcggacacacccgacacccaaccccgaaccccacacacc

SEQ ID NO: 150051 - RNA, 58 nt, Homo sapiens
ccgcgcgggcgcgacacgcgaggacaacaggcagggcaagaaagccgagggaagggag

SEQ ID NO: 150052 - RNA, 65 nt, Homo sapiens
gcccggaccccaagaccaagcgcgccacgcgcggcgcgccgcgagacgacgggaccgaaggaccc

SEQ ID NO: 150053 - RNA, 91 nt, Homo sapiens
ggcccagcgcaaacccagcgccggagaggaacaagcgcccgaccagaagggcacgccgcagcaaaaaaagaccgaaccaagaaaacagccc

SEQ ID NO: 150054 - RNA, 68 nt, Homo sapiens
aaggaaacacacaaacgcaggaacagacgaccagacgcagagagggcggcaggccagggcacgaggag

SEQ ID NO: 150055 - RNA, 82 nt, Homo sapiens
agcagcagcccacgaacagaaaggaggacagcagcggacggccggaccaagaggcgccgccccccagcaaacgagaaaaacc

SEQ ID NO: 150056 - RNA, 79 nt, Homo sapiens
gaagccacgccagacggagaaaggcaacagagaagcggcgcggagggcgggaacagcccgggccgccgcacccaccgcg

SEQ ID NO: 150057 - RNA, 99 nt, Homo sapiens
gacaacggcccagacacagaaacaagggcacgaccagacgcccacccacaaagccagagcgcagagaaacgaacggcacaggcccgccgggaaccagca

SEQ ID NO: 150058 - RNA, 106 nt, Homo sapiens
cagacacggggaagcgcaaaaacaagacggggcgccccacagaggggcgacgaaccccggcccaggaaagcggacagacagggccagcagaccacacaccaaaccc

SEQ ID NO: 150059 - RNA, 85 nt, Homo sapiens
cgcgaggggagcaccaggaccgggccggaacgagacgcacggaaacgaaggcagcaaaaagaagagcagaaacgaaggaaaaggc

SEQ ID NO: 150060 - RNA, 69 nt, Homo sapiens
aaggcgacgccagaggaggaaaggaagacaaggaagaacccgcagcgcacaggcacccccacagcggag

SEQ ID NO: 150061 - RNA, 76 nt, Homo sapiens
ccaagacagccggagcagaggagcgccgccggaggacggaacgcagaaaccccacccagggaagagccgcaagggc

SEQ ID NO: 150062 - RNA, 56 nt, Homo sapiens
ggaagggcggcggaccggggcgaagacagagacgccacaggaaaggaagccccggc

SEQ ID NO: 150063 - RNA, 75 nt, Homo sapiens
caaggacagaggaccaaagcggaccagagacaggaagagagaagggcacagaccaagacaacgaaccccggccag

SEQ ID NO: 150064 - RNA, 75 nt, Homo sapiens
ccagcgcgggcggaccgacggagacggaaagccgggacaggagaagcgcgcaagacgcaacacaaacgagaaaga

SEQ ID NO: 150065 - RNA, 96 nt, Homo sapiens
aaaaacaggaagaagaaagaaagggaagaagggagacaaaggaaaacaaaggcgggaaaggaagacaggacgcgccaacgagacagcaagacaaac

SEQ ID NO: 150066 - RNA, 75 nt, Homo sapiens
agaccaacgcaaagaacagaccgcagaaacaacaggggagaagcgcagaagaagaacgaaggcgaggacacagaa

SEQ ID NO: 150067 - RNA, 105 nt, Homo sapiens
aaaaccgcagagaaacagaacccaagccaggcacccaaaaaaacacacgagaggcgagggacgacagagcaagcggcagagggcaagcgggaaaaagaccaggca

SEQ ID NO: 150068 - RNA, 85 nt, Homo sapiens
ggggagcgaagcgagggcgaagcacgacacagaaggggaggggagggaaaggcccaggaaaaaggagcacccacgggaacagccc

SEQ ID NO: 150069 - RNA, 95 nt, Homo sapiens
acacgacgagccagacacaagcacagcgagaccgcggcgcaggaggaggaggagcgcgagaccgaggcacgggcaggcacagcagaccagaagca

SEQ ID NO: 150070 - RNA, 78 nt, Homo sapiens
acggcggagcggcccagcgcaagcacgcagcccaccagcccagcggccaccaggacgagaagcgagaagcgaacaaaa

SEQ ID NO: 150071 - RNA, 81 nt, Homo sapiens
ccgggcgaagggagaggacagcagggaggcgggacgcggggaaagggagcagcaccggccacacccacagcacgaccggaa

SEQ ID NO: 150072 - RNA, 74 nt, Homo sapiens
ggggaccggagcgacgccacaaggggagaagggaccacgcccacgacggagcgcgcggccacgagaggggcacc

SEQ ID NO: 150073 - RNA, 74 nt, Homo sapiens
ggaggccgcaaagggcacgaagcaggaaagaacgacgccagggagggggggcgaccgaggaaaaaaagaaccaa

SEQ ID NO: 150074 - RNA, 77 nt, Homo sapiens
gggaggaaaagggcagggacagcgcaggcagcaggagaaagacagcaaagaaaaggagaagaaaggaaaaaaacaac

SEQ ID NO: 150075 - RNA, 73 nt, Homo sapiens
aaaaaaccgagaacccgaccccgcggagacagcgagacccgccaggagcaaaggacccagagagggaccaggg

SEQ ID NO: 150076 - RNA, 37 nt, Homo sapiens
gaagaaaacagacagaaaaagaccacagcgccaaaga

SEQ ID NO: 150077 - RNA, 76 nt, Homo sapiens
aggggagccacaggagagcgcccagggacgcacaccgagacgaacacagaacagcacgaccagaggggaagccaag

SEQ ID NO: 150078 - RNA, 79 nt, Homo sapiens
ggacagcacagcacacgacacccccgggaccgcggagagaagcagcggacagcagagagcccaaaaggcagagcgagga

SEQ ID NO: 150079 - RNA, 67 nt, Homo sapiens
agagaagacacgagcacaaacggggacgacaccggagaaggcagcgacgacagcgacagcgagaaga

SEQ ID NO: 150080 - RNA, 64 nt, Homo sapiens
gccagagcaggaaaaaagcgaaggcaacaggagcgggaaacgaaacccgcgccagagagccaag

SEQ ID NO: 150081 - RNA, 77 nt, Homo sapiens
ccgagaagaaagacccaggcaaagacacaccagaacacagcaggacaccacgccaccagcggagggagaaacggccg

SEQ ID NO: 150082 - RNA, 85 nt, Homo sapiens
gcggacccacggggccaagccgcgccggagcggagcgcgggcgccggggagccaggcccgggaggagcggggacacgaggacccc

SEQ ID NO: 150083 - RNA, 83 nt, Homo sapiens
ccaagcccgcggagaaaggaacccacccgaaggcgagacaccgaaacccaggaccaccacggggaccaacaaagagccgcgcc

SEQ ID NO: 150084 - RNA, 68 nt, Homo sapiens
aaccggaggagaagcccagggagcgcaccccaggaaaccacaagaagggagaagacacgcaacacagc

SEQ ID NO: 150085 - RNA, 72 nt, Homo sapiens
acaaacaccccacgagaaagggagagcaagaggaaaacccggaggcccgaaaggaaggcggaggaaggcggg

SEQ ID NO: 150086 - RNA, 70 nt, Homo sapiens
cgaccaaggaagcaaagcaggaacgaacaggcccaaggcgccagggacgaagaggacccgcaacaaaccg

SEQ ID NO: 150087 - RNA, 79 nt, Homo sapiens
gggacccacgaaggacagaggcggggcaaccgaggagccagcaccgccgaccgccagcgccagaagccagagagggcgg

SEQ ID NO: 150088 - RNA, 72 nt, Homo sapiens
ggacagcaaaggagcagggggcagacaccccacaggcaccagcagcaacgaacaggaggaaaagagaaccag

SEQ ID NO: 150089 - RNA, 103 nt, Homo sapiens
cagggaggccaacgggggcacacaacacgccaggggcgcccgagggcaggaagcaaaccaggagccacagcggcagggaaaaaaccagcaaccgcgggaaaga

SEQ ID NO: 150090 - RNA, 77 nt, Homo sapiens
gaagagggagaaaacgggcgaaggaagcggcagacaaaaaggaaaccaacaaggagagagaaggcagaaacaaaaaa

SEQ ID NO: 150091 - RNA, 81 nt, Homo sapiens
gggggcaaccagaggggccaacggacgacagggaagcgagaaccaggaacgaagaacaaaggggaaaggcaacaagacagc

SEQ ID NO: 150092 - RNA, 80 nt, Homo sapiens
ggccaccggcaggcgcacaggcccggccaggcacaagggcaccacaaagcaggaggagcaagcacaacaggccgaagagg

SEQ ID NO: 150093 - RNA, 76 nt, Homo sapiens
ccagcgcgcacaaggaccgaccgggcgagcgagagagagcaagcgcagcgccacaaacagaagggacaaccaagaa

SEQ ID NO: 150094 - RNA, 88 nt, Homo sapiens
gggcgagaacgccacgcgggccggcgaaagcgaggcgggccaggccagcgggccggggagcgccagccgagaggagcgcggagcgcgc

SEQ ID NO: 150095 - RNA, 54 nt, Homo sapiens
gaccaggacagacagagacaagaggacgaacgacaccgggccccccccggcgag

SEQ ID NO: 150096 - RNA, 53 nt, Homo sapiens
ggaagccagaagaaggggagggacaggcgcgcgaagaggacaaagcgaagaga

SEQ ID NO: 150097 - RNA, 75 nt, Homo sapiens
cagacagggacaccaaggagcagagcaacacaccaggaagcagagcggcaacaaaaacgaaaacccacaacgagc

SEQ ID NO: 150098 - RNA, 80 nt, Homo sapiens
agacaccaagaggggaaagccaaggagagcgaggaacgaccaagcaaaaaccagggccaacggccacccaagcaacaaag

SEQ ID NO: 150099 - RNA, 68 nt, Homo sapiens
cgaacaaggcgacaacacagagacaggggaaacgaacaagaaagaagagcaacaggccacaaaggacc

SEQ ID NO: 150100 - RNA, 76 nt, Homo sapiens
aagacggcgaagcaccaacgccaaggcgaaaggcccgagcgagggacggacaagacaaaggagaccgcgaaggggc

SEQ ID NO: 150101 - RNA, 79 nt, Homo sapiens
ggaggcgaaagcagggaaccaaggaagaaggaaagggaagaccaacacacacgacagacaacaacaggcaggaccccag

SEQ ID NO: 150102 - RNA, 34 nt, Homo sapiens
ccgccacccaggaaagggaagaacagcgccaaac

SEQ ID NO: 150103 - RNA, 104 nt, Homo sapiens
agcagcggcgcaccgggcgggccccggacccggagacaccccgcagcacagccgcgaccaagaccaggagaagacgaaccgaggggacggcaaagaagagggac

SEQ ID NO: 150104 - RNA, 77 nt, Homo sapiens
caccaccaacggaaaacaacacagggagaaacgccacaccgggaaaggagggcccagaagccaagaggaagaccgac

SEQ ID NO: 150105 - RNA, 64 nt, Homo sapiens
agcccagcagggggacacacaggaggacagacacagggagccaaggggcagcagaagaggcgag

SEQ ID NO: 150106 - RNA, 67 nt, Homo sapiens
ccacagagaacccagacaacaggacgccgccaaggaccggaacagggaccggccacgcccggagcag

SEQ ID NO: 150107 - RNA, 79 nt, Homo sapiens
cgggagcagccccagacagccggcgcggcgggcgggcggcggcggcgcgggccgagaaccaagcacacgaccagacggc

SEQ ID NO: 150108 - RNA, 99 nt, Homo sapiens
agcagcccagacgcggcacagagagggccgggagcgcgcagccagggccaggccgagggcccgcccggccccaggagaagaaccagccgcagaggaggc

SEQ ID NO: 150109 - RNA, 44 nt, Homo sapiens
accaacgaggaccaaaagcaccaaagggggaagcgagcacagaa

SEQ ID NO: 150110 - RNA, 75 nt, Homo sapiens
acaggcggcgcgggcgcaggaagggggaccggaggagcgcgacgagaggccccgacgcccgggcccaccagaaca

SEQ ID NO: 150111 - RNA, 83 nt, Homo sapiens
aaggaggaaccagcacccacagggagggggccaagcaccccaggagagaagcagaagagggcgcgcaggcaggcacaaggccc

SEQ ID NO: 150112 - RNA, 69 nt, Homo sapiens
ccaccgccggcgcgggaaacgggcgaagcgacgagccgcgaggagacaggcgggaaccaaccacccgag

SEQ ID NO: 150113 - RNA, 69 nt, Homo sapiens
gagggaagagagcacggaaggaaaagggacaagcaagagcaacaacagaccggagagaacagaaaaaaa

SEQ ID NO: 150114 - RNA, 68 nt, Homo sapiens
ggccggggccaacgggaaaccggaccgacagcaagaaaaggagaaaacaaggccgcgggcacacagca

SEQ ID NO: 150115 - RNA, 69 nt, Homo sapiens
gggaccacaaaggagacacgaggaaggggagaacacagagcagaaaaccaggacacgcaggggagaacc

SEQ ID NO: 150116 - RNA, 80 nt, Homo sapiens
gcaacgccgagcggcaaccaacagagccagggagaaggacaggacacccagcaacagaccgagaagacagcggcaaaacc

SEQ ID NO: 150117 - RNA, 71 nt, Homo sapiens
agcaggcccggggagggggaccgcgaggagcgcagccgcaaggggcaccacccagggcagagaaaacagaa

SEQ ID NO: 150118 - RNA, 58 nt, Homo sapiens
cccagcagaagcgcggaggcgaaagccccacggcggacgccggcaaccccaccaggag

SEQ ID NO: 150119 - RNA, 68 nt, Homo sapiens
accgacaaccaagggccccgcggaccaaggaagaacccgaagcaccgggggcacccgaggaggaagag

SEQ ID NO: 150120 - RNA, 82 nt, Homo sapiens
cgcagcagggagggaagcagaccaggaccacgaacaccagcagcgggcccaggccaggagggcaagaacacgcagaagaccc

SEQ ID NO: 150121 - RNA, 87 nt, Homo sapiens
caggcaaaagcggaacaagaaagcagaaaaaacccaggagcgaaggaacacacgcccacagccgcaaaagccagaggaagaaacaaa

SEQ ID NO: 150122 - RNA, 73 nt, Homo sapiens
acgggaaacacacggaaggggcgagagacacaaaaggagaccgaacaccaaaaccgcgcgaaacgcccagaaa

SEQ ID NO: 150123 - RNA, 58 nt, Homo sapiens
gaagccgcagaaaaagccagagagcgcagggcagaggggaaagggcacacggcccgaa

SEQ ID NO: 150124 - RNA, 86 nt, Homo sapiens
cgccaacaggacaccgaagccaaccgaacaagcacaagcccggcggagcccaccaccacggcaagcacagagaacgacaacaccgg

SEQ ID NO: 150125 - RNA, 79 nt, Homo sapiens
caggacccaacgacaggcgccccggcccaacgaggcgaccacaccacaaaagagcaaacggacacaaaccaaacaaaaa

SEQ ID NO: 150126 - RNA, 57 nt, Homo sapiens
gccagccgccacgcgcgccacccggccgcaagcccggccggagcagccggaagacag

SEQ ID NO: 150127 - RNA, 87 nt, Homo sapiens
gggaacgggagccgggcgcggggagcgcgcgaagccggggcggagcacgcgagcaggcgaagccgacgagcccgaacagacgcacca

SEQ ID NO: 150128 - RNA, 76 nt, Homo sapiens
cagacccgaccgaccagcggcgggagaggagagacccacccagccaacaaacacccgaaggaccacacgaggacac

SEQ ID NO: 150129 - RNA, 53 nt, Homo sapiens
aaagcacaacaacgcagaaagcccacaagaagcgaaagggggcagacagaaga

SEQ ID NO: 150130 - RNA, 84 nt, Homo sapiens
acaagcacggaaccgcccgagacgggaggggcgaccccggggcccggccagcacgaccgaggaggggcggacagcggaggagaa

SEQ ID NO: 150131 - RNA, 102 nt, Homo sapiens
ccccacacaaggcagccgccgggagccagaagcacaggcccgggcgaaggggccacgcgacaggagcggcccccaggacaaagacaaggaagcgaaagagag

SEQ ID NO: 150132 - RNA, 74 nt, Homo sapiens
caaaaaacaaccgaaagaaggcggaaccacacagcagcagcccgggaacgaagcagaaacacgacgggccaacc

SEQ ID NO: 150133 - RNA, 129 nt, Homo sapiens
cgcagccaggcccgggacccgcagcgccgcccacgcccagcgccgcccccccggccagcaacagcgagacacgagaggcgagggacgacagagcaagcggcagagggcaagcgggaaaaagaccaggca

SEQ ID NO: 150134 - RNA, 75 nt, Homo sapiens
cgaggcagcacaacaagaaaaagaagcgaggacacagaccgaacaaccaagaccgagacaaaaaggaaaaagaaa

SEQ ID NO: 150135 - RNA, 68 nt, Homo sapiens
ccgaacgcagcggggcccacacgaggggagaagcagaccgcaccaggcgggaccccgaaaaagcccaa

SEQ ID NO: 150136 - RNA, 71 nt, Homo sapiens
gagaaaaccacggacaagaaagcgccaaaaacaacaccaaaaagccgcagggaagaggacgggcaccgcag

SEQ ID NO: 150137 - RNA, 71 nt, Homo sapiens
gggcagaaaggagccggagccccagcacccagaagaaccgaaaggccaaggaaaaagaaagagagagacag

SEQ ID NO: 150138 - RNA, 77 nt, Homo sapiens
aaccggcggcggcgcaaaaaggcgaaagccgagggaagggggacgagccaagaaggcaacacaagcgagggagaagc

SEQ ID NO: 150139 - RNA, 88 nt, Homo sapiens
agccccccaaccccaccacccaccaaagggggcgcgaccgagagagccaccagccagacgaagccgcggcaaggccgccagagaagcc

SEQ ID NO: 150140 - RNA, 59 nt, Homo sapiens
gggccaaggacaaaggacaacaaggaggagggacagccaagagcaaacaccagaacacg

SEQ ID NO: 150141 - RNA, 34 nt, Homo sapiens
gaggaggcggggaagaggcccggcacaaccgaac

SEQ ID NO: 150142 - RNA, 75 nt, Homo sapiens
gggagccgaccagccaacaaaagaaaaaaaaaccaaaagagagagcgacaagcccagagaacaggaaagcaaaac

SEQ ID NO: 150143 - RNA, 76 nt, Homo sapiens
gggccggaggcggggaaaacggacacagacaaagcaagaaaggaagccaaaggcacccacgccagagcaacgcggg

SEQ ID NO: 150144 - RNA, 94 nt, Homo sapiens
gcgagacgccgccgacgccgcgcgggccgcgcgcgcgcgcccggaaaccgggcaggcggccgcgcagaccccgagggccggcccgggagccaac

SEQ ID NO: 150145 - RNA, 82 nt, Homo sapiens
gccaaacaggacaggaaaagaaagcagagaggaaccaagcgacccgaagcaaggggagagacaaggcacgcacaaacgaagc

SEQ ID NO: 150146 - RNA, 78 nt, Homo sapiens
ccgccaccagccccagaccagaaagcagcagcccccagcaggggcgcaaacgccaaggcgccggggagcaggagaaga

SEQ ID NO: 150147 - RNA, 80 nt, Homo sapiens
cagaccgggagcacgcacgccacgaaggccaggcgcacgaagaaaaggaaaagaagacgcacaccaagaccacccaaacg

SEQ ID NO: 150148 - RNA, 81 nt, Homo sapiens
cggacagagagcggacgggccaacccaaaaccagggcggcaaaacgagcgggccaggcaagccacagccaggaaacaccag

SEQ ID NO: 150149 - RNA, 50 nt, Homo sapiens
cccgccaacgaaccacaggcgagaccgagacaagacgaaaagaaaagcgc

SEQ ID NO: 150150 - RNA, 81 nt, Homo sapiens
caaacccggggccacggaaaaaagcgccagggcaccacacccgggaagcaagagagaaaggagacgagaaagagaagacaa

SEQ ID NO: 150151 - RNA, 87 nt, Homo sapiens
ccgggagccccggagccgcggcagcgccgagggcccccccccaggcccgggccgaggcaacgaaagcaaaccgagagcaggcgaagg

SEQ ID NO: 150152 - RNA, 43 nt, Homo sapiens
aggagccgcagccaaaagggaggagagggcaggagagaaggaa

SEQ ID NO: 150153 - RNA, 77 nt, Homo sapiens
caaacaccgccagaaggacacccggacccaagcaggaaagggcaaaggaaggagcggaggagaagaacgggggaaca

SEQ ID NO: 150154 - RNA, 76 nt, Homo sapiens
aagagagagaaaaaggacaaaagccaagaggaggacagcgcacacagcaagcacgaggccgcccagacacccccaa

SEQ ID NO: 150155 - RNA, 78 nt, Homo sapiens
aaacacggagagcacgagagaaagggacgccggaaaaaagggaacgaaagcaaggaacccagcagaagccagccgcca

SEQ ID NO: 150156 - RNA, 69 nt, Homo sapiens
gagcaaggaaagacggcaaagaagagaaagccgaagccaggcggaaagcaaaagacgaaacccggagca

SEQ ID NO: 150157 - RNA, 71 nt, Homo sapiens
ccaacaagaggaagcaggaaaaacaaagaagacccagaacggccgagcgaccaggagaggagcccccgccc

SEQ ID NO: 150158 - RNA, 72 nt, Homo sapiens
ccggggggggagaggccgccaggggcccgccacgggagagcgaaggcacgagcgcccagaagaggaacccag

SEQ ID NO: 150159 - RNA, 58 nt, Homo sapiens
gagagacggggcaccggagccaggaggccgacccgacccagaccacccgcccggcccc

SEQ ID NO: 150160 - RNA, 70 nt, Homo sapiens
ccccaacggcccccgcgccgggcgcagcggaaccaccacccaccgaagggggacgaagacccaaacgaca

SEQ ID NO: 150161 - RNA, 66 nt, Homo sapiens
acacagcacacaaaaaggggggccgccccgggggcccagacaacgaccgaagaaagaagagaacca

SEQ ID NO: 150162 - RNA, 86 nt, Homo sapiens
gccggggcacgaggcagagggcgcaccgcccgggacggccacagacccacagaggcaccccagacacagacacaaggcacgaggac

SEQ ID NO: 150163 - RNA, 70 nt, Homo sapiens
aacccaagaaacacacacccaacgacagcacaccggggagccgccaccaaaagcagacggaaaacccacg

SEQ ID NO: 150164 - RNA, 74 nt, Homo sapiens
aaccgaacaaagccaccagggaagcaaagcaaagggggcccccccgagaggaaaagaacaaagggcaaaggaca

SEQ ID NO: 150165 - RNA, 97 nt, Homo sapiens
ggcggacaaaacgccaggcggaccagaaggccagcaaaggccgaaagaagaaaacccgagcagagaaaacaacaaagcgcccagcacacagcccgac

SEQ ID NO: 150166 - RNA, 80 nt, Homo sapiens
acacgaaaacaccaccaggcaagaacgagaccacccggagaaaaaccagggagcagcaggagagaagaggggacgacacg

SEQ ID NO: 150167 - RNA, 73 nt, Homo sapiens
cagaccgccgacagacagcagccggggcagcccagcggccgcggagcaacaagaaggccgaggccaaccccag

SEQ ID NO: 150168 - RNA, 69 nt, Homo sapiens
cccgccggccggacccacggagccggcagcccagcacccgagccgaggaaacccagacccaagaccaac

SEQ ID NO: 150169 - RNA, 81 nt, Homo sapiens
gcgggggcgcgcggcacagcgggagcaacgaacggaaacaagagcagaggcgaggggacggcggggagcgcaggacagacg

SEQ ID NO: 150170 - RNA, 75 nt, Homo sapiens
ggcagacaaacccacagccagggacacaagacgaacggcggagccggagcaacagcaccagaagccaagggcacg

SEQ ID NO: 150171 - RNA, 77 nt, Homo sapiens
ccgagaaggaggggagagccacacaccccgaccacgcggccgagaggagggccccaaggaccgagagccccagagca

SEQ ID NO: 150172 - RNA, 81 nt, Homo sapiens
caagcacacccgcaaggcggcacgagccaaggagaagacacggaagagacaaagcacaaaaaaaaacaaaccaagacgaca

SEQ ID NO: 150173 - RNA, 69 nt, Homo sapiens
gccggaccagcaaggcggaccacgaggagcaacggcgagccgcgaagccacccccgggacaaagcgacc

SEQ ID NO: 150174 - RNA, 79 nt, Homo sapiens
gaggcaggcgccgggggaggccacagcggccgggaccaagcgagggcagcaaacaagccagcagcaaaccaggaccaca

SEQ ID NO: 150175 - RNA, 67 nt, Homo sapiens
cgccacaaccccaggacccgaacacggaagaaagacacgcaggaggccgcggccgagcagcgccacc

SEQ ID NO: 150176 - RNA, 56 nt, Homo sapiens
ggcgcacaaggagcccacgcagagacaccagcgcagccgcccagcagcagcagccc

SEQ ID NO: 150177 - RNA, 41 nt, Homo sapiens
aaggcaagacgcagaggcagccaggcaagacaggccaacac

SEQ ID NO: 150178 - RNA, 75 nt, Homo sapiens
gcaagacagaggagacgcgagaaacagggcagcaggagcagagagaccaagggaaaccgagaaggccaggagcaa

SEQ ID NO: 150179 - RNA, 72 nt, Homo sapiens
gcaaagaggaagagaagagaaggaagaagcaaaaaaacgcacacaacagaacgacagagagagcaaaacgac

SEQ ID NO: 150180 - RNA, 58 nt, Homo sapiens
cggccaagccgaagagcagaaccgagcaggaggaaaagacaagaaacgagccggacgg

SEQ ID NO: 150181 - RNA, 54 nt, Homo sapiens
acggacacaacggcagaccgcagaacacccagccagggggagggcaggaaaaag

SEQ ID NO: 150182 - RNA, 73 nt, Homo sapiens
agccgggggacaagacaacgggccggggagggccacagcaggaacacagcacccacccacacccacacccgcg

SEQ ID NO: 150183 - RNA, 79 nt, Homo sapiens
caagcaggaccacccaccagccaccagacagagcaccacaggaaggaaacagcaggaccgaaaagcaggaagggaccag

SEQ ID NO: 150184 - RNA, 70 nt, Homo sapiens
gaaaaaccgaaagagccagcgcggcggcacagaccaccagagaccgaaagaaacaggagagagccgaaca

SEQ ID NO: 150185 - RNA, 78 nt, Homo sapiens
aggaccggcagccggggggaagacaaggagggggccagagaacaagcccagacagcaagacgcgagcgcaggggacca

SEQ ID NO: 150186 - RNA, 86 nt, Homo sapiens
cgccgcgccgcgccgcgccgcaccccgagcgaccgagcccacgcaggagacgggaggagcgacaacggagcacacccaccccgcgc

SEQ ID NO: 150187 - RNA, 61 nt, Homo sapiens
ccgcaggccacagagcggcacgccacccccacacccccaggaagcaggcgccacaaaacaa

SEQ ID NO: 150188 - RNA, 83 nt, Homo sapiens
accacgacggagcaagacagacacacgcccacaaagcccagaagaagggcaccagcgaaggcagaaccagagaccacagaaga

SEQ ID NO: 150189 - RNA, 69 nt, Homo sapiens
ccaaggccaccccggccaagagccccagaacgaggaagaaagaacaccgaccgaggacaacaggagaga

SEQ ID NO: 150190 - RNA, 81 nt, Homo sapiens
ggcagcagcagcagcccgccacccaacagaccggagcgaaccaccccaaacagggaagagaggcgggaagagggcgggcgc

SEQ ID NO: 150191 - RNA, 70 nt, Homo sapiens
aaccacccagacaagagcaccacgggcaggaaggcagcgcacgacagcaaaagggaaaggccccagccac

SEQ ID NO: 150192 - RNA, 70 nt, Homo sapiens
gcgggccgcgagcggggcgacccgaggacagggcccaggacaggcacacagggaggcacgagcagaagag

SEQ ID NO: 150193 - RNA, 75 nt, Homo sapiens
gcagacgggaccacgaggcaacgccccagggacaggagagagggcaagagacgacaagcagagagaacaccaggg

SEQ ID NO: 150194 - RNA, 50 nt, Homo sapiens
cgggcgggcgagcacaggcacacacacgcggggccacgcaggggccggcg

SEQ ID NO: 150195 - RNA, 47 nt, Homo sapiens
ccaggagcccgagagagaaggaggacgcgagaaaccgcagccagcag

SEQ ID NO: 150196 - RNA, 73 nt, Homo sapiens
aggcacaaaaagcagccagaggaacaaaagagcgccaaacaacgcaggaaagccagacaggaagggagagaaa

SEQ ID NO: 150197 - RNA, 75 nt, Homo sapiens
ccagcagaggcggagcccgcagaccgcagaaggccggagacaccagcagggggggaagaaagaaggagaaggcgg

SEQ ID NO: 150198 - RNA, 61 nt, Homo sapiens
cggggcaacgacgcagacggcagggggaaaagaccagccaagcaccaaccccagaccaacc

SEQ ID NO: 150199 - RNA, 57 nt, Homo sapiens
aaaaggggaccagagacagagccagcaaaaacggaaccagcgcggcacaaagaaggg

SEQ ID NO: 150200 - RNA, 64 nt, Homo sapiens
ggggaggcccaaacccgggaaggacgaaaaacaaccaccagcgagcaaaaaggcaaagaccaag

SEQ ID NO: 150201 - RNA, 77 nt, Homo sapiens
cgcagcgcgaccgggaggcccagaggaagaaacaagcgagaggaagcacagcagaggagggagcacaagccgggggc

SEQ ID NO: 150202 - RNA, 55 nt, Homo sapiens
cggccaggggcccggggaaaagcgaagacgcagccaaggggaccgcagggcaccc

SEQ ID NO: 150203 - RNA, 75 nt, Homo sapiens
cggccgcgccccggccgcgccggggccgcgcggccccgcggagccaggaagaccagagacacagcccggaccacc

SEQ ID NO: 150204 - RNA, 73 nt, Homo sapiens
ccgcgccccccccagggccccggcgccgcccccgacgcgccagggacaggcggggaagaaagccggagaaaag

SEQ ID NO: 150205 - RNA, 59 nt, Homo sapiens
caaccggaccgcacccgcccaagccggaaccaacagaggcaaaacccgacgcaaacgac

SEQ ID NO: 150206 - RNA, 86 nt, Homo sapiens
agcggccagacggccagcggcagcaagaacccgcacaagcccgggggaaaggcagcgcgcagcagcggcacacaagccaaacagag

SEQ ID NO: 150207 - RNA, 76 nt, Homo sapiens
agagccccagaagccaggaaaacccagccacgcccagaagggggagcgcacagacgacacacaagcaaacccacgc

SEQ ID NO: 150208 - RNA, 79 nt, Homo sapiens
agaaggcgccgagggagacaggacaagaggcggcaggaggcaaagggaccccaagaaaccaaagggcaagagccgcagc

SEQ ID NO: 150209 - RNA, 81 nt, Homo sapiens
cgcagaaggggccacaccacagcccaagcgagccacggggaaggagagagagagggcccaagagccccaagaaacggagac

SEQ ID NO: 150210 - RNA, 61 nt, Homo sapiens
cagacagcgggcaggcacgcgaaaaaagcccaggacccacccggcagagaggacccagcag

SEQ ID NO: 150211 - RNA, 60 nt, Homo sapiens
gaagggggcaggcccaaagccccgagaaccaagaacggaagaccagcccggacccaacga

SEQ ID NO: 150212 - RNA, 79 nt, Homo sapiens
cggcagccacccaccgccgccgcccccaggcacgaacgagacacgccgggcgcgacccaccggccggcgggcccggccg

SEQ ID NO: 150213 - RNA, 75 nt, Homo sapiens
gacgagcgagccaacggaacgaggcagagacccaggaaggcgcagcaggggagaaacgggagggaccccacaacc

SEQ ID NO: 150214 - RNA, 74 nt, Homo sapiens
cgagcccgcccacgcaggcagcgaggacccaaagacaggaccacgcaccagcagagaaggaaagcaaaccgaag

SEQ ID NO: 150215 - RNA, 70 nt, Homo sapiens
ggggggggaagccgcagcggaaagcaggagcacaggacccaccggagcgccgcgcggggcaggccgggcg

SEQ ID NO: 150216 - RNA, 74 nt, Homo sapiens
caaaccccaggccaagcagccaccagcagcccccagagcgggaccacagagaagaccgggaggacagcgagcgg

SEQ ID NO: 150217 - RNA, 69 nt, Homo sapiens
agacaagccccaacgccagcgaagggcgcccaacggaagagagggcgaggcaggaagcgggagagaaca

SEQ ID NO: 150218 - RNA, 73 nt, Homo sapiens
gagcgccagcaggccgggcgcaggcgcaaagggaaaaccccccaagagggacagagagggaagcacaaaccaa

SEQ ID NO: 150219 - RNA, 81 nt, Homo sapiens
ccggcgccgcgccggcggcgggcggagggggcagggcagaaggaccaggggcgacgaggcccagagcaagagaggcaccca

SEQ ID NO: 150220 - RNA, 68 nt, Homo sapiens
aacggaacaacacccgcagaagcgcaaaagggaagacgagggcagggggcagcagcaggaaggaaaag

SEQ ID NO: 150221 - RNA, 69 nt, Homo sapiens
acccccacacccccgggggcacgaagacagagagacgccacggggcccagacggggacagcaaggacac

SEQ ID NO: 150222 - RNA, 110 nt, Homo sapiens
ccgggaaacggggccaagcgcaagccacgaaagggccagaagaagacacaaggagcgcacagcaacagccgaaaaaggaaaaacagacaccgaaagccccaaaaaacaac

SEQ ID NO: 150223 - RNA, 35 nt, Homo sapiens
cccgaaagcaaaggaaacgaacaaaaggcagccaa

SEQ ID NO: 150224 - RNA, 65 nt, Homo sapiens
cgaaccggccaccccccagaaaacgacaaacagaggcacaggaagcggagcgagacccagagcgg

SEQ ID NO: 150225 - RNA, 81 nt, Homo sapiens
agagcagcagcagagcagccacgagagacagcaggccgagcccgagcgcgggaagaaagaggagccccgccacaccagcag

SEQ ID NO: 150226 - RNA, 81 nt, Homo sapiens
gagaaaaccacccaaagccaaagggcaaccccccgacagggacaaggacaacgggagccggaccagacaacagcaccgcgc

SEQ ID NO: 150227 - RNA, 65 nt, Homo sapiens
gggggagagccacggaagccgacagacaaccagcccgaagggcacggaagagaaagaccgccgcc

SEQ ID NO: 150228 - RNA, 71 nt, Homo sapiens
aaagccacaaacgaaaaagggaggaaggaaagagaagaggagaagcagcaaaagaagcgaccgcgggaagc

SEQ ID NO: 150229 - RNA, 82 nt, Homo sapiens
cgaccagccgcggagccgggggcaggaagggaaaaggccgaggcacagcgggaagaccgcaaagacgacccgagacagggaa

SEQ ID NO: 150230 - RNA, 74 nt, Homo sapiens
aggagcgagcgcgcgaggggcggccgaggccacaccaccacaggaggcaagaaccgcacccaccccagaccagc

SEQ ID NO: 150231 - RNA, 53 nt, Homo sapiens
accacaaaaacgaaggcggcggagccaccgagcgaagacccgagaacaagacg

SEQ ID NO: 150232 - RNA, 88 nt, Homo sapiens
gcggcgcggcgcgcggaccccgccgagccagcgccggccgcgcgccgcgcccgcgccacagggagaagagcaaccggacacagaaggg

SEQ ID NO: 150233 - RNA, 78 nt, Homo sapiens
acaccggacgaacaaaggccacgggaacaacgccagaaacacgcacagacaggaggaggacccagaagccggagaagc

SEQ ID NO: 150234 - RNA, 77 nt, Homo sapiens
aaagacagcaacaacaaccagcagcaacaaggaaacagggcaagaaggggggcccaagagaagaacaacaaaaccca

SEQ ID NO: 150235 - RNA, 82 nt, Homo sapiens
cagcaggcggggaagagaaagggccagaagagggacaggaggagaaggggagaggaggaagagaggcgaggcagcacgagag

SEQ ID NO: 150236 - RNA, 73 nt, Homo sapiens
ccagccccacagaacgcacagaggacacaccagaggcgccaggcagccacgcggagacaagcgagaagcaaga

SEQ ID NO: 150237 - RNA, 72 nt, Homo sapiens
ggaagagccagcgccaaggcggaaaagcccaagaaacaaacagaaaaaccagaagagaaaaaacaaagggga

SEQ ID NO: 150238 - RNA, 57 nt, Homo sapiens
gagaacgaaacggagccagagaaggcagaagcagggacgcaccaaaacggacagccg

SEQ ID NO: 150239 - RNA, 81 nt, Homo sapiens
aggcaccgggacggaccgagaccggaccgagagcggaccgagagcgcgaaacgcacgagaagggccgaccaggaacacgca

SEQ ID NO: 150240 - RNA, 61 nt, Homo sapiens
gaggagagccgcagagcgcgcagaccccgccaaaccagggcagagaaggggccccagaacg

SEQ ID NO: 150241 - RNA, 74 nt, Homo sapiens
cccggcagcagccacgggaaccaaaaaccacagagagaagaggaccccaagggaccgaaagacaagagcacgga

SEQ ID NO: 150242 - RNA, 80 nt, Homo sapiens
ccgggagcaagaagaacacccagaggggcccagcacacaccaggcaccagcacagccggcagcccccccccaggaacccg

SEQ ID NO: 150243 - RNA, 39 nt, Homo sapiens
accacgccccggaggaccaggggcgggaggaacagagcg

SEQ ID NO: 150244 - RNA, 62 nt, Homo sapiens
cacccaggccggccagcacccaccgagaaggccagcaggagggcaacacccagacagcccag

SEQ ID NO: 150245 - RNA, 81 nt, Homo sapiens
gacaccggaaggaaggaaccacgagcagccagcagacaccaggcacaaagacccagcaggcagccccagcacagcaccagg

SEQ ID NO: 150246 - RNA, 67 nt, Homo sapiens
cagagcaaggggaacgccacggacgggcgggccgccgcccggcgaaaagggggcccacgcaacaagg

SEQ ID NO: 150247 - RNA, 72 nt, Homo sapiens
gagacgccgccgcgcccccgcgagcccagaacacgacagagagcaagcgggcccagagggagcggagggcga

SEQ ID NO: 150248 - RNA, 72 nt, Homo sapiens
aagaaagggacaaagagaggagcaggaagaacgacagaaaagaagccacgaaccacgcgcacaaagaaaccc

SEQ ID NO: 150249 - RNA, 83 nt, Homo sapiens
gcagcggcccggcggggcccggcaccaggaccaccgcggcagcacgcggcggagaagacgggaggaacgcagcaggaggcaaa

SEQ ID NO: 150250 - RNA, 80 nt, Homo sapiens
caagagaggaaaacagaagcgggcgccccagggaaaggaccgaggcaggaaagaggccagacgcagggaccggcaccgac

SEQ ID NO: 150251 - RNA, 95 nt, Homo sapiens
caaggggaggagaaaagagccaccgagggaggcggacaaaagagcacgaggcgagcggggagacccgagagaccaagggggaggaccacggaggg

SEQ ID NO: 150252 - RNA, 81 nt, Homo sapiens
agaaggccaggacccggccccccaagcgaaaacaccgcaccgcgcgaccccagggaacaaggaggccgagcccgaaacaac

SEQ ID NO: 150253 - RNA, 74 nt, Homo sapiens
ccaccaggaggcccgggggggccaggcacccagggaaggacagagccaccccgccacaagaccacgcagaagga

SEQ ID NO: 150254 - RNA, 64 nt, Homo sapiens
gggaaaaaggcggacgaagaggagggcgaccagaagacggaagaagcggcggagcaggacacga

SEQ ID NO: 150255 - RNA, 80 nt, Homo sapiens
ccccaccggccacgggagaaggcggccacaacaggaaacagagccaggcagcccacaaagccagggcccacagcaacaag

SEQ ID NO: 150256 - RNA, 87 nt, Homo sapiens
ccagcgacccgaccccgcgcgacgacccgccgccgccgggcggaggaacccaagacagaccaggagaggagcagccggaaagcaacg

SEQ ID NO: 150257 - RNA, 79 nt, Homo sapiens
gaccgcagacgggggacgcagggaggagcgggacaccccggaagcgggaaagcgagagaggaacgaggggcacagaaac

SEQ ID NO: 150258 - RNA, 78 nt, Homo sapiens
agacagaagagacaggaagcacgcccagaagaacaggcacacagcagaaagcagagagcccagaagaaaccaaagcca

SEQ ID NO: 150259 - RNA, 50 nt, Homo sapiens
caagacaagaccagcccccaggcccgaagaggcacaggagcgaaccgccg

SEQ ID NO: 150260 - RNA, 57 nt, Homo sapiens
aagacgcgagaagccacacgccacgccggaaccggaaacacaccagaggcgcagcag

SEQ ID NO: 150261 - RNA, 59 nt, Homo sapiens
gaagcggggcgcacaccaccggacaaccgacaaaaccccagcccggcgagaagaggcgc

SEQ ID NO: 150262 - RNA, 73 nt, Homo sapiens
cgggacacgcgaggaaccggaggagagccccacagagaaagagagcaccccaggaacgaacacaaaccccagg

SEQ ID NO: 150263 - RNA, 108 nt, Homo sapiens
agggaagaaaagaaagaagacaaggggaaaaggcaggaagaggaggacggcacgcagacgcagcaggagggaagcgcgcagacgggcaggcgcgcggggggcgaccga

SEQ ID NO: 150264 - RNA, 78 nt, Homo sapiens
gcggaccgcccgcgcggggcacgaggaacagggaagggcgcgagcggggacaaagcgagagagagagagagaggaagc

SEQ ID NO: 150265 - RNA, 56 nt, Homo sapiens
gcacccacgaggacagcaaacaagagcgaggaaaacgccacgacagacacaaccaa

SEQ ID NO: 150266 - RNA, 98 nt, Homo sapiens
cgcagccgacaaaggcgccgcacaccgcgacggcgcgcggcgcgagaaaaggacccaagggggcaaaggcggaaacagcagaggacaccaggagaggc

SEQ ID NO: 150267 - RNA, 51 nt, Homo sapiens
gggggagggggaggagccgaacgagccccagccagggccagccaggagccc

SEQ ID NO: 150268 - RNA, 79 nt, Homo sapiens
aggcggcagcgcaaccacgagacggccccaaggccccagcaggaggacccgccggaccagccacgaaaagccagagaca

SEQ ID NO: 150269 - RNA, 68 nt, Homo sapiens
cggaaaaccccccgggaaagcggaacagacagaagcaggacccaacagagggaccaagcaagaaagaa

SEQ ID NO: 150270 - RNA, 78 nt, Homo sapiens
gcaacagaaacagagagaagaacaggagagaagagcgccacaaacgacaagacgagcgcagaaaccccggacccccag

SEQ ID NO: 150271 - RNA, 72 nt, Homo sapiens
agaccacagaagaaggaagggccacccaggacaggggcacccagggagacgggcgaacacagggaagaagga

SEQ ID NO: 150272 - RNA, 81 nt, Homo sapiens
gcgcagaagcagcgcaggccgaggagacggcggcccgaggagggagaggacacggcccacccggaaacgccgaagggacca

SEQ ID NO: 150273 - RNA, 75 nt, Homo sapiens
ccacagcagcacgcaccagccagcgaaccggcccaaaggacgaaaggcaaaacacagaaaaggaagcaggcgaag

SEQ ID NO: 150274 - RNA, 80 nt, Homo sapiens
caacccaagccagagcacaggaccgagcagaccaaggcgacccagcgcaggaggaggagaagacaaccaggggagagcca

SEQ ID NO: 150275 - RNA, 55 nt, Homo sapiens
caccccagccccccagacgagccacggggaaggagaagagagacagacgagcgcc

SEQ ID NO: 150276 - RNA, 79 nt, Homo sapiens
gcgggcggggaacccaggccccgccgaggcggccagccaggggaggcgcggcccgccacgaagaagagcaacggaccac

SEQ ID NO: 150277 - RNA, 87 nt, Homo sapiens
agcagcgccgaagcagccgggagccggagcgggcgcggacgccgaggcaccgaggcaccagaggaggagcggagaggaggcaggggc

SEQ ID NO: 150278 - RNA, 63 nt, Homo sapiens
gaagcagaacaacgcggaacagacagaaccgcaggaaaaaagaccagcccgccgcccaccacg

SEQ ID NO: 150279 - RNA, 65 nt, Homo sapiens
acaggcgaggccaggcaaaggaaccacccaggaaacagcgcaagccggacaggacaaaaggacac

SEQ ID NO: 150280 - RNA, 83 nt, Homo sapiens
caacaacccccccgcccgccacagccggcagcgcgaagcagcaaccagggcagacggccaaagaggagacggaaaaaaggagc

SEQ ID NO: 150281 - RNA, 57 nt, Homo sapiens
ccccagagcgacagcccgggacaccaagaaagaacgaaggggcaggaccagcgcccg

SEQ ID NO: 150282 - RNA, 79 nt, Homo sapiens
aggagacgggccgcacccgccccccgcgcccgccaccggccgccgcccgaccgacagaacaagcgcaaaaaaagaagag

SEQ ID NO: 150283 - RNA, 74 nt, Homo sapiens
caacgcggacccagagaagccgaccccaagaaagagagagacagaagccacaggaaccaacgcagagccccaga

SEQ ID NO: 150284 - RNA, 103 nt, Homo sapiens
ggcgcggaggaacaggcggacggccacgcagccaggacgcggaacgcaccaccgagccggggccggcccgccacgacgagaccaggaaagagacgccaaacag

SEQ ID NO: 150285 - RNA, 80 nt, Homo sapiens
ggacagaccaccgagggcgggaagggacgggcccgaagacaccccgccaaaaggacagaggaccacggagacagcagaga

SEQ ID NO: 150286 - RNA, 48 nt, Homo sapiens
gggagagccaaagaaggaaacacacgccgagaagacggccccacggag

SEQ ID NO: 150287 - RNA, 89 nt, Homo sapiens
ccaggggcccgagggcggggaccggcggcgcggaggagcgaggcagcgacaggacgggaacgggccccaaggacgccccccaaggacac

SEQ ID NO: 150288 - RNA, 91 nt, Homo sapiens
cgggcggaccggagcgggcggcggaggacccggacagagaccccggagggacgcagaccgggagggggggagaagaacaacccaaagaagg

SEQ ID NO: 150289 - RNA, 57 nt, Homo sapiens
ggagagggaaacaaccccacgagaaggccccagagcgccgaggcggggccagggagc

SEQ ID NO: 150290 - RNA, 72 nt, Homo sapiens
cgaggcggcggcgcccggagggcagcgaggcacaccagaaaaggaagacaacgaaggagagcaccacgaaag

SEQ ID NO: 150291 - RNA, 68 nt, Homo sapiens
ggaccccggccggaggcaaggacaagagcaccaagagagaccaggacacaccacgggaacaaaaaagg

SEQ ID NO: 150292 - RNA, 87 nt, Homo sapiens
ccggcagcagagcacggcgcgcagccccaggagcagaggcccgaaggaggccaccaaggagggcacacccaggcagagaagcgagca

SEQ ID NO: 150293 - RNA, 74 nt, Homo sapiens
ccaaacaaggagccagggaaaaccaacccagaccgcccacccagaagggagccaggacaggagaggaaaaccaa

SEQ ID NO: 150294 - RNA, 66 nt, Homo sapiens
ggacacaccggcagcaaacagcaaggaggcaagagggaaaaaggcggaaagcaggcaaggcagaga

SEQ ID NO: 150295 - RNA, 83 nt, Homo sapiens
gcccggaccggccgagaggaagacgagccgggaggaacggcccggaaacaggaggacgagaggaaccgcacccaaggacggcg

SEQ ID NO: 150296 - RNA, 35 nt, Homo sapiens
ccccggaagccagaaagagggcaccccaagaacca

SEQ ID NO: 150297 - RNA, 79 nt, Homo sapiens
gagggagaccacagcaagacgccaggacccacggaagccagaaagagccggccggaggaagaggagaaaagcgggaaga

SEQ ID NO: 150298 - RNA, 90 nt, Homo sapiens
ggcgacgccacggccgcacacacgggaccggacaacaacagggggccggcacacaagaaggggcccggaccacggcacgggaccgaggag

SEQ ID NO: 150299 - RNA, 56 nt, Homo sapiens
cacgcgggcgaaggcgcaggaagaagggaggacgaaccagaaccaaccaggaccaa

SEQ ID NO: 150300 - RNA, 84 nt, Homo sapiens
ggagcgccacaccaaggccaagaacgggcaccggcgggacagagcgggagccaccagcgccaaagggaagccaggagcccgggg

SEQ ID NO: 150301 - RNA, 72 nt, Homo sapiens
gacgagcaacaggagagggaacgggaggaccaggggccaacacacgcgcaggaagcgggaggaccggacgaa

SEQ ID NO: 150302 - RNA, 80 nt, Homo sapiens
ccgcggcggcagcagcaggagaggaggcagcacggcaggagacgaggagaggacagcaggacacccggaccccaccgcgg

SEQ ID NO: 150303 - RNA, 80 nt, Homo sapiens
agaagcaacacacggcagaagcagaacgccgaaaacaacacaacagacaggggagacaccgagccccacgcagcgcaggc

SEQ ID NO: 150304 - RNA, 69 nt, Homo sapiens
aacgggccggacacggggaccaaaaacggacaccagaagaaaaaagcacagcaaacccacaggagggcc

SEQ ID NO: 150305 - RNA, 108 nt, Homo sapiens
ccgccgccgcgggcgccagaaggaagaggcggacggaggagcaggcgagaagagaaggcaaaagcagaccggaaaacccaccggcaagaccacacccgaggggagccc

SEQ ID NO: 150306 - RNA, 36 nt, Homo sapiens
cccaccgccgaccaagaaggaccggaggaacgcgac

SEQ ID NO: 150307 - RNA, 56 nt, Homo sapiens
gcccacagcccagaggacggaagacagagcacggggccaaaaaggcacgagggaac

SEQ ID NO: 150308 - RNA, 60 nt, Homo sapiens
cccacagcccagccgggaagggacagacgggcgcagacccggaaacagcagccagaacgg

SEQ ID NO: 150309 - RNA, 70 nt, Homo sapiens
acgcaaccccggggcggcgcacacagcccccagaaagaaggccgcggaggaggagaacaccgacaacagc

SEQ ID NO: 150310 - RNA, 68 nt, Homo sapiens
aggggacgaacaagaacagaaagggaacacagcagagggggaaaaaaacagaacagcaggaacaggaa

SEQ ID NO: 150311 - RNA, 86 nt, Homo sapiens
accacgggagaagcaccagaccgagccgagcccagaggcccagaagacaggggaggcgagcagcccagaccggaaggagggcagag

SEQ ID NO: 150312 - RNA, 73 nt, Homo sapiens
accgggagagcgaccagggacaaaaggagagaacagaaagaccaagcagaagagaggacaaagcaccgggcag

SEQ ID NO: 150313 - RNA, 68 nt, Homo sapiens
gcggcccgaacagacagcgcgccacccccgaggcccgggcggggccgacagcaccgccggcgaccgca

SEQ ID NO: 150314 - RNA, 85 nt, Homo sapiens
gaagagcagacggggggccccgcgaggcccggaggcgccgagcggaggagaccagcagaagggcaggcccagcccccggacacgg

SEQ ID NO: 150315 - RNA, 37 nt, Homo sapiens
ggaaggaacgcacacaacaagacggggcgccagggcc

SEQ ID NO: 150316 - RNA, 69 nt, Homo sapiens
cgaccgagccaggacaaacagaggcccacgcggaccggcagcgccaccggaccaccagacaaggacacg

SEQ ID NO: 150317 - RNA, 82 nt, Homo sapiens
cagcagggacccaaggggggagcgggaacacccaaaagcgagcgcaaggaggcagagcaaaaacgagaccaggagaaacgaa

SEQ ID NO: 150318 - RNA, 84 nt, Homo sapiens
agcagacccagcacgggacagaggcaagggcaaaccaaaaacaaaaaaccagcaaaggaaaaaagacaagagcaaagaaaggca

SEQ ID NO: 150319 - RNA, 74 nt, Homo sapiens
gcccagaaaacaggaaaacagacccaggaagccacgagggcgaggcgcagcggacaagggacagaccaggcacc

SEQ ID NO: 150320 - RNA, 58 nt, Homo sapiens
agagcagcccgggggaggagccacggcacccggcgagccgcccagcaaaacccaacgg

SEQ ID NO: 150321 - RNA, 102 nt, Homo sapiens
cgaggacaaaggaacagcacagggcgcaacaagagcgacaaacgcagggccggcccagggagaacgcaaaaccaccacccccacaaaaaacgcagggagaaa

SEQ ID NO: 150322 - RNA, 82 nt, Homo sapiens
cccagccgaagcagccaccaggaggcgcaggcacaaggccagggagaccagggggcaggggaggagcgcccaggcgaccggc

SEQ ID NO: 150323 - RNA, 39 nt, Homo sapiens
aaggagaacccagcccgacgggaacaaaaacccccagag

SEQ ID NO: 150324 - RNA, 58 nt, Homo sapiens
ggaccaccgcggcagcacgcggcgccgggagacaaggaaaacacacagaaaacaacag

SEQ ID NO: 150325 - RNA, 78 nt, Homo sapiens
caagccgggaaagggacaagaagggcaaagccgaagacaccaggggggaaaaaccacacaggcaaagaacgcgcaaaa

SEQ ID NO: 150326 - RNA, 79 nt, Homo sapiens
agaaaagagacggagcaagagaacgcaagagacgggcgaaccgaccaagaacaacacccagagggccaggagaaggcga

SEQ ID NO: 150327 - RNA, 67 nt, Homo sapiens
agcccccaacagggaacagcggggcacacaggcgggaaaacaccgagggacggaaaaggcgcacacg

SEQ ID NO: 150328 - RNA, 72 nt, Homo sapiens
gaacggggcaaacgccgaaaggccggaggaacgaaacagcaaggagaaccaacaaccgccgacgacgaccca

SEQ ID NO: 150329 - RNA, 38 nt, Homo sapiens
ggaccacacacagaccaaggccagcagagcccaagggc

SEQ ID NO: 150330 - RNA, 88 nt, Homo sapiens
gaagcgccgggcccgcgcgggggggagagccacgacgccgggaccgggaccgccgccgccgccgccaccaggcaccggcccgaccagc

SEQ ID NO: 150331 - RNA, 47 nt, Homo sapiens
agaacacaccagccccaaggcagccaccgagagacaaaccggaccca

SEQ ID NO: 150332 - RNA, 79 nt, Homo sapiens
caagacccacccgccacggcaccaggcccgaagaacaccgaagcagcacacagaccgaaagaccgaccaccccgggcgg

SEQ ID NO: 150333 - RNA, 52 nt, Homo sapiens
cggacccagcaccaacacaggcagagagagacacagccgaaagcggacgcaa

SEQ ID NO: 150334 - RNA, 77 nt, Homo sapiens
agaagaacggggcaggaaccaggaccgaacccgccccccagagcggggcccggcgcacccaccaccgccgcccacgg

SEQ ID NO: 150335 - RNA, 38 nt, Homo sapiens
aaccccaggcccgccgcacaggggacccaacagaggga

SEQ ID NO: 150336 - RNA, 40 nt, Homo sapiens
ccacacacgacgggaagcggggggaccacgggagaggagg

SEQ ID NO: 150337 - RNA, 57 nt, Homo sapiens
ggacaccgggaccgggggcgcagcaccgaagcaaagagaggagagagaaacaccccg

SEQ ID NO: 150338 - RNA, 82 nt, Homo sapiens
ggcgcgggagcgcgcggagcggggcgcagaagacggaggaggcggagcgccacaaggaggacggaccacccaccgccgccga

SEQ ID NO: 150339 - RNA, 58 nt, Homo sapiens
cccccagcggggcggagcgaccccgcggggcgcgagcagaaacgaggcccagcagaga

SEQ ID NO: 150340 - RNA, 81 nt, Homo sapiens
aggagacaggccggggagagggcgagcggcagagcaacaacggggccccggcagggacaagccaggacaaggcccaaggca

SEQ ID NO: 150341 - RNA, 57 nt, Homo sapiens
ccgggcaaggggacgcgcagcgaaacgaggaaccccagagaggacagaagccaacca

SEQ ID NO: 150342 - RNA, 84 nt, Homo sapiens
gccagagccgggcccaggggccggagacccccagaaccgccaagaccaagaccccaggagagggaacccccgccaacccagcac

SEQ ID NO: 150343 - RNA, 78 nt, Homo sapiens
acagagaagacagcgcagacaacgaggaaccgcaaagaggccgaaaaagagggaccgaacaagccagaaagaaaagaa

SEQ ID NO: 150344 - RNA, 81 nt, Homo sapiens
aagagcagcggaaaagaccagcacagaccccgccccccgaggcgcagcccgaacccagcagccacacgccaacaacgagac

SEQ ID NO: 150345 - RNA, 79 nt, Homo sapiens
gacggcgacgcgggaggccaggggacccaagagccaacaggcagcaaaaggcagaacaaagcacaaaggccgcaagagc

SEQ ID NO: 150346 - RNA, 75 nt, Homo sapiens
gccccccagaaggagagacccgccaggagccacgaggacgccaaccagccgcggacgacaacggggccggcccag

SEQ ID NO: 150347 - RNA, 74 nt, Homo sapiens
gaaagggggagcaagaagagggacacaaggaaaccccaggggagcggcgacaaggagcccacacagacaaaaga

SEQ ID NO: 150348 - RNA, 61 nt, Homo sapiens
cacaggcgcaaaaaacaaaaaggaagccccggcaccagaacggcaagccggcccacccgag

SEQ ID NO: 150349 - RNA, 73 nt, Homo sapiens
cgcgccggcgcaaagaagcccaagccaggacggaccccaagcaagccggaagccgcccgaacacgaagaagag

SEQ ID NO: 150350 - RNA, 43 nt, Homo sapiens
aggaggaaaggccagaccacagaagagcggacagagagcacaa

SEQ ID NO: 150351 - RNA, 80 nt, Homo sapiens
aagggagccagcacgccaaagaggagcgcgacagaacggggcaaaccggaaaagcagccaaaggaccagaaacggcaagc

SEQ ID NO: 150352 - RNA, 56 nt, Homo sapiens
caagcaccggagaaaacccacggaagaagacggcacgggacccccagcacaggcag

SEQ ID NO: 150353 - RNA, 65 nt, Homo sapiens
agccgaacaggcagggccagacccagaccagagacaaggccccgagggaggagcccgaaggcgca

SEQ ID NO: 150354 - RNA, 76 nt, Homo sapiens
agaggcggcggcgcggggcccccagaaggacgccagcggagaacgcggcaaagcgagggaaagcacaaagcgcgga

SEQ ID NO: 150355 - RNA, 59 nt, Homo sapiens
cccacagccagcaacaccggaccaagaaaggcccagggaccaaagcccggacaaggccc

SEQ ID NO: 150356 - RNA, 75 nt, Homo sapiens
cggaaccggccaagggaaagggcccaagcggcacggggacaagacagacaacaggacaaagaggaaaccagaccg

SEQ ID NO: 150357 - RNA, 66 nt, Homo sapiens
agggacagcagggacagaacaaacggagaaccaggagcgaagacaacggggaccaaagaagccgcc

SEQ ID NO: 150358 - RNA, 41 nt, Homo sapiens
acccgagcaacccaggccagccacggacaaaacagggcgac

SEQ ID NO: 150359 - RNA, 80 nt, Homo sapiens
ccgcaccgagggcgagcccaggaacacagcacccacccacacccacacccgcgacgggagggaggagccggccagcaacc

SEQ ID NO: 150360 - RNA, 80 nt, Homo sapiens
aggccacagccggagcccccggagcggagagcacccagagaccaggacagccagaggcccaggaagacacgagaagcccg

SEQ ID NO: 150361 - RNA, 45 nt, Homo sapiens
aaacacgaggcgcccaggagacgagcagggcagaaaccaaacgcc

SEQ ID NO: 150362 - RNA, 40 nt, Homo sapiens
gggcagagccagcaaagccccaaggaggcccgccgacgac

SEQ ID NO: 150363 - RNA, 69 nt, Homo sapiens
cacagcaggacccaagcagccgaggaaaagaccaggcacggacacggaggcgcggggggaccacgaagg

SEQ ID NO: 150364 - RNA, 84 nt, Homo sapiens
cccaaaagaagaggcacaggcccaggcagaccgcagcaaagaacgcaaggcggggaaaaaaaggcagcacacagacgcagcaac

SEQ ID NO: 150365 - RNA, 80 nt, Homo sapiens
gaaaggacaaaacaaaaccgacaaagaccaaaacagagaaccgggcaagcaccccagagccgagacacacggaagccaga

SEQ ID NO: 150366 - RNA, 54 nt, Homo sapiens
gccaagaaccacgggggcaaggcacggggagcgcagccaccccgaccaacccgc

SEQ ID NO: 150367 - RNA, 90 nt, Homo sapiens
ggagagccgggaccggccgggaagcggccaccgacacgcagcagcggccagaccggaaacaggcacagaacagaaggaaaggacgaagag

SEQ ID NO: 150368 - RNA, 63 nt, Homo sapiens
ggaccggggcagccagggcgggaaggccagggcaggacagcagcccgcaacaggccggccagc

SEQ ID NO: 150369 - RNA, 79 nt, Homo sapiens
ggcccggggcccgggggcgcgggccggggggggccggccgcgcgaagacgcggaccacggccacccacggcgccgacac

SEQ ID NO: 150370 - RNA, 82 nt, Homo sapiens
gccggcgagaagcggccgagccagcagcaggaagggcggaaaaggcaaaacagcgcaaccaagagagaggaagagagagcaa

SEQ ID NO: 150371 - RNA, 95 nt, Homo sapiens
agggaccccacgacagaaaaacaacaagaccccagccaacagaggacgaaagagaggaacggacaccccccaggcacagccacaccccagcggcc

SEQ ID NO: 150372 - RNA, 73 nt, Homo sapiens
cggaaacgaagaaggcccagcccaccagaaagccaacggaagagcaacaaggacaagccaagagaccaggagc

SEQ ID NO: 150373 - RNA, 65 nt, Homo sapiens
acgagaagacgagagaacgacagggagccacaggaagaaggccacagggccagagagggacaagg

SEQ ID NO: 150374 - RNA, 68 nt, Homo sapiens
aagggagaaaggggcaaaacaaggggaagggggccagacaaccagggaagcacagacacgcgcaccgg

SEQ ID NO: 150375 - RNA, 61 nt, Homo sapiens
agaaggcccggacacagcaaaccgggccacagcccaggccagcccgcagccggaggggcca

SEQ ID NO: 150376 - RNA, 75 nt, Homo sapiens
gaagaagacccagggaaacccccaggcccagggaaacacccggagaacccaggcaacagagcaaccgcagacagc

SEQ ID NO: 150377 - RNA, 82 nt, Homo sapiens
cccccccgaacgcgagggagcgcaaccaccaaggcgggagcagcggaagacaccaaggccagggagggccaccgcacggaag

SEQ ID NO: 150378 - RNA, 75 nt, Homo sapiens
aaggaggagcaagaaagacaccaggggggaaaaaccacacaggcaaagaacgcgcaaaacaggacgaaaacaaag

SEQ ID NO: 150379 - RNA, 78 nt, Homo sapiens
cccgcccagccccgagccgggaagcgaaagccccgaagggggaaccgcaagcggccaagcacaaagagcgccccacga

SEQ ID NO: 150380 - RNA, 75 nt, Homo sapiens
aacaagcccacccagaaaaaggcccgggacccaggaaccaggaaaccacagccccaaggagcagccagggcaacg

SEQ ID NO: 150381 - RNA, 77 nt, Homo sapiens
ccagcacggcccaagaagaccaacacagaccgcagcccccggcgccaccagcagccaaagaccccagacccgcagag

SEQ ID NO: 150382 - RNA, 62 nt, Homo sapiens
ggaaccacccaggccccacacccccagcaccgcccagccgacgggggaggaacaacgaccga

SEQ ID NO: 150383 - RNA, 75 nt, Homo sapiens
accgggccaacacccgcccccgaaaaaccacggggaagccacccgacagggccggggacacaagcaacagccaga

SEQ ID NO: 150384 - RNA, 77 nt, Homo sapiens
cacacagaaccgacccaaggaacccaaagccgcaaggggacgaaccgggagaggagccccaccggccaccaggcgac

SEQ ID NO: 150385 - RNA, 78 nt, Homo sapiens
cagcccccggcccgcgcgcccgcacccggccgccggggccgcccaggcgagagccacagaaggaggaggggacagcag

SEQ ID NO: 150386 - RNA, 35 nt, Homo sapiens
ggcaaaggccccgacaggaaaagggggccaggaag

SEQ ID NO: 150387 - RNA, 71 nt, Homo sapiens
cgaccgagcgagcaagaacaagaaaaaccagacaccaaaggaagcaggaaaagccgaacaaacgagcccgc

SEQ ID NO: 150388 - RNA, 85 nt, Homo sapiens
gaggcaccacccccggagcccccccaacacggaccgcgcccgccgggcacacaagaaggcacgaacaggagacagcggagaaaga

SEQ ID NO: 150389 - RNA, 59 nt, Homo sapiens
aggaggggaaacaccagggcagcggcagaaagacccggcaaggccaggagcgcccagga

SEQ ID NO: 150390 - RNA, 85 nt, Homo sapiens
ccaggccgggcaccccgagcgcaaggacagcgcgaggccgcgcagcccagcgcagccaagaaggagggggcagagcacggcaggc

SEQ ID NO: 150391 - RNA, 81 nt, Homo sapiens
gaggggagcgcggggcccggcagaaaggccgaacgaggcggggggcccgagaccacaccacacccaccagggaggaccgga

SEQ ID NO: 150392 - RNA, 51 nt, Homo sapiens
cagccagggcgaacccccgcagggcgaggacaaccaaagaagagaacaaac

SEQ ID NO: 150393 - RNA, 61 nt, Homo sapiens
aacaccacaacggagagggagaaacaggcaacacagcgggcaaggcccccgcaccgcagag

SEQ ID NO: 150394 - RNA, 75 nt, Homo sapiens
gggcccaggaagcagcgcacacaaaggacgaaggagagccgagccacgcggccacacacaagaggccggcccagg

SEQ ID NO: 150395 - RNA, 84 nt, Homo sapiens
gccacaccgagcgcgaggcgcggagagcaacgccgggacagcgcaaggacaccagaggaccagaacccacgagaaacagacgag

SEQ ID NO: 150396 - RNA, 56 nt, Homo sapiens
ggagacccaggcccagaggaagaaagcaaggcggcccccccaacaagagcggcgcc

SEQ ID NO: 150397 - RNA, 72 nt, Homo sapiens
caaaaggcgggaaccagggagcaccaaccccagccaagggggaggcaagcggagcaggcagaccgaagacga

SEQ ID NO: 150398 - RNA, 66 nt, Homo sapiens
gagcaaaagcaccccgcaccaacgagaagaggaagagaagcccagacacgaagaagagagccagag

SEQ ID NO: 150399 - RNA, 71 nt, Homo sapiens
cgggagagagaaaaaccggacgagcgagcaaggagaacagagcgcacgcacccagagaccggggccgggcc

SEQ ID NO: 150400 - RNA, 78 nt, Homo sapiens
cagagggacccggacaaccagaggcagccagcagggggagcaaaagcgaaagccggacacaccaaacgcagcccagca

SEQ ID NO: 150401 - RNA, 69 nt, Homo sapiens
agaaaacaacaccccaccccacccaacgggcacacaagggacgcacgagagcgaccgcacagggaaaga

SEQ ID NO: 150402 - RNA, 73 nt, Homo sapiens
caaaggcacccgcgagcgcaacccaaggcaagaggcgcagagccagagaccggagacaccaagacggggcaga

SEQ ID NO: 150403 - RNA, 63 nt, Homo sapiens
ggaaagaccagaagaagccagggaggccagacgccagaagggagaccacggggaaaagagccg

SEQ ID NO: 150404 - RNA, 58 nt, Homo sapiens
cgagggccaccgggaaggacagaaggaacagagacagacccgggggcccccaaggaga

SEQ ID NO: 150405 - RNA, 80 nt, Homo sapiens
agcaacacgagacgcggcagcgcaggccaagaaagagagcgggcgcgcaaggagacacacgaaggggacagcgcccaaag

SEQ ID NO: 150406 - RNA, 58 nt, Homo sapiens
aaaagacgggcgccgcgggcagcgcgcggcccgggcagcagcaaagcccagacaagcc

SEQ ID NO: 150407 - RNA, 77 nt, Homo sapiens
ggccgggcccagcaccgaccgaacacagaaacgccccgggccagccgccaaggccgcccagagccccagcacaagac

SEQ ID NO: 150408 - RNA, 71 nt, Homo sapiens
ccgacggacccgcgcggggcgccacggccggcagggacgcccggagcggcccacacacgggccgccggcag

SEQ ID NO: 150409 - RNA, 103 nt, Homo sapiens
agagggcgccccaagcggaaagcgcacggggaaaacaaggggacccgggaagagggccaacaaaaagggcaggggacccacaggacgcagccacaccgcccgc

SEQ ID NO: 150410 - RNA, 75 nt, Homo sapiens
cacaggccgacccgcaggccccgaaaaagcggaagcaacaaaaagcaacaaacgcacaacgggaagagccacccc

SEQ ID NO: 150411 - RNA, 70 nt, Homo sapiens
gcaacaacagaaacagcaccagacccccagagaaagagggcacacagggcagaaaccaaacgcccaaaag

SEQ ID NO: 150412 - RNA, 75 nt, Homo sapiens
ccgacgcagcacaagaacgcagacccccagaacaagagcgcccaagaggaccccgaaggagcgggagcgcagaag

SEQ ID NO: 150413 - RNA, 74 nt, Homo sapiens
ccaacaaggaggcaaccccgcccggaccaaggaaggagaggaagagcaggcccagccaacaaccagaaaaacca

SEQ ID NO: 150414 - RNA, 80 nt, Homo sapiens
agcgacggggaggcgcggccaacggggccacaaggagaacaccaacaccagcagcagaggcccccagacccgagccagca

SEQ ID NO: 150415 - RNA, 113 nt, Homo sapiens
ggcggccgcagccagcccgggggcccgaggagggaaccggccacggagagcaccaccggacgggcggcagagaagagaagagcacagcgggaggaaagggagagacaagagag

SEQ ID NO: 150416 - RNA, 108 nt, Homo sapiens
cgccagccgcaccagccgcccaagccgcacagccgcggcggcagcagcaggagaggggaggggcgaccccggggcccggccagcacgaccgaggaggggcggacagcg

SEQ ID NO: 150417 - RNA, 59 nt, Homo sapiens
gggccgggacgcagcccggcggcagcagggcggaaaacaccccaaaagccaaaagggaa

SEQ ID NO: 150418 - RNA, 77 nt, Homo sapiens
ccagagaaaaggcggaagaccgccaaaaaggacacggagccaggaacaagcacacagagacggggacggcaacaaca

SEQ ID NO: 150419 - RNA, 71 nt, Homo sapiens
ggacaagcgcagggaccgagaaccaaggcgccaccagcaaaaccagagaaacaggcagagaaagacacccg

SEQ ID NO: 150420 - RNA, 67 nt, Homo sapiens
ggggcgaaccgagcaccagaaaaggggaagaaggccaaccgggggccaagggggaagggaggcagca

SEQ ID NO: 150421 - RNA, 77 nt, Homo sapiens
ccgaaccaccaccacagacccccaccagaaagcaaacgagggcacacggcggggaagcggaggcggaccggaaacga

SEQ ID NO: 150422 - RNA, 86 nt, Homo sapiens
gaaagagagcaaggggaaggacgggagacacagacacaccgcaaacggggacagcgccgaccggaacagggaccacggaagcccag

SEQ ID NO: 150423 - RNA, 100 nt, Homo sapiens
aagaaaggaaggaaccgggaggggagggaagggacaagaagaacgcccgggcgaggaggccaacacgcggaccaggacggaggcgagggagaccggacgg

SEQ ID NO: 150424 - RNA, 85 nt, Homo sapiens
gaacaaggagaagaaccaggagacggaggaagaacccaagccagagcccaggacgaacacagagcagaacccaggaacagagggc

SEQ ID NO: 150425 - RNA, 81 nt, Homo sapiens
gggagagaggccgccgccccggcccggcgcagggcccggggcaggcagaacgcgcgccgggcggacgcgcagggcaagggg

SEQ ID NO: 150426 - RNA, 69 nt, Homo sapiens
cccgcgcgcgcgcccccgcgcgcccccaggccggaaagagaagcccagcgagggggagagaagacggag

SEQ ID NO: 150427 - RNA, 67 nt, Homo sapiens
acaccaacaggaagccaggggagagaaggccgagacagaggagcaacacaagcggaaagaaggaacc

SEQ ID NO: 150428 - RNA, 76 nt, Homo sapiens
cagccaggagcacggggggggccagggagcccggaagaggaaagaaacagcaaacaaaacgccccaaaacacgaaa

SEQ ID NO: 150429 - RNA, 74 nt, Homo sapiens
ggagcgcccggacacggaccggacagagaagaacgcgacaaaaaccccgcacacgaaggcccccacaagaagac

SEQ ID NO: 150430 - RNA, 72 nt, Homo sapiens
cgagaaaccaaagggaacgggggagagaagccacaaagcaagcagggacaggacaccccagggagagaccga

SEQ ID NO: 150431 - RNA, 70 nt, Homo sapiens
ccacgagaaaaagacccaggggcagcccacagaggaaacaccccgcaggacaccaaggaggaggcgagga

SEQ ID NO: 150432 - RNA, 79 nt, Homo sapiens
ggcgcgggaaacgggcgaagcgacgagccgcgaggagacagggaggccgcacagaggaggagcaccaaaccgagggagg

SEQ ID NO: 150433 - RNA, 75 nt, Homo sapiens
gagaaaaaaaggcaaaagaaaaaaagcacaagaacagggacagggaaacagggagcggggagcagcccgcacacg

SEQ ID NO: 150434 - RNA, 83 nt, Homo sapiens
ccggagagacagcaccgaagacagccaccccggggacacggcaagcagggagaggagccgcgaaggcggcgaccaccccgcag

SEQ ID NO: 150435 - RNA, 78 nt, Homo sapiens
gggcgagaccacaaagagacaccagcggcaccggagaccaccggagcaccccgacacagcaccggaggggccaggaaa

SEQ ID NO: 150436 - RNA, 88 nt, Homo sapiens
cgagagaagccggcggggacgagagccccgagggcgccgggcccacgggaccggacgaggcccagagcaagagaggcacccacccgaa

SEQ ID NO: 150437 - RNA, 87 nt, Homo sapiens
ggggagcgcgacgcgcaagggcgcggagccgcgggccggcgagcgcgcgccaccagggcaggcgccccaacccaagccagaggaggc

SEQ ID NO: 150438 - RNA, 72 nt, Homo sapiens
cggcacacaaccagagcgaggccggccacacggcacacagcccaccaggcaccgggcacgggagcgggccgg

SEQ ID NO: 150439 - RNA, 89 nt, Homo sapiens
aaaggccgccgccgccgccgccgcgccgagcggaggaggaggaggaggcgaggaggagagacaaccggggagaccacgacgcgccccgg

SEQ ID NO: 150440 - RNA, 54 nt, Homo sapiens
gccacccaaagccagcagaccggaaacaggcacagaacagaaggaaaggacgaa

SEQ ID NO: 150441 - RNA, 54 nt, Homo sapiens
ggcgggcccacgcagagagaccccaggcacgagaagagaagcccagagcaaaac

SEQ ID NO: 150442 - RNA, 88 nt, Homo sapiens
caccccaggacggacagcaggggccgacggccgagaagcccaggaagggaaaaggccgaggcacagcgggaagaccgcaaagacgacc

SEQ ID NO: 150443 - RNA, 81 nt, Homo sapiens
aagagaggaaacagacccgagagggcgccgcgaaaagaaaacgaacccagaccaaagaaggagggcaggccccgggacgag

SEQ ID NO: 150444 - RNA, 80 nt, Homo sapiens
agaaaacgacagacacaaaaaagaccagaaaagaaaaacccggacacaagcgccagaaaaggaaccacgaggccgaaagc

SEQ ID NO: 150445 - RNA, 99 nt, Homo sapiens
ccggaacccgcaggaggaccgagcgacagcgcacggcagcggcaccacggcgacgcacaagggagaaagaagagagaccagaaacgagaggagaagaaa

SEQ ID NO: 150446 - RNA, 60 nt, Homo sapiens
gcgacgcggagcaaacggagccgccaagggggaaggggggaccgacacaagaagcagcca

SEQ ID NO: 150447 - RNA, 75 nt, Homo sapiens
agagagaaaccaacaagcggagagagccgaggagccgaacccaagcagagcgagaggaaaagggacgagcaacag

SEQ ID NO: 150448 - RNA, 80 nt, Homo sapiens
ccgagaacgggaaaggaaggcccggaggcgcccagggccgcacacgaggcacacacgggcgcgggcgccggcgaggcggc

SEQ ID NO: 150449 - RNA, 77 nt, Homo sapiens
gaggccggagacgaggggacccaagcggagacagcaccgacagaaggggccaagaacggcggcagaaagcaaaggca

SEQ ID NO: 150450 - RNA, 73 nt, Homo sapiens
ggaacgcaggacccaaagcgagcaggaacacaaacaccgaagcacgggcccaacaggcaccccacaaacaggg

SEQ ID NO: 150451 - RNA, 77 nt, Homo sapiens
aaaagaaggagcaaaagaaaagggagacagaacagcggaagaagaacgagacagcagaaagaagcagcgcaaggccg

SEQ ID NO: 150452 - RNA, 68 nt, Homo sapiens
ccgcggccggggcaggagcgcagggcgcgccagaggacaccagacccaaggcgcaagaaaaggagccg

SEQ ID NO: 150453 - RNA, 73 nt, Homo sapiens
gggaacagaaggggccagcagcccgccggcggccgaaagacacagacgcggccaaccacccaaagaggagcaa

SEQ ID NO: 150454 - RNA, 60 nt, Homo sapiens
gcaaagccaccccccgaggaaaaaggagcgaagaacagagccgcccaaagagacaccaaa

SEQ ID NO: 150455 - RNA, 58 nt, Homo sapiens
ggacagcgcacacagcaagcacgaggggaaagagggaccagcgcagcagaagcaggga

SEQ ID NO: 150456 - RNA, 77 nt, Homo sapiens
aggagcggaaggcggagcgaagagccggaccaagcgccagagcggggacaagcgagggagcgaccgcagagaggacg

SEQ ID NO: 150457 - RNA, 65 nt, Homo sapiens
aagagagaaaggacggacgacagacaaagaagcaccgaacaggagcggaagaaacccagacgccg

SEQ ID NO: 150458 - RNA, 77 nt, Homo sapiens
caaaaggcagggaaaaggaagagaagccgcgacccaaagcggagcccaaaaaaccaggcacccaaaacagaagggag

SEQ ID NO: 150459 - RNA, 85 nt, Homo sapiens
cgcagaccgggccgggccgccacaggggaggaagcagccaggggaagacgcccccaccacagaacggaggaggggcaggaagggg

SEQ ID NO: 150460 - RNA, 83 nt, Homo sapiens
agaccccaggacaagacgagaaggagccacagaggggaggacagcagagagaaaggacaagaaaaccccaggacacagagcgg

SEQ ID NO: 150461 - RNA, 98 nt, Homo sapiens
gaaacgaccaaagaccagcaccggcccgaaacgccgaaaaacccaagggcagacacaaggaacagccagccaggagaaaaacgaacccaacagaccac

SEQ ID NO: 150462 - RNA, 89 nt, Homo sapiens
agcaggcggagccagacggcaccgaagaaaccagcccgagcaaaggggcgaggccaaccaagaagacgggagacaagaccacgagacac

SEQ ID NO: 150463 - RNA, 65 nt, Homo sapiens
cacagaagaaacgacaccagagggaccccgacggagagacaaagaagacggagggggggccagcc

SEQ ID NO: 150464 - RNA, 84 nt, Homo sapiens
ccaagagaagcgcaagagcaacaccccaccccaaggggcaaaggaaaggggcaggcacccccaacaagaaggaagagaaagaaa

SEQ ID NO: 150465 - RNA, 75 nt, Homo sapiens
gcagggacgggccagcaagccgggcgaaagacaacaggcaaacagagcacgggaccgggaaagcagaagaccaag

SEQ ID NO: 150466 - RNA, 83 nt, Homo sapiens
ggggccgaagcagcaggacaccgaccaggccccgccaagacagccacacgaacacggacccccccaggcagagcagacagcag

SEQ ID NO: 150467 - RNA, 76 nt, Homo sapiens
cgggcacggagacccgcaacagccggcccccaccagacagcaggagcgagaacccgagcagcgccagagcaacaca

SEQ ID NO: 150468 - RNA, 74 nt, Homo sapiens
gcaagccggccgggaagacccgagccccaaagacagaaaagccccgagacggaagagaagagaagagaaccaaa

SEQ ID NO: 150469 - RNA, 75 nt, Homo sapiens
cagacgagggccccccggccgagagcgagaagcagcagcccagggggcccaaccaggagcggagcaaggagcaca

SEQ ID NO: 150470 - RNA, 69 nt, Homo sapiens
ccgaagacagcagcgcaagagggaccccgacggacaccccccagcgcaagccagcccgcaggcccccga

SEQ ID NO: 150471 - RNA, 66 nt, Homo sapiens
cggaccagaaggccagcaaagacaacggcaagcggagaagagcaaggccgaaccgagaggaagggc

SEQ ID NO: 150472 - RNA, 71 nt, Homo sapiens
cacaaacaccgaagcacgggcccaacaggcaccccacaaacagggcaggccagggagccccaaaaagaagc

SEQ ID NO: 150473 - RNA, 71 nt, Homo sapiens
caggaaccaggccggccagcgaacgacccaggggcggggggaaaagaacgcaggcaaacagacacaaacca

SEQ ID NO: 150474 - RNA, 71 nt, Homo sapiens
agcaccgcacagacggccgacgcacacgaaaccaccaagaccaaacgacgccacaggccggagagaagcca

SEQ ID NO: 150475 - RNA, 57 nt, Homo sapiens
cgcagaggcaaggggccaccaggaggccagggggcgccaggacggcagagaacgccg

SEQ ID NO: 150476 - RNA, 78 nt, Homo sapiens
gaggcacccagccggagcaggcgcaagaccacaagcgcccggagcacagggcagcggagaccgaaaggcgcccggggg

SEQ ID NO: 150477 - RNA, 40 nt, Homo sapiens
ccgcacgacagcggcccgcggacaccacaccgagcagaga

SEQ ID NO: 150478 - RNA, 77 nt, Homo sapiens
cccgggcggggcccccgccacgcccaaacgcgaagcagccccgcgaggaccacccggcagaacagaagagcaaacca

SEQ ID NO: 150479 - RNA, 70 nt, Homo sapiens
gcgaaccacggaaaggaggaagaagacaccggggacagacagggagcggccagccaacaggacagccccc

SEQ ID NO: 150480 - RNA, 67 nt, Homo sapiens
gagggaggaaaacaaccgagggcagaccgaagaaaaggagagaggcagaccaaaacgggcccgcgga

SEQ ID NO: 150481 - RNA, 74 nt, Homo sapiens
cacgggaagaccggaggggacgaagaacgggcgaaagaaaccagaggagaaggagagaaaagaggaaggcagga

SEQ ID NO: 150482 - RNA, 87 nt, Homo sapiens
agaaacagagggagaacaagacacgaagagcagcagccggggaaggagggaccacgggcaagacgagaagaaaggcaccgcacacac

SEQ ID NO: 150483 - RNA, 75 nt, Homo sapiens
gcggcgacccaggcccaaaccaaggccaaaagaaaggaagggcaaccccagggacgaggaccaaggaagaaaacg

SEQ ID NO: 150484 - RNA, 77 nt, Homo sapiens
acaagacacggagcaaggaggaaaacacacggggcacaacagcaggacgcccagaacagcgcaccggaccaccacac

SEQ ID NO: 150485 - RNA, 77 nt, Homo sapiens
cgcccgaggcgaggaggagcgcggcggacccaaagacaggaccacgcaccagcagagaaggaaagcaaaccgaagca

SEQ ID NO: 150486 - RNA, 78 nt, Homo sapiens
cgaccgcaaccccggaggacggcgagaaggcggcgcgcgaggcaagcgcgcgccgagacggagggaacggaagacaag

SEQ ID NO: 150487 - RNA, 82 nt, Homo sapiens
gagggccacgacaaggccaacccaagcagccgaccgagaagcggccagagcagcagggacccacgagccgccgcccgggcgg

SEQ ID NO: 150488 - RNA, 67 nt, Homo sapiens
aaacacgcacccagaaaagaagaggagaccaaacagaaccggcaacggaaaaacccaaggcgcccga

SEQ ID NO: 150489 - RNA, 71 nt, Homo sapiens
gaaacgggagacgagggaagaaagggcgggaaaagccacccacagggggcggggcagaacccaaagcggcg

SEQ ID NO: 150490 - RNA, 76 nt, Homo sapiens
gccgccgccgggaccccgcccagcaggggaaaagagacgcaaaccacgaggacagagaagagagaagccaccagca

SEQ ID NO: 150491 - RNA, 77 nt, Homo sapiens
cgggcgagcgacagcggcggaaggccaccagaggcgagagcggacggacaagagaaagaaagagaagagagccgaag

SEQ ID NO: 150492 - RNA, 80 nt, Homo sapiens
cccagcggcgaggcccagagcccagcgaaacaaaccccaaccaccggccccgggggcaaccaacaacgaggaccagagcc

SEQ ID NO: 150493 - RNA, 106 nt, Homo sapiens
gaacagagccccccccccaccgcgggggcgcagagcgggcaagcacgaagccagggcgaacagcagacaaagagacgggagcggagggaaagaaacacagaccaag

SEQ ID NO: 150494 - RNA, 38 nt, Homo sapiens
aaacaagagaccacagaagagaccggccaccaaaccac

SEQ ID NO: 150495 - RNA, 74 nt, Homo sapiens
gaggcaccgccggagccgccggaagggcgcccgcagccccccacgcaagagggacagggaggacccagaagagg

SEQ ID NO: 150496 - RNA, 73 nt, Homo sapiens
gggggcacacgaggcgcacaagagccaagggcagacggacacaaaaccagaaggacagaaacacaaagcgaga

SEQ ID NO: 150497 - RNA, 81 nt, Homo sapiens
cccaccacggaaagagagccggccaggccgccgggggacacaggacaaggagccaccggagaggaagcggcagacagcgaa

SEQ ID NO: 150498 - RNA, 80 nt, Homo sapiens
ggggagagcggggccggacagccgggcaaaggcccccggagacagaggccccccggacagagccccgcgcagaaagccaa

SEQ ID NO: 150499 - RNA, 82 nt, Homo sapiens
cccgccggccccagcccagccccgcagcccaccgacccaacagaggaagccgcaagaaacgggacgacaggaaggccagaga

SEQ ID NO: 150500 - RNA, 79 nt, Homo sapiens
gacaccgaagcagaggagcagcaggaccagaccaagggaacggaagccccagcccgcgcgagccaggcgcccacaggag

SEQ ID NO: 150501 - RNA, 75 nt, Homo sapiens
ggggggcaggccaccgggcgccagggaaggaccgcacacaagccgcaccggacacgcgcggagcgggaggaccga

SEQ ID NO: 150502 - RNA, 103 nt, Homo sapiens
agggacggacccagagggccgacgggagggagcggagaccggggccggcgcacggggcggaccgaggagggcggacacacccaggaggagggggacagggagc

SEQ ID NO: 150503 - RNA, 76 nt, Homo sapiens
cgccaaagggccaacaagcccaacccagcaggccgggaggaaggaagacacaaccacgcaaggaagagccaggagc

SEQ ID NO: 150504 - RNA, 68 nt, Homo sapiens
gagaaggagaccaaaccggaaaccgccaaaaccccccacacaccccgccgggagcaaggccgcaagag

SEQ ID NO: 150505 - RNA, 87 nt, Homo sapiens
gaaggagaggagaagaggaacgcaggagagcagcgaaggagaggagaaggagaaaaccgggccaaaagagaagaaaagaggaaccca

SEQ ID NO: 150506 - RNA, 83 nt, Homo sapiens
cgcccccccggccagcaacagcgagggaaagggagcagcaccggccacacccacagcacgaccggaacccagcgaccgacgcc

SEQ ID NO: 150507 - RNA, 73 nt, Homo sapiens
ggggagacaccaggcggcaaaaaagaacagccagaagaaccagagagaagaaaaaggaggagcacgccgcgac

SEQ ID NO: 150508 - RNA, 70 nt, Homo sapiens
gaacaacgcacccaccagcaaagaaagggaagcagcgggagaggagcgaaggaagagccaggaaagcaaa

SEQ ID NO: 150509 - RNA, 68 nt, Homo sapiens
gccgacagacaaccaggcgaaaagaagaggcgggaaacgcccaggacaaacccagaccacacaagggc

SEQ ID NO: 150510 - RNA, 71 nt, Homo sapiens
ggcgggcagagcaacgcaggcggcccagagcacccgaccagcaaggagagaaggaaggccgggaagcacaa

SEQ ID NO: 150511 - RNA, 83 nt, Homo sapiens
aaggcgcaaacgggccacggagccgaagaggacagacaggaagcgacaggaagaagaggaggccaagaggaagcagagaggga

SEQ ID NO: 150512 - RNA, 80 nt, Homo sapiens
cgcacgggagccagcggggggcgacagcaagagggcgcccggaagaggaaaggacgagagagacacaaaaccccagcgga

SEQ ID NO: 150513 - RNA, 81 nt, Homo sapiens
gacggaaggggaagaggcccacccggagaaccccacggagaaccagagggccacgaccgcgagagggccggaaggcggagc

SEQ ID NO: 150514 - RNA, 90 nt, Homo sapiens
cggccccgggcacgcagcgagccagggaggagcggcgccccgcggcaggcagcccagcaggggccgacggagcaagagcgaggaacagcg

SEQ ID NO: 150515 - RNA, 80 nt, Homo sapiens
cgccgccacccccgacacgaaagcagacccaacaccgggaggacacgcgaccgaacaggaggagccaacccacgagaacg

SEQ ID NO: 150516 - RNA, 64 nt, Homo sapiens
cgcccacaccagaagcagagccgcaaaggcccgccagcacagagaccagaagacaacaaaaacc

SEQ ID NO: 150517 - RNA, 77 nt, Homo sapiens
ccgcgacagcccagagaccaacccaggaaaggccaacaggccggagaaccccagaggcgaagacgacgagaagagac

SEQ ID NO: 150518 - RNA, 73 nt, Homo sapiens
acagcaggcacagggacgagggggcggaaggcgggaagaagaacaacagccgaggccaacacagagaacaccc

SEQ ID NO: 150519 - RNA, 80 nt, Homo sapiens
gcgacggcggcgggaggcgggcgcccgggccgcgcggcgccgcgccggcggccgccagcaggcccaggcacggaacaggg

SEQ ID NO: 150520 - RNA, 82 nt, Homo sapiens
gaccaggcgcggcgcggcgcggcgaggcgagcggccggaagaagaagaacacaggccaccggagcagcaacaagaagggaaa

SEQ ID NO: 150521 - RNA, 73 nt, Homo sapiens
ccaggaagaggagagaaaagggccagggagagccggggacgacacacacacggagccgacaaccccggaacgc

SEQ ID NO: 150522 - RNA, 76 nt, Homo sapiens
ccacagaaacaaaagcaacaaagagggccagagggcccaaagcggagaggcacgagcacagggacccagaaccccc

SEQ ID NO: 150523 - RNA, 79 nt, Homo sapiens
gacaacgaggaccggccgaggggcccagagaacaacgagcgggaagggcaacccggagacaaaagcacaggcaacccgg

SEQ ID NO: 150524 - RNA, 56 nt, Homo sapiens
cgcgcgcggcacacaacagagcgaggccgggccagaacgaagcacaacaggcagcg

SEQ ID NO: 150525 - RNA, 73 nt, Homo sapiens
aggcaggcagccggagacacgaagacggacgcgaaaagaccaacggagcggccgggaacgggcagaacaaccg

SEQ ID NO: 150526 - RNA, 121 nt, Homo sapiens
accaccacgccagccgcaccagccgcccaagccgcacagccgcggcggcagcagcaggagagggccaaccgccccccagcagcaggcacgggcgaaccccgagccccgccccacgcccgcc

SEQ ID NO: 150527 - RNA, 71 nt, Homo sapiens
caccagaaggcagcagcggagagcgaagccgcaccaggcaagccggaaaacagaacggcgagacagaccca

SEQ ID NO: 150528 - RNA, 76 nt, Homo sapiens
agaccggaggggacgaagaacgggagccccaagggggggcaggcagcagagaggcccccaagggcgggaaagaacc

SEQ ID NO: 150529 - RNA, 69 nt, Homo sapiens
cccagcagaccagagcagggaagccagcaaaacgccggaagaaccggacaccccaacccccggagcaag

SEQ ID NO: 150530 - RNA, 78 nt, Homo sapiens
agccacgaaggcaccgacgcacagcgaccaccaacagaccgaagagaaccaggagccgccaaagggcaccaagggcgg

SEQ ID NO: 150531 - RNA, 70 nt, Homo sapiens
agagggcgccccccccaagacaaaccaagggcgggggggcacaaggaccacgccgcgaggcaaacgcaag

SEQ ID NO: 150532 - RNA, 82 nt, Homo sapiens
caccccaggcgcccagaccaagggaacggccccccgccagcccgacgccggccgcggcccggacagcaacggccccgcagac

SEQ ID NO: 150533 - RNA, 56 nt, Homo sapiens
accaagaaccagaaagcaccgggaggaaagagagccacacgaagaacacggccaaa

SEQ ID NO: 150534 - RNA, 61 nt, Homo sapiens
acagccgaaggaccgcgagcagacccgacaacacacccggcaggcggaacgcagggcgcac

SEQ ID NO: 150535 - RNA, 82 nt, Homo sapiens
cgggacccagcaagaagcagagacacagaacgcccagggggaggcggcgcaacgcggggaaagcaaccagggggcacgccag

SEQ ID NO: 150536 - RNA, 110 nt, Homo sapiens
ggaggccgcccggcgcagcggggaccggcggcggcgcccaggcacccggcccggggccagcccgcaacccccggcgaccacgggcccggcaacagcgcagcggggacacc

SEQ ID NO: 150537 - RNA, 45 nt, Homo sapiens
caccagcaggacaggaaaaaaagagcagagaccagacgaaaccca

SEQ ID NO: 150538 - RNA, 66 nt, Homo sapiens
cgggcgggcggccaccacgggacaggaagacgcaaacagcagacggaagaccccacggcaaaacca

SEQ ID NO: 150539 - RNA, 57 nt, Homo sapiens
caagaaaaggggcgcgggaggaccgcagggcgaaaaaacgagaaagaaagcaggaga

SEQ ID NO: 150540 - RNA, 82 nt, Homo sapiens
aggccccacagccaccaggcaccccaacaaccaggaagccggcgggcgaaagaccacgggaaaaccaccccagacggagacc

SEQ ID NO: 150541 - RNA, 94 nt, Homo sapiens
cgccggcgaccgaggggagagggaacgcagcgaaagcggaacgggagagcccagagacaagcaaagaggcaggacagaaccaagacaaacaacc

SEQ ID NO: 150542 - RNA, 70 nt, Homo sapiens
cgcaccaccagggcacaggagaaacgcaccacgcagaccgaaaagagacacgagaggcccgggagccaaa

SEQ ID NO: 150543 - RNA, 80 nt, Homo sapiens
caccaggcagagcccagggcgggggccacacccagagcgggacgggcccggccagaaccacggcacagcgcaggcgggga

SEQ ID NO: 150544 - RNA, 72 nt, Homo sapiens
gcggaccagggccccagggacgcagggggcagggcagaggacaggagcacgcacgagaagcgaacagagagg

SEQ ID NO: 150545 - RNA, 77 nt, Homo sapiens
agggcggccaaggcacaggcagaagagcacgacgacggccaccagagaggacgcccaacagccagaaggaggcgcgc

SEQ ID NO: 150546 - RNA, 101 nt, Homo sapiens
gaaggggaagaagacaaagaaggaaagaagaaggggaagaaaagaaggggaagaagacaaaacccaccagccccaggccagcggacccgaccacaacccac

SEQ ID NO: 150547 - RNA, 69 nt, Homo sapiens
cccgcagaagacgccgacgaggcagaagacagccacacaggcacccacccaggccaacgaggaggacag

SEQ ID NO: 150548 - RNA, 76 nt, Homo sapiens
aacaggaggaccggagcacggcaaacaacacccaacagcccaaagcaaaggagcaacagcccaggagaaaacggga

SEQ ID NO: 150549 - RNA, 75 nt, Homo sapiens
gggaaccaacccagccgaccccccaggcccgggaggccacacggacggcgagaacggccccccaacaccggggcc

SEQ ID NO: 150550 - RNA, 73 nt, Homo sapiens
ccaggcccgaccgaggggcggagccgcgccgagcgcgcggagaaccagagaagccgggggaccaggaggagaa

SEQ ID NO: 150551 - RNA, 37 nt, Homo sapiens
acggggccacacacggcaaagagaccgacagagccac

SEQ ID NO: 150552 - RNA, 69 nt, Homo sapiens
cccacacccaggccacacccacccaacagacgcacaggaacagagccacaagaaggagagacgcagagc

SEQ ID NO: 150553 - RNA, 39 nt, Homo sapiens
gaaacaaagagccgcggaagaagcccaagaaccaacaac

SEQ ID NO: 150554 - RNA, 77 nt, Homo sapiens
aagcgcagagagaggagaggacacggacgacaccgagcccaaccgaccaaccacaacaccccaaaggaagcaacaca

SEQ ID NO: 150555 - RNA, 81 nt, Homo sapiens
accgacccaccgcgcccgggccgccggcaggcggccgcagcaacccgccggggagaagaaaaagcagaaaggaacagaaaa

SEQ ID NO: 150556 - RNA, 79 nt, Homo sapiens
gggggcggaaggagaacaaagggagaagaggaagcccgacaacgaaggggaccaaaagaacccagccaacccgcagagg

SEQ ID NO: 150557 - RNA, 79 nt, Homo sapiens
aaacaagaaggaaaaacgccacgcaccggagagagcacaggccgccgaggaggaacgaagacgaagaacaggagaaaca

SEQ ID NO: 150558 - RNA, 64 nt, Homo sapiens
cgagccccgggggagacggagggcagccggaagaccacagcagccaagagccggacaaggccag

SEQ ID NO: 150559 - RNA, 69 nt, Homo sapiens
caaacccaagaccacaggaagaaaggaacaggacccggcgggggcaaggaagcacggaggcccgggaac

SEQ ID NO: 150560 - RNA, 90 nt, Homo sapiens
cggacgccagcggacacgcgggcgaggaaggaagcagccaccccgccaggccccccgcccgccgcccccggaggaggacgagagccgaag

SEQ ID NO: 150561 - RNA, 71 nt, Homo sapiens
gaacggacccagcagaaaagaagcgggcaacccagcgcaggagggcacggagggggaaaaaaacaggggaa

SEQ ID NO: 150562 - RNA, 88 nt, Homo sapiens
gggggcagccccccgcccggccagccgccccgccgggagggaccccagaagacgaggcaggcggagcgcaagagccgcgacagacacg

SEQ ID NO: 150563 - RNA, 56 nt, Homo sapiens
gaagaacagcgggaaagaaggcaaaacacggcggaacacgggcaacgggggaagac

SEQ ID NO: 150564 - RNA, 81 nt, Homo sapiens
ggcagcaggcaaaccaggccaagccagcacaggcacgcagaagggagcaccgggagaagacagggccccacagaagcaagg

SEQ ID NO: 150565 - RNA, 86 nt, Homo sapiens
gcgacgcaaccgcgggagaggcgcgccaaagaaaaggggaaaagaacaggaagagaaaccagcagggcagagacccaggacaaacg

SEQ ID NO: 150566 - RNA, 53 nt, Homo sapiens
ggagccagagcgcagaaaggcgccacaggagccgcagaagcaaaggcaccgcc

SEQ ID NO: 150567 - RNA, 76 nt, Homo sapiens
agccccccagagcgggaacaggcgcagaaccgcagcggagaggaaccaggccgcgcaagccgagacgacaaggcca

SEQ ID NO: 150568 - RNA, 65 nt, Homo sapiens
gaggcgcccaccggagggaaaacaaaaaaaggcggcacaacacaagccaacgcagcgagagggag

SEQ ID NO: 150569 - RNA, 80 nt, Homo sapiens
ggccaaagacgaaaacccagggaggcgaagccccagggaacccgagaaggccaacaaaagagcgaggaaccaagaagagg

SEQ ID NO: 150570 - RNA, 71 nt, Homo sapiens
cggccagcccagcccccgccgcggccaccgggcaccccagagcgcgggaagaaccggaacgccggggcgca

SEQ ID NO: 150571 - RNA, 77 nt, Homo sapiens
cacgcagaagacgagaaggggccaaagggcgggaaccgacgaggaccccagagacacgcccagaaccaaccaggagc

SEQ ID NO: 150572 - RNA, 77 nt, Homo sapiens
agggccaaacgggcccaagccggaaaaaagaggacaaccaaagggaacaggcccaaagaacagcagccggaaaagga

SEQ ID NO: 150573 - RNA, 54 nt, Homo sapiens
aaaaagaggaccgaagcaacgcgaaacaccaaagagcccaaaaggcagagcgag

SEQ ID NO: 150574 - RNA, 86 nt, Homo sapiens
agccccggccgggcgaccaagcggaggcgcgcggaacagcgccgaggcgacccgcccagggcccacgagacgcgaacaaacgccgc

SEQ ID NO: 150575 - RNA, 64 nt, Homo sapiens
acagcgcaaaaaaagcgagagggaggcgccggcgggaccgcgggaaggcggggcggggccggcg

SEQ ID NO: 150576 - RNA, 54 nt, Homo sapiens
ggacgcgccaggcacagcagcagacggacgggccgaggcacaccgcagaacaag

SEQ ID NO: 150577 - RNA, 73 nt, Homo sapiens
ccccgccccggagccagaaccgggagccgccaggccggccgggagaaggcaagcccgcgaaggaggcagcggc

SEQ ID NO: 150578 - RNA, 57 nt, Homo sapiens
accgccagggagccaaagacgcccagagagacacaccaacaaaggcagcgcgacaga

SEQ ID NO: 150579 - RNA, 60 nt, Homo sapiens
ccaccgaacaacgccagggacagacaaacccccgggaaggaacaagccaaaaccgcagaa

SEQ ID NO: 150580 - RNA, 69 nt, Homo sapiens
ggcaagggcagccggggacacggaaagcacaaggagaaaaaaggccaggggaaggcgaaggaacgggcg

SEQ ID NO: 150581 - RNA, 87 nt, Homo sapiens
ccgcgcgggggggccgagcaggcccaggcgcggcagcccgggaacacagccccagcgccagcaaagcacggacagagaaggaggaga

SEQ ID NO: 150582 - RNA, 81 nt, Homo sapiens
agcaggcaaagacggcaaaagcacaaggaccgcggacagagacaacaccgagagagaagccaggcgcacgaagaaaaggaa

SEQ ID NO: 150583 - RNA, 56 nt, Homo sapiens
ccacgcgcggaaggcagcgcccagcagcgcagggaggccaagggaggacaccaggc

SEQ ID NO: 150584 - RNA, 81 nt, Homo sapiens
accggaccgaggaggcagcgcggggcagcgcgagccgggaagaaaagaaacgaagccgggcacggacaggacagagaaagc

SEQ ID NO: 150585 - RNA, 79 nt, Homo sapiens
ggaaggaggagagggcggcggagaagaggcaggaagaccgccaacaggaagagagaagggcacagaccaagacaacgaa

SEQ ID NO: 150586 - RNA, 71 nt, Homo sapiens
ccgcgcagagacacgaggaaagaacccggaaaccacaaggccagcaccgccgggcagacaacggggggggc

SEQ ID NO: 150587 - RNA, 50 nt, Homo sapiens
ccgccgccacccacaaggcacaacaggaaggagggcacggagcggggagc

SEQ ID NO: 150588 - RNA, 71 nt, Homo sapiens
ccacgccaaccagccgaagaacgaaaaccgggaggccaaacaggggggcaaccgcgaagcaaaagacacag

SEQ ID NO: 150589 - RNA, 79 nt, Homo sapiens
gaagggaaacagcagacagcgcaagcggcagcacaaagaggcaggaggaccaacggaggccgcagaagaagcggaggag

SEQ ID NO: 150590 - RNA, 63 nt, Homo sapiens
cgacgggcaggaaggagggggcgcacaaacgaggacagagcgggagccaccagcgccaaaggg

SEQ ID NO: 150591 - RNA, 72 nt, Homo sapiens
ggccggagccacccagagcaacgcccgcacgggcacagacaggaagcccggggcggcgacggagcacgaccc

SEQ ID NO: 150592 - RNA, 60 nt, Homo sapiens
gcgccgcggaccagaggcgccgagcaagaaggaaacacaaaacacagagggcagacgccc

SEQ ID NO: 150593 - RNA, 73 nt, Homo sapiens
ccccaccgagaccaagaaggaccagaaaaccgacaacccccagaaagccaagccgggacaaaccggcgaccac

SEQ ID NO: 150594 - RNA, 67 nt, Homo sapiens
ggccggcagagcccgcagagaaaaaaaaagcacaacccagccagaggggcaccgaaccccgggggca

SEQ ID NO: 150595 - RNA, 54 nt, Homo sapiens
gggcacacaaacagagcagcacacaggaaaaggcgaaagaaggaaccaaacggc

SEQ ID NO: 150596 - RNA, 60 nt, Homo sapiens
agagccaaggaaaaacagcaagaacccaaaagggaccgggcgaggccaccccgaggcaag

SEQ ID NO: 150597 - RNA, 69 nt, Homo sapiens
gagagccacagcaaacaccaagaccgaggcggaggagagaggacgcgagaaaaacgaagagaccggccg

SEQ ID NO: 150598 - RNA, 84 nt, Homo sapiens
cgggcccagaaggcgagaccagagacgagaaggcgcaggagccgcaggccgacccaccgggcacacaacaaacggggagaagca

SEQ ID NO: 150599 - RNA, 60 nt, Homo sapiens
gccagccagaccgcggcgccaggcccaccagaagagccgacaagccggcagaaggcagac

SEQ ID NO: 150600 - RNA, 73 nt, Homo sapiens
gccggcacgagcagcaaaggagacaagaaacaaaacccagccgagcagggcagcagcaggacacagcaggggc

SEQ ID NO: 150601 - RNA, 75 nt, Homo sapiens
gggcggccacaccacaacaagcacaaacacagcccacaggagagagacgaggaaagaaggaagcagcgaagcagg

SEQ ID NO: 150602 - RNA, 72 nt, Homo sapiens
caagacacagaacacgcagacccagagagggaccagggccaaagaagagccggggggcaggcggacagcaag

SEQ ID NO: 150603 - RNA, 74 nt, Homo sapiens
gggaagaggcgaaggccagagcacgagcacgggaagagcaagagaggcagagaagagagacgcccaagagaaga

SEQ ID NO: 150604 - RNA, 77 nt, Homo sapiens
gccacagaccccagaaacgggcaagcgcgcaaacccagaaaccacagacccgacagaaccccagcaagaccccaacg

SEQ ID NO: 150605 - RNA, 71 nt, Homo sapiens
gacggcagaggaccccggagagcaaggaagaaagcagcccaggccggcaacccacaacgagaggaacaaaa

SEQ ID NO: 150606 - RNA, 65 nt, Homo sapiens
ggaggcagagcagggacggccgggaaagaaccagaagccaggaagaggacggagagagagccaaa

SEQ ID NO: 150607 - RNA, 93 nt, Homo sapiens
ggaaaccaagagacaaaaaaccggcacgaaaggggcacagaaagagcgaagaacacaaaaccaaagaggagaaaaagccaagacacaaacaga

SEQ ID NO: 150608 - RNA, 59 nt, Homo sapiens
ggagggacgcaggcgcaggccagggaggagccaagagggcccgaggaaaaaggaacgga

SEQ ID NO: 150609 - RNA, 74 nt, Homo sapiens
agcggaagccacgccccacacagcagccaggggcccgcgccagcaagggggagaacggcacgacccccccgaac

SEQ ID NO: 150610 - RNA, 83 nt, Homo sapiens
cagagcgcaggacgccacagcaagaggaccccaccgggggggaaaagagcccagccaaccacgaggaaggaccaggaaggaaa

SEQ ID NO: 150611 - RNA, 81 nt, Homo sapiens
ccaccaacagacgaggaacagcgaaggggagcccagggaagcccgggaccgaaaaaacggccggggggggcacagagcccc

SEQ ID NO: 150612 - RNA, 78 nt, Homo sapiens
ccacgccccaggcccaaccaggacgggcagccagcagcgggccgggcagacgcccgaaccggcagaaaccggaccacg

SEQ ID NO: 150613 - RNA, 77 nt, Homo sapiens
acagggagaaaccccacccccaagaaccaacccccaaaggcgggacaggccacgagggcacagaacgagcggccacg

SEQ ID NO: 150614 - RNA, 72 nt, Homo sapiens
aacgagagagagcaaaaacaccagacaagaacaccggaacgaagaggagggacagcaaagagcaaacacagg

SEQ ID NO: 150615 - RNA, 105 nt, Homo sapiens
gcaagcaagcgggacagagggaaagggaccaagcccaaagaggagaaagagccaagggcagcaacacgcaaccccccgacccccaaaaaggccgaccgaaacaca

SEQ ID NO: 150616 - RNA, 90 nt, Homo sapiens
ccaacaaagcaccacacgacggacagaggcagacacccagcaccacggcagacaacaaccaacacgaacaaggccgcaagaacgcaaaga

SEQ ID NO: 150617 - RNA, 84 nt, Homo sapiens
gcagccaaagcacccaccacagaaaaacagaaacggaaagacggaaagaggggggagaaagaacaggaaagaccagcgaagaga

SEQ ID NO: 150618 - RNA, 92 nt, Homo sapiens
gaagccaacagcgggccgacggcgcccacgcacagcaacacccggaccaccggggccggggaaagaacaaccggaggggaagacgaagaagg

SEQ ID NO: 150619 - RNA, 68 nt, Homo sapiens
caaaaacaccgagagcccaaagcgcccaggcacccccagcagcaaggaagaagaaccagaccggagac

SEQ ID NO: 150620 - RNA, 73 nt, Homo sapiens
cagacaccgccccgagacgagagggcggagaaggaacagggagagaaacaacgggaacagaaaggagcgggca

SEQ ID NO: 150621 - RNA, 72 nt, Homo sapiens
aggcggcaccaagacaccagccgaagggaggccgaagacagcaccacaccagcggcgaaagacgaggacaca

SEQ ID NO: 150622 - RNA, 88 nt, Homo sapiens
gaggggagcggagggggagacagacccgccagccagaaggaaccaaagcgacggacgaacacgacccaacaaagccacccggacaccg

SEQ ID NO: 150623 - RNA, 79 nt, Homo sapiens
ccccgaaaaagacaacagaccaaaggagccggaccagaccgccggagcacgccgagaccaccgaggacacaaccgccca

SEQ ID NO: 150624 - RNA, 58 nt, Homo sapiens
ccagcccacgcgcaccaggccgcacgccgcaccaggcagaacaacggggaacgcacgc

SEQ ID NO: 150625 - RNA, 69 nt, Homo sapiens
caagaccaacacgcgcaagggaaccggggacccaggaaggggaaaaagagagaaagcaggagaggcaac

SEQ ID NO: 150626 - RNA, 43 nt, Homo sapiens
ccaccccgcgggaacgcccagcgcgacaccacgccacccaaga

SEQ ID NO: 150627 - RNA, 66 nt, Homo sapiens
caaagaggcgcaagagagaggagggggcaccgagcaacgagggcagacacaggaccgaaaggcgac

SEQ ID NO: 150628 - RNA, 79 nt, Homo sapiens
cacccaagcccacgaggcggaaggaccgagcgcgaggacgcccgggcaaaacacagaccggccaacccaggcagccaac

SEQ ID NO: 150629 - RNA, 73 nt, Homo sapiens
aggaaaaaaccagcgagcacaggagcagacggccagacgaagaaacaggaacgcagcaaggggagggccgaag

SEQ ID NO: 150630 - RNA, 77 nt, Homo sapiens
agcaacgaggaagggagacaagaagcacaagagaaggaaacaggccaggagagacaaaaaccaggaacacccagcag

SEQ ID NO: 150631 - RNA, 82 nt, Homo sapiens
ccacagccacccccaaggaccagcgacgaggccggacggaaaaggccgcaggcgaaggggcggggcgggcacgggagagggg

SEQ ID NO: 150632 - RNA, 79 nt, Homo sapiens
gcaacaccagggaggccaagcgaccacccaaagaagggagcaagaggcagacagaccgagacgggcaaccaacaagaaa

SEQ ID NO: 150633 - RNA, 80 nt, Homo sapiens
cgacgcaccgcaggcagacaaaagggccaaagaagggagagagcaccagaagaaaggagagagccgaaagagaaaagcgc

SEQ ID NO: 150634 - RNA, 79 nt, Homo sapiens
ggcgcgcagaaccagaccgggagcacgcacccacgagggaaaacaaagagggaaaacggagaaaagcccccccaggcca

SEQ ID NO: 150635 - RNA, 78 nt, Homo sapiens
caggcgaggcgcagaaggggacagaacagggagccgccaccaaaagcagacggaaaacccacggggaagaccacaccc

SEQ ID NO: 150636 - RNA, 73 nt, Homo sapiens
cgaccacaccaagcggaaaaaagacaccagcgacaaggacaggggaggcaagcaggggggcaaaggaaagaag

SEQ ID NO: 150637 - RNA, 81 nt, Homo sapiens
gacagagaggagaacgaagcccacaagaaggaggagagaagagaggaagcgagcagcacgggcaagcgggcagcgaagaga

SEQ ID NO: 150638 - RNA, 65 nt, Homo sapiens
caaaaggggaaaacgcgcccgagaagaagccgaacgagcgaaaaaacagagagggccaaggcccc

SEQ ID NO: 150639 - RNA, 82 nt, Homo sapiens
aagagccgaccacaaggggaggacaaccgcccgggaccagcgagagccgcggcagcccaagcgaacaccgaagggagagcaa

SEQ ID NO: 150640 - RNA, 79 nt, Homo sapiens
cgcgaaacgcacgagaagcacagaggacccgaaaccggagagcaccgcgaaaaggcggccgagggcagcgaacacagag

SEQ ID NO: 150641 - RNA, 78 nt, Homo sapiens
caggaacagacacggggaagcgcaaaaacaagacggggcgccccacagaggggcgacggaaacgaaggcagcaaaaag

SEQ ID NO: 150642 - RNA, 75 nt, Homo sapiens
aaccgcaggacccagcagcgcagcagccaaggagacaccccagagccgaaaggcagagccccggcagaagagcgc

SEQ ID NO: 150643 - RNA, 80 nt, Homo sapiens
caacaacaccacaaaaccacagccaagggcggagaacggaaaagcaccaggaagcagagaggaccgcagaagggaaggag

SEQ ID NO: 150644 - RNA, 73 nt, Homo sapiens
ccgcgggacaaaggaacagccccagcccggccccaggaacggaaggaaccaggacccaggcaaggagaagacc

SEQ ID NO: 150645 - RNA, 84 nt, Homo sapiens
cagacgcggggagccgccggagcgagaagcgcgccgggggcccggaaagggacgcgcgcccagggagcgagaagcagccagggc

SEQ ID NO: 150646 - RNA, 39 nt, Homo sapiens
accccaggagaagacaggggaaggagaaagaagaaacaa

SEQ ID NO: 150647 - RNA, 75 nt, Homo sapiens
gggcaccccgagacccggggcagacgcccacccagaagacggcagcgaacgagaagagcaaggcgccaacgccca

SEQ ID NO: 150648 - RNA, 80 nt, Homo sapiens
gacacgcgcccgagccaaggagaggggcggcccagcacaggaggccgaagggagaacgaagggggccgaagcacgaccga

SEQ ID NO: 150649 - RNA, 60 nt, Homo sapiens
ggggaccagagaggacggcaccagccaggaggccaacagagagagaaacacagaaggacg

SEQ ID NO: 150650 - RNA, 77 nt, Homo sapiens
cagagaaagcagaggggagaggagagccagcacaagacgaagagggcccaggcagacccgcagaccaacgaaaacca

SEQ ID NO: 150651 - RNA, 78 nt, Homo sapiens
gccgccacacccccaagccccacccacgggcagacccagacccgcaacaaggacgggaaaccgaagaagaacacccca

SEQ ID NO: 150652 - RNA, 55 nt, Homo sapiens
ggggccgacagaccaacaccacaggcaagggcagacgggggaggaggacgcaaag

SEQ ID NO: 150653 - RNA, 67 nt, Homo sapiens
gcgcccgaccggagcagggcaccggaccgcacaagcagcagcagcggcaccaagcgcggggacagag

SEQ ID NO: 150654 - RNA, 72 nt, Homo sapiens
ggagaggagaaaggagacgcagaacgggcagagaccgcaggaagaagcgaagagccccagcacacagaccag

SEQ ID NO: 150655 - RNA, 47 nt, Homo sapiens
cgcacagaagcacggaaacagccaggacggccggagcagcagaacaa

SEQ ID NO: 150656 - RNA, 41 nt, Homo sapiens
gaggccccaggacaaaggacgggggccggcggagccggacc

SEQ ID NO: 150657 - RNA, 76 nt, Homo sapiens
agaagaggagagaggaacccgaagaagaaaggacgacagccagagaggaaagcacaccaccaaaaaagagacgacg

SEQ ID NO: 150658 - RNA, 84 nt, Homo sapiens
accccaaggcacaggcgaccaccccaaaagcaccggccccgcacagcaaaccaggaaccgcgacccaagcggaggaccgagggg

SEQ ID NO: 150659 - RNA, 79 nt, Homo sapiens
agggcgaagcacgacacagaaggggaggggagggaaaggcccaggaaaaagcaaagaaagggagacaggcagaaccaga

SEQ ID NO: 150660 - RNA, 72 nt, Homo sapiens
cgcaccgcaggcagacaaaagggccaaagaagggagagagcccgagaccccggggggaccgaccccggacgg

SEQ ID NO: 150661 - RNA, 64 nt, Homo sapiens
acacacaggcgcgaaacggaaaaaggaggaccagacacaggaagccgacggacaaagacgaacg

SEQ ID NO: 150662 - RNA, 81 nt, Homo sapiens
cccccagccacggaaacgacgaccgaaaacccagccagacaaaagagaagcagaggagcgaagaaagagagaggaacagag

SEQ ID NO: 150663 - RNA, 81 nt, Homo sapiens
gcgggcccgggccgagcgcccccgcgcgcacccggagcaccgcggcagcgcaggacaacacacagcccccggccccacccc

SEQ ID NO: 150664 - RNA, 66 nt, Homo sapiens
gggcaaccagaggggccaacggacgacaggacagggcccaggacaggcacacagggaggcacgagc

SEQ ID NO: 150665 - RNA, 60 nt, Homo sapiens
cccaacggacaagcaggccgacaacccaaacagcgaggcaaccccagaaccaaccagccg

SEQ ID NO: 150666 - RNA, 59 nt, Homo sapiens
cgggaacaccggcgaaggacgacagcaaaggagccagggcagaaacccccaccaggcgg

SEQ ID NO: 150667 - RNA, 83 nt, Homo sapiens
caggaagcagaacccgaagggaacacaacaaggccaagggggcccagaggagaaagaaggcagaggcaccaaacacaaaaaaa

SEQ ID NO: 150668 - RNA, 103 nt, Homo sapiens
acaggaccgaaagagccagcaaaagacgagacaacagggcccgagaaacaaacaacgggcccaacaccacgagcagcccaggggaagaacgcgagcgcccaag

SEQ ID NO: 150669 - RNA, 81 nt, Homo sapiens
agaagcagaggaaagcagggcagcgggaaaaggaaccaccgccgggaagcaacggacgggggccacgcggagaagaagccc

SEQ ID NO: 150670 - RNA, 81 nt, Homo sapiens
gccccgcccacgaggagcacagccgggccgcgcgaaggagaagcacagagcccacaccgcccgagcaagaacagcaaagcc

SEQ ID NO: 150671 - RNA, 107 nt, Homo sapiens
accaggagggaaagagccaccaaggggagagacgggcgggaccccaaaccggagaagagaaaagaagcgcaacacgcacagcgaaaggcaagaggaaccgaggagca

SEQ ID NO: 150672 - RNA, 59 nt, Homo sapiens
cggagaacacagacaaccagccaggggcggcggcacaagccacgacccaggagacgacg

SEQ ID NO: 150673 - RNA, 76 nt, Homo sapiens
cccggacccagcccggggaaacaaccccgccccggaggcggcgaggagcggcgggaacacgaggacccaaagaaca

SEQ ID NO: 150674 - RNA, 77 nt, Homo sapiens
ccaggaccccggaagccagaaagggaaaaagacccgagaagcgcagacccaccagggaaagcaaaggcagggccaaa

SEQ ID NO: 150675 - RNA, 72 nt, Homo sapiens
cagacaaaagggccaaagaagggagagagaggggggccaggcagccagcccaacccaaaggggcccagagca

SEQ ID NO: 150676 - RNA, 87 nt, Homo sapiens
aagggcgcagcggaagcccaggaaacacaggcagcggggaaaagcgagacacagcagaacaccggaggggcggaccagaacaacccc

SEQ ID NO: 150677 - RNA, 79 nt, Homo sapiens
ccaagcacccaggaacgacccgccccccccgagacaggccgagaagcaggagaaaggagaaaggggacagacgaaacgg

SEQ ID NO: 150678 - RNA, 75 nt, Homo sapiens
accaacacccacccaaagaaggggagccgccagagccaaagaacggacggcgccagaagcgcccggcccgaacac

SEQ ID NO: 150679 - RNA, 72 nt, Homo sapiens
ggggaacaccacaagagggccggaagccgccagacagcaaccggaaagggccaaccggcgcacagggagcag

SEQ ID NO: 150680 - RNA, 58 nt, Homo sapiens
gaaagaaaagcccaaggacaagagagaaaaggaacagccgaagccaggggcaagcgaa

SEQ ID NO: 150681 - RNA, 74 nt, Homo sapiens
gggcggcaggaccgggggccgaggcgccggggaccccagaagacaggagacccaacaccccagccagacggcac

SEQ ID NO: 150682 - RNA, 71 nt, Homo sapiens
ggagcacgccgcacaggccgcgaacggggcaaagggggacaaccaagacagcagaagaggcccggccgccc

SEQ ID NO: 150683 - RNA, 74 nt, Homo sapiens
acaacgagccccaaaagagacacaaacaaggagggcgagagagacagggaggaagcggcggaggcaggggcaac

SEQ ID NO: 150684 - RNA, 79 nt, Homo sapiens
cgccaagcaaagccaggccaaggagggaagacagccgccaccaggcgcccccccagcaaccacccacagacccgagaca

SEQ ID NO: 150685 - RNA, 81 nt, Homo sapiens
agccagaaccaagacagagagggaggggggaagacagggcccagcaccacaggacgggccgggaagccgccagcagggaca

SEQ ID NO: 150686 - RNA, 63 nt, Homo sapiens
ggacacgggggccacaaagccccccggagacgcaaccaaggcaccgcggacgcaaggccaccc

SEQ ID NO: 150687 - RNA, 83 nt, Homo sapiens
aaaagaacccaccaaggaaccgggagaaccggagccccaggagcggccggaagcgggaaagagcaggaggaggggggggccag

SEQ ID NO: 150688 - RNA, 74 nt, Homo sapiens
cggggaaaaaaccagagaccacagaaggacgggagaacaccccacagggaagaggaaacccgcgccagagagcc

SEQ ID NO: 150689 - RNA, 74 nt, Homo sapiens
ccgcaccggcaccaccgccggcgcggacggagcaggacacgagacacaggccgcacgcacgcgggggaccccaa

SEQ ID NO: 150690 - RNA, 55 nt, Homo sapiens
caggccagaccacagagcagcaaggagacacagcacaccacccaaaaagaggcac

SEQ ID NO: 150691 - RNA, 43 nt, Homo sapiens
agagaggccgcgccgggcagagagaaacaggaagagagccgga

SEQ ID NO: 150692 - RNA, 68 nt, Homo sapiens
caagaggcggcgcccgcgccacagccaccagagccggcagcaaagagggaacaggaaaaaggaggaca

SEQ ID NO: 150693 - RNA, 55 nt, Homo sapiens
cgccaggggggagcgcccaggcggggccacgagcagcaaaggaaacagaaccacc

SEQ ID NO: 150694 - RNA, 85 nt, Homo sapiens
aaccaaaacaaaaacaccgcccagagagcaaagaccaccacaggcaccagacacagaggaacacaacacaaagaaaagacaacag

SEQ ID NO: 150695 - RNA, 87 nt, Homo sapiens
cgagagcaagagggcaccagcagcgacggagccacccgcgaaaacggccagggccgccggaggcccacccgacgcggagcgaccggc

SEQ ID NO: 150696 - RNA, 54 nt, Homo sapiens
aaaagggccaaagaagggagagagaaaaagcagagagacgcaagagagaaaagc

SEQ ID NO: 150697 - RNA, 79 nt, Homo sapiens
cggcacgccccgccagaccacgggagaacaaaccaagaagcacaggagcggcaggccaccacgagaagcagggacgccg

SEQ ID NO: 150698 - RNA, 78 nt, Homo sapiens
aaagcccaggaaccgcgaaggaacacggaagggcccccaggagagccgaagaaagcgggcaaagcggaagcaaagaaa

SEQ ID NO: 150699 - RNA, 54 nt, Homo sapiens
gcgaccacccacacaaacccgggacgggccgagaggaacagagacagacccggg

SEQ ID NO: 150700 - RNA, 73 nt, Homo sapiens
agcaggaagaggaaggacgccgccccaacagacacgagaggcgagggacgacagagcaagcggcagagggcaa

SEQ ID NO: 150701 - RNA, 62 nt, Homo sapiens
gccgccgcgccccccccgcccgcgcgaccgcagggcgcccggcaaggacgcaggaccccccc

SEQ ID NO: 150702 - RNA, 92 nt, Homo sapiens
cggaacacccggaagccgagaaaggagcggaggacaccccggagaggacgggaggacggcagcacagggaaccacagaacaggaacacagga

SEQ ID NO: 150703 - RNA, 80 nt, Homo sapiens
gggcgagcagggccacaggcacagaacggggagccaaaggagggccccaaggaccgagagccccagagcagagccaggca

SEQ ID NO: 150704 - RNA, 68 nt, Homo sapiens
agcagagcaggcagggcagaagaaaaggaggaggagcgcgaagaagaccacagcccaggagcggagac

SEQ ID NO: 150705 - RNA, 84 nt, Homo sapiens
ccaaggagacgaggacgccgagaagaccccaggccaccgcaccaaggcgcccaagaagccgagagaaaaggggacgccacggac

SEQ ID NO: 150706 - RNA, 73 nt, Homo sapiens
caaaccaccaaaaacaacacccagaaagaggcaaggccccagcccaagcgggccgacgagaggaaagcacaaa

SEQ ID NO: 150707 - RNA, 71 nt, Homo sapiens
cgaacccaggaaccgaagaacagacccagacccaccagccacaaaccagccaggccgacaacgcaagcggc

SEQ ID NO: 150708 - RNA, 75 nt, Homo sapiens
gaccgagagcggaccgagagcgcgaaacgcacgagaaggaaccgggaagggaacagggaaccaagcagagaaaga

SEQ ID NO: 150709 - RNA, 73 nt, Homo sapiens
ggacccagcgaggaggcccgagagagacgcagcgcaaggccgggggaggccacaaaacaaagcgacaggagaa

SEQ ID NO: 150710 - RNA, 80 nt, Homo sapiens
gccagagaaggccgaagcacggaggacccggcacgaggggcacccagccggccggagagccagcgcccccgggaacaacc

SEQ ID NO: 150711 - RNA, 79 nt, Homo sapiens
agggacagcaggaaagaaaccacaccaagaagggacacacccgacagacgaagaacccagcaagcacaacagcagcgcg

SEQ ID NO: 150712 - RNA, 76 nt, Homo sapiens
caacacaccacgggaccgggcaagggaagaaaagacggcggaaaacccgaagcagaagcccgacacaggcacaaga

SEQ ID NO: 150713 - RNA, 82 nt, Homo sapiens
cgcgcaggaggacggagcccaaccgcaacccgcgccgcgccgcgccgcgccggccggcaagaagccaacggagaaccaaggc

SEQ ID NO: 150714 - RNA, 73 nt, Homo sapiens
gccacccccagacccccagcccagagaagggccacgccgcccccagaaccccgacccaaccaacagaagcacc

SEQ ID NO: 150715 - RNA, 77 nt, Homo sapiens
gcccaggacacagaccgcggggccgcgccccaggcgcaaggaagaagagacgccgcgcggcagacaaggcccggcag

SEQ ID NO: 150716 - RNA, 75 nt, Homo sapiens
cagccgaagcccaggcccaagaggcgccagagaccacacagcacgcaccggaggggcacagcagggaggaacaca

SEQ ID NO: 150717 - RNA, 65 nt, Homo sapiens
aagaaagagggggagcacccggccacgaacgggcgaaaaagggagcaaagccaaaccgaacaagg

SEQ ID NO: 150718 - RNA, 77 nt, Homo sapiens
agaaggcggagagaggaaggcaaggcacacaaggaacaaaaaacaacagaggcgaaacagaagaaagagaaaaggga

SEQ ID NO: 150719 - RNA, 71 nt, Homo sapiens
caagcaaggacccaccaggccgaagccagccggagcagcggcacaggagaaagaagaaacaaagagggacc

SEQ ID NO: 150720 - RNA, 76 nt, Homo sapiens
gaagacccgagccggacccagggagagcagggcagggaaaagcgccgggcggaccagcaggacgaaggaagaacac

SEQ ID NO: 150721 - RNA, 70 nt, Homo sapiens
ccgcggaggggcacgagcgccacaaccccagagcaagaacgaggccaaggaggagggacacagagacagc

SEQ ID NO: 150722 - RNA, 70 nt, Homo sapiens
gcgccgcaccgaggcagcccgcggcaccgggggacagggggcagcacgccgaaggagagaccagacaaca

SEQ ID NO: 150723 - RNA, 83 nt, Homo sapiens
gcagcaggagcagcccgcggcgaccaagacaggaaccgcccggcagccggcgaggggggagcccagcaggagcgggaaaaccg

SEQ ID NO: 150724 - RNA, 74 nt, Homo sapiens
cggggccccggccaccgggcgggagaagagaggcggcggaggacaagcaaagaggacaggcaacggaggacaaa

SEQ ID NO: 150725 - RNA, 62 nt, Homo sapiens
cgccaagccccgcgagcgcacgccaacgacgaggaccgacgcagagaaacacagcccaaaga

SEQ ID NO: 150726 - RNA, 110 nt, Homo sapiens
aagaagaagagaacaaagagccgggagacggagcacggcgccgcggcaagagccagggcggagaacggaaaagcaccaggaagcagagaggaccgcagaagggaaggaga

SEQ ID NO: 150727 - RNA, 76 nt, Homo sapiens
acaaggcgcacacacaagaaaggcaacaaaaccacgcagaggagaaaaagagccaggccaccaaacgcacaccccc

SEQ ID NO: 150728 - RNA, 89 nt, Homo sapiens
ccgcacggacaccggcggccccaccagcagacgcagccgagacaccagcccgaaacaccaccaaggccggcgcggaagaggccggcggc

SEQ ID NO: 150729 - RNA, 75 nt, Homo sapiens
gagagcaacaaagccgacccaacccaagggccaaaggaaggaacggccaggagaacaaccagcaccgggacccaa

SEQ ID NO: 150730 - RNA, 116 nt, Homo sapiens
gccaggcggacccggccaccagcgagagcaccaccaggcccccagccgcaggcccggcgacgccaccccgccccaccgaggccggcgggccacagcaggcgccccgccggagaacc

SEQ ID NO: 150731 - RNA, 77 nt, Homo sapiens
agcagcagcagcccagcaggcgcggcccgccagggcgaaaacacagaaacaccaaagaaaagacaaagaacacaaga

SEQ ID NO: 150732 - RNA, 79 nt, Homo sapiens
ccgggccgaaccagaggggcagagaaaacgccagccgggaagaaaagaaaaagcgcaaggaaccccacgggaaaggagg

SEQ ID NO: 150733 - RNA, 76 nt, Homo sapiens
gagaaaaaaccggaaaacccagccacaggcgcagggccacgccaggcggggccagggggcgacggcgaaaccagag

SEQ ID NO: 150734 - RNA, 72 nt, Homo sapiens
gcaaaacccacggagagcccaagcggcgaggaaaaccaccacacaggggaaacacccagacaacacacacaa

SEQ ID NO: 150735 - RNA, 41 nt, Homo sapiens
acggaggggaaccgaaaagagcaggagaaggaccaaaagga

SEQ ID NO: 150736 - RNA, 83 nt, Homo sapiens
cgggccagaggcagcccccaggagccgagcagaaacggagcaggcaggacccaggacggaaccacgcacccaggccgcggggc

SEQ ID NO: 150737 - RNA, 87 nt, Homo sapiens
cgacagcggccggggcgcaggcgcccggcggaaggcagaaggcaacagacacgcaacagaaacaccagagggaaccccaaaccaaca

SEQ ID NO: 150738 - RNA, 79 nt, Homo sapiens
gcccaagccccaccgcgagggaagcgcagagaagagaaaaacccagaaaacgaaggcgaacaaaccccagccccccggc

SEQ ID NO: 150739 - RNA, 44 nt, Homo sapiens
agcccaaagaccccggagacagaagaaggacccagcccagccgc

SEQ ID NO: 150740 - RNA, 71 nt, Homo sapiens
gccacaggacgaacggaaggaggaaaaggcccaggcgagaaagaaaccggaagaaagagacgccaaaggag

SEQ ID NO: 150741 - RNA, 68 nt, Homo sapiens
aagccaaagaaggcaggggaggaaggccgacggccaaaacccgaacacaaagacagaaggccacaagg

SEQ ID NO: 150742 - RNA, 76 nt, Homo sapiens
gcgccaacaggagaaagggaagaggacgagacagaccaagcaacggcacaggagaaaaccccaaaaacaagcgccc

SEQ ID NO: 150743 - RNA, 86 nt, Homo sapiens
cggaacagaaccaaaggcaggacagccagcagggacaccaggggggaaaaaccacacaggcaaagaacgcgcaaaacaggacgaaa

SEQ ID NO: 150744 - RNA, 64 nt, Homo sapiens
gggagacgcacagcaagagccaggacaccggaagcgggaaaaggccaagacgcccccaagaaag

SEQ ID NO: 150745 - RNA, 63 nt, Homo sapiens
cacgaacagggaagaaaagagaaaccacccacgggaaggacacaagaagcggagcaaaccccg

SEQ ID NO: 150746 - RNA, 75 nt, Homo sapiens
aggaagaggcagaggacccaccgccagccacccacgccagcagagcgcgccgggggcccggaaagggacgcgcgc

SEQ ID NO: 150747 - RNA, 62 nt, Homo sapiens
cagcgggaggaccgggaaggcaggaagcacagaagagagaagaacgagagccaaaggaccgc

SEQ ID NO: 150748 - RNA, 74 nt, Homo sapiens
aagcagccccggaagacaacgcagacgccagcaccaagccagcaagaaagaacaggccagacaaacagcgaaga

SEQ ID NO: 150749 - RNA, 78 nt, Homo sapiens
acccgggaaggaggcgacaggacacagaagaacgcagcccggggagcagcaccccacaggcacgccaaccccacgcaa

SEQ ID NO: 150750 - RNA, 66 nt, Homo sapiens
acggaaccgggacaaaagaggaggaccgagccagaagcaacccaagacacccccgcggacgcccca

SEQ ID NO: 150751 - RNA, 80 nt, Homo sapiens
ggcggggaggcgcggagcgcgcggggccgcgccgcgaccccacggccgggcaccgaaagaagaagccacacacagaagac

SEQ ID NO: 150752 - RNA, 53 nt, Homo sapiens
cgcagagggcggagcggcagggagaaaccgaaacgaacccagccagaaacaca

SEQ ID NO: 150753 - RNA, 73 nt, Homo sapiens
aagggagaacgccagaggccagcaccgcagagcagggacggggggaaaagcgcacccgggcccgggcgagaaa

SEQ ID NO: 150754 - RNA, 75 nt, Homo sapiens
gggaacgccaacccacccaaacagccacccacgcacccgcggccaaaacacgacaggggccaggacaacagagag

SEQ ID NO: 150755 - RNA, 80 nt, Homo sapiens
ggcccaccaacaggaacagggcagacgagcggaggacacccaacccggcaaaaaaaccaccaggaagggagacgcgccaa

SEQ ID NO: 150756 - RNA, 110 nt, Homo sapiens
ggcaaggccacaagggaacgggcggccccggagagagagccgcgcacgcacagacaaggaggcagcagcagcgagccccaccgccggccggacccaaacggccaagaaga

SEQ ID NO: 150757 - RNA, 98 nt, Homo sapiens
ccggaccaccggcagccccaggccgcgggggagaagacccgccagcagaccggccaaagaaccaggacgcggcgcgcccaagccggaagccaaacaca

SEQ ID NO: 150758 - RNA, 82 nt, Homo sapiens
aagaaccgccacggcacaccagccaagcagacagacccacagcagcacaaacggcagaacgaagcccccggcaccaagagga

SEQ ID NO: 150759 - RNA, 59 nt, Homo sapiens
agagggcgcaagcagagaaaagggcaaagcgaaacaggagagaaaccagaaacaaggcc

SEQ ID NO: 150760 - RNA, 75 nt, Homo sapiens
cgggcccaccccccaggccggccccagagcccacccaacgccccaccgccaaccgaaaaccagggcgaaaaaaga

SEQ ID NO: 150761 - RNA, 57 nt, Homo sapiens
caaaagaacggaagaaaaaaccaggaagaagacggcacgggacccccagcacaggca

SEQ ID NO: 150762 - RNA, 59 nt, Homo sapiens
agagggcgaaggccgggagacagcagggacagaccggacaccagaggacgcccggcaga

SEQ ID NO: 150763 - RNA, 71 nt, Homo sapiens
acaagccgggcgcccagccccgcagcaagcccgagaagcaagaccgccccaaaaagcaagaaaagaccgga

SEQ ID NO: 150764 - RNA, 50 nt, Homo sapiens
cggaaacgcggaggcaagcacgggccaccaaggaccccaccaccccagac

SEQ ID NO: 150765 - RNA, 78 nt, Homo sapiens
ccgggcccaagcgccccggggggcagcccgaaccagccacaaagcaaaggcgagaacgcggacaagcaaacaaagagg

SEQ ID NO: 150766 - RNA, 86 nt, Homo sapiens
caggagcggaaaccacaagggacgaccacagcccagagcagcaaggccaccccccgagccgacaaggagcgccggccaccgggcac

SEQ ID NO: 150767 - RNA, 79 nt, Homo sapiens
gaaggagcacccaggaccaccagaacgaggcggagaagaacccaaccaaaaccaggcggcaaccccggggcgacaaaaa

SEQ ID NO: 150768 - RNA, 83 nt, Homo sapiens
gcagcccgggacaccggggccgccgaggcaaagagccacacgcggcagccgaccagccccaccccccaacaacaagggcacga

SEQ ID NO: 150769 - RNA, 71 nt, Homo sapiens
accggaagccaacagcagcaggggaacccaacccacccccgccccaacaagaggccaacggccaagaccgc

SEQ ID NO: 150770 - RNA, 82 nt, Homo sapiens
gcgcaggacgggcacagcagagaccaaaggcagggcaaggaaacggccacaaagcaccacaagcaaggaacaaaagaaagca

SEQ ID NO: 150771 - RNA, 99 nt, Homo sapiens
gccgcagcagggcagcccgcaccgcgccgccgccaccacgcccacgcaacacacggaacaagcgggaaacggagccaccaacaagcgggagaaagacag

SEQ ID NO: 150772 - RNA, 58 nt, Homo sapiens
ggggcagaaacagagaaggaacagagaaaggacagggacaggaaagaaagaaaaagaa

SEQ ID NO: 150773 - RNA, 80 nt, Homo sapiens
aggagccacaagcccccagccagccaggggaaccagacccccgggagacggacacggagaccaccaggcaacaagaaccc

SEQ ID NO: 150774 - RNA, 81 nt, Homo sapiens
cgggaccggcgccgccccgagccgaccgcgccgcacgggagccagcgggggacccaaagacaggaccacgcaccagcagag

SEQ ID NO: 150775 - RNA, 80 nt, Homo sapiens
ggacacccgaagcgggaaagccaggagacgacaaggcgggcagggggagcggcgcggcagagcgggcaggagaggccggc

SEQ ID NO: 150776 - RNA, 69 nt, Homo sapiens
agagagaaaccagcgcaaagagcccgaacagcgacggaagaaaacgccagagaagcagagcagcccgga

SEQ ID NO: 150777 - RNA, 62 nt, Homo sapiens
ggggcgaaccacggaaaggaggaagaagacaccggggacagacaggcgaggcagaagcacgg

SEQ ID NO: 150778 - RNA, 78 nt, Homo sapiens
acaacaggccacccaaccgaaaacggaccagaacccaggacagcagccacgccgcaacaaccgcgagacagggaagaa

SEQ ID NO: 150779 - RNA, 76 nt, Homo sapiens
cagagcggaacggacacaagcgcaacgaacgaagacgggcaagcgggggccaaaggaaaaccggaaggcaccacaa

SEQ ID NO: 150780 - RNA, 83 nt, Homo sapiens
ccagagacacagggagaaaggaagggaaacacccagacccaaacacgaaggcaagcagaagaggaacagaagaagcagagcag

SEQ ID NO: 150781 - RNA, 58 nt, Homo sapiens
gcaccggcaaagggcgaaaggcacaccagagaacagggcccacgggacaggaaccgcg

SEQ ID NO: 150782 - RNA, 74 nt, Homo sapiens
gggcgcgcgaggggagaacggccaagacagagagggacccccccaaagaagacacgagcccaccagcccgcccc

SEQ ID NO: 150783 - RNA, 82 nt, Homo sapiens
agaaaaggcccaagacccaggaagaagaggacaggaccacccagacacaggaaggggacacacaacgagaacaccaagaggc

SEQ ID NO: 150784 - RNA, 64 nt, Homo sapiens
ggcgaagccacggcgggacaggaagccacagagccaagagacccgacggaaggaggaggaagaa

SEQ ID NO: 150785 - RNA, 38 nt, Homo sapiens
gcggaagagcgaggaagaggaaaggaccgccagccagg

SEQ ID NO: 150786 - RNA, 85 nt, Homo sapiens
cccaaagcgagggagacagcaacagaagagaagcacaaacaagaaagggaaaaccgaaacagagccccccagccagcgcagggca

SEQ ID NO: 150787 - RNA, 78 nt, Homo sapiens
agcaccgagcgcagcggcccaaggaaggcggaaacacagaggccaacagcaagagcaaccagggaccaccccacaaca

SEQ ID NO: 150788 - RNA, 72 nt, Homo sapiens
ggaaagcccgggccaagcgggaggcgccaccccgccccccgaggcgcagcccgaacccagcagccacacgcc

SEQ ID NO: 150789 - RNA, 36 nt, Homo sapiens
caggaccccccccaacgagcgcgagaagaagcaccc

SEQ ID NO: 150790 - RNA, 72 nt, Homo sapiens
gcccgccccgcgccccgcagggccaggacagcagaggcacacaaacggaaccgcacaaagcagacaacaaaa

SEQ ID NO: 150791 - RNA, 72 nt, Homo sapiens
cccaagaccaagcgcgccacgcgcggcgcgccggaaaaggcgaggagggacgcgacagaaccgccccccccc

SEQ ID NO: 150792 - RNA, 61 nt, Homo sapiens
ccgggaaagggacaagaagggcaaagccgaaaaacgaggccgaagagcgaagacacggccc

SEQ ID NO: 150793 - RNA, 73 nt, Homo sapiens
aaacacagcacaagaggggagaaaaccagagggagcaggccgggccgggcccagagggaagaaaccacagcgg

SEQ ID NO: 150794 - RNA, 83 nt, Homo sapiens
ggggcgagaccccgcccggaccgcaggacaaagcccagccaccacccccaccgacagaacaagcccagacccacccggcacac

SEQ ID NO: 150795 - RNA, 72 nt, Homo sapiens
ggcggaggaacggggcccgcccgcggcccccgcgcggaggacaccagaaaaggcaagacaacgcagaaacca

SEQ ID NO: 150796 - RNA, 75 nt, Homo sapiens
gaggccaggccaggaaaacacggacccccagcaacccagaagccagacgggagggcaaggccgaaccgcaagagc

SEQ ID NO: 150797 - RNA, 73 nt, Homo sapiens
agaagcgcagcacacgaccgggcccccacgggccccaggagaacacacaaccacgccgacaccagggaccagg

SEQ ID NO: 150798 - RNA, 68 nt, Homo sapiens
gagcgcccaaggcccaggcgcccggagcaccgaaacgccgaaaacgagccgggacagacaaacagcgg

SEQ ID NO: 150799 - RNA, 41 nt, Homo sapiens
accacaaacaggacaagcacacgggcaaggccagagaaggc

SEQ ID NO: 150800 - RNA, 76 nt, Homo sapiens
caagaaagaagaggcaaccacgcccaagcaagcggcccgaacacagaacccaagaaggagagacgggagggacaaa

SEQ ID NO: 150801 - RNA, 83 nt, Homo sapiens
ggagcgggacaccccggaagcgggaaagagcgccaaacggaggcccgaagaaaaagaaccgaaaaagaaaccacagacgagaa

SEQ ID NO: 150802 - RNA, 72 nt, Homo sapiens
cgccggcagcacggccgaaggagacagcccagaagaacgaggacagaggccagccggagacccgggcacaga

SEQ ID NO: 150803 - RNA, 75 nt, Homo sapiens
cagaacggggccaccagcgccggggcgcgagcggccaggcgcgccgccggccagacacgccagcacaagacggcc

SEQ ID NO: 150804 - RNA, 76 nt, Homo sapiens
cggacacacagaggaggcaaaaacaagcacacacaaacagcaggcaacagcgaagcaaaacgcgcagagcaggagc

SEQ ID NO: 150805 - RNA, 79 nt, Homo sapiens
gccacaaaacagagaagaagaccccacggaaagacaccggccagcggccagagcgagcaggccacacgaccaccaccac

SEQ ID NO: 150806 - RNA, 82 nt, Homo sapiens
cggagagccggccggggcaacgcgaaaccaagacaggcaaccacagagagagcagcccccccccggaggcccagaggaagac

SEQ ID NO: 150807 - RNA, 80 nt, Homo sapiens
caccgcaacacccaggcccccaacagggacaaacgccaaagccccggcaaaaacaaccagggaggaacccaacaggccca

SEQ ID NO: 150808 - RNA, 70 nt, Homo sapiens
ggcgcggggaccggacgggaagggccaggacgcgacaaggccgacaggagggaagaaaccagacaagaaa

SEQ ID NO: 150809 - RNA, 72 nt, Homo sapiens
gcagaggaaacgagggacaacacagacccaccagcagagcaaccccgcacaaacccagcgaacaacggagga

SEQ ID NO: 150810 - RNA, 42 nt, Homo sapiens
agaaggacggcagaccgacggaaggagcagacagcaagaacc

SEQ ID NO: 150811 - RNA, 76 nt, Homo sapiens
cgacaaaacagcagaccaggaacccaggagaaaaaacaagaaaaaacccaagcaaggacacggcaaaagcggcaga

SEQ ID NO: 150812 - RNA, 37 nt, Homo sapiens
gccccagagagcgggaacagagaccgagccggcgggg

SEQ ID NO: 150813 - RNA, 76 nt, Homo sapiens
gcgccgccccgggccccggccccgccagggcgcgcagcccgccccccgccgcgcagaggcggacacgagcgaaccg

SEQ ID NO: 150814 - RNA, 76 nt, Homo sapiens
gaccggccagggcccaccgcgcaccggagagcagccgcggaaaaacgcaggaggagaagaaacaggagaggaggaa

SEQ ID NO: 150815 - RNA, 52 nt, Homo sapiens
gcagcggaaagcaggagcacagggacaagcaaggggccaaggagccaaggag

SEQ ID NO: 150816 - RNA, 78 nt, Homo sapiens
gcaagacaaccacccgaacccaccgccaggccgaggaagggacaaagaggagggaagcgcaagcaccccagaaaaagc

SEQ ID NO: 150817 - RNA, 57 nt, Homo sapiens
gaccagacagagaagccgaagggcagaggaagccaaggacagcgaagagacagcgca

SEQ ID NO: 150818 - RNA, 91 nt, Homo sapiens
ggggcgccgccacgccccaccacaagagaggagggccacggcggacacaggaagcaagacaaacccaaccaacgcgagacacgcggaacga

SEQ ID NO: 150819 - RNA, 39 nt, Homo sapiens
acccccgccgcggccgcgccgagaacggagggaacggaa

SEQ ID NO: 150820 - RNA, 83 nt, Homo sapiens
gagaggaggccgccagcagaggcggagcccgcagaccgcagaaggccggagacaccagcagggacccagggcgagggcaacga

SEQ ID NO: 150821 - RNA, 61 nt, Homo sapiens
gcacggcagaccgggcgagcagagaagaagcaggcaggagcagacgcgcccgagaagccaa

SEQ ID NO: 150822 - RNA, 78 nt, Homo sapiens
gcagccaagccgggccgcccgcggcaggcccgggagaagcggccgccagccagccgcgcagcacaaccccgccaaccc

SEQ ID NO: 150823 - RNA, 61 nt, Homo sapiens
aacaccaacacgagggcggcggaaaaagccgccacacgccaaagaacacaggcacagaagc

SEQ ID NO: 150824 - RNA, 72 nt, Homo sapiens
ggaaaaagaaacacaccagacacaggagccaaaccgcacggccccagagaaaccaggaaaaaccagacacac

SEQ ID NO: 150825 - RNA, 99 nt, Homo sapiens
gccgcgcgccgccgccgcccgggcgggagccaggagcgacgcaccgccaggcaggcacaaagacccccgagcccccagccggacccccccgcaagcgcg

SEQ ID NO: 150826 - RNA, 78 nt, Homo sapiens
gagagcgcgaaacgcacgagaaggagcgaagcagcaggggacgagaggcaccagaaacggcggacgaaaggacgggaa

SEQ ID NO: 150827 - RNA, 73 nt, Homo sapiens
gaagcaagccaccgaccacaccgcccggggccgggcagcgagcccacacagaaaccccaagagggaacgcccg

SEQ ID NO: 150828 - RNA, 67 nt, Homo sapiens
accgggaacccgcaccaagacgccggacggcagaccagcgccagaggcgagcgacagcgccaagaaa

SEQ ID NO: 150829 - RNA, 89 nt, Homo sapiens
agaagacggggcagcggacgagcggagaaggccacaccacgcagaacgcaacaccaaggcacaccaccccagggagcaccgaagacgag

SEQ ID NO: 150830 - RNA, 53 nt, Homo sapiens
cgacgcgggggccaacaggggagcacgccagacacccagaaccaccaccaaac

SEQ ID NO: 150831 - RNA, 76 nt, Homo sapiens
aagcaagacccaggacaccccgaagccgagaaagacagaaaaagcacagaaacgcggaacagagaggaagcaaggc

SEQ ID NO: 150832 - RNA, 74 nt, Homo sapiens
gaggcaacccccccaccccgaccagcccacgcaggacgggaggaacacggcaccagcgggggggcagccaaggg

SEQ ID NO: 150833 - RNA, 78 nt, Homo sapiens
ccggaggagacggggcagacaacggagcccgggagacacaagcagcgaggaccaggaacaacagagacaagaacaagc

SEQ ID NO: 150834 - RNA, 86 nt, Homo sapiens
aggaggagagcgagcagacaagaccccaacaacaaggcccccacgacaaggggagcgaacaaggagcggggaggagaaagagggaa

SEQ ID NO: 150835 - RNA, 68 nt, Homo sapiens
cccacaggcaaccagcagcaaaccaggcagaagcaccaccgggagaaaccggaagaggaaaccccaga

SEQ ID NO: 150836 - RNA, 53 nt, Homo sapiens
ccgaacccgaaggggcagaagacaagaagggaagaccggcgaagcgaagaaca

SEQ ID NO: 150837 - RNA, 69 nt, Homo sapiens
gagggagggagagagacagcgacgagagagaccggagaggggagagaggcagaagaggccggaccggcg

SEQ ID NO: 150838 - RNA, 53 nt, Homo sapiens
agaacagaacccaaaagccgacaaccccagaaacagacggaccccagcagcca

SEQ ID NO: 150839 - RNA, 80 nt, Homo sapiens
cgggccgcgcgcgcgggggcgaggcggacgcgcggcgcgccaggggccagcacacaccagcaaaacagcccagagcaaga

SEQ ID NO: 150840 - RNA, 137 nt, Homo sapiens
agacgcccaacagcccagcccggggcagggaaaggagaaacaccagacacggaagccacgccgagcggagacccggacgacgggccaggccggcaccccgggggccagggccacggggaacccgaagccgaggagcc

SEQ ID NO: 150841 - RNA, 85 nt, Homo sapiens
ccgagcgcaaggacagcgcgaggccgcgcagcccagcgcagccagccacggcagcaggcagcagagcagacccacggggacgagg

SEQ ID NO: 150842 - RNA, 64 nt, Homo sapiens
gggggcggggacggcgccgagagccccggcgaagcgggcgccccagcccagagagccgccaaga

SEQ ID NO: 150843 - RNA, 62 nt, Homo sapiens
gcgaggaggaaaggaggacgaggaaacacagcgcgggaaggaacaagaggcccagggaggcc

SEQ ID NO: 150844 - RNA, 71 nt, Homo sapiens
gcgcaccacggccaggcaaagaaagacgcgccaacgaacccaccacgaaggccagaggacagaaggcaccc

SEQ ID NO: 150845 - RNA, 58 nt, Homo sapiens
gccagaaagaacaacccgaacgcaaaagaaggacagagcgggagccaccagcgccaaa

SEQ ID NO: 150846 - RNA, 54 nt, Homo sapiens
aaagggccgcgacagaaaggagagccagcaaagagaaaaacaggcacaacaagg

SEQ ID NO: 150847 - RNA, 68 nt, Homo sapiens
cccacgcgggagaccggggggcggacgcgcgcggggcaggagcagcgagaagagccagagaagaaagg

SEQ ID NO: 150848 - RNA, 76 nt, Homo sapiens
accacgggcggccccagaagaacccgggcggggccggacggggggagaaggaaaagggacaaagcagccgggaaga

SEQ ID NO: 150849 - RNA, 80 nt, Homo sapiens
gagaggaggagccagacgacaagcacacacaggcgcgaaacggaaaaagggcaggacagaacaggaggacgaccagaaac

SEQ ID NO: 150850 - RNA, 73 nt, Homo sapiens
acaaaagagaagaaccaaaacggccccgccgccccagcgggacaccggaagaaagcagccaccagacacagaa

SEQ ID NO: 150851 - RNA, 75 nt, Homo sapiens
gacaacagccaagagggcgcccagagacaacgagagaacgaagccagcagaacggccaaggcacgggacaagcca

SEQ ID NO: 150852 - RNA, 72 nt, Homo sapiens
acgcccaggaaccacaaggaacagaaccaccaaagggaacccagaagagagaagaagcaaaccgggaccgga

SEQ ID NO: 150853 - RNA, 53 nt, Homo sapiens
gaaaacccgcgagcaggaaccccaggaaacggccagggcccgagcaggaaaga

SEQ ID NO: 150854 - RNA, 66 nt, Homo sapiens
acaacccgaaaggccaggcagaacagcgcgcacacggcgagcaaggaagaaaagggaaccagcgga

SEQ ID NO: 150855 - RNA, 86 nt, Homo sapiens
gccaagagagagcagcagagagagaaggagcacacaccgacacggaagccacgagcaaggggcacacgaagcgaaaaagaaagaag

SEQ ID NO: 150856 - RNA, 88 nt, Homo sapiens
cggaggagaccaggccgagcacaaccgagcagcggcggacacgggcgccgaggaggacgcgccagcaggcaaacagggacacaaggac

SEQ ID NO: 150857 - RNA, 73 nt, Homo sapiens
gcggaaacaggaacagcccaaggaccacaagaacggaagcagaagcacgcaagcagagacagagaggaagaca

SEQ ID NO: 150858 - RNA, 83 nt, Homo sapiens
cggaaagcaggggggacccggaccgcgcgaagcgcaaaaacccgccaccgccaagagacgaagagcgaaggggagcggccaca

SEQ ID NO: 150859 - RNA, 76 nt, Homo sapiens
ccggaccgagagcggaccgagagcgcgaaacgcacgagaagcacgcagaagacagaccacaccaagagaccgccca

SEQ ID NO: 150860 - RNA, 84 nt, Homo sapiens
gagccgcgcaaaggccccggcaagaagggcgcccgcgccggcagaggaggcgagcacccgccagggagaggaacccccgcgcac

SEQ ID NO: 150861 - RNA, 41 nt, Homo sapiens
cccagacgggaggccaagcccagaaggaccgggacgaggca

SEQ ID NO: 150862 - RNA, 81 nt, Homo sapiens
caacagcgcagagagaaggagccaagaccccagccgccaggagacccaggcgccagagccccaggagaggaaagcgcagac

SEQ ID NO: 150863 - RNA, 76 nt, Homo sapiens
ccaggccccgaagcaagccccgaaaagaacggcggccaaagcgccagacaagggccgagccccggagagccccccg

SEQ ID NO: 150864 - RNA, 76 nt, Homo sapiens
agaaaaacaggcccgacccgaccccaaaagagacggacgcacaggaaggaaaaaggcgccaagaggacaacaaacg

SEQ ID NO: 150865 - RNA, 77 nt, Homo sapiens
cacaccgaggacaggaccgacagcacaacaccgcacggggagccaagccggacgcaaacccgggccccccaaaaaac

SEQ ID NO: 150866 - RNA, 68 nt, Homo sapiens
gaggccccgccggggacccgaaaaaaaaggagcaaacaggaccagaagccaaagaggcgagggcccgc

SEQ ID NO: 150867 - RNA, 81 nt, Homo sapiens
ccgagcgcgcgagccagacagacgcgagcgacaagagaaggaggaaaggcggccaacagcgggacaggaggagccaacagc

SEQ ID NO: 150868 - RNA, 61 nt, Homo sapiens
cacgcgcgggaaccaggggcagagggaccaccgacagacgcaaacagcagacggaagaccc

SEQ ID NO: 150869 - RNA, 70 nt, Homo sapiens
aggcaaggcagggggcaagcacagcggcaaaaggcgaacaaagcagcccgaggaggcacgcaaaacaaca

SEQ ID NO: 150870 - RNA, 77 nt, Homo sapiens
gaaaaaggacaaggacgccaggaaaccaagacaagcaaagggcgcgcccccacaagcagcggaccccgcccacgacc

SEQ ID NO: 150871 - RNA, 77 nt, Homo sapiens
gacgaccgacaggggggaaaggaaagaagggggcgaaaggaagcccagaaggccccgggccgaaccagaacgggacc

SEQ ID NO: 150872 - RNA, 81 nt, Homo sapiens
ccagccacaccccgagagcccggacacaagacccgcgcggccacgaccgggaggaccaaagggacacagaagacaaagcag

SEQ ID NO: 150873 - RNA, 76 nt, Homo sapiens
ggagaacgaccaaccgggggccaagaggagacgacacgcaccaagccagagcagaaggggaaaagaaacgcgagcc

SEQ ID NO: 150874 - RNA, 74 nt, Homo sapiens
gaacccgccgacacaggagcgaacacagaaaacagaaggaagcagcagcagcagagcacagggccccccaacgg

SEQ ID NO: 150875 - RNA, 53 nt, Homo sapiens
gcagaacgggcagagaccgcaggaagaagcgaagagcaaagaaagagacagaa

SEQ ID NO: 150876 - RNA, 80 nt, Homo sapiens
aaccgcacggaccacacagcgcgggagccacgcagaggacgccggaacacccggaagccgagaaagcagcaagagcaccg

SEQ ID NO: 150877 - RNA, 81 nt, Homo sapiens
gcgcccccgccccgggaccgcggggagggcccgcgagagcgccgggagcgccgccaggacaggcccgacgacccagaccaa

SEQ ID NO: 150878 - RNA, 75 nt, Homo sapiens
ggcgcgcgcccgcgcgcgcggcggacagcggaagcacgggccagacccgcggacacagagcagcgagggagcgcg

SEQ ID NO: 150879 - RNA, 83 nt, Homo sapiens
aaccagacaagaacgagaggaggcgggcagaggagccagaagggggaagcccaagcaagacaaacagagaacaggacagcaag

SEQ ID NO: 150880 - RNA, 80 nt, Homo sapiens
gccccgggaagacaaggggggaaggacaaagcacagaaggcgaggaaaaccaccacacaggggaaacacccagacaacac

SEQ ID NO: 150881 - RNA, 62 nt, Homo sapiens
ccacacgggccagggcagggccacccaggacccagcccccggagaagccaaggaagaccaag

SEQ ID NO: 150882 - RNA, 79 nt, Homo sapiens
cacagagggggaaagccaaggaaaaacggagagccacaaaaaaggaagcgaaaggcccagggaaagggccagccaacac

SEQ ID NO: 150883 - RNA, 70 nt, Homo sapiens
agaggcgccaggccaagcaaggaccccaaaagagacagacaggcgagcaaaaaaaacaagcccggaagcg

SEQ ID NO: 150884 - RNA, 81 nt, Homo sapiens
aaacaaaacaaacaaggcggggacgcccccccagcggcgggcagggccgcacacagcccagaggagccaccgcgcccaggc

SEQ ID NO: 150885 - RNA, 81 nt, Homo sapiens
gaacgaagggccaagaaggagaagcagcgcggaaaagcagaaggaaagagaagggagggcgacgagagccgaagcagaggc

SEQ ID NO: 150886 - RNA, 71 nt, Homo sapiens
ccaccaaacacgaggaaggaggacccagcccgcgcacacagagaaagccaaagaagccggaaaaaagcaga

SEQ ID NO: 150887 - RNA, 82 nt, Homo sapiens
gcagggcccggccgcgcccgggagcggcgccaggccggagcgcgacacggagacaggggcaggggcccgggcagagggaaag

SEQ ID NO: 150888 - RNA, 61 nt, Homo sapiens
ccccaacaggagacgcgacacacaacgagacggaggaaggagggcgaaccaaagaaggaag

SEQ ID NO: 150889 - RNA, 64 nt, Homo sapiens
aagacgagaccagccgcgaacccgaggaagcaggcagaaggagaaacccaaaaacgcaaagaca

SEQ ID NO: 150890 - RNA, 72 nt, Homo sapiens
cggacgcaaagcgcacggaaggcgcagggagcaggagaagcggagcgaaggggcgggcaggcagaggcggcg

SEQ ID NO: 150891 - RNA, 103 nt, Homo sapiens
ggagcaaaaagccagagaagccgccgaagaccacaagggcagaagacagcaggacgaaccaagaaacaaaagggaagaccggaacggagacgcacaacaaggg

SEQ ID NO: 150892 - RNA, 86 nt, Homo sapiens
ggagcaccccggaggaacggagacaaaggaggacagccaaaggcgccacggccggaacgcacagcggaaggccgccacccgggcca

SEQ ID NO: 150893 - RNA, 80 nt, Homo sapiens
ggcccccccaggacaacccagaggcaacaaaggcgaggggcagagagaagagcacacagaaggccaggagcgacagagcg

SEQ ID NO: 150894 - RNA, 61 nt, Homo sapiens
ccagggaggcaggggcagaaacagagaaggaacagaaaagaaagggggcccgagcagcaag

SEQ ID NO: 150895 - RNA, 58 nt, Homo sapiens
cgagagaaaaggcacggccagggcaggacagcagcccgcaacaggccggccagccccc

SEQ ID NO: 150896 - RNA, 71 nt, Homo sapiens
ccggagcgcccgacccgcgggccgggcgcagccgccgccccgccccagaagacaagggaggcgaggacgga

SEQ ID NO: 150897 - RNA, 31 nt, Homo sapiens
cggagaaccacaaacaaccgcagccccggaa

SEQ ID NO: 150898 - RNA, 83 nt, Homo sapiens
ggccgagagccggaacaaacgagggcccgggaggaccgacgcagccagaggccacaggcggaaggggagcggagggggcacag

SEQ ID NO: 150899 - RNA, 63 nt, Homo sapiens
aaaagaggaaccaagccaaccaaaaaacaagacgacaacaagagacagaaacagcaggcgagc

SEQ ID NO: 150900 - RNA, 62 nt, Homo sapiens
gggagacaagcaagagccaggacaccccgaaagccggaaaacggacaacggcaagagagcac

SEQ ID NO: 150901 - RNA, 74 nt, Homo sapiens
cagacgagcggaggacacccaacccgggagcgagagaccaacgggcaagcaaccgaggagaaaagagcgggcca

SEQ ID NO: 150902 - RNA, 70 nt, Homo sapiens
agggaccacaagcaagcgaaggaggccagaagaccagaagcgacagaaaacagcagccagcaagaaagac

SEQ ID NO: 150903 - RNA, 88 nt, Homo sapiens
agcagcaggagcacgaagaggacgggaagcgacggaccacgaccgcgggaagaaggaaacaaagccagaccgccgaggggggacgaac

SEQ ID NO: 150904 - RNA, 75 nt, Homo sapiens
ggggagaaccaccacgaaacggacagcaggaccgccccagggaagggggaaagagaccgccaggcggacgaaccc

SEQ ID NO: 150905 - RNA, 79 nt, Homo sapiens
gccaagaccgcgcagccgcggcgaagaaaaggaagcggcaaacaagaccagagcggcaacagagcaacaaacggacagg

SEQ ID NO: 150906 - RNA, 98 nt, Homo sapiens
aggagcggagcccgcagaaccccacagcaagaggacggaagaaaacaccggagcccaagacaccaaaacagacgcaggcaagaggcagaaggacaaag

SEQ ID NO: 150907 - RNA, 80 nt, Homo sapiens
accacccacacaccagcggcagcccccgacaagggccgaacaccaacagaggaagaaaggagagccgcagaagcaagaga

SEQ ID NO: 150908 - RNA, 79 nt, Homo sapiens
ggggagcgcccgcgacagaggagggaggaaaacaaccgagggcagaaacaaaaccagccaagcagaggagaaaaagaca

SEQ ID NO: 150909 - RNA, 77 nt, Homo sapiens
ccgacgagccggaggggcgccgcgggagcaaacgggaaaggcaggggacaccgaacggaacggaaacacagcaggaa

SEQ ID NO: 150910 - RNA, 58 nt, Homo sapiens
cgagagggagagggcaagggcaagacaaggaacagagacagacccgggggcccccaag

SEQ ID NO: 150911 - RNA, 73 nt, Homo sapiens
gagccgcgaaagacaaggaggcccgcgggccgcgggccgccgcagacagaggcacaaaaggagaaagcagaag

SEQ ID NO: 150912 - RNA, 79 nt, Homo sapiens
caagaccagcgcgagggcccgggcaaggcccgacagaaaacagacgacgaggagacccggggaacggggagaggcggcg

SEQ ID NO: 150913 - RNA, 78 nt, Homo sapiens
cgggacagcaacagggacgcgacaccgcacgagcggcccagaaggggcagaccaacaccacccagcaaaaaccccgac

SEQ ID NO: 150914 - RNA, 78 nt, Homo sapiens
gaaacaaaaacacacccagggaggcaagcagagcgcggccaagaacagaggaagggggacggggacaccagacgggaa

SEQ ID NO: 150915 - RNA, 82 nt, Homo sapiens
cgcgaggaaaggccgaggagccggagccgcagagacccggagggagaccgagagaagagagagaggaagaagaagaagaagg

SEQ ID NO: 150916 - RNA, 78 nt, Homo sapiens
gcgaggccgggccgggggagaccgcgccggggaaccaggggggaaccaccagaggaagagagcaaagcagaaacggac

SEQ ID NO: 150917 - RNA, 48 nt, Homo sapiens
gcccagcccgccaggggggaaagagagagaagaagagcccccaagcac

SEQ ID NO: 150918 - RNA, 82 nt, Homo sapiens
ggcgcagggaccggcgcgcgggagcgcacggccccaacgccccagaccagcggcgccggagcaccggagcagaagaccgagc

SEQ ID NO: 150919 - RNA, 61 nt, Homo sapiens
gagccagaagccaagaagacaggacgaggccacaagcacagaggcacaaaggaaccccaaa

SEQ ID NO: 150920 - RNA, 83 nt, Homo sapiens
ccaggccccaagcccgaggcccagaggaggaggcacgccagccaaagggcggcccccgacacaccacagcgagcagcccccgc

SEQ ID NO: 150921 - RNA, 56 nt, Homo sapiens
gagcgcgccgaccggccaaaggcacaccgaaccgcgggggcccgcgcagacgcacc

SEQ ID NO: 150922 - RNA, 74 nt, Homo sapiens
cagacaggacaccagagaagcaaacgaacgacagcccggcccgggagcacggagacgacaacgagggagccgcg

SEQ ID NO: 150923 - RNA, 72 nt, Homo sapiens
aagagaagaaccaaaacggccccgccgccccagaccagcaagaaggaagagcaagcacaacaaaaggagcag

SEQ ID NO: 150924 - RNA, 75 nt, Homo sapiens
aggagaccgaggaaaggcagacccgaaggaacgcgacaggaagaaacaaaccgacaggagccagaaggggaagac

SEQ ID NO: 150925 - RNA, 76 nt, Homo sapiens
acgacgccagaacaggccccgcagcgaaaacccaacgagaccaaagaggcaaggccagcccagaacaaagcaggcc

SEQ ID NO: 150926 - RNA, 57 nt, Homo sapiens
cggcagaacgcagaacacacaagaacagaggcgacaggacaacggacagcaaaaaag

SEQ ID NO: 150927 - RNA, 55 nt, Homo sapiens
gaggagacccaggacaaagcagacggaaggacagaacggaaaagagaaaacaaag

SEQ ID NO: 150928 - RNA, 77 nt, Homo sapiens
ccgcccccacacacaccagcaccaggagggaaccaccaccgcgcccgccggccgcgccccacacagacagggggcgg

SEQ ID NO: 150929 - RNA, 72 nt, Homo sapiens
gcacgaaaaaacccagcgaagaccacagaaaccaaaaggaagaacagacacagcaccgacacgcgcaaaagc

SEQ ID NO: 150930 - RNA, 54 nt, Homo sapiens
aggcccagggaggcaggggcagaaacagagaaggaacagagccagcgggccggc

SEQ ID NO: 150931 - RNA, 69 nt, Homo sapiens
cgccgaccccccggcgccgcgccggcggcggcacaggaagagggcggcacgcggccagagagcacaacg

SEQ ID NO: 150932 - RNA, 68 nt, Homo sapiens
agccgcccacgcgaaaacacacacagaaacaccaagagccagcaccaggggggacacaccaccgggaa

SEQ ID NO: 150933 - RNA, 61 nt, Homo sapiens
cggacgcggcgcgcgaccgacacgaagcacgccgagaggagcgaagcccaacgcaggagcg

SEQ ID NO: 150934 - RNA, 83 nt, Homo sapiens
agacacccgggccagcacaaacccagaaaccagacggacgcccgggcggcgggggcgcggcgcccccggagggggccaacaac

SEQ ID NO: 150935 - RNA, 84 nt, Homo sapiens
acaggagcaaagaagaggggcgccggaccgaaggcgcgaccacgacgagaagcgggggccgcagcggggcaccaacgcagggac

SEQ ID NO: 150936 - RNA, 85 nt, Homo sapiens
ccgcagaggcccaggcaaccacgccagacaaagaggccaacgagaaccgacaagagcacgaaggaagaaaggggaggacgaccag

SEQ ID NO: 150937 - RNA, 61 nt, Homo sapiens
ggagagaaagcagacacgcaccacaaaagaccaccaggcccagaagcggggaaggcagaga

SEQ ID NO: 150938 - RNA, 83 nt, Homo sapiens
acagaggccggagcagagggaagcaaggcaaggcaaaggacccagaggagaaaacggccggagaccccccagacacagcacgc

SEQ ID NO: 150939 - RNA, 67 nt, Homo sapiens
ccaaccggggaggaaaaccgacgaagggaagaacagcgcaggccgcaacaaggaaccgagccaaaaa

SEQ ID NO: 150940 - RNA, 81 nt, Homo sapiens
ccagcccagccagacccagccagaccagaccgagccacccagaaccacagccaaggcgccggcgaaagcaacgaagggacg

SEQ ID NO: 150941 - RNA, 77 nt, Homo sapiens
cgaaacgcacgagaaggcccgagcccaagcgcacgacaccagaggccgaagaacgaagacacaaaagaaggaaaagg

SEQ ID NO: 150942 - RNA, 73 nt, Homo sapiens
ggccgcgacgcaggcgcacggagacccgccggcaggcgggaaaccagaccgcaagggcagaaccgcaagggaa

SEQ ID NO: 150943 - RNA, 84 nt, Homo sapiens
ggcggaaaccgaaggggagccaggcggcgacagcgggaggagaaagcacacgacggcgcccaaaacgagagaggacacgcacca

SEQ ID NO: 150944 - RNA, 38 nt, Homo sapiens
caaaagaacacgccaggagccgacacaagaagcaacca

SEQ ID NO: 150945 - RNA, 81 nt, Homo sapiens
gccacaggcccgccccagagggggcccaggaaggggaaagagcgggggaggaccacccgggcggccagccagcccagggaa

SEQ ID NO: 150946 - RNA, 78 nt, Homo sapiens
cacccgagccgacagacaaaagagcgggcaaccaagccacgacacggcggggcgcacggcgagagcccaaccggccca

SEQ ID NO: 150947 - RNA, 84 nt, Homo sapiens
ggggcggcgcgccgccgaaggcgggcgcagcggcggagcggagcggagcccggaggggaacccagaaccgcggaccacagcaaa

SEQ ID NO: 150948 - RNA, 87 nt, Homo sapiens
agggcagaaacaggacgaaaaaagggcaagaagccagaagaagagccccgagccgagggggcagcgcacgcgggcagacccccgaaa

SEQ ID NO: 150949 - RNA, 71 nt, Homo sapiens
ccacagcaggccaagagccccaaaaggcgcagagacaaggaagggaagcggagaaaaggagcaaaaaacaa

SEQ ID NO: 150950 - RNA, 51 nt, Homo sapiens
gggccacgggagccgccgccggagcgagaacacgggaggaaaaggcccaca

SEQ ID NO: 150951 - RNA, 52 nt, Homo sapiens
cgaaaaagccagcaacagcgagacgacgggaccgaaggaccccgccagagac

SEQ ID NO: 150952 - RNA, 40 nt, Homo sapiens
ggagggcgggagcgagggcggccgacggcgcaaggccacg

SEQ ID NO: 150953 - RNA, 75 nt, Homo sapiens
cgcggaagggaggcgcgaagagcgaaagggggacaccggggcagcagcggcggagaaaccaccacaaacacgagg

SEQ ID NO: 150954 - RNA, 70 nt, Homo sapiens
ccaccaccagagaagcacagcagcaaccaaacccaagaacaaaaaggcccacagggggccaggcccagac

SEQ ID NO: 150955 - RNA, 53 nt, Homo sapiens
aggaacaaaaggaaacccaccaagaaaccagagacgaccacaagaacccacag

SEQ ID NO: 150956 - RNA, 74 nt, Homo sapiens
aaaggaaggggcggaaccggccgggccgaaggaggagaggcacagaagccaccagggagaagaggagaccaccc

SEQ ID NO: 150957 - RNA, 78 nt, Homo sapiens
gagacgggaccaaggggacggggcaccgccaacgggggccggacaggagcaccaagagaaagggcgcaaaaagaaaga

SEQ ID NO: 150958 - RNA, 76 nt, Homo sapiens
ccggggggcaggacgagcagccgccgggacggccaggaacggggcgggccaagcagagagggagacgcgcacggac

SEQ ID NO: 150959 - RNA, 78 nt, Homo sapiens
cgccccagggacccagggaacgggaccggagccagccgcaaagaggccaagggaggaaaaacgcgccaggaaaccagg

SEQ ID NO: 150960 - RNA, 36 nt, Homo sapiens
ggggacagaaaggccaacggaccacaccaaaagcca

SEQ ID NO: 150961 - RNA, 73 nt, Homo sapiens
cggaagacagagagagaaaagagggacgccaaacacccaaagccgacgaagacagccacacccccccagaaca

SEQ ID NO: 150962 - RNA, 87 nt, Homo sapiens
gggcaggggcggaggcggaggcagaggggaggcgcgaaagggcgcacccacgacgcgcacaccaccggcagaccggcgccacagcac

SEQ ID NO: 150963 - RNA, 58 nt, Homo sapiens
ccacccagaggaggaaagaaggacgccaacgcagcgagagggagagcaaagcagcggc

SEQ ID NO: 150964 - RNA, 77 nt, Homo sapiens
gagggggggcgcgccggaaaccggagcgcgcagcagcacccgagggacccgaggagcccaccaagccgaccgcaggc

SEQ ID NO: 150965 - RNA, 79 nt, Homo sapiens
gcagagagaggcgagaaagcacaacaagccgccagggagaaaagacgaggaagcccaaaaaccgcaagaaaggcacaga

SEQ ID NO: 150966 - RNA, 74 nt, Homo sapiens
cccacagcacccccaggcgccgagccagccgcacggccagacagcgggaagaccgcgaagaaagcggagacggc

SEQ ID NO: 150967 - RNA, 67 nt, Homo sapiens
gaaacacagaacgcaggccaaaaccaaccaacaacaacgaccggcccgcagcgagcaccaaggagca

SEQ ID NO: 150968 - RNA, 72 nt, Homo sapiens
ggccaacaggacacggggcacggagaggcagccggagcacaggagccaaaggaagagggccaggggggagga

SEQ ID NO: 150969 - RNA, 60 nt, Homo sapiens
gccgggcaccggaagagagcacccgaaaagcaaaggcccacccaggcacagggagaaaca

SEQ ID NO: 150970 - RNA, 60 nt, Homo sapiens
ggcacagggaggccagccggagaagcgagcagcgagccaggcggcgcgcaggagcacccc

SEQ ID NO: 150971 - RNA, 40 nt, Homo sapiens
agccgagagggaaacaacccacgaaagaccacagcaagac

SEQ ID NO: 150972 - RNA, 57 nt, Homo sapiens
gcgagcgcggcgcggccgggccggggggagccggcggacgcgcgggcccaccggacc

SEQ ID NO: 150973 - RNA, 80 nt, Homo sapiens
caaggagaggagccgggggccgacgcaggggcgaacagagcgggccaaagccagccggcacaggcgggggcaaggccgac

SEQ ID NO: 150974 - RNA, 78 nt, Homo sapiens
aaagcacagacgccagccaagcgccgacagcccagcaaaaggaggacggcagccagaacacgaagcaccgggagcccc

SEQ ID NO: 150975 - RNA, 78 nt, Homo sapiens
cagccagccccgaacaagcaccagaccaagcgacaagcgccacaacacagaggagccagcccccacagagcgggagcg

SEQ ID NO: 150976 - RNA, 83 nt, Homo sapiens
cggcggccgccgcgcccacccgcccgcgccgagggcggaggagcgcccggggccggaaaagggagaacagaagaacagaaaag

SEQ ID NO: 150977 - RNA, 80 nt, Homo sapiens
cgccccaagcgaacagagcaaggaaagcaacccaggaccaggaaagcagaaagaaggacaaaagaaacggaacgggacac

SEQ ID NO: 150978 - RNA, 75 nt, Homo sapiens
agagccccgcaccacaagaaccccgacagcagagacgacgcggcaagcagcggaagaggacgacgcgacacaaac

SEQ ID NO: 150979 - RNA, 80 nt, Homo sapiens
caccaaaacaacgcccagaaaaaaggccacagcagcgaagaaaaggcagcaaggagcgcccacggcagagccacaacgga

SEQ ID NO: 150980 - RNA, 77 nt, Homo sapiens
aagaggagagagagcaagagaggaagaagaacgacccgcccggggcagcaggggcggcgaagaggacccgcaggcgc

SEQ ID NO: 150981 - RNA, 62 nt, Homo sapiens
cgcccggggacgaaagcaggagacggaagagcaagaccacaccagcacaaacggagaggcgc

SEQ ID NO: 150982 - RNA, 76 nt, Homo sapiens
agagagaggaaacccaagcagcgccgccagaaggaagcaacagacgggaccgaaagacgacgacgcagcacagaga

SEQ ID NO: 150983 - RNA, 67 nt, Homo sapiens
gggggccagcaacccagacgcccacaggacaagagcgcgaaccaccgcggcagaacggcggggccga

SEQ ID NO: 150984 - RNA, 56 nt, Homo sapiens
agcccccgagagggggaacagggccggggccccgggagggccaccaccggacccgc

SEQ ID NO: 150985 - RNA, 53 nt, Homo sapiens
cgccgcgggcagcgcgcggcccgggcagcaggaccgccgcgccgaccggagac

SEQ ID NO: 150986 - RNA, 71 nt, Homo sapiens
caaggccaggcgacccgacgggccaccgagcgagagccggaccaagaaacccccacaggaaacgccgcgcc

SEQ ID NO: 150987 - RNA, 66 nt, Homo sapiens
ggaaggcaagcacagccagcgaccaaaaacagaaacccagagggccggccggacgcaaacgcccga

SEQ ID NO: 150988 - RNA, 73 nt, Homo sapiens
gacgggggcgaagagcgcgccgcccccgcccacccagcaaaacaaacggagagaggagggagaaacaaaggcc

SEQ ID NO: 150989 - RNA, 81 nt, Homo sapiens
cgaaggcagcggggccagcaaaccaagaggagcggggaaaagagggccgagaagcgggagcagggcaggggagggaacaca

SEQ ID NO: 150990 - RNA, 55 nt, Homo sapiens
cccaaaaaaggccagaggaggacagcacgagaggggaagccggggaacaccagag

SEQ ID NO: 150991 - RNA, 81 nt, Homo sapiens
caggacaaacagcacaagagcggacaagccccgagccccggccccaaagacccaaaacagagacaccccccagcccccgcg

SEQ ID NO: 150992 - RNA, 78 nt, Homo sapiens
gccagaaccgaggagagaaggcagccagaggaacaaaccacgagcacccaaggcacggaccacccgcaccccacagag

SEQ ID NO: 150993 - RNA, 73 nt, Homo sapiens
ggcgacgggaagcgaccgcaggcgggcccccgaccgacaaagccagaagcacgacagagacgggcacacaaga

SEQ ID NO: 150994 - RNA, 79 nt, Homo sapiens
aagagaaaaaccacgccccaaagaaaccagagcaggagaagcggaggaaaccaagaccggaggaccacccccgccccga

SEQ ID NO: 150995 - RNA, 54 nt, Homo sapiens
acggccacgccccccgcaacaacccacaagacacgagaggcgagggacgacaga

SEQ ID NO: 150996 - RNA, 60 nt, Homo sapiens
cggaaccaggaagagagacgacgggcaacagacaggccacggcgagccccgaggacgggg

SEQ ID NO: 150997 - RNA, 73 nt, Homo sapiens
agacaagccggggaggaagggcggcggaccggggagccggagggggaccagcgggggggccccacggagaggc

SEQ ID NO: 150998 - RNA, 76 nt, Homo sapiens
cagcgaccagaaacacaagagcaagagggacagccaggggaaaagagacgcaaaccacgaggacagagaagagaga

SEQ ID NO: 150999 - RNA, 79 nt, Homo sapiens
ggagagcggacccagggcccggcgaaggacccggccgaggcgggcgcaagagaaggcaccaagaggccaaagccacccc

SEQ ID NO: 151000 - RNA, 67 nt, Homo sapiens
agcccaaacaggagcggagcagccaaagaggagcaaggggccccgccacgcagcccacagcagcccg

SEQ ID NO: 151001 - RNA, 78 nt, Homo sapiens
cgcgaacgccacgagcccccaggggacggcgaacgcagggaaggcacgaccagcaaccagcccgagagaccgcggacc

SEQ ID NO: 151002 - RNA, 55 nt, Homo sapiens
gagagacgggagcccgacacagaccaaacagaggcagaacgaaaaaagaaaaccc

SEQ ID NO: 151003 - RNA, 106 nt, Homo sapiens
cgcagagagaaaggcggcgggcagaagaaaacagggagcaccagcccggcagccgaacacagaccaggcgcagccggaccggacagaccaggggccgggggaccag

SEQ ID NO: 151004 - RNA, 76 nt, Homo sapiens
aggccagaacgccgcaaagcaaagccaccagaggccccgagggaggccaggagcacagaaacacccaccaggagcc

SEQ ID NO: 151005 - RNA, 54 nt, Homo sapiens
cacaaacaaacacccacggaaccagagacaacgggaaaagaacggcaaacccaa

SEQ ID NO: 151006 - RNA, 74 nt, Homo sapiens
cgcgccccgggcaggcccccaagagccgaggcgcggcgcgccgaggcgcccaccaggacagacagccggggcaa

SEQ ID NO: 151007 - RNA, 79 nt, Homo sapiens
accaagcaggccaagcaaaaagccagggcccaaagccgccccggaccaaggggcgaggcggccacgaggcaagagacgc

SEQ ID NO: 151008 - RNA, 77 nt, Homo sapiens
gcgaaagaaaggaaccagggagaaagcacagaaacgaggggacaaacacaccagagagaaacacagcccaaagaaac

SEQ ID NO: 151009 - RNA, 73 nt, Homo sapiens
ggagccaagcagcagaagagcaaggagaacagccgcggagcccaggcggaggcaaggcggaggccacgcaacc

SEQ ID NO: 151010 - RNA, 79 nt, Homo sapiens
aagaaagggcagaagcaaaacaggacgacccgaggaacagaggaaccagcaccagacagaagacgcagaagagcagcga

SEQ ID NO: 151011 - RNA, 83 nt, Homo sapiens
agcggaggccggcacgcccgcccgaggcgacggccgcggcgcacaggggccaccacagagcccgcagggacacagcagaacaa

SEQ ID NO: 151012 - RNA, 66 nt, Homo sapiens
gaacagagccggaagcaacacgcagagcggcggcagaaagccgaaaaagaagaaaccacgaaaacc

SEQ ID NO: 151013 - RNA, 75 nt, Homo sapiens
cgcccgaccgccacagccagggacgacacgcacagagaaggacgagggcccccagccagagcccaccagccggcc

SEQ ID NO: 151014 - RNA, 82 nt, Homo sapiens
cagcgccacacgagcccaggcacaggcacgcagggcccaccggcgcggcaagagccccgagcggccgcccagcccagcacaa

SEQ ID NO: 151015 - RNA, 77 nt, Homo sapiens
cagagagcagcaaaaaaccccccacaacacaaccacagcccagggcccacaagagagggaaggagaaaggcagacga

SEQ ID NO: 151016 - RNA, 66 nt, Homo sapiens
agaaacacaaagcgccaaaaggaacccacaggacccggaaacagggacaccgaaccacccaacagc

SEQ ID NO: 151017 - RNA, 61 nt, Homo sapiens
aaggcaagcagagacggaaaagggaaggagaaccccagaggcgaagacgacgagaagagac

SEQ ID NO: 151018 - RNA, 36 nt, Homo sapiens
cagcggagcggcaccgagaggagcgccgccccaggc

SEQ ID NO: 151019 - RNA, 63 nt, Homo sapiens
acacacccacccaccggcccagccccgaggagagaccgcaccaacggcaagacaagacccgcc

SEQ ID NO: 151020 - RNA, 85 nt, Homo sapiens
caaggggcagggagaagggcaaggaccacaaagagcccaccccgacacaaaccccggcggggcaggaggcggggaccagcgagac

SEQ ID NO: 151021 - RNA, 61 nt, Homo sapiens
ccgcaagcaaaaaccaaaaaccggcccagacaacggcaagggggcgggcgcaccgcggcag

SEQ ID NO: 151022 - RNA, 81 nt, Homo sapiens
ggagacccagggagccaaggcgaaaggggaagagggcaccccggccgccccagacggcaaccaacagaggcgggaaggggc

SEQ ID NO: 151023 - RNA, 80 nt, Homo sapiens
gcagcccggcccaacccggaccggggacgcacggaccaaaaacccgcaacagcccccgcccaagggccacggggaccagg

SEQ ID NO: 151024 - RNA, 69 nt, Homo sapiens
cggggaggcgcagcccgaaggccccgggcaaagcggacaccggggacaacacagaggacccagccacac

SEQ ID NO: 151025 - RNA, 71 nt, Homo sapiens
ggagagggaagcaaagaaacacaccacccaggcaaacgaccaaagacaagaaggccaggcagaagcaggaa

SEQ ID NO: 151026 - RNA, 81 nt, Homo sapiens
cggggccgaggcacccaccccggagcggagacacccaaccgaccgaaaccaagggccggaagcccacccaagaacgggccc

SEQ ID NO: 151027 - RNA, 78 nt, Homo sapiens
gggccacccggggccggcgcggaggcagcgggcacggcaggaaagcagagccaaagaagaacaggagaaaagaagggg

SEQ ID NO: 151028 - RNA, 77 nt, Homo sapiens
ccccccaggcccccacccccgagggggggccaggccacaggcccggcagaaaacccgcaaacacgccgccagaaccc

SEQ ID NO: 151029 - RNA, 69 nt, Homo sapiens
gacccagcccaggccgcacggacgggggggggaagaccgcaggaaagcaggaaggcaagaaagccaagg

SEQ ID NO: 151030 - RNA, 49 nt, Homo sapiens
cggcggccacacgccacgccaccagcggcaaggacggagccccacgcga

SEQ ID NO: 151031 - RNA, 55 nt, Homo sapiens
agaagccagacccccaaggaccggaaaccaggcaggccagcaggcagcgcacggg

SEQ ID NO: 151032 - RNA, 73 nt, Homo sapiens
gagaacagccgcgcggcgagcggcccgcacaaggccggcaggcaaaggcagacacggcgaccgaccccgagag

SEQ ID NO: 151033 - RNA, 75 nt, Homo sapiens
ggaagaagcgaacagggcgacaacaccccgagagaaccgagccaccgcaacggaggcgaaccggcaggagaaagg

SEQ ID NO: 151034 - RNA, 64 nt, Homo sapiens
gcgcaaggaagaaacccccagccgacgcccgcgccccccagcaagggacacgccggaaaaaagc

SEQ ID NO: 151035 - RNA, 50 nt, Homo sapiens
cagcggacgcggaggcccaaccgaagaaaacaagggggagaggcaccagc

SEQ ID NO: 151036 - RNA, 81 nt, Homo sapiens
aacaagacggggcgccccacagaggggcgacgggaacgggagacagaggacccaacccaagaagccacgccacagaaagag

SEQ ID NO: 151037 - RNA, 74 nt, Homo sapiens
ggaagggggaaggccaccgccagcgaaccccgaaggaggccaagaaaggacgagagacgcccccgggacgaaaa

SEQ ID NO: 151038 - RNA, 76 nt, Homo sapiens
gaggcccgcccaccagcgcccgcccccgccccgcacaagggcacccacagaaagcgacggcgagccagacacgcgc

SEQ ID NO: 151039 - RNA, 73 nt, Homo sapiens
cacacacagggaccgcaaaggcgaggacaccaccacagggagaaacacaggacaacggacccaaaggcaccaa

SEQ ID NO: 151040 - RNA, 70 nt, Homo sapiens
cagcaaaggaggcacccacagagcaccggaccagcaaacagggcccaacaaaggccgcagaagcggaaaa

SEQ ID NO: 151041 - RNA, 105 nt, Homo sapiens
accggaagacgggcgaggagaccggcaccacggcagcggcccaacgccaagaacaacgaagggccgggccggggcacgggcccacggccccccaccgggccaccc

SEQ ID NO: 151042 - RNA, 79 nt, Homo sapiens
caccgaggagcgggccagccgcgcggcgggaagcggcggcggcggcccagcgccaagaggaaccaacacagggagggcc

SEQ ID NO: 151043 - RNA, 88 nt, Homo sapiens
gcgcagcgacggcgcgggagagcgcgccagccggccgcgaaaacgcgaagacgacgagcgcaccaagaggaacacaggcgaccgccaa

SEQ ID NO: 151044 - RNA, 83 nt, Homo sapiens
gcggaggacgcgaggggcggaggcgggagaggcgagccgcgagagggccggcaggcccgggaaggacaggaagggaaggggcg

SEQ ID NO: 151045 - RNA, 80 nt, Homo sapiens
ggggcggccgggacggaggacgcgcagccccgacaagggaccgggcgggccccgcaggaaacccccaccggcccacacag

SEQ ID NO: 151046 - RNA, 79 nt, Homo sapiens
caaaccaagggcgggggggcacaaggaagcggaagggacagccaagcccgaagccagagaaggcacaggagaggagaag

SEQ ID NO: 151047 - RNA, 78 nt, Homo sapiens
accagcaaggcggcagagcaaggggcacgcagaaggaccggccacggaacgggggacccacggggcagggacgacgca

SEQ ID NO: 151048 - RNA, 74 nt, Homo sapiens
ggcccgacaggagcacaggcccagaggcagagcacacaaccaggaaccaaaaaccgcggcgacggggaaaaaaa

SEQ ID NO: 151049 - RNA, 80 nt, Homo sapiens
cggagcgccgccgccgggaccccgcccagcaggaccacgccgcgaggcaaacgcaagggaaaaaagggcaggggaaagag

SEQ ID NO: 151050 - RNA, 128 nt, Homo sapiens
gaacgccagggcccccaggcccagagaagcgccgggcccgcggaaggggaccacggaccaagcgagggccccggggacggcaggcaaaacccacaggggggccgcacgcggcgggaaggcgcacagca

SEQ ID NO: 151051 - RNA, 75 nt, Homo sapiens
cacaagagaccggggggccggggggaaaggggcagcagaggcgagaggacccaagaagaggagaagagacgggag

SEQ ID NO: 151052 - RNA, 70 nt, Homo sapiens
ccgcccaacaaacagaggacagggggcgcacagacggagaccgagaggccgaacacagcagcggcgcccg

SEQ ID NO: 151053 - RNA, 56 nt, Homo sapiens
acagcaccagcgggccggaggagccagagcgcagaaagagagacggagcaccacgg

SEQ ID NO: 151054 - RNA, 82 nt, Homo sapiens
gccgcggccgggccaacccgaggcggggacgccgcgacgggaacgaggagcgggacaaaacacccaagcacacaaccagaaa

SEQ ID NO: 151055 - RNA, 77 nt, Homo sapiens
cgagcaggcaggccccgcaggccacccaggcccggaggcagcgcagggcgacgccaggagcacaccgaaaagaaagg

SEQ ID NO: 151056 - RNA, 123 nt, Homo sapiens
gcagcagaggggccacgcgggcccgaggcgcaccaagggcgaaggagccggcccaagacagcccgagaagccagcagaggaaggaaggacgaagggaggccagaagcacggcccacagaacga

SEQ ID NO: 151057 - RNA, 55 nt, Homo sapiens
ggcaccacgaaggaccgaagagacgcagaaaacagacacacagcggagacaagca

SEQ ID NO: 151058 - RNA, 72 nt, Homo sapiens
gagacccacaagggacgaagccagcaaaacgccggaagaaccggacaccccaacccccggagcaagaccagg

SEQ ID NO: 151059 - RNA, 71 nt, Homo sapiens
accccggagcccagaagacagagggcgagacagaagcgaaggggacagggggagaaccgccagggaaaccc

SEQ ID NO: 151060 - RNA, 68 nt, Homo sapiens
agagcccgcggggaggcgcggccgccccgcgggggacggcaaacgaacacgcgcagcgcagaggcccg

SEQ ID NO: 151061 - RNA, 82 nt, Homo sapiens
ccgcacaacaagaggccggcggggcgacagccacccacacagaaagccagggccggagggagaacagagcggccccccccac

SEQ ID NO: 151062 - RNA, 82 nt, Homo sapiens
ccggaggggagacgggaggcagggcccgccggcgggggggagcgggcagcggaggaccccgcaccaggccccggcggccggg

SEQ ID NO: 151063 - RNA, 81 nt, Homo sapiens
agaggccgagggcacagcggagcaggcgccacgggacacggaaccaggaggagcggagcgccgcgcgcccaggccaggacg

SEQ ID NO: 151064 - RNA, 71 nt, Homo sapiens
agagcagcgggcagcaaccagcgcgcgcaagaaacacgcgagcgagcggcaaagaggggccggaccacaag

SEQ ID NO: 151065 - RNA, 83 nt, Homo sapiens
aagggggccggagcgagaccgggcggccacagccgcagggagaacccgaggcgggcgggaccgcgccagaacaagcaaccaca

SEQ ID NO: 151066 - RNA, 79 nt, Homo sapiens
cgcgccaccgcaaaggcccgcgcaccgccagggaagaaacggcaggagcagggaaaaggcccacgagacaagaagggcc

SEQ ID NO: 151067 - RNA, 60 nt, Homo sapiens
cgccaacccgcgccgccgccaccagcccaaaacggagcccaggagaaacgccaaggccgc

SEQ ID NO: 151068 - RNA, 91 nt, Homo sapiens
caggcgccgcggcccggcaccccgggaagagccgcgcgacagcccgggcaccagggcacgcaccccgcgccgccgccccccaccaaggaag

SEQ ID NO: 151069 - RNA, 56 nt, Homo sapiens
gaaggaccacgaccccgaagacagcagagaaggcagggagaccccaaggcaaaacc

SEQ ID NO: 151070 - RNA, 82 nt, Homo sapiens
ccaaggccagacaaaacacccacgggcccaggaggacggccaggaccaggccagcagccacgcaccaaccggaccagggccg

SEQ ID NO: 151071 - RNA, 53 nt, Homo sapiens
accacaacacagaacgaagagaagaagcgagaacaaagaagccacagacaaag

SEQ ID NO: 151072 - RNA, 84 nt, Homo sapiens
caccgcgaggggcgggcgaggcaccggagacccgagcaccccaacgggcaggaagaacagggaaccgagaacagccaaggaccc

SEQ ID NO: 151073 - RNA, 74 nt, Homo sapiens
gacagaagaagaaagaagaaaacggggcgcaccagggagcaccagagccaaggcgcaccggcgcccagaagagc

SEQ ID NO: 151074 - RNA, 53 nt, Homo sapiens
gccgaaccgacgaccagacccgggaaagagcagagccaaaaaccgaacacccg

SEQ ID NO: 151075 - RNA, 68 nt, Homo sapiens
gggaaaaaagcacggcagcgcgcgccacgggccaacagggaagcccacaaccaaagagaggccggaga

SEQ ID NO: 151076 - RNA, 41 nt, Homo sapiens
aggcccagcacaaagggaaggcgaggcaccaagccccccgc

SEQ ID NO: 151077 - RNA, 82 nt, Homo sapiens
ggcgcccaaacccggaccagcagccagcaccagcccccaccccaggccccccagccccagcacaaacagcagcagcaacaac

SEQ ID NO: 151078 - RNA, 62 nt, Homo sapiens
ggaagcgagcagcacgggcaagcgggcagcgaagagagaggagaggaggcagaacgaagaag

SEQ ID NO: 151079 - RNA, 71 nt, Homo sapiens
agaaagacaggaaaagagacgaccagaaccgacaaaggaccggcccccacgaggacaagcagaaaccaagc

SEQ ID NO: 151080 - RNA, 65 nt, Homo sapiens
agcagaaagagaagacaagcccccacacgggcacagaagagcaacaagcggaagaccacaacgac

SEQ ID NO: 151081 - RNA, 73 nt, Homo sapiens
gagcgaggacagcagaaagaccacagagacccagagagaaacagcccagaaccgggacaacccagcaaacagg

SEQ ID NO: 151082 - RNA, 106 nt, Homo sapiens
gggaagggagacgaaaacggaaacagagcccagcccagaaaagcgcaagagaaaaggggagaaagagaagagcgagccaggcagcacacgagaagcaccggaagag

SEQ ID NO: 151083 - RNA, 83 nt, Homo sapiens
cacgggccagccccgccgccccgcaaccggcagccgccgccgggaaggaaagaacccggaaaccacaaggccagcaccgccgg

SEQ ID NO: 151084 - RNA, 61 nt, Homo sapiens
gcagcgcggcacagcacaccccagcggcacacacagcgaaccggaaaggaccggcagaaaa

SEQ ID NO: 151085 - RNA, 72 nt, Homo sapiens
caaggcaggcaacaagcaccaaggagcagagcggagagaggacagaacacagacgaccggcagcacagggaa

SEQ ID NO: 151086 - RNA, 113 nt, Homo sapiens
aacgccccggcgggcccagagcccagagccggacggggacacaggccgggagaaaacaaaggccaaagagccaaggagagaagagggcccgacaccaagagagcaaaacgacc

SEQ ID NO: 151087 - RNA, 32 nt, Homo sapiens
agcgagaggcgccagggggagccacccaaagg

SEQ ID NO: 151088 - RNA, 63 nt, Homo sapiens
cgagaagagacaccagagccaacgggagcagagggcccccccgggggcgagaagaaacggacg

SEQ ID NO: 151089 - RNA, 79 nt, Homo sapiens
gacagcgagaacaaaggagagaggaccacccagaggagcaacaaacaccacgacagacacaagaagaagaaaaagaaaa

SEQ ID NO: 151090 - RNA, 41 nt, Homo sapiens
accgcccggccccagcagaagccaggcagagcagcccacca

SEQ ID NO: 151091 - RNA, 74 nt, Homo sapiens
aggagaggacacgggagagccgaaccagaagagaaagcagcagaaggcgacaggaggagcgggcggaaacaagc

SEQ ID NO: 151092 - RNA, 82 nt, Homo sapiens
gggcagccacccccggaacgggaggaaccgccgccccgagcgccgcccgcaagcccccaccaccagacgaagcagccacgcc

SEQ ID NO: 151093 - RNA, 77 nt, Homo sapiens
cccagaacaagcaaagaagggaaaccaggacagcgacagccgccaccggcaacaaccagacccgacccgaacccacc

SEQ ID NO: 151094 - RNA, 79 nt, Homo sapiens
acaggcggcgcgcgcggcgcgggacgcgcgcgggcacccacggagccccggggcgacgacacccccggggcggccaccc

SEQ ID NO: 151095 - RNA, 80 nt, Homo sapiens
accaccgcaaggacaagaccgcgcacagaccccagaaaaggccaagggggcggcacacaagaaggggcagagaggagaga

SEQ ID NO: 151096 - RNA, 74 nt, Homo sapiens
cagaacaacagcacgggagaaagcgcccacgcacgaaagcccaggccaaaaagaggcaaagggaaaccgaaggg

SEQ ID NO: 151097 - RNA, 87 nt, Homo sapiens
ccagcggagcaagaagaggaccggcagggcagagcaggaggccccccgagaccccaagaagaagcggaagaggagccgcggaaccaa

SEQ ID NO: 151098 - RNA, 45 nt, Homo sapiens
ccgaggcccggagcgaccaggcagacaggaaggaaaaaaggaaaa

SEQ ID NO: 151099 - RNA, 67 nt, Homo sapiens
gccgcaacgggaaagaaaaaaggacacgcggcgagcggccagcaaggaagccccacagccaacagaa

SEQ ID NO: 151100 - RNA, 80 nt, Homo sapiens
ggcccgcccgccaaagcgcccagccaacgacccacgcagccgcccgaccaggacccgcacagcggccgcggccgggcgcg

SEQ ID NO: 151101 - RNA, 94 nt, Homo sapiens
gccggacccgcccagcagaagaagagaggagggagaacacagaaaccggccccagggaccaagaaaggcccagggaccaaagcccggacaaggc

SEQ ID NO: 151102 - RNA, 40 nt, Homo sapiens
gagcagcacagacaccagccaggaccgacagcccccagga

SEQ ID NO: 151103 - RNA, 78 nt, Homo sapiens
caccacgagcggggcggaggggcggaacaggcagccggcaccaccagagaaccgagcggccggagcagaaacgagcgg

SEQ ID NO: 151104 - RNA, 53 nt, Homo sapiens
aggaccacagccgagcgagagcaggaagacggggccacgcgcacaggggcggc

SEQ ID NO: 151105 - RNA, 80 nt, Homo sapiens
ggggcaaccagaggggccaacggacgacagaacagccagcagaagcacaccaacgacaggcccgaaagaaggcgagcaca

SEQ ID NO: 151106 - RNA, 77 nt, Homo sapiens
ccgccgccgccgggcggcccggaccgccccaccaccgcgggacacgacgaggaagaaaggagcccagaggaaccgcg

SEQ ID NO: 151107 - RNA, 78 nt, Homo sapiens
cccggagcaaagagaagacaccggaagaaggggggagacacgccacgcggccaaaggaacacggaggaaaagcagcca

SEQ ID NO: 151108 - RNA, 75 nt, Homo sapiens
cgggggaggcagagcgggcgcgccacggccacacgcccagcgagcgccccacacagcaccaaggacaagaaggca

SEQ ID NO: 151109 - RNA, 65 nt, Homo sapiens
gagggcgggggcagcggcagcggggacgagagccccggcacaaacggaccaccagaaagcacccc

SEQ ID NO: 151110 - RNA, 81 nt, Homo sapiens
gggccgagacgccaagaggccagggagaggcgcagccgcccccagccccgaggggagaggccccagggacacaaggccgca

SEQ ID NO: 151111 - RNA, 76 nt, Homo sapiens
gggcgccgcccccccggcccccgggacggcccaaggccagcccgcagcccgggcgcgccaggcacagccaagagcg

SEQ ID NO: 151112 - RNA, 71 nt, Homo sapiens
gaggcacggcaaccgaaagaacaaaacaccaccggcaagaagaacggaccgaagccaaagaacaagagcgc

SEQ ID NO: 151113 - RNA, 73 nt, Homo sapiens
ggaaccgggcacaggcccagggccagccccaacccgcggaagacagaacgaaccacggcaaggccgaggcacc

SEQ ID NO: 151114 - RNA, 74 nt, Homo sapiens
ggcagccgccgcccggacccccaggcagcccaacagcccacagcaccccagaaacgaagccaaggccccaccca

SEQ ID NO: 151115 - RNA, 75 nt, Homo sapiens
acacaaggcccagccacccccggccaagccagaaggggaaaagggaccccgaacaaaacaagaacaagcaagcag

SEQ ID NO: 151116 - RNA, 77 nt, Homo sapiens
agaaaaaagaaaagagaaagggggacaaagacagcccagaaccgcggacagcaaaaggagaaaaaccgcacaaaggc

SEQ ID NO: 151117 - RNA, 67 nt, Homo sapiens
ggcaggggacaccaggaaaaagcgcgcaggagggcagcaccgcaaaaagccaaaacagaccgagaaa

SEQ ID NO: 151118 - RNA, 86 nt, Homo sapiens
gcgcagccaagcccggagccaacaagcggaaggcgaggcaggagaaggcggaacccgggaagcggagcgcaggagccgagagcgcc

SEQ ID NO: 151119 - RNA, 78 nt, Homo sapiens
cgaaccgagcgccagagacgggcggcgcaagcaaaaccaggcaagcgccagcaggacccccaccgagaaaagacgacc

SEQ ID NO: 151120 - RNA, 81 nt, Homo sapiens
cccgccccagcccaccccaaccaagggaagaagcccagcggaggcgaacggcccccgccaacacgaggaccccacggagag

SEQ ID NO: 151121 - RNA, 84 nt, Homo sapiens
aggggcaaggaggggaaggacaacccccgcaggcggcggggcagggcagacaacaccgacgagaaggggcagaccaacaccacc

SEQ ID NO: 151122 - RNA, 67 nt, Homo sapiens
ccacccaaaagaaaacccaaaaaggagcagccggccggggcgagaccaaaaggaggagaagagacaa

SEQ ID NO: 151123 - RNA, 73 nt, Homo sapiens
cccacagcaaagagagccccaggagaagaacaagaccgaccgggcggaggagacggcccggcgccccgccacg

SEQ ID NO: 151124 - RNA, 81 nt, Homo sapiens
ccaagaggcgggaaggagcagcacgccccccggacagaccacccagcccgacagggaccgcgaggaccagccgcggcacgg

SEQ ID NO: 151125 - RNA, 68 nt, Homo sapiens
gaggcaacgagaagaagcaaaaagcaaggccaccaacaagagcaacccaggagaagaagcagaagaag

SEQ ID NO: 151126 - RNA, 77 nt, Homo sapiens
ggggccacaaagccccccggagacgcaaccaaggacagaagacggaagaaacggagccgaagccagcagaaagaagc

SEQ ID NO: 151127 - RNA, 55 nt, Homo sapiens
gccgaaaacaccaacgcacaacaacagcaacggaggcgggaccggaacaggcaca

SEQ ID NO: 151128 - RNA, 80 nt, Homo sapiens
agagcacacacggccaagagcgggcaccaggaagcgaaggcggaaccaggccaagcggaaacaggaaggaacaccaggag

SEQ ID NO: 151129 - RNA, 67 nt, Homo sapiens
ggggaggaagggcggcggaccgggagacaccccgcacacacacccaaggacacagacggaagggagg

SEQ ID NO: 151130 - RNA, 77 nt, Homo sapiens
gagcagaacacggcgagcggggggccacagggcaacggggcccgcaggcccccaccgcccagaggagagcgagcacc

SEQ ID NO: 151131 - RNA, 71 nt, Homo sapiens
gccacccaaggccaaagaaccagcacaggacaaaaggaggagggcaaaccagacagaaccgacggggaaag

SEQ ID NO: 151132 - RNA, 58 nt, Homo sapiens
gaaaaagcgggaacgcaggacccaaagcgaagaggaggacgcagcagagagggcaggc

SEQ ID NO: 151133 - RNA, 81 nt, Homo sapiens
ccacaagggccccagcccaggaacgaacccaggcgcacaggagaagagacccaagaggaagaaggaagcccacccccagaa

SEQ ID NO: 151134 - RNA, 75 nt, Homo sapiens
aagccgagccgccacccggcgcacgcagcacgggggcaggggccgacccagaacgccagcgccgcaaggaaaaaa

SEQ ID NO: 151135 - RNA, 92 nt, Homo sapiens
ggccgagcgcggaggcgccccgcgcagcgcgcgcccaagggcgcacccacgacgcgcacaccaccggcagaccggcgccacagcaccacccg

SEQ ID NO: 151136 - RNA, 73 nt, Homo sapiens
gccgacccgccagaggaggccccccagccacggaaacgggaaccgcccaaaagcccgccagaagaaggacggg

SEQ ID NO: 151137 - RNA, 84 nt, Homo sapiens
caagacagaggaagaacgggaaaaaggaagccagaggaccgcacggcgccggggaacggcgcagaaggaaggccgcgccgcagc

SEQ ID NO: 151138 - RNA, 77 nt, Homo sapiens
acaagcaaagccaacagccagccgggacaccacagcaagaggaacgggcacgccagaaaagaccaggagaagcagac

SEQ ID NO: 151139 - RNA, 77 nt, Homo sapiens
ccgcccgccagcgccggcgcgggggaggggagcccgcgcccgccgcgggagagagaaaccccaccacgcggcagggg

SEQ ID NO: 151140 - RNA, 59 nt, Homo sapiens
ccgccacacgccaaagaaacaccggacacagcgacgcacgagccagcgccgaccacagc

SEQ ID NO: 151141 - RNA, 81 nt, Homo sapiens
acgcgcggcccggcccggcgggggaacgaagaaggacagaacggacaaggcagagcaaggaaaagacggccacccaagaac

SEQ ID NO: 151142 - RNA, 83 nt, Homo sapiens
cagccggggaagggggggacaagagcccccggagagaacacgacacagcggggccccgagcgggacccccgaggagagagacc

SEQ ID NO: 151143 - RNA, 57 nt, Homo sapiens
cgacagcccgcccaggaagggacccgagcacggacaggacaaaccccccccccgggc

SEQ ID NO: 151144 - RNA, 60 nt, Homo sapiens
gacacgcagcggcggccagggaccaagccggaagcagccaaagcacggagacaagaacgc

SEQ ID NO: 151145 - RNA, 79 nt, Homo sapiens
acagcgggggggaacccagcaccgagaacacacccaacacaccagccagcccgaccaggacgccgcagaaaacacaaac

SEQ ID NO: 151146 - RNA, 35 nt, Homo sapiens
cgcgcgccgcgaccccaagcagcggcagcagggca

SEQ ID NO: 151147 - RNA, 80 nt, Homo sapiens
gaagaagagcaaagaaagcgccccaaaagacaggcccaccgaaggacgcacaaaacagaaacaaggacccggaaaggaag

SEQ ID NO: 151148 - RNA, 43 nt, Homo sapiens
aagaagcagaagcccaccccccggaagagagaaggccacgccc

SEQ ID NO: 151149 - RNA, 78 nt, Homo sapiens
ggaagacgagccaccgaggcacagagcaaggcaccggcaccggaccaacacgaaggagaaccgcaggccccgcggaga

SEQ ID NO: 151150 - RNA, 78 nt, Homo sapiens
acagcgccagaagcagaggcgcaaagaagcgaagcagaaaacagaccgcaaaagccagggcccacacggaaacggaga

SEQ ID NO: 151151 - RNA, 82 nt, Homo sapiens
ggggccaggccagcagcagaacaccagccgacagcgaccaaggccagagcgaaaggccacggccagccgccggcacgcagcg

SEQ ID NO: 151152 - RNA, 72 nt, Homo sapiens
acacaggaaacgcagaagaggccgccaacacacgcaaagcagagaaaggagggcgacagaccagagaaagag

SEQ ID NO: 151153 - RNA, 78 nt, Homo sapiens
ccccagcaaaggggcccagcaacaggagagaggcgaggggaaccaacagaacgcaggcccgaccacgaagaagaggac

SEQ ID NO: 151154 - RNA, 78 nt, Homo sapiens
ggacccgaggggcgacagcgcgcggcaggcggcgagccgggggccgcagggcacccaccgggggaaccaaacaggagc

SEQ ID NO: 151155 - RNA, 67 nt, Homo sapiens
acaccccaaccagcacgggccgaaagggggcagaaacgggacgggagcgccacggggggaagagagg

SEQ ID NO: 151156 - RNA, 66 nt, Homo sapiens
gaaggcagccgggagggaccaaaaaacagaagagcgaggcaaccaaggcgcaaaaccccaccagag

SEQ ID NO: 151157 - RNA, 68 nt, Homo sapiens
aacgaagaagacaagaggcagggacaaaggaaaaagaggaggaaaacagcagggacgaacaaaagcga

SEQ ID NO: 151158 - RNA, 70 nt, Homo sapiens
gaacacgcggaacacagaagcaaaaagaaaagcccaccgaagggggaaagagacacagggaggaaccaag

SEQ ID NO: 151159 - RNA, 76 nt, Homo sapiens
aggcgcccggcggagcagaggaaccacacgcgacaggagcagcgacgcaaaagggcacaggcgaagacggaagccc

SEQ ID NO: 151160 - RNA, 80 nt, Homo sapiens
cacccggacggaaaaccacacccggcggacacagaaagagaaaacgacagcccgccaggagcacaacgccgagaaagcca

SEQ ID NO: 151161 - RNA, 62 nt, Homo sapiens
gaagaccacaaccggcgcacacagggggggccgcccgcccaaggcaggaagaggggccgcaa

SEQ ID NO: 151162 - RNA, 80 nt, Homo sapiens
accgcagcaccagcgcgggccggaagagggaggaacagcagcggaaacaagcacggacggcgggagggcggccaacgaaa

SEQ ID NO: 151163 - RNA, 53 nt, Homo sapiens
gaaaagggcagggacagcgcaggcagcagagcacgcgccaagggcacacgcag

SEQ ID NO: 151164 - RNA, 75 nt, Homo sapiens
ccaccccaagcaaggccaggaggcgcgaacggcggaggcaaaaaaggagaaagaacaccaagcagagggaagacg

SEQ ID NO: 151165 - RNA, 63 nt, Homo sapiens
ccacaggaaaggagggaagccagaggccaaaggcaggagagaggcgcggcgggggcgagcgac

SEQ ID NO: 151166 - RNA, 89 nt, Homo sapiens
gggacaggacagcggcagagggacaccaacaggacaagacgacacagaccaggccgccaacggccgaccccgggggccggggacccccg

SEQ ID NO: 151167 - RNA, 64 nt, Homo sapiens
aaaagcacagcagcgcaaaacaaagcagagccgagccagaaaagcgccaggcaggcaggaaagc

SEQ ID NO: 151168 - RNA, 60 nt, Homo sapiens
cccaaggggggccaggggaaggccgggaagggaagaagaagccaagcagcccccgaacgg

SEQ ID NO: 151169 - RNA, 59 nt, Homo sapiens
ggccagcccccccaaaaaggaaagacaccggcgggagcccgcccaggggacggacacaa

SEQ ID NO: 151170 - RNA, 81 nt, Homo sapiens
aagagggcccaaaagagagaaacagaggaaaacccagagaaaaggaaacaacaggacaccacaaagagccaaaacaaggca

SEQ ID NO: 151171 - RNA, 78 nt, Homo sapiens
agcagagaggggccagcacacaggcaaaggcagacacggcgaccgaccccgagagccagccgagcaaggaaaagaaga

SEQ ID NO: 151172 - RNA, 69 nt, Homo sapiens
ggcggccaggccaaccgaagcgagacgacgggaccgaaggaccccgccagagacaaccgagcgccagga

SEQ ID NO: 151173 - RNA, 72 nt, Homo sapiens
ggaccaagaaccaggagcgcggaaggcaaagaagaaccaccgggccggcccgggagccgacgggcgacgggc

SEQ ID NO: 151174 - RNA, 74 nt, Homo sapiens
gcgcagccaccggacgccgcaggggggcccacgcggaggacgcagaacacggcgggcggcccgccaacgacgca

SEQ ID NO: 151175 - RNA, 56 nt, Homo sapiens
cgggcccggcggacagccgcacccgcgccccagcaggccccaccagaacagagcca

SEQ ID NO: 151176 - RNA, 77 nt, Homo sapiens
gcgccccggacgagagcccggcgggggcgcagaacacggaccaggacacggaggagaacagggcaccgaagggggag

SEQ ID NO: 151177 - RNA, 92 nt, Homo sapiens
ccggcagcgccccgcgagaaggaggagcccccgcccggcagccaccccacgggaaacgcagccagcggagcccgcagccggcccgagccagg

SEQ ID NO: 151178 - RNA, 75 nt, Homo sapiens
gcgcgcccgccacggcgccgagccgcggccgagagagcacacagcgcacaaagccgcaggcagacagcgccgaac

SEQ ID NO: 151179 - RNA, 45 nt, Homo sapiens
cggggaccgagggggcagccggcccgcagcccccggaagccaaag

SEQ ID NO: 151180 - RNA, 52 nt, Homo sapiens
gcacaagcaaaaccacccacagagaacagccagcaaagacaagagcagacca

SEQ ID NO: 151181 - RNA, 74 nt, Homo sapiens
aagccgcccgccccccaccgccgcccccccggcggcagcccccgggggaaacacaaagaagacaccagaagggc

SEQ ID NO: 151182 - RNA, 80 nt, Homo sapiens
gacaagcacgggacccggaagcgcgcgccaagggccgacacaacaccgagacaacggaagaccaaagcaagggaggagaa

SEQ ID NO: 151183 - RNA, 65 nt, Homo sapiens
cgcccgcgccacagccaccagagccggcagcaaagagggaacagcccgacgccaaccaagaaggg

SEQ ID NO: 151184 - RNA, 67 nt, Homo sapiens
gaaaaacacaggacacaaccagcaccacccaacacagaccgaacaacgacgaaacgccacacaaccc

SEQ ID NO: 151185 - RNA, 76 nt, Homo sapiens
gaacaaaccgaagaacagcgggaaagaaggcaaaacacggaaaaaccagacaccaaaggaagcaggaaaagccgaa

SEQ ID NO: 151186 - RNA, 122 nt, Homo sapiens
gggagagcgccccgccgggcgagcaggggcgccggcccgaggccgcgcgcggcgcccgcgggcaagccagcaggccagagagaagaacagcagaaaggaccacgagagcgaaggacccagca

SEQ ID NO: 151187 - RNA, 80 nt, Homo sapiens
acagaagcaaaggcgcccagcccggaagcagccgacacgagcggcaaaaacagcgaaaggagagcacaccccggagaacc

SEQ ID NO: 151188 - RNA, 74 nt, Homo sapiens
ccaccggccgaccgcgcgccacgcgccgggagcgccgccaggacaggcccgacgacccagaccaagagcaccga

SEQ ID NO: 151189 - RNA, 79 nt, Homo sapiens
gggggggggagagaaccggacccgggcagggccaggacccagcgaggggggccaggcaggagccccccaaccaggccca

SEQ ID NO: 151190 - RNA, 63 nt, Homo sapiens
gcgcaagacacaccggaggcgacggccaggccacagggaccgagcccagaacccggacgggca

SEQ ID NO: 151191 - RNA, 58 nt, Homo sapiens
ggcccgcgcgccgagggcgaggcggacgcgcggcgcgcaggagccgagacaggggaga

SEQ ID NO: 151192 - RNA, 81 nt, Homo sapiens
gaaaaacaaccagagcgcagaaaggaacgagagccggcagagcggacgcagaccgaggagccgccggcccaggcggaggca

SEQ ID NO: 151193 - RNA, 67 nt, Homo sapiens
ggaaaagggccaagaacacggagaacaggaaaaagggcaagaagcaccaaaaggaagagaaaggagc

SEQ ID NO: 151194 - RNA, 60 nt, Homo sapiens
acgcccggccgacaagcacgcaaggggggccccagcccggccgaacgggcgcacgacaca

SEQ ID NO: 151195 - RNA, 71 nt, Homo sapiens
aagcaagacgagagcaagaaagaaggcgagacagagacaacagaggaagaggcgccagacggagaagaaac

SEQ ID NO: 151196 - RNA, 72 nt, Homo sapiens
cgagcagcaagaagaacagccccaagacgcaggaggcggaaaggggacggaaggaagaaagacggaacagac

SEQ ID NO: 151197 - RNA, 73 nt, Homo sapiens
acaggcggacggcagcggcggcaggacaggacaacagaaaaacacacacagggggaagaacgagaaaaacaag

SEQ ID NO: 151198 - RNA, 37 nt, Homo sapiens
aaaaacaccccacagaacaggaacacggccaaagccc

SEQ ID NO: 151199 - RNA, 74 nt, Homo sapiens
gcagcccggaccagccaagccccaacggcccccgcgccgggcgcagcggcccggcagggcagagacacccaaga

SEQ ID NO: 151200 - RNA, 80 nt, Homo sapiens
cggccgagggaagaaaccagcgcaagcacagaggcccgaaagcagaacagagaaggaacgaaaagaaaaaaaaaggaagc

SEQ ID NO: 151201 - RNA, 78 nt, Homo sapiens
agcaccgaccagagccgaggggagggggagaagaggaggaggacgaagcaaccccgggagagggaaagaggcccagga

SEQ ID NO: 151202 - RNA, 84 nt, Homo sapiens
gacgcggacagagagcggacgggccaacccaaaaccagggcggcaaaacgagcgggccaggcgggggccggccccagcccagac

SEQ ID NO: 151203 - RNA, 71 nt, Homo sapiens
aggaagaagagagcggaacagcagagcgcacaaccgcggcgggccagacgaggaggccggggaccaacggc

SEQ ID NO: 151204 - RNA, 50 nt, Homo sapiens
gcgagcagcgcccccgggggcagcacgccgaaggagagaccagacaacag

SEQ ID NO: 151205 - RNA, 97 nt, Homo sapiens
caaacgaagccggggcccccagaagacaagcagagccgcagcccgaacagcccacagaacaagaggcgcgggcgcaccgaaaccaagcccaaaaagc

SEQ ID NO: 151206 - RNA, 78 nt, Homo sapiens
ggagccgcaccaccaacgcggccgacaacagccggcgccgccacgcgcggagccagcgcccggcaaggagcgagcggg

SEQ ID NO: 151207 - RNA, 87 nt, Homo sapiens
ggccacgccgaggcgcccgcagccacgcggaggcggcggggagccgcgcgcggcagagcggacgagaaccaccaccgaccaggcacc

SEQ ID NO: 151208 - RNA, 35 nt, Homo sapiens
aggaacgacacagcgccaggaggaaaacacgcagg

SEQ ID NO: 151209 - RNA, 71 nt, Homo sapiens
gagacagaagcggaacaccagacgaaacagaaagcggggccagagcgggcaaagaagcaaaccgggcacaa

SEQ ID NO: 151210 - RNA, 77 nt, Homo sapiens
ggcaagaaacccacaaaggacaggaagaggagggggagccagagcaacagcggaagagacggaacaacaagcaagcg

SEQ ID NO: 151211 - RNA, 71 nt, Homo sapiens
cagccaggccaggagagcgcggaacccaaggaaaggacggcggagccgggaaggaaccccaaggaagcaga

SEQ ID NO: 151212 - RNA, 41 nt, Homo sapiens
cgagcccgagcggcagcgccggagaaaaggcaacgcaaagg

SEQ ID NO: 151213 - RNA, 77 nt, Homo sapiens
gaaaaacacccgggaagggaacagagcagacccggacggaacaggcaaaagaagaaggagggggcagagcacggcag

SEQ ID NO: 151214 - RNA, 51 nt, Homo sapiens
agacacacaacccgacccgacgagagaaagaggacacggccgacagacagc

SEQ ID NO: 151215 - RNA, 86 nt, Homo sapiens
gaaggcgcagcagaggggccacgcgggcccgaggcgcaccaagggcgaaggagccggcccaagggaggaggacggacaccagccga

SEQ ID NO: 151216 - RNA, 79 nt, Homo sapiens
agaaacgaaacagaacagagagaagcccaccaagggaagaagcagaagcaagcccagggcaaggaccgggaaaacggac

SEQ ID NO: 151217 - RNA, 75 nt, Homo sapiens
gccccaaccaggccacggcgccgaccgggagaacgagaagacaaggccccagggaacccaagaaaagaggaggag

SEQ ID NO: 151218 - RNA, 68 nt, Homo sapiens
gacagacagagggcgacgggaccaggaaggcacacggaccgcaaaaacaaaggaaagaaagcgaagac

SEQ ID NO: 151219 - RNA, 69 nt, Homo sapiens
gggcacaggcacgcagcacagacagcaggcaagccgcagcggcgcgcaccacgacaaagaagagaaaac

SEQ ID NO: 151220 - RNA, 86 nt, Homo sapiens
ccaaggaagccacggcagacacacaacccgacccgacgaaaaggaccggccccgcccccaccgcacacgaaagcgcaccagggaac

SEQ ID NO: 151221 - RNA, 37 nt, Homo sapiens
cccagcacaggaggcgagacagggccacgcacccagc

SEQ ID NO: 151222 - RNA, 79 nt, Homo sapiens
aaagagaggagggagaacacagaaacccgccccggggcacaaaggagccagaggaggcgaagagccacgccaagaccgg

SEQ ID NO: 151223 - RNA, 108 nt, Homo sapiens
cccagcgccgcccccggagggcccacgcagcgccggacaaagagcagcaccagcagaagagggcccgaccacggcaacccagaggcgaagcaggacacccgcaaagaa

SEQ ID NO: 151224 - RNA, 77 nt, Homo sapiens
cccacaacgcccccagcacagcgccccaccccagcccccaacccccagggaaaaaccacgcggagaagggagagaca

SEQ ID NO: 151225 - RNA, 75 nt, Homo sapiens
cacgggacgcgacgcgccccgcccccccgccggcccccccacggaaggggcacacagagaaaaaaagggaacaaa

SEQ ID NO: 151226 - RNA, 84 nt, Homo sapiens
gaggcgggcgaggcgccgcggaccagaggcgccgccacgagagaagaaagaaaaagaaaccgccagcccagagacacgaaaggg

SEQ ID NO: 151227 - RNA, 76 nt, Homo sapiens
gcgcgacgaagagccccccaagcccgaagaggaaggagcgggcccaagaaaagacaggagaaagagcgcccaagac

SEQ ID NO: 151228 - RNA, 75 nt, Homo sapiens
cccggcaaaacgcgccggcgaggagggcaagcagcccggccagggacagcgcacagcagggaaccacgaacgcga

SEQ ID NO: 151229 - RNA, 82 nt, Homo sapiens
caccaggcaggcaaagaacgggccggagagggaagacgcaagagggaccccaggaccgggcccagacacccggaagcaggcg

SEQ ID NO: 151230 - RNA, 72 nt, Homo sapiens
aacgaccacggaccagcccagggagaccagcgaagccggggaaacagacaagaggccgccccagaagggacc

SEQ ID NO: 151231 - RNA, 74 nt, Homo sapiens
gccacagacaaccacaagcggccaaaccccagccagcagaagcgaaggcagcagcggagagaaccagcagagaa

SEQ ID NO: 151232 - RNA, 76 nt, Homo sapiens
agaacgcccgagccccaacccacgcgccccaagggcacagaacggcacccacgaacccgccgagagagaagcaaaa

SEQ ID NO: 151233 - RNA, 70 nt, Homo sapiens
ggcgagcagccaggccaggagagaggcgcgaacagggcccacccgccacgacacaggggaagaagaccac

SEQ ID NO: 151234 - RNA, 73 nt, Homo sapiens
cgccagaggggcccagagcccgcaagaagaccacaagcagggagaccagaggccagaccgccgggggagaagc

SEQ ID NO: 151235 - RNA, 73 nt, Homo sapiens
cagcaagcagaagagggacgaaaaggagcagcgaggaaggacaacaaaagaccgaaaagaagaaggagacaag

SEQ ID NO: 151236 - RNA, 75 nt, Homo sapiens
caagaagcaaacagaggggcagacagacagcggaacgggagcaagaggagaacgccaagccaaccgaaaaagccg

SEQ ID NO: 151237 - RNA, 75 nt, Homo sapiens
gcaaagcacagacaggagaaagaagacagccacagaaagggacaaaaaggcaagaacgagagaagccgaaaaaac

SEQ ID NO: 151238 - RNA, 70 nt, Homo sapiens
cgccacgggccgccagggaaagggccagagcccaaaggcccagaccaacggcgggccacacccaaaaccg

SEQ ID NO: 151239 - RNA, 71 nt, Homo sapiens
gaagagagagaaagaccaagcaaacgggaaaggcaggggacaccgaacggaacggaaacacagcaggaagg

SEQ ID NO: 151240 - RNA, 85 nt, Homo sapiens
agggcggaggccccggcggcagagccggaagaagaggaaagcaaagaagccaagaagcgaagaaccaagaacggaagaagccggg

SEQ ID NO: 151241 - RNA, 110 nt, Homo sapiens
acggagaaccagaccggcgacccgcgacgccgagcacccaggcgacgcccaccaagcacgagccagggagccgccgggaccggcccgggagacgacaacccaaaccgaaa

SEQ ID NO: 151242 - RNA, 52 nt, Homo sapiens
cggagccgggaaaggacaaggaaggaggagcagggcccagcagcgaagggca

SEQ ID NO: 151243 - RNA, 50 nt, Homo sapiens
gcgagaccggggcgaaacaaggggagaacgcaggagcgcgggggccccga

SEQ ID NO: 151244 - RNA, 84 nt, Homo sapiens
acaagcaaaaggaaggagcaggaccgcgcccagaagcacagcgaggccacaggaacgcgccgaaacacgcaccaccaccccccc

SEQ ID NO: 151245 - RNA, 59 nt, Homo sapiens
cacacagagaacggccacaacaagggcccagagccgggccgagggcaagaggcagcaaa

SEQ ID NO: 151246 - RNA, 76 nt, Homo sapiens
ccaagacagagcgcacccggcaggcgcaacagagcgccggcgacaccggagacaggcgcgagaagacacccgcaag

SEQ ID NO: 151247 - RNA, 82 nt, Homo sapiens
ggcaggaggccaccgcgcagcgcgggccccgcagaggaaggaagccggcgggcggggggacgaagggaacccgccgggcggc

SEQ ID NO: 151248 - RNA, 82 nt, Homo sapiens
cgcagggcgcccccgggagggacaccgccaaacaaggaccgaaaggcggcgcaaggagcccaagagccaggaacaccgaggc

SEQ ID NO: 151249 - RNA, 81 nt, Homo sapiens
gcgaccaccccgcgcagccaccggacaccgcagcacacagagaccgggaggagggacggagggggcagaaaaaagaagcgc

SEQ ID NO: 151250 - RNA, 78 nt, Homo sapiens
cagcagagaacgggcagaggagacggaagaagcaacgaagaagaaacagcaccaaacgaaagcccacagggcgccccc

SEQ ID NO: 151251 - RNA, 79 nt, Homo sapiens
gaggcaggcggagccgaccgggccagaacggcagaggggccggaagaaagcggcgaacccaggaacagggcaggaaaag

SEQ ID NO: 151252 - RNA, 73 nt, Homo sapiens
gagccgcagagcgcgcagaccccgggcggagaacggaaaagcaccaggaagcagagaggaccgcagaagggaa

SEQ ID NO: 151253 - RNA, 75 nt, Homo sapiens
gccaccgacaggaaaagggaagcgggacggcgccgcacacggcgagaagcgccgccgccaggggggcacgccggc

SEQ ID NO: 151254 - RNA, 87 nt, Homo sapiens
gcgcggagcccggccccgcaccaggaggaggacgacagcacgaaagagccgcagacgcacagcaaccaccggacccgaaggccacca

SEQ ID NO: 151255 - RNA, 67 nt, Homo sapiens
aggcgcgcaggagccaagcacagcccaggggccccggcgcccccccagccccccaggacccgggccg

SEQ ID NO: 151256 - RNA, 74 nt, Homo sapiens
gagagggcggcggcgcgagcgcccaggccacggagcgccaccggaaggccgcgggggaaggaggacgcagagag

SEQ ID NO: 151257 - RNA, 67 nt, Homo sapiens
ccccgaacgggacaaacgcgccacacagccgccaagacccagggaagcgacacaaacccgccgggcg

SEQ ID NO: 151258 - RNA, 79 nt, Homo sapiens
gcgccgggaacaaaaccagcacccaaggcagccggaaacgaggcaaggaacacaagcggcggcacaaagggggaccaag

SEQ ID NO: 151259 - RNA, 77 nt, Homo sapiens
caagaccgccccgccgcccagaggacgcccaacaccacccacccaccacgccagacgccaggagcccaggcaggaac

SEQ ID NO: 151260 - RNA, 85 nt, Homo sapiens
agagcgaacaaccccagaagagaaggacagaaaacgggccccagacacaagccccaccaagaggacaccccaggaacgcggaggc

SEQ ID NO: 151261 - RNA, 77 nt, Homo sapiens
ccacacaagcgaaggcgcgcaccggaagcaccagcgaggaaggcacaggcacaggagaccaccaacacagcaaagca

SEQ ID NO: 151262 - RNA, 75 nt, Homo sapiens
ccgagagccgcccgggccagcggccgcgcacccccggccggaggcaccagcgccggcaagaagccaacggagaac

SEQ ID NO: 151263 - RNA, 75 nt, Homo sapiens
ccgcgccggcacgcgagaggagcgccggagccgaaaggcagagccccggcagaagagcgccaacaacgaaaaaca

SEQ ID NO: 151264 - RNA, 75 nt, Homo sapiens
cggcccaccaaaccccgcaaagagccccagcgcccgacaagcaaaaaagacgaaaaagaaagaagaagggaacaa

SEQ ID NO: 151265 - RNA, 76 nt, Homo sapiens
ccaagccggggcaagaaaacccccacagaagcaagcagcaggacccggccagcggagcgcccccagcggaccgcgc

SEQ ID NO: 151266 - RNA, 62 nt, Homo sapiens
cacaccggaccaggaaacggaggcggacgaccccggggacaaacgacggagcagaagagcag

SEQ ID NO: 151267 - RNA, 68 nt, Homo sapiens
ggcacccaaacgaaaaggagccagggcacaaacacagcaaacagcgcccaaaagggaccccaccacgc

SEQ ID NO: 151268 - RNA, 79 nt, Homo sapiens
ggagcccgacacgcgcgaccacgccccggaaagccagcggggaagaagaccaaccccgaccggaaagcaacggacagaa

SEQ ID NO: 151269 - RNA, 81 nt, Homo sapiens
gaaacaagccgggaaagggacaagaagggcaaagccgaagccacacagagccagaaccagcagcacagagcccccaagccc

SEQ ID NO: 151270 - RNA, 63 nt, Homo sapiens
ccgacgccaggcagcgcccccaaacgaggaaaagggacaagagccggccgggaaacccaaaga

SEQ ID NO: 151271 - RNA, 76 nt, Homo sapiens
cgaacagaccgcccggggccccaggacggggacagggccgaagacccaaccagggcagaaccgcacgcagcacccg

SEQ ID NO: 151272 - RNA, 70 nt, Homo sapiens
cgccccagaaccggcgaaaaccggagagggacaccggccaggaccagagggaaaaggcacccagcggacg

SEQ ID NO: 151273 - RNA, 86 nt, Homo sapiens
gaccaggacgacacgaaggaggaagaagagacgaagagacagcggagaaccggcgaacaagacgaagcggaacaaaaaggcgaaaa

SEQ ID NO: 151274 - RNA, 117 nt, Homo sapiens
ggacaggagaaagcagaaagccgcaaggacgagaggagacccgccggagaagaacaaaccagcaggcccccggaaggaagaggccggacaccaaaggaggaaggcgccagaacgaac

SEQ ID NO: 151275 - RNA, 72 nt, Homo sapiens
gcccccgcccaaggagaagcgcccaagcggacggcccaccggcagaaagggagaaacacaaagggaaggaag

SEQ ID NO: 151276 - RNA, 87 nt, Homo sapiens
gcccgcagcacccccgccagcagccgccggagccagccaacgagcggcaggaagagacgaagagaaaaaaagggaacggagcaaagc

SEQ ID NO: 151277 - RNA, 76 nt, Homo sapiens
gagaaggacgaagaccggaagaccagggacgaaaggcaaaacacagaaaaggaagcaggcgaagaaaagccagcaa

SEQ ID NO: 151278 - RNA, 79 nt, Homo sapiens
cgcccgcccgggcagccgcgaggcagcggcggagagggaaccaggggacggcacgcccggaaaaacggcaggggcaagc

SEQ ID NO: 151279 - RNA, 63 nt, Homo sapiens
aacgacgggcaacacgagcacggacaagggaccaggaggagaagcaaccagagaggaagcgag

SEQ ID NO: 151280 - RNA, 83 nt, Homo sapiens
cggggcgcggccggccacagggagcacaaggcgcaagacaaggcccgcgggccaagacaaacaccacacaagaccccaggcgg

SEQ ID NO: 151281 - RNA, 75 nt, Homo sapiens
gaggagaccgggaaaccgccgaagacgaagggacagagagaggcagaagaaaaagcacccccaagcgagagagcg

SEQ ID NO: 151282 - RNA, 67 nt, Homo sapiens
cgagccacagccagacaggcacagggggggccacccccagaggaggcagaacgaacaaagaaggaga

SEQ ID NO: 151283 - RNA, 76 nt, Homo sapiens
gggaaaccccgaaaggggggcagggagagaaggccccgagccccggccccaaagacccaaaacagagacacccccc

SEQ ID NO: 151284 - RNA, 66 nt, Homo sapiens
aagggcagggacagcgcaggcagcaggggagaagcagaccgcaccaggcgggaccccgaaaaagcc

SEQ ID NO: 151285 - RNA, 83 nt, Homo sapiens
ccgcaccaggaggaggacgacagcacggcgggcgagcagcacgggaacaggcagaagagcgggaggacagaaagaaagacagc

SEQ ID NO: 151286 - RNA, 70 nt, Homo sapiens
cagagaccaacccaagcgaagaagagcggaaaacaagggccaaagaagccaaagccccagacaaccacag

SEQ ID NO: 151287 - RNA, 37 nt, Homo sapiens
gaagaggaccacacacagacgcacaagaagaaccggc

SEQ ID NO: 151288 - RNA, 71 nt, Homo sapiens
ccccagagcccccggagggaacgaagagccaggaggaaaaggagaaccaccccggcccaacccggagcgaa

SEQ ID NO: 151289 - RNA, 57 nt, Homo sapiens
aggagcaggacgaaagcgaaagagaagcggagaagggcagaagcggaacgcagggcg

SEQ ID NO: 151290 - RNA, 44 nt, Homo sapiens
gcgaggaccaccaaagaaacccaaacggaccccgaggaacggac

SEQ ID NO: 151291 - RNA, 56 nt, Homo sapiens
caacggagcggggcaggggcgacgagagcgcgcgaaccaacggcccgggaccaccg

SEQ ID NO: 151292 - RNA, 69 nt, Homo sapiens
aaaccgggagaagaagggcacgacggacagaagccacagacgaccaaagcccaggagaggacaaaagga

SEQ ID NO: 151293 - RNA, 66 nt, Homo sapiens
cacccgagcagcgcgaacacgaaaacgaagagacagacagcaaagccgggacgggaaaaaaaggcg

SEQ ID NO: 151294 - RNA, 75 nt, Homo sapiens
aggcacaccccacacaagcacgccaagcacgcacccggcaaagaacgcagccaaccgaaagccacggcaaccaga

SEQ ID NO: 151295 - RNA, 75 nt, Homo sapiens
ccgggaccacggacaacccgaaaacgacgaaccacgaggccgaaagcacagcagcacacgagacgcggaagcagc

SEQ ID NO: 151296 - RNA, 42 nt, Homo sapiens
ccgccgcgccagggacccagcaaggagcagggacaagacagg

SEQ ID NO: 151297 - RNA, 72 nt, Homo sapiens
gacagcagagacgacgcggcaagcagcggaagaggacgacgcgacacaaacaaaagaggagccgccggccca

SEQ ID NO: 151298 - RNA, 38 nt, Homo sapiens
gccacgcgggccggcgaaagcggcgagaacgcggacaa

SEQ ID NO: 151299 - RNA, 88 nt, Homo sapiens
cggcgccgaggcggccacccgagacgcggcgcgcacgcccggccgcgcaggcggacaccgaccgcaggaaggaggaggaggagggagc

SEQ ID NO: 151300 - RNA, 80 nt, Homo sapiens
acgggaaggcagagagagcaggcacagcgccggaacaaacaggagggagcaacaacaaggagcaagcacagcgcgagcca

SEQ ID NO: 151301 - RNA, 40 nt, Homo sapiens
caagcgggaccgccagaacaaggcccaggaggcaagagcg

SEQ ID NO: 151302 - RNA, 73 nt, Homo sapiens
gccagaccggcgcgagaacaacgggaacgcccccaagcccaaggaaacacggaggccccgcagaagaagaccg

SEQ ID NO: 151303 - RNA, 85 nt, Homo sapiens
gaagagggagaaaaagcagaacaaaagaccccaagcggaccaaggaaaaaagaggaccaaccaccccaagccaagaaggcaaaag

SEQ ID NO: 151304 - RNA, 61 nt, Homo sapiens
agcgaaggggaaggcgccgaagaggacgaagagagagccggagggcaggaagccgccacca

SEQ ID NO: 151305 - RNA, 67 nt, Homo sapiens
aacagaccaacaacagaaccaagggagggaaagagcccaaaaggcagagcgaggagagaagaaggag

SEQ ID NO: 151306 - RNA, 70 nt, Homo sapiens
ggcgcccccaccggaggagcccaccggcccaaaggcccggacccaaaacaggaaaagagagaagaagcaa

SEQ ID NO: 151307 - RNA, 67 nt, Homo sapiens
gaacccagaccccagacgcccccgcaacaaacagcgcagccgagaagaaaccgcaagaaagaaagcg

SEQ ID NO: 151308 - RNA, 70 nt, Homo sapiens
ccgaccaggagacagacccgaaacacccggccagcgccccgcgggcaaaggggacggaaacaagcagcac

SEQ ID NO: 151309 - RNA, 61 nt, Homo sapiens
ccggcgagccaagccgcagccggcaggccggggaccacgagagaccgaaggagcagacgag

SEQ ID NO: 151310 - RNA, 67 nt, Homo sapiens
ggacagagccaaggccccgaccccaggaacgagccccgccgggagaggacaaagaagcggaggacgg

SEQ ID NO: 151311 - RNA, 79 nt, Homo sapiens
gaagccgcggcagacagcccaggacccaggaagccacccgcagaggggcaaggagaaagggcaaacgcagcacacaagg

SEQ ID NO: 151312 - RNA, 76 nt, Homo sapiens
ggagccgccccgcccggggacgaagagcgcagcccccggcgggggagaaaaagcccccacggagagacaggagcag

SEQ ID NO: 151313 - RNA, 53 nt, Homo sapiens
gcagcaccaggcacggaagaggacagcaccggaccgcaccccagaacaaccaa

SEQ ID NO: 151314 - RNA, 62 nt, Homo sapiens
gccaacacaccagcccagacagcgcaagcaccaggacgcgaaggacccagagcccggcggcc

SEQ ID NO: 151315 - RNA, 73 nt, Homo sapiens
ccagagccgcggccggggcgcgggagggagcgcaccacacacaagccacagcaaggggaacccaaaaacgcga

SEQ ID NO: 151316 - RNA, 69 nt, Homo sapiens
ccgcgcgggcgaacacacaaagccgcaccaggcacagaggacagaggccacgaagccagagcgcaacca

SEQ ID NO: 151317 - RNA, 71 nt, Homo sapiens
aaaggcacagaaccggaggccagaaaaggaaacgaccccggccgagcgaggaggcgaagaccagggccaca

SEQ ID NO: 151318 - RNA, 64 nt, Homo sapiens
aaggaccaagaaccaggaggaggaggcgaaacaaggcgaccacaacccagcacggaaaggagga

SEQ ID NO: 151319 - RNA, 76 nt, Homo sapiens
gagacccgggcagaagaacaccggcggcggccagcccgacacaggagcacccacgggaacagcccagaaacgaggg

SEQ ID NO: 151320 - RNA, 62 nt, Homo sapiens
ggcgaggccccagaccacacgcagcacggcagaagagcgacgggaccgagagaacgaagccc

SEQ ID NO: 151321 - RNA, 83 nt, Homo sapiens
gagaggcgagccgcgagagggccggcaggcccgggaagggccgaggacaccaaccacacacaacgccagccaggggagcggcc

SEQ ID NO: 151322 - RNA, 80 nt, Homo sapiens
acaaaagggccacccaaaggcaaggaggaacaacgggaccggcaggcccaaagggaccgccagcgacagcaggacgcaaa

SEQ ID NO: 151323 - RNA, 51 nt, Homo sapiens
gaggcaccgaggcaccagaggagaagcacccaagccagggagcggcaaaag

SEQ ID NO: 151324 - RNA, 71 nt, Homo sapiens
ggggacacccggaggcggcgcagcagcaccgggccccacccccggcagaagcggccacacagcaccacacc

SEQ ID NO: 151325 - RNA, 68 nt, Homo sapiens
gaagccaggagagaggagccaagaccgcgcgaaacgcccagaaaccaagaagcagcacgccggaaaac

SEQ ID NO: 151326 - RNA, 76 nt, Homo sapiens
ggaccacggaaaccaacaccacggacccaaggccagccagccccaggcaccagcggacaggacagggaggacgaag

SEQ ID NO: 151327 - RNA, 40 nt, Homo sapiens
ggaccaggcacccgggaaggggggaagaaaagaaggcccc

SEQ ID NO: 151328 - RNA, 75 nt, Homo sapiens
ccagcagaggagaaagaacagcgacccacagagagagggagaaggggacaagaagggccacgccacacgacaagg

SEQ ID NO: 151329 - RNA, 77 nt, Homo sapiens
gcacagcgagacaccaagaggggaaagccaaggagagcgaggaacgaccaagcaaaaaccagagacgggacgccagg

SEQ ID NO: 151330 - RNA, 78 nt, Homo sapiens
gcgggcggccgggagacccacagagcgcgcacaacacgcaacccaggcacaaggacagcccgaagcaggaacccaaag

SEQ ID NO: 151331 - RNA, 49 nt, Homo sapiens
gcggccggagcacagcagggacagcgcaagccccggggcagagacacag

SEQ ID NO: 151332 - RNA, 81 nt, Homo sapiens
ccccggagggagacgcgcgccgaggagaacccagcggaaaaccgagacacccccgacacaccgggaggcgccagccagcac

SEQ ID NO: 151333 - RNA, 72 nt, Homo sapiens
aaaggggagcgaggaaaggggcggccgaggccaggacggaagcccgcgcagccgccagcgagggccacgcag

SEQ ID NO: 151334 - RNA, 64 nt, Homo sapiens
gcagccgaagccgcagggaggggaaacgaagcgcacgaaacaccaaggcggaggcaaggcggac

SEQ ID NO: 151335 - RNA, 83 nt, Homo sapiens
agcgcggaaagccgaggcggggcgccaagaccagcagcaccaggagccccccgcccagacaagcccccgaggaaagaacaaac

SEQ ID NO: 151336 - RNA, 83 nt, Homo sapiens
ccgggcggagcccggcagggggggccggcgcccggcaggccagccccagcccgcgccggagaggggcccggaagaacgaggac

SEQ ID NO: 151337 - RNA, 75 nt, Homo sapiens
cacaaccaaacacagcagagacaaccgaggccagagaacccaaaagcaaacccaagaccgaaagaaacccgggaa

SEQ ID NO: 151338 - RNA, 72 nt, Homo sapiens
agcagagagaggggccagagaacagaaacggcaaagggccggggacaccagagaacaagcagaggaaagaca

SEQ ID NO: 151339 - RNA, 76 nt, Homo sapiens
cgcccgagagcagagcacagcaagaccagaagaccccaagaagacgccgggcccccagggagaagccccgaggcca

SEQ ID NO: 151340 - RNA, 72 nt, Homo sapiens
caagaggggccagcagagcaggaaaacgaagaaggcaaaaccaagaggaaaagaggccaggcgcgaggaaac

SEQ ID NO: 151341 - RNA, 62 nt, Homo sapiens
aaaccaagaacgaggagcccagggacacacgcccagggccaggggcaacaaagaccaacagc

SEQ ID NO: 151342 - RNA, 55 nt, Homo sapiens
gcagcggacacacgccgccggcagggaaagaaaacaagccacccagacaagagga

SEQ ID NO: 151343 - RNA, 66 nt, Homo sapiens
aaccgggagccaccgcaccagcccgagccgaacccaagggggagaaggacacgccaaaggaaggca

SEQ ID NO: 151344 - RNA, 74 nt, Homo sapiens
gaagcaaccggcgccaccagcaaccagagggccagagggaaggacagcccgacacaggccacgagcaaggacga

SEQ ID NO: 151345 - RNA, 65 nt, Homo sapiens
ggacaggcaaaacaacagacacgcgacgaaacaggaagcgccgcggagccacaacagcaagcagc

SEQ ID NO: 151346 - RNA, 72 nt, Homo sapiens
acacagccagagagccaggaagcaaggagggaaagacagaaaagagagaaacaggccacaaggccagaaacc

SEQ ID NO: 151347 - RNA, 75 nt, Homo sapiens
gaagcccacagcccgcgggcccgacccaacaggacacgaaagccgccaggagcaaggcagcgacccagggcacag

SEQ ID NO: 151348 - RNA, 52 nt, Homo sapiens
caggggcccaagaaaaagcaccggaccacacgaccgcgagagggcgaagaac

SEQ ID NO: 151349 - RNA, 70 nt, Homo sapiens
gaagcaaaaggagagacagcaacaaggcgaaggagacagacaagagaggacaggaaaccacggaaaaagg

SEQ ID NO: 151350 - RNA, 36 nt, Homo sapiens
cagacacagaccgcagcgggcaccgagaggaggaac

SEQ ID NO: 151351 - RNA, 84 nt, Homo sapiens
gcggcgccagggggaagacaggacagaaaaaaacggacaacaccaaagcaacaaggcaacagccggacccacaaaccgggagac

SEQ ID NO: 151352 - RNA, 76 nt, Homo sapiens
agggcagccccaagagagccaggagcgcacacacgacaggagaaaggagaggacaacagcagagccaggagaagcg

SEQ ID NO: 151353 - RNA, 80 nt, Homo sapiens
ggccaggccagcagcagaacgggacccaacaagccccaggacagaaggaaagcccgcacaaagggcgcgcgaggaaagcc

SEQ ID NO: 151354 - RNA, 79 nt, Homo sapiens
cggcacacccacggaagccaggggagcaacagagggcgcacaagcagaccgacggcagaagggcaaggaggcggcgcga

SEQ ID NO: 151355 - RNA, 74 nt, Homo sapiens
aagaggcggccaaggggacgagcaaaggaagcgcgaacagcagcgcagaagcagaacgcacccggccaggacag

SEQ ID NO: 151356 - RNA, 58 nt, Homo sapiens
cccagggaccggcaccgcagcaccagagccgaagaaaaggagagaggcagaccaaaac

SEQ ID NO: 151357 - RNA, 73 nt, Homo sapiens
aagcggacaggaacccacggaggggagagacagagaacaagggcacagagcagggagacccgacagggacagc

SEQ ID NO: 151358 - RNA, 83 nt, Homo sapiens
cacccccggccccgaagacaaaacccgaggcccgggaggagccaacaagcgcacggagccccaagcccaggaacagcaaagga

SEQ ID NO: 151359 - RNA, 77 nt, Homo sapiens
aggggagaaaccaggcagggcaaacagggaaagaggcaaaaccgagaaaaggaccaaagagagcgagaaagcccaag

SEQ ID NO: 151360 - RNA, 77 nt, Homo sapiens
gacaccgacacacgccccagaggaagaccgcaggaaagcaggaaggcaagaaagccaaggacgaaacccacacggag

SEQ ID NO: 151361 - RNA, 57 nt, Homo sapiens
gggccccgcccccgaaggacagggcggagaacggaaaagcaccaggaagcagagagg

SEQ ID NO: 151362 - RNA, 76 nt, Homo sapiens
cggcggcccggggcgcggccgagggagcaacaagagcagaaaggaagaaccacccgcccaggagaaaaaaaagaca

SEQ ID NO: 151363 - RNA, 89 nt, Homo sapiens
ggcgacggcccgaggccgagggcggccgacagagccccggcccccccgcagacccccgaaaggaagcacgcgcgcggacaagaccagaa

SEQ ID NO: 151364 - RNA, 77 nt, Homo sapiens
aggagaggccggggcagcagggccccgcccccgaaggacaggaaaggaaaggcagaggcacagcgcgagggagcaca

SEQ ID NO: 151365 - RNA, 52 nt, Homo sapiens
cccccgagaaccgcgccaccagagacggggaggccaagccaagcaccaggcg

SEQ ID NO: 151366 - RNA, 80 nt, Homo sapiens
aaacacaaacagaaacacaagaagcagccagaaccacaccgcaggccaccgacgacacagaaaaaaccgcggcacacaga

SEQ ID NO: 151367 - RNA, 54 nt, Homo sapiens
ggcgggcccacccagagggaacgccagcgagaggagggaacaccgaggaccaag

SEQ ID NO: 151368 - RNA, 70 nt, Homo sapiens
cgccgcgggcgccgcccccccggcccccgggacggcccaaggccagcccgcaggccaccgacccgcccca

SEQ ID NO: 151369 - RNA, 78 nt, Homo sapiens
agggcaccgcggacggggccgcccagacaacaggcacaaagagagaaggaacacccacagggcagacagagaaagaac

SEQ ID NO: 151370 - RNA, 43 nt, Homo sapiens
ccagcacccagggcccaccagccgcaggaaggaggaggcaaaa

SEQ ID NO: 151371 - RNA, 68 nt, Homo sapiens
aagccggagagcagccccagagccaaacgagcaagagaagacagagagagggaggaaggacaagacag

SEQ ID NO: 151372 - RNA, 69 nt, Homo sapiens
gagccggaaacggacaaacagaacggccggggggcgagcgaccgaaagacagaaacagagaaaccaacg

SEQ ID NO: 151373 - RNA, 73 nt, Homo sapiens
acgggcacaacgggcgaagggagagggcccaggacggacaggagagacaacggaggcaagaaagacggagaag

SEQ ID NO: 151374 - RNA, 79 nt, Homo sapiens
gcgaagccgaaaaaggcagcagcgaaggaaagccgcagcggggagaagcccacgcgaaaacaacaaggaaaaaaaggag

SEQ ID NO: 151375 - RNA, 66 nt, Homo sapiens
acacaaccaaggggaaacagcaaaacacgaaagcacccgggcgccgagccccagagcgcggaagaa

SEQ ID NO: 151376 - RNA, 71 nt, Homo sapiens
cagacaagcggaggagagaaagcgagaacaaaaccagcgaggaaggagagcagccaggaaggagacacaac

SEQ ID NO: 151377 - RNA, 75 nt, Homo sapiens
gaaggccaaacaaaaagacccaaagaaccgaaggggggccagaaaaagaacaaaaggccagcagcgcgaagaagg

SEQ ID NO: 151378 - RNA, 59 nt, Homo sapiens
cgcgagcgcgggcggggaaagcccccgagcggaaaacgcaggagcgaaggggcgaccgg

SEQ ID NO: 151379 - RNA, 72 nt, Homo sapiens
gcccagacaacccaaaacaacggaaaagcaaggacaaggccagccaaaagaagcaagggaaagaccaggagc

SEQ ID NO: 151380 - RNA, 71 nt, Homo sapiens
ggaaggaaccggacccgcacgcgagaaacccgggggagaggaaagcggggagggcggagaacggaaaagca

SEQ ID NO: 151381 - RNA, 80 nt, Homo sapiens
gccgcccgacccaaagggaaaacagaaacagacaagcagaccggaagaccgacggaagaccacaccccgagggagcccag

SEQ ID NO: 151382 - RNA, 40 nt, Homo sapiens
gcgagaacagccagagaggcggcgcccagcggccacacgc

SEQ ID NO: 151383 - RNA, 76 nt, Homo sapiens
ccacccggcccccggcaccaggccgaaaacgaagcagaggaacaacaagaggggaaaagggcaacacacaccccag

SEQ ID NO: 151384 - RNA, 73 nt, Homo sapiens
aaggcagacgggagcgcaaggcgccccaaggccagacaaaacgaggagaacaaggcggaacgcccgaaaagga

SEQ ID NO: 151385 - RNA, 83 nt, Homo sapiens
gcaacagcgagggcaaagagcggggcccagggaaaacaaagcagacaaaggagagacagcacaaccaggggcgcaacccagca

SEQ ID NO: 151386 - RNA, 36 nt, Homo sapiens
ggcccgagggaccaaaggcgcaggcggaaaccaaga

SEQ ID NO: 151387 - RNA, 69 nt, Homo sapiens
cacaacaggaaacaaccaaccagcaaagccgggaggaaaggaaacgggcacagaaaggagagaagacca

SEQ ID NO: 151388 - RNA, 72 nt, Homo sapiens
aggggggcaacaagcccaggccccgcggccgaggccggaggaggagcggcggccccacgccggaaagcggaa

SEQ ID NO: 151389 - RNA, 55 nt, Homo sapiens
cccagaggaaacggcccacgggaccacagcagggagacgaacagaggaggcagaa

SEQ ID NO: 151390 - RNA, 79 nt, Homo sapiens
cagcacgccaaggagaagaagcgccgaacacaaacgcaaagggaacagaagccaggagagcagccagcgggacagaagg

SEQ ID NO: 151391 - RNA, 72 nt, Homo sapiens
accagagaaagacaaccaaccccaccgaggaggacagagacgcaacaacaccacccaacacggagcagcaga

SEQ ID NO: 151392 - RNA, 64 nt, Homo sapiens
aggaacagcgggacccaggaaacacccaaggaaccaaagcaggccagcagaaaaccccgcgcac

SEQ ID NO: 151393 - RNA, 83 nt, Homo sapiens
aacccggagggcggaccacaaggcgggcgcaaagacaccgccagaagaccagaggaccccggaggaagcagccgaaaacaacc

SEQ ID NO: 151394 - RNA, 58 nt, Homo sapiens
aacccgccacgacaaccgcaccaacaaagacagacgggaagcagcccccacaagccac

SEQ ID NO: 151395 - RNA, 39 nt, Homo sapiens
ccggggcacgacacaaaaacaggcaagcgaagcccgagg

SEQ ID NO: 151396 - RNA, 70 nt, Homo sapiens
gcgcagccccggcgccggcggcgggaccgcggaccggggaaaccgcacgcaacagccaagcacagcgcca

SEQ ID NO: 151397 - RNA, 69 nt, Homo sapiens
gaccagacaaaaaggccgcgaccaggaggggcccgagagaagagaagagcggaggaacaggaccggagc

SEQ ID NO: 151398 - RNA, 77 nt, Homo sapiens
aacaaaggaaaagaaaccaaccgaaaagggaagcgacgggcaccaggggaaaggcgaaagcaccaaaggaacgaaga

SEQ ID NO: 151399 - RNA, 69 nt, Homo sapiens
cccggggccccgggaccaacgcgcgggccggggcgaggccccgagcccagagaaagggggccaggaagc

SEQ ID NO: 151400 - RNA, 77 nt, Homo sapiens
gacacgagcacaaacgggcgacagagaagagagaaggccccagcagcgggcacgcgccgagagcccgccgggcccag

SEQ ID NO: 151401 - RNA, 70 nt, Homo sapiens
cggccagggcaccggggcccggcgcccgggcccgccccggagggccacggaaccgcccagccccaagccc

SEQ ID NO: 151402 - RNA, 74 nt, Homo sapiens
aacgcgagccaccgggaaccagcgagaaggggggccaccccaacgccagacccagggcaccgccgggaaaaaag

SEQ ID NO: 151403 - RNA, 76 nt, Homo sapiens
gccgggcggaaggacacaaggccggggaggaaagcaaaaccagggggcaacaaagaaaaaaacaaacaacagcaac

SEQ ID NO: 151404 - RNA, 66 nt, Homo sapiens
aagcgacggcacggaggcaaagaaccgaagaagaggaggggggcaccggcaaggccggaagggggc

SEQ ID NO: 151405 - RNA, 67 nt, Homo sapiens
aaaagagaaaaaagcagacgcggcagaaagccgcagggggagccaaagagcgcggcgccaggcggag

SEQ ID NO: 151406 - RNA, 73 nt, Homo sapiens
cggaaaaacggagaggaaaacccaaaaaaccggcgcacaagaacccaagccagaccgcccgagaaagacagga

SEQ ID NO: 151407 - RNA, 73 nt, Homo sapiens
cccgcggggcggcggccaacgccgacacacccgagagcaaagagagcaggagaaggacagaccagcagcccac

SEQ ID NO: 151408 - RNA, 83 nt, Homo sapiens
cgccgacccgcccaccacgccagcagcgcgacggcaggaggaagagcacagcagcccggaaaggccccccggaagagaacccc

SEQ ID NO: 151409 - RNA, 81 nt, Homo sapiens
ccggagaggcgcccaagagcgacacgccgacccgcagaggccaggacccaaccgggggcaggcaacaaccggccaaggagg

SEQ ID NO: 151410 - RNA, 76 nt, Homo sapiens
cgggggcagccagccgagggccaccgggaaggacagaagggcaccgagggcggccgagcccggaccacgggcagcc

SEQ ID NO: 151411 - RNA, 107 nt, Homo sapiens
agccgaggcaaagagacaaggagagaagaaccaaagaagcaaaacacgaggacagagcgggagccaccagcgccaaagggaagccaggagcccgggggcacggggag

SEQ ID NO: 151412 - RNA, 73 nt, Homo sapiens
gcaccaaaagaggggacagggcaaagcgaaggcggagcaggagaaagcggcacagaccccagaggaaaaaccc

SEQ ID NO: 151413 - RNA, 75 nt, Homo sapiens
cgccgccgccgcagcgggaccgcgcgaccggcgcccgcccgcgggaaggcgcccgggagcacacaagcacaaacc

SEQ ID NO: 151414 - RNA, 77 nt, Homo sapiens
gcccgcgcggcgcggggaccgcggcccgcccccaaggacgagaagagaccagacagccacccaaggaaaccaggagg

SEQ ID NO: 151415 - RNA, 86 nt, Homo sapiens
agccccagaggggagcccgagggcagaaggggagaacccgggagaggagcggaagccccggccagagggcacccccccgaggagcg

SEQ ID NO: 151416 - RNA, 79 nt, Homo sapiens
caacgggaggggccaccgggccccccaacaccacacgagggcggcaccaagacgcaaaacaaaaggggccaaggacgca

SEQ ID NO: 151417 - RNA, 79 nt, Homo sapiens
caggacacagcaaaagcaaagaccagaaagaggccacccaagaaacgccaaaagcccagaagaacgacgcacaacacca

SEQ ID NO: 151418 - RNA, 67 nt, Homo sapiens
acaagacaccagaaagacagcacgccgggaaccccagcaggaacaagccacagcagagcacagaagg

SEQ ID NO: 151419 - RNA, 39 nt, Homo sapiens
ccgccacaccagaaagagaaggcagcacccacagggcac

SEQ ID NO: 151420 - RNA, 98 nt, Homo sapiens
agaaacagagcggcggaaggcgggcgccagaggacaaggagaccaaagagaacaaccccgaagaagggcggaaacggcgagcaacagaggccgagacc

SEQ ID NO: 151421 - RNA, 77 nt, Homo sapiens
agccgcgcagccagagccccaacagcgagggcagcggggaagaccaagagggaaaagaggacgaggcgcgaaaaggc

SEQ ID NO: 151422 - RNA, 76 nt, Homo sapiens
cacgacaccggcacccagcaccacccggaggagaccggcagcagaacgagaaggaaaagcagaaaaaagaagaccg

SEQ ID NO: 151423 - RNA, 78 nt, Homo sapiens
gggagcgaccgggagccggcgcgcgggcggggaggcgaggccggacgcacccggggggcccagggcagcacgagcagc

SEQ ID NO: 151424 - RNA, 75 nt, Homo sapiens
agccacagagggaaagcacaaaagaccacacgcagacagaaagaggaagacccaggccaggaaacgaggccgcgc

SEQ ID NO: 151425 - RNA, 50 nt, Homo sapiens
cccggggagcgaagggcaggcagaaaaagaagaggagggagggcagaaaa

SEQ ID NO: 151426 - RNA, 73 nt, Homo sapiens
gacgagccagaccgccaaaccagagaaagaaacacccgaacagcgacaacaggacaccagcaacagcgccagg

SEQ ID NO: 151427 - RNA, 78 nt, Homo sapiens
aaccccgaaaggggggcagggagagaagggagcagcagccccgagaaggaagaggaggaagcgagggcccgcgagggc

SEQ ID NO: 151428 - RNA, 70 nt, Homo sapiens
gccacgcgggaggggggcaaagggacccaggggaacaaacaagagggcacgccggagaagaacggaaaag

SEQ ID NO: 151429 - RNA, 87 nt, Homo sapiens
agcagggaaggaggccgagccgggaccaggcccgggggcggcggccacgccaaggacggcaaacggggacagcgccgaccggaacag

SEQ ID NO: 151430 - RNA, 71 nt, Homo sapiens
cacccgccggaggaggcccccagccacgggaacgggggaaggagacgcacacccacaccgggcaacaggcc

SEQ ID NO: 151431 - RNA, 56 nt, Homo sapiens
acagcacagcacccacaaagcaacgaccacgaacgaagaaaccacgccaaagcaaa

SEQ ID NO: 151432 - RNA, 71 nt, Homo sapiens
aggggccggcgccggcgccgcgcccgccccggccacccggccagcgaggaaacaaagccagaccgccgagg

SEQ ID NO: 151433 - RNA, 58 nt, Homo sapiens
agcagaacgcacaccagccccggcccaggacccccaaaaaggggagcccaaaagcacg

SEQ ID NO: 151434 - RNA, 74 nt, Homo sapiens
gagacccggccaccagccggagagggcacgaaggcgggaacaccgagccagaagggagcaaagcgacgccacgg

SEQ ID NO: 151435 - RNA, 77 nt, Homo sapiens
cagcgccgcgcaccagccaggacgcacacggcgaacggaacccaccggggaccgccaccgacgcacgccccccgagc

SEQ ID NO: 151436 - RNA, 67 nt, Homo sapiens
aggggcagacagacagcggaacgggagcaaggaaaggagcagaacccgggccaaacagcacggcggc

SEQ ID NO: 151437 - RNA, 76 nt, Homo sapiens
cggaggagggggggaaacgaaaacaaaggacacagaaagaaggaaaagggcgcccgaggagcccccgcgcccaggc

SEQ ID NO: 151438 - RNA, 81 nt, Homo sapiens
ccacaaaggagccccacaccaccacacccgggccagcgagcagagagacgcaaggaccgaagcccagacaacaacaccgag

SEQ ID NO: 151439 - RNA, 63 nt, Homo sapiens
ccgcaccagaagaagaaggccagaaaaaggggcagcggcaagcaggggagccagccacacaga

SEQ ID NO: 151440 - RNA, 60 nt, Homo sapiens
acgggacgaggagagggagggaaccgggcagaggagaacgggaaagcgcacaagccaccg

SEQ ID NO: 151441 - RNA, 113 nt, Homo sapiens
aacaaagcaacagcacaagaacaacaggcccagcaaagcaccacggcaaaaccgagaagccaggccggagacccggacaaggcaagcccagcacccaccggggaggacaggcc

SEQ ID NO: 151442 - RNA, 77 nt, Homo sapiens
gaaagaagagcagcagagagaccgaaagaaagacaacccgaaagaacaccgaaccaggggcaaaacgaagggccaaa

SEQ ID NO: 151443 - RNA, 57 nt, Homo sapiens
gccgacacaagggacccagcgagccagaaaaacgcagccagaagagggccggagaga

SEQ ID NO: 151444 - RNA, 72 nt, Homo sapiens
acccggggcccccgggcccccggaccagggagaccggccgggaacagacggcacaacgggaagcggaaaccc

SEQ ID NO: 151445 - RNA, 61 nt, Homo sapiens
gggaagccgggcaagaagcggaggaaagggggacaaggccgggaaacacgaagaagaccgg

SEQ ID NO: 151446 - RNA, 74 nt, Homo sapiens
ccggcacggaagcgaggcaaacacgagaagacaacgaagagaggaaagaagcggaaaggagggagcacacaaca

SEQ ID NO: 151447 - RNA, 76 nt, Homo sapiens
gcgaccgccaagagacacacagggcaccagaccgggaccaagaaaggcccagggaccaaagcccggacaaggcccg

SEQ ID NO: 151448 - RNA, 76 nt, Homo sapiens
aacagaacaccaggacacccagagcgggaaaggaagccaccccagaaagacccacacacgccggggccggcgacga

SEQ ID NO: 151449 - RNA, 73 nt, Homo sapiens
ggaagaaagaaaagagaccgagggacaaccgaaaaacaccagcaaccgacggcagcaacaaggacaggcacag

SEQ ID NO: 151450 - RNA, 83 nt, Homo sapiens
acgaccggagcagagagcggcgagcaagacgccaccccgccccaccgaggccggcgggccacagcaggcgccccgccggagaa

SEQ ID NO: 151451 - RNA, 63 nt, Homo sapiens
aaaacaggagaagaaggccgacacggagggggccaggcacgcagccagaggggccagaagaga

SEQ ID NO: 151452 - RNA, 82 nt, Homo sapiens
agagacagagaccaagccaaacccccaggaaagaccacagcaagaccacgcccccagccgggggaccaggccgaacgacccg

SEQ ID NO: 151453 - RNA, 59 nt, Homo sapiens
gcggggaagggggcgggccgcagagcaggacgccgaggaccacagaggagacaaagcag

SEQ ID NO: 151454 - RNA, 91 nt, Homo sapiens
gcgggagcgcggaacagcaggcccgagcccaccgcgccgggccccggacgccgcgcggaaaagggccgaaagaacaagacagagcaggaag

SEQ ID NO: 151455 - RNA, 78 nt, Homo sapiens
gggacggaccgagaccggaccgagagcggaccgagagcgcgaaacgcacgagaaggaccgaccgagagcgacaaagac

SEQ ID NO: 151456 - RNA, 67 nt, Homo sapiens
aacaccagacagcgacaggaaagcaccccacgaacaaccacaggaagagacacacaagaaacaaaac

SEQ ID NO: 151457 - RNA, 76 nt, Homo sapiens
gaaaacccgcgaggaaagggaaggagcaagccggacgcaagaggcgccccaaggaaaggggccaacgggcgccagc

SEQ ID NO: 151458 - RNA, 83 nt, Homo sapiens
cggacagccagggcgccagaagaaaacggcgagaggggcgagaacgccacgcgggccggcgaaagcgagccagccgccgcgcc

SEQ ID NO: 151459 - RNA, 73 nt, Homo sapiens
gacgacaccccgaggggcaggaggggccgcagccagcacgaaagcagggaaccccagccgaccagagacacaa

SEQ ID NO: 151460 - RNA, 81 nt, Homo sapiens
cgcccccggcccggagcaacgagcgcagcgccgacacggcacaccgaagaaaaagaacaacaacaagaggaaagaaaaccg

SEQ ID NO: 151461 - RNA, 77 nt, Homo sapiens
agcaagagcaacagcacacgaggacggccaggagcagacaagcgagacccgggggcaacccaaccaagggacgaacc

SEQ ID NO: 151462 - RNA, 66 nt, Homo sapiens
gacgggcggaggcggggggaccggcgggcgggacccacccaggaggcagaaacacgccgcgcgcca

SEQ ID NO: 151463 - RNA, 90 nt, Homo sapiens
ggcccgggccggcgcccaaggcccgcccgggagggccggggccgcgccagggaccaggaggaagaagagagccgagggaagacagaggag

SEQ ID NO: 151464 - RNA, 76 nt, Homo sapiens
cagcgcaggagaaacacaggcaccaaggaacagacaagaaaaagggaagggagaaaaaccaaagccgaaagaaaac

SEQ ID NO: 151465 - RNA, 77 nt, Homo sapiens
ggaagcaaaaaccgcgccaaagcaaggcacaacacaagagcggaagaccccagcaacgcaagagccaagcacagccg

SEQ ID NO: 151466 - RNA, 81 nt, Homo sapiens
agccgcgccgccgggacacaccaggagaacaagcccacgcacccgcaccccccggaggcggccgagcccacgcgacgaaga

SEQ ID NO: 151467 - RNA, 73 nt, Homo sapiens
gaagcagaagcacagggcacgccaacccaggaacggggggccacgacgggccaaagcggagaagacacaaggc

SEQ ID NO: 151468 - RNA, 67 nt, Homo sapiens
gggcccgcccaccggggaggagaggaaggaagaggggaaaacgacccccaggaaaaagaaaaggacc

SEQ ID NO: 151469 - RNA, 60 nt, Homo sapiens
cggcgggcccgggaagcgggccggcagcgcccggacgaggagccaaagcgaggccaggaa

SEQ ID NO: 151470 - RNA, 79 nt, Homo sapiens
gagcggccgcgagccaccgaggcccagggcggagaacggaaaagcaccaggaagcagagaggaccgcagaagggaagga

SEQ ID NO: 151471 - RNA, 64 nt, Homo sapiens
agacgcagggcgcccccggacgacgaaggggaaacacccccaaggcaaggcaaaaaaaccacac

SEQ ID NO: 151472 - RNA, 69 nt, Homo sapiens
aggacaaccccgcaacggcaggggcaggccaggaccgacagcccccacaagaaaccagagacgaccaca

SEQ ID NO: 151473 - RNA, 73 nt, Homo sapiens
aaggaccaagaaccagagaacacaacagccacaaaccccaaggaaggagcaaggccacgcagggaggaaggga

SEQ ID NO: 151474 - RNA, 105 nt, Homo sapiens
gacccacgacgccgggaccggccaagggcccacacaccaagaccaagggaaagggagcagcaccggccacacccacagcacgaccggaacccagcgaccgacgcc

SEQ ID NO: 151475 - RNA, 69 nt, Homo sapiens
gggccaggggggggaccaggagaccacccaacccgaccagccaaaaaagaagaccacggaaggagaagg

SEQ ID NO: 151476 - RNA, 54 nt, Homo sapiens
aggccgaccgcccgccacgccccaaaagcacgcacgaaaccggcaagccagcgg

SEQ ID NO: 151477 - RNA, 77 nt, Homo sapiens
gacagaccagggacacaacgggaaaccggaccgaacaagccaacgccaacgcggaggccgagcagccaaccacaaaa

SEQ ID NO: 151478 - RNA, 86 nt, Homo sapiens
gccaacccgccaggagggaccggaggccacagcaggacaccccgggcacgccacgccccaagaggaaggaacagagccacagagaa

SEQ ID NO: 151479 - RNA, 56 nt, Homo sapiens
gagaggacaggagaccggaacaggaggcagaggagaccaggccccccacacagagg

SEQ ID NO: 151480 - RNA, 75 nt, Homo sapiens
ggcggaaaggaccaaggagggggaggcaagcaggggggcaaaggaaagaaggcagaaagggaggccaggagcgcg

SEQ ID NO: 151481 - RNA, 75 nt, Homo sapiens
ccgacagggccagcaacaccgggcaccgaacgggggggagcggagccagggagaacgaagagacaaagagcgccg

SEQ ID NO: 151482 - RNA, 77 nt, Homo sapiens
cgcgcccggcgggccaaaccaccggccagcgaggaaaaaaaaccgccccgggcggggaacggaggagaggaaaacgg

SEQ ID NO: 151483 - RNA, 60 nt, Homo sapiens
ccccacaccccacagggcgcacagccgcggcccgaaaaagcccaagacagcagaagcaga

SEQ ID NO: 151484 - RNA, 55 nt, Homo sapiens
gcgggcagcgcgcggcccgggcagcaggacagggggagaggcaaggaaacgacaa

SEQ ID NO: 151485 - RNA, 69 nt, Homo sapiens
ggccacggcaccggcacaccgcggggccgaaaacaacgacaacgagcacaggaacaagacaacacacac

SEQ ID NO: 151486 - RNA, 73 nt, Homo sapiens
aagaccgccgcccagccccaaagagcgagacacaggggaaacgggagcggcgaaagaaaaacaggaccgcgcg

SEQ ID NO: 151487 - RNA, 77 nt, Homo sapiens
ggccagcccagccggcacgccccccggcccagggaccccgcgcagaggagaagacagaggagccagaccaagagaca

SEQ ID NO: 151488 - RNA, 72 nt, Homo sapiens
aaaaaaaaaaacaaccgaggggccgacccaagcacaccagaaagggcgagagacagcagacccaagggaggc

SEQ ID NO: 151489 - RNA, 85 nt, Homo sapiens
ggaggcccaaaagaggggcgacagaacagaggacacgggcgggcgcccccagaagcccgggaacaaacagaccgcaagagaaaag

SEQ ID NO: 151490 - RNA, 77 nt, Homo sapiens
aaaaaggcaggaccgccccccgagccagcaggcaccacaaggccacaaaggaggggaggcccggagggaaacacacg

SEQ ID NO: 151491 - RNA, 73 nt, Homo sapiens
cccccacaggaaaggagggaagccagaggccaaaggcaggaggagaagaagcaggcacagaccccaagaagac

SEQ ID NO: 151492 - RNA, 80 nt, Homo sapiens
gagccccccgggacccacagcaccccgaggcccgacccaggacaaagcagccagaccaaagcacagcgccagagaccccc

SEQ ID NO: 151493 - RNA, 75 nt, Homo sapiens
gggagagaggacccccccccccccccaaggcgacagacacagcaccggccccggcagcgggacgcaggacggcag

SEQ ID NO: 151494 - RNA, 58 nt, Homo sapiens
acagcccaggacacccccagagaagggcacccgaaacaaaccagaaagaggcaacggg

SEQ ID NO: 151495 - RNA, 80 nt, Homo sapiens
gaaccccacggcaacgggcgccacgccggccaaccaggaccacggcacgggagcgcggggaccgagacaaaacgcagaag

SEQ ID NO: 151496 - RNA, 70 nt, Homo sapiens
cgggagggcagccaccaaaacagacccgggcagcaccagaacacaaaaggcaacgcgccaagaccccccg

SEQ ID NO: 151497 - RNA, 53 nt, Homo sapiens
gaccccccggcgccgcgccggcggcgccgagccagcaggagggcggacgcaga

SEQ ID NO: 151498 - RNA, 73 nt, Homo sapiens
agagaagaaaaaggcaaaaacccggagagcaaacaacacgacgggaaagcagacaaagggaagaagcgccgaa

SEQ ID NO: 151499 - RNA, 75 nt, Homo sapiens
aagcagaacaggccaagcacgggaaggcaaagaagaagcgcccacagaaggaagcgcgggaaagagggccggaaa

SEQ ID NO: 151500 - RNA, 72 nt, Homo sapiens
acccaccgggaaaaggcacgaagggaggcaaggaggccacggggccgaagacaccaaccgggcaccagccaa

SEQ ID NO: 151501 - RNA, 79 nt, Homo sapiens
gggcgggccgcgcgaagcccgagaggagccacaaggagacgccgccgcgcccccgcggcccgacgcgcaaccacaacag

SEQ ID NO: 151502 - RNA, 63 nt, Homo sapiens
ccaggaggcgcgcagcagccagaggacaaaacccagccggcacaaaccaggaaaggaagccgg

SEQ ID NO: 151503 - RNA, 75 nt, Homo sapiens
gcaggaacgggcgccggcgcacagcagagggacaaaggaaaaagaggaggaaaacagcagggacgaacaaaagcg

SEQ ID NO: 151504 - RNA, 69 nt, Homo sapiens
cgccacagccaccagagccggcagcaaagagggaacaggacccaaagacaggaccacgcaccagcagag

SEQ ID NO: 151505 - RNA, 76 nt, Homo sapiens
acggccggcggcacccgcacccggggacaagcgcgggaacggcgcggaaggaagcgagagaaaagaagaaggcaca

SEQ ID NO: 151506 - RNA, 67 nt, Homo sapiens
cgacccgcgccgccaggaacagaacccggaaaacagaggcccaaaacaaaaaaaaacaaagacggcc

SEQ ID NO: 151507 - RNA, 65 nt, Homo sapiens
cgcaagacagggaagccggaggagcggacaacccagagagaaacgccagaccacagcggagagag

SEQ ID NO: 151508 - RNA, 79 nt, Homo sapiens
caaggcaagaccgaacagaaggaacgacgcggaccagaagccagagcgaggacgccggcaggcgccgcccgcggccgcc

SEQ ID NO: 151509 - RNA, 86 nt, Homo sapiens
acagaacgaggccaagcggaggggcgcgagccaccgcgccggacgggagggccgaacacgggccaggcgcagagagggacacgaga

SEQ ID NO: 151510 - RNA, 84 nt, Homo sapiens
acaggaagccacaacccggagcagggaggaaacggcaggcaggaggggagcccaggacaccacgaaaaggaaggccaagaccaa

SEQ ID NO: 151511 - RNA, 79 nt, Homo sapiens
gccggcgcacgcgggggggggccgaccggagcgggccaggccgggagagagcaccagccaggacgcccacccggcccgc

SEQ ID NO: 151512 - RNA, 82 nt, Homo sapiens
cgccgcggccccggcgcggacccgccaccggaggagccccccagggcagggacgaggccggaaggggccagacgcgggaccg

SEQ ID NO: 151513 - RNA, 60 nt, Homo sapiens
cggccacagcgcccaggggcccgacccaggcaagcgagcaggcgagcaggagcccacagc

SEQ ID NO: 151514 - RNA, 70 nt, Homo sapiens
caagccacgacagggaaaaccgggacaggagccaagagaggggccacgggccaggcggcgagcccggacc

SEQ ID NO: 151515 - RNA, 79 nt, Homo sapiens
gcagacgggcccgcgcacagagacaggacaagccccgagccaagaaccgccggcgcagcaccaccaaccggaagcgaac

SEQ ID NO: 151516 - RNA, 89 nt, Homo sapiens
ccggaagcagcacagggaagccacaccccaagagccgaggccaggagaagacagaggagccagaccaagagacagcacaggcgagcgag

SEQ ID NO: 151517 - RNA, 79 nt, Homo sapiens
ccaccaacgccacaccgacccacaggagcgcccgcggaggagcgccgggggagccgccaccaaaagcagacggaaaacc

SEQ ID NO: 151518 - RNA, 55 nt, Homo sapiens
gcagcgcgcggcccgggcagcaggcccaggcagcgcagacgaaacagcgcgcaga

SEQ ID NO: 151519 - RNA, 79 nt, Homo sapiens
caaacagggggggagacgggccccacacagcccaaggcaggggaaagcgcaggggggcacacacgcagggcccgcgagg

SEQ ID NO: 151520 - RNA, 76 nt, Homo sapiens
agccaaagcagcgaagaagaggcccaacccccaccccgcccaaggaggcccagcggaccaaaggaccagaccgcgg

SEQ ID NO: 151521 - RNA, 79 nt, Homo sapiens
gccggcccagccggggcagaacgaccacgcggagccagccagaccacgcaccacacgaaccgaggcacaccaaaggcgg

SEQ ID NO: 151522 - RNA, 82 nt, Homo sapiens
cgcaaggccccaggaacaccacagccccccacccaggaaaacagcccccacaaagaaggcagccccccaaggccacgcccca

SEQ ID NO: 151523 - RNA, 64 nt, Homo sapiens
ccccccacagacccggaagaaagccccccacacagggacggagcgaaccaggcaggccaccgaa

SEQ ID NO: 151524 - RNA, 81 nt, Homo sapiens
gcacggcgagggccgggccccacgacgcgggacgaagagccgaggagacaagaaggagaccggcgaccgcaggccaggaca

SEQ ID NO: 151525 - RNA, 56 nt, Homo sapiens
cggaaacccggggcgaaaaacaaagaaacaacgaacgagcaaggaagggccaaggc

SEQ ID NO: 151526 - RNA, 94 nt, Homo sapiens
gggaggaagaagagagggaccggacccaggccccggcaagggcgacccggcagcagcgcggccggccggggggaagcgagcgcgggggagccgg

SEQ ID NO: 151527 - RNA, 86 nt, Homo sapiens
gcggagagccacggccggaccccacccaccccacccgcagcagccccccagccccaggggcagcagccccggggcggggcgggcgg

SEQ ID NO: 151528 - RNA, 85 nt, Homo sapiens
agcacagcaaggaggaaacagcaagggaacaacaacaggacgccacaggccagacagacacagcacagcagccacgaagagcaaa

SEQ ID NO: 151529 - RNA, 79 nt, Homo sapiens
ggaaacaaccacgagcaggcaaggcagcgggccccacacaccgccacacgcacgcagggcagagcggcgggaaaccacc

SEQ ID NO: 151530 - RNA, 86 nt, Homo sapiens
cggcgggcgcgcggagcggcgccccgcagccgcggaccgaggcagcggcggcaccgccggccgaggcagaccgccaggccgcaggg

SEQ ID NO: 151531 - RNA, 62 nt, Homo sapiens
ccaggcccgggggcggcggccacgccaaggacggggcgacagagaagagagaaggccccagc

SEQ ID NO: 151532 - RNA, 72 nt, Homo sapiens
gacgaccaaggaggggaaccagaaagccaaggaaggcggccccaaaccagggccgaaaacccagaagaacgg

SEQ ID NO: 151533 - RNA, 88 nt, Homo sapiens
cgaccccgcccgaggcccccacaagaagcagcggacgcgcccccaagaaagcccgggcgcgccaggcacagccaagagcggaccggca

SEQ ID NO: 151534 - RNA, 67 nt, Homo sapiens
gcggccaaaaccacaggaaagaacaagcaaagcaccacaggggaaaacaagcagaaccggggaccag

SEQ ID NO: 151535 - RNA, 79 nt, Homo sapiens
acaaggcaccgccacaccaagaaggccacagccgaccaccggggaaccggcccggaagcagccaccccagagcaacccc

SEQ ID NO: 151536 - RNA, 67 nt, Homo sapiens
cgaccaaacgggcaaggacaccacaaaaacaaacagccccccagagcccggggaagggagcccagcc

SEQ ID NO: 151537 - RNA, 54 nt, Homo sapiens
aagggcgggaaacccacccgccccaaagcgaggagggcacgaagaggaacgggg

SEQ ID NO: 151538 - RNA, 84 nt, Homo sapiens
aaggggacacccgggcacagaggaggccagccgcgccaggcaccgcgaggaccccaacagcgggccgggcgcccacaccgggcc

SEQ ID NO: 151539 - RNA, 83 nt, Homo sapiens
cgaagagagacacgcaggaaagccccagccacccacaaacagagagaaggaaccacccacgcaggcagccggccacggcaacc

SEQ ID NO: 151540 - RNA, 79 nt, Homo sapiens
gcccacacgggaagcgcgggaagggaaacaaagcccagacaagccagggaacgaagggcccaccccaggaggaagcggg

SEQ ID NO: 151541 - RNA, 34 nt, Homo sapiens
cgacacccacccgggcgccaacgcaaagccacac

SEQ ID NO: 151542 - RNA, 78 nt, Homo sapiens
cgaacggcaggcgccggcgggccggccgccagcaagagcgaacgcccaagcaaaaacagggacagacaaaaccgcccc

SEQ ID NO: 151543 - RNA, 88 nt, Homo sapiens
gcccgcaagccaggcacaagggggaaggcaagcagggaagcccaagcccccaggagcgcaggagccaggcggccacggagcaggaacc

SEQ ID NO: 151544 - RNA, 94 nt, Homo sapiens
gaggaaagcgaaagggaggacagaagcgcgcccaacaccccaacggggcagagagaggaaaggcgacgggagaaggaggaaaccagacccggcg

SEQ ID NO: 151545 - RNA, 77 nt, Homo sapiens
cccccgagagcggaaacaggaaacgaaagagcccagacacccaagagggccaagccagaaaacagaaacgaaacaga

SEQ ID NO: 151546 - RNA, 83 nt, Homo sapiens
caccaggaggaccagcagcaaaagaaggagggccccaggaaaggagcaggaggagaagaaaccccaagaccagagggcagccc

SEQ ID NO: 151547 - RNA, 69 nt, Homo sapiens
ccagcaccaccccgcacggcccgccagccaaaaccccagcgcaggacgccgccagccaccggcgcgaag

SEQ ID NO: 151548 - RNA, 85 nt, Homo sapiens
ggaacagcgagcggagccggcaggaaggggaccgggcggcggagcggcggaagaaggaagggccgacccgccggcacgacgacgg

SEQ ID NO: 151549 - RNA, 72 nt, Homo sapiens
gccaccgcaaccccacccccagacccaaggcccaagaacacgaccagaagcgggacaagggggcaacggaca

SEQ ID NO: 151550 - RNA, 80 nt, Homo sapiens
aagggaagaagacggcaaaagcaacagaggcccaagaacaggcacagaacgaaaggaagggagagcacccaaaggaaaga

SEQ ID NO: 151551 - RNA, 81 nt, Homo sapiens
gaggggaccaccgaccgcggccccagacagggcaggccgggccccgccccacggccccagagggaccgaagcaggaaacaa

SEQ ID NO: 151552 - RNA, 82 nt, Homo sapiens
ggcccgaggccccagccgagaggacgcggcggaaacgaagcggcccccaggcacgaagcgaagaagaggagagaagcagcgg

SEQ ID NO: 151553 - RNA, 86 nt, Homo sapiens
ccagaggagccgccgcagagccccccgcccccgggcgagggaaggacagaaaacgggccccagacacaagccccaccaagaggaca

SEQ ID NO: 151554 - RNA, 77 nt, Homo sapiens
accaggaggccagggggcgccagaccaagggaacggaagccccagcccgcgcgagccaggcgcccacaggagaacag

SEQ ID NO: 151555 - RNA, 83 nt, Homo sapiens
ggagacgacagagcgggcgcacccgaaggagcacaccagaggcagcaccggcgcccgagcccccgcccacagcggccacacca

SEQ ID NO: 151556 - RNA, 81 nt, Homo sapiens
gccgcccgcacaagccagaggccaacccagggccaagaacccaaagcaaggcgagacaaggggccaaccagccagggccaa

SEQ ID NO: 151557 - RNA, 82 nt, Homo sapiens
gcgccgccccaccgcggcacaagcaggccggacccacggcgcggagcgcaccaccaggccagcgcgggccgccagcggcggc

SEQ ID NO: 151558 - RNA, 79 nt, Homo sapiens
caaccgcccgagacgcccaccgccaaggccagcggggcgccaggacagagcgagggggcggcaccacgccccccccgcc

SEQ ID NO: 151559 - RNA, 64 nt, Homo sapiens
gagacaccaagcccacgaaagcaccggcaaagggcgaaaggacacagcaggggccagacaacca

SEQ ID NO: 151560 - RNA, 75 nt, Homo sapiens
cgaagaaagcgcgaggggcgcgagggaaaacggacggacccagccgaggaagaagaggcccgaaaaggccagcgc

SEQ ID NO: 151561 - RNA, 73 nt, Homo sapiens
cggaaccgccaggccgagccggccgaacagagagaagggcgggagaaaccaaggaaagagaaaagcgggaggc

SEQ ID NO: 151562 - RNA, 65 nt, Homo sapiens
gcaagaaacccaggacgagaacagcaacaggacggaggggggaggagcaggcccccaccgcgacc

SEQ ID NO: 151563 - RNA, 76 nt, Homo sapiens
aagaagccgcagaaaaccaggacgaaacaaacgagaagagccgcggagaaccgaaccaacagccagccaaagccag

SEQ ID NO: 151564 - RNA, 71 nt, Homo sapiens
agcacgagcacgggaaggacgaacgacaccgggccccccccggcgaggacccacgcgcagcccaagaagac

SEQ ID NO: 151565 - RNA, 85 nt, Homo sapiens
aaaccgagaggcaaaccgagaaccgggccaaggcgacaagccagagaaaaggcaaaaagagacagaagaaacagaaggcacagga

SEQ ID NO: 151566 - RNA, 69 nt, Homo sapiens
ccgaccaaccacaccaaccggcaggccaggagcacccacgggagaccggggggcaagaaaaggaagaag

SEQ ID NO: 151567 - RNA, 83 nt, Homo sapiens
ggcacaccagggccggaagcccaagcggggaaagagaagaaggcgccgcccgcggagggggcccccgcgacgaagccccggag

SEQ ID NO: 151568 - RNA, 77 nt, Homo sapiens
ggaaaacccggacaaaccgccacaaagaccagagaaagcggcagagaaagggccagggaaaacacaccaaacaggcc

SEQ ID NO: 151569 - RNA, 51 nt, Homo sapiens
ggacgggggaacccggggccagaggcgcgcgacgggaccacaggcgaccgg

SEQ ID NO: 151570 - RNA, 80 nt, Homo sapiens
agccgaaggcgaccaagacgcggcccaagggcccggcggcgcgagcaggaagggaggagagagcgaggccacccagaagg

SEQ ID NO: 151571 - RNA, 81 nt, Homo sapiens
ggcaagacggccagagcagcgcccccggcgccccgccaagggcgcagaccgacgcgagacgacgggaccgaaggaccccgc

SEQ ID NO: 151572 - RNA, 79 nt, Homo sapiens
agggcgcagggcccggcgagaacaccaggaagcaaggcggcagcgccaaccggccggagagcaccggcagacggcggga

SEQ ID NO: 151573 - RNA, 58 nt, Homo sapiens
agcgagggggggcgcgccggaaaccggagcgcgcagcagcaaaagcggcaggcgacag

SEQ ID NO: 151574 - RNA, 89 nt, Homo sapiens
cacagcaagcaccacgcggccacggaacaaccgaacgcaccgaggagaagaccaggaggcgggccaaggcgggaagagggcagcagaag

SEQ ID NO: 151575 - RNA, 73 nt, Homo sapiens
ggggggcgggccggagcggcccgcgccgggcgccggcaccgcggcagggaaagaggaagaaaacacagaaagg

SEQ ID NO: 151576 - RNA, 63 nt, Homo sapiens
agaaaacaagaagagcagacaaaccccagaaaaggaacacagagacacggcgacggaaggaag

SEQ ID NO: 151577 - RNA, 57 nt, Homo sapiens
cggaaaacgggccaaagcaggaaacgcccagaagggagcagggacggagaggcaggc

SEQ ID NO: 151578 - RNA, 67 nt, Homo sapiens
acgcagccccagagcggcggggaaacgggaggcaacaccaaaagagagacgaccaggaaagccggcg

SEQ ID NO: 151579 - RNA, 100 nt, Homo sapiens
ccgaggacaagcacaagcagcaccaaaaggcagcacccggacccaccacgcgacagaagaaagggagcccccaagaacagcgagcacaggaaggaaaccg

SEQ ID NO: 151580 - RNA, 70 nt, Homo sapiens
ggcaccaaaaccagaaagcagcagcagaaaacgaaggaagaggaggccaagccgacgccagcgggcgcca

SEQ ID NO: 151581 - RNA, 75 nt, Homo sapiens
acaagaccgggacacccgaagcgggaaaggcagcccaaggccaaccccacgcaccgcccgccccccgaggagccc

SEQ ID NO: 151582 - RNA, 83 nt, Homo sapiens
ggacaccgcaaccccgcagagcgcaccacaaagcgcgcaacgccaacccaggcgagaggagacagacccagcacggacccccc

SEQ ID NO: 151583 - RNA, 75 nt, Homo sapiens
accgggccccagaccggcgaccgagagcccggaccagcagagggccgacgcccaagacacagccccagcagcccc

SEQ ID NO: 151584 - RNA, 78 nt, Homo sapiens
acacccaggggccggcaccagaagacggaccggagcacgcgagagaaggcaaccaaaggcaggacacaaaaacaaccg

SEQ ID NO: 151585 - RNA, 58 nt, Homo sapiens
cggcacaaaacaaggaaagagaggaagagagaccaaacaccaagcgcccaggggcggg

SEQ ID NO: 151586 - RNA, 82 nt, Homo sapiens
caaagagaagcggcaggaaagcgggaaaaccggaccaccccagaggaacgagcacccagaggagaggccagagggcgggcca

SEQ ID NO: 151587 - RNA, 84 nt, Homo sapiens
agacaaggaaagaggaggaggcaaaggacaaagccccagaaaacgggacacagacccccagcccgcccaaggagccgccgcacc

SEQ ID NO: 151588 - RNA, 77 nt, Homo sapiens
ggacgcgccgcgccccaagcgccacggccaccacgcggcagacagggcccgcccggagcaaagacccgggagacgcc

SEQ ID NO: 151589 - RNA, 73 nt, Homo sapiens
cgcgggcagcaccccgcagacaccggcgacaccccggcaggggcgcggggggccaccaacacccccggaacac

SEQ ID NO: 151590 - RNA, 82 nt, Homo sapiens
gaccagccgggcgcgacgccgcggacccccgcgaccgcgcggaccagggcgacaaagggacccgaccccgagaaagcccagc

SEQ ID NO: 151591 - RNA, 52 nt, Homo sapiens
ccgagacagcacaacaacacaacagcacgaaggaaaccagacggacaccggg

SEQ ID NO: 151592 - RNA, 77 nt, Homo sapiens
gcaagcgagaggaaacgggccccaaggcgaccggaagacagagacacgacacagcagccaggcaaagggaaaagaac

SEQ ID NO: 151593 - RNA, 78 nt, Homo sapiens
aggagcggcggagacgaggccaccaggaaagccgcagccccgggcaagcagggagcggccacccagccacgcgcacca

SEQ ID NO: 151594 - RNA, 83 nt, Homo sapiens
cgggcggcgaggggagagcagcgaggagcccaggagcagggccaccacagaaccaggccaggggaacacacggggaggaagag

SEQ ID NO: 151595 - RNA, 73 nt, Homo sapiens
cagagggacccggacaaccagaggcagccagcagggggagggcccagagagcaaagcccgaggacggacccgg

SEQ ID NO: 151596 - RNA, 59 nt, Homo sapiens
gagagaccaggacacagagaacaggggcacacccgaccaggccaaccgaccgcaagcgc

SEQ ID NO: 151597 - RNA, 82 nt, Homo sapiens
cgggcggcgggcgcgcgcaccagggggagaaacccgggaccagcggccgcaggccaccgagcccaaggggccccgggcgggc

SEQ ID NO: 151598 - RNA, 75 nt, Homo sapiens
caaaggaaaggccacacacaaaaaggacccaaaaggcgggcgaaaacgccaaaaaccagacgggagcgcagagac

SEQ ID NO: 151599 - RNA, 74 nt, Homo sapiens
ggccccggcagcagcccgacgcaaaccaaggacggggaccgcacacccaaggaaaaccgccgccggggccagca

SEQ ID NO: 151600 - RNA, 67 nt, Homo sapiens
gcccaccggaccgcagaaacgagggacagggcgaaacaaccaaggccgacaccacacgacaaaacca

SEQ ID NO: 151601 - RNA, 77 nt, Homo sapiens
cgaggagcgcgggggcggcccgccccggacccgagcagagcgggaaccggggaggacggcgcacccagccacagacc

SEQ ID NO: 151602 - RNA, 98 nt, Homo sapiens
gccagcgcgggcggaccgacggagacggaaagccgggacaggaggcgcgccccagaccccagagcacgccggcaccaccagacgggcggaagaggaaa

SEQ ID NO: 151603 - RNA, 68 nt, Homo sapiens
gagagaagaaagcagcacaccccagccggggcagcacgccgaaggagagaccagacaacaggccaggg

SEQ ID NO: 151604 - RNA, 73 nt, Homo sapiens
agaaacaaaagcgccagagccaagaacggaggcacagcacaagggggggaaaagaacacaaggccgaaaggcc

SEQ ID NO: 151605 - RNA, 81 nt, Homo sapiens
ggagaggagcagagacagagccgcgaagcagccacggaccccagcacgaaaagacgggagaaaaaggggccagggacagag

SEQ ID NO: 151606 - RNA, 75 nt, Homo sapiens
cggacccgcccagcagaagaagagaggagggagaacacagaaaccggccccagccaagagcaccaggaacccaga

SEQ ID NO: 151607 - RNA, 79 nt, Homo sapiens
gagggaccggaacggcggcgacaaggggcccgaacagaggggcaggaccgagaggagcccaggcaaaagaaaagcggag

SEQ ID NO: 151608 - RNA, 70 nt, Homo sapiens
caagagcccggggagagaacgcaggaaagaaccaggaaacccggaccgccgcccaggagaacccgaagac

SEQ ID NO: 151609 - RNA, 82 nt, Homo sapiens
caccaacagggaggaagaaggagcggggacagacacagagcgcaaggcgaaagccaacacggagccaagcaggcaggaccac

SEQ ID NO: 151610 - RNA, 73 nt, Homo sapiens
acagacacaaccgacccgccaagcgcacacaaaagaggagaaaaccgggcgcagccgcacacggagaaccaaa

SEQ ID NO: 151611 - RNA, 76 nt, Homo sapiens
acacgaaaaaacccagaacacgggagaaaaaggaaaacgcggaaaaccgacacaacagcgcagcagaagaaagccc

SEQ ID NO: 151612 - RNA, 62 nt, Homo sapiens
agaaggcaacaccacaccggcagagaccaacagaccagcaacaggccggcagggcacagcag

SEQ ID NO: 151613 - RNA, 76 nt, Homo sapiens
gcgcaaaccagaagaaaggcgcacgacaggcgaaaacccacacagacaggcacaaacagcagacaaaaggaaaaag

SEQ ID NO: 151614 - RNA, 76 nt, Homo sapiens
gcgccgcccgagcacgccgcgcagcccggccgccggcccccaacagcgccggcagagagacgaagagagaagcagg

SEQ ID NO: 151615 - RNA, 74 nt, Homo sapiens
acacacgaagccagcccagccccccagggcggagaacggaaaagcaccaggaagcagagaggaccgcagaaggg

SEQ ID NO: 151616 - RNA, 40 nt, Homo sapiens
aacgccacaggaccccacacagcagcaaaacaaacggaga

SEQ ID NO: 151617 - RNA, 79 nt, Homo sapiens
caaagggaacacaggaccccaggagacaagcgcaagcagccagagcccgggcgcaaagaaccaggcccggaccagagcc

SEQ ID NO: 151618 - RNA, 73 nt, Homo sapiens
caagggaaacaacgcgaacccccagccaagccaccggcagaaccggagagccggggaccgccccagcccgggg

SEQ ID NO: 151619 - RNA, 85 nt, Homo sapiens
cgcccagccgcccgcgggccagcgcaccggcccccagcggcagccgagcccgcccgcgcgccgacaggaagggaaggggcggaga

SEQ ID NO: 151620 - RNA, 64 nt, Homo sapiens
ggcagcacagcagcagggcccccacaagggggcacaggcaagacgcaggaaccaccacgacgaa

SEQ ID NO: 151621 - RNA, 75 nt, Homo sapiens
cgagagccgcccgggccagcggccgcgcacccccggccggaggcaccagcccagagacccagagcagcagcgaag

SEQ ID NO: 151622 - RNA, 79 nt, Homo sapiens
aaaaggccgaaggaaccagcaaagagaaaaagcggggaaaacaaaaaaaagaaggagggaagagggggccaggaccagg

SEQ ID NO: 151623 - RNA, 74 nt, Homo sapiens
ggaaacggagcagcaaggaaaaggaaaccgcccgcccccaggcgcgcgcagaaccaacaaaagcgaaggaaaag

SEQ ID NO: 151624 - RNA, 77 nt, Homo sapiens
aggcggcagccggagagcgaagcagcagcccgcccagaagccacggcaagaacggaagcacgggcggaggaaagcac

SEQ ID NO: 151625 - RNA, 88 nt, Homo sapiens
gcgagcaggaggagagcgggcgcccgggaccccggccaagacagagcccacgccgagcaccaaggaaaagaccgcgcaggcaaccacg

SEQ ID NO: 151626 - RNA, 78 nt, Homo sapiens
gaagcgacgcacaacaacacaagacccgaaaggaggcaacccccaagggaacggaagacccccggcccagcggacggg

SEQ ID NO: 151627 - RNA, 62 nt, Homo sapiens
cgcggccccccagccgcggagaaggagaacgacggcaccggaagcggccggcgcaacaagag

SEQ ID NO: 151628 - RNA, 84 nt, Homo sapiens
cggcacacgcagcccgagcacacaaccagcacaacccggcagcaccgcgaacagagagaagggcgggagaaaccaaggaaagag

SEQ ID NO: 151629 - RNA, 87 nt, Homo sapiens
gaagcgcggcgagccgagcggccaggacgacgaggagcagggccgacgcgcagacgcgccccccgcagcaggcgcccacacccacca

SEQ ID NO: 151630 - RNA, 85 nt, Homo sapiens
caggcagacacaccgacgaaaagaagacgggcccgggacacccagacagagagagcgcacgaagaagggcggaggacaaggagaa

SEQ ID NO: 151631 - RNA, 77 nt, Homo sapiens
ggagccgagccgacagcccagcaggggaccggaagggaccaccagaaggacaaaaaccgagcggagaggagaaagag

SEQ ID NO: 151632 - RNA, 83 nt, Homo sapiens
cccggcacccccgcacaggcgcccgcccgcacgggcgcgccaagggcacagagggagaggcgaagggagggccgccccaaccg

SEQ ID NO: 151633 - RNA, 77 nt, Homo sapiens
aacaccggaggagcggggagggggacacacaaccgcccagccggcgagggacgccgcagaaccaccacgaacggggc

SEQ ID NO: 151634 - RNA, 80 nt, Homo sapiens
acccacgaccaccaccacccaccccacgagaccagggacaagacggacagaaacgaacagcgggcgagccaggggagcca

SEQ ID NO: 151635 - RNA, 81 nt, Homo sapiens
acagcggagacccagggcgcgaccacagaccaacccccggcagggagaaggaggaggcaaaccagcgggagagacaacggg

SEQ ID NO: 151636 - RNA, 73 nt, Homo sapiens
aacaaagccacgaaaaccaaagaaacccaaggaaacggagccacggggcagacacgaggacaaaaagaggccc

SEQ ID NO: 151637 - RNA, 76 nt, Homo sapiens
gggagcgaggcccaacacagacccagagccaaaccggggacggcccggacgggggcgggagccccagccagcgcga

SEQ ID NO: 151638 - RNA, 75 nt, Homo sapiens
gagccacccagccacgggcggccacacgacccacccaagcccacgaggcggcacccggaaacaagccacgaagga

SEQ ID NO: 151639 - RNA, 85 nt, Homo sapiens
caccggccgcccagccaggacgcgcccggagaaggggcacgggcgcagcggccagggaaggaagcaaagcaaaggagaaggcagc

SEQ ID NO: 151640 - RNA, 70 nt, Homo sapiens
gccgcaccagaaggggacgccagacgccaccgcagcaccccagggaggccgcaaggaggagaggcccaac

SEQ ID NO: 151641 - RNA, 74 nt, Homo sapiens
cgcgaaacgcacgagaaggggagagaagaggcaccccagaaccggccagcaccaggaaccaagaagaagagggg

SEQ ID NO: 151642 - RNA, 83 nt, Homo sapiens
ccgcgggcgccaaggggagcagaaggaccggacacagggaaagggagcagcaccggccacacccacagcacgaccggaaccca

SEQ ID NO: 151643 - RNA, 96 nt, Homo sapiens
gcgagcggagaggaaccgaggcaaggcacgcggagaacagaacaacagagcagacagggggaccagagacacccgacccgaccacagcggaggaga

SEQ ID NO: 151644 - RNA, 71 nt, Homo sapiens
agaggcgagagcggcagcagcaccagcccaagagaaggagaagcaaaagccaaaaaaacagggcggcggga

SEQ ID NO: 151645 - RNA, 70 nt, Homo sapiens
agccgggaaggggagccaccagcccccggacccgacaaacggacagcaggaccagaacaaggagaagcac

SEQ ID NO: 151646 - RNA, 78 nt, Homo sapiens
caaagaaacaaagaacggacccacaccgaggcacccgaagaagagaccaccaaccagccacacaacccaaagaccgga

SEQ ID NO: 151647 - RNA, 63 nt, Homo sapiens
cggcggcgagggccaggaaacggagcggggaaggacagaccaaacagcacaggcgaccgaagc

SEQ ID NO: 151648 - RNA, 41 nt, Homo sapiens
gaacgagcaccacaagagcaccgacggagccgccgcaccca

SEQ ID NO: 151649 - RNA, 68 nt, Homo sapiens
gcccaacaacaggaacgaacgggacagagggggacagcgaaacaggcgcagccgagccaaagaaaaag

SEQ ID NO: 151650 - RNA, 77 nt, Homo sapiens
ccggccgcgacagcgaacagcgcggccgcaggcggaacaacagaggcagggaagacgaggacaacggcacagcagag

SEQ ID NO: 151651 - RNA, 72 nt, Homo sapiens
gcggcacgcgagcaccgaacaacggcggcagacgaaggggaagcccaaggaaggccaaaaacccccggagac

SEQ ID NO: 151652 - RNA, 67 nt, Homo sapiens
gaacaacacaggacggagggggcacagacaggcagaaaccagcccaaaagaccccgaaagagaagga

SEQ ID NO: 151653 - RNA, 72 nt, Homo sapiens
acaccgaaaacgccccacacaagcgccccgagcaggcccgccaggccgccggcacagagggccaggccccgc

SEQ ID NO: 151654 - RNA, 77 nt, Homo sapiens
acagcaacagccccaccccgaaacgccccgaaaagacgggcaacagccgccgcggagaggccggaaggaccacggaa

SEQ ID NO: 151655 - RNA, 67 nt, Homo sapiens
aaaaacgccgaaagaagcaccgcaagccaaccagagccggcggcagcccggggcaagacggcagccc

SEQ ID NO: 151656 - RNA, 84 nt, Homo sapiens
caagaagccacccaggaacaagacgacagagagagcagcaagaaggagcagaccccacccccccagcggggagaggagcgggag

SEQ ID NO: 151657 - RNA, 72 nt, Homo sapiens
gagcgggaaaacgcaggcagacaggccgaaagacccccggcggccaagacacagcgaaaaacccagcacagc

SEQ ID NO: 151658 - RNA, 70 nt, Homo sapiens
ccaaaggaggggagagggccacagaaggcacagaaaaggacggcccacacccacagacgcgagccggagc

SEQ ID NO: 151659 - RNA, 63 nt, Homo sapiens
gggggaaccacagacagaccggggcggccgagccgggagaggccgcccagcgccaggccgaca

SEQ ID NO: 151660 - RNA, 81 nt, Homo sapiens
agaacccacacaggggaacacagccaacgaggacaacgaaccgcaaagaggagagcaaaggcagcaagagagcacaggagg

SEQ ID NO: 151661 - RNA, 84 nt, Homo sapiens
cgcagcccaggagcccaaggcggcccggcgggcgacggacggccggacagaaccaagccgccacagggagaaaagagcagaggc

SEQ ID NO: 151662 - RNA, 67 nt, Homo sapiens
aaaccaccaggaaggagccaagcacagcaggcagcagagccaagcccagggaaacccagacgacaag

SEQ ID NO: 151663 - RNA, 82 nt, Homo sapiens
gcgcgcccagcgccgccccgcgcgcgcccgccacggcgccgagccgcggccgaaagaacgagaccaccccaaacagcccacg

SEQ ID NO: 151664 - RNA, 77 nt, Homo sapiens
accaggacagacggagcaagaccaaggagcagggccgccccgaggagagcgacgcccgggcgcgccccggcagagcg

SEQ ID NO: 151665 - RNA, 67 nt, Homo sapiens
caccagggaagagacacacccagaacaaaccaggggagggaaacgagaaaaacgacgccagcggcgg

SEQ ID NO: 151666 - RNA, 56 nt, Homo sapiens
caaaggcacccgcgagcgcaacccaagggggaggggggcgaaaccgagcgcggggc

SEQ ID NO: 151667 - RNA, 91 nt, Homo sapiens
cgcgcccgaacgccaccagccagaacagagccgggcgcaagcagcagccaagggacaccaagaacgaagcacccagaccagcaaaagagac

SEQ ID NO: 151668 - RNA, 67 nt, Homo sapiens
aagcacaaacgaggcaggagcgaaaggaaaccggccaacggacagccccacgacggcaggcgcacgg

SEQ ID NO: 151669 - RNA, 80 nt, Homo sapiens
acccacgcagagggcggagcggcagagcagcccgacggccaggaggcgaagagacgaggaagcccaggagcccgaacaca

SEQ ID NO: 151670 - RNA, 40 nt, Homo sapiens
ggcgaagaggaacgaaccgcggagccccgggcccagcagg

SEQ ID NO: 151671 - RNA, 79 nt, Homo sapiens
gccgccgcccggccaccggcgggcccgaggagagcgcggagccgcgcccccgggcacccggaaacaagccacgaaggag

SEQ ID NO: 151672 - RNA, 81 nt, Homo sapiens
ggagaaagcgagggaacgagacggacagacagaggcaacaaaaaccagagaaccgacgggaaaaggcaaggaaggagcacc

SEQ ID NO: 151673 - RNA, 58 nt, Homo sapiens
gcaggagagaaagggaaaggcagagaaagcaagagacgcaaccgaacgcagagcggag

SEQ ID NO: 151674 - RNA, 41 nt, Homo sapiens
ggaagaacccacgcgcgacgaaaagagaccagaaagcgggc

SEQ ID NO: 151675 - RNA, 76 nt, Homo sapiens
cgccccgccggccaaacccccagccccggcgcccaccgcagcaaggacgccgcagcagaagaggcaggaacgaacc

SEQ ID NO: 151676 - RNA, 75 nt, Homo sapiens
caacacggggacgggccagcaagacacagagagaaacgaggcacaaacgcaagaacgccaggaaagaagaaagga

SEQ ID NO: 151677 - RNA, 71 nt, Homo sapiens
caacggagcggggcaggggcgacgagagcgcgcgggaacggagggaaagcgacaaacaaccaacccacaga

SEQ ID NO: 151678 - RNA, 85 nt, Homo sapiens
cccaggccagcggaccaagccagaacccggacccagcgaccggcgacccagcccggccccaagaacccaccagacaacaagccca

SEQ ID NO: 151679 - RNA, 53 nt, Homo sapiens
agagcaaggggcagaaacggccccgggggccgaggcgaccacacggagcagcc

SEQ ID NO: 151680 - RNA, 41 nt, Homo sapiens
gcgaggagcgagggacccaaaaccagacgagagacagaaga

SEQ ID NO: 151681 - RNA, 66 nt, Homo sapiens
gaagagcaggacaagcagaaaaagcggcagcgagaccgcaggggaaagaccagaaccggcgcaaca

SEQ ID NO: 151682 - RNA, 74 nt, Homo sapiens
gccgggagcgccggggccaggagagcgcgccggcgagaagcggccgagccagcagcaggggcgaaggagaaaga

SEQ ID NO: 151683 - RNA, 73 nt, Homo sapiens
agacgcagggcgcccccggcaggagacagagagaaagcaacagcaggccagccccagagcccggggagcacga

SEQ ID NO: 151684 - RNA, 60 nt, Homo sapiens
cccggacacccaaacgcagcgaacacaggcaggagccggaggcgcagaccggggacagca

SEQ ID NO: 151685 - RNA, 81 nt, Homo sapiens
cagggggaaccagcccaagccagcaacacaccaacaggaagcggccccccacacagcaggaaaggaagccgggggaccaac

SEQ ID NO: 151686 - RNA, 67 nt, Homo sapiens
gaacgaccaagagggagaagcacgcagaggccagaaggccccgggggcggccacgaccaagaagaag

SEQ ID NO: 151687 - RNA, 70 nt, Homo sapiens
acaaaggacacagaaaggacaagaaacaccaacgagacacagccgggcaaggggggaggagggacaacac

SEQ ID NO: 151688 - RNA, 75 nt, Homo sapiens
agcagagggggcgccagagggagaagccaaggcccgccacagcaaacacaacaggaaaggaaaggcggggaaagg

SEQ ID NO: 151689 - RNA, 71 nt, Homo sapiens
accagccccaggccccagcgcgagagacacaggaacgccgccccacccggcgcgagagcagggagagcagg

SEQ ID NO: 151690 - RNA, 69 nt, Homo sapiens
caggaccgagcgaaggcaccacggcgagacacagggaccaagaaaaaagcgaggaaaacgccacgacag

SEQ ID NO: 151691 - RNA, 87 nt, Homo sapiens
gagcagccacccgcagagccccccggaggaggagcccgaaaccaccccgacgcccagcccaagaggcggggaaaaaggagaagccag

SEQ ID NO: 151692 - RNA, 55 nt, Homo sapiens
ggcagacgaagaagaagcaagcgaggcccacaagaagagccggggccggggccca

SEQ ID NO: 151693 - RNA, 82 nt, Homo sapiens
gaagcaggaggcaagaaaggggaaccccggagaaaaggccaagaaggcaggccggaaggggggcgacgcggaaggcacaaca

SEQ ID NO: 151694 - RNA, 72 nt, Homo sapiens
agcaggacggaagcgagggcacgggcggcagcccgagaccgcagcagaacccaaaggcggcggcaaaacgga

SEQ ID NO: 151695 - RNA, 81 nt, Homo sapiens
cgccgcccaccgggagccgggacagggcagagcggcgggaaaccaccaacaacacccccaaaccaaaacagccggaagcgg

SEQ ID NO: 151696 - RNA, 58 nt, Homo sapiens
gcaagcaagccgccaggaacacaaagaagcagcagaaagcagagagcccagaagaaac

SEQ ID NO: 151697 - RNA, 74 nt, Homo sapiens
cgcccccggagagcagaaggggccccgggagcggagacagaggacagcgccgcaggcgccaaaaggaaacacgg

SEQ ID NO: 151698 - RNA, 73 nt, Homo sapiens
gggcacagcacgggagaagccccgcacagcagagagcaacccgaaaagagaagacccggggcaggcgcaggag

SEQ ID NO: 151699 - RNA, 78 nt, Homo sapiens
cagagaggagaggacaaagaccgcagacacagggcccacacccaagagccggaacccgaagaggcagcagcggaccgg

SEQ ID NO: 151700 - RNA, 77 nt, Homo sapiens
aggaaggaaccgggaggggagggaagggacaagaagaacgcccggaacccagaaccgcgggcagcaagaaccaccaa

SEQ ID NO: 151701 - RNA, 80 nt, Homo sapiens
caagacagcgacgcgccaccggcggggggcgagcaacaccggaagcgcgcaagacgcaacacaaacgagaaagacagccc

SEQ ID NO: 151702 - RNA, 72 nt, Homo sapiens
gcggccccgccggccgggcggaggacaagcaagccagacccccgccaaaagaaggggaccccagccagcccc

SEQ ID NO: 151703 - RNA, 62 nt, Homo sapiens
acccacagcggggcggcggcggcggcggcgcggcccaaaagagggaaaagaggacgaggcgc

SEQ ID NO: 151704 - RNA, 81 nt, Homo sapiens
gcccaagagaagcgggcagcggaaacgcacggggagacggcggaagaggagaaggggggcaaaggcaccaaacaagaccac

SEQ ID NO: 151705 - RNA, 83 nt, Homo sapiens
gcgacccaggaaggagagaggagaacgcagacagaaaccaagccgccccgaacaacgccgaggggggcagacaccaacccaac

SEQ ID NO: 151706 - RNA, 77 nt, Homo sapiens
cacaaaagagcagaggaggaacaccaggcacaaggacagccaggaaggcaggaacagaccaacccccggcccccgga

SEQ ID NO: 151707 - RNA, 74 nt, Homo sapiens
cgacaggcccgaggaaacccagaaaacaacaaagaccggcagcacacaacgcggagcccggacagaaacaccga

SEQ ID NO: 151708 - RNA, 75 nt, Homo sapiens
cagggaggcaagcagagcgcggccaagaacagaggaagggacccgaaggaagagggaacgaaaaagaagagaaaa

SEQ ID NO: 151709 - RNA, 72 nt, Homo sapiens
cccaaccgccacggaagggaaagaccacagcaagaccacgcccccagccgggggaccaggccgaacgacccg

SEQ ID NO: 151710 - RNA, 68 nt, Homo sapiens
ccaggaaaagcacccggaggaggaagaagaaggaagccaaagaaggcagggcgcggggcagagcacgg

SEQ ID NO: 151711 - RNA, 78 nt, Homo sapiens
agaacacagggggaagccaagcagaacaagggacacacccagaagggcagaaaagaaaaggccaaacccacccacagc

SEQ ID NO: 151712 - RNA, 82 nt, Homo sapiens
caccggccagcccagcccccgccgcgggggcgcggggcagggcgcggggacaggggcccgacaggagcgcccagccaccgaa

SEQ ID NO: 151713 - RNA, 87 nt, Homo sapiens
cgccaccggccgagagcaggggccggccccacagcccacaggaggaccaaagggggcagagccgccccgaggccccggcgcggcgcg

SEQ ID NO: 151714 - RNA, 51 nt, Homo sapiens
cccaggaaaaaaccaaggacaaaggagacaacaggacacacagcaacgaag

SEQ ID NO: 151715 - RNA, 69 nt, Homo sapiens
caggcccgaacccccaggccacagagcacagaagaaaagcggccaggcgagaagacagaaggagccaca

SEQ ID NO: 151716 - RNA, 74 nt, Homo sapiens
cgggcgggaggcgcggggccggggccgcgcgcccacccaacccgaggaggagacacacagccccagacgggagg

SEQ ID NO: 151717 - RNA, 77 nt, Homo sapiens
cgcagcacccccgccccccaggcgacgagacccagggcaggcagacggacagacggggagaaggccaaagaagaacg

SEQ ID NO: 151718 - RNA, 73 nt, Homo sapiens
gaaggagggcaagacagcgagggacgaaggagaccgcgcaggagccgaagaaggagcagcgcggaaaacggac

SEQ ID NO: 151719 - RNA, 63 nt, Homo sapiens
caacggaccgaagaacccggggggcccaaggggagagaagccgagagcagcagaggccgcgac

SEQ ID NO: 151720 - RNA, 75 nt, Homo sapiens
agagaagagagaagccaccagcaaaaaacgggcaccccgggcggaaaagagggaaggcgacaccccagaaccacc

SEQ ID NO: 151721 - RNA, 63 nt, Homo sapiens
agagcagagcggagggagccccagacacggaccggcccggggcccagcccccgagacgacccg

SEQ ID NO: 151722 - RNA, 96 nt, Homo sapiens
aggacacggaacgccaaacaaggaaaccccgggggggaccgaaaaccaggggaagcaggcgggaaggcccaggccccggggacaagagcggaaagg

SEQ ID NO: 151723 - RNA, 75 nt, Homo sapiens
gacgaggcccgcaccggccagcaagggcagggcaagccgaagagaccagaggagggagccaccagcaggaaagcg

SEQ ID NO: 151724 - RNA, 84 nt, Homo sapiens
cgaacagagagaacaagagacgcagccgcacagaggagcggacgggcgagggaggaagggggcgcacgcggaggacacccacga

SEQ ID NO: 151725 - RNA, 82 nt, Homo sapiens
gaccagacaccgcggaagcgggcacagagcaggcacccaaacaggcaaccccaagaaaagggaaagaaggccagagaagaaa

SEQ ID NO: 151726 - RNA, 42 nt, Homo sapiens
ggaccccgcggacagaaacccaagaaaccaggaaggggaaac

SEQ ID NO: 151727 - RNA, 67 nt, Homo sapiens
ccaagacccacaacaaaaggaaaaggcccaggcagggcgggcaccaggagcgaagcccaaggcccac

SEQ ID NO: 151728 - RNA, 78 nt, Homo sapiens
gcgcggcgggacaagcgcgacgcccggcgcgagccaagcgcgcgccgccgacaaccccggaacgcgggcaaaaggccc

SEQ ID NO: 151729 - RNA, 61 nt, Homo sapiens
gcagcacggggaacgaggaggaagaagaagccagaacacaaaccaggacaggcaagacgag

SEQ ID NO: 151730 - RNA, 109 nt, Homo sapiens
gagccggccaaccaacacaaggagcagcagcgggccgaagcagcagagagaggaggaccgaaggagaagaaggagaaggggaggagaaggcaagccggaaagagcgaaa

SEQ ID NO: 151731 - RNA, 65 nt, Homo sapiens
gggcacccacggagccccggggcggacccaggagagggggagggaccccaccggggcaaagagag

SEQ ID NO: 151732 - RNA, 65 nt, Homo sapiens
gaaggaccaagaaccagacacaagacacccaagaagcccagcagacccaacgcccagcaccaaaa

SEQ ID NO: 151733 - RNA, 67 nt, Homo sapiens
cgaagagcgccgacaaggagaaggggcgccacgcacccgggacggacaggcgcggaggacccaaaag

SEQ ID NO: 151734 - RNA, 78 nt, Homo sapiens
cgagcccccgccgcgccccacgccggcacacacacagaggggagagcaacccgaacgggcagagcagacggaggcgcg

SEQ ID NO: 151735 - RNA, 66 nt, Homo sapiens
gagaaagcggcgggcacgaggagaagggagacggccgggagcccagaaacaaacacaggggggaaa

SEQ ID NO: 151736 - RNA, 69 nt, Homo sapiens
agaaagccaacgaaccacaacaggaccgaagaggggcgccggagaggagacgagccacgagaggaccac

SEQ ID NO: 151737 - RNA, 79 nt, Homo sapiens
cggaggcgggcccagaggcggagcgcgagagaaagaagaggcccagcacaagcggaagccccagggggggaaaacggaa

SEQ ID NO: 151738 - RNA, 70 nt, Homo sapiens
cgagaaaccgccgaccaagagcgaagcgacggacaggcgaagaaacagagaccacagagcgggaaaaggg

SEQ ID NO: 151739 - RNA, 83 nt, Homo sapiens
cggcacagacgcggcggggcgcaaaccgagacaagcaccccgaagcgccggaaccacggaaggagggggcgacacacaagcag

SEQ ID NO: 151740 - RNA, 70 nt, Homo sapiens
gaccacagaaggacgggagaacaccccacagggaagaggccaaagacccccccccaaccagaacgaccca

SEQ ID NO: 151741 - RNA, 81 nt, Homo sapiens
gaaggggacgcggagggcgacgccgagggccagcgggacggagcaggggacccaaggccagccagccccaggcaccagcgg

SEQ ID NO: 151742 - RNA, 80 nt, Homo sapiens
gcaaggaggcccgagccgggcccagggggagaccgagagggagcaccccaaacggaggaagaacacccccgggagaggcc

SEQ ID NO: 151743 - RNA, 77 nt, Homo sapiens
ccaacaccagaccacggaccgcagcgccccaggaggggcggccggcaggagagagcaggagacggagggcagaggca

SEQ ID NO: 151744 - RNA, 82 nt, Homo sapiens
cgccgccccgccagcgccagacggacgaggcggcggagaacaagcggcagccaagaccgaggaagggggccaggcgaccaga

SEQ ID NO: 151745 - RNA, 60 nt, Homo sapiens
accacgcaaggcgcggacacaggcagacgaggaagagagaagggcacagaccaagacaac

SEQ ID NO: 151746 - RNA, 67 nt, Homo sapiens
agcgcccgccggaggagcagccagagcccaaaaggcagagcgaggagagaagaaggagggaaagcca

SEQ ID NO: 151747 - RNA, 68 nt, Homo sapiens
ggcgcccaagaggcgacgccggcggaaacggacgacaaagccgaaaggccgcaagcagaaacacagga

SEQ ID NO: 151748 - RNA, 64 nt, Homo sapiens
aagcgccaaacccacggggaacgaacagaacgcaaagaacgaaaaggccccaggacacgagggc

SEQ ID NO: 151749 - RNA, 83 nt, Homo sapiens
gaggaccgcaggccggaacgccccgccgcccaccgcgggccagggcgggcaggcacgcagaccaagggacccagcaggggcga

SEQ ID NO: 151750 - RNA, 74 nt, Homo sapiens
acggccgcccgccgcagcggagacaaaagagaacgaacgcagaccgggaaaaccaacaaaccaagagggacgaa

SEQ ID NO: 151751 - RNA, 76 nt, Homo sapiens
ccgacccggaggggcggcaggagcgaccggaggacaggcgccgcgacggcgcgagcggggggcgcgacgagagacc

SEQ ID NO: 151752 - RNA, 79 nt, Homo sapiens
gacccgcaacaaacccaccgccgagcaaagaaccaaccagaacacacgacagaaaggcaggagagcgaaagagagcgga

SEQ ID NO: 151753 - RNA, 55 nt, Homo sapiens
ccgcggaaaacagagagggccgagaggacgaaaaaagggccggcccgaaagggga

SEQ ID NO: 151754 - RNA, 53 nt, Homo sapiens
gcacggacgcggagaggggagccgcagagaacaaacgcgaccagaaccgaaga

SEQ ID NO: 151755 - RNA, 66 nt, Homo sapiens
accagacccacccacgcaggccggaggcaggcaggaaggcaacagcccccaggggagcaaccaggg

SEQ ID NO: 151756 - RNA, 86 nt, Homo sapiens
agcccagcaacagccagggagacggaacacaaccaagccgcgagccaaaagccccaagggaggcggcagaggacaccggggacccg

SEQ ID NO: 151757 - RNA, 76 nt, Homo sapiens
cacccccaccacaagggaacagacacccacccgacggggccggcccgccgcccaacaaagcagagcccacagacaa

SEQ ID NO: 151758 - RNA, 62 nt, Homo sapiens
gggacgggcggaagcacagcacggacggagaacacggaggacaaccagggaagcagaaggca

SEQ ID NO: 151759 - RNA, 71 nt, Homo sapiens
gaggcaggggagggaagaacgcgaccagcgagcgggcaaggcaaggagagcgaaaggaaaacaaggcacca

SEQ ID NO: 151760 - RNA, 69 nt, Homo sapiens
cggagggggaccacacagccagaacagcggacgccacacccaagagaagcccgaacagagcagcgaaca

SEQ ID NO: 151761 - RNA, 86 nt, Homo sapiens
cggaaggcccgcgccaagccaaggaccaaccaagaagcgaagaaaagagaaagaaacagacaagcgagagagcagcgcaacaggaa

SEQ ID NO: 151762 - RNA, 77 nt, Homo sapiens
agacccagaagagacaagcaagaaggaagacccacaagagaccacgcagagacagcacccaaccggcagcagcaggg

SEQ ID NO: 151763 - RNA, 78 nt, Homo sapiens
cacacggccccggcccacgcccggcccagacccacacgccgaccccgccccccgaggcgcagcccgaacccagcagcc

SEQ ID NO: 151764 - RNA, 71 nt, Homo sapiens
aaagacggacagccaagcaacgaaggcggcccagggcagcagcacacaaacaaccacaaacaacagccaca

SEQ ID NO: 151765 - RNA, 73 nt, Homo sapiens
gcacacacccagaggcccagcgcgcagcaaagggcgggaaagcaccagaaaacacacagcacggaagacgcga

SEQ ID NO: 151766 - RNA, 75 nt, Homo sapiens
cgcagcagccggggggaaggccaagaggcggcgggagaccccaaccgcagagcgcccggacggcgagagcaggcg

SEQ ID NO: 151767 - RNA, 59 nt, Homo sapiens
aaaaacaaggggaagacccaaggaaccaggcgaagaggcacccggagaagagggagcca

SEQ ID NO: 151768 - RNA, 78 nt, Homo sapiens
aggcgaacaaaaagccaaagcaaaacagaggcgcagccccaaacgggaccaggaggccgccagacccacccggacccc

SEQ ID NO: 151769 - RNA, 81 nt, Homo sapiens
gggagcagagacagcacacgcgggagacaacagcagcaaaaaggcgccagccggaagcccgagggcagcgcccacggccgc

SEQ ID NO: 151770 - RNA, 66 nt, Homo sapiens
ggcgaggacaaccagaagaaaaagcggcgaaggacacccagccacaagcccgaaccagacgaaggc

SEQ ID NO: 151771 - RNA, 76 nt, Homo sapiens
cggagagagaaaaccagaagaagagaagcccaacacagagagacacaccaacaaaggcagcgcgacagagaaagcg

SEQ ID NO: 151772 - RNA, 63 nt, Homo sapiens
aagagcggaaaggcaaaaggacagaagccagcccagaaagggaaaacgacaccagggaaaaag

SEQ ID NO: 151773 - RNA, 72 nt, Homo sapiens
ggcagccgcagcaggacaagaaagcaagaaccagaggcggagccgggggacagcaagcccccgacgaagaaa

SEQ ID NO: 151774 - RNA, 80 nt, Homo sapiens
cgaggcggagaaaaacagagacacgggagaagagcagacaaaccgaaggccagcaaggaccagagaaaaagcaccccagg

SEQ ID NO: 151775 - RNA, 56 nt, Homo sapiens
gagagaaggggaaaaagcaaaccagaccaaggggaaggaaacagagcaaagcagcg

SEQ ID NO: 151776 - RNA, 70 nt, Homo sapiens
gagccagaaaaaacaaagcaagccccgaagagaagccccagaggggaagaaaccgaaaagagaaagaaac

SEQ ID NO: 151777 - RNA, 81 nt, Homo sapiens
aagcgagcccaacccgcggccccggcgccaagccgccgcaccccggccaggaaacggcaaaaggcgccccacaaagaggaa

SEQ ID NO: 151778 - RNA, 79 nt, Homo sapiens
cgagagcagcaccacagggcggaaaaggcaggagacccaccaccggcccagggccaagaagacagaacaagaacaagca

SEQ ID NO: 151779 - RNA, 63 nt, Homo sapiens
gcggggcccggaggagggggcagaggccgacgccagccagagagcgcgcaagccccggggcag

SEQ ID NO: 151780 - RNA, 73 nt, Homo sapiens
cacccagacccaggcacccacccgccccaccgcagcccaccccagagaaagaccaggccggggggggcacaga

SEQ ID NO: 151781 - RNA, 48 nt, Homo sapiens
gaagacaggcaaagacagaacgcggcagaacggaggcaggcagcacga

SEQ ID NO: 151782 - RNA, 116 nt, Homo sapiens
agccaacaaacaaggaaggaacagcagcaaaaagaacacaaaggacagacagagagagagcacagaaaccagaaacaaagacaagaccgccaagaagcccaacgagaggagagaaa

SEQ ID NO: 151783 - RNA, 38 nt, Homo sapiens
agggagccccagacccacaggagaaacgaagcggcggg

SEQ ID NO: 151784 - RNA, 85 nt, Homo sapiens
gcccggccagccgccccgccgggagagacaacggcaacacgacaagaagccggcccaccgcagcacaggcgcgaggaaaggcagg

SEQ ID NO: 151785 - RNA, 83 nt, Homo sapiens
ggggaggagagccaaccagcaggcccggacaggcccggagcacacaaggcgaaagaaaaggcaagagaaccgaagaaggacag

SEQ ID NO: 151786 - RNA, 83 nt, Homo sapiens
caacggcaaaggcagaccaacaagaggacccaggagaaacgccccaaagagcaccggcacccgccccggccccgagcagagag

SEQ ID NO: 151787 - RNA, 87 nt, Homo sapiens
aaaaccacggccacccccagagcgccgggcgcggaccagggacacgccggcaccaccgagccggaggcggccccagcaccacccgac

SEQ ID NO: 151788 - RNA, 76 nt, Homo sapiens
cgaccgacgagcgcacgaggaggcgcgcagaaccagaccgggagcacgcacccacgaggacacgccagcggggagg

SEQ ID NO: 151789 - RNA, 73 nt, Homo sapiens
cccgccaccgcggccaccgacagcggccccgcggagaggaagcaaagcaaaaccagacccgaaaacaacacca

SEQ ID NO: 151790 - RNA, 72 nt, Homo sapiens
cagaccccaccaggcagaagcgacccaggaggcccaccagcagggacggacgccgacgcagagggagaagag

SEQ ID NO: 151791 - RNA, 72 nt, Homo sapiens
agacggcaggccagacccccacagcgagcgggcagccaccaaacaccagacagggggcggggggcagcagac

SEQ ID NO: 151792 - RNA, 83 nt, Homo sapiens
cagagcaccaaaggagcaaggagaagagccggggaggagaggagaaaccaagcagacccaggagccgacacccgcacgccagg

SEQ ID NO: 151793 - RNA, 69 nt, Homo sapiens
caggagacgcacgcgacaaagaagaagcaagacaaagaacgcaagaaggggcgcggcgcagcacgcccg

SEQ ID NO: 151794 - RNA, 79 nt, Homo sapiens
ggcagcggcaccacggcgacgcacaaggggcgggagggcagcacaggggagaacggagaacacacccagaaacaaaaca

SEQ ID NO: 151795 - RNA, 81 nt, Homo sapiens
gcaaggacccccccggccaagggcaagcaagaaaaaggcacaaacccagcacagagaagacggcgacaagcaaaagacgac

SEQ ID NO: 151796 - RNA, 78 nt, Homo sapiens
aacgaaggccaggcaccccaagagacccaccaggagaaggaagggcccagagccccaagcgaaggagcagggcaccag

SEQ ID NO: 151797 - RNA, 79 nt, Homo sapiens
gggggcccgacgcacaaaggcccagcgggcccagcaccgaacccggggggaccgcagccccccccccaaaacccaagga

SEQ ID NO: 151798 - RNA, 57 nt, Homo sapiens
caggcagcaggccaacgcagccgccccccaaacagccggaagagaccagcagacccc

SEQ ID NO: 151799 - RNA, 63 nt, Homo sapiens
ggcagacacagaaggccgacacccgcaccgagccccaaaacccagaaggaagaagaagaaaga

SEQ ID NO: 151800 - RNA, 78 nt, Homo sapiens
cgcgcgcgcgcggcggggcgcgccgcggggacagagcgcggcacgagcaccagagaggggcccaggcaaggcgccgca

SEQ ID NO: 151801 - RNA, 87 nt, Homo sapiens
cacggaagccagagggcagaaacccgagccgggcagacacacacggaacacacaccagccgcggagagcaggggagcagcgcggaca

SEQ ID NO: 151802 - RNA, 82 nt, Homo sapiens
cgagaagcaggggaaacagagcacagcggacaggacaaagaacacccaggggccccacaccccggaccaagcagccccgcaa

SEQ ID NO: 151803 - RNA, 72 nt, Homo sapiens
cgggcagaaagaaacacggaaggaagggaacacggacgacgagacacgaccaacacaggcgaccaaacgagg

SEQ ID NO: 151804 - RNA, 73 nt, Homo sapiens
cgggggcgggggccggagagaagcggaaaggacaaggcacgaggcgcggcgaccaccacagcagagcccggcg

SEQ ID NO: 151805 - RNA, 70 nt, Homo sapiens
ggggagccgaaaaaagccaagacgcaagcccacccaggacgggaggccagccgagagccaaggaacgaac

SEQ ID NO: 151806 - RNA, 64 nt, Homo sapiens
cagccgaaaagccccgcccgcccggaagaacccgagcaaccccgagaagagaagaaccccaagg

SEQ ID NO: 151807 - RNA, 72 nt, Homo sapiens
aagagcaccggagaggagaggcaagaggacaaaccggcgaccacacacggggacgacggggaagccggacag

SEQ ID NO: 151808 - RNA, 79 nt, Homo sapiens
ccgcgaggggcgggcgaggcaccggagacccgagcaccccaacgggcaggcccagggagccacgcgccagcccgccgga

SEQ ID NO: 151809 - RNA, 92 nt, Homo sapiens
cgcacgcaccggcccccaccacaccacccacccggggggcgcgacagagacgggaggcggcagaagacaagcgcaggaagagcggagaacag

SEQ ID NO: 151810 - RNA, 69 nt, Homo sapiens
ggaaccaacgacacgacgaccaccagacgagacacgcgaaggaccaaaagaccagagcaaacgaaggaa

SEQ ID NO: 151811 - RNA, 46 nt, Homo sapiens
agaaaaaccacaagagagcccagggaaggcaccaaaaagaggcgcc

SEQ ID NO: 151812 - RNA, 80 nt, Homo sapiens
aggaaaacggcgagaggacggagggggcccgacaaagcccccaagagaggaaagcggccaggcgggcccaaaccaggaag

SEQ ID NO: 151813 - RNA, 69 nt, Homo sapiens
cggaagaccgacaaagcacacggcaggaaaggggaaaaaggcaacacgaaagcgagcgaacaaggggaa

SEQ ID NO: 151814 - RNA, 83 nt, Homo sapiens
gcccagcagccgcggcagaccaagaagccagagagggcggggagacaaggaggccgagagaccgcaggacgaggaaagcccca

SEQ ID NO: 151815 - RNA, 79 nt, Homo sapiens
caaggacccgggaagagaaaagcgaaggacaccggcaagagaagccgggcaaggagaacaacacaaaccgaggggaaga

SEQ ID NO: 151816 - RNA, 58 nt, Homo sapiens
gcgacagacagcgagccggaggaccgccaggcaggcccggcaccaagggccggaacga

SEQ ID NO: 151817 - RNA, 81 nt, Homo sapiens
ccccgaaaaaggccccaggaccgacagcagaggagcgcaagaacggagaacaccgacggagaaaacaggagcgcggcgaca

SEQ ID NO: 151818 - RNA, 37 nt, Homo sapiens
gccggacgacaccccacagcaaacacaacacacacag

SEQ ID NO: 151819 - RNA, 114 nt, Homo sapiens
gcgcaggaggccggaccagagagcgcaccagagcagcacaaggaagcgccccaaagagcgacagcgggacgagaagaagccaccgggcaccggccgagggcggagcagcgcagg

SEQ ID NO: 151820 - RNA, 93 nt, Homo sapiens
aaaaggcacagaaccggaggccagaaaaggaaacgaccccggccgagcgaggaggccaagaacccaaagcaaggcgagacaaggggccaacca

SEQ ID NO: 151821 - RNA, 79 nt, Homo sapiens
aagaagacacacgaggccgacagaggagagcagagacagacacaagcgggccaacaaaaggcccacacacgaggaaggc

SEQ ID NO: 151822 - RNA, 57 nt, Homo sapiens
gagggcaagagggcgaaacaggccgacgcaaacgaggagagaaggcgaggaagccca

SEQ ID NO: 151823 - RNA, 80 nt, Homo sapiens
ggcaacgccaagacggcgcaacaacaaccagccgcggcgaaaccgcaccacgagacccacgaggccggcccaagaaaagg

SEQ ID NO: 151824 - RNA, 69 nt, Homo sapiens
cacccccaacccacagacgcccagaggacaaaaggggccgggcaccacaagggccaagacgaccggagg

SEQ ID NO: 151825 - RNA, 100 nt, Homo sapiens
gcgagagcagagcagacgcagggggcggggacagggcccggccacgcaaccgcccggaaccaggcccgggaggagcggggacacgaggaccccccaaagg

SEQ ID NO: 151826 - RNA, 42 nt, Homo sapiens
gcggacacacgccgccggcagaggcggggacggacagccagg

SEQ ID NO: 151827 - RNA, 68 nt, Homo sapiens
acaaggagaaaagagcagaggggggcaccagagccaggcgggcgaacccggccccaacgaccacccac

SEQ ID NO: 151828 - RNA, 57 nt, Homo sapiens
ccgagcacgccacagacaaggaggagagaaagaacccacgcaggacgacagaagagg

SEQ ID NO: 151829 - RNA, 77 nt, Homo sapiens
gacccgaagagacaaaagagagccaaccggagcagcagaccacaggagagggaaaaggagaggggccacgaaaaccc

SEQ ID NO: 151830 - RNA, 88 nt, Homo sapiens
agccgcccagacggccaccggcgggaggaacaaaagaagcccaccagaggcgaggggaggaggaagcgagcgaaaagaggcgggaaac

SEQ ID NO: 151831 - RNA, 60 nt, Homo sapiens
agcacacgccgggagaggagggcaagcgagggcgcacggaggagaaggcagagccccccc

SEQ ID NO: 151832 - RNA, 77 nt, Homo sapiens
gaccagagggccccacgacaaagggagaagcagaagcccgcacagagcagggaccccaaccgccgggggaggacacc

SEQ ID NO: 151833 - RNA, 62 nt, Homo sapiens
ccggagaccgcaagcaggggccgacagaaaaagaagaggaggacagggggggccggaaacgc

SEQ ID NO: 151834 - RNA, 76 nt, Homo sapiens
gaccgcacgggagaaaacaagccaaggagaacccagcccgacgggggaaaagaaacaaacaacaagaagaaggaca

SEQ ID NO: 151835 - RNA, 61 nt, Homo sapiens
cggacgggccaacccaaaaccagggcggcaaaacgagcgggccagagagggccgaggcaga

SEQ ID NO: 151836 - RNA, 62 nt, Homo sapiens
ggaccgagagcgcgaaacgcacgagaagaacgggacggcaggaaacacgagccccaggccga

SEQ ID NO: 151837 - RNA, 72 nt, Homo sapiens
cgccaaaacccaagccggagaagcagaaggagcaaccaccgaaacgggcgaaaaagaagaacagcaaaacac

SEQ ID NO: 151838 - RNA, 73 nt, Homo sapiens
agccaagcacacaagccagggaagacagaagaaaccagccaccggacaaagaggccggaaaacccgcacagaa

SEQ ID NO: 151839 - RNA, 33 nt, Homo sapiens
ggacgggaaagcagaagccagcgggccggcacc

SEQ ID NO: 151840 - RNA, 73 nt, Homo sapiens
gaggaagcaccgaagagagggccaaaaaggacagacagacaagaagaggcacaaaagaaagagcccagcagcg

SEQ ID NO: 151841 - RNA, 43 nt, Homo sapiens
cacaacggaccacacaagcaggacgagagaggagcgcgggccg

SEQ ID NO: 151842 - RNA, 69 nt, Homo sapiens
aagacaagaaaaaaaacccagaggagaaggcacaaagaacccgggccgagaccaaccgacagggagaac

SEQ ID NO: 151843 - RNA, 60 nt, Homo sapiens
gaaagaacagaccacccgaaaccacgagagaagaaagaaaaagaaaccgccagcccagag

SEQ ID NO: 151844 - RNA, 74 nt, Homo sapiens
cggccgagacggcggcagcagcggcacaggcgggcacaaaccgaagaggacaaggagagaagcagacagaagga

SEQ ID NO: 151845 - RNA, 82 nt, Homo sapiens
cggggccagccggaccaaccccgaggaccagacagccccgggagccggcacaggacccaaagaggcggaggggccagcaccg

SEQ ID NO: 151846 - RNA, 51 nt, Homo sapiens
agaggaaaccgcaccgcccggaggcacaggccgcgagacgacgacccgccc

SEQ ID NO: 151847 - RNA, 83 nt, Homo sapiens
gaacaagaaaagcgcaagccccagaagcccagagcacgccgaagccaccagacgggaaagggggcaggaaaaccgaaagcaca

SEQ ID NO: 151848 - RNA, 69 nt, Homo sapiens
ggaacagcgaggaagacagaaggaagggagcgcgccaaaggaccaagaagagccagcacaacgcaagcc

SEQ ID NO: 151849 - RNA, 78 nt, Homo sapiens
gcaaccagacgccagcgggacgaggaccgagaccgcggccgggaccgagggcgacgaggcggagacacggggagaggc

SEQ ID NO: 151850 - RNA, 77 nt, Homo sapiens
acgggcccggagagcccgaacggggcaaaaaggcggaacgcccaaaacccgccggaccgaagaaggggcaagcacca

SEQ ID NO: 151851 - RNA, 66 nt, Homo sapiens
aggaaaaaccacaagacagaacaaggggagaaggacacaaccaggcaagaggaaaaccaacgaaca

SEQ ID NO: 151852 - RNA, 57 nt, Homo sapiens
gaggaaggacggaagaggcccgcggaggcggcgggcagcgcccggaaggccgcggac

SEQ ID NO: 151853 - RNA, 62 nt, Homo sapiens
aggagacccgggccgcaggaagcccccgcggaccgaaagggcggagaacggaaaagcaccag

SEQ ID NO: 151854 - RNA, 61 nt, Homo sapiens
gcagacgggggaagccaggcaccccccacagaaagggcgaggagcgccgccccaggcggag

SEQ ID NO: 151855 - RNA, 76 nt, Homo sapiens
aaagggacaggaaggaccagcaacagggcaggaaacgggacgacccgggacagcccacggggcagaccagcgacca

SEQ ID NO: 151856 - RNA, 75 nt, Homo sapiens
acaaaaaacaggaaaaacagaagaggcagggcaaaacgagggaagaagcagcagcaacagccagagacggaggcc

SEQ ID NO: 151857 - RNA, 78 nt, Homo sapiens
ccggggcccggagcgccccaacccagcgccaccccaccaggcggcagaagcacacaagaagacaccgcagcggcagcc

SEQ ID NO: 151858 - RNA, 86 nt, Homo sapiens
gagcaacagcgccagaacgagaaggaacgcgaacgcaggcaagcggcggaacaagacaaccggcagagcgaggagcgcggacagcg

SEQ ID NO: 151859 - RNA, 83 nt, Homo sapiens
cgcagcagcggggaggagccaaagcccggcgccaccaagccgcagggagaacacccaacgggagaaccacccagccggagaca

SEQ ID NO: 151860 - RNA, 67 nt, Homo sapiens
aaaagacagagagggaaggccccggcacaacagcaacgcaagagcagggacggggggaaaagcgcac

SEQ ID NO: 151861 - RNA, 66 nt, Homo sapiens
cgggcgcggagaacgagggggaaagccgacgagcacggaggggcggaccccccccaccccacccaa

SEQ ID NO: 151862 - RNA, 65 nt, Homo sapiens
gcaacgccaccgggaaggccaagggccaagcagacacggcacacggcacggacagggcgggacgc

SEQ ID NO: 151863 - RNA, 70 nt, Homo sapiens
cgacgccgccaccacgggcaacgaggaagaagaggagagacagcaagaggggagaagccccagggaaaca

SEQ ID NO: 151864 - RNA, 72 nt, Homo sapiens
cagaggcaaggggccaccaggaggccagggggcgccagggcccagggcgggggcgggcacagcacgcacccg

SEQ ID NO: 151865 - RNA, 80 nt, Homo sapiens
agcgccgccgcgcgcggagagccccagacagcgcgaagaggacagcagggaagaacggaaaccagagaaagaaacgcccc

SEQ ID NO: 151866 - RNA, 69 nt, Homo sapiens
agagacaaggccagggagagacccaaagacgaaaaagagccacgcccccacgagcgccccccggaccac

SEQ ID NO: 151867 - RNA, 67 nt, Homo sapiens
gcaagaggacaaggagaaggacggggggcagacaggagcccaagacgacccggagacgcggaggcag

SEQ ID NO: 151868 - RNA, 69 nt, Homo sapiens
cagacgcagggcgcccccggagcccgggaccccgcgagacgcaggggaaaaaccgaggggacaaaacaa

SEQ ID NO: 151869 - RNA, 59 nt, Homo sapiens
cacaacaagcgcggaccggagacgacagaagagcaggcgaggacgccgggcacagccaa

SEQ ID NO: 151870 - RNA, 64 nt, Homo sapiens
acacccgaaggaagaccccccagaacacaaagcaaggcacagaaggcaccagaaccgaggccac

SEQ ID NO: 151871 - RNA, 70 nt, Homo sapiens
cgagcagcggacgccggccgccgcaggagagccaaagcagacccccaagcgagcggagcggaaggagcgc

SEQ ID NO: 151872 - RNA, 67 nt, Homo sapiens
aaagcgcaaccagggagggcggagaacggaaaagcaccaggaagcagagaggaccgcagaagggaag

SEQ ID NO: 151873 - RNA, 97 nt, Homo sapiens
caccgccggcgcgggaaacgggcgaagcgacgagccgcgaggagggaagaaaacgccagagaagcagagcagcccggagcgaggggagaccggggaa

SEQ ID NO: 151874 - RNA, 76 nt, Homo sapiens
agcggagacacaggcaaacgcagaaaagagagccgggcgcggaaacgaggggcaaaagcagggcaacggcccggcc

SEQ ID NO: 151875 - RNA, 81 nt, Homo sapiens
aaagggacaagaagggcaaagccgaaagccgcaagggaacgcaggaagaagcccaggacaagcagggagcgccggacacaa

SEQ ID NO: 151876 - RNA, 43 nt, Homo sapiens
agcaaacccaacaaacaccagagaggagaaaggagacgaaaaa

SEQ ID NO: 151877 - RNA, 41 nt, Homo sapiens
gcggcgggccggacccggcagccagaggagcagccaagaag

SEQ ID NO: 151878 - RNA, 53 nt, Homo sapiens
caagccaagaaaagaacagcacaagccagaagaaagaggaaacgaaaacgaag

SEQ ID NO: 151879 - RNA, 60 nt, Homo sapiens
gccgccgaggaggcgagcagccgggagacaccgccaccgccaggaagaagagagggcgaa

SEQ ID NO: 151880 - RNA, 69 nt, Homo sapiens
cagagacaaccgagcgccaggagagagacaaagcaaaacaggcacacaaaggggacccacagaaagggc

SEQ ID NO: 151881 - RNA, 57 nt, Homo sapiens
caacagcgagggcgacaaggcggagcggcagaaggacgccagaaagagggcaacggc

SEQ ID NO: 151882 - RNA, 74 nt, Homo sapiens
gcgggacccaggccgaagcagaaggcagcgggccaagcagcgccagccaggaacgagacaacgccagcagacac

SEQ ID NO: 151883 - RNA, 75 nt, Homo sapiens
ggaaggaaccagccaaaaagcaagggaagaccaaagcaagggaggagaagccagccccgcggcgggcgggaagga

SEQ ID NO: 151884 - RNA, 75 nt, Homo sapiens
cccagacgcccccacggcagaaggggaagccagcaacgcggaaggagaagcaaaacacagaggaaaagggaaaga

SEQ ID NO: 151885 - RNA, 70 nt, Homo sapiens
gcaaacggccgacccgcggagccaccagaaagcagccaggagagcaacaggggccagagaagaagcagag

SEQ ID NO: 151886 - RNA, 68 nt, Homo sapiens
ccgagcgcacgcccgaacgcgaggccaacagccccggagcacagcaagcgggagcaggcagaccaaag

SEQ ID NO: 151887 - RNA, 61 nt, Homo sapiens
caagccgccgcgaggagcggcgcgggccccccccaccgcgaaagggcagcaagacacgaag

SEQ ID NO: 151888 - RNA, 71 nt, Homo sapiens
gaggaggcagcgcgaccccgcacgacaacggcaagcggagaagagcaaggccgaaccgagaggaagggcaa

SEQ ID NO: 151889 - RNA, 81 nt, Homo sapiens
gggcgccaggccgcgccgacgcacccagcacgggccagaacccaaggagaaaggcggcgagaagaggaagagagagagggc

SEQ ID NO: 151890 - RNA, 79 nt, Homo sapiens
ccaaggacgccacaagaagaagcgacagccaagaagagcagcgggggacacgaccgaagcggcggccgcccagggacag

SEQ ID NO: 151891 - RNA, 66 nt, Homo sapiens
gcgaaccgacgccgggcggaaaaccaccaaaaccggcagcgagccgagcaagacacccccggcacc

SEQ ID NO: 151892 - RNA, 74 nt, Homo sapiens
gaccaggagcaaacagaagacccagagagggaccagggccaaagaagagccggggggcaggcggacagcaagcg

SEQ ID NO: 151893 - RNA, 86 nt, Homo sapiens
aaggcgaaggaccccaacggggaggccaacggaagaacccgagcgggaagaagccgcagcaagccgcagcggcgcgcaccgggcgg

SEQ ID NO: 151894 - RNA, 88 nt, Homo sapiens
cgggaccacaaaaggcacgaagagagaaagaaggcggagcaggcgagaagaaagccaaggcagcaggaagaagcgggaagaaaaccag

SEQ ID NO: 151895 - RNA, 83 nt, Homo sapiens
gcaggaccgcccaacacaaagcagggaggcagcgccgacaacaccgacacagaccaacaagggcgacagagcgaaagaaacga

SEQ ID NO: 151896 - RNA, 85 nt, Homo sapiens
cccagcaaaacccacacaggagcccagaaagagaggaagccaagcggcaggaaacgggacgggggagaccgaccgaggagccgaa

SEQ ID NO: 151897 - RNA, 82 nt, Homo sapiens
ccagcggcgcggcgggccaaggccgcgccgggcgggacgggggggcggcccggccccgcaggcgcacgggacggcagcgcgg

SEQ ID NO: 151898 - RNA, 85 nt, Homo sapiens
agagaacaagagaagagcaagccccaggaacgccgaaacgagcaggcaagagacagacgggaggcacgcagacagccacggcagg

SEQ ID NO: 151899 - RNA, 57 nt, Homo sapiens
ggcgcccggggagccggccagggacccagaggcgacggaagcccggcagcccggccg

SEQ ID NO: 151900 - RNA, 74 nt, Homo sapiens
gcccaaaagagcgcaccaacccccacggaaagacaaggagccgggccgagaaaccgaaccagagaccagagaag

SEQ ID NO: 151901 - RNA, 67 nt, Homo sapiens
agggggaaggagagccaaggaaaaaggcagaaagaagaaaggaaagggaaagaaaaggcagaaacaa

SEQ ID NO: 151902 - RNA, 82 nt, Homo sapiens
cagaggacccagacggagcaggaagaagcaccaggagggaggcagcagcccgggcgccacggggaggagcaccgcgcccagg

SEQ ID NO: 151903 - RNA, 81 nt, Homo sapiens
cggcccacaccggcagaacacagcagggcggaggaaaggcaggaagagaccgagaccaggaaccaggcaggggaacggagc

SEQ ID NO: 151904 - RNA, 79 nt, Homo sapiens
agaaacccaaccgcgcccgcccccgcgagcagagcccaccaagccgaggcaccgagcacccgaggggcggcgggaaaac

SEQ ID NO: 151905 - RNA, 55 nt, Homo sapiens
gcccaagacccaggggagaaagcaccgggaggaaagagagccacacgaagaacac

SEQ ID NO: 151906 - RNA, 38 nt, Homo sapiens
gaagcacccacagcaacaagggcgaacacacacaaaag

SEQ ID NO: 151907 - RNA, 87 nt, Homo sapiens
aacccgaggcccgggaggagccaacaagcgcacggagccccaaggacaccacagccaaagcccagggaagcacgaacacaagcacaa

SEQ ID NO: 151908 - RNA, 72 nt, Homo sapiens
aaagaccggaaaaagcagcagccggagaggccgaagacggggcagaagggagaaagcccggagcacacaagg

SEQ ID NO: 151909 - RNA, 84 nt, Homo sapiens
cacggagcgggcgacgagcgacccgggagacacgacgaagacgaccccgacgcaggccaggagccgcggacagaagccgagcac

SEQ ID NO: 151910 - RNA, 76 nt, Homo sapiens
accacgccaccccgccggaccgcacaggagaagccagcccgagagccaggccgggcaaaagacaggagaagaagga

SEQ ID NO: 151911 - RNA, 70 nt, Homo sapiens
gacgaaaaaagggcaagaagccagaagggaccacgccaagcgagaacgaacaaaacgggaagaagaaaga

SEQ ID NO: 151912 - RNA, 76 nt, Homo sapiens
cgaggaggacgcaggagcgcaccccccggccccccggagagggaggggggccaggggggcgcggccggccccgcgc

SEQ ID NO: 151913 - RNA, 81 nt, Homo sapiens
acgccgggggcgaggagacaaaaaagcccaagaccggcacaccgaagaggcaaggcagcgagggaccagaccggagacgcg

SEQ ID NO: 151914 - RNA, 35 nt, Homo sapiens
cacaggaagagaagagcagaaacgagaggggagac

SEQ ID NO: 151915 - RNA, 77 nt, Homo sapiens
agagcaaggagaggaacggccaaaacgggacaaaaggcggaaccaggccagcgaccacgagcgggcaccacagaccc

SEQ ID NO: 151916 - RNA, 80 nt, Homo sapiens
ccggcgcgcggcgcgccgcccggcgagcgggccggaggaaaagaaagacgggagagaagcgccggccggaaagaagacgg

SEQ ID NO: 151917 - RNA, 78 nt, Homo sapiens
gaccaaaacagggagaaacacagccagaagggcaaggggaaggccaaggacgagaaagaccccgaaggcaccacagcc

SEQ ID NO: 151918 - RNA, 73 nt, Homo sapiens
caaccgccgagagagaggaaggccagaacaggccgagagcagccagaagacaaagaggggaagacacagaacc

SEQ ID NO: 151919 - RNA, 89 nt, Homo sapiens
caacccacagaggccaaaagacgccacggcgagccgagggcgcagcagacaaggaggagcccaaaggcgaaaggggcagcccgcccgca

SEQ ID NO: 151920 - RNA, 79 nt, Homo sapiens
aggcgccgagaggaccggggggacagcccgggaccggccgaaaggcgaggaaccgagcgcagaggcaggcgggccgggg

SEQ ID NO: 151921 - RNA, 73 nt, Homo sapiens
aggcaagaaccgcagaagagggaggcgaaaggcagaacccaaaggcaaaagggaaagcaaggggaagggccca

SEQ ID NO: 151922 - RNA, 75 nt, Homo sapiens
ccgcgcccgccgcgggagagaggacccccccccccccccaaggaggaacccggaagaaaaaaaaaacaagagggc

SEQ ID NO: 151923 - RNA, 75 nt, Homo sapiens
aggcccagagccgggggagacaaggaacggacgggagacacaggaagagcgggccaaccggggacgagccagacg

SEQ ID NO: 151924 - RNA, 52 nt, Homo sapiens
ccaagaaccaaaaaggaccacgaaggccccgacggcagcccaccccgagcgc

SEQ ID NO: 151925 - RNA, 64 nt, Homo sapiens
gcagcccggagggggagcagacgaaccggaacccgcgggccaacagcaagaaagggaagccgag

SEQ ID NO: 151926 - RNA, 73 nt, Homo sapiens
agggcaaagaaaaagaagaagcacacacacagggaggagcacaaacgcccaccacacagcagaaacggcaggg

SEQ ID NO: 151927 - RNA, 46 nt, Homo sapiens
cagccccggcacgcaggggcaggaaccagcaccagacagaagacgc

SEQ ID NO: 151928 - RNA, 90 nt, Homo sapiens
cgaaccccaccgcacccgagccgcccggccaccccgcacgcggaagcgggcgacaggcagagcggaaacaccccccaccccgaacccggg

SEQ ID NO: 151929 - RNA, 72 nt, Homo sapiens
ccccaggccccccacagaaaaggaaaggaggagacacacagccccagacgggaggaaaaaaggaaggaccgc

SEQ ID NO: 151930 - RNA, 38 nt, Homo sapiens
gcgaggacgagagagaaggcacgcccacaaagcaacgc

SEQ ID NO: 151931 - RNA, 38 nt, Homo sapiens
gagaccagcaacgcaccgagacgagacagaacaccacc

SEQ ID NO: 151932 - RNA, 50 nt, Homo sapiens
gaagcagagcaagaaagggaacaacgcaccacaagccaacaaaccgaaaa

SEQ ID NO: 151933 - RNA, 81 nt, Homo sapiens
aggaagagaggagcgacgccgggggcgcagaccgggcaagaccacccgcaagcacgcggaacaagagcaaagaccaagagc

SEQ ID NO: 151934 - RNA, 57 nt, Homo sapiens
gagaccgcgccggcgaccagcaccgaacgaccggagcgagcacagaggacacacccc

SEQ ID NO: 151935 - RNA, 79 nt, Homo sapiens
ggaagcgcggagagacggcgcccgccccccgccgccgcccaaggagagcgcgggcgacggggcgagagagccgggggga

SEQ ID NO: 151936 - RNA, 65 nt, Homo sapiens
accacccgcaagcacgcggaacaagacaacacacacgcaccagggcagaaaaagggagaaagagc

SEQ ID NO: 151937 - RNA, 87 nt, Homo sapiens
acgccccgaaaagacgggcaacagggcgaagccgggaaaaagaaccaggccaaggagcggaggagcgggcagcaggagacgccaaac

SEQ ID NO: 151938 - RNA, 63 nt, Homo sapiens
caaaacgcagcaaccaaaggcaccggccgagaggcaaggaaggcccgccagcaagaggaaaag

SEQ ID NO: 151939 - RNA, 73 nt, Homo sapiens
ccccgcagaccaaggacacccaagagggcgagcaggacgaagcgcccgccaccaagggcaaggaaagagagaa

SEQ ID NO: 151940 - RNA, 80 nt, Homo sapiens
ggcggcagcggcggggcggggcgagcagaggacccggcgggcggcccgcgggcagagaggagcacggcagccaggaggcc

SEQ ID NO: 151941 - RNA, 69 nt, Homo sapiens
gaggcacccccggaccagaacggcacggccacgggcgggcaggcaagaggccaacccaacagaagcgcc

SEQ ID NO: 151942 - RNA, 91 nt, Homo sapiens
gggacacagcggggcaggagcgcccgcaccacaccccacaccccaagaagaagcggaagaggagccgcggaaccaagacacaaggaacaga

SEQ ID NO: 151943 - RNA, 54 nt, Homo sapiens
cacacaaaaaacagcgccgcccggagcaagaaacggacgggcaaggccggcgag

SEQ ID NO: 151944 - RNA, 71 nt, Homo sapiens
gccgcgagcagcggacgccggccgccgcaggaggagacacagcaaagagcccaggccaccaaggaccccac

SEQ ID NO: 151945 - RNA, 61 nt, Homo sapiens
cggcgcggaagaagcgcgcggagcgcgggagaggagggaggcaggacccgaagaggaaaag

SEQ ID NO: 151946 - RNA, 86 nt, Homo sapiens
caccacaaggagagcgagcacagccccacagagcagcgcccgcccacccggagccaggcacacaggacgaccggaggccaccagcc

SEQ ID NO: 151947 - RNA, 87 nt, Homo sapiens
acacgcgagccgacgagaaaggaaggagacgaaccacaaacggagacggcagacagcacaggcagcgcagaaggccagacacagaac

SEQ ID NO: 151948 - RNA, 74 nt, Homo sapiens
accgcgagagaagggggcacaggcggagaggaagagaaacaccccgccagccagaagaagagcaggggccgaag

SEQ ID NO: 151949 - RNA, 77 nt, Homo sapiens
ccacccgagggcgaagcagccaaggaacacagcacccacccacacccacacccgcgacgggagggaggagccggcca

SEQ ID NO: 151950 - RNA, 72 nt, Homo sapiens
cgcaccgacccgacgcgccggcccacgcgcggccaaggacgaccgaaaacccagccagacaaaagagaagca

SEQ ID NO: 151951 - RNA, 76 nt, Homo sapiens
gcaagagacgacccgacgccagggcaaccaccaaggagaccacggaagagccaggccagacggggcagggaacaac

SEQ ID NO: 151952 - RNA, 55 nt, Homo sapiens
ggaagacacagcaaggaagacccacggagaacgaaggaagaccaaggaagaacag

SEQ ID NO: 151953 - RNA, 64 nt, Homo sapiens
aacagcgcgaggcggcggcagcgagccgggcccaccaggccgcgaaagaaggcgacagaccgaa

SEQ ID NO: 151954 - RNA, 62 nt, Homo sapiens
ccaccgacacagcccagccggagaaacaccccagacaacccaagaaaaggcaacggacgaca

SEQ ID NO: 151955 - RNA, 67 nt, Homo sapiens
agagaacaggaacggacaaggcaggagcccaagagaacgaaagcacagaaaacaacgccccaggacc

SEQ ID NO: 151956 - RNA, 79 nt, Homo sapiens
cgggaccgcagcacggggaaacgaccgccccaaaacggggggacacaccaccgggaacaagccgccgggccagggaaga

SEQ ID NO: 151957 - RNA, 78 nt, Homo sapiens
agccacaccccaaaagggaaagggccagccgggcagcgccagcgggaggacagccaggccccagaagcagggcaccag

SEQ ID NO: 151958 - RNA, 40 nt, Homo sapiens
gcaggagggcaccccaaaagaaagacaagggaggcgagga

SEQ ID NO: 151959 - RNA, 78 nt, Homo sapiens
gagagagaaaaaccggacgagcgagcaaggaagcgcagaaaggaagagaagaagaagcagaaagggcaggacgaagaa

SEQ ID NO: 151960 - RNA, 60 nt, Homo sapiens
cccaggaacagacccgagcaaaggcagaagaagagcaacaagagaaaggcggcggcaaac

SEQ ID NO: 151961 - RNA, 78 nt, Homo sapiens
cccccccacccaggaaaggagaagcgcccgggaccacccgagacccaacccgcacgcccagcccaggaaccggaccac

SEQ ID NO: 151962 - RNA, 82 nt, Homo sapiens
gaccgcaacacgggaggacggggaaaaagcggccaaagaaggaagcgcgcaccggcgaaagggagaccggggcccgagcccc

SEQ ID NO: 151963 - RNA, 70 nt, Homo sapiens
caggcagcgcccccaaacggcagaagcccccggggagagacagacagagggacacagagaggaagaaagg

SEQ ID NO: 151964 - RNA, 84 nt, Homo sapiens
aggcagcagagcccagggccggccaggaggcccaagacaccacagaagcccccgagcccagcccaacaagccgaaaggccacaa

SEQ ID NO: 151965 - RNA, 76 nt, Homo sapiens
agaagcccgaggcgcaagagacaaagaacccgggagggaaagacccaccggacgcggacaggcaaaaagccgacgc

SEQ ID NO: 151966 - RNA, 53 nt, Homo sapiens
aagcggacgggggaggaaggcacgcgccagaacccccaaagacaacaaggagc

SEQ ID NO: 151967 - RNA, 77 nt, Homo sapiens
accagaaaaggccagccagcgacacccggaaacacgacaccggaagcccggcacgcgggagcagaaaccacacggaa

SEQ ID NO: 151968 - RNA, 71 nt, Homo sapiens
gaacaaacagcagcccccggaaaaacgggccgcaaggccaggcgcgcagaggcacccaacggcacagaccc

SEQ ID NO: 151969 - RNA, 73 nt, Homo sapiens
acaacagcgaggagcaggcggagcacccaccacggagggaaagaccaggcaggcaacccagaaaggcagcaca

SEQ ID NO: 151970 - RNA, 71 nt, Homo sapiens
ccgggccccggacgccgcgcggaaaagagaagacgcgcaagaccgagcaagacgccgcagccgagcacgag

SEQ ID NO: 151971 - RNA, 82 nt, Homo sapiens
cccgccaaccccaggggaccagaggaaccagcccgagcggagaagcaggccaacagcaaaaaaccaagagggggaacgaaaa

SEQ ID NO: 151972 - RNA, 75 nt, Homo sapiens
ggccgccggggccgccaggagcccgaccgggagaggacaagaccacgagccaggcaagggcagacaaacaaaaga

SEQ ID NO: 151973 - RNA, 72 nt, Homo sapiens
gggaacggggagcaagaacaagaacaagcgggaacccacacccaagaggagcacaggaagaacagaaaccag

SEQ ID NO: 151974 - RNA, 57 nt, Homo sapiens
ggcgggaagacagaaccagggccgggggccagcaacccccagccacaacgcgaaccg

SEQ ID NO: 151975 - RNA, 76 nt, Homo sapiens
gcggaaaggagggcggcccggaccgggagacacggccagacgcccccagaacagaacccccacagcagcacgcagg

SEQ ID NO: 151976 - RNA, 75 nt, Homo sapiens
cccccgcagcccggccgagcgcaaccgccccgccaacagaggggccaagcagcccagagaaagacacaaaacagc

SEQ ID NO: 151977 - RNA, 86 nt, Homo sapiens
caccgagagggcgcgagggcgcgcacaaccggcccagcaggcacccgagcagcgccacgcaagcgccggccgcccgcaggacaccg

SEQ ID NO: 151978 - RNA, 66 nt, Homo sapiens
ccgaacacaggggagacagaagcaaaggaccgggcgaggcagggcacggaccgcaccggacaccaa

SEQ ID NO: 151979 - RNA, 56 nt, Homo sapiens
ccacggcaccccgcacgcacgcgggcaggggaggcaagcaggggggcaaaggaaag

SEQ ID NO: 151980 - RNA, 77 nt, Homo sapiens
gaaagggcgggaaaagccacccacagggagaaacacagcccaaggacccaccaagggcaaagaccagaagaccgcgg

SEQ ID NO: 151981 - RNA, 83 nt, Homo sapiens
cagaggaagcgcaacaggcagaggccaaaggaagaggcggaaaacaaccccagacaaacacaaggagcgagcaggcaaaaaag

SEQ ID NO: 151982 - RNA, 72 nt, Homo sapiens
ccaaaagggaaaagcaccggaggagcagcgacgagaaagagcaagagcccagggaaaagaagaaggagccgc

SEQ ID NO: 151983 - RNA, 73 nt, Homo sapiens
acaaaccacccacagccaagaaagcaacaaaacaccaaagggcagaacagggggccaggagaagaagaagacc

SEQ ID NO: 151984 - RNA, 57 nt, Homo sapiens
gagaagacggcggcggcgagggggggcggcacacagagaaaaaaagggaacaaaaca

SEQ ID NO: 151985 - RNA, 70 nt, Homo sapiens
ggacacgaggagaaacagcagaaacgcaccaggccaaagaaagagaaggaggaacacggccaaccacaaa

SEQ ID NO: 151986 - RNA, 36 nt, Homo sapiens
gcggccaacgaaaggagacagcaaacagaggaacaa

SEQ ID NO: 151987 - RNA, 82 nt, Homo sapiens
gagggagagacgccgaacgacgccccgcacaccggagcgcccagcgcgaggagcggcccccaggcacgaagcgaagaagagg

SEQ ID NO: 151988 - RNA, 83 nt, Homo sapiens
ccaggccccccgccccggccgccaggagcagccgccggcgccaagagcgccgaaaagcgaaaagaaacaagccgcggcaacag

SEQ ID NO: 151989 - RNA, 67 nt, Homo sapiens
ggagggagaacaagcaacggcggaaccccaaggacccagacgaagagaacagcccaccagaagagca

SEQ ID NO: 151990 - RNA, 43 nt, Homo sapiens
gcaacagccgccggcggaagacgccggacaaccacagcccgga

SEQ ID NO: 151991 - RNA, 80 nt, Homo sapiens
cagcaggccaacgaaagcgccaacccacggagcccagaaagcgggaccaccgcaaagccacacccccacaaccgcagccc

SEQ ID NO: 151992 - RNA, 80 nt, Homo sapiens
cccccaaggggcgggcgccggagccgacgccgggaacccgccgcgcgccgcgaccccaagcagccaccaggagagaacgc

SEQ ID NO: 151993 - RNA, 81 nt, Homo sapiens
gcaggagacagccaaggggagaccacaccaagcgggagacacaccacgccaagggccgggcaaaaagggaaagaaaggagg

SEQ ID NO: 151994 - RNA, 84 nt, Homo sapiens
cggaagcaaaggagcacgaggaggggggacaaggaagccgcgagcagaacgcgccagcaacacgggcgaccagcgagagcagga

SEQ ID NO: 151995 - RNA, 68 nt, Homo sapiens
gcagccaccacccacaagacagagagcaagaccggaaggaagcggaagggacacacagcaacgaagca

SEQ ID NO: 151996 - RNA, 69 nt, Homo sapiens
gggagcagaaggccccagaaacagcagggagaagagggacacaccagaaaacgaggagcccaggcaaac

SEQ ID NO: 151997 - RNA, 75 nt, Homo sapiens
gcggcgcggcgccggcggagggaagaagacggcgaagcaccaacgccaagcgaggaggaaaacccaaacgcagag

SEQ ID NO: 151998 - RNA, 61 nt, Homo sapiens
gcgccgacaacccggcgccagagccgggaagcacagcacagcagaagcacacgacagaaag

SEQ ID NO: 151999 - RNA, 41 nt, Homo sapiens
gcccagcgggccggaccggaccagaggaccagcacagcagg

SEQ ID NO: 152000 - RNA, 74 nt, Homo sapiens
ccccaacccacgagaggacagcccaggccgcggaggcccgagagcggccgcacaccggaggagggcgagagggg

SEQ ID NO: 152001 - RNA, 90 nt, Homo sapiens
ggccaggagccaggggcccagaagaggaggagcccggaagcgcgagaagaaaccaacgcggagagcgcggcaggagcggaccgcgagcgg

SEQ ID NO: 152002 - RNA, 77 nt, Homo sapiens
ccaggaggggccagaacggacaggggccgcgccgcgccgcgcgcgggagcgccagcaagagccgaaaaccagccccg

SEQ ID NO: 152003 - RNA, 64 nt, Homo sapiens
gagacacaaggacagcagcgacggggcccgcaccccagcccaacaagagcagagacgagaaaag

SEQ ID NO: 152004 - RNA, 74 nt, Homo sapiens
acggcccgcggagcccagcacggcagaaacagccaagagagaacaacaggggggagaggagagaaccagaagag

SEQ ID NO: 152005 - RNA, 55 nt, Homo sapiens
acacaaggagggggcagagcgagggcaaacagaggcagagcaacagggacacaag

SEQ ID NO: 152006 - RNA, 84 nt, Homo sapiens
caccgggcagcgggggagcggcgcagcggcggcagcggagagcgagagaggggagcaggggccagagaacaagcccagacagca

SEQ ID NO: 152007 - RNA, 72 nt, Homo sapiens
agaagggcaggccagaagggcggcccagggcagcagcacacaaacaaccacaaacaacagccacaggaggca

SEQ ID NO: 152008 - RNA, 75 nt, Homo sapiens
ggacagcagaaaacaaggagaagcacggaccaaagcagcgcaacccagccacaggagggcacggagcggggagcc

SEQ ID NO: 152009 - RNA, 63 nt, Homo sapiens
cgaccaccggagccaagacagagggagccgacaccaccccccaccaaaggcaaaggcaggaca

SEQ ID NO: 152010 - RNA, 71 nt, Homo sapiens
aaagcaccaaacccagacaaggaaggacagaaaagagccaacgcagaaaagaagggacaacggaagacaag

SEQ ID NO: 152011 - RNA, 75 nt, Homo sapiens
cccccagaccggcggaaggcagccgcccccccccggcggcagacgagccacgcgcaggaaaagaaaagccaagag

SEQ ID NO: 152012 - RNA, 78 nt, Homo sapiens
gagacgccccaccaggcacagagaagagcgcccgcacccagagaaaaccggacgccacggagccaacccacaagggcg

SEQ ID NO: 152013 - RNA, 65 nt, Homo sapiens
cgaaaagagcccgcgaggccgacaagagccacccggagcaggaaagaccacagcaagaccacgcc

SEQ ID NO: 152014 - RNA, 51 nt, Homo sapiens
aggacagcgcacacagcaagcacgagcggccgcgagaaccgggcagagcag

SEQ ID NO: 152015 - RNA, 63 nt, Homo sapiens
ccacaccgagacccgcccagaggaaggcagccacggaagagggcgcgcggggcggccccccga

SEQ ID NO: 152016 - RNA, 77 nt, Homo sapiens
cgaacgagcaaaggcacgggcagccggaaggacaccaagagcggaccgggccccgggaagagagaagccacagggcc

SEQ ID NO: 152017 - RNA, 88 nt, Homo sapiens
caccggcacccgcaagaagcaccagcaagggccccagggcaccccgcggcggcggcggaggcggagaaggcgcggaggccggggcggg

SEQ ID NO: 152018 - RNA, 77 nt, Homo sapiens
ggcgaggccgccgcgacacccccgcaccggggccgggcgcgggccccggggccgcggcgaaaggacggggcgaaagc

SEQ ID NO: 152019 - RNA, 41 nt, Homo sapiens
ggaggccccgggaggccgaggcgggcggaggcaaggggacc

SEQ ID NO: 152020 - RNA, 77 nt, Homo sapiens
cacaacgcggccggcgcccgcacccaccgagaaccagccaccgacccggacacaaagacgcagacggaggcgagccc

SEQ ID NO: 152021 - RNA, 71 nt, Homo sapiens
gcagggaaagccccgcagcaacagggcggagaacggaaaagcaccaggaagcagagaggaccgcagaaggg

SEQ ID NO: 152022 - RNA, 85 nt, Homo sapiens
acagaagagcgaagcgaggacacacccaggaaaagaccaggacggacaagcacagccggaaggcagagaaagcaagagacgcaac

SEQ ID NO: 152023 - RNA, 56 nt, Homo sapiens
ggagccaagacgagaaaggaggaacgaaacacccaagccggggaggcaccacgagg

SEQ ID NO: 152024 - RNA, 79 nt, Homo sapiens
gcggccacacgacccacccaagcccacgaggcgggaaaggaaagcaagccaggaggaaacgacaccaaaccgggggggg

SEQ ID NO: 152025 - RNA, 76 nt, Homo sapiens
caagagcccagcagagaaaaagacaccacaacgcagggcaggggacgaagggaacccgccgggcggcccggcaccc

SEQ ID NO: 152026 - RNA, 62 nt, Homo sapiens
gccgaaacggaaagcccaagaggagacgacggaggccacagacacacgcagcagaaggcagc

SEQ ID NO: 152027 - RNA, 77 nt, Homo sapiens
acgcggccacagcccacgagggcaccaaaaacaagaaaaagaccgcagaagacccaccccgcagaaagcacaggacc

SEQ ID NO: 152028 - RNA, 35 nt, Homo sapiens
agaccaggcccaaaaaagagcgcggcgcccaggcg

SEQ ID NO: 152029 - RNA, 56 nt, Homo sapiens
gcgcccgcccgcacgggcgcgccaagggcacagagggagagggaacaacagaaaaa

SEQ ID NO: 152030 - RNA, 76 nt, Homo sapiens
gagaccgggaaaccgccgaagacgaagaggccagaccggcccgggccgggccaggaggacacgcgcagggcccacg

SEQ ID NO: 152031 - RNA, 79 nt, Homo sapiens
gccgaaggagcaagaacccagaagaggcagcagcggaaggcagcgggagccgaaaacggaagaaaaccgacaacccaag

SEQ ID NO: 152032 - RNA, 74 nt, Homo sapiens
gaagaaggaagggccacccaggacaggggcacccaggccaccaggcaacgcaccaacaacaccacacaaaaaaa

SEQ ID NO: 152033 - RNA, 50 nt, Homo sapiens
ccaggccaacgccagggcggccacaaaaaagcacgaacagacgccagcca

SEQ ID NO: 152034 - RNA, 80 nt, Homo sapiens
gcaggaaccaccaggacagaaggaggagagaaagaaagccagcgcaacgagagaaccagcagaaaagaagcccaagaaag

SEQ ID NO: 152035 - RNA, 95 nt, Homo sapiens
aaagaggagccgcgccgggggggcacggaaacgcagcacacggcgaaagccacggggaaaaggaaggccggaggaggcaacagcggacagcagga

SEQ ID NO: 152036 - RNA, 70 nt, Homo sapiens
aagaccagcaaaaggagaccccccgggaggcggcgccggccccgcagcgcgggaggcgcaccacccgagc

SEQ ID NO: 152037 - RNA, 55 nt, Homo sapiens
ggagagcacagcaagagccaggaccaccggaagccagaaagggcccagacccggg

SEQ ID NO: 152038 - RNA, 75 nt, Homo sapiens
gcagcagacccccccccccacccccggggccacccccaaccaggaccaaagacgaccaccaaagccagcccccag

SEQ ID NO: 152039 - RNA, 75 nt, Homo sapiens
ccaaccgcgcagagaggccccagagacgaacaagagaccccgcgagacagccgcccccacccaggaacaccccgc

SEQ ID NO: 152040 - RNA, 60 nt, Homo sapiens
ccggcgcgcgggccccgcagcgcacccggcggcggacaggggaccccagcggaacacacc

SEQ ID NO: 152041 - RNA, 78 nt, Homo sapiens
cacacccccgccaggagaggcgcggaacccacaggcccacaaccgcagcgaggagccagcgaaagcacgcaccgccgg

SEQ ID NO: 152042 - RNA, 77 nt, Homo sapiens
ggagcgggcagccgccgccaccccgcggccgcacccccgccccaggacccaccccgcaccagggggcgcaacacgac

SEQ ID NO: 152043 - RNA, 84 nt, Homo sapiens
gcgcagccaaacgcgcgaagaagaaagaggagaaggggaagaacaccagggggggagagcagaagggacacagcaggacaggaa

SEQ ID NO: 152044 - RNA, 79 nt, Homo sapiens
ggacgccgccgaagaagcacgaaagccccacccgccgcagcaagcagaggccagcccgaggaaagaaccgaaaaacacg

SEQ ID NO: 152045 - RNA, 77 nt, Homo sapiens
cagccaaaaaggcaccaagaagacacagacaagcccaagcgagcgcaccaaacagaggaagagaagagagcgacgga

SEQ ID NO: 152046 - RNA, 101 nt, Homo sapiens
ccgcgggcggaagacaggccacccagcggggagcacggcgagcagccaggccaggagaggcggccccacaagacggacgggggcgacaagcgaaccaacgc

SEQ ID NO: 152047 - RNA, 64 nt, Homo sapiens
ccgggccgaaccggaagggcaaggacccagaagaaccacgcgcaggccagagcagcccaggccc

SEQ ID NO: 152048 - RNA, 79 nt, Homo sapiens
accgcgacccaaacacccaacgagacgggcaagagggcaggcacgagcaaggaggagccccgaaaagcaaagaaaaagg

SEQ ID NO: 152049 - RNA, 76 nt, Homo sapiens
gagcccacaacacagcggacagccagcaccagcagcgcgcacccagggcacaggagacagagaggaggagccgcgg

SEQ ID NO: 152050 - RNA, 38 nt, Homo sapiens
cgggagagggacgagcgccgacaaagcagccagaccaa

SEQ ID NO: 152051 - RNA, 67 nt, Homo sapiens
cgcccccccggaacggcaccacaaggccgggagagagcgcgaaccggaaaaagaacgacggaagaag

SEQ ID NO: 152052 - RNA, 72 nt, Homo sapiens
cgagcccacgaacccgaagcccccaaagagagaaccggagagcacccaacagaaggaaaacgagacaccgca

SEQ ID NO: 152053 - RNA, 74 nt, Homo sapiens
aaccaaagcacacagagcaaggcaaccgaccagccaaacccagacgcaaccacccccagagggaacaggaccca

SEQ ID NO: 152054 - RNA, 70 nt, Homo sapiens
gacagcccccgggggacgcaagagggacaggcgaagggccacccagcacccgaggccccccggggacaca

SEQ ID NO: 152055 - RNA, 80 nt, Homo sapiens
ggagaccaaccagcagacaaagccaggcaccacgggggaccgcacaggggcaggcacccccgacagacaaaccccagcaa

SEQ ID NO: 152056 - RNA, 79 nt, Homo sapiens
ggccgggccccgccaccgcaaggaggggacacagcgaccacgacggagaagcagggccaaggcccggacggagacacac

SEQ ID NO: 152057 - RNA, 78 nt, Homo sapiens
accccccggaagagggacccaagggcagcccccccgggaagcggcccccccccgggagcgaggaccagaacagagaag

SEQ ID NO: 152058 - RNA, 81 nt, Homo sapiens
gcagagccggacggaccgaaccgcccgagagggagcccgcggacgcagccaaggaccaggacaaaaccccagaggaacgga

SEQ ID NO: 152059 - RNA, 87 nt, Homo sapiens
ggaggacccggaccggacaacgcaacacaggacagaaccccgcacagaaaaagggaccaaaccagacaacaagaaaaagaacaacag

SEQ ID NO: 152060 - RNA, 85 nt, Homo sapiens
agccgcgccccgcaggcacccgggcccccgcccgggcacaaaaccaggggaaagaggaagaaaccagcaccgggaccggaacggg

SEQ ID NO: 152061 - RNA, 87 nt, Homo sapiens
ggcgggacgggacggcggcccagcgagggcggcccggggcacccgcacgggaagcaggcccgccacaggcaaggcagcaccccgacg

SEQ ID NO: 152062 - RNA, 73 nt, Homo sapiens
aagaacggcagcaccaccgccaagcagccaccgagcagcgcgaccaggccaagacgggaggcagcggcggccg

SEQ ID NO: 152063 - RNA, 75 nt, Homo sapiens
gccgggaaaaggcaaggcgccaggacgaaaaggcccaggccggcggaaaacccaccgccaaaagagcccagcagc

SEQ ID NO: 152064 - RNA, 82 nt, Homo sapiens
ggggcggggcacggacgccggagccgcaggcaagagcgaaggagaaaggcaacaaggcccgagcggggaacacgagagccac

SEQ ID NO: 152065 - RNA, 65 nt, Homo sapiens
aaacagggagcccaaaacaagaagcagccgccccgcgcccgggggaagaacacaggagcgcacaa

SEQ ID NO: 152066 - RNA, 82 nt, Homo sapiens
gagcgcgacgaccgccgagcggcggccgaggcggcggggggcgcgcaggccgcgacgagggcgcgaggaagaagagagggcg

SEQ ID NO: 152067 - RNA, 81 nt, Homo sapiens
ggcggacgccgcagagcgccgaggaggcccgcggggcaaccgccacgagacaccaagaggacgccagaaagcccaacggag

SEQ ID NO: 152068 - RNA, 71 nt, Homo sapiens
gacagcggcagaaagaccgcggacccaaaggagacaacaagaaggaggcaacaagggacccccaggacgca

SEQ ID NO: 152069 - RNA, 102 nt, Homo sapiens
aacagcagcaaccacacccgcccccggagagagcacgaaggacccagcagggcaccaggacccgacaaacggacagcaggaccagaacaaggagaagcaccg

SEQ ID NO: 152070 - RNA, 56 nt, Homo sapiens
ccacccagcacaccccgcgaaaggaggaggcacagagccccccaggccacccagga

SEQ ID NO: 152071 - RNA, 74 nt, Homo sapiens
gaccagaacggacagagggcaccaccacgaggcgaggggccaaccaaggaggcgaggggccccccgacaaccgg

SEQ ID NO: 152072 - RNA, 79 nt, Homo sapiens
accacagccaagcccaagcaaaagccaacagagcagcagcacgggcagcagagcacccccaacccacgcgcagagaaac

SEQ ID NO: 152073 - RNA, 78 nt, Homo sapiens
acagcaaacgcgaaagagccaggcagaaagacaaagcaggcaggcagcccgccggccccggcaggggagaaggaggag

SEQ ID NO: 152074 - RNA, 73 nt, Homo sapiens
ggaggcagcaggcaccgacgcaggcagaacagggccacaccaccggaaccaacacagggagggccaagaaccc

SEQ ID NO: 152075 - RNA, 69 nt, Homo sapiens
gaaggacggcgcccacccgccggagcagcccgaggccccagccagcgaacgacaccagaggaccagaac

SEQ ID NO: 152076 - RNA, 86 nt, Homo sapiens
ggcgcgcggcgcgccgcccggcgagcgggccggaggaaaagaaagcacaggaagccggagaaccgaaggaccgcggaccaggcgga

SEQ ID NO: 152077 - RNA, 86 nt, Homo sapiens
cggaaggggggcacaaacgaaaggcaccccaccgccagcccgggagaacgcaccagcaaaagggaacgggggcagcgccagcccgg

SEQ ID NO: 152078 - RNA, 76 nt, Homo sapiens
aaagagcaaaagacggacggaaccacaaacaaggcgcagagaaagaagagaaagcaaccacaaacacagaaaggac

SEQ ID NO: 152079 - RNA, 63 nt, Homo sapiens
accggagggggaagaccgcgcccgcggagagcccaaacaccaccaccaaggaacacgaggacc

SEQ ID NO: 152080 - RNA, 86 nt, Homo sapiens
accagaacacccccaccgagcaggcccacgccagggagcgggaggacgaggaggaggccgccacgagcaagccagcagagagagac

SEQ ID NO: 152081 - RNA, 71 nt, Homo sapiens
ggagccaggcgccggggcgagcggacaggcaagacaggccaccacgggcacgcggaagccgggccagccgg

SEQ ID NO: 152082 - RNA, 78 nt, Homo sapiens
ggccgcccgcccaaggcaggaagaggggccgcaaagaagacgaacagagaccaagaaggggaacagcaaaccagaaac

SEQ ID NO: 152083 - RNA, 75 nt, Homo sapiens
cgcgccacgcgggagcgagaccggagcgccagggccacggcccaccacccggaagcagcaaaagaccaaaccagc

SEQ ID NO: 152084 - RNA, 77 nt, Homo sapiens
ccgccgagcgcccgggggcgcccggacggagacaaggagccagaacacccccggcaccagaaacagaccgcaaagga

SEQ ID NO: 152085 - RNA, 40 nt, Homo sapiens
ccagcgccgggcagcgagaaaagagaggaggacccgcggg

SEQ ID NO: 152086 - RNA, 76 nt, Homo sapiens
accccgaggaagacaacggacggagaacggaccgaagaagccagaaacccaaaaaacaaaggagaggcgagcccga

SEQ ID NO: 152087 - RNA, 81 nt, Homo sapiens
caaaaggccacacgcgacccccgagcggaaaaacggcccggccaggccccaccgccacaagcaggggaacaccgccaaccc

SEQ ID NO: 152088 - RNA, 69 nt, Homo sapiens
aaaggaaaaacccaaggacaacgacgggccccaaaggcgaagaaggccacggcaggggaggaaaccagg

SEQ ID NO: 152089 - RNA, 83 nt, Homo sapiens
cagaagcccgcagcaggggcagcaccgacggaagagagggccccgcaagggggcccgggccgaaggccccggacgagacggcc

SEQ ID NO: 152090 - RNA, 68 nt, Homo sapiens
gggaccgaaaggagagcaaagccccgcgagacagaccggaacggacaagacgaaagcgaacagagaac

SEQ ID NO: 152091 - RNA, 85 nt, Homo sapiens
ccccgcgccggcaggggcgccccgcgccggccccggcggcccagccgcgggcacccccgcagggaaaggaaagcaagccaggagg

SEQ ID NO: 152092 - RNA, 75 nt, Homo sapiens
cgccgcgacggccccgggaaggagagacccacggcagggggaggccgggcgggggcagccccccccgccacgaca

SEQ ID NO: 152093 - RNA, 81 nt, Homo sapiens
ccgggaggggacggccgccggagccgcgaggccaaggacagcaccagacaccgcgggcacgcaaggaaccgcagacaaccc

SEQ ID NO: 152094 - RNA, 48 nt, Homo sapiens
gggacgagcagagaacagcaaaagagcacaaggaaggccgcggacccc

SEQ ID NO: 152095 - RNA, 92 nt, Homo sapiens
gccacacccccccgacgccgcgcggggacgcaagcccgccgacacagccaccaagaaggcacaagcagaacgggaaaaggggcggaaagacg

SEQ ID NO: 152096 - RNA, 55 nt, Homo sapiens
ccccacacgcaggaaacacgaggacaacaggcacaaagagagaaggaacacccac

SEQ ID NO: 152097 - RNA, 69 nt, Homo sapiens
ggagcacaacgcacaaaaggggacaacaggcacaaagagagaaggaacacccacagggcagacagagaa

SEQ ID NO: 152098 - RNA, 72 nt, Homo sapiens
aaaggaacgccacaaagaggagggcaaagcagaaaagcccacggcaagaagcccggcgccaaggaaaaagac

SEQ ID NO: 152099 - RNA, 61 nt, Homo sapiens
ccggcgagacgagaacgcagaggagggagacagagggggcacccagaggccggggaccgcc

SEQ ID NO: 152100 - RNA, 74 nt, Homo sapiens
cggggacaccaacaggacccgcaggccgaaacagaagcccgcgaagccgggaagaccaggagcagaaaaaccgc

SEQ ID NO: 152101 - RNA, 83 nt, Homo sapiens
gcggggcggacgccggggagacgcaggcgaggacagcccagagcaagcacacggaggcccgggagccagaccgggagcccgcc

SEQ ID NO: 152102 - RNA, 81 nt, Homo sapiens
accggcggaaggccgcgcagaacgagaaaacgcacacacacaccggcaccacagggcgcccaaggccgccacggggcacag

SEQ ID NO: 152103 - RNA, 57 nt, Homo sapiens
cccacaagagcgggacacagaagggcagggagaagcagcgggacaaaagcaggaagc

SEQ ID NO: 152104 - RNA, 58 nt, Homo sapiens
cggcgacaacacccggccccgagacagaagccggaggaaagaggaccaggggagcgag

SEQ ID NO: 152105 - RNA, 75 nt, Homo sapiens
gaggaaggaccccgccaaaggacaacggggacaacagcgacaaagggacgcggaggaccagaccccaccaagaac

SEQ ID NO: 152106 - RNA, 48 nt, Homo sapiens
ggagagcaaggaagaaagcagcccaggccaggccggccagcgggcaaa

SEQ ID NO: 152107 - RNA, 54 nt, Homo sapiens
gaccccgacaggaagagcggaagagagggcgaggcaggaagcgggagagaacac

SEQ ID NO: 152108 - RNA, 40 nt, Homo sapiens
agcgggcagaacagcgcggcaggggggcggccggccgcag

SEQ ID NO: 152109 - RNA, 82 nt, Homo sapiens
gcaaccaaccaaaacagccagccgcagagaccccaaaccccggcccgacaggagcacagacaaagcgccgcacccaggcgga

SEQ ID NO: 152110 - RNA, 77 nt, Homo sapiens
ccagacccaaacggcagagacagcagaccaaagccaacccacaagaaagaccccaaggagcgaagggcgacccccgg

SEQ ID NO: 152111 - RNA, 79 nt, Homo sapiens
ccgagccgcgggggaaaaccaaagagccggacgcaggccccgccaccccccaccggggacaggaggcagcacggcagga

SEQ ID NO: 152112 - RNA, 69 nt, Homo sapiens
cccaaaaacgcaaagcacgggaaaggggacccagaaagaagcacaaaacaaacgacagcagcagagaaa

SEQ ID NO: 152113 - RNA, 75 nt, Homo sapiens
gaaggaccaagaaccagaagaagaagaggacaggcccaggaaagggaagaacaaaggaagagagcaggaaggcca

SEQ ID NO: 152114 - RNA, 79 nt, Homo sapiens
cggccccgaggaagcaaggccgcggggggagaccccaccaccggaaacgcaagcagaaccaaccagacccgcaacaaaa

SEQ ID NO: 152115 - RNA, 91 nt, Homo sapiens
gcgggcccgcgcccggccggacccgggcccgagggacgaacagcggggacgccccagcagaccgcccaggagaggaaagcaggaggaaaga

SEQ ID NO: 152116 - RNA, 70 nt, Homo sapiens
gacaccaaggaaaggcgcaccaaggaacacgacgcgaacaagaggcgccagcgggcgcgccggaagaaca

SEQ ID NO: 152117 - RNA, 72 nt, Homo sapiens
cggcccgcgcggaccagcgcgcccacagcccccaccaacacaggaagaacgggaaaagaacggcaaacccaa

SEQ ID NO: 152118 - RNA, 73 nt, Homo sapiens
ggagaccccccaggacaacagcacacgcacccaagcggagggcgacagaccagagaaagagaagggccaaaca

SEQ ID NO: 152119 - RNA, 111 nt, Homo sapiens
ccggagccgcccaagccgcgccccagagagcgcccgagagaacagggggccgcggccagggccaggggacacggaagcagcgacggcgcgaccccggcccgggcggggcgg

SEQ ID NO: 152120 - RNA, 71 nt, Homo sapiens
acagaggggaggaacccacccacagcacaagcccaggcaaggaggaacaggaaagggcagaagaagcagag

SEQ ID NO: 152121 - RNA, 53 nt, Homo sapiens
ccggcaggagagacgggagcccgacacaggcggcaccaggacgccgaaaagcg

SEQ ID NO: 152122 - RNA, 65 nt, Homo sapiens
ccgacgccaggcagcgcccccaaacggacacagaaaacaagggaagagggaaaccggggacaacg

SEQ ID NO: 152123 - RNA, 76 nt, Homo sapiens
cgggcacacgacaggcccggccagagcggcaagcaagaccacacccaggaagaagagagggcgaaggaggccacac

SEQ ID NO: 152124 - RNA, 38 nt, Homo sapiens
caacaggcagcgcgacgggaccccgaaaaagaccagga

SEQ ID NO: 152125 - RNA, 81 nt, Homo sapiens
agaaccgcggcggccggagcggggacggaaagagagccgcagcgcagaacaagggaaaaaagggcaaaaagggcaaaaaag

SEQ ID NO: 152126 - RNA, 79 nt, Homo sapiens
gacacgcccccgccgccgccggagccgcagcacggcgacacaccaaagaaaaaacacaccaagcagaaacggagccaag

SEQ ID NO: 152127 - RNA, 73 nt, Homo sapiens
agcacaccgaaagccacagcaagaaggagagacagccccacagacgcaggcgcagaaaagaagcacaagaaaa

SEQ ID NO: 152128 - RNA, 79 nt, Homo sapiens
ccacagcaggaccaggggccaaagggcagggggcccggccgccgaggccccgggcaaagaggccagcgcgacagaagga

SEQ ID NO: 152129 - RNA, 81 nt, Homo sapiens
cagaagggggaaagagaccgggacagaacagcaggaaccgaaagacgacgcaccgaaacgaagagcaacgaagacaggaga

SEQ ID NO: 152130 - RNA, 61 nt, Homo sapiens
ccacgcgcggaaggcagcgcccagcagcgcagaacagcagaccagaggcccaggccccgca

SEQ ID NO: 152131 - RNA, 83 nt, Homo sapiens
aggacgagcagcaagcagggagcaagcagccacaggcagccggccagaaccacagcacaaaggaagaacgaagaggacaagga

SEQ ID NO: 152132 - RNA, 71 nt, Homo sapiens
cggagcccaggaagaggacacccccgaaccgcaggaggaaaaggggaagaaggccaaccgggggccaaggg

SEQ ID NO: 152133 - RNA, 68 nt, Homo sapiens
ccaaacacaaaggaagaagcccggagacgaccaagagcgcgccagggagaggaagggcaccagagagg

SEQ ID NO: 152134 - RNA, 80 nt, Homo sapiens
ccgaaaccagcccacggaaagggaagaaggaggccgcaagggaggcgggaggcggcagaagcagccagaggagggcacag

SEQ ID NO: 152135 - RNA, 88 nt, Homo sapiens
aggacgcagccgggccaggcaggggcggaggcccgccccccacaggagaggaaccgcacccaaggacggcggaggcccagcccccgcc

SEQ ID NO: 152136 - RNA, 79 nt, Homo sapiens
gcgcgcaaggagcccgggacggagaggccgcaggagcacaaagccaacaggcagaccagagacagcgccacgcacccgg

SEQ ID NO: 152137 - RNA, 73 nt, Homo sapiens
gcccgcaccccgcccggacagcccagaccgggaaccagagcgcagaggcaggcgggccgggggcagcgagccc

SEQ ID NO: 152138 - RNA, 78 nt, Homo sapiens
ccaggccaagagggacccacccggcggcgaagccgacgagcccgaacagacgcaccagcgggaggaagagggacggcc

SEQ ID NO: 152139 - RNA, 74 nt, Homo sapiens
cgcgccccacgggccaggaggggcacagagcagaggacaccacaggaaggaggcgcagagagaaggccaggcgg

SEQ ID NO: 152140 - RNA, 70 nt, Homo sapiens
gccagacacaaacagcaaaccgacaccagcgacacaagcgcgagggaaccacagaggacaggcgaggggg

SEQ ID NO: 152141 - RNA, 69 nt, Homo sapiens
gcagcccccagagcggaacacagaccgaaacacagcagcaggagccagaaaaaagcaaacacagcggac

SEQ ID NO: 152142 - RNA, 82 nt, Homo sapiens
aagaccggaccagccagaggacgcgggccgaggagagcggaggagggggaaagggcacgggccgcaggaagagagaaaccgc

SEQ ID NO: 152143 - RNA, 62 nt, Homo sapiens
cgcgcagcgcgacgcgcgaccagaccggcccccccgagcgcgagaccgaggcacgggcaggc

SEQ ID NO: 152144 - RNA, 74 nt, Homo sapiens
agcgggaggagaagaacggccgcccagggcagggagacgacaacaaccacgagccaaacaggcagacagacgga

SEQ ID NO: 152145 - RNA, 76 nt, Homo sapiens
ggccggcggcgcgcggcgcgagccgcagccggcccgccggcgcggggaggcccagcccgccgcagggccaccccgc

SEQ ID NO: 152146 - RNA, 60 nt, Homo sapiens
gcagcacccccgccccccaggcgacgagacccagggcaggcagagggcaccacagacaag

SEQ ID NO: 152147 - RNA, 57 nt, Homo sapiens
caccgggagcggcgaagaggcaccggaggagaaggagaaaccaagagaaagaaggag

SEQ ID NO: 152148 - RNA, 79 nt, Homo sapiens
ggaggcgaggcccgcaccggaagaggaacgcaaggaagaaaagggaacgccaccgccccacggaaggaagaaaaggggg

SEQ ID NO: 152149 - RNA, 62 nt, Homo sapiens
caccccaccaacacgggacagcagaccacagcccggcaggcccaaaaacccaaagggacaga

SEQ ID NO: 152150 - RNA, 77 nt, Homo sapiens
ggaggcggcggagcgcgagagccgagcggaccagacgaccacccaaaggacaaagccaagaaagaggcgaaaacccc

SEQ ID NO: 152151 - RNA, 81 nt, Homo sapiens
ggaggccgcgggccgggcagcagcgcagccggaggaagccgccgcacccaggcggagccagggcacaacagcacacaaccc

SEQ ID NO: 152152 - RNA, 57 nt, Homo sapiens
caggagccacggacaagaccaaaagggggagaggcaccagcaacagaccaaccgcag

SEQ ID NO: 152153 - RNA, 97 nt, Homo sapiens
aagacacagacaggaagaagaaaagagaagcaccggggaaagaaaaggagaggggagagcaagggaaccaagcaaacaaaagaagaaagaagaaggg

SEQ ID NO: 152154 - RNA, 73 nt, Homo sapiens
gcggcgccgcgccccagaccagagcccaccaagaaaacacagggagcgcaacagagacagacccaccacagga

SEQ ID NO: 152155 - RNA, 65 nt, Homo sapiens
aagacgaggcccccaagcggggaggcagaaccccacccgggcagcgcgaagaccgggggcagccc

SEQ ID NO: 152156 - RNA, 90 nt, Homo sapiens
ggaccgagccgcgaggacacgggcgcaaccgcagcacacagcgaccgggagaacaagacgaagccccagcgacgcagaggacccagccaa

SEQ ID NO: 152157 - RNA, 74 nt, Homo sapiens
ggcaaggccaccacgccccgaaaaggcaccgggccgagacggcccagacgcgcggcacaggcacgcgcgagccg

SEQ ID NO: 152158 - RNA, 75 nt, Homo sapiens
cagagaccaacgcaagcagggagaagacggacgaaccacccacaaccaagaggagaaagacgcagaaagaggggc

SEQ ID NO: 152159 - RNA, 66 nt, Homo sapiens
ccgagcggggaccccagaaaaacagaaggaaaagagccggacgaacacaaaggggcagcaacacca

SEQ ID NO: 152160 - RNA, 60 nt, Homo sapiens
cagcagccgcccaccgccgagaagcccagacggaagccgcggaaggacccaggccaagcc

SEQ ID NO: 152161 - RNA, 55 nt, Homo sapiens
aaggcggcccaccccagagcaccggcagacaaaaggcaacccagaaacagaaggc

SEQ ID NO: 152162 - RNA, 78 nt, Homo sapiens
gcagccgccaaaaaccggacagccaagcaacagcccagcaaggggacgaagccacgacagcagagaggagcacggcag

SEQ ID NO: 152163 - RNA, 73 nt, Homo sapiens
aggaggagcccggccggccgcgacgcaggccccacgaggggagggcgagccgccaggcgcgaggacggcgaga

SEQ ID NO: 152164 - RNA, 73 nt, Homo sapiens
ccagcacccgccagcggccagcggagaagcagccgacacgagcggcaaaaacagcgaaaggagagcacacccc

SEQ ID NO: 152165 - RNA, 116 nt, Homo sapiens
gcaggccgacaccgccgcagaacagggagcccgacagcggaggcgccggcggcccacccggaagacagccaaaggcagggaagaaaaagaagacaccagagaaacacgagagcagc

SEQ ID NO: 152166 - RNA, 66 nt, Homo sapiens
ggggaggccacaggcgcaagcagacccgcaaccgacacacagcaaaagcaaaggccagacgcacgc

SEQ ID NO: 152167 - RNA, 77 nt, Homo sapiens
gcggagcccgcagaccgcagaaggccggagacaccagcagaaaaccgaacgaaccgaggcgcaaccacagggccaac

SEQ ID NO: 152168 - RNA, 58 nt, Homo sapiens
gcgcggcgcggggccccgcggcggaggccaaccgaggagcaccccacgccaaaacccg

SEQ ID NO: 152169 - RNA, 62 nt, Homo sapiens
gaggccggccacgccccgcacgacccacaggaccgcgaacaaggaggccacaaaacacccgg

SEQ ID NO: 152170 - RNA, 79 nt, Homo sapiens
gacgggagagcgccggcggagaaaaaggacagagcgggagccaccagcgccaaagggaagccaggagcccgggggcacg

SEQ ID NO: 152171 - RNA, 61 nt, Homo sapiens
ccaggcccacgacccaaaacggaagcagcagaaggccccccaccaggcgcccaccccacca

SEQ ID NO: 152172 - RNA, 68 nt, Homo sapiens
ccagagaaagagacacacgaccaacaccaaggaagcgcaccggcgccgagacccagacccaccggagg

SEQ ID NO: 152173 - RNA, 70 nt, Homo sapiens
gggaggaaagggagagacaagagaggagacccaacagacggggagagggcacggaaagaccaaggaggcg

SEQ ID NO: 152174 - RNA, 82 nt, Homo sapiens
cgcgccgccgcccccagccccccgcccggggagggcaccagccacaagggcgcagaagccggcagagcccaagagacaacaa

SEQ ID NO: 152175 - RNA, 78 nt, Homo sapiens
gagaaagcaccgaccaacacccaggagaagagcgccaggcgccgcgggggcacacagagaaaaaaagggaacaaaaca

SEQ ID NO: 152176 - RNA, 71 nt, Homo sapiens
cagggccggccccagcccggcgcgccaagggcgcagcgcaaggaccccacaagcgaccggcaaagcgccag

SEQ ID NO: 152177 - RNA, 79 nt, Homo sapiens
cccccaccagaggacgggaggagcagcaacagggggaccggaggagagaacaaccaagcggaaacccacccaagcccaa

SEQ ID NO: 152178 - RNA, 82 nt, Homo sapiens
ggacaagcacccggggggcgcaccagaaaggaagcaaagcagcccgaggaggcacgcaaaacaacagggggcaaacaagacc

SEQ ID NO: 152179 - RNA, 69 nt, Homo sapiens
cggagagaggacagggcaggaaccgcagaaacagccaaacaagaagaagagaagggacgaaccagaaca

SEQ ID NO: 152180 - RNA, 67 nt, Homo sapiens
cagcccaaacgccccacgaccagcaccccggcacaagggaaacgcacaaccccgcccagccggcggc

SEQ ID NO: 152181 - RNA, 57 nt, Homo sapiens
cgcggacgcaaaccgagccccgcgccgcagggcgcaagggaacacaaccccaccgag

SEQ ID NO: 152182 - RNA, 79 nt, Homo sapiens
ggccgcggaggaaggccaggagggacgccgagacgcaagcaggggcgacgacccacgccgggagggacggcgcggggga

SEQ ID NO: 152183 - RNA, 72 nt, Homo sapiens
gggcccgggccacaacccccacgcgaagagcccacgcgccaggcggaggcagggcgcgaccggccacacaac

SEQ ID NO: 152184 - RNA, 83 nt, Homo sapiens
ggaggcccccaccccggcccgaagaggacacggaccagaacagcaagggcgcaaggacagaagaagcaacccccccgaacaag

SEQ ID NO: 152185 - RNA, 78 nt, Homo sapiens
ggacgaccaggcaccgcgcgggcagagaaggagggggcagagcacggcaggcagaaggggccaacccgggggaacgca

SEQ ID NO: 152186 - RNA, 78 nt, Homo sapiens
acagcggccccccagaaaagcaaaccagcagcggggaacagaggccgaaaggaaggaaaggagggagcggcccagcgc

SEQ ID NO: 152187 - RNA, 81 nt, Homo sapiens
aagacaccccaggagcccagccacagccaccggacccccagagagcacaggagcacgggagcaggggcagacacgggacac

SEQ ID NO: 152188 - RNA, 57 nt, Homo sapiens
gcggcgcggggcggcgggccggccgaaggggccagcacgaaagcagccaggagaaga

SEQ ID NO: 152189 - RNA, 71 nt, Homo sapiens
gacgcggagggggaccgccgccaccggcgggaagagcaccagggaacagagggacaccagcacgagaaggg

SEQ ID NO: 152190 - RNA, 71 nt, Homo sapiens
gaagagcaaggaaaagaaaagggggaaggaaacccgcgggaaccaggagccgacaacaacccgacgcaagg

SEQ ID NO: 152191 - RNA, 80 nt, Homo sapiens
cgccccccccgccccccaggaggggcgagagggagccgcagcgagcagcgcagcaggggccacaaagacaggcaaaaggg

SEQ ID NO: 152192 - RNA, 79 nt, Homo sapiens
aacggggacacgcacgagagaggcaggggaccccccgagggcagcccggccccagcagggcgggggccacagccaaagg

SEQ ID NO: 152193 - RNA, 70 nt, Homo sapiens
aaagggccaaagaagggagagagggcccaacaaccagcaggaagggcgccaaaccaccgcggagcccggc

SEQ ID NO: 152194 - RNA, 76 nt, Homo sapiens
cagacgcagggcagggccccgcccggcggggaaggggccagcacgaaagcagccaggagaagagcacaagaaacaa

SEQ ID NO: 152195 - RNA, 72 nt, Homo sapiens
aacgaaacacgaaagggcagcagagagagcagccacaaaaagaaagcaggcaagccacggacaaagggccac

SEQ ID NO: 152196 - RNA, 73 nt, Homo sapiens
gacaggaggccccggaagacggcacacacagaccagccaccacaacagcggcacagaagacccggcgggagaa

SEQ ID NO: 152197 - RNA, 71 nt, Homo sapiens
acaagacccaagaaggaagaaagagaaagaaggaagaaccaggcgcaggagacacaggcacacggggcggg

SEQ ID NO: 152198 - RNA, 88 nt, Homo sapiens
gccgaccaccggaacggacagcccccccagggcccgacccaggcaagcgagcaggcgagcaggagcccacagccgagcagcggcccag

SEQ ID NO: 152199 - RNA, 67 nt, Homo sapiens
cccaggaacaagcgagaggcaacgagaccaggacagcaaaaacgcgcagggaaccaggaacagacga

SEQ ID NO: 152200 - RNA, 60 nt, Homo sapiens
cacgcacgccaagacgaggggcccaaggagaccagccgcggccacacccgaaggacggaa

SEQ ID NO: 152201 - RNA, 77 nt, Homo sapiens
ggcaccgcccagaagggaaagcgccgccgccgcggagacccgggcagcgcccaccgcggagcgcagagccccgagag

SEQ ID NO: 152202 - RNA, 77 nt, Homo sapiens
gggccgcaggccgcgagcagcggacgccggccgccgcaggagaacagagcgggagagccccccacgacccagaacca

SEQ ID NO: 152203 - RNA, 70 nt, Homo sapiens
ggaggcggaaccccagagaaacgacccaaaaagccgaagccccaagggaggaagaaaccgaagagggaaa

SEQ ID NO: 152204 - RNA, 84 nt, Homo sapiens
acaaacgcaagagcagaaaagcaaccagcagcaaccagaaccccgaccccacccgaagagaggaacaggagccagcacccgccg

SEQ ID NO: 152205 - RNA, 74 nt, Homo sapiens
agcaacaagaaggccaaaaaaacccagcggaaagcaacaaaagggagaaccaggggaaccggaagacgcgaaga

SEQ ID NO: 152206 - RNA, 81 nt, Homo sapiens
gagcgcacgaggaggcgcgcagaaccagaccgggagcacgcacccacgaggggaaccaagaccaggacaaagaagacccgg

SEQ ID NO: 152207 - RNA, 64 nt, Homo sapiens
ggacaaaaaacagacgggccgacgcaggagaggaaccaagaggacaacagagaaacacaaaacc

SEQ ID NO: 152208 - RNA, 72 nt, Homo sapiens
gaggcgcgcaggagccaagccagaagaagccaaaggcccacaacaaagagaggaagccagaagacgagaagc

SEQ ID NO: 152209 - RNA, 37 nt, Homo sapiens
ccggagccccccaggaggaggagagcacccagacgcg

SEQ ID NO: 152210 - RNA, 56 nt, Homo sapiens
caaaaagaaagcaagagaagaggggccgggagaggaaggccccaagcagccagcag

SEQ ID NO: 152211 - RNA, 78 nt, Homo sapiens
ccccccaccagccacggcgaacccccccaacggaacagcaccccccaaggacacgcaggagaaagaaggacgccgaga

SEQ ID NO: 152212 - RNA, 78 nt, Homo sapiens
ccgcgccccccgccgccgccgccgcgcgccaaagcgcgccgccccgggcaaaaggcccacgaagaggacgccagggcc

SEQ ID NO: 152213 - RNA, 76 nt, Homo sapiens
ccagcagagagcggccccacaacaaaagaggccagcccccagagggaggccaccggaaaaggcgaggagggacgcg

SEQ ID NO: 152214 - RNA, 67 nt, Homo sapiens
caagaaacagcagcaaggaacgcgcagccagcaccagagagaagacgacgcaccgcaggcagacaaa

SEQ ID NO: 152215 - RNA, 115 nt, Homo sapiens
cgccgcagaacagggagcccgacagcggaggcgccggcggcccacccggaagaccaggagaaggagagggaagggcaaggagaccaagaaccccggaggaggggaggagcagagc

SEQ ID NO: 152216 - RNA, 80 nt, Homo sapiens
gcgcggcccgggcgccacgagccggcggcggacggcagcgggcacagagagacccagcgacgagcaaaaggccaaggaag

SEQ ID NO: 152217 - RNA, 74 nt, Homo sapiens
gcagcaaagagggaacagcaccacccgaaggcccaaaccccgccagagccgacgggcaaggcaggaagaagaga

SEQ ID NO: 152218 - RNA, 78 nt, Homo sapiens
ggaccgcagaaagacgaaggcgaacaggaacaaagagagagaaggggacacggaaaacgacagaacgaagcagaagaa

SEQ ID NO: 152219 - RNA, 61 nt, Homo sapiens
gccggagcgagaccgggcggccacagccgcagggagaacccgaggcggagcgggggggcac

SEQ ID NO: 152220 - RNA, 75 nt, Homo sapiens
acagcggacaagaagaagacagaacgcccccaccaccgcaaacagggaagggggccagacaaccagggaagcaca

SEQ ID NO: 152221 - RNA, 80 nt, Homo sapiens
acaagaaagcgccaaaaacaacaccaaaaagccgcagggagacaaagcaggaggacacaagaagggaggaaaggcggacc

SEQ ID NO: 152222 - RNA, 52 nt, Homo sapiens
cccggcgccggccgagaaggcagaggcgagaagcccacaccagcaaggcaag

SEQ ID NO: 152223 - RNA, 63 nt, Homo sapiens
cggaaggagacccagagaaagagacggacaagcggaagacccccagccaaaccaccacgacac

SEQ ID NO: 152224 - RNA, 80 nt, Homo sapiens
caaagagccgggggaaagcggacgaaaggaaggcagcaacaaggaagaggcaaggaacacaagaacaaacagaaacaaac

SEQ ID NO: 152225 - RNA, 74 nt, Homo sapiens
gcgcggcccggcccggcgggagagaggcgcaggccaaggcggaggcagggccacacaggagacagggccgcagc

SEQ ID NO: 152226 - RNA, 79 nt, Homo sapiens
ggaggcgcgcagaaccagaccgggagcacgcacccacgagggacaaaaagcggagaaccacagaaaacggccggggaag

SEQ ID NO: 152227 - RNA, 66 nt, Homo sapiens
acaggaggagcagaggacacgaaaagaagcaagaagggaaacaggagaaccgacagaaaccccaag

SEQ ID NO: 152228 - RNA, 68 nt, Homo sapiens
gcccaggcccaggccgcggccccccgcgcgcccgggaacgagaccaggaggaaacagcggacggggac

SEQ ID NO: 152229 - RNA, 79 nt, Homo sapiens
cagagacaagagagaggaccaaaccacccaggacacggagcagcgggagcccagacgccgcgggagcaaaagagaagcg

SEQ ID NO: 152230 - RNA, 76 nt, Homo sapiens
ggaccccggagcccagaagacagagggcgaggagggagccaggagcgcgggagcgaaggccagccacacgcgcacc

SEQ ID NO: 152231 - RNA, 76 nt, Homo sapiens
cccccgcccccccccccacgcaaccccagaccaacacacaacaagcagaccggaagaccgacggaagaccacaccc

SEQ ID NO: 152232 - RNA, 74 nt, Homo sapiens
caggagccacagacgaccggcacacagcagagagaagacaaggggacggcagcccaaagaaaacccagaggccc

SEQ ID NO: 152233 - RNA, 49 nt, Homo sapiens
accggagaccagaaaagggacaaagccaagcaaaaacccagaaaccaaa

SEQ ID NO: 152234 - RNA, 87 nt, Homo sapiens
agcccagacaccaggaaaccccagaggaggcgggcccggagcaggcaagccacaacagaaacacgccggggaggccgagccccgacc

SEQ ID NO: 152235 - RNA, 80 nt, Homo sapiens
ggcaggcagcacccacccggggcacacgagggcaccaggaccagcaggagccaggccaggcccccaaaccggcacgggcg

SEQ ID NO: 152236 - RNA, 73 nt, Homo sapiens
cagagccagccaagccagaggccgcgaaaggaaccagcaccagccggagagccaaagcgaagcgcgaacgcag

SEQ ID NO: 152237 - RNA, 77 nt, Homo sapiens
ggccgcgggaccgggggaaagggcagccgggccgcgggcccggcgcaggagaccagcagcaggcaaagaccagcaag

SEQ ID NO: 152238 - RNA, 74 nt, Homo sapiens
cccacagaagggagacagggagaccaccaaaaagaaaagagaaggggcagaaggaaggggaccaagccaaccca

SEQ ID NO: 152239 - RNA, 75 nt, Homo sapiens
aacaggccaaggggcccacccaaagcgcaggagaaacggcaagggcaaaaggaaaaaagaagaccagaaccacag

SEQ ID NO: 152240 - RNA, 70 nt, Homo sapiens
gcgagcccgacgggacaggcccaccggaccgcagaaacgaggcgggaggagaaaaggaaggaaggagccc

SEQ ID NO: 152241 - RNA, 75 nt, Homo sapiens
cccgaaccaccccgggagcagagcgacaagaacccagcaccgaaagggagggaggagggccaaaaacagaaacag

SEQ ID NO: 152242 - RNA, 81 nt, Homo sapiens
gggacagagggagccaggcagagcgccgacaccagggaccaggcggaccaggacgggaggcagacccacacggggaccgcg

SEQ ID NO: 152243 - RNA, 87 nt, Homo sapiens
gcgagcagagccgcccagcccgccagcgcgccgggacggacgagccgggaggggagacaccgaccccaagcgagagagcagaagaca

SEQ ID NO: 152244 - RNA, 84 nt, Homo sapiens
ccccccagccgccgaagaccgcccgcccggggcggggacagagagcaccagcacccacggcaccgcccccccacgcagccacgg

SEQ ID NO: 152245 - RNA, 77 nt, Homo sapiens
ccccaaggacccgggcgacggaccaagcaccaggagccaaagaagaggaaggcccacaaagagccggagcacaacgc

SEQ ID NO: 152246 - RNA, 76 nt, Homo sapiens
acggaaggggagaaccaaccaggcaccaaggacgaaagacacccagcagccagccgcagcaggccgccgacgaccc

SEQ ID NO: 152247 - RNA, 77 nt, Homo sapiens
cagaacaaccgcggggcacacaaagagcaaaggcagacaagaccagccacaaaaagcggacaaagcaagagagaagg

SEQ ID NO: 152248 - RNA, 78 nt, Homo sapiens
accgagggaggacaccggaccccggacgcgggaaaggggcagggaccccacacaaacaaagaaaggaaacgcaaggaa

SEQ ID NO: 152249 - RNA, 53 nt, Homo sapiens
agcaagccgagaaagggaggcggaacaggcaagaaaaggagaagaaagaagaa

SEQ ID NO: 152250 - RNA, 64 nt, Homo sapiens
acaggaacaaacgagcacgcaaagaagcagaacagacaaacagcgaccaacacacaaaacaggc

SEQ ID NO: 152251 - RNA, 78 nt, Homo sapiens
ccggagaagcggagaagacaagagcccgcgggcacgacccggacccgcgccagggccgggaccgggacagaggaaggg

SEQ ID NO: 152252 - RNA, 79 nt, Homo sapiens
acagcaagcgaagccgaaaaagcgcccgagacgggcccgccgaaaggggcaagacgccaagagaaaaggcgagagcaca

SEQ ID NO: 152253 - RNA, 83 nt, Homo sapiens
cgagggagcgccgcggcccgcgcgcccgcgcggcggaggagagcgggcaccccagcaccccggccaccaacaccacgagccaa

SEQ ID NO: 152254 - RNA, 87 nt, Homo sapiens
aagcggggagcgcccgcgacagaggagggaggaaaacaaccgagggcagaagcgaggaaaacgccacgacagacacaaccaagcacc

SEQ ID NO: 152255 - RNA, 55 nt, Homo sapiens
gggcaacacaagaacagaagaccagcacagccagaggaccccgcgagcaagaagg

SEQ ID NO: 152256 - RNA, 66 nt, Homo sapiens
caagagacacagagagcgccggcaccaggcgggaggagaaggagaaacggaggacgcccccacaca

SEQ ID NO: 152257 - RNA, 72 nt, Homo sapiens
ggagcgggcaggaccggggcagggcccaaccacgaagaagaagcgagcggcgcagaagacagaaacgcacgg

SEQ ID NO: 152258 - RNA, 77 nt, Homo sapiens
gaagcggcgccgaaggcccggaccgccgggcgcgcggggccccgggccgaggcggaaaccccaggcacccgcggccc

SEQ ID NO: 152259 - RNA, 83 nt, Homo sapiens
cgaacgggggagcgggcaggcagaagaaggggaacccgcgcccaccaggagacacacagaagacgaaagacgaaagaagaaca

SEQ ID NO: 152260 - RNA, 98 nt, Homo sapiens
cacccccccggagacacccgacacgacccacggccgcccagcgccaggcgcccggggaaggagaagcaagaagggaccagcaggccaaccgggcgccc

SEQ ID NO: 152261 - RNA, 68 nt, Homo sapiens
caggcccaagaaaagaacacggaccaacagccacaacaaagacagaggaccggaaagcaggaaagcac

SEQ ID NO: 152262 - RNA, 57 nt, Homo sapiens
acccgaccacgacaaggagggcagcaggaggggggaagcaggaggcacggaggggac

SEQ ID NO: 152263 - RNA, 72 nt, Homo sapiens
cccaaagaaggcccgcagaccgaagagagaaaaggaacagccgaagccaggggcaagcgaaaccacagaaga

SEQ ID NO: 152264 - RNA, 76 nt, Homo sapiens
accacaagaaaacaggggagggccaaagagacagaacggaagccacgcacgccagaaaaacaaacacagggaggaa

SEQ ID NO: 152265 - RNA, 62 nt, Homo sapiens
ccagggccccgggccgccgggaggcggcagcagaagagcagcccgacggccaggaggcgaag

SEQ ID NO: 152266 - RNA, 64 nt, Homo sapiens
gaaccggagacccagccccgagcaccgcgacacacacccccagccaaaggcagggaagaaaaag

SEQ ID NO: 152267 - RNA, 72 nt, Homo sapiens
ggacgaggaggaaacaaagaagagacacgcaagcgaggagcgacgaggccggaggggaacagcaaggacccg

SEQ ID NO: 152268 - RNA, 52 nt, Homo sapiens
cgacccccagaagcaggccacggggcgccggccacgaggggcggaagaccag

SEQ ID NO: 152269 - RNA, 74 nt, Homo sapiens
aaggggggagagacaagcaagcagggagaagccaaaaggacaggcagagggcccaacaacagaagaacccgcca

SEQ ID NO: 152270 - RNA, 75 nt, Homo sapiens
acacggaacagcaccgccgcaggcacgagacagcggaaagaagaaaaacaacagcagaacaacggaagaaagaaa

SEQ ID NO: 152271 - RNA, 79 nt, Homo sapiens
gccgacggacccggaaaaccggcccccaacgacaaaagacgcgaccggaaaggagagagagacagaaccacagacaagg

SEQ ID NO: 152272 - RNA, 74 nt, Homo sapiens
ggaaagaaccagagcgcaaaagcaagaggcaaaaaggaggcgccccagagcacacagcaggccccagcccaaac

SEQ ID NO: 152273 - RNA, 76 nt, Homo sapiens
caagacaaaacaggaaacaaggaaagaagacaagcacagaaggcccaggaggcaagagcgagaagagcgcaagaca

SEQ ID NO: 152274 - RNA, 74 nt, Homo sapiens
caacccccccacgccacacagggaaggcacacagcaggccacaaaagacaagacacgagaagggccaagaacaa

SEQ ID NO: 152275 - RNA, 74 nt, Homo sapiens
cccaacagcagagacagcagccacagcgccgggcagccagcacaagacagacaaacggagagacgggacaccag

SEQ ID NO: 152276 - RNA, 50 nt, Homo sapiens
gaagcaaacgaagggcaagaacaaaaaaaaggaagggaaacaggaggagg

SEQ ID NO: 152277 - RNA, 68 nt, Homo sapiens
cccacccgagcagccagagcggaccggggcagaccaaacggcaagcgaagcaaaccaacaccccccgg

SEQ ID NO: 152278 - RNA, 37 nt, Homo sapiens
ggaggacagccagagacaagcagacggagcaaagaga

SEQ ID NO: 152279 - RNA, 42 nt, Homo sapiens
gaaaaagggccaggccccaggggcaagggccggaacagccac

SEQ ID NO: 152280 - RNA, 71 nt, Homo sapiens
cgcgcggagccagcgccacggccgcaccaggagcgcacgcaagggcgcgcccggcacacgaaaccacgacc

SEQ ID NO: 152281 - RNA, 74 nt, Homo sapiens
gagcgaacgggacagcccacacccggcgcggagggccggcgggcgacccgcccgacccggccgccgccgacccg

SEQ ID NO: 152282 - RNA, 76 nt, Homo sapiens
cagggaagagaccagcgaaagcaggcccaacgaaccagaggaggccaacacgccaccacccggggccaggaacgga

SEQ ID NO: 152283 - RNA, 53 nt, Homo sapiens
cacggcgagcagccaggccaggagaggaagaccgcccccgacaaagaagacgc

SEQ ID NO: 152284 - RNA, 75 nt, Homo sapiens
ccggggcagggccgggagagcggaggcgagggcgccggcaccagggcgcaaccggaaagggaaggccacaagacc

SEQ ID NO: 152285 - RNA, 72 nt, Homo sapiens
aaacaccgaggaagaaaaccgaaccggaaacgaaaacgcgggaggagccaagcgggaaaaggggcaccgacg

SEQ ID NO: 152286 - RNA, 78 nt, Homo sapiens
ccagagagaacaacaccagagccgggagcgccacaaggcacaccgccgaggcccagcagggaggggggaggagagcag

SEQ ID NO: 152287 - RNA, 88 nt, Homo sapiens
ggaaacaggggccacggagccacggccacggccgcaaggaagcggaagggacagccaagcccgaagccagagaaggcacaggagagga

SEQ ID NO: 152288 - RNA, 80 nt, Homo sapiens
aagcggccaaagaaggaagcgcgcaccgcaaaccaggcgagacagcaggagcaccaaaccccaccaaaacggccgaagac

SEQ ID NO: 152289 - RNA, 41 nt, Homo sapiens
gaccacaaaccgcgccagaaaagagccaagaggccacgaca

SEQ ID NO: 152290 - RNA, 74 nt, Homo sapiens
gaaagggaccgaaaggagagcaaagagaggaaagaacccaagggaacagggaggcaaggagccgagaagaccga

SEQ ID NO: 152291 - RNA, 63 nt, Homo sapiens
ccgcgcggaccacaaaccgcgccagaaaaaaagagccgcagacgcacagcaaccaccggaccc

SEQ ID NO: 152292 - RNA, 73 nt, Homo sapiens
cgcgccccacccgcgccccgccgagcgcacaaaacagaaggcagaccagagacggcggcaccgcaggaaccgc

SEQ ID NO: 152293 - RNA, 78 nt, Homo sapiens
ccggagcgggcggcgagacaaaggcgacggggacaagaccccccccagggaagaccaaagcaagggaggagaagccag

SEQ ID NO: 152294 - RNA, 96 nt, Homo sapiens
caaccagccggccagaaaaggaagaacccaggcagcagacagcggacgggaaaagagaccgaagagccagaggaacaaggcaaggcgcaaacagga

SEQ ID NO: 152295 - RNA, 71 nt, Homo sapiens
gcggggagccacgaaagaaaacggagaacacccagcagaggcgcaggaaaagcaccgaaagaacacggaaa

SEQ ID NO: 152296 - RNA, 69 nt, Homo sapiens
ggaaggcaagagccaacccaaaaccaagcaggcaggggcagaaggcgacccagcgcagagcaaacagaa

SEQ ID NO: 152297 - RNA, 75 nt, Homo sapiens
agcgcggcgcggggcggcgggccggccgaaggcaagaacggaagcacgggcggaggaaagcacaagcagagcccc

SEQ ID NO: 152298 - RNA, 72 nt, Homo sapiens
agaagacaaaggcaaaagggacgaagggaacaaggacagagagaggcagaagaaaaagcacccccaagcgag

SEQ ID NO: 152299 - RNA, 61 nt, Homo sapiens
gggcccggcccggccggggagagagacacaggagggggaacaggaaaaacgagaggagaga

SEQ ID NO: 152300 - RNA, 81 nt, Homo sapiens
ggcccccccgcgccgaccgcgccaggacagacgcacagacaccgcaggcaaagggcgggaaacagcggcgcagcagccaag

SEQ ID NO: 152301 - RNA, 75 nt, Homo sapiens
gaaagcgcagagccaccaacaacagaagaagaaaccccagaaagagcaacagaaggagacagagcacggaaggac

SEQ ID NO: 152302 - RNA, 80 nt, Homo sapiens
cgcccggaggccggacagcgagcggagaggccccgggcggccccgaggggaagggaccgagaaacacagccaagacaacc

SEQ ID NO: 152303 - RNA, 77 nt, Homo sapiens
ggcgagaacagcaaagcccaagagaggcaggcagcgacagccacacaacggacaggcacggaagaacacgggaaagc

SEQ ID NO: 152304 - RNA, 81 nt, Homo sapiens
acggaccacggggaacccagagcagcacaacgcaaggggacacggggccgcggagcaccacccggaagcgcccggggccga

SEQ ID NO: 152305 - RNA, 77 nt, Homo sapiens
cacgaaaaaagaacaccccgccaaaagcaagggaaaggaagagacacaggaagaggcaaagcagacacccggaccag

SEQ ID NO: 152306 - RNA, 53 nt, Homo sapiens
aaagagaaaggaagcaggcccgggaagggggcagcagaaaacaaagccaagaa

SEQ ID NO: 152307 - RNA, 83 nt, Homo sapiens
ccggaaccgccgggccgaacagcagacgccgcggagaacacacaaccaaaaagcccaggcaagacacacgagacgagagaaag

SEQ ID NO: 152308 - RNA, 77 nt, Homo sapiens
gcgcccgaggcgcgggaggggggaccgggaaggcaggccccgaagccccagaacaagccagaagagcaaaccacgac

SEQ ID NO: 152309 - RNA, 73 nt, Homo sapiens
gcagccgccacggaggcaaagcagccggacaggagagacaacggaggcaagaaagacggagaagcgagaagag

SEQ ID NO: 152310 - RNA, 78 nt, Homo sapiens
agcggagacggggagcgcgaggaccgcgggggcagggacaaacagcgcagagaagagaagacaggaccaggagccaaa

SEQ ID NO: 152311 - RNA, 78 nt, Homo sapiens
gcagaaagaaaacgaagaggcaaagagaaaaacacacccagacggagaaccgcaggaaaggacagggacagccccaag

SEQ ID NO: 152312 - RNA, 79 nt, Homo sapiens
agcacgggaagagagaaccgaggaacgaagaaacagacacaacagagcagaaggcacaagaagaccacccaagcaccag

SEQ ID NO: 152313 - RNA, 76 nt, Homo sapiens
aagaacccagaacaagaaaggcaagaaagaccgcgccggcgggaggagaaaggcccacggcgcgcaagagagaaca

SEQ ID NO: 152314 - RNA, 40 nt, Homo sapiens
ccgaccacgacaaggaggcccggccaacgcaacagggagc

SEQ ID NO: 152315 - RNA, 81 nt, Homo sapiens
ccgacaagacaccacggacgagagacaaacgccgaaggcaagaacggaagcacgggcggaggaaagcacaagcagagcccc

SEQ ID NO: 152316 - RNA, 55 nt, Homo sapiens
cggaggagagaaagcgagaacaaaaccagcgaggacaggcagcagagacagaaga

SEQ ID NO: 152317 - RNA, 86 nt, Homo sapiens
ccagaccaaaagaaaaaagggacccacccagccgcagggccgaggcagccaggcgcccagccggaaggcaggcgaagccccaccca

SEQ ID NO: 152318 - RNA, 77 nt, Homo sapiens
ggcagaggaaggagcagaggagagaagcccacaccccaccagccccgggcaccccaggaagagcaaccgccgcaagc

SEQ ID NO: 152319 - RNA, 70 nt, Homo sapiens
ccgggcagcgagcccacacaggacacgacgccccacgccacccggacccccgcgacccgccacagaggcc

SEQ ID NO: 152320 - RNA, 72 nt, Homo sapiens
ggcgcccccggggacggcagcggcaccaccgcgcagaggggcagggggaggcgccaggcgggagcaggagcc

SEQ ID NO: 152321 - RNA, 77 nt, Homo sapiens
gccaggcacccgagaaaggggacgggacagagcgaagaaccccccaagaagacgaaacccccgggccacaagaaggg

SEQ ID NO: 152322 - RNA, 79 nt, Homo sapiens
cgacagggcggagccacccccagggagagcgcgcaggaagaggaagaaaagccaaacagaggccaagggcacggcgaaa

SEQ ID NO: 152323 - RNA, 38 nt, Homo sapiens
gacggcaccagccaggaggcgagagcacggagcaccag

SEQ ID NO: 152324 - RNA, 75 nt, Homo sapiens
agcaaaccggcggaggacggaaccaggggagagcgacccaaacaaagacagaggggaagcggagcgacggacacc

SEQ ID NO: 152325 - RNA, 75 nt, Homo sapiens
ggaggcaaaaagaacaagcccaggcacaacacagccccgcaggcagaagcccccggggagagacagacagaggga

SEQ ID NO: 152326 - RNA, 54 nt, Homo sapiens
caacccaagagggcaaaagaacaagacggacacagaaacgaaaggcccgagcca

SEQ ID NO: 152327 - RNA, 49 nt, Homo sapiens
gcgggggagcacacgacgggacccacgagggagcggcgagcgggcacgg

SEQ ID NO: 152328 - RNA, 69 nt, Homo sapiens
gccggagccacagcaagccccgcgcccaagaagaggaacccgcaagagcagaagagacccacacgacag

SEQ ID NO: 152329 - RNA, 115 nt, Homo sapiens
acaggacccgggaggccccccgcgacagacccagcccccgggcagaccggaaaggccaagaggagaaggcagagcccccccaggcagaagcccgagcgggaaccagcgaagccag

SEQ ID NO: 152330 - RNA, 58 nt, Homo sapiens
cgggcgcaggaaggccaccgacaggaagaggaccccagcagacaggcgaagggacgcc

SEQ ID NO: 152331 - RNA, 69 nt, Homo sapiens
cgcacccggggaaccagcaaacaaggaaccacaggcccggagaaggaccacacagcgcccaccgccgaa

SEQ ID NO: 152332 - RNA, 34 nt, Homo sapiens
caagacaggacacaacccagggagcacagccaac

SEQ ID NO: 152333 - RNA, 79 nt, Homo sapiens
gcgcagcagcaggaggaggaccgcagcaaggggcggcagggggaccagccagcaacccgcccccggaccaagcaacccc

SEQ ID NO: 152334 - RNA, 70 nt, Homo sapiens
gacaaggcaaacaaggcacacgcagaaccacagcaaggcacagcaaaggaagaaacaacaagcaaagaga

SEQ ID NO: 152335 - RNA, 78 nt, Homo sapiens
ccagaccagcaaggaaaggacacccccaacaaggcgaagaaagggaggcaccaggcacggggaggccaacaaagggga

SEQ ID NO: 152336 - RNA, 79 nt, Homo sapiens
aaaaacagaacaggaggggagagggcaggaaccaccgcccaaagccccacggcccgcccaaaagaaaaccggcaccgaa

SEQ ID NO: 152337 - RNA, 61 nt, Homo sapiens
ggcaccaccagcccagccacacagacggggacagaagcgacgcgaccggaaaggagagaga

SEQ ID NO: 152338 - RNA, 81 nt, Homo sapiens
cgggcacccgcgccgggcaccgaggaccagccaagacagagcgacacgcgcgacggaggccgcagggccagaacaacgaac

SEQ ID NO: 152339 - RNA, 59 nt, Homo sapiens
cgaccaccagaagagccaaacacaagaggaaccaaacgagaaccccccaaaccaaagaa

SEQ ID NO: 152340 - RNA, 90 nt, Homo sapiens
gcaaggcggcggacggcgcgcgcccgaggcgaggaggagcgcggcggagcagagcagaagcaaaggagaggagagacgcacggacaggag

SEQ ID NO: 152341 - RNA, 71 nt, Homo sapiens
gagcagcggacccaggcagacagaagcgaaggggacagggggagaaccgccagggaaacccgggggacaga

SEQ ID NO: 152342 - RNA, 85 nt, Homo sapiens
agcagaagagaagaagaagcaggagaacgaaacggagccagagaaggcagaagccgaccacaaagccgagcccgccggcgccccc

SEQ ID NO: 152343 - RNA, 73 nt, Homo sapiens
caggccagaagaccacgaaaccgacaccaggaaagagcgaggagggggggaaagccagaagcaggacggcacc

SEQ ID NO: 152344 - RNA, 85 nt, Homo sapiens
cgaagagacggaggaaaccacaggacggaagcacaggggccaccagagcgcccgagaaaggacaagaacaaggaaaacaagagaa

SEQ ID NO: 152345 - RNA, 75 nt, Homo sapiens
ggggaggaaccccgccccgaggcgggggcgcggacgcggccgacacaacccgagcgcacccaccccaccccaccg

SEQ ID NO: 152346 - RNA, 64 nt, Homo sapiens
cagcccccgaggagcgggacacaggggggagcaccaaaggaaccagacagcaaaggaagagagg

SEQ ID NO: 152347 - RNA, 70 nt, Homo sapiens
agcgacggcccgaacgagcggaggccaacaaagccccaggcccaaggcagcacccacgcagccacagagg

SEQ ID NO: 152348 - RNA, 80 nt, Homo sapiens
acggggcaggcgagcccgccacagagccgaaagggaaagcaggcaggagggagagcgccgaagaaccaccccccgccccg

SEQ ID NO: 152349 - RNA, 84 nt, Homo sapiens
cggcaggcgagaccccaggcacagagaccccaccacaagagagaaccgagccaccgcaacggaggcgaaccggcaggagaaagg

SEQ ID NO: 152350 - RNA, 61 nt, Homo sapiens
gacagagcgaggcggcggcagaagaggaagagcgggggagaagccgcgccggacaaacccg

SEQ ID NO: 152351 - RNA, 55 nt, Homo sapiens
caggagggaagacggggcaacagaacaaagagacaacggaacagagacaaaccac

SEQ ID NO: 152352 - RNA, 80 nt, Homo sapiens
cgcggcgcccgccggaccagacgcggcgggcgcagccacgacgggccgagccgccacgcccgcgagccccagcccgggag

SEQ ID NO: 152353 - RNA, 75 nt, Homo sapiens
gaaggaccaagaaccaggaaaccgaggaaggcagggaccggaaagaacaaaggcccaccggaagagcggcgaaaa

SEQ ID NO: 152354 - RNA, 70 nt, Homo sapiens
gggaggccaagaagagagacaagacaaaggacaaaggagaagacgacagaggaaaagagagacagcacca

SEQ ID NO: 152355 - RNA, 75 nt, Homo sapiens
caagcacgccgcccagacaaccccgcgacaagaagagaaagaacaagaccgggacacaggaaagagaaaagaaaa

SEQ ID NO: 152356 - RNA, 83 nt, Homo sapiens
aggacacagccgcaagaacaacacgcccaggccggcaccccgggcgcagaggccagaaaagggcggggcaccggcgacagcgg

SEQ ID NO: 152357 - RNA, 77 nt, Homo sapiens
cgaaggcggagcgggcggggacgggggcgagaggaacgacaacccgggggagccagcccggcccccacgacacaccg

SEQ ID NO: 152358 - RNA, 76 nt, Homo sapiens
cagccgggacgacagggaacccgaacaagcccacccagagagagaagaacaaggcggccaaaccaagaccaacaac

SEQ ID NO: 152359 - RNA, 77 nt, Homo sapiens
agcgagaagcccagcgcgaaccaccggccggacgcgggagaccagcgacccgcccaacaccgaccgggagagaggcc

SEQ ID NO: 152360 - RNA, 85 nt, Homo sapiens
aacacagagaggcggaaaggcaccggagacagaggcggaaccaaaagcagggaaaccggagagcgaagaccggagaaacagaacg

SEQ ID NO: 152361 - RNA, 68 nt, Homo sapiens
cagcagaaagcaaaccagcaggcaccaaggaaagcagaagacaaaaaagacgccgggaaggaaaaaaa

SEQ ID NO: 152362 - RNA, 94 nt, Homo sapiens
caagcggaaagcgcggagcgcggagccaccgggcaccaaagggaccgcagcgccccgccccaggaccaaagagcaggcaaggaacacggaacac

SEQ ID NO: 152363 - RNA, 77 nt, Homo sapiens
cgggcgagaccaggagaccggcagccccagcgacccaagaaccggacaaagggagccaaaggaaaaaagaccccaga

SEQ ID NO: 152364 - RNA, 52 nt, Homo sapiens
gaggaaaggccgaggagccggagccgcagggacgaccaggacagcgcaaaca

SEQ ID NO: 152365 - RNA, 60 nt, Homo sapiens
gaaccagaagcgagagaaaagcccccaaaagcagcacagacaagggaggcgaggacggac

SEQ ID NO: 152366 - RNA, 112 nt, Homo sapiens
gcccaggaaggccaggaaagagagccacacaacacgaaaaagcaaagcacgcagaggcaccaagaagcagggaccacagacagaggcgaaagggaaaagaaaaaaaaaagga

SEQ ID NO: 152367 - RNA, 80 nt, Homo sapiens
gagagcggacaaggcggcaccaccacacccagggaagaggaagaacgcgagaaaaaaacgagcgacagagaaggccggaa

SEQ ID NO: 152368 - RNA, 80 nt, Homo sapiens
aaaggaaaacgcggaaaaccgacacaacaggcagaagccccagaggagcccgaaacccccaggcgggcaggaaggagagc

SEQ ID NO: 152369 - RNA, 79 nt, Homo sapiens
cccacaggagcagcccaggggaagaacaccagcaggaaaaaagagcggcagaaggccaaacggccgagcaggcgagcga

SEQ ID NO: 152370 - RNA, 74 nt, Homo sapiens
gaccagcaacgagcaggagaccaagcaggggccccaggacgcggagaaaggcccgaagcaaacaacgccagcgg

SEQ ID NO: 152371 - RNA, 71 nt, Homo sapiens
ccccccccgcacacggcgcaccgccccggacccggaggggaccaccgcggaagagaagaacgacgagaagg

SEQ ID NO: 152372 - RNA, 58 nt, Homo sapiens
agaggggcagcgcgagcgggaccagcgccggaggcgccgcagggcgccggccgagccc

SEQ ID NO: 152373 - RNA, 70 nt, Homo sapiens
gagcgagggggggcgcgccggaaaccggagcgcgcagcagagggagggacgagaaaaccggaacggggga

SEQ ID NO: 152374 - RNA, 77 nt, Homo sapiens
cgaagaaccaggagaaggaggagagaaggccccaagaaaagcccccaaggcaagaaccaagcggaggcgcggggcca

SEQ ID NO: 152375 - RNA, 77 nt, Homo sapiens
caggcggcgcggacggggcggggcagcgcaagaccccgcacggaagcagcaagcacaggcagcgcagagccagagac

SEQ ID NO: 152376 - RNA, 69 nt, Homo sapiens
gagccacggacaagaccaaaaggaaaccaggagcggaagaccggccaggaaaggacaagaaacagagag

SEQ ID NO: 152377 - RNA, 79 nt, Homo sapiens
cagggggaacaggccggagcggcccagaccccgcccgcgggagcgggcagcacccgaggaggccgcgaggcacagaaga

SEQ ID NO: 152378 - RNA, 79 nt, Homo sapiens
acacgagcacaagacccaaaaaggcgacgcaaccaagcaccgaaacagcaggaagaggaccaagggagcagagagcgga

SEQ ID NO: 152379 - RNA, 60 nt, Homo sapiens
aagacggaaccaggaagagagacgacgggcaacagacagcgcaggacaagcgagcacaaa

SEQ ID NO: 152380 - RNA, 74 nt, Homo sapiens
cacagcagcccgcagagccgcacaccccggggagccgccaccaaaagcagacggaaaacccacggggaagacca

SEQ ID NO: 152381 - RNA, 76 nt, Homo sapiens
cggacgcacaggaaggaaaaagggagaccagcacgagccgggcgggacgccggaaggggcacaagacacgcacaag

SEQ ID NO: 152382 - RNA, 80 nt, Homo sapiens
gaagaagaagagccaccgaccggcggcgacggcggcgcgaggaccgaccgggcccgcggacgaagaaggcacccccccgc

SEQ ID NO: 152383 - RNA, 82 nt, Homo sapiens
cgaggccagagaaagagaagcggcacccccaggaagcgcggggaaaggaaaccaaaccaggaaagaaggacaaggagcgagg

SEQ ID NO: 152384 - RNA, 78 nt, Homo sapiens
aaggagaagcccaacaaagccccacagcagccagaaggaaagagcaccccggagcaggggaaaaaggaccaaccggca

SEQ ID NO: 152385 - RNA, 69 nt, Homo sapiens
ggagcgccacggccacgccccccgcaacaacccacaagggcaaagaccaccacaaagagaagaacggga

SEQ ID NO: 152386 - RNA, 80 nt, Homo sapiens
agagcaaggaagagaccaagcaccaagaaaacgccaaggaacgggccacggacagagcgaaggggagaggaggaggcgac

SEQ ID NO: 152387 - RNA, 116 nt, Homo sapiens
aggcacagccccgcccagcccacggaacgcaccaggaaggccggagggggagagccgagccgagagcagccgcagcaggaggaagggaagaccggagacacagcggggccgaaggc

SEQ ID NO: 152388 - RNA, 50 nt, Homo sapiens
gcccggaggcccacagcagggggcaggcccaggaggcaagagcgagaaga

SEQ ID NO: 152389 - RNA, 89 nt, Homo sapiens
cgcggccccgccggccgccggccgcgcggggggagacggcgaagaacagaggaacaacgccaacgacaagacgaggaccaacgccagcc

SEQ ID NO: 152390 - RNA, 83 nt, Homo sapiens
cggaccagaccggaacgcccaagccccaccgcgagggcccccagagccgacggcccccaccccccacaagacgcggcccacgg

SEQ ID NO: 152391 - RNA, 68 nt, Homo sapiens
accgcacgaaagaagacaaacacaacgagagggggaaggagcggcgcgcgcaaccagcccccgcccac

SEQ ID NO: 152392 - RNA, 73 nt, Homo sapiens
caacgcaggaacaccgcacgcgcggaggagggacgggggacaggaaagaacacaagacacagcacggaaacaa

SEQ ID NO: 152393 - RNA, 71 nt, Homo sapiens
ccccccagaacaacacacaccagaaacagcgcaccacccgcaggaaggaaaacacccggcagggaaggaag

SEQ ID NO: 152394 - RNA, 55 nt, Homo sapiens
cgccacgggccgagacacgcagcggcggccagggaccagcggcggagacacggaa

SEQ ID NO: 152395 - RNA, 78 nt, Homo sapiens
gaggagcgaaggaccgcgaagagccagaagagcagagcccagggaaaaagggacggaaacggacagagaaacaccagg

SEQ ID NO: 152396 - RNA, 76 nt, Homo sapiens
aacaaaaagaaaaaagaacaagggaagacaccaacaagacgcaaaaccagcaggccgcgaagagggagcagccaga

SEQ ID NO: 152397 - RNA, 62 nt, Homo sapiens
ccccaagccggacacaccgcacgagagccaggcacaccaggccaaccggcccaaacaccaag

SEQ ID NO: 152398 - RNA, 77 nt, Homo sapiens
gacgcggcggcaagacggggcgggggccggaccaaggagggaccacagagcccaccacacagcaggccaggacgcga

SEQ ID NO: 152399 - RNA, 58 nt, Homo sapiens
caggaccagaacagcgcaggagcacagagggagccacaaacaccacccgagaacggag

SEQ ID NO: 152400 - RNA, 73 nt, Homo sapiens
agcagggccagcaggccccagcaggggcagagccccgggccagccaggaggagcgagggagaagccagagagc

SEQ ID NO: 152401 - RNA, 89 nt, Homo sapiens
acccggccacgaggcccgcgcacgacccagccccagaggacaccagcggggccggcgcggaagaggccggcggcgggacggccccacgg

SEQ ID NO: 152402 - RNA, 79 nt, Homo sapiens
gggaacgcgaagcgccaaagccagacaaggcccggccaggccccaccgccacaagcaggggaacaccgccaaccccaag

SEQ ID NO: 152403 - RNA, 76 nt, Homo sapiens
ggagcccgcagaccgcagaaggccggagacaccagcagaacaagagaaccaacggcgaaaacggcggggaaaaaag

SEQ ID NO: 152404 - RNA, 70 nt, Homo sapiens
agccagaagaaggacaacgacaaaaaggacaacagaggaaagcgggaaccaaccaccaacggacaagcca

SEQ ID NO: 152405 - RNA, 50 nt, Homo sapiens
ccaacaagacaccaggaggggaggaaaggaccccaaggagcgaaagaaca

SEQ ID NO: 152406 - RNA, 94 nt, Homo sapiens
ccgccggacgccgccaccaaccgcgggggaggacaggccccgccgcagacaagcagaccggaagaccgacggaagaccacaccccgagggagcc

SEQ ID NO: 152407 - RNA, 69 nt, Homo sapiens
gggcacccccaggggaccaacccagaggacggaagcaaagggcagccaccgaagacagcgaccagacaa

SEQ ID NO: 152408 - RNA, 78 nt, Homo sapiens
gcaaaggcggccgggagacagccggaagcaaggcagaagaggccacaaagacgaaggggaaggaggagaagacggcga

SEQ ID NO: 152409 - RNA, 76 nt, Homo sapiens
gccagagcccacagaagcaggaagaggagcaccggcccaggcggaggcaaggcggacccggcggcgcaacccaccc

SEQ ID NO: 152410 - RNA, 36 nt, Homo sapiens
cccagaggaacgacccagaggaaacccggacgcgaa

SEQ ID NO: 152411 - RNA, 45 nt, Homo sapiens
cccaggccgaccggcgcgcggagggccgacgccaccgccgagccc

SEQ ID NO: 152412 - RNA, 96 nt, Homo sapiens
ggcgccaggacgacgaggaggagacgaccggccggaaaaccgcaagaccacagcaggcccgggcccgccggccacaccacacgcccccgccgccca

SEQ ID NO: 152413 - RNA, 88 nt, Homo sapiens
ggagcaccaggaccgggccggaacgagacgcacgaggcgggaggcggcagaagcagccagaggagggcacaggcggcgcggagcgcgc

SEQ ID NO: 152414 - RNA, 72 nt, Homo sapiens
ggcaaaagcgcacaaacgcccaaggagagaagccacaaacaggccgcacagggagagagagacgacaagacc

SEQ ID NO: 152415 - RNA, 75 nt, Homo sapiens
cgcccggcgcgcggcgcgccgcccggcgagcgggccggaggaaaagaaagaagaaggagccccccgagagcaaac

SEQ ID NO: 152416 - RNA, 65 nt, Homo sapiens
cagagcaaaaggggccccacggaggccacagccacaacaacccagggccaaacacacaggaacgc

SEQ ID NO: 152417 - RNA, 77 nt, Homo sapiens
gaaccgcagacagcggccaagaagacacaaaggacggaggcacgaagaaaaagcagcacgaaggcgaggaaccagca

SEQ ID NO: 152418 - RNA, 76 nt, Homo sapiens
acccacgaggacagcaaacaaggacgagagcacagcccccaggagaggcaggcgcaaaggaggcaacagaggagca

SEQ ID NO: 152419 - RNA, 72 nt, Homo sapiens
ggaagacacgaaaaaagagaaagggccaacgggaaccaccaagggaaaaaccagcacccacagaagaagaga

SEQ ID NO: 152420 - RNA, 87 nt, Homo sapiens
ccgagcaagaaaggagagccgacccacggaagaaaacaggcagagagacgaagagagaagcagggcagaaagagcggaaacgagaag

SEQ ID NO: 152421 - RNA, 80 nt, Homo sapiens
gaccaagcaggagaaccgaccggcagaaaggaaacccacgccacaacaaagaccaacagcaccgagggcacaaaaacaaa

SEQ ID NO: 152422 - RNA, 81 nt, Homo sapiens
cgaggagccgaggaagagggcggcgacgggggggacgagcggagcccgggacaggagagagaaggagcagacccaggaaag

SEQ ID NO: 152423 - RNA, 80 nt, Homo sapiens
ccggcgcggcacagcgccgccagcagggccgaccagaagcgaggcggcgagcaggagcaacaccagagcaagaccaggcg

SEQ ID NO: 152424 - RNA, 61 nt, Homo sapiens
gcccggcccaggcggcaaggagaccaaccaggccgcggaacaccaccggaacggcgcgcgc

SEQ ID NO: 152425 - RNA, 75 nt, Homo sapiens
acggcggccccaggcccaggccccccaccaccagaggcaagacagccggcaggcagccacaaaccgcgggacccg

SEQ ID NO: 152426 - RNA, 62 nt, Homo sapiens
gagcccagaagacagagggcgaggacacggcgcagcaacaaacagcggcgacaaaccgagac

SEQ ID NO: 152427 - RNA, 54 nt, Homo sapiens
ccgccgccgcggaaccgcggcgcagacagccaaggagacgaagaaagcgaagaa

SEQ ID NO: 152428 - RNA, 38 nt, Homo sapiens
gcaggacccaaagcgaaggccggcagggccagagaccc

SEQ ID NO: 152429 - RNA, 92 nt, Homo sapiens
cgggccccccgccgccgccggcccggacaggccgccaacagacagggcggagcaggagagcagagccggagccagggcaggccaggagagaa

SEQ ID NO: 152430 - RNA, 75 nt, Homo sapiens
ccggaaaggaccagaccgcccaggaaacggaagggccccacaccaaaccgccacgcaacagacgcagagccagcc

SEQ ID NO: 152431 - RNA, 39 nt, Homo sapiens
gccaccacacaacaccgaagcaagcaaccagagaacaga

SEQ ID NO: 152432 - RNA, 87 nt, Homo sapiens
ggaggagaagaagggaggcagagaaggaacaggccgagagcagccagaagacaaagaggggaagacacagaaccaaccacagacaaa

SEQ ID NO: 152433 - RNA, 35 nt, Homo sapiens
aagggaacagaaggagcagacaagaagccagaagc

SEQ ID NO: 152434 - RNA, 77 nt, Homo sapiens
cgggagggcagacgcggccgcggcaccccgaacggggccccccgcgcgagggaaagacaaggagccgggccgagaaa

SEQ ID NO: 152435 - RNA, 73 nt, Homo sapiens
ggacacgcacccgacccaagagaagaaaggaaaaaggaaccaaccggagaaggcgggaagcaaggccaaacaa

SEQ ID NO: 152436 - RNA, 71 nt, Homo sapiens
ccgcccaagagagcaagaccgggcccacgagaaaaggaaccacagaaggagggaggcaggaggaccgacgg

SEQ ID NO: 152437 - RNA, 75 nt, Homo sapiens
cccagcgccggagcccccaaaccgaaggaccaccccgagaggaaagccaggagcccaaaaagaagggacccacga

SEQ ID NO: 152438 - RNA, 80 nt, Homo sapiens
ccgcgggccggcgcccagcgcccagggcccaggccgagcaggaacgggcgcaccacgccaccccgccacgagagcaggaa

SEQ ID NO: 152439 - RNA, 43 nt, Homo sapiens
agagaacaccagaaacccggcggagaagaaagcagagaacggg

SEQ ID NO: 152440 - RNA, 75 nt, Homo sapiens
agagacaagccaaagccgaccagggaacaacgggagaaacagcaacaaccccggcccaggaaagcggacagacag

SEQ ID NO: 152441 - RNA, 77 nt, Homo sapiens
gagacgcggagagcagcaggcggacagacaacaaacacccggaagacagcaaaaggcaggagccaggaaaccgcagc

SEQ ID NO: 152442 - RNA, 58 nt, Homo sapiens
gcggcccgccccaacccgcgcgccaggaaggagggccccggagcagccacaccaccga

SEQ ID NO: 152443 - RNA, 75 nt, Homo sapiens
gcggcccgcgcaggcgcgcgcggcccggggcggccccgcgggccacagacggcccgccacgggccccgcagccgc

SEQ ID NO: 152444 - RNA, 56 nt, Homo sapiens
cggggaaacacagcaagcagaccgagagacccagcgagcagcaaaccagcggcgcg

SEQ ID NO: 152445 - RNA, 60 nt, Homo sapiens
gccaggcggccccgagcggaacggagaaagcgaggagaggaaaacccaagacaaggaagg

SEQ ID NO: 152446 - RNA, 66 nt, Homo sapiens
acaaaaccacaggcacaaagaggcgacgagaagagcaccccccagagcaccgacccaccacaaggg

SEQ ID NO: 152447 - RNA, 77 nt, Homo sapiens
accaagaaccagaaaggcaagaacagcagcgggaaagacaacaggaagaacagaaagcggcccagccccaaccagac

SEQ ID NO: 152448 - RNA, 83 nt, Homo sapiens
gggggccaagagcgcccagcggacacagccccggagagccagcaggcgaccaacaggaagccagggcgcagagcccaagccca

SEQ ID NO: 152449 - RNA, 82 nt, Homo sapiens
agccagggaaacgcaacccaagggcagcgcaggggagacaccgaagaacaagcacgagcacgacagagaggaggaggcgcac

SEQ ID NO: 152450 - RNA, 74 nt, Homo sapiens
cggcagcacagccccagggagagccgcaggcaccaagaagaccaacaagcagaagagccaagacaaaaaggagg

SEQ ID NO: 152451 - RNA, 78 nt, Homo sapiens
aagcccacagagacacaaccggagcccagagccacgcaaaggcccaggacagaaggcgggcaaggagcgccccccgag

SEQ ID NO: 152452 - RNA, 77 nt, Homo sapiens
gaggggaccgacgccggcagaacacgcgcgggaccccgggcacggcgcgcgggagcagaagcagcacacacaaagaa

SEQ ID NO: 152453 - RNA, 71 nt, Homo sapiens
ggcgccccacagaggggcgacgcaacacccccagggagcgggggcggaaacacggaagagggggaggccag

SEQ ID NO: 152454 - RNA, 67 nt, Homo sapiens
caccccacgcgagaacgaccacgcaggggaaccagaagaggccaaccagcacgaacgccagcagcac

SEQ ID NO: 152455 - RNA, 103 nt, Homo sapiens
ccgggagcaggaggacggaaccagggccaggcgaggaccaacccaccccggagcagagcaagaacgggacgagacaaaaagaacggcagccaccagaagggcg

SEQ ID NO: 152456 - RNA, 52 nt, Homo sapiens
cccaaggccgcaacagaagcgaaagggggcagacagaagagagacgagcaac

SEQ ID NO: 152457 - RNA, 77 nt, Homo sapiens
agaaagaggaccagagagccaagaacgaagaaagcggaagaagacaggggcaaggccgaggggaacagcacacagag

SEQ ID NO: 152458 - RNA, 80 nt, Homo sapiens
gacgcggacagagagcggacgggccaacccaaaaccagggcggcaaaacgagcgggccaggagaacggcagcagccacca

SEQ ID NO: 152459 - RNA, 76 nt, Homo sapiens
aaccggagccccccaggaggcgggaagacaaaccggcccaccccaaaagaaaggccggcaagcgccggcccgagcc

SEQ ID NO: 152460 - RNA, 76 nt, Homo sapiens
gccacaggagaggcccaggccgaccggcgcgcggagcagcaggccagcacaggaggaccagacagagagacgcaaa

SEQ ID NO: 152461 - RNA, 114 nt, Homo sapiens
acaacaccacaccccaacaaaagaacgcgcccaggacccggcgcacggaagaaacagcccaggcacaacgaaacgaaggagccaaaaccagcacaagggacagaaaagcaaaca

SEQ ID NO: 152462 - RNA, 36 nt, Homo sapiens
accggaagggcaaggaaacagaacgacagcccgcac

SEQ ID NO: 152463 - RNA, 66 nt, Homo sapiens
caaagaaaagagggaaaagcagcgccccagaaagcaccaccacccacccggaacaccgcgaaagcg

SEQ ID NO: 152464 - RNA, 40 nt, Homo sapiens
aggaagagcgaggggacaaagaacccccgagggcgggaaa

SEQ ID NO: 152465 - RNA, 83 nt, Homo sapiens
agagagaaccgccagaaaggagcggaagaggccacgaggcgcacaccgccagcccaagaaaaaggagagaacaaggagcaggc

SEQ ID NO: 152466 - RNA, 90 nt, Homo sapiens
ccagcagacgcagccgagacaccagcccgaaacaccaccaaggccaccagcgggcccccacggagggcagcaaggggacggggaacccgg

SEQ ID NO: 152467 - RNA, 84 nt, Homo sapiens
ccggagagagagccgcgcacgcacagacaagaagcagagagcaggcagcagaagaagaagccacacaccgaaggaaaaaccaac

SEQ ID NO: 152468 - RNA, 75 nt, Homo sapiens
agcacaaacaacaaggccgaagaagcaggaaagcacaaaacgcacaaaagggaaagggggcgaggaaaacaccga

SEQ ID NO: 152469 - RNA, 65 nt, Homo sapiens
cgcggcgcgccggaaaggccaggaaccaaccgggagccccccaagagacccaggggaagacccaa

SEQ ID NO: 152470 - RNA, 71 nt, Homo sapiens
ggcaaaccccaaaaacagaaggggaaaagcaccaaggacaccccccaggcacagccacaccccagcggcca

SEQ ID NO: 152471 - RNA, 40 nt, Homo sapiens
aacccaaagaggaagcacaggcagccccacgcacgccccg

SEQ ID NO: 152472 - RNA, 70 nt, Homo sapiens
ggcagccccggccaaggcgagaacgaccggcggcgaacaagaggcgccagcgggcgcgccggaagaacag

SEQ ID NO: 152473 - RNA, 71 nt, Homo sapiens
gaccccgcccccggcagcaggggcaagggagggaaaagcacaaaggaggcaacgccagagcccaaaaggga

SEQ ID NO: 152474 - RNA, 37 nt, Homo sapiens
gccccccaccacccggggcaggcggaggcggggggac

SEQ ID NO: 152475 - RNA, 121 nt, Homo sapiens
aaaaccaggggaagcgaagacagggggcccaaacgggagacaacccccgaaggaggggaccaagaaaggcccagggaccaaagcccggacaaggcccgagcaccaggaccgcagaaggccc

SEQ ID NO: 152476 - RNA, 56 nt, Homo sapiens
cggaagcaccaacaacgaagacgaaaggcaaaagcagaccggaaaacccaccggca

SEQ ID NO: 152477 - RNA, 85 nt, Homo sapiens
gcgcagacggcgagaccccgcacagagccaggacaaaaccaggcagaaccaacacgaacccaagcacaaacaagaaaacgagcag

SEQ ID NO: 152478 - RNA, 72 nt, Homo sapiens
ccgaacccagggacaaaaaagaaagagaaaaacagaggacagccgaagcaggacacaaagaaaagacgaagg

SEQ ID NO: 152479 - RNA, 78 nt, Homo sapiens
gacacgcaggacgagcggccgaagcagcgcggggacggaaagagagccgcagcgcagaacaagggaaaaaagggcaaa

SEQ ID NO: 152480 - RNA, 83 nt, Homo sapiens
cgaacacgagcaccacaggcgcccgaaggccggaacagcaggcaccaccagcaccaccccagagcagccgccgaccccgcgaa

SEQ ID NO: 152481 - RNA, 67 nt, Homo sapiens
caaaaagacggacagcccacgggaacaagaggggacagaaagaaccggccacgagaaccaagaggag

SEQ ID NO: 152482 - RNA, 57 nt, Homo sapiens
aggcgcgcccagccccgcagccagggcgaacccccgcagacagggaggccgcacaga

SEQ ID NO: 152483 - RNA, 66 nt, Homo sapiens
acccgggaccgcaaaagacgggaaggaagagacaacccacccggacccaccaccgggcggccccgc

SEQ ID NO: 152484 - RNA, 63 nt, Homo sapiens
gcgccagacgcccgagaagccaggcagcaaacacacaggaacacagcacccacccacacccac

SEQ ID NO: 152485 - RNA, 75 nt, Homo sapiens
gacccacagacagaacaaccgcagcgcaccccccacgggcagcagggggagaagcagagaacgggggccagagga

SEQ ID NO: 152486 - RNA, 74 nt, Homo sapiens
cccgcagcagcagaacaaagcagccggaaaggagccaagaggcgggggccagccggccgacacgaagcggaccc

SEQ ID NO: 152487 - RNA, 59 nt, Homo sapiens
ccggggggggacagcaggcgaggcacgaacacccaacacaaccagaagcgggaaggaaa

SEQ ID NO: 152488 - RNA, 58 nt, Homo sapiens
cgggccagaacggccaggagacgcaacggaaacagaacgacagcccgcaccgacgccg

SEQ ID NO: 152489 - RNA, 89 nt, Homo sapiens
cgcgaaacgcacgagaaggaggaggaggaggaggcccggcggccagcagcccgccggaggcgggaccccgcggaagaagcggaagaaga

SEQ ID NO: 152490 - RNA, 67 nt, Homo sapiens
ggaaaagagcagcagcaagcacacgcaccaaacagagcaaaggccccagcggcggaggaaagagagc

SEQ ID NO: 152491 - RNA, 75 nt, Homo sapiens
cgccaccagcaaccagagggccagagggaaggacaggagcccccaggacaggcacacccgggaaaaccgaacacc

SEQ ID NO: 152492 - RNA, 57 nt, Homo sapiens
ggggaccccacgaccgcagcgcccagcgaccgagggacagcgggaggggacagcgag

SEQ ID NO: 152493 - RNA, 87 nt, Homo sapiens
ggagccccccgcagcgaccggaagacgaggcggcgggggacaagcggcgccccagagcggacgaggagcaaaagaaaaggccaaaac

SEQ ID NO: 152494 - RNA, 72 nt, Homo sapiens
ggccagcgacgcaccgagaaaggaaggaaaaccgacgaggagcagccgcgcagaccaggaagaccaaggcaa

SEQ ID NO: 152495 - RNA, 104 nt, Homo sapiens
gggcgagcggccggcggcgcgggcccggcggcggcggcagcggggccgggccggagcgccacagaagaccgcaggaaagcaggaaggcaagaaagccaaggacg

SEQ ID NO: 152496 - RNA, 58 nt, Homo sapiens
gcgaaccgggccccacgggcggaggagcaggggccccgagggagcgcgccccggccgc

SEQ ID NO: 152497 - RNA, 77 nt, Homo sapiens
cccaacaagaccaccccaccaggagcagcacgaaggcccaggcagcgcagacgaaacagcgcgcagaagccaacaga

SEQ ID NO: 152498 - RNA, 80 nt, Homo sapiens
cgaagcagaccaccgacagcaccccagggccaaaacgcacaccaccaggggcagaagcccccgcaggcccgaaaggaaga

SEQ ID NO: 152499 - RNA, 60 nt, Homo sapiens
ccacaaacaggaccggaacaccagggagcgcgggcgcaggacccaaagacaggaccacgc

SEQ ID NO: 152500 - RNA, 58 nt, Homo sapiens
gacggcaaagcaccgagcaccccgcgcagcccgagcaccggagcccagccggagccca

SEQ ID NO: 152501 - RNA, 76 nt, Homo sapiens
ccagaagaccagaagcgacagaagggcgagaaggcccaaggcgaaaaccaagaccacgcggagccacacaggcgag

SEQ ID NO: 152502 - RNA, 83 nt, Homo sapiens
ggccaacaagaaaggagaaagagagccaaaacggagacagagaggacgcagcccccaagagccccagagacgacaagaacgag

SEQ ID NO: 152503 - RNA, 71 nt, Homo sapiens
gaggaaggcccgagggaaagcacgcggaaagccccgaaccagaagcggcaaacagcacagccagcagacca

SEQ ID NO: 152504 - RNA, 93 nt, Homo sapiens
cccgagggccagcacaaccaggaggcggggccacggccaaggccacgcgcggggaccacgagccaggacccagcgcccccccggggaagacag

SEQ ID NO: 152505 - RNA, 84 nt, Homo sapiens
cggccgcggcacggcccggggccgggagcgcccgaggaacacgccgcaggagggggaagacagagaagaccacacaaccgaagg

SEQ ID NO: 152506 - RNA, 74 nt, Homo sapiens
gaagagagacacaaagagcacaaaaaagcggaaaaacgagggcacagacacgggaccacgggacgcgggagccc

SEQ ID NO: 152507 - RNA, 76 nt, Homo sapiens
aacaaggccaaagacaagcagaagccaggacccgggcggaagccagaggaaagagaccccccccaccagagaggaa

SEQ ID NO: 152508 - RNA, 66 nt, Homo sapiens
agggcggaagggcggaaggagccacaagaccaagcgccacaagggaggaaagccaggaagcaagcc

SEQ ID NO: 152509 - RNA, 71 nt, Homo sapiens
agcggcagcggggaggacaggaaccgcggggcagagacgaaacagaagcaacagaagaaccccccgggaca

SEQ ID NO: 152510 - RNA, 74 nt, Homo sapiens
gccaggagcgcggccccgccggcccgggcgggggcgaggaagagacaggcgggggagaagaagcagggccaaac

SEQ ID NO: 152511 - RNA, 68 nt, Homo sapiens
agccggggaggcaacagacgaaggagcaagggcaacacccggagagaagagccgcaaccaaaccacga

SEQ ID NO: 152512 - RNA, 77 nt, Homo sapiens
ggagacgaaggggcaaaggggacgcggcaccacggcacgcacaaggcgaggcggaaagaggggacgaccacgaaaaa

SEQ ID NO: 152513 - RNA, 62 nt, Homo sapiens
aaaaggcagcacgaagccgaagccaagcgaaagcccgaaggcccacgagagcggggaggaag

SEQ ID NO: 152514 - RNA, 70 nt, Homo sapiens
ccaagaggcgacggcagaggaccccggagagcaaggaagaaagcagcccagacaggcagcaaagagcaga

SEQ ID NO: 152515 - RNA, 53 nt, Homo sapiens
acccgggccccacagcaaccccacgcagaaccggccacacccaggaccggaac

SEQ ID NO: 152516 - RNA, 78 nt, Homo sapiens
cgagcacagagacgaagaggaccaggagcaaacagaagccaccagccgcgagcggcgggccggcaaagaggcggccag

SEQ ID NO: 152517 - RNA, 72 nt, Homo sapiens
cgcggagccggggacgcaaggcacagaagagcaaaaggagcccgggcaccgccagaaccggcaacccaccgg

SEQ ID NO: 152518 - RNA, 81 nt, Homo sapiens
caccggagcccaggaacaccaccggaccagaagcgggccagccagcaggccagcccaaacacggcggaggcaaggcgggac

SEQ ID NO: 152519 - RNA, 72 nt, Homo sapiens
gaaccacccggagaggcaggggcgaccggcccgaggaccgccgcacgaccaaacgcagaacccacaccccaa

SEQ ID NO: 152520 - RNA, 80 nt, Homo sapiens
gcgcacacaagggagcccccccaccacccccgagaagccaaagcagaaccaagacaaacgaccccggaacacggaggcaa

SEQ ID NO: 152521 - RNA, 65 nt, Homo sapiens
aaccgcgcggcgcccccccgcggggcagcgcccaaagcccgccaccgaggggaaagacggaaaag

SEQ ID NO: 152522 - RNA, 73 nt, Homo sapiens
cagacggaaaccaaggagcgaggggaaccgcccaaaagcccgccagaagaaggacgggagccaaaagaaggca

SEQ ID NO: 152523 - RNA, 72 nt, Homo sapiens
ggagagagcaagaccagccaggggaaacccggagggaaccaagaaggaaacccagacgacaaggaaggccaa

SEQ ID NO: 152524 - RNA, 70 nt, Homo sapiens
agcgggcgggccagaaggcaaaagagccgggaacaacccaggggaaccaggggaccagcagggcaggcaa

SEQ ID NO: 152525 - RNA, 85 nt, Homo sapiens
ccccgcgcccgcagcgccaggcggcggcgcccaggaaagccaggccagaagaaggaaggccggggaggggacaggaaagacacac

SEQ ID NO: 152526 - RNA, 73 nt, Homo sapiens
gaacacccaggcaaacaggaacaccccacacgacaggaccaagcacggcgccacggcccgcccccagacgcgc

SEQ ID NO: 152527 - RNA, 115 nt, Homo sapiens
ggcgagaccggagagccgcaggacggcgcggcagagccccgacgccacagaacgggccagaagcccccaggaggagaacgagcaacggaagccagaagaagcacccccagcaggc

SEQ ID NO: 152528 - RNA, 54 nt, Homo sapiens
cgcccacgaccaaacacaggaagagagaagggcacagaccaagacaacgaaccc

SEQ ID NO: 152529 - RNA, 123 nt, Homo sapiens
aaggggccaccgggcagggaagagagaagggcgggaagggggcccggccccaggcgcccaccgaaaccacccacccaccagcgacgaggaagggagacccagcggggcgcccccgccggccgg

SEQ ID NO: 152530 - RNA, 70 nt, Homo sapiens
caacaccggaaaacaccccagaggaaccagacacccagccgcagggaaagccggcagcagagcacaggaa

SEQ ID NO: 152531 - RNA, 71 nt, Homo sapiens
gaggagaaggagacaggccccggcaccaggccccggggcagaagagcggcgccgaggagaaggaaaaagac

SEQ ID NO: 152532 - RNA, 78 nt, Homo sapiens
aagaaagccacccacacagagacacaaggcagcaggcggcccaggacgcacagagcaggaccgacgagagaacacgag

SEQ ID NO: 152533 - RNA, 79 nt, Homo sapiens
aaggaccaagaaccagccacaagggcgcagaagccggcagagcccaagagacaacaagccgaaaagagaggcaaacgcc

SEQ ID NO: 152534 - RNA, 80 nt, Homo sapiens
cgcgcggccccgcccccgccggcgcgcccgcgcggcgcggggaccgcggcccgaggccggaccacggaaagaccccacgc

SEQ ID NO: 152535 - RNA, 77 nt, Homo sapiens
cacagcacccgaggcaaggaaaaagaaaacgcccgaccaagcagagaagaccaggcaggacagccaggggaggagac

SEQ ID NO: 152536 - RNA, 79 nt, Homo sapiens
gggaggaaagggagagacaagagaggagacccaacagacgacaaggcagccgcaaggaaacacaacccagccaggcgcc

SEQ ID NO: 152537 - RNA, 76 nt, Homo sapiens
accggccacgcgcaccagagcagggcccccgagaaacaccggggccaggacccccgcagcaaacacaagaagacca

SEQ ID NO: 152538 - RNA, 69 nt, Homo sapiens
ggaaccagccacccagaggcgacagagaagagagggacggcgcaaaccagggcgaggcgggacagcgca

SEQ ID NO: 152539 - RNA, 72 nt, Homo sapiens
acagcggaggagaccgggaaaccgccgaagacgaagacaagaacgagccagcaaacccgaggagccagagac

SEQ ID NO: 152540 - RNA, 79 nt, Homo sapiens
gacaccgcgacaccccaacaaacaccagcgcgggcgaagagagaggaagacgcccaggggcgccgcagaccgcccccaa

SEQ ID NO: 152541 - RNA, 62 nt, Homo sapiens
gacgaagaaaagaggagacccggagaagcaggaccagaaccagggccaccgcacccaggcgg

SEQ ID NO: 152542 - RNA, 78 nt, Homo sapiens
gcggagcgaagcgaacaaaaagcagcaaaccggaccaccccgaagaaagcacagcacggaaaagaggcgcagggagca

SEQ ID NO: 152543 - RNA, 68 nt, Homo sapiens
accgaaggcagcaagagcagacgacaaaacagcagaccgagcaaaagccagaacgaagcccgcagcga

SEQ ID NO: 152544 - RNA, 85 nt, Homo sapiens
ggcagcccccaccccagcagcacaccagagccagccccaggccgcgagccggacaacacaccacaagaaccgcagcacagacaca

SEQ ID NO: 152545 - RNA, 71 nt, Homo sapiens
aagggcagaacacaagcgcaaagagacaaaacgggacaaagcgcaaagcacacaaaagcccaaacagacag

SEQ ID NO: 152546 - RNA, 82 nt, Homo sapiens
aagaaaacaaaaacgagaccaagagaaggcagccgagcaccgagccagcccaggaaaaggagagagcgcaggagaacaccaa

SEQ ID NO: 152547 - RNA, 80 nt, Homo sapiens
agggagcggcacagccagaagaccgaagcgcgacggaagggcacacagggaccaagaagccccggggacacgcgagaaaa

SEQ ID NO: 152548 - RNA, 72 nt, Homo sapiens
cggaaccgcgggagccgaaggggagcagaccaagacccccacagccccagaagcccccgagaccagagaagc

SEQ ID NO: 152549 - RNA, 81 nt, Homo sapiens
ggggaggcgcccccggagccgccccggaggagaaggcacccgggacaacggcacaagcgccgcaaaaccgggggcaagaga

SEQ ID NO: 152550 - RNA, 83 nt, Homo sapiens
ccccggaccgccaagaaagcggggcccgagggaaaggacacagaggcgcgagccgggaggcacggacaagacgaccccccccc

SEQ ID NO: 152551 - RNA, 72 nt, Homo sapiens
ccccggaggaaacagaagaaaagaagcgcagaagaaagacgcaagggcccgagggcaggacagcaggcaccg

SEQ ID NO: 152552 - RNA, 70 nt, Homo sapiens
gccagcacggcccgaggcagggagggaagcggagagacaggaaccaggggggaccaaaacaaccacacca

SEQ ID NO: 152553 - RNA, 78 nt, Homo sapiens
cagcaaggaagcgccacccaagagagcagagggagacacaagccaaccccaggaccgagaaaaaaaggcagggggaaa

SEQ ID NO: 152554 - RNA, 72 nt, Homo sapiens
ggaaaaggaagagagaccgacacccaagacaagacagcgcaaggcaggggccaggaaggaacggcagccagg

SEQ ID NO: 152555 - RNA, 63 nt, Homo sapiens
aacagcaagcgaaacccgaacaaagggaggcagacagaaaaagaaacgcaaggaacagagcag

SEQ ID NO: 152556 - RNA, 85 nt, Homo sapiens
agcaggacccggagggcccaagggccccaaaagcacacagggaacccagaaagaagaagcaggccgcaggacggagagcaccgaa

SEQ ID NO: 152557 - RNA, 58 nt, Homo sapiens
aaagggccaaagaagggagagagggccagaagcccaggaagcacacacaaggccacgc

SEQ ID NO: 152558 - RNA, 40 nt, Homo sapiens
acgagaagcggccagcgaccgggagggaccgccgcacaac

SEQ ID NO: 152559 - RNA, 57 nt, Homo sapiens
acggggagagccaccggccccagcagagcaacaaacaccgggccaaccagcaccaag

SEQ ID NO: 152560 - RNA, 76 nt, Homo sapiens
gcacccaggcaaaagcgcggccgccggagccgccgcgcgcgacggccgggccggccgcgcgcgggccgcgcacaca

SEQ ID NO: 152561 - RNA, 39 nt, Homo sapiens
cggaaggaaggaacccaaagccgccgaggccgcgagcag

SEQ ID NO: 152562 - RNA, 70 nt, Homo sapiens
gggagcccccaacaaccagagagcggcaggcgcagggaccaacaagcgcaccggaagggaccccgagaaa

SEQ ID NO: 152563 - RNA, 60 nt, Homo sapiens
ggcggacgggacagcacccccggggcagcccacccaagaggaaaggcaagggcagaaaag

SEQ ID NO: 152564 - RNA, 78 nt, Homo sapiens
gagaggcgggcgaggcggcccagcggcggcaggacgcgagagcggaaagggcaccgacccacacgacggaggcacccg

SEQ ID NO: 152565 - RNA, 76 nt, Homo sapiens
aggcaccagcaccacggagcacaagaccccgccccgccgagcgcagggcggcccgacgccagcgccagcaccgccg

SEQ ID NO: 152566 - RNA, 78 nt, Homo sapiens
gcagaaaccacaccaaaagcccaaaaggacccaaagggcaccacagcaggcggcaggggccgagagcagacacggaga

SEQ ID NO: 152567 - RNA, 84 nt, Homo sapiens
cgggggcacagccggcgcggagcgccgcaggcggcggccgagggcgcgcggaccccccgcgagagccgcccagagaagaagaaa

SEQ ID NO: 152568 - RNA, 61 nt, Homo sapiens
ccaacaagagagggaggcccccccgagaaaagcacagcacccgcaggccaacacaggacca

SEQ ID NO: 152569 - RNA, 44 nt, Homo sapiens
ggccacccgggaacggaggagggggagaggaacaaagagcgcag

SEQ ID NO: 152570 - RNA, 75 nt, Homo sapiens
aaaacccagcgccaggcccaggagaaagcccgaacgcgggaagaacgaagaaggacaaaaaggagaggcgacgga

SEQ ID NO: 152571 - RNA, 82 nt, Homo sapiens
gccaccgcaaccccaaccaaccggaggccagagcaccaggaagcaacaccccaccagaccacccagcaagcccacaaaaaag

SEQ ID NO: 152572 - RNA, 69 nt, Homo sapiens
caccagaccaaggaaaacgaacccaaaacaaaaccgagaagaagagagaaaaaccaaagcacggggcag

SEQ ID NO: 152573 - RNA, 98 nt, Homo sapiens
accccaaagccacaaaaaggcaaaagaagaaaggggcaaaacaaaagaaggaagagcagaccagccagccccaagcagccgcacgacaaagaacgaag

SEQ ID NO: 152574 - RNA, 44 nt, Homo sapiens
ccaagaagacggacagcaccgaaagagggagagcggagcgaagc

SEQ ID NO: 152575 - RNA, 61 nt, Homo sapiens
cccccacgccacacacaccacagccagacaggcagaccgcgaagcggaccgccggacccgc

SEQ ID NO: 152576 - RNA, 73 nt, Homo sapiens
cccgggggaagcggcgggaggccacgggagccggaagggcggaaggagacaaaaggcccagcgaaaggcacaa

SEQ ID NO: 152577 - RNA, 75 nt, Homo sapiens
aaacaaggggcaccaaacgcggcaacgcccccgggacagcacgccccggaccccaacccaggaacacagaccacc

SEQ ID NO: 152578 - RNA, 75 nt, Homo sapiens
agaagccccggccgggccggccagcgccggaaaccaacaaggaccaggaggagaagcaaccagagaggaagcgag

SEQ ID NO: 152579 - RNA, 73 nt, Homo sapiens
caaggagacacaaaggaggcaccagacgccggcaacaaagaacacacggaagaagcagaccaaagagggaaga

SEQ ID NO: 152580 - RNA, 77 nt, Homo sapiens
ccgcgcgagcgccccggccagcgccgcgcccgcccccagggcggcaagaggacaagaacaaggaaaacaagagaacc

SEQ ID NO: 152581 - RNA, 73 nt, Homo sapiens
agagaagacgacgcaccgcaggcagacaaaagggccaaagaagggagaaacaaaaccagccaagcagaggaga

SEQ ID NO: 152582 - RNA, 78 nt, Homo sapiens
gcggacgccaggggccagacccacaacaccagcaggaaaaaagagcggcagaaggccaaacggccgagcaggcgagcg

SEQ ID NO: 152583 - RNA, 82 nt, Homo sapiens
gggggcgggaagcggcccccgggcgcgggcgaggccgggcggcgccgccccaccggacccgcaggacccagaagaccccaga

SEQ ID NO: 152584 - RNA, 81 nt, Homo sapiens
cgacgcgcaaaaaaaggaacacagaagaaaagcggccaggcgagaagacagaaggagccacagagaaccccagcaaagcga

SEQ ID NO: 152585 - RNA, 68 nt, Homo sapiens
gacgccacagagggaagaccccaaggcagaccgaccaaacagggagcagcggacaggagacaggaacc

SEQ ID NO: 152586 - RNA, 80 nt, Homo sapiens
gacgagaaggaaagcccgggcagccagagccgcaaagaccgggaaaaccggaggccagcccacccagagaggccgaaaac

SEQ ID NO: 152587 - RNA, 71 nt, Homo sapiens
ccaaccaggacgcaggcgaggggccacgggacgcagacagagggaaaggagccgagccgccagcacccaac

SEQ ID NO: 152588 - RNA, 80 nt, Homo sapiens
cccaggcagccccgcacgagcggcaaccgaaagccagcagcggcgagcgacgcgcccacggaggaggcgggggccccaca

SEQ ID NO: 152589 - RNA, 69 nt, Homo sapiens
gcgggccgcaacgccacgacagaaggcgccaggcgggaaaccggcccagcggcacagccaccggcccag

SEQ ID NO: 152590 - RNA, 79 nt, Homo sapiens
cgcgcgcggcgcgggacgcgcgcgggcacccacggagccccggggcggggagaaccgccagcgacgggaaggcaggacc

SEQ ID NO: 152591 - RNA, 83 nt, Homo sapiens
acggaagcagcagcaacacacaaggaagccgggaggaagaacaggaaggcgagcccacggagagaaccagaccaggaggcggg

SEQ ID NO: 152592 - RNA, 77 nt, Homo sapiens
ccggacgacaccccacagcagccccgggggcgccgagggcacaagggcaacgacagaagggcgaagccaacgccaga

SEQ ID NO: 152593 - RNA, 76 nt, Homo sapiens
cgaaacagcgaacagaagaagagcaaagaaagcgccccaaaagacaggcccaccgaaggccaacggagagacggca

SEQ ID NO: 152594 - RNA, 81 nt, Homo sapiens
agcagcccaccacggggcagaacaccgaaaaccgccgaagcagcaaaggaagcagagcagaaggacagcaaaaggagaacc

SEQ ID NO: 152595 - RNA, 79 nt, Homo sapiens
gagaagaagagcggaaacccagcggagcggccagggccccacaggggcacaaccgagcgggagcgagaccagcaccaga

SEQ ID NO: 152596 - RNA, 82 nt, Homo sapiens
cccaggccagcgccccaggccaagagggacccacccggcgcaggaggccacgcgcagccccggaagagccacccagacccac

SEQ ID NO: 152597 - RNA, 82 nt, Homo sapiens
cgggcggccggcgggcggggcggcggcgcgacaggacccaaagacaggaccacgcaccagcagagaaggaaagcaaaccgaa

SEQ ID NO: 152598 - RNA, 68 nt, Homo sapiens
acgaagaggagaagacaccaaaaagcaaacggaccagaccgaccaccaaaaggggcggacccagcggg

SEQ ID NO: 152599 - RNA, 82 nt, Homo sapiens
ccaccagggcgcacgggacccgcccaagagccccaaaaacaccagcgaagaagcaggaaaaagaaacacaagacggcaaaaa

SEQ ID NO: 152600 - RNA, 88 nt, Homo sapiens
cgggagaagcagggaaggaggccgagccgggaccaggcccgggggcggcggccacgccaaggacgggaaacggaaacggccagaagca

SEQ ID NO: 152601 - RNA, 77 nt, Homo sapiens
gagcggcggccaggccagacccgaaggccaggagacccgaccccaagacagcagcgcccaaggacaagccaagcggc

SEQ ID NO: 152602 - RNA, 77 nt, Homo sapiens
gcacacccaagacgcggcaacaggaccggcaaagaacgcaacgcaggccagcgaagaagggcccccgagaccacgga

SEQ ID NO: 152603 - RNA, 77 nt, Homo sapiens
gcgaccggaaagccaagacggacccaagccgggggacgaccgggacagcaccggcgcaccagagagggccgcaggga

SEQ ID NO: 152604 - RNA, 84 nt, Homo sapiens
acgacggcggaacggggaacgacggcccagcaggcggggaagagaaagggcagcaaaaccccagaagaggcgaaccgcaggaaa

SEQ ID NO: 152605 - RNA, 71 nt, Homo sapiens
ccgggggcagcgccccgacgagggagccaacccagccccagagagcacgaaccagaccaagaggcagcaga

SEQ ID NO: 152606 - RNA, 90 nt, Homo sapiens
cgaccgcaggcagcaccggaggcccaggcccggcagcccaacccagcaggacaaggccaggcagagcagcccaccagggaggggaggggg

SEQ ID NO: 152607 - RNA, 69 nt, Homo sapiens
ggacccacccccgacagggacacagggagccccagacccacagacgcgcccaaccgggggaaggggcgg

SEQ ID NO: 152608 - RNA, 76 nt, Homo sapiens
ccggccggcgcccagaagggaagacccccagcaaagagcgaggaagggaccacagaccagcacgccggcgccacga

SEQ ID NO: 152609 - RNA, 78 nt, Homo sapiens
ccaaggggcaggagagaagggagcgaacacaggagaaacagaacaggcgacgggaaaggaaagggaccaaagaacaga

SEQ ID NO: 152610 - RNA, 67 nt, Homo sapiens
aaggcccggacccaaaacaggaaggaggggggaagacagggcccagcaccacaggacgggccgggaa

SEQ ID NO: 152611 - RNA, 53 nt, Homo sapiens
agcaacaacagaaccggacagaagcgcaaaaaacgcacagcacaagggggggg

SEQ ID NO: 152612 - RNA, 67 nt, Homo sapiens
ccgcagaccgcagaaggccggagacaccagcagggcgagcaacggcccaaccaacccccggaccgca

SEQ ID NO: 152613 - RNA, 29 nt, Homo sapiens
agcgcaaccagggagacacccagacagac

SEQ ID NO: 152614 - RNA, 75 nt, Homo sapiens
cgaaagcagcaaggcgagaggaggccgcggagaaccgaggcagcagcggggggccagcagaagaacccagaaaag

SEQ ID NO: 152615 - RNA, 75 nt, Homo sapiens
aagcgcagcccgaaggggaaaacgaagccacccaacggcaaagccaaggcagcgaccccaggaccccggagagga

SEQ ID NO: 152616 - RNA, 72 nt, Homo sapiens
acaaacaggaaaagcccacgagcacagagggccccagagggcagcaggccgccagacaacccagccaaacag

SEQ ID NO: 152617 - RNA, 71 nt, Homo sapiens
ccccgcggacccacccccgaacccccaaggagagaaaacagacagaaaagaaccagaaccggccaaaagcg

SEQ ID NO: 152618 - RNA, 74 nt, Homo sapiens
agacagacagcaacgaaggggcaacaccccggaaacacgacaagccaaagcaaaggcagaaacggggacacaag

SEQ ID NO: 152619 - RNA, 72 nt, Homo sapiens
gcacaggacccaggaagcgcccccggcagcaaggaggagccaacccgcacaccggcacaaaaaacagacacc

SEQ ID NO: 152620 - RNA, 83 nt, Homo sapiens
aggccggggcgcgaccgcggaccgcagcccgggccagccggggcggccggccaggaaccacccgaagagaaaccaagcggcga

SEQ ID NO: 152621 - RNA, 85 nt, Homo sapiens
cacgcggggcccagccagcaaggagaagcaacaggcaggaggaggggagacacaaggagcccccgcaaaccaagccgccacaggg

SEQ ID NO: 152622 - RNA, 77 nt, Homo sapiens
caagcaaccccgcgcagccaccaagagccccgacagcagccaagaccccccgaccggccagaccccaacccccacac

SEQ ID NO: 152623 - RNA, 77 nt, Homo sapiens
gggagccccgccgagggcccaaacacacagaccggaacagggaagagccaggccggcggggcacgcccgaacggacc

SEQ ID NO: 152624 - RNA, 66 nt, Homo sapiens
agagcaaaagcaacacagagaaggggggaaagcacgccggcacagagacacgcaggggccacgggc

SEQ ID NO: 152625 - RNA, 78 nt, Homo sapiens
cgcaccggcggcgcggacgacagcgagacaccgcaccaccaggaggagcaagcgaacaaaaaaccgaaaaacacacgg

SEQ ID NO: 152626 - RNA, 80 nt, Homo sapiens
caccagcaagcgcggaagaggaccggaggccggaggaagccaggaggccgggaaccgacccgagccccaaagacagaaaa

SEQ ID NO: 152627 - RNA, 65 nt, Homo sapiens
agcgccgcaaagccaagacccagcccaaacccagcaagagaagagccggggcaggagaaacaaca

SEQ ID NO: 152628 - RNA, 84 nt, Homo sapiens
ggacaccccggacgaaccacaggaagcgcggggcggcggcgaaaggacgcgccgggaggaaccgaggccacagagaggcacccc

SEQ ID NO: 152629 - RNA, 77 nt, Homo sapiens
acgccgcacccgaaaggaggccccgccggggacccgaaaaaaaagggaccgggcaaagagccagagaccccacagag

SEQ ID NO: 152630 - RNA, 74 nt, Homo sapiens
ggaaagccccccaccaggggcaaagggacacaaggacgagcaaaggaggacgaaaagaccaccagacggcaaga

SEQ ID NO: 152631 - RNA, 79 nt, Homo sapiens
cagacgcccgaccagggcagaacccagcgcccccccagaacacccagccacggaaccaggagcgcagaggagcaccggc

SEQ ID NO: 152632 - RNA, 74 nt, Homo sapiens
acaaggacaaccgaaaacgaacccaaaggagagcccggacgagacaagggcaacgagacacccagcggcccggc

SEQ ID NO: 152633 - RNA, 71 nt, Homo sapiens
aaccaacaacaacacaagaggcaaaacccaacgaggacgggggaaagaaggaagggaaaaaaaccaaagca

SEQ ID NO: 152634 - RNA, 76 nt, Homo sapiens
acaagacaagagccaggcgaggccccacggaaagagcggcgccaccccgggagaaggcgaccgagacgcaagcaac

SEQ ID NO: 152635 - RNA, 56 nt, Homo sapiens
cggaggcagaggggaggcgcgaaagacccccggagcagagggggagagggcaagga

SEQ ID NO: 152636 - RNA, 74 nt, Homo sapiens
agcgaggaggagcccgcacaaacaagcagccaagacaggggaccacaccaaacgaaccggggaaaaccgcaaca

SEQ ID NO: 152637 - RNA, 69 nt, Homo sapiens
cccggaccaacgaccgcacggaaacgaagcgacacgcacgggggaggggagccagacaacaaaaagaac

SEQ ID NO: 152638 - RNA, 80 nt, Homo sapiens
cgagagaggcaggcggagccgaccgggccagccaagggaagaagcagaagcaagcccagggcaaggaccgggaaaacgga

SEQ ID NO: 152639 - RNA, 68 nt, Homo sapiens
acacgcaacccccagcacaggccggacccagcagggcccccggaacaaacccgggagccacgccagac

SEQ ID NO: 152640 - RNA, 82 nt, Homo sapiens
gcgggccaagagccggacaggcacgaaggaccgaaagcacagaacacgggcgaagcagaaccacaccgcaggaaacaagcac

SEQ ID NO: 152641 - RNA, 65 nt, Homo sapiens
ccaggcgaagcggccgagcaggcgagcgaacgacggggacacacagccgagggggagaagaccag

SEQ ID NO: 152642 - RNA, 73 nt, Homo sapiens
ggacgccggagaggcaggcgcggcccgcggggcgccaggcacgcgaggcccccagcacgaaacacgggaagga

SEQ ID NO: 152643 - RNA, 71 nt, Homo sapiens
cacacaccggaccaacggaaaagagcaaagcagcagaagggccagcacgagccaaaaagcgcaggcggcag

SEQ ID NO: 152644 - RNA, 84 nt, Homo sapiens
ggccagacccaggaccgcgacacccccagggacaggaaagcaaggcccagcgagccggacccccagcggagggaagacgcagcc

SEQ ID NO: 152645 - RNA, 60 nt, Homo sapiens
gagcaagcgaccgaggcaccgaagcccgccccagcacgcgagcaccgaccgccggaggcg

SEQ ID NO: 152646 - RNA, 81 nt, Homo sapiens
aacaagacagaaaaacaacgaccaaaaacacacggaagcacaaagcgagagcaagcgcggacaaccaggaaaaagaccaac

SEQ ID NO: 152647 - RNA, 96 nt, Homo sapiens
cccccaaccccacgccaccgaagagccaagcccaggagcaggcaagaaaggacaaaggaacggaaaagcgggaaccggggagggggggaccacgaa

SEQ ID NO: 152648 - RNA, 66 nt, Homo sapiens
gcaggacaagagaaagaggagcaaaaacgagagaccaaaaaaaacagaaaagaagaaaaaacccag

SEQ ID NO: 152649 - RNA, 65 nt, Homo sapiens
aaaacgccggccgaacagcccacgccaagaaagcaggaccggcacgcgccggcagggcgaaggca

SEQ ID NO: 152650 - RNA, 79 nt, Homo sapiens
aaacaacccaaagacccacaccgaggcacaggaaccacaacagcaaagacccggacacagaacagcccacccaacagga

SEQ ID NO: 152651 - RNA, 66 nt, Homo sapiens
agacccaaggcgcaagaaaaggagccggaaacggacaaacaggcagacgcggccagccaccagaca

SEQ ID NO: 152652 - RNA, 61 nt, Homo sapiens
acgggcaggggcagcgcgagcacccggaagcaccagagcccccgaggaaagcacgcacaac

SEQ ID NO: 152653 - RNA, 60 nt, Homo sapiens
gaacggccaggcggccccgagcggaacggagaaagcgaggacaacggcaagcggagaaga

SEQ ID NO: 152654 - RNA, 48 nt, Homo sapiens
cgagcgggacccgggggccggccggaggaaggaaggaaaacgaaaagg

SEQ ID NO: 152655 - RNA, 85 nt, Homo sapiens
gcgcggccgcccccggccccggagcccccggcggcgccaccagaccgggagccggccccggagaaccagcggcgggcaaaaaaca

SEQ ID NO: 152656 - RNA, 60 nt, Homo sapiens
aagccaggcaccacgggggaccgcacaggggcaggaacggccaaagcagacagcagccag

SEQ ID NO: 152657 - RNA, 69 nt, Homo sapiens
gaagaaaacagaagcggagaaagggagagcacaggggggcagaggaggcaagagacacacagcccacca

SEQ ID NO: 152658 - RNA, 66 nt, Homo sapiens
cggggaccggcgaggagcgaagaacaaacacccgagcgcgagggaaagagagggacgaaaccccag

SEQ ID NO: 152659 - RNA, 81 nt, Homo sapiens
aggaggggaccgccgacaccggagagagaaacagaccaccccaggaaaagagaaccgccgaaaagacaagaacaaaccgaa

SEQ ID NO: 152660 - RNA, 73 nt, Homo sapiens
cggcaccaacacgcggagcggaagacggcaacccagaaacccagccccgaagacggccgaccccagccgcaga

SEQ ID NO: 152661 - RNA, 80 nt, Homo sapiens
gagagagcaggccggaccccaggccaaacgaccaagaaagcgggacgcggaaaacgggacccgcaggggcccccccggaa

SEQ ID NO: 152662 - RNA, 73 nt, Homo sapiens
caaaccaaagcgggaaaaaaaaaagacacgcagacgaccacggggaacacagaacagaagacgaaaaccagcc

SEQ ID NO: 152663 - RNA, 75 nt, Homo sapiens
cggcacgggcgacagcaggcacagggacgagggggcggaaggcggcaggcacaccacaagaccccgggcagaaca

SEQ ID NO: 152664 - RNA, 57 nt, Homo sapiens
gaagccagcagcccaacaccgccgaaggcacaccaacggcacaaagagaagcaacag

SEQ ID NO: 152665 - RNA, 71 nt, Homo sapiens
aaacagaccacccccaaacggaaagggcaggaagaccaggagggcaaaggagaacgagaccaacgagaaag

SEQ ID NO: 152666 - RNA, 77 nt, Homo sapiens
gagcgaagccaccccggcaaaggagcgagccggagcgccagcccaccggacacgagacggacgacgcagccagagca

SEQ ID NO: 152667 - RNA, 59 nt, Homo sapiens
ggaaccaggaacagaggacaggagcgcccgcccccaggaaaacacgaaggagagaagag

SEQ ID NO: 152668 - RNA, 78 nt, Homo sapiens
caagagcgccaggagcgccgaagagaggggccgaaccgggccagagagcaaacaaggggccgagagagcccggacggg

SEQ ID NO: 152669 - RNA, 66 nt, Homo sapiens
cggagggaaagaccaggcagagagacaccaaagcgggaggggcccgccccgcaggacggaacaagg

SEQ ID NO: 152670 - RNA, 74 nt, Homo sapiens
acgaacagagccggaagcaacacgcaagccggcagcgcccgagggagcaaggagaagagcggaacccagaccgc

SEQ ID NO: 152671 - RNA, 80 nt, Homo sapiens
gaaggggaccaggggcacaagaggaggaagaagggggaaagggaaaagaggaagagagaaacagagagaaggagaagaga

SEQ ID NO: 152672 - RNA, 78 nt, Homo sapiens
ggccgcggggcggaggcaccgcgcggggggaacggggcgggcgggccgcgcagcccccgggaaggaaggaacagagaa

SEQ ID NO: 152673 - RNA, 69 nt, Homo sapiens
aggaaaagaggaagagggcgggaaggcaggcagccaaaggcagggaagaaaaagaagacaccagagaaa

SEQ ID NO: 152674 - RNA, 68 nt, Homo sapiens
gccgacggcaagccagaagcaaggagcccaagaaaacaagcaaagccaccaaaaccccacgcgcgccc

SEQ ID NO: 152675 - RNA, 75 nt, Homo sapiens
aacgggaaagaaagaacgcagggaaggagaaggaagacggcgaggagagccggagaggaggaaggagaagcccgg

SEQ ID NO: 152676 - RNA, 73 nt, Homo sapiens
cgcggagagcaagcaaccaggcgagcaacgggccaggggagaaacggagcagcaacaaccggccgagcacggg

SEQ ID NO: 152677 - RNA, 68 nt, Homo sapiens
cggcggggcagccaggggaagagaccgggagccggcaagagccgacggaaacacgcgcgcaagagcag

SEQ ID NO: 152678 - RNA, 62 nt, Homo sapiens
agcgcgcccagcgcccgcagaaggcccagggacccagacaggagcgcgggaagaagccggcc

SEQ ID NO: 152679 - RNA, 45 nt, Homo sapiens
ccgcagaacagacgcaccaacagcagcagggacgcaccaaaacgg

SEQ ID NO: 152680 - RNA, 73 nt, Homo sapiens
agagaggaagaagaacgacccgcccggggcagcaggccggagcccaacagaaagcccagccccccccaccgcc

SEQ ID NO: 152681 - RNA, 80 nt, Homo sapiens
cgaccggagaacgcaggcccgaagggccgggaggggcaacaagggcacaacaagagccagcacccccacggcccacccag

SEQ ID NO: 152682 - RNA, 76 nt, Homo sapiens
gcgaccacgccccggggcagcaggcgaccagcgccacggccaccagcggaagaaaggaggaagagaggaaaacagc

SEQ ID NO: 152683 - RNA, 82 nt, Homo sapiens
cgggacaaggcagacgggagcgcaaggcgccccaaggccagacaaaacggaaggaagccagcgaagcaccgggacacgagac

SEQ ID NO: 152684 - RNA, 81 nt, Homo sapiens
cgcccgcgcacggccgcgggggcccaacgaaaagagcaccgcgagcaagcaagacgggcaaggacagcaaaagacggaaca

SEQ ID NO: 152685 - RNA, 71 nt, Homo sapiens
gaaacggaaagaagcaccggagagacagcacagcacccacaaagcaacggcccgggagcgagacgcaacag

SEQ ID NO: 152686 - RNA, 84 nt, Homo sapiens
cacgcaccaccccaccaccccagcggccagacggccagcggcagcaagaacccgaccccaccaacaacgaacgcggcaggcgca

SEQ ID NO: 152687 - RNA, 82 nt, Homo sapiens
gaaccccaggacgcgcccccgggagcgggcgcccagagaggcacacccccgcagagcgcccacaaacgggaaccagaagagg

SEQ ID NO: 152688 - RNA, 66 nt, Homo sapiens
aaggacaaaccgcgcccgggaccacaggcaccagccagcaaaggaaacgggaaaccacaagccgcc

SEQ ID NO: 152689 - RNA, 80 nt, Homo sapiens
gacggaagaggcggcaacagagccgcaggaggcccgcccaacacgccagacggcagaaaacggcaccacggacgcaccag

SEQ ID NO: 152690 - RNA, 73 nt, Homo sapiens
acacccgcaacccgggcccgcgcacaagaacgaggcgagcgaagccagggggccccaggggagggggccggcc

SEQ ID NO: 152691 - RNA, 72 nt, Homo sapiens
cagaaccaggcagaaggacgagacagaggcccggagacggcagggaggcagcagaggcgaaacgaccgaggg

SEQ ID NO: 152692 - RNA, 79 nt, Homo sapiens
caggacagcgccggccacccaaagcacgggggcaacagaggcaacagagacccgagcggaagagaagccaaggaacaag

SEQ ID NO: 152693 - RNA, 79 nt, Homo sapiens
cggcaagaacagacaaaaagaagcgggagaacgggcgcgccagagagggaaccaaggcgcccggagacacgaggaaagg

SEQ ID NO: 152694 - RNA, 78 nt, Homo sapiens
cccaacgaggggggagacggggcgagcgggcgacggcgcccggcaaggacaaggccgcgggagagcgggggcgggagg

SEQ ID NO: 152695 - RNA, 85 nt, Homo sapiens
gacaagccgcggcagccgcggaccaccgccgccaggggagaagcccaccacgcaacgggacggcgcggcggaaggcgcgccagac

SEQ ID NO: 152696 - RNA, 69 nt, Homo sapiens
ggaggagcaggacacgcacaaagggggggacacaacgccacgggccggaaggcaagaccagaccagacg

SEQ ID NO: 152697 - RNA, 58 nt, Homo sapiens
aacagggacagggcgaagcacagaaccagcacgcgggacgacccgggacagcccacgg

SEQ ID NO: 152698 - RNA, 110 nt, Homo sapiens
gccgcacccggacggaccgccacgcgcccgggagacgcccgcgccgccgccggcacagccacaccgagaagaccggcccaagaaccccaccgcccgaagacagcgccaca

SEQ ID NO: 152699 - RNA, 86 nt, Homo sapiens
agaaagcaggcgaacccgcggcgcaaaacgggaacccacccaccacccagggcacaacaccacagccggaccgcacccgcaccgcc

SEQ ID NO: 152700 - RNA, 40 nt, Homo sapiens
ggcacagagagcgggaccagaaaacgagaggaccgggcag

SEQ ID NO: 152701 - RNA, 76 nt, Homo sapiens
aagaaagaaaaagaggaagaggcaccagccaccaaaggacaggagaaaagaaagcaaccagccgagacaagcagcc

SEQ ID NO: 152702 - RNA, 87 nt, Homo sapiens
ccagacgagcggaggaggcacagggcgcggaccgcacgagcgcgccggaaccaaaaagaagccccagagccggggccaggagcccca

SEQ ID NO: 152703 - RNA, 78 nt, Homo sapiens
gcggaggcgggagcgcggaaacggaaccgggaggcgacgcacacgagcggaggcgaaggggacaagaccccccccagg

SEQ ID NO: 152704 - RNA, 75 nt, Homo sapiens
caggaaaaccggccacaaaaccagagcggagacacccaggaggcagaagccaggacgaacagcggggacgcccca

SEQ ID NO: 152705 - RNA, 66 nt, Homo sapiens
gccgcggcgacccagcgaggcgacaccgaaacccagagaccagccccgggaaaggagaggcagaaa

SEQ ID NO: 152706 - RNA, 70 nt, Homo sapiens
ggacagcgggcacagagcgagccacacacggggaaggcaacaaaaggacaagaacgaggagcaggaacca

SEQ ID NO: 152707 - RNA, 74 nt, Homo sapiens
ccgagaagcaaaaacagccgaccagccccaagaacacgacaagaagccgaaccaccgaacgaagacaagcaccc

SEQ ID NO: 152708 - RNA, 88 nt, Homo sapiens
ggaagcgccacaccggagcaacgaggcgccgggaccggcgcagagacaggcgcgaggagacaccgcagggcgaagaagagcagagcag

SEQ ID NO: 152709 - RNA, 80 nt, Homo sapiens
cgggacgcgggcgcgcggccccgcgagcgccggagcagcccgccgggacccaccaagggcccccacgacgcaggcggacg

SEQ ID NO: 152710 - RNA, 76 nt, Homo sapiens
agaagcagggaacaacagacaccaagggaccaagaaaggcccagggaccaaagcccggacaaggcccgagcaccag

SEQ ID NO: 152711 - RNA, 70 nt, Homo sapiens
gaagccgccaaagggaacggggacaaggccaacaggaaaaaggaaacaccggaaaccggaaacaacacgc

SEQ ID NO: 152712 - RNA, 80 nt, Homo sapiens
cggcgccggccgccccaccggcggaacccagcaaggagaagacagaggagccagaccaagagacagcacaggcgagcgag

SEQ ID NO: 152713 - RNA, 70 nt, Homo sapiens
aagagaggaagaagaacgacccgcccggggcagcaggcaaccccgcacaaacccagcgaacaacggagga

SEQ ID NO: 152714 - RNA, 71 nt, Homo sapiens
gaacaccaagaacgggcgcagggagcgccaaacgaggcacaccacaggcgggcagaaaaagcaggagcacc

SEQ ID NO: 152715 - RNA, 72 nt, Homo sapiens
gggcaccagccccgacaccacacccagacccaaaggcaacaacagcagggcccagaccaagccccaccaaca

SEQ ID NO: 152716 - RNA, 81 nt, Homo sapiens
gaagagacacaaggggcaggggaccgcgggacaacacaccgggacagagccgaggacacagaccccagaaagaagacagaa

SEQ ID NO: 152717 - RNA, 34 nt, Homo sapiens
agggcgcgccgagacgcccgaggggcgaacagaa

SEQ ID NO: 152718 - RNA, 88 nt, Homo sapiens
gcagaggagcagaccgcaaagcgccggaagaagcggccacccggagaaaggccacggccccagcccaccggaccggaccgcgggcagg

SEQ ID NO: 152719 - RNA, 82 nt, Homo sapiens
aaaaaaggaagcgaaagacagccccgcccagggaagaagagagagacagacacaggaggagacccacagaggcacaagaggc

SEQ ID NO: 152720 - RNA, 56 nt, Homo sapiens
caaaagagcgcgacaagagacgaaagcgggaacccacaacgaaggaaggaacagag

SEQ ID NO: 152721 - RNA, 76 nt, Homo sapiens
ccccggaaaacacaaaccgaaaccaaaacccccagcccagaaggacacacaccaaaccggacagaacgaccgcccg

SEQ ID NO: 152722 - RNA, 82 nt, Homo sapiens
ccccaggaagcgaagaggagcgagacggcccggaggaggccaagcgaccggagggaagaccagacggaccagaagcagaccc

SEQ ID NO: 152723 - RNA, 73 nt, Homo sapiens
cggcaggccccagaccgacccaccagagcaacagaggccacagcagcacacaacagggccgggggcagccccc

SEQ ID NO: 152724 - RNA, 73 nt, Homo sapiens
acgcagaaacacaggaccccccccaacgagggcccgagggcaggacagcaggcaccggcgaagcacagagagg

SEQ ID NO: 152725 - RNA, 38 nt, Homo sapiens
ggcggaaagcccacagcagcagcaggcacagaacaagc

SEQ ID NO: 152726 - RNA, 83 nt, Homo sapiens
gcgcgcagggccgaacccaggggaaagcacgaagacagaccgcgaaaccaggaagagaggaggccccccaggccacccaggac

SEQ ID NO: 152727 - RNA, 82 nt, Homo sapiens
gggcccgacaggagcgcacaagcgcggacaaggacccgaccgccgcgcgggggccaacaagcagacaggaagggaaggggcg

SEQ ID NO: 152728 - RNA, 81 nt, Homo sapiens
accaagaggcgacggcgaggcgcagaagagcaagaccgaagacaacaaaagaaaacaaagcacggaaacaagagaacacag

SEQ ID NO: 152729 - RNA, 77 nt, Homo sapiens
cgaccggccacgggcgagcgcggcaggggggaggcagcaaaggaaggacaaaaccgaaagagcaagggccgaaaaca

SEQ ID NO: 152730 - RNA, 58 nt, Homo sapiens
aggagccccgcgggaacaacagcgaccccaaggaagacaaggagaaccgcacgccacg

SEQ ID NO: 152731 - RNA, 67 nt, Homo sapiens
gagaagaaaggaaggagccaggcaagcccgcagaaacaggagacggaggagaggcaagaacaacgcg

SEQ ID NO: 152732 - RNA, 101 nt, Homo sapiens
cgccacgcagagccgccgcagcccaggaccgcacgccagggaaaccaaagagccaggcgacccccgcgcccgaggcccagaaggggacaagcgggagaccc

SEQ ID NO: 152733 - RNA, 77 nt, Homo sapiens
gaggcggcaaagaaacggagagggcggggacacagcgggcaggaagaagacgccgaggcccccccacccagaaccga

SEQ ID NO: 152734 - RNA, 59 nt, Homo sapiens
aacagaacgcggccccagccacaccaagcaggaaaaccgcccagccggggcaccgggaa

SEQ ID NO: 152735 - RNA, 75 nt, Homo sapiens
acgaggccgaccacagacagaggcaggccaccccaggccaccagcaagaccaccccccgagaacgagggcggaag

SEQ ID NO: 152736 - RNA, 63 nt, Homo sapiens
ccgaggccccccgaaccccaaggccaacagagagaagagaccaggcccacacgcagccacgca

SEQ ID NO: 152737 - RNA, 77 nt, Homo sapiens
cgggagaggcgggacaagccaagggacaggggggccgggggaacgaggaagcgcccaagaccaaagcgcgcgggcac

SEQ ID NO: 152738 - RNA, 93 nt, Homo sapiens
cgggagcagaacgagagggacgccggaccacgccacaagaggaggaacggcgaagccccaaccccgaagaacaagaacaggaggcgggccgag

SEQ ID NO: 152739 - RNA, 77 nt, Homo sapiens
gacccccgggcgccaggcggaagcagaggagcagaggcccacgcggaccggcagcgccaccggaccaccagacaagg

SEQ ID NO: 152740 - RNA, 79 nt, Homo sapiens
ccgcgcgcggggaccccacgggccaggcggcgaagagagcaggccgcccagaaggccagggcccagaaccgcaaccagc

SEQ ID NO: 152741 - RNA, 71 nt, Homo sapiens
ccgaccgggccaaagaagagccaacaggaccaaaccacccaggacacggagcagcgggagcccagacgccg

SEQ ID NO: 152742 - RNA, 38 nt, Homo sapiens
ccaggaccaaccgaaagcacgaggagcccaccggccca

SEQ ID NO: 152743 - RNA, 80 nt, Homo sapiens
gaaaggcgcgacgagcaaggaaccgaaggacagagcgggagccaccagcgccaaagggaagccaggagcccgggggcacg

SEQ ID NO: 152744 - RNA, 82 nt, Homo sapiens
gggggcagcgcagcggcagggcagcacggcgccggaggaccacagcccgacccaggggcgagaggacagagacgaggcgggc

SEQ ID NO: 152745 - RNA, 77 nt, Homo sapiens
aggacccaagcagggcacaggaacaggaagagagaaggccacgcccgaccccaagcaacaacggggcagggacaggc

SEQ ID NO: 152746 - RNA, 71 nt, Homo sapiens
cggaccccagcgccgggcagcgagagcaggaacacaaacaccgaagcacgggcccaacaggcaccccacaa

SEQ ID NO: 152747 - RNA, 72 nt, Homo sapiens
ggaaaggaacagcgagcggaccccgaccccgaggcgagacggaaagaacgccaaaagacgaacacaaaggga

SEQ ID NO: 152748 - RNA, 74 nt, Homo sapiens
gagaaaacccaaacgagagcgcggcaagggcggaccgcgggccacagccgagaagaggaaacacaccccagcag

SEQ ID NO: 152749 - RNA, 76 nt, Homo sapiens
gccggagaggcaggcgcggcccgcggggcgccaggcacgcgaggcccccagaagagcccaaacaaggagcacccag

SEQ ID NO: 152750 - RNA, 77 nt, Homo sapiens
ggacgcccacaggagccaggggcgggggccgaccccggaaccagaggccccaaaagccacgccgaagaaagacaaaa

SEQ ID NO: 152751 - RNA, 73 nt, Homo sapiens
gcagggacaaagagaccgcaacaaagaccgacccaaaagggcgcggcaagggggcagggggaggagcagaaac

SEQ ID NO: 152752 - RNA, 70 nt, Homo sapiens
aaccaggcgcaggacacacagagagagagggccgaggcagacaagggaaaggccgcgcaggggaccaccc

SEQ ID NO: 152753 - RNA, 73 nt, Homo sapiens
agagagcgggcgggcggccgggagacccacaggaccaagaagcaagagccagccagagaaccaccggaccacg

SEQ ID NO: 152754 - RNA, 57 nt, Homo sapiens
aaacaaaggaaaagagcaagaagaggaaaagaggagacggaagcggaagcacacgcc

SEQ ID NO: 152755 - RNA, 68 nt, Homo sapiens
caacaaccaacaacgcaggggacaccaaaagcaccgagaggaggaaccaagaaaaaaggcaggaccag

SEQ ID NO: 152756 - RNA, 42 nt, Homo sapiens
cacggggacgacggggcacgcggacgcggaggcgaggacaag

SEQ ID NO: 152757 - RNA, 76 nt, Homo sapiens
agggcagggaccaccaaagaggaccaacaaaaacagaccagaagaaccaagaagaacagagcgccgggacaggaaa

SEQ ID NO: 152758 - RNA, 85 nt, Homo sapiens
ccgagcgcgccgcccggcgccggcccgcccccgcagcagcgccagccacccaggcgaccggcaaccccaggagcgccaggagagc

SEQ ID NO: 152759 - RNA, 72 nt, Homo sapiens
gcagccagaagaaggaccggaagcacacaacaggaaaacaaaagaggagaaagggaggcgaggacaacgggc

SEQ ID NO: 152760 - RNA, 77 nt, Homo sapiens
cccaagagcgggaacaggaagccgccgaagcccagaagagaggggagccgaaggcacaacccagaaggcccggacgc

SEQ ID NO: 152761 - RNA, 76 nt, Homo sapiens
aggcggagcggggcccgacgacccaggggcgccagcaaagggaagaaaccccaacaggacccacacgacgggaaga

SEQ ID NO: 152762 - RNA, 37 nt, Homo sapiens
ggggggaccgcacggacccccacaggcgcgccgagac

SEQ ID NO: 152763 - RNA, 82 nt, Homo sapiens
ggcgcgagggcgggggcagcggcaggaagaaggaggccgaccaggccgacaaagcagacgcccgcaaacgaccggggaaagc

SEQ ID NO: 152764 - RNA, 30 nt, Homo sapiens
acgcaaacacaacaggacgggcacccaaga

SEQ ID NO: 152765 - RNA, 57 nt, Homo sapiens
gaaacacacccgcagggccagaggaggcccagggaccgcaggagacacggacacgag

SEQ ID NO: 152766 - RNA, 81 nt, Homo sapiens
cggcgcccggcaaggacaagcggaccgaccagaccgcaggagaaccggacaacaacaggaagagaagaggccaccagaaca

SEQ ID NO: 152767 - RNA, 70 nt, Homo sapiens
gccccacgcccccaggcaggagaggggcacgggggaagagacagcgagcagagaccaggagaagagaaga

SEQ ID NO: 152768 - RNA, 74 nt, Homo sapiens
acgaaaccggaaccaacaggagaagagcggcagagggcgaaaaccacggacagcaaggcaccggaagaagaaag

SEQ ID NO: 152769 - RNA, 78 nt, Homo sapiens
gggagacgacgggcagaaggcggaacaacagaggcagggaagacgaggacaacggcacagcagagcgggagacacagg

SEQ ID NO: 152770 - RNA, 80 nt, Homo sapiens
aagaacggcggacccgggggaaaccgcaaaagggcaccacaagccgaacagccagccagcaaaagaacagcagcaccaga

SEQ ID NO: 152771 - RNA, 71 nt, Homo sapiens
agcaaaaaagagcaaaaaacagacaggagaccgaaaccgggcagcaaacaccgaaagagacggaagagcaa

SEQ ID NO: 152772 - RNA, 82 nt, Homo sapiens
cccggccgccagaccacagcacagccgggaaggggagccaccagccccccgaaaaacaaccaccagcgagcaaaaaggcaaa

SEQ ID NO: 152773 - RNA, 79 nt, Homo sapiens
gacagcagaccaccacgaggggaccaccaggaacagaggggcacaaagacaaaccggcgaccacacacggggacgacgg

SEQ ID NO: 152774 - RNA, 77 nt, Homo sapiens
aggcacggcgccgaaacccacacagaggagggcacgcggccagaggcgggggccacagaagaggagaagcgggcaac

SEQ ID NO: 152775 - RNA, 77 nt, Homo sapiens
cgacaccacgacgacgggccacagcagccggcggcggcagagggccagggacgcggacgcagaagacgaccaaaagc

SEQ ID NO: 152776 - RNA, 60 nt, Homo sapiens
cagaacacccaggcgacagggcggggaacagaccagggaaggggaggagaagagccggga

SEQ ID NO: 152777 - RNA, 54 nt, Homo sapiens
gccaaaggcgcgcaaggaggaagaagcaccagcaccaagaccagccagggagac

SEQ ID NO: 152778 - RNA, 70 nt, Homo sapiens
gggaggccagcacggccgcggcggggcccccccgcgaccccacgagaacagagaaaaggaggccggacaa

SEQ ID NO: 152779 - RNA, 77 nt, Homo sapiens
ccaaaaccccggagaacccgaagcacagcgaaggaacaagaaaaaaagcagagcaggggggcaaacaacaagcccga

SEQ ID NO: 152780 - RNA, 72 nt, Homo sapiens
gcaaacaagaccaccggagagaaaaccgcacacacaaaggccaccaggcaacgcaccaacaacaccacacaa

SEQ ID NO: 152781 - RNA, 67 nt, Homo sapiens
aaacggcggcgcggagccagcgcgcagaccagcgggcccccacagagagcacacaaacaaagcgaaa

SEQ ID NO: 152782 - RNA, 47 nt, Homo sapiens
ccgccgcaaacgcgggaacaagggagccacgccccaggggagccaac

SEQ ID NO: 152783 - RNA, 73 nt, Homo sapiens
gggacgcacacggaagaaacgcaacccaggccacagagcaaccaaaaaccggccgcaggcacaaaagaagacg

SEQ ID NO: 152784 - RNA, 82 nt, Homo sapiens
cgggaccacggcagaaggagcggaaggcggagcgaagagccggaccaagcgccagaagcaaaacggaccaaggggccaggcg

SEQ ID NO: 152785 - RNA, 38 nt, Homo sapiens
aggccagaaggagcgcccccagggcgacgcgaccagaa

SEQ ID NO: 152786 - RNA, 80 nt, Homo sapiens
cccccggaggacgcgaggacgcacaggagaggggaccaaaagaacccagccaacccgcagagggaggggaggggcgagcg

SEQ ID NO: 152787 - RNA, 62 nt, Homo sapiens
aagaagagaaagccccaagcgacaggggagggacccagaacagcaacccgccaggaccacgc

SEQ ID NO: 152788 - RNA, 96 nt, Homo sapiens
gccagagccggagcgcgaaggccgggacccggccccggcccacaggggggggcaaacccgagagaacgggcaagaacggaagcacgggcggaggaa

SEQ ID NO: 152789 - RNA, 72 nt, Homo sapiens
ccaacgaaaggggcgacaccagggccgcagagaggaccagcgggaaaagagaaagggggacgaaggacaaca

SEQ ID NO: 152790 - RNA, 34 nt, Homo sapiens
aaaaccgcacgcgagggaacacgaggacccaaag

SEQ ID NO: 152791 - RNA, 72 nt, Homo sapiens
agaaaaaggccgcaggaagaggagcacaaagagaaacagcccggaaacagaggacgagaagagagaccgaga

SEQ ID NO: 152792 - RNA, 80 nt, Homo sapiens
cgccgcgccgcgggccggagaagcggccgcggccagggaacggggcacgcggccaacggaacacgaggacccaaagaaca

SEQ ID NO: 152793 - RNA, 77 nt, Homo sapiens
gcagcagccaacacgccaccgggggaaccgacagggcgggcggacgaccccacagacggcgggcaaaggagccaaag

SEQ ID NO: 152794 - RNA, 70 nt, Homo sapiens
acagaaccgacagggaggaacgcggggaggaggaggacaggaagaccggaagcgccaagcccaccagaca

SEQ ID NO: 152795 - RNA, 69 nt, Homo sapiens
agagccggagagcacaagacgaagagaaggcgaggcaggagcgcaacggcgacagagagacaggaagac

SEQ ID NO: 152796 - RNA, 85 nt, Homo sapiens
gcccgccggcccccccccgcgcccgcgaccgccgcggcgaagaggacaggcagccagggacgccaccaggcagccgcagaggaga

SEQ ID NO: 152797 - RNA, 79 nt, Homo sapiens
gaggagcggagaccgacacaacccccggagacaaagcaggaggacacaagaagggaggaaaggcggacccaggaaccac

SEQ ID NO: 152798 - RNA, 79 nt, Homo sapiens
cgggaccgagcacccgccccgggcaccaacgaagccaggagggaagcccagaagacgcacaagagagaccgaccaaacc

SEQ ID NO: 152799 - RNA, 40 nt, Homo sapiens
acccagcggccaggaaggcaaaccgaggggacggggcagg

SEQ ID NO: 152800 - RNA, 79 nt, Homo sapiens
cagaccaggaacaagagagaaagagggacagccgcacggaggcgaaacacaaaggggcccaggaaacaccagaaacagg

SEQ ID NO: 152801 - RNA, 68 nt, Homo sapiens
gcggggaagcccccgcccggcacacagagaaaaaaagggaacaaaacacagcaagcagacaaaagggg

SEQ ID NO: 152802 - RNA, 107 nt, Homo sapiens
gcgggggggcgcgggagcaacgggaggccggacccagcgagcgggcggcacgcacgcaggaaggagggccccggagcagccacaccaccgaggccccacccagcacg

SEQ ID NO: 152803 - RNA, 81 nt, Homo sapiens
ggagcaggcgcgggcgagccggcgacggacgcggcgcgcgaccgacacgaagacccagacacgaaccccaaaaacccagac

SEQ ID NO: 152804 - RNA, 71 nt, Homo sapiens
cggccgcagacaaaacggccgagcgaccaggagaggagcccccgcccgaagaccggggagggccccccagc

SEQ ID NO: 152805 - RNA, 67 nt, Homo sapiens
aacgcaccagagccgagaaacgcgaaaaggaagcggaaggacggggacagaagacccacgccgagcc

SEQ ID NO: 152806 - RNA, 73 nt, Homo sapiens
cggccgagacgcaccgcgggacgggaaccgcgacacaaggaccacggcccacacccaggagcagcagaaaaga

SEQ ID NO: 152807 - RNA, 72 nt, Homo sapiens
gggagcccgccagggagagggacacaccaagagcgagccagagcaaagcaccccaaacaggaggcagagagc

SEQ ID NO: 152808 - RNA, 75 nt, Homo sapiens
gcgcaaccaaagcaccagaccccaccagcaacgagagggcaaaaaacacagacaccggcgaacaacaagaaccgg

SEQ ID NO: 152809 - RNA, 69 nt, Homo sapiens
gaaacaagcaacgcgagagcaaagggaaacgagcacggagcgcccacggagccacggaaggaaacgagc

SEQ ID NO: 152810 - RNA, 100 nt, Homo sapiens
agccacggagcgcgcggaggaggagcaggaggaaagagggaggaggccacaccaagccaggcggaggcaggagaaaccggccagaggggacgcgggacaa

SEQ ID NO: 152811 - RNA, 65 nt, Homo sapiens
aaacagacgacaaagagcacgaaccggggaacagaccggaggaaccgagcggaacaccaggacca

SEQ ID NO: 152812 - RNA, 83 nt, Homo sapiens
gaaccgaggggcccccaggaccaacccgagagagaggaaccagaaccaccacgaccaagaggccagaaccaccagagcccagc

SEQ ID NO: 152813 - RNA, 76 nt, Homo sapiens
ggcccgggcgagcccggagaagaggaaggagcggcgcgcggcaagcaagaggagcaccgcgccaccccagccgcga

SEQ ID NO: 152814 - RNA, 82 nt, Homo sapiens
gcgggccgcgcgaagcccgagaggagccacaaggagacgccgccgcgcccccgcggacaaggggcggacagggggaagagga

SEQ ID NO: 152815 - RNA, 68 nt, Homo sapiens
acggagcagccccggagccaaggcggagaaaacggaagagccaacgacacagcaggggccagacaacc

SEQ ID NO: 152816 - RNA, 55 nt, Homo sapiens
ccaagaaacaaacccagacgggcagaagagagagaaagaaggggaaaacggacga

SEQ ID NO: 152817 - RNA, 78 nt, Homo sapiens
gcgccacagagcagcggagcaccccaacgagcgaccgggcagccagaacagcacacagcaccggacggcacacgccgg

SEQ ID NO: 152818 - RNA, 70 nt, Homo sapiens
cccacaggccggcggaccaccaggcgaccaccgaagaggaggccaccagcacagccaggaggggagacgg

SEQ ID NO: 152819 - RNA, 67 nt, Homo sapiens
gcaggcaggggacaggcacacaagaggccacccccgacgccaaccaaaacgaagaagagaagcccag

SEQ ID NO: 152820 - RNA, 73 nt, Homo sapiens
aagagcagagaaacacgcagccacgccacccgacccacgcgggaaacggccagcaaaacagaacgcacggcga

SEQ ID NO: 152821 - RNA, 65 nt, Homo sapiens
aggcagacaaaagggccaaagaagggagagagaggaagacggggcccaaagaggaagggggaaag

SEQ ID NO: 152822 - RNA, 79 nt, Homo sapiens
cggaaacagcagagccaccagccaagaccaagcgcgaaagcgccaaaaggacagcagagccccccccagcgccgaaggc

SEQ ID NO: 152823 - RNA, 39 nt, Homo sapiens
gaccgagaggaacacagggaacagaaagaacagccaaaa

SEQ ID NO: 152824 - RNA, 105 nt, Homo sapiens
cggcgggagcgcgaacgagcgacggcggaacccggggccgggacgcagcccggcggcagcagagcccaaaaggcagagcgaggagagaagaaggagggaaagcca

SEQ ID NO: 152825 - RNA, 52 nt, Homo sapiens
gggacaaaacagaggcaacaagcggaaccaccagacacgacaacagccccca

SEQ ID NO: 152826 - RNA, 82 nt, Homo sapiens
gaagaccgaggggcacaccgaccagccgcacgccgaccggcgccgggagaccggacaacaggcacaaagagagaaggaacac

SEQ ID NO: 152827 - RNA, 78 nt, Homo sapiens
cccagcacgccgcgccgcgcgcgggcccgcacagacgccgcgggccccagcgcaggcggaggcagggcacgacggcca

SEQ ID NO: 152828 - RNA, 72 nt, Homo sapiens
ggaaaaagacaccaccaacggaaaacaacacagggcagcccgccgcgggaacagacagaggaagacggggca

SEQ ID NO: 152829 - RNA, 83 nt, Homo sapiens
cgaggagagcccagaggccaaacgaaaggaaacaagaaggcacagagcgagaagaggcgacaccagggcccaaagaacaaccg

SEQ ID NO: 152830 - RNA, 78 nt, Homo sapiens
caacaagcgccggcgcgccagggcccggggccgacgccagcagacaggacggaggcacgggaggagcggcagccagcc

SEQ ID NO: 152831 - RNA, 67 nt, Homo sapiens
gacaaaagggccaaagaagggagagagggcagagaacaagcggccccaagcaggaccacaaagggac

SEQ ID NO: 152832 - RNA, 68 nt, Homo sapiens
aggaccagcacaagagaaggaaaaggagaacccgcaacacaaaccccaccaacaaagacaagaaggca

SEQ ID NO: 152833 - RNA, 70 nt, Homo sapiens
accagagccacaaccaaaagaagcacaccgaaaaaccagaagagaaaaaacaaaggggagaggcaccccg

SEQ ID NO: 152834 - RNA, 49 nt, Homo sapiens
cccgcgcggccccgagggccccaaggccgagccaagaacagaggcgccg

SEQ ID NO: 152835 - RNA, 77 nt, Homo sapiens
gggagacggcgggcaagcgccacggcgcccggcgccgcacacaggaacacagcgccaagggcggaaaacaccccaaa

SEQ ID NO: 152836 - RNA, 80 nt, Homo sapiens
caacagacagggaggcgcgggcagccacaaggggacccacccaccacacccagggccgagcccggcgcagcggccccgcc

SEQ ID NO: 152837 - RNA, 78 nt, Homo sapiens
gggccgagcgcggcccgcaggcgagcgccgaaaccgggcgcaggcgggagaagacagaggagccagaccaagagacag

SEQ ID NO: 152838 - RNA, 102 nt, Homo sapiens
ggagccggggggggcggagggggagacggccgggagggcccgccagccgcgcccgccgcccaagccagagaaccaccacagggcccgaaaaacacagagcca

SEQ ID NO: 152839 - RNA, 58 nt, Homo sapiens
acaaggcaacacccgaagaaacaagcacaggggggaaggggaaggacaggagcaccgg

SEQ ID NO: 152840 - RNA, 44 nt, Homo sapiens
aagaagggccggcgccagcgaggacccagaaggaccccaccccc

SEQ ID NO: 152841 - RNA, 59 nt, Homo sapiens
cccggaggaggcgaagcgagaggacagacacgcacagaacccaaagcccaagagggccc

SEQ ID NO: 152842 - RNA, 73 nt, Homo sapiens
gggaaagcaagaaggcaaacaaagcaaagaaacaaccaaggcacaggagaaacgggccagggacagcggaaag

SEQ ID NO: 152843 - RNA, 70 nt, Homo sapiens
gggagcggcgccgcgggaggagcgccagcccgcggcggcgaggaagaaacaaggcgggccgcgagaccac

SEQ ID NO: 152844 - RNA, 82 nt, Homo sapiens
cacgagcgcccgaagagcaaaaccagcgggcggccgcgcccccaggacacaaggggggcaggccggaccgaaggacaggaga

SEQ ID NO: 152845 - RNA, 81 nt, Homo sapiens
ggcccgaacccggcgacggcagggcccacggcacggccccgcggcgcgcaggaggagcggcaggccagaacagcagaggac

SEQ ID NO: 152846 - RNA, 50 nt, Homo sapiens
gggcccgcgggccgccccaccccacagaagcacaaggaccgaggaaccac

SEQ ID NO: 152847 - RNA, 65 nt, Homo sapiens
aaagagcaagaccccgccggagccccaaacagagacaggggaaacgaacaagaaagaagagcaac

SEQ ID NO: 152848 - RNA, 68 nt, Homo sapiens
aaacccagacaccgacgggccgcgaggggaagaggaagcaaagccaaggacagcagaccacagcccgg

SEQ ID NO: 152849 - RNA, 75 nt, Homo sapiens
gcaacgccggcagcgcccacgaccagggaaccgggaaaagccccacgagggaaaaccccgaggagcacgaaggac

SEQ ID NO: 152850 - RNA, 81 nt, Homo sapiens
caacagcacggaagccagcaccaggagcgcaccgaacccggggggaccgcagccccccccccaaaacccaaggacacccca

SEQ ID NO: 152851 - RNA, 71 nt, Homo sapiens
aaaccggaagccaaggccccagacaggacagaagacaaggagacgcagagaaacggcagaggccaggggga

SEQ ID NO: 152852 - RNA, 76 nt, Homo sapiens
cacagcacagccgggaaggggagccaccagccccccggccgaaccggggcagcgcgcaaggaggagcagcgagagc

SEQ ID NO: 152853 - RNA, 52 nt, Homo sapiens
caccagaaagggaaaggaaccagggccaggccacacaagccccagccaaaac

SEQ ID NO: 152854 - RNA, 68 nt, Homo sapiens
agaagacaaaaagagaacacccccgagcggagacaggaggaaggcaaccagggcgaggaggccagggc

SEQ ID NO: 152855 - RNA, 82 nt, Homo sapiens
agaagccacaggagaccggaggccaacggcagaagccaccacaaaagcgaaagggcacaccacaggagaaggcagaggcccc

SEQ ID NO: 152856 - RNA, 44 nt, Homo sapiens
gacagggccgaggccccagagaaccaaccagacccggagcgagg

SEQ ID NO: 152857 - RNA, 68 nt, Homo sapiens
caaaagacaccagaccaacccaggagaagaaggaaaggacccaggggagaaaccgcggccacaggaaa

SEQ ID NO: 152858 - RNA, 72 nt, Homo sapiens
gaagacaccggggacagacagggggggacacagcgagccacgcgccaggaagcccggccaaggagccaaccg

SEQ ID NO: 152859 - RNA, 62 nt, Homo sapiens
ggccaccggggaaacaaacacacgcaggcaggcgaaccccggccgcgagcccagcgacaacg

SEQ ID NO: 152860 - RNA, 77 nt, Homo sapiens
ggcgggacacccaaggggcacggaccccccacagcgcgcaaccgaacgcacacgaaggaagacccaggaaaggggag

SEQ ID NO: 152861 - RNA, 81 nt, Homo sapiens
aacagagaggaagaagcgaggggcacggcgcgagacagagcggaggggaagagacagcagcgggaagccacggccaacccc

SEQ ID NO: 152862 - RNA, 70 nt, Homo sapiens
cgccaggccacaaaagaaagaaaccgcgaggcagggaaagaaggggggcaaaccgagggacacccagcga

SEQ ID NO: 152863 - RNA, 123 nt, Homo sapiens
caagcccaccagagaagcgacccaggaccaggagggacgcaaaacgcccaggaggccgacgggacacgacacagggacgggccaagaacccaggaggagggaaagccggacccggcagaaggc

SEQ ID NO: 152864 - RNA, 69 nt, Homo sapiens
ggccgcgcagggcccggcgccgcgcagcagcccccacgcgccaccccgggcaaacagccacgaagcgac

SEQ ID NO: 152865 - RNA, 75 nt, Homo sapiens
cgaaaagcgccaaggaaaaggacgagaacgccgcgacagaaaggacaaccaaagccaagcaacgaaggacaggac

SEQ ID NO: 152866 - RNA, 74 nt, Homo sapiens
acaaccgcagggaccacagcaccgaaaacaccaggaaagacaggagaccaaaaagaaagcaccacaagacccca

SEQ ID NO: 152867 - RNA, 84 nt, Homo sapiens
caggaggaaaacacaccaagaccaaaaacggagcggcaaaccaccaagaacccaaaaaccggcagagaaggccaagaaaaccgc

SEQ ID NO: 152868 - RNA, 77 nt, Homo sapiens
aggaaacaccggcagcccagagagcaggcgcagaagcagaagcgcccgcgaggcccgcgccaagaccagagacggag

SEQ ID NO: 152869 - RNA, 80 nt, Homo sapiens
cggcgaagggaacagccccaagaggcgacaaaccaagaggagccagaggcgaccgaaagaaaagggccacagacagcagg

SEQ ID NO: 152870 - RNA, 86 nt, Homo sapiens
gcggcgccggccggcggcgcgcggcgcgagccgcagccggcccgccggacggagacgagcagagggggcacggaggcgcaggagcg

SEQ ID NO: 152871 - RNA, 73 nt, Homo sapiens
acaggccaagcgaagaaacacacacagaaccagggggcaagagcaaggcaccagcagaacagacacccccaaa

SEQ ID NO: 152872 - RNA, 67 nt, Homo sapiens
ggaccccaccagaggacagccagccggaccccagcccaagaacgcacccacgaggcggcgacggaaa

SEQ ID NO: 152873 - RNA, 52 nt, Homo sapiens
agaaaccccagagcgcgaccgcagaggaggcaggagaaccacacacacaccg

SEQ ID NO: 152874 - RNA, 77 nt, Homo sapiens
gaagaaagcaggaaagagcacagaagaacaaggaaggccccagaagccgaaccggaaggacaacccggcagagccac

SEQ ID NO: 152875 - RNA, 80 nt, Homo sapiens
cagagcacagagcaccacgaacaaacagaaagcgcgaagaggggaagcaaagcaaaccggacaaacaccagaccagacga

SEQ ID NO: 152876 - RNA, 82 nt, Homo sapiens
caaccgcccccacagggcccggaaggcaacggcagagacacacgccagcagcggagcaacaggaggcaaacaggcccccggg

SEQ ID NO: 152877 - RNA, 76 nt, Homo sapiens
cagggaaaggagcggggagccccgcgccacagacagaagcgaaggggacagggggagaaccgccagggaaacccgg

SEQ ID NO: 152878 - RNA, 58 nt, Homo sapiens
gagccaagaccacagcagcacccaggaagcgaaagggggcagacagaagagagacgag

SEQ ID NO: 152879 - RNA, 63 nt, Homo sapiens
gcacacagccaggccgcccggaaagggcgcgggaaggcccggcgggggcaacgagaaggacag

SEQ ID NO: 152880 - RNA, 82 nt, Homo sapiens
cccccgcgcgagcacccgagcggcggcggcggcagcagcggcagcggcaagcaccggcaagaaagccagagcccgaacggaa

SEQ ID NO: 152881 - RNA, 80 nt, Homo sapiens
gcgacacaagaagagggcggagcggagacgggagaagaaaagacagagacggagaggagagcaacggcagagggggaccg

SEQ ID NO: 152882 - RNA, 76 nt, Homo sapiens
cgcggccgcggagacagggagacccggggcggagcaacggggcggcacacaaggagcgaagggcagggagaacgcc

SEQ ID NO: 152883 - RNA, 80 nt, Homo sapiens
cccaggccgccggcaggccaggcccagaggcgggaagacgcaagaacgcacaaacgcgcgccacccgcgcccaagacgcc

SEQ ID NO: 152884 - RNA, 71 nt, Homo sapiens
cccccgcccccccgggcaggaagacaaaaacagacggccaaaacgggaagcaaaccagagcgacgcgccag

SEQ ID NO: 152885 - RNA, 51 nt, Homo sapiens
accaagaaccagggcggaaccaaagaaaaacagaaagaggaaaaccagaga

SEQ ID NO: 152886 - RNA, 74 nt, Homo sapiens
gccaccagaagccacgaagaaaagaacggagggcgcgaaacacacgcccgagacaagccacaaaacaagaaaaa

SEQ ID NO: 152887 - RNA, 77 nt, Homo sapiens
agaccgggagcacgcacccacgaggacaacaggcacaaagagagaaggaacacccacagggcagacagagaaagaac

SEQ ID NO: 152888 - RNA, 57 nt, Homo sapiens
ccagcgcagccagcaccaagccggggcacacagaaacgaaaaacagcagaaacggaa

SEQ ID NO: 152889 - RNA, 70 nt, Homo sapiens
ggacaggaggcaggagagcaggccaccacagggccgggaccgacccagaagcccacggcccaacaagaca

SEQ ID NO: 152890 - RNA, 67 nt, Homo sapiens
gaaagacaaaaggaggccaccagaggagcagaaagcgcacaacaaaaaggaccccagggaaaaaagc

SEQ ID NO: 152891 - RNA, 63 nt, Homo sapiens
gagcccaaaagaagaggcacaggcccaggcagaccgcagcaaagggaggacgcgagcggaaga

SEQ ID NO: 152892 - RNA, 48 nt, Homo sapiens
cccgcggagagcccaaacaccaccaccaagagaggacagaccccagga

SEQ ID NO: 152893 - RNA, 85 nt, Homo sapiens
gaccagagaagagcacagaagaccagagaggaccaacggccaaccgagcgccgcaagcggacgagggccagagccaggcggcagc

SEQ ID NO: 152894 - RNA, 37 nt, Homo sapiens
ggcagccagaaaagacagaaagagggaagaaagaggg

SEQ ID NO: 152895 - RNA, 69 nt, Homo sapiens
gcaagcaaagaccaagagaagaggcagaaaaaccacagaaacgaaagaaaagacaaaaaacaacgaaaa

SEQ ID NO: 152896 - RNA, 68 nt, Homo sapiens
aggaggacaacgggacccagaagagggaagagcggccaagagagaaacacaagagaacaccaggcagc

SEQ ID NO: 152897 - RNA, 77 nt, Homo sapiens
gcaggcaagcagggcgagggagcagcagaaaccggaaaacacacccagcagcacgcaaggcaagaggaaccagccag

SEQ ID NO: 152898 - RNA, 34 nt, Homo sapiens
ggacccagcgaggaggcggagcagaccaccgccc

SEQ ID NO: 152899 - RNA, 62 nt, Homo sapiens
cgggccgggaggggacggccgccggagccgcgaggccaaggcaccgaaggaagaaaaacagc

SEQ ID NO: 152900 - RNA, 55 nt, Homo sapiens
caccccccgccgggcaagcccgggggagaggcaccagcaacagaccaaccgcagc

SEQ ID NO: 152901 - RNA, 77 nt, Homo sapiens
ggaggggccgccggcgggaccgcagcacggggaaacgaccgccccaaaacggggagggcagaacaacagcagcagaa

SEQ ID NO: 152902 - RNA, 76 nt, Homo sapiens
gaacgccacgcgggccggcgaaagcgaacagaaaagccagaccaaagcaaacaacggaaagcgggcagaggaaaag

SEQ ID NO: 152903 - RNA, 79 nt, Homo sapiens
aaggcgggcaggagaaagggcggaaccacaaggcaccacgccgcccagaacagcacaaggcggagccaccgcacccagg

SEQ ID NO: 152904 - RNA, 78 nt, Homo sapiens
ggggaaagcaggagagaagaccagaagggaggagacggagagaggagaggagaaaagcagaacagagcaacaagagca

SEQ ID NO: 152905 - RNA, 79 nt, Homo sapiens
agaagacaagagagacggcgaggcgcgccccgcccggcagcgaccggagaacagagaacgaggaagaaaaggaaaccca

SEQ ID NO: 152906 - RNA, 65 nt, Homo sapiens
gaggaccagaaaccgccccagcgaggaagaggacaggagcggagagaaaaacagcccgcagacac

SEQ ID NO: 152907 - RNA, 75 nt, Homo sapiens
acgccccccaaagcaggccaccggacagcagcggggcaccccagacaggagcacccaacaccgggaagagccaca

SEQ ID NO: 152908 - RNA, 78 nt, Homo sapiens
gggcgggccgcgcgaagcccgagaggagccacaaggagacgccgccgcgcccccgcacacaggacagggggaagcccc

SEQ ID NO: 152909 - RNA, 79 nt, Homo sapiens
aagagccaccccacacaggccacagacacaaggccagaccacagacaacaggcacaaagagagaaggaacacccacagg

SEQ ID NO: 152910 - RNA, 48 nt, Homo sapiens
cacgcagcagaagcccggagcagaagaagaacccagccggaaaacgga

SEQ ID NO: 152911 - RNA, 74 nt, Homo sapiens
ccggaaagccaggcagggaaagggagcagcaccggccacacccacagcacgaccggaacccagcgaccgacgcc

SEQ ID NO: 152912 - RNA, 53 nt, Homo sapiens
gcagggcgcccccgacccgccggacgggagcccaggaccagagagagaagagg

SEQ ID NO: 152913 - RNA, 75 nt, Homo sapiens
ggcccgggagcggaggaaccgcgaacaccagaagcagccgaaacgaaccaagaaccgaaggaaccaagaggaaca

SEQ ID NO: 152914 - RNA, 78 nt, Homo sapiens
aggaaaacaagacagcgccaacaagagagaaaacacagcggagggaagaagacgaagaaggcggagaaaaggagcaag

SEQ ID NO: 152915 - RNA, 78 nt, Homo sapiens
gaacccccagcagagaccgggaccgccgggcccaagcacacagagcgcagcaaggaaagcaagaacacaaaggggaaa

SEQ ID NO: 152916 - RNA, 77 nt, Homo sapiens
aaaaccaaccccacggaaaagaaaaccccgccacagaaaaagaagaagaggagggggagaaggacccagaagccgac

SEQ ID NO: 152917 - RNA, 76 nt, Homo sapiens
gccaacccaaaaccagggcggcaaaacgagcgggccagacgccacccagagcagccgaacgccaaagaaaccagca

SEQ ID NO: 152918 - RNA, 81 nt, Homo sapiens
aagggacaagacagcccaggccgggaaaggaagacggggcgcagcgcaacccggagaacaccgccgccacacaacgcgaga

SEQ ID NO: 152919 - RNA, 72 nt, Homo sapiens
gcacaccacaagcaacagaccggaggacccgaggagcccgaagacccggggaccagaggagacgccccaacg

SEQ ID NO: 152920 - RNA, 55 nt, Homo sapiens
ccacagccaaggcgggagccacggcgggaccaggacggaccaacacaagcaccca

SEQ ID NO: 152921 - RNA, 69 nt, Homo sapiens
gaaaacacggggcaccaggacggcagacaagagaaaacaacaaggaacgacagaggaaagagacaacgg

SEQ ID NO: 152922 - RNA, 60 nt, Homo sapiens
ccgacaggaacagggaccacgggggggcacgagggcgagacgaacaccaccggagcgccc

SEQ ID NO: 152923 - RNA, 72 nt, Homo sapiens
ggcgaacaaagagaaaagagagagcgagagagggaccgcagacggacccacccaggaggcagaaacacgccg

SEQ ID NO: 152924 - RNA, 76 nt, Homo sapiens
caacacccagcagaccccccggggcgacagggggaccgcggcgcgagggacgcaccgccccaggacggggagaaag

SEQ ID NO: 152925 - RNA, 87 nt, Homo sapiens
gcccgcccgccagccagagcccacgcagcaacaagggcccccgacgggcgcggccgaggcaagaaccggggcggcacccaccccccg

SEQ ID NO: 152926 - RNA, 74 nt, Homo sapiens
ccaccaaaaagggaaaagaaaccggcccagcagccggggagagcccacgccccaggccccaggcaaggaagcgg

SEQ ID NO: 152927 - RNA, 42 nt, Homo sapiens
ccggcagcggcgcgggaggccggcgggaggagccaccgaccc

SEQ ID NO: 152928 - RNA, 76 nt, Homo sapiens
ccgcccacgcaaacccaaagaccccgccggagacgagagacccacaggaccgcgaacaaggaggccacaaaacacc

SEQ ID NO: 152929 - RNA, 85 nt, Homo sapiens
ccgccacgacacaggggaagaagaccaccgcacagacccgggaacagcggaagaagaccgccagcagcagccgaaaacgcacaag

SEQ ID NO: 152930 - RNA, 79 nt, Homo sapiens
ggcccagaacagcacacccaggagcccgaaagagcacgaggagccagaaacgcaaagggcggagaacggaaaagcacca

SEQ ID NO: 152931 - RNA, 65 nt, Homo sapiens
gagccaaccgcagccggacagaagccgagccggacagaccaaggagacccccaggcccaggcggg

SEQ ID NO: 152932 - RNA, 75 nt, Homo sapiens
gaacaggcagcaggaagcacggcgggcgaaacagggaccaagaaaggcccagggaccaaagcccggacaaggccc

SEQ ID NO: 152933 - RNA, 54 nt, Homo sapiens
ccgcagcgccagcagcggacaggcacagacaaccaggaacaagccagccagcac

SEQ ID NO: 152934 - RNA, 64 nt, Homo sapiens
aagagccgccacaggagacagcgcggagaacggggaaccagcgccccagcaaaccaccccaacc

SEQ ID NO: 152935 - RNA, 69 nt, Homo sapiens
ggcagagcaggccgcggcgacccagcgagaccagaggacaacacaaggaccgaggcccaagcgccaggg

SEQ ID NO: 152936 - RNA, 71 nt, Homo sapiens
cgccgacgaggacccagaagcgggccgcagccaggcgggaaaagccaggggaggcaagcaggggggcaaag

SEQ ID NO: 152937 - RNA, 79 nt, Homo sapiens
aagcaacaaccaaaggccagggcacaaaaaaggcaagcagaagaggaacagaagaagcagagcagagacggagcagcag

SEQ ID NO: 152938 - RNA, 68 nt, Homo sapiens
caccgagaaaggaaggaaaaccgacgaggacaaagcccccagaggaaccggggcacaccaagaaaaac

SEQ ID NO: 152939 - RNA, 89 nt, Homo sapiens
cgcacggacgcgaccgagggccagccaggccgcgcccgagaagaacaaggccacggcagagacaacgggaccccaaggcacaggcgacc

SEQ ID NO: 152940 - RNA, 87 nt, Homo sapiens
ggcgccaccggagagaggccgcgccgggcagagccgcacagaggaagacacagagagggcgggccccagcggccggcgcagggacag

SEQ ID NO: 152941 - RNA, 69 nt, Homo sapiens
gcaaggcccccgaccacacgcccgcgcgaggggaacaccaggaaaaggagaccccaaggccggacagaa

SEQ ID NO: 152942 - RNA, 54 nt, Homo sapiens
gaagcaaacagacggcaaaagggcccacagaacaagcccaaccagcggacggaa

SEQ ID NO: 152943 - RNA, 81 nt, Homo sapiens
agcagacagccccgggcaccaggcagcaacaggccgggagaaggggcaaggcgagacacagcccgggccagccacggaccg

SEQ ID NO: 152944 - RNA, 76 nt, Homo sapiens
cgcgggcggacggcggaggcgcccccaggaagggcaggaagaaaaaaggaccgagaaacccagaaaaacgagcaca

SEQ ID NO: 152945 - RNA, 70 nt, Homo sapiens
ccaccagacacccaacgagcggacaagaacacggaagagaaccagccaaaccgaaaacaaagcaggacag

SEQ ID NO: 152946 - RNA, 64 nt, Homo sapiens
ggcggccgaaccccgacccaggcagggcggccacagccgcccaccagagccggagccccagcag

SEQ ID NO: 152947 - RNA, 77 nt, Homo sapiens
cggaaccacaccaacagcgccgccaggaccacgaggagcaacggcgagccgcgaagccacccccgggacaaagcgac

SEQ ID NO: 152948 - RNA, 74 nt, Homo sapiens
ggcaacgacaagagaaagaaaaacaagaacgaggaacacgaacaggaacccgcaggcccaagcgccaccaagga

SEQ ID NO: 152949 - RNA, 73 nt, Homo sapiens
ggacccaaaaaccagggacaaaccaagagcaggagggaacggcccagcaagcaggcggcaaagagcacaagca

SEQ ID NO: 152950 - RNA, 69 nt, Homo sapiens
gaaagaaaccacagagcaggagggacccaggagacgacacggagcgggaagacagggaggggaagcaag

SEQ ID NO: 152951 - RNA, 72 nt, Homo sapiens
gcccagcccgagagcgggaacaggccgggaacgggaaacgcgcgccgagaagccacccgccgagagggagcg

SEQ ID NO: 152952 - RNA, 40 nt, Homo sapiens
agagggaccgcgccaccggccgagggcacaggaaaagacc

SEQ ID NO: 152953 - RNA, 75 nt, Homo sapiens
agacccaggcccccccaaaggccagcggagagcggcgggacggcagcagaccgggacaccacccgccccaccgag

SEQ ID NO: 152954 - RNA, 90 nt, Homo sapiens
cgcagggggggacgagggcaaaggcaaggggggaccgcggccacggacgccgacacacagccgcgccaggggagacacaagaccggcggc

SEQ ID NO: 152955 - RNA, 56 nt, Homo sapiens
cccagggagaaaccccccagggaggagccgcgaagccacacgggcggaagaaggcc

SEQ ID NO: 152956 - RNA, 68 nt, Homo sapiens
agcccggacaacagccacgcacacagcaaaagacgaccgggaacaaacaacgccggggacaaaaacag

SEQ ID NO: 152957 - RNA, 73 nt, Homo sapiens
agcaccgacaaaagacccacaccaagagcagggacggggggaaaagcgcacccgggcccgggcgagaaagaag

SEQ ID NO: 152958 - RNA, 90 nt, Homo sapiens
cgggcggggggcccgggcgccgagccgcaggagagacacgcgggccgaccccagagcggcgcggacagggcaggggcaaggaaagcagcg

SEQ ID NO: 152959 - RNA, 75 nt, Homo sapiens
ccacgggagcaccagggggaaaacagggggccgagggcaggagaggggaacagcaggacaacaaccaaaaacaac

SEQ ID NO: 152960 - RNA, 56 nt, Homo sapiens
cagccaagagcgggcccgggccaaccgagggcccaggaaacagggacaacagacag

SEQ ID NO: 152961 - RNA, 36 nt, Homo sapiens
acaagacggacacagaaacggggcaccaccgcacca

SEQ ID NO: 152962 - RNA, 76 nt, Homo sapiens
cgcccaaaccgccggccaaccaggcagcggaaaagagaagaagaagcggaaaggcagagaaggagaaagagaagag

SEQ ID NO: 152963 - RNA, 74 nt, Homo sapiens
caccaagggaagagaagacgcacgaacaccgcccgccaggccccagggcaggggcccggagagcgcgcccccca

SEQ ID NO: 152964 - RNA, 72 nt, Homo sapiens
gcaaaaggggcgcaaggcaagcaagaaggagggacagggcgaaacaaccaaggccgacaccacacgacaaaa

SEQ ID NO: 152965 - RNA, 90 nt, Homo sapiens
cacagagccacgaacgcgggcgagggccggccacggccgcagggaggcacgggcaggaccgcacaggcgcaggcgcaaggggccagggga

SEQ ID NO: 152966 - RNA, 78 nt, Homo sapiens
cgaggcacgaggaccgcgaaggaccaaagcagcagaccacagccaacgaaaccaagcgccagggaaggggaaaaagca

SEQ ID NO: 152967 - RNA, 52 nt, Homo sapiens
gacagcacagcacccacaaagcaacgcccacaggagaagccagcccacccga

SEQ ID NO: 152968 - RNA, 73 nt, Homo sapiens
aagcaccaaccagaccaggacaaaaagcacaacggagggaagaaccccaccaacacacaggggccgaacaggg

SEQ ID NO: 152969 - RNA, 68 nt, Homo sapiens
gccaagagacccaacccccgagggacacacaggaagacgaacacggaacgggcgagaagaaagcagag

SEQ ID NO: 152970 - RNA, 74 nt, Homo sapiens
ggccagcaacgaagcacggaagaccaccaaaacaaagccacaagacacgcgaaaggaggaaacccgagaaggcc

SEQ ID NO: 152971 - RNA, 58 nt, Homo sapiens
gaacgcgccaggcaaccaagcgaacccggaaggcacccggcaagcaggacccgcccag

SEQ ID NO: 152972 - RNA, 85 nt, Homo sapiens
aagaacacagagggggagggggagaccaggaagggcgcggagcagaaccccccaccagcaaaaaggcggagaacggaaaagcacc

SEQ ID NO: 152973 - RNA, 74 nt, Homo sapiens
acacagcggaacggcaaagcagcacacaaagagggcacccagaccgcaggggaggggaaacacagagaacggaa

SEQ ID NO: 152974 - RNA, 74 nt, Homo sapiens
gacggggacggagagaacacgagcccacaggcacacagagaaaaaaagggaacaaaacacagcaagcagacaaa

SEQ ID NO: 152975 - RNA, 78 nt, Homo sapiens
cgagcaagaacaccggaccgagacaacaagcgggcaacgaagcaagagccccacacaccaagaacccgaaaaggaaag

SEQ ID NO: 152976 - RNA, 68 nt, Homo sapiens
gggaaggacaacagcaaggacagcaccaaggacacacagcaacgaagcaggggaggagggaagaccgg

SEQ ID NO: 152977 - RNA, 52 nt, Homo sapiens
agcaaagaagagacgaaaaacccgggaaaacgacccccaggaaaaagaaaag

SEQ ID NO: 152978 - RNA, 84 nt, Homo sapiens
gccaggccagacccgaaggccaggagacccgaccccaaggaccacagggacaagcagaggcgagccagggcgagaaaccacaag

SEQ ID NO: 152979 - RNA, 66 nt, Homo sapiens
agggagaacacagaaacccgccccggggccacacgccccacccaccaccccgccaccacccgaaca

SEQ ID NO: 152980 - RNA, 65 nt, Homo sapiens
cggcgccccgagccggccgagcggcgacggaccgcgagcaaggaacgcacaaaccgcagccacgc

SEQ ID NO: 152981 - RNA, 54 nt, Homo sapiens
accaaacggacaacagcaccaggagaaggaacgacccaggagggagaaaagaaa

SEQ ID NO: 152982 - RNA, 74 nt, Homo sapiens
aaaaaagcgagacccacacaagaaagggaaaaggaccagcgcagccagacaaaacacgccaaggcaggggacga

SEQ ID NO: 152983 - RNA, 81 nt, Homo sapiens
aggaccggcgccgaacacgacggcacaggggggggggaaaggagacccagaggccgagccggccaaacaggggccacggcc

SEQ ID NO: 152984 - RNA, 73 nt, Homo sapiens
ccgcccaggacaagccgcgcggggacccgacgcccgcacgggaaggccaaaccaggcagaaacagccgaagaa

SEQ ID NO: 152985 - RNA, 68 nt, Homo sapiens
gccccccagcaagacaacgacgaaagacccacagaagcgcgccgggcgcagaggacaggcacacacag

SEQ ID NO: 152986 - RNA, 35 nt, Homo sapiens
aaggacaaaaacagccagccgaagaagacccagga

SEQ ID NO: 152987 - RNA, 76 nt, Homo sapiens
cccacagggcacagagaacgaagaggcagagagcaaagaacccccaagcaggaaggacaccagaggacgcccggca

SEQ ID NO: 152988 - RNA, 84 nt, Homo sapiens
agcagccaacacaccagcccagacagcgcaagcaccaggacgcgaaggccggacacccaacagcacgcagacaaggcaccaaca

SEQ ID NO: 152989 - RNA, 68 nt, Homo sapiens
cagcgccccagacgcccgggccggcggcgaagccccgcagcgacgcacaaggaaaaacagagagaaag

SEQ ID NO: 152990 - RNA, 81 nt, Homo sapiens
gggaagaagggagacaaaggaaaacaaaggcgaagaggcaggaacgaaccaacgcaggaccaggaaaccaagcgacagaca

SEQ ID NO: 152991 - RNA, 77 nt, Homo sapiens
gggaaacccaagaaagaagaagcacagacgagaaacaaggcaagaaggcagccgagaagccaaggaggggcccgaca

SEQ ID NO: 152992 - RNA, 75 nt, Homo sapiens
gaccaggacacacagacaccaccccccccccacaggaccccaagcaaaccggccgggccgcccgcggcagagcag

SEQ ID NO: 152993 - RNA, 73 nt, Homo sapiens
gaagagaaaccgagcaacagacaaagcccggggaaagaccacagcaagaccacgcccccagccgggggaccag

SEQ ID NO: 152994 - RNA, 58 nt, Homo sapiens
gacccggaagggaggcgggagaaggcgcaacgcggcgcgggcgcgggcaggacaccgc

SEQ ID NO: 152995 - RNA, 80 nt, Homo sapiens
ggaggacccacgcaggcagccaagcaaggacgaaaaggacggcgccgggggccgaaaacgcccagccaaggggcaacacg

SEQ ID NO: 152996 - RNA, 80 nt, Homo sapiens
caagaaacagcagccaaccaggcccgagacaaaaaggaacaagcacacagagacggggacggcaacaacaacaagaaacg

SEQ ID NO: 152997 - RNA, 59 nt, Homo sapiens
gagcgcgaaacgcacgagaagggggggccgcccgcccaaggcaggaagaggggccgcaa

SEQ ID NO: 152998 - RNA, 68 nt, Homo sapiens
aacaacccacgcggcaccaaaaaccagaaacccgcacggggagagcggccgggaagcgacagagaacc

SEQ ID NO: 152999 - RNA, 109 nt, Homo sapiens
gacagcggcaccgccagacggccagaaagccgccagagcggggcacggagcgggaggagaaaggcgcaggaaaagcaagcccccagaaacagccgggaacaccagcccc

SEQ ID NO: 153000 - RNA, 71 nt, Homo sapiens
agcacaggaccacaaacagcaacacagaacgcaagaaggaaggaagggaacacggacgacgagacacgacc

SEQ ID NO: 153001 - RNA, 72 nt, Homo sapiens
cagacgggggaagccaggcaccccccacagaaagggcgagcacagcaaggaggaaacagcaagggaacaaca

SEQ ID NO: 153002 - RNA, 67 nt, Homo sapiens
agaaggaccaagaaccaggggccaaggaggcaaaggagcaagacgccccagcaggagagcagaacca

SEQ ID NO: 153003 - RNA, 81 nt, Homo sapiens
cccacgcgcacgccgggggcgaggagacaaaaaagcccaagggacaaaagggagacaccaccagaacaggccggcgcgcgg

SEQ ID NO: 153004 - RNA, 62 nt, Homo sapiens
cagcaagcgaagccgaaaaagcgcccgagacgggcccgccgaaagaccgccagagcggaacg

SEQ ID NO: 153005 - RNA, 76 nt, Homo sapiens
caacaagcgcaacaggaccagcaaaaaaagaacccaacacgagccaccaaaaccggcaaaggccgcgaggaaccac

SEQ ID NO: 153006 - RNA, 76 nt, Homo sapiens
cggcccgcgcgcccgcacccggccgccggggccgcccagagaagcacagaacaaaagaagcaagagcaagaaaaaa

SEQ ID NO: 153007 - RNA, 61 nt, Homo sapiens
ggaccggcgggcggcacgcgccccagaccaccggcagggaacagccgagcagaccgaggag

SEQ ID NO: 153008 - RNA, 61 nt, Homo sapiens
agagcagccaggccagagagccagaacggagagaagaccggagaaacgagcaacagcccca

SEQ ID NO: 153009 - RNA, 85 nt, Homo sapiens
ccccccaggggcgccaggggcggccagggcgaaaacacggagaccaccccagcacgaacagacagagcacagagaccgaagggag

SEQ ID NO: 153010 - RNA, 71 nt, Homo sapiens
ccgaggaaacaccaggccaaagcggagaaagaagagaaagcaaccacaaacacagaaaggacagaaagcac

SEQ ID NO: 153011 - RNA, 74 nt, Homo sapiens
caacccagccacccagcgacggagcacaacccgaagcggccggaccggaacagggcgggacccgggacagaggc

SEQ ID NO: 153012 - RNA, 71 nt, Homo sapiens
caagaaaaggagccggaaacggacaaacagaccccccaccccgaaaccaaccaaagaagcccccaaaccaa

SEQ ID NO: 153013 - RNA, 88 nt, Homo sapiens
caggagagcaccaggaacgccagaagccaggacgagccgaaaaggccacggaggacggaagcccgggacacagagagaggccgaaggc

SEQ ID NO: 153014 - RNA, 84 nt, Homo sapiens
ggaaggcgcgaggaggaaaggaggacgaggagccaaaaaccgaacacccggaaggggacaagggacggcgaacagaccccgcgc

SEQ ID NO: 153015 - RNA, 76 nt, Homo sapiens
gagagagcccaggccccgcacgaaaacagaaagagaagaacaaccggagaagacgacacacccgcaccacgggcgc

SEQ ID NO: 153016 - RNA, 52 nt, Homo sapiens
ccacgacacggcaggaaggaaaggcgcgcccaaaacggcacaaagccgggaa

SEQ ID NO: 153017 - RNA, 76 nt, Homo sapiens
acacaagaaaccccacacggaagaacgaaggaagggaagaacaggcagcggaaggacgagagaacacaaacagaca

SEQ ID NO: 153018 - RNA, 69 nt, Homo sapiens
gcccggaaaaccagaccagaaacggaggagcccgccgaagcagggacccgaagaagagagcaaaaacgg

SEQ ID NO: 153019 - RNA, 73 nt, Homo sapiens
agagccaacaacgaagcagaccaaaccgacagaaggaccagcggagcagccaggagagcaaaggggcggaccc

SEQ ID NO: 153020 - RNA, 77 nt, Homo sapiens
aaagccaccagagaaccggcacagagcccacaggcggggagcgcccccaggagcagcggagcgggagcgcaccgggc

SEQ ID NO: 153021 - RNA, 72 nt, Homo sapiens
accgagagaacggccaccaagcccggacgaccgaaaacccagccagacaaaagagaagcagaggagcgaaga

SEQ ID NO: 153022 - RNA, 66 nt, Homo sapiens
gccaccgggaggcccagggaagggggcagggcccagaggccggagcgagcccagaagagaggcgag

SEQ ID NO: 153023 - RNA, 84 nt, Homo sapiens
caggggagcgaaggcgaggggcagcggcaggagagccggccgcgacaggacggaaggaggcagaaagggagccccaagagagag

SEQ ID NO: 153024 - RNA, 53 nt, Homo sapiens
cacccagagcaaagaaggcaggcaaccaggaccgggaacggcccccacgcggc

SEQ ID NO: 153025 - RNA, 57 nt, Homo sapiens
ccaagaaaggcacgcaccaccccaccgggaaaagccaagaaagacccaaaagacccc

SEQ ID NO: 153026 - RNA, 87 nt, Homo sapiens
agagccgccagcgagcagacacccgccccacggacagcagcgacagcaccaaagcaggcggggcgaaggcggagccccgggaccggc

SEQ ID NO: 153027 - RNA, 107 nt, Homo sapiens
agacaacagagacgcgggccacgggaacgacgccaagaggcgcgggacggccgggcggcggggaggcggaggaccggagggggaagaagaggaagaggaggaagagc

SEQ ID NO: 153028 - RNA, 71 nt, Homo sapiens
gacagaaagaaaggccaaagcagcagcggcgccaagaggggcaaagacccagccaccccacgacccacccc

SEQ ID NO: 153029 - RNA, 74 nt, Homo sapiens
cagcacaacaacacggagacagagccgaaggccggcagaagggaccaagaaaggcccagggaccaaagcccgga

SEQ ID NO: 153030 - RNA, 78 nt, Homo sapiens
caacaggacggcccaaaaccagccgacaaagagggggcccaagaaggaaagcgagagcccacggcccaggacacaacc

SEQ ID NO: 153031 - RNA, 68 nt, Homo sapiens
cggaccgccgcgcagggcagccaccagggcacagcacgaggcgaacccccaaagacacacggacccac

SEQ ID NO: 153032 - RNA, 71 nt, Homo sapiens
agagaccaaaaacagcacagaaaagcccagaagcgaggcgaagcagcggcgagaaacgagagcacgagaaa

SEQ ID NO: 153033 - RNA, 77 nt, Homo sapiens
gggcagcacggaaccacacagggccgccaccaacagagaagacagagcaccaacgaggccgaacggccacagggaca

SEQ ID NO: 153034 - RNA, 69 nt, Homo sapiens
gcacacgccccaaggagggaccaagaggggccgcaaggccaggcgcgcagaggcacccaacggcacaga

SEQ ID NO: 153035 - RNA, 76 nt, Homo sapiens
gccgaggggcgggaacgaaacggcccccaaaggaccaaaacgcaaccaaggaaaagcgcagagggaaacggacccc

SEQ ID NO: 153036 - RNA, 68 nt, Homo sapiens
accggaccagagagcggcagagggaagaaaagacaagggaagaccaagacaaaaaggcagaggagcgc

SEQ ID NO: 153037 - RNA, 58 nt, Homo sapiens
accagccgaccacagcaagcccgggagcgccgcccaggccggaggcaaggcgccaccg

SEQ ID NO: 153038 - RNA, 65 nt, Homo sapiens
ccaaaggcaagacgaaccaaccagcacaacagccacgaggcggccccagcgcgggcgacaggccg

SEQ ID NO: 153039 - RNA, 74 nt, Homo sapiens
acaagacgaagaacagaaggcgacaaggccaagaccgccagcaaaggaagacgagaaagccggacccacagccg

SEQ ID NO: 153040 - RNA, 37 nt, Homo sapiens
gcagagccagacaacaggggccggggaggacagggga

SEQ ID NO: 153041 - RNA, 79 nt, Homo sapiens
aagagaaaacccggagacccggccaaacaggcaggcagcggaagagaaagaccgaggcaaagaagcaggagcacacaaa

SEQ ID NO: 153042 - RNA, 72 nt, Homo sapiens
ggagcccggggaaagaggcgggagagggaggagcccagaccgggcgacccgccgccgaacggccacagggac

SEQ ID NO: 153043 - RNA, 88 nt, Homo sapiens
caggagaccggaggccaacggcagaagccaccacaaaagcgaaagggcacaccacagccagccaggacggaacccgcaccaccacaca

SEQ ID NO: 153044 - RNA, 91 nt, Homo sapiens
gacgagacgccgggaccgagggccggggacaaggccgccgaggaacaggacccaaaaccaagccaagaagggagccaaagaaaccggacca

SEQ ID NO: 153045 - RNA, 61 nt, Homo sapiens
cccaggacagcaccagcgggccggaggagccagagcgcagaaaggaggaaggccaggcgcc

SEQ ID NO: 153046 - RNA, 80 nt, Homo sapiens
agacccagcgaggcgccccagagcccagggcaggacaccgacaggaacagggaccacggggaacgagaaggaaaagcaga

SEQ ID NO: 153047 - RNA, 80 nt, Homo sapiens
ggcaacaagaggagaaaaggaacccaaacagagccacccccacccaagagacacaaaacagcacaggagaaaagcgaaga

SEQ ID NO: 153048 - RNA, 89 nt, Homo sapiens
cgcccagacgaacgggcgcgccaaggaccgcgaaaagagagcgggacgaagccgacaggagaagcggacaccccagcgcagacacgcca

SEQ ID NO: 153049 - RNA, 40 nt, Homo sapiens
cccagagagccagaaagaagcgagcagacaccgcaggaaa

SEQ ID NO: 153050 - RNA, 81 nt, Homo sapiens
gaaacgaaaaaccgaggaaggacagacggccagccagcacaaacggggcccagacaggccaaggaccccgagcccaaggaa

SEQ ID NO: 153051 - RNA, 87 nt, Homo sapiens
ggaagaagaggcagcccagcaccgcaggaagaccaggaccgaagcggaccgaccaaaccagacaaggacaggggcacgagaaaagcg

SEQ ID NO: 153052 - RNA, 67 nt, Homo sapiens
ccgccgccgccggaccacagcaacacaccggccagaagaggagaggcacaaccaggcacagccccag

SEQ ID NO: 153053 - RNA, 77 nt, Homo sapiens
acaacgagagagccgaggagccagagcaaggggaacgccacggacggggaggccagagcccaggccgaggcgaaagg

SEQ ID NO: 153054 - RNA, 42 nt, Homo sapiens
cgcaggccccacgcagcccagccccaccaggcgcaaccgaaa

SEQ ID NO: 153055 - RNA, 84 nt, Homo sapiens
ccggcccagcagcgcagccgcagccgggcggcagggccccgagccggcccgggcgagcaacccggagacaaaagcacaggcaac

SEQ ID NO: 153056 - RNA, 69 nt, Homo sapiens
gggggcacacccaccaacccagagcagccaggccagagagccagaacggagagaacaaagggcaaagga

SEQ ID NO: 153057 - RNA, 71 nt, Homo sapiens
gaaacggaggaaaagcgaggacgacccgaggaacccagcaccaaaacgggaacaggacacgccccaccagc

SEQ ID NO: 153058 - RNA, 32 nt, Homo sapiens
gcggcgagccggggccggcccccgcaaacgcg

SEQ ID NO: 153059 - RNA, 75 nt, Homo sapiens
gcgagacgcggcggcgcggcgccggcggagggaagaagacggcgaagcaccaacgccaagggacggacaagggag

SEQ ID NO: 153060 - RNA, 54 nt, Homo sapiens
aaggaagggcacgggcagggcgaaccccgagacccaagacgccgccaaccggca

SEQ ID NO: 153061 - RNA, 67 nt, Homo sapiens
gaggaaagcggcaacggccgccccaggcaaggaaaggcagaagaaagaagaaaaaggcagggaaacg

SEQ ID NO: 153062 - RNA, 82 nt, Homo sapiens
cgaaggcgaacagaaaagagaaaaagagcgaaaaagaccagcgcgagacagagagacacggaaaagggaagcgaagggccga

SEQ ID NO: 153063 - RNA, 66 nt, Homo sapiens
cagacccaggggaacaagagaaagcagggaagcgacagggagaggaccggcgacgcgcccgcaacg

SEQ ID NO: 153064 - RNA, 74 nt, Homo sapiens
ccaaaagaacgaggccggaagacgccgaaggcagcgcagacagaccccgcccagaacacacggggagacagaga

SEQ ID NO: 153065 - RNA, 111 nt, Homo sapiens
gaagaagggcccaaaaggcagaaaaagggcaaagacacggaccaagaagccaacagaaccaagacaggcgcccagggcacaaaggggcgcgaagccggccaacggaaaaga

SEQ ID NO: 153066 - RNA, 59 nt, Homo sapiens
agagaagaggaacaaaacaaggccaagacaggggacagccggccgaacggcagccccgg

SEQ ID NO: 153067 - RNA, 79 nt, Homo sapiens
aagaagggccaggcagcgaaagaagacgccagcacaccccacagaggaggaccccagcaaaagaacagaagggagaagc

SEQ ID NO: 153068 - RNA, 75 nt, Homo sapiens
cgaggaaccggaccccggcagcgacagcccaaggcggaaaagcgaaggaagccacaagcacagcccacacaaacc

SEQ ID NO: 153069 - RNA, 66 nt, Homo sapiens
gagcaggcagagacagagaagaaacgccggcaaagcagagcagaaaagaagcagaaaacacaccca

SEQ ID NO: 153070 - RNA, 61 nt, Homo sapiens
aagcacgggggcagcacacagaagccaagcgaaagacagaggcccagccgaaagaggggag

SEQ ID NO: 153071 - RNA, 77 nt, Homo sapiens
cccaggcaaccccccccagcggcccccacccagccggcagagacacaacaggaaggagacgggacacagcgggcagg

SEQ ID NO: 153072 - RNA, 79 nt, Homo sapiens
cacaggcaaacgcagaaaagagagccgggcgcggaaacgaggcagcgaaacaagaaagcacagaaccaaaaccagggaa

SEQ ID NO: 153073 - RNA, 61 nt, Homo sapiens
cccggaccggagaggaggggaggaaacccagcggcggcagaaccagccggcacaaagccga

SEQ ID NO: 153074 - RNA, 81 nt, Homo sapiens
cgcggcggcagcagcaggagaggagggcgggaccccgcggaacggccgcggggagcggcgcgcgcacaggcacacgacacc

SEQ ID NO: 153075 - RNA, 75 nt, Homo sapiens
aaacgggaagagagggaacacgcaggagggggcgcgcaaacgaaggaaaaggaaaaccaacagcgccacaaagac

SEQ ID NO: 153076 - RNA, 67 nt, Homo sapiens
ccagaagaggacgcgcccaaagcgaccacaacgagaaagacgaaaagaaggcaggggaaacgaaggc

SEQ ID NO: 153077 - RNA, 74 nt, Homo sapiens
gcaagaaaaccaccagaccaaggaaaacgaacccaaaacaaaaccggaacaaggaggaagaaagaggcacaacc

SEQ ID NO: 153078 - RNA, 84 nt, Homo sapiens
ggcaccgcgcgaagcggccaaagccgcccagacggccaccggcgggaggaacaaaaggcaaacaccagcaacacccgggacaaa

SEQ ID NO: 153079 - RNA, 77 nt, Homo sapiens
cgggacgcgcccgccgcccggcgcgcggccgcgcgcgcggccgcacgcggggcgcgcccaaggcacacagagaaaaa

SEQ ID NO: 153080 - RNA, 74 nt, Homo sapiens
ggcaaacggcacaccagggcacaaaccaaggaacaaggggccaaggccaagccaccccagaggcgcaccagaaa

SEQ ID NO: 153081 - RNA, 78 nt, Homo sapiens
gcccaggcgaccgggccggggagccggcaggacccgaagacgagggcggagaacggaaaagcaccaggaagcagagag

SEQ ID NO: 153082 - RNA, 80 nt, Homo sapiens
gcccgcccggccgagaccccgcgggaggcccacagagaccgggaagaggcgcccccacgggggaccgacaaggcacccag

SEQ ID NO: 153083 - RNA, 82 nt, Homo sapiens
ccacacaccgccacacgcacgcaggaggccccaacccgagcacaacagcaaccggccaaacagaggggcgcagcaaacaagc

SEQ ID NO: 153084 - RNA, 81 nt, Homo sapiens
ccgcgcggcgccgggcgcggcccggcgacaggcgcaagaaagcgaagagccacgaaaagcccaggggaaaaagggaggcca

SEQ ID NO: 153085 - RNA, 51 nt, Homo sapiens
aaacagaacccaagccaggcacccaaaaaaacgccgagaaacagacaaccc

SEQ ID NO: 153086 - RNA, 73 nt, Homo sapiens
aggagcacagaaaggagcagacgggagcaaagccaccgcccaagaacggcggcccaggagggccccaggccgg

SEQ ID NO: 153087 - RNA, 82 nt, Homo sapiens
gagaaccaaggcggacgcggcgagaaggagaaagacagcaaagaaaaggagaagaaaggaaaaaaacaaccccgggcacccc

SEQ ID NO: 153088 - RNA, 57 nt, Homo sapiens
ggaggcaggcagaaagaggcaaggcaagaggagggagagaggaaagccaaagagcga

SEQ ID NO: 153089 - RNA, 127 nt, Homo sapiens
gacggcagcagggggaaacggggacaccacccccaggacgacggcagcaaagagcgcagcccccaggaagaggagcaggacggagggagaaggggccacacggaagggccgaggaggaggacgggag

SEQ ID NO: 153090 - RNA, 78 nt, Homo sapiens
acccaccccacacagcaacaggccacaagaagccaagcagggcacaaccagacccagcagacagcaagacagcgggaa

SEQ ID NO: 153091 - RNA, 69 nt, Homo sapiens
cggaggacagcccggagcaggcagcccaaaagacggagcaaaagggaccacgcgcgcaggggcgcccca

SEQ ID NO: 153092 - RNA, 76 nt, Homo sapiens
agccccacgaagagccgaagacaaggaggacccgcaggcaccaagaagaccaacaagcagaagagccaagacaaaa

SEQ ID NO: 153093 - RNA, 74 nt, Homo sapiens
acggcacagggaggccagccggagaagcgagcagcgcccggcgaaaaacagccaagagaaaggagggcaaacag

SEQ ID NO: 153094 - RNA, 100 nt, Homo sapiens
ccgcgagccgcgaccagccagcacagagcaggagcaggagcagaggagaacggacaggagagacaacggaggcaagaaagacggagaagcgagaagagac

SEQ ID NO: 153095 - RNA, 87 nt, Homo sapiens
cggcccggcgcaccagcgcacacgccgccacggcgcgagagggcacacaggcccgagcacaaacacaagaaacgcacgcccgccagc

SEQ ID NO: 153096 - RNA, 73 nt, Homo sapiens
acaagcagggaacaagaaagcagcccaccaaccagcaaacgggcaggacccgaggcgccagcagcagcaagac

SEQ ID NO: 153097 - RNA, 72 nt, Homo sapiens
aaaccagcaaaccacaggaccaccgacaggaggaccaaaggagcaaaaagccaaggaaaggagaccccccgg

SEQ ID NO: 153098 - RNA, 92 nt, Homo sapiens
ccccgggagcccagccaccacagacagaagacgaccccgacgcaggccaggagccgcggacagaagccgagcacggccgagacaaaaggacg

SEQ ID NO: 153099 - RNA, 80 nt, Homo sapiens
ggagcgggccagccgcgcggcgggaagcggcggcggcggcccagcgccaagaggggccccggcgcccgcgcagcagagca

SEQ ID NO: 153100 - RNA, 58 nt, Homo sapiens
cggagggaaggggaagcggcgggcaacaaggcagacacaaaaacagacggaggacgaa

SEQ ID NO: 153101 - RNA, 75 nt, Homo sapiens
ggcaggaacccaagccccacaggagcggaagaaggggggccagcccacaaaacacagccagggagaccgaaaaaa

SEQ ID NO: 153102 - RNA, 80 nt, Homo sapiens
accggggcgaacaggcggccgccaagacacgagaggcgagggacgacagagcaagcggcagagggcaagcgggaaaaaga

SEQ ID NO: 153103 - RNA, 64 nt, Homo sapiens
cgcagcgggagcggacggcgagcgcgagcggcgcgagaaagggaccccagcggaacacacccac

SEQ ID NO: 153104 - RNA, 66 nt, Homo sapiens
gaaaagggagcgacgcaaaggcaccaacccaggaagaaccaaaagggggaaacccgcccagggcgg

SEQ ID NO: 153105 - RNA, 63 nt, Homo sapiens
aacaaaacgaaccaggacggcaagccaccaacggcggggggcgaggagcgagcaggagccggg

SEQ ID NO: 153106 - RNA, 61 nt, Homo sapiens
agccgcacagcacccgagaagagaagaaagcagcacagaaaggagaagagagagccaacgg

SEQ ID NO: 153107 - RNA, 76 nt, Homo sapiens
gcccggcgccgagaggcaccgccccaggacaaaaggggcggggaggggagaggcacacgaaaggacccacacacag

SEQ ID NO: 153108 - RNA, 56 nt, Homo sapiens
cgcgggacgggcaaaggaaagaagaagcacagacgagaaacaaggcaagaaggcag

SEQ ID NO: 153109 - RNA, 71 nt, Homo sapiens
ggacacacccccaggaggcccggcagagcaggggggccgcacagagccagagagcacgaccagcaaacggg

SEQ ID NO: 153110 - RNA, 84 nt, Homo sapiens
cccggccgccgccccgccgccacccgaccggggacaacaggagaagcggaaggagaccacccaccaggcgcaggcccagcagga

SEQ ID NO: 153111 - RNA, 72 nt, Homo sapiens
acagaggggcacaaccgacaggaaaaaaagcggaagagcgccagcacggaaggacagggaacaagaagagcc

SEQ ID NO: 153112 - RNA, 74 nt, Homo sapiens
aggaacagaaaaagaggaacccgcgacccgggcacccagagcagggaggcaacccccagccacaacgcgaaccg

SEQ ID NO: 153113 - RNA, 72 nt, Homo sapiens
gaagcccccaaagagagaaccggagagcacccaacaggccacagggaaagacagaagggaaaccacaacgag

SEQ ID NO: 153114 - RNA, 79 nt, Homo sapiens
gagcacccggagaagaagcagcgcaaggaccaggcgaggagggcgaggcagggcaaggcaacgaacagaaaggcacgac

SEQ ID NO: 153115 - RNA, 78 nt, Homo sapiens
agaggcggcacccagccccagccgaaggaaagaggcagaaggccagaagggcgaagaagaaggaaaaaaggccacgcc

SEQ ID NO: 153116 - RNA, 77 nt, Homo sapiens
aagaaccggggagcgacagaagacaaacagcaaggggcaaagccacaacccaacagagagcaaagccgcacaacaga

SEQ ID NO: 153117 - RNA, 67 nt, Homo sapiens
gccgagaagaccgacggggagaggcaggaaaagaggcagagcaacagggacacaagcaagaagaaag

SEQ ID NO: 153118 - RNA, 77 nt, Homo sapiens
ccggaaacaggaagaggagaaacaaggaccaacaggaacaaagaggacacagacccggaggaaagcccagagggaag

SEQ ID NO: 153119 - RNA, 73 nt, Homo sapiens
agcgcgcccagggagaaagccggagaggcggagcagaagaaaagaaaaagggccaacaagcccacaaacagca

SEQ ID NO: 153120 - RNA, 54 nt, Homo sapiens
ggaagccgaggccccccacccaggagaacggaaaacccacagcggcaacacgag

SEQ ID NO: 153121 - RNA, 44 nt, Homo sapiens
agggcagaaagccagacaccagcagagacccaaagccgagacca

SEQ ID NO: 153122 - RNA, 60 nt, Homo sapiens
ccaggcggaagggcgcggcggggggcacaaaaggacacagcaggggccagacaaccagac

SEQ ID NO: 153123 - RNA, 80 nt, Homo sapiens
ggcggaagaggcggccggcgaaaggagcgggccggcaagggagggagcccggaagaggcgcaggacccccggcagcacca

SEQ ID NO: 153124 - RNA, 39 nt, Homo sapiens
gccaaacacaccgacaagggcagcggaacgcgccgacgc

SEQ ID NO: 153125 - RNA, 74 nt, Homo sapiens
agcagcgcgccgccgcccagggggcggggccgacaaaacagacggggcggcgggccgggccgggggacccgaca

SEQ ID NO: 153126 - RNA, 71 nt, Homo sapiens
aacccagaaggaagaggagaaacagcaagggaagcggcgacgccgccggaggagagcagcaggaggacaaa

SEQ ID NO: 153127 - RNA, 89 nt, Homo sapiens
ccgcgcgacagccaccaggagacgggagcaagggggccgcgcacccaacccagggccaagaaaggagcgagggacggcggcgaggacca

SEQ ID NO: 153128 - RNA, 84 nt, Homo sapiens
cgcaccgcccccgcccgccaggcccgggacacgaccaccccaagcgccacacggcgacagcgacacgagaggcgagggacgaca

SEQ ID NO: 153129 - RNA, 70 nt, Homo sapiens
gccagcccggcgaccgcgcgggcggaaggagcagacaggaagggaaggggcggagacgggcggaacgcag

SEQ ID NO: 153130 - RNA, 61 nt, Homo sapiens
agcacggcagggcagcaacacgagagaacggaggccggcagccagacacgcagcgggaacc

SEQ ID NO: 153131 - RNA, 75 nt, Homo sapiens
gaacgcaggggagaggagaagagagcggcggaaggggaacaagagacaacaagacggaacacgaagaggaagaga

SEQ ID NO: 153132 - RNA, 77 nt, Homo sapiens
ccccagagcggaacacaggagggagaacgagaggaaccaagagagaagaagaaggagaagacaaaccagaacccagc

SEQ ID NO: 153133 - RNA, 78 nt, Homo sapiens
cgcgaaaggaggaggcacagaggaacacaacagagagagaagagagaccaggcgcaaggagaccacagcccaacaaca

SEQ ID NO: 153134 - RNA, 76 nt, Homo sapiens
caacacaggcagcccgaagcaacaaagagagccagggcggacccaagagaaggcaggaagaagcaaagcacacaga

SEQ ID NO: 153135 - RNA, 77 nt, Homo sapiens
ggaaagaccgccagcgaggcagacacacggaccacaacacagagaacaagaaacggaaggggaagaaagaaagcaaa

SEQ ID NO: 153136 - RNA, 72 nt, Homo sapiens
agggacaaaaaaaagaaaagcggacgggaagcagggggaggagcacacagacccacaggccaaaggagcgga

SEQ ID NO: 153137 - RNA, 88 nt, Homo sapiens
cgcgccccgcacagcacagaggggcagccggagagccgggaaaggcaaggggagagccaggcgcagagcccgcaaccagcagccaggg

SEQ ID NO: 153138 - RNA, 77 nt, Homo sapiens
ccccccaccccaccaggaaaagaaagccgagggaaaaaccggagaagagaaacaaaaggacagagaaaaggcccagg

SEQ ID NO: 153139 - RNA, 69 nt, Homo sapiens
caagcacaaagcgaagaacggaaaggcagaaaaggcaaagcccagggagcaaaccgagccaaccccgaa

SEQ ID NO: 153140 - RNA, 68 nt, Homo sapiens
agaagacaccaaaaagcaaacggaccagaccgaccaccaaaaggcagggcagcaggacaaacaaagcc

SEQ ID NO: 153141 - RNA, 74 nt, Homo sapiens
ccccaacccgcccgagccccacgacaaaggagggaagcggcggaagcagcggacacaagaacaaagagggagca

SEQ ID NO: 153142 - RNA, 77 nt, Homo sapiens
gcgcccaagacagcaagggacagacgggaaaaaagagcaccaacgaaccgagccaccgcaaaggcagacagcacccc

SEQ ID NO: 153143 - RNA, 74 nt, Homo sapiens
caagacggcaaagcacccagccgcagcgccagcagcggacaggcacagacaaccagggaggggcggccacggca

SEQ ID NO: 153144 - RNA, 80 nt, Homo sapiens
caggcgagccaccaccccagccaacagaaccaacaaggacggcgggcccggaaggaacgcccggaaggccgcggaaaccg

SEQ ID NO: 153145 - RNA, 66 nt, Homo sapiens
aaacaggaaagacgaaagaaacagacccacagccggagagcccagcggacgcccaacaggacgagg

SEQ ID NO: 153146 - RNA, 60 nt, Homo sapiens
gaggagccacgggcagaagcgacaccgaggcagaaccgcaagggcccaggaggccagcgc

SEQ ID NO: 153147 - RNA, 76 nt, Homo sapiens
aaggggagccaggcggcgacagcgggaggagaaaggagaagagggggagagcggagggcacaacaggcagcgggag

SEQ ID NO: 153148 - RNA, 77 nt, Homo sapiens
cacgagcagaaacaggacacagggaggaaggaggaagaaccgggaaacagcaacccgccaaggagcacccccggggc

SEQ ID NO: 153149 - RNA, 81 nt, Homo sapiens
agcggccagccgagcaagcggaggaccacgccggccggaccccgcgaggcaagacaagaccaggcacacgaccaagaagca

SEQ ID NO: 153150 - RNA, 71 nt, Homo sapiens
accggaagcaagaaagaaccagaggaggagcgcaagaaacaaacaacccccaaaggaaccggaggccgaga

SEQ ID NO: 153151 - RNA, 84 nt, Homo sapiens
gcggcgcaggggaacccggcggcggagagagaacaggacgcaggccgagccccccacaaagcgccaaaaacaaaggggcaggaa

SEQ ID NO: 153152 - RNA, 81 nt, Homo sapiens
gacggacgaggcggcggagaacaagcggcaggacaaagacccccacagggagagacgccagccggggagggagcagggagc

SEQ ID NO: 153153 - RNA, 86 nt, Homo sapiens
gagaccgccggccgagggggcccaggggcagcgagcaagacagcaagcagcaccacgcgcgcccgagcggacaagagcagcgggag

SEQ ID NO: 153154 - RNA, 57 nt, Homo sapiens
caggaagcggaggagccccggaggcagagcggcgccagggcacaccaagccagaagg

SEQ ID NO: 153155 - RNA, 77 nt, Homo sapiens
ggcaacaggcagaaaaagaaccagaagcggaacgcagagccagaagagacgaaggacccagagacacaaagaaaaca

SEQ ID NO: 153156 - RNA, 69 nt, Homo sapiens
aaggagcaccaccaagggcaagccaaacaccgacgggggaagcgggggcagaagaaccagagacgggcg

SEQ ID NO: 153157 - RNA, 72 nt, Homo sapiens
cgagggcggggggagggcagacacacgaggcccacgcaccgcggcgcgccgcgaaccagagcaccgaaccca

SEQ ID NO: 153158 - RNA, 76 nt, Homo sapiens
cgcacgaggcgggcgggccggcagagcagcaccccacaggacaacccgaggagccaccagcagaccacaccaggac

SEQ ID NO: 153159 - RNA, 79 nt, Homo sapiens
ccagaaggaagaggcggacggaggagcaggcgagaagagaagagccgcgaagcagccacggaccccagcacgaaaagac

SEQ ID NO: 153160 - RNA, 78 nt, Homo sapiens
acagagaggcacaccgaagacccaccccggcccccccccgccccccaaagagaacaccgccgcgaacgcagccacggc

SEQ ID NO: 153161 - RNA, 72 nt, Homo sapiens
gaaacggcccaaaaacgacaccacgaaggacaagaccaaaacccacggggaagaacaggcagcacaggcacc

SEQ ID NO: 153162 - RNA, 71 nt, Homo sapiens
ggagccaccagcccccggagacgacgcgccccaccgccgacccgcagacacggaccgcagggcggccaggg

SEQ ID NO: 153163 - RNA, 75 nt, Homo sapiens
gccaagggcacagagagcaaggacggaggcgaaggcacaagaacacccgagaggggggcaaaaggaagagagcaa

SEQ ID NO: 153164 - RNA, 76 nt, Homo sapiens
cgcagcgcagccagggcagccaggcagagcgcacccgcgccccagccaaaggcacggagggcccccagacccagac

SEQ ID NO: 153165 - RNA, 84 nt, Homo sapiens
ccgccaccagccgggcccgcgcgcccggccaagaggcaaaggggaggacgcagcaaaccaccagaagcgggaaggaagaaagag

SEQ ID NO: 153166 - RNA, 74 nt, Homo sapiens
ccaggccccagaggagaaggagcaagggcgcggcaggacaaggagcaccaagaaccgacccagaacgcaaacag

SEQ ID NO: 153167 - RNA, 57 nt, Homo sapiens
agaaaacccagagcccaagcacacgcccaccacaaaggcgagagcacggagcaccag

SEQ ID NO: 153168 - RNA, 70 nt, Homo sapiens
cggaaaacggaccgaaggccgccgaaagcagagaaaggcgcagacaaaacgaagcgaaaccccgaaaaga

SEQ ID NO: 153169 - RNA, 78 nt, Homo sapiens
ccaccggggcgccacgccccagcccgcccccagccgggacgccggcccacccgagcgcaaagacgaaggggaacccca

SEQ ID NO: 153170 - RNA, 87 nt, Homo sapiens
cgcgggcgcagggcagcgcccgcgccccgccgcgagccgcgcggagccgcgcagccccggagcacgcccgggcgcgccaggcacagc

SEQ ID NO: 153171 - RNA, 69 nt, Homo sapiens
gcaaggaggccgcaaagggcacgaagcaggaaagaacgacgccagggaggaggagccaggaggagagaa

SEQ ID NO: 153172 - RNA, 70 nt, Homo sapiens
gagacaagaaagaggaccagagagccaagaacgaagaaagcggaagaaggggagaagcagaccgcaccag

SEQ ID NO: 153173 - RNA, 74 nt, Homo sapiens
cagggggggcggcgaccgagcaccaggacgcagaaggacccacagaagcccaagggaaccacaaacagacagga

SEQ ID NO: 153174 - RNA, 71 nt, Homo sapiens
aaccagcccggccacagaaaccagaccagaaagaaaacccaggaaacacaagccacgagaaggacccaaag

SEQ ID NO: 153175 - RNA, 75 nt, Homo sapiens
agagaacccaacacagggaaaggaaccgcggacagggaacgaagaaggacagaacggacaaggcagagcaaggaa

SEQ ID NO: 153176 - RNA, 71 nt, Homo sapiens
ggccccaacaccagccgccgccccgcagccccccgcagcacccagccggccacgaggcagcgagaagaaaa

SEQ ID NO: 153177 - RNA, 83 nt, Homo sapiens
caggaggaggggcggcggcgggaagagcggccggggccgggccggggcacggcagaggcgccaagaagagccgcgcccgagga

SEQ ID NO: 153178 - RNA, 69 nt, Homo sapiens
ggaggcggaagcacggccaaggaacccaagcccagacccaggaagagagacggagaaggagacccaacc

SEQ ID NO: 153179 - RNA, 44 nt, Homo sapiens
aagggagcgcaccccaggcacaaccaagaaagacagcggagagc

SEQ ID NO: 153180 - RNA, 81 nt, Homo sapiens
aaggagccaagaaagagaagcaaaccagccagcacgggggcccagccagccagcagcgaggggggacggaggcggcacggg

SEQ ID NO: 153181 - RNA, 80 nt, Homo sapiens
ggccgcggcccgaggcgcagcagcaggaggaggaccgcagcaaggaagagagaaggccacgcccgaccccaagcaacaac

SEQ ID NO: 153182 - RNA, 74 nt, Homo sapiens
agcccggggccgggccagccgaccccccaaggagaggccccgagcccaaaaggcagagcgaggagagaagaagg

SEQ ID NO: 153183 - RNA, 77 nt, Homo sapiens
agcagccagccaagcgaggaaccagcggcaaccggagccggcgaacgacgccgccaagaacaccacaaaacagcgca

SEQ ID NO: 153184 - RNA, 83 nt, Homo sapiens
cggcaaaacgagcgggccagagacaccaggcgccgagaaggccagcagagaaacaggcaggagaggcccacaggcgcggacgg

SEQ ID NO: 153185 - RNA, 69 nt, Homo sapiens
aagagcggaaagccgcccagagcccggaccaagcaccccaccaccaaaccacggcccagggggcgaaag

SEQ ID NO: 153186 - RNA, 38 nt, Homo sapiens
gggcaacacccgacaaagggaggagagaaagaacccac

SEQ ID NO: 153187 - RNA, 71 nt, Homo sapiens
ccaaggacccgcaccaagagcggaacaagagacgcacaagaacgaagaagaaacaaagcccaaagaacccc

SEQ ID NO: 153188 - RNA, 50 nt, Homo sapiens
agacagaaccgccaaagcgcgcagcaggcgcaaaaacgaacccacaaccg

SEQ ID NO: 153189 - RNA, 76 nt, Homo sapiens
acaccagggccggaggaaccacaccggaagacggccagcagaagcaggcgagccccccgagaaaaagaagaaacgc

SEQ ID NO: 153190 - RNA, 55 nt, Homo sapiens
gacgagggccggaaggggccgagaacgacagagggcacaagacaagaaagaccca

SEQ ID NO: 153191 - RNA, 74 nt, Homo sapiens
cccagcagcagagggggcgagcgcacgccggaaacagcgccacgccagacgcaaaggcggaggcaaggcgcgac

SEQ ID NO: 153192 - RNA, 39 nt, Homo sapiens
caggaagcgggaaaccacaaaggaaggccccgcgagacc

SEQ ID NO: 153193 - RNA, 74 nt, Homo sapiens
cccgccgaagcagggagagagggccaaccccacaccagcaagcagcacgacgccccacgggagcaaggaggccc

SEQ ID NO: 153194 - RNA, 63 nt, Homo sapiens
ggagagcggccagcacagcagagagaagccaggggaaaacgacccccaggaaaaagaaaagga

SEQ ID NO: 153195 - RNA, 81 nt, Homo sapiens
aaagcacaaggaccgcggacagagacaacaccgagagagaagacagcccgaagaaggagacaggagaagagcggaagaagc

SEQ ID NO: 153196 - RNA, 128 nt, Homo sapiens
aagaggggccccggagcgcggcgcccgcggccgggcggcgcggccgcccgggccgggccccaccggacggcccaggaacaccggagggcggccccggagggacagccgggcagggcgcgcgcagaagc

SEQ ID NO: 153197 - RNA, 56 nt, Homo sapiens
cggcgaaaggagcgggccggcaagggagcggggcgacaaagaaagaaggcaacgca

SEQ ID NO: 153198 - RNA, 70 nt, Homo sapiens
gggcagacgccccggcaaaagggaacacaagcccaaacccagaacgcccccgaacggagaagagcgaacc

SEQ ID NO: 153199 - RNA, 57 nt, Homo sapiens
gccgggaacccacagggagggcggagcagcccaccagcgccaacgcccagcccaggc

SEQ ID NO: 153200 - RNA, 57 nt, Homo sapiens
caagacgggagccgccgcggggggagccgggcagaccgaggaagccgacaggaccgg

SEQ ID NO: 153201 - RNA, 72 nt, Homo sapiens
gaagaggaagaagagccaccagagagaaaagcaaacgccagcagaccacacccagacacagcccccaggccc

SEQ ID NO: 153202 - RNA, 55 nt, Homo sapiens
gcgcgacggcgacgcgggaggccagagacaggcgggcgagcagaaccccaggcca

SEQ ID NO: 153203 - RNA, 75 nt, Homo sapiens
cgacacacgacgggcagaacaagcacgaacccgaacgagagcacaaagccgagcaaagcaaaacaacagaaaaaa

SEQ ID NO: 153204 - RNA, 58 nt, Homo sapiens
ccgaagggcgagcgagcggaaaacgccagcggacaaaagggacgcgcggagaccgaac

SEQ ID NO: 153205 - RNA, 75 nt, Homo sapiens
gggacccaggagccggccagcgcgccggagccgccgagcagaagaagagggggagacccgcgcacacaagcggca

SEQ ID NO: 153206 - RNA, 78 nt, Homo sapiens
accgccccgccggagagaaaaccgaccgagagcacaagccggacccccacccggcccgagaagaggacccgaaacaga

SEQ ID NO: 153207 - RNA, 79 nt, Homo sapiens
ggaggcggaggacgagaggaggaaacagcgcggagaccccagacccccagcgcggcaccaaaagaagcgaaccgggagc

SEQ ID NO: 153208 - RNA, 80 nt, Homo sapiens
cgcggcagcaggcgggcgcggcggccgcggcaaggaccagaaggacccaaggacgaaggcaggggaaaggaccccagccc

SEQ ID NO: 153209 - RNA, 58 nt, Homo sapiens
cgaagcccagggaggccaccagccacgacagcgccacccacagaccgccccagcgagg

SEQ ID NO: 153210 - RNA, 75 nt, Homo sapiens
ggaacccaaaggcagcggagcgcccaaacccaaaagaggagagaagaccaagaaaaaaaagaaacgaacaggcca

SEQ ID NO: 153211 - RNA, 81 nt, Homo sapiens
aggaccagaggccgccacaaccgccagacaaccggagccacgccccacgaccgccagggcggagggggcagggcagaagga

SEQ ID NO: 153212 - RNA, 75 nt, Homo sapiens
cggagcgcagacgcacaaagggaaagaacgccggacaacagcggcgaagaaggcaaaccgaaggcccacagagaa

SEQ ID NO: 153213 - RNA, 48 nt, Homo sapiens
ggcagacaaaagggccaaagaagggagacaggcaggagaagggcaccg

SEQ ID NO: 153214 - RNA, 77 nt, Homo sapiens
gcccacccaccccccacaccccccgagcccaccagacaccggccagcacgaaccgacagaagaaaaggcccaccggg

SEQ ID NO: 153215 - RNA, 69 nt, Homo sapiens
agggccaggccgggcagccgccgacgagcagggggcagcacgccgaaggagagaccagacaacaggcca

SEQ ID NO: 153216 - RNA, 71 nt, Homo sapiens
gagaacaaggcggagcccaagggacgcgagagcccacgaagagcgacggagcgaacccggacgaagaaacg

SEQ ID NO: 153217 - RNA, 81 nt, Homo sapiens
aaaagacagcccgcagcacgaccagcaggaacggagccgaggaaggacagggcgggaggggccaccgccaggccgcagcgg

SEQ ID NO: 153218 - RNA, 55 nt, Homo sapiens
gccccaaagcgggaaagcgcaaaggcagaagcccccggggagagacagacagagg

SEQ ID NO: 153219 - RNA, 44 nt, Homo sapiens
gagagaaagcccacagaaacacagaagcaagaccagagagcaaa

SEQ ID NO: 153220 - RNA, 76 nt, Homo sapiens
cagaaaggaacagacaggagggagaagaccaaagaagagagagcaggaccaccaccgcccacagccgcggacggcc

SEQ ID NO: 153221 - RNA, 73 nt, Homo sapiens
gacgcggcgcgcgcggacgaagagccccccccccaacaccgcgacacgcagccgaccagagaaaagggcaaac

SEQ ID NO: 153222 - RNA, 48 nt, Homo sapiens
gagaaaaggccaagaaggcagaaccggaaaaccaagcaacgagacaca

SEQ ID NO: 153223 - RNA, 70 nt, Homo sapiens
gggcaccaggaggaacaaaacagaacgcggcagaacggaggcaggcagcacgagacacaccacaagaggg

SEQ ID NO: 153224 - RNA, 77 nt, Homo sapiens
gggccgaccgagagccgggacgaacagcgggccgcagccaagcgccgccggagaggggggaaaggaacggaagacca

SEQ ID NO: 153225 - RNA, 81 nt, Homo sapiens
cggcgaccgggcgccgagacaccagagccacaaggcaccaccagcaccaccccagagcagccgccgaccccgcgaagaaga

SEQ ID NO: 153226 - RNA, 96 nt, Homo sapiens
ccagaaggaggacgcagaagaccacaacagggacaccggccagcgcagcacgggacgcgaccggaaggcaggaaccagaccaccaggcccgccggc

SEQ ID NO: 153227 - RNA, 76 nt, Homo sapiens
gccaaagaaacaagccgggaaagggacaagaagggcaaagccgaagggcaagaagaaagcaacacaagacaaacag

SEQ ID NO: 153228 - RNA, 41 nt, Homo sapiens
cccaggacaggggcacccaggaggaggaagccaagaacggg

SEQ ID NO: 153229 - RNA, 58 nt, Homo sapiens
gggagacacacccggaacagaccaacaccaaagaagcgcaaaagagaaaccacaagaa

SEQ ID NO: 153230 - RNA, 54 nt, Homo sapiens
aaccgggaagcacgaaagggacaggaggacaagacgacagaaaccgccgaaaga

SEQ ID NO: 153231 - RNA, 55 nt, Homo sapiens
cccaccccgaagagcaacggaaccagcgccgaggcaggcaaccaggaccgggaac

SEQ ID NO: 153232 - RNA, 94 nt, Homo sapiens
cacggaggacggcaggacgggccggggggacacgcggggccccgagccccggccccaaagacccaaaacagagacaccccccagcccccgcgcc

SEQ ID NO: 153233 - RNA, 79 nt, Homo sapiens
ccaggcccacccaccagcgagcgccgcgaggcggcgcgaagcccccaggagaaagaagccagagaggggcaccacggcc

SEQ ID NO: 153234 - RNA, 80 nt, Homo sapiens
ccgaccaacgacgcgcccacaaccgggccggccccagagcccaccgggaggagaaggaggaggaacgccagacacaacaa

SEQ ID NO: 153235 - RNA, 71 nt, Homo sapiens
ggaggaggaagaccagaggaagcgacagagagaggcaggggccagccccaccccaaccaagacaaacggga

SEQ ID NO: 153236 - RNA, 67 nt, Homo sapiens
gcgcggcgcggggccccgcggcggagaggaggaagcaacggaaccacagggggaagaagcccacaca

SEQ ID NO: 153237 - RNA, 80 nt, Homo sapiens
ggggaaaacccgaggagacgcaagacccaaacaaaaagacacgaagaggaggaagcccagggacccaccaggccacaccc

SEQ ID NO: 153238 - RNA, 78 nt, Homo sapiens
caagacgcccaccccacaagggcccggccccaccaaaccgggggcaacggaggggccaggcacgggacggaagggagc

SEQ ID NO: 153239 - RNA, 75 nt, Homo sapiens
ggcccccaacagcgccgagaacagaacccacggccgaggggaaggaaccagcccaaagaggacaacccagaggac

SEQ ID NO: 153240 - RNA, 83 nt, Homo sapiens
ccgaaaaggcacagaaaggacaagaaaccccgacacaaagaacgaaccaagggggccggacaagacgcagagagccgacagac

SEQ ID NO: 153241 - RNA, 74 nt, Homo sapiens
cgcgccagggcacagggagcagccgaagagcaaagccagcacccgagggccagaaacgaccaaacgaaaacaag

SEQ ID NO: 153242 - RNA, 76 nt, Homo sapiens
ccggccccggcccacaggggggggcaaacccgagagaacgggaagaagaaagcgagacgaaaacagaggcaaagaa

SEQ ID NO: 153243 - RNA, 82 nt, Homo sapiens
ccaagccaagcgcaacaggggacccaaccagagccggccgggagccaggaggccaccacaaagccgggaggccgggacgccc

SEQ ID NO: 153244 - RNA, 75 nt, Homo sapiens
aggacgaggacgaggacgcaagccacagcaaggaagggcgaagggaccgcagaaaaaccccaagcacccgaagga

SEQ ID NO: 153245 - RNA, 51 nt, Homo sapiens
ggccagcgaaaacgcccagcgccaggaaggcggggaagagaaagggcccaa

SEQ ID NO: 153246 - RNA, 76 nt, Homo sapiens
caggacccgcccagcccaacggggagggcggagaacggaaaagcaccaggaagcagagaggaccgcagaagggaag

SEQ ID NO: 153247 - RNA, 57 nt, Homo sapiens
gcagcccgaggccccagccagcgaacgccacacgcgaggcaccacgggaaggaggcg

SEQ ID NO: 153248 - RNA, 76 nt, Homo sapiens
ccaagaaaggaaaaacccaaggacaacgacgggccccagcggaggacccacaggagaggcacaggaccagaccaag

SEQ ID NO: 153249 - RNA, 50 nt, Homo sapiens
gacagccccggaacgccgaagacaaaccggcgaccacacacggggacgac

SEQ ID NO: 153250 - RNA, 71 nt, Homo sapiens
cgggacaccccggaagcgggaaagggagggaagccggaagcggcaacagcaaagggaaaagaggagacgaa

SEQ ID NO: 153251 - RNA, 74 nt, Homo sapiens
ccacacagccagaacagggacgccagccgcagaggaagacccggcccagagccgcgggagggcaaaagaacagg

SEQ ID NO: 153252 - RNA, 79 nt, Homo sapiens
aaaaaggaaccgggcccaccaggaaaccggaaacaggacgaggcagagaacgaaaccagaaggccaaagagcaacgaca

SEQ ID NO: 153253 - RNA, 86 nt, Homo sapiens
ggcccggcagcgcgccacagcccgcgaagccaacgaggcggggaacccagcagaagccagccgccacgccgagccagccagcacca

SEQ ID NO: 153254 - RNA, 67 nt, Homo sapiens
agaggcgagcagagaagaggagacggcgcgcccacaccacgagaaccacagacagcagaggcaaaac

SEQ ID NO: 153255 - RNA, 79 nt, Homo sapiens
acaccccagcccacagagagcaaaacacaagagagcagggaggagccgcagaaagcaacaaagcgagagcacaagaaaa

SEQ ID NO: 153256 - RNA, 69 nt, Homo sapiens
agaaaagacaggcgccaggagcacagaagagcgaggagcgaagcaggaggggaaggcgccgcccacgac

SEQ ID NO: 153257 - RNA, 68 nt, Homo sapiens
ccgggcggcacgcacgcgggcagggaacaggcggagcggaaggccgcggagcgggacccagaacgcga

SEQ ID NO: 153258 - RNA, 71 nt, Homo sapiens
cccggggccgggacgcagcccggcggcagcagcagagccccgagaggggcgcgcagaaacgggaagaaaca

SEQ ID NO: 153259 - RNA, 84 nt, Homo sapiens
cccagcccgggcgggggcagagccagacggagaaagaagggccaaggcggacagcccagaccccgagcggacgaccgaggcaca

SEQ ID NO: 153260 - RNA, 56 nt, Homo sapiens
cgccagcagggcggaaggcccacccaccaccagagcgagcggagcgaagacgcaca

SEQ ID NO: 153261 - RNA, 72 nt, Homo sapiens
ggacccagccccagaagccacagcacacaggaacagacaaagaagaagacaccaccgaagaggagggccaga

SEQ ID NO: 153262 - RNA, 67 nt, Homo sapiens
ggaggagaaaagaggcggcccacccccccggccgcgaggccgcacccagaggaagagggcccggcgg

SEQ ID NO: 153263 - RNA, 66 nt, Homo sapiens
gggaccgaagaagccaaaggccaagaaagccggacagggccagcaaacaagaaccgccaaggaaca

SEQ ID NO: 153264 - RNA, 77 nt, Homo sapiens
caacaaagacaaacaagacaaacgacggaaaaggagagagaaacagagaacgaggaagaaaaggaaacccaaaaaga

SEQ ID NO: 153265 - RNA, 75 nt, Homo sapiens
agccgggagccaccgcgaaggagagggaggggggccaggggggcgcggccggccccgcgcgcgaccgcacaccca

SEQ ID NO: 153266 - RNA, 57 nt, Homo sapiens
agggggaagcggcccccgcagacgccggcaggggcgagaacaaggagagagcagccg

SEQ ID NO: 153267 - RNA, 78 nt, Homo sapiens
aggccaccagagacaggaaaagaagcaaagacggaccagcgacagaagcacaacacaggagaaaagaagagacagaag

SEQ ID NO: 153268 - RNA, 56 nt, Homo sapiens
accgcagaaggccggagacaccagcaggaccaaacaagggaagaggcggggcgaga

SEQ ID NO: 153269 - RNA, 73 nt, Homo sapiens
ggggagcagagaaaggaacaggagacagagcgaaacacagggaacaggagaacgggaaagcgcacaagccacc

SEQ ID NO: 153270 - RNA, 74 nt, Homo sapiens
gcgaaagaagcccaaccgcggagaaaaggggacagaggccccacagacaaaaccgccggcggaagagagcgcac

SEQ ID NO: 153271 - RNA, 78 nt, Homo sapiens
accgcccggccggcgcccgcaaccgcgacgaagaaaaaaagagcgacgaggcaaggaggcgcgcgaggggaagcagaa

SEQ ID NO: 153272 - RNA, 78 nt, Homo sapiens
gggccggccccagccccgcaccggacacagcggaggagaagcgcaggagaaaggggagcgaagccaagaagcagaaca

SEQ ID NO: 153273 - RNA, 86 nt, Homo sapiens
acccggggcgggaaagacaagagcccccacccaacaacggcgcccacagagaccgcggccaggagccaagaagaccagaccgcggg

SEQ ID NO: 153274 - RNA, 61 nt, Homo sapiens
cacccggcagaaccggaaggccagccgagcgggccaggcagggacaccccgcagcccccag

SEQ ID NO: 153275 - RNA, 50 nt, Homo sapiens
aggcagaaagagccaggcgcagcgcccaacaggagcgcacgcaagggcgc

SEQ ID NO: 153276 - RNA, 71 nt, Homo sapiens
aagaggccgcccccagcagggagcaaccacagaaggaaaagcacgacccgaagaagagaagcagaacaacc

SEQ ID NO: 153277 - RNA, 74 nt, Homo sapiens
aacccccacgcggccagcgaaaacgcccagggcgcacccccgagagagccacggaagggcgccaaggagccacc

SEQ ID NO: 153278 - RNA, 78 nt, Homo sapiens
cagcgaggcgccccagagcccagggcaggacaccgacaggaacagggaccacggggggccggagcgagggagagcagg

SEQ ID NO: 153279 - RNA, 76 nt, Homo sapiens
ccagcagagacaaggcacggagagcaacaaagccgacccaacccaagggccaaagaagggagggcaagcagaaagc

SEQ ID NO: 153280 - RNA, 107 nt, Homo sapiens
cagaggggaggggaggagaggacacgggagagccgaaccagaagagaaagggagaaacggacaacacccggagcagaaggcacgcaagcggcgaccgggaggcaagg

SEQ ID NO: 153281 - RNA, 65 nt, Homo sapiens
gggagaagccgaccgaacgcgccagcgcggggcaacaggacccgcggggcccagccccaccaggg

SEQ ID NO: 153282 - RNA, 73 nt, Homo sapiens
gggaagggaccagggcaggaaggaaagccaagcgcagagccggaggagccaccaacagaagcaggagccagga

SEQ ID NO: 153283 - RNA, 81 nt, Homo sapiens
acgcgccacgcggagcccgccgcagcgccagcgaggggcccggagaccagccaaccggaccgagccccagaccccacggca

SEQ ID NO: 153284 - RNA, 58 nt, Homo sapiens
ccagccggaacaagagacccgacaacgccagaacccacaaaaaccgcaacagaacaac

SEQ ID NO: 153285 - RNA, 74 nt, Homo sapiens
gggcacaacgcggccggcgcccgcacccaccgagaaccagccaccgacccacagaagcgaaggggacaggggga

SEQ ID NO: 153286 - RNA, 67 nt, Homo sapiens
gcccgaggggaagcagccagggaaaccggcacagggaagagaaacagagaaaccgcgaccaagccag

SEQ ID NO: 153287 - RNA, 99 nt, Homo sapiens
ccaggacagaaaagacaggcgccaggagcacagaagagcgaggagacaacaggcacaaagagagaaggaacacccacagggcagacagagaaagaacac

SEQ ID NO: 153288 - RNA, 83 nt, Homo sapiens
agagccgcccgagggaggcgacgggggcgaagagcgcgccgcccccgcccacccagggcggcacccaccccccgagcccgccc

SEQ ID NO: 153289 - RNA, 78 nt, Homo sapiens
cccgaggcgggagcccaggaaagaaccaaaaaccacgaggagaggagggcggaacagaggaaagggacaggaagacaa

SEQ ID NO: 153290 - RNA, 79 nt, Homo sapiens
acaccgcaccagggacacgggcgaagaaagcaagaggggaggcggagaagacccacaaggcggcacagggagaacacag

SEQ ID NO: 153291 - RNA, 78 nt, Homo sapiens
acaaccccccccggcccacgacccaaggacacaacccggccgcagagcccaggaggcagcacggcaggagacgaggag

SEQ ID NO: 153292 - RNA, 75 nt, Homo sapiens
aaagcagccgccgccgccgccgacccagggaggcccagcgaagagaaagaaaacaagaagcccggaaggccggca

SEQ ID NO: 153293 - RNA, 73 nt, Homo sapiens
cgcaagaccacaggcaaaagaccgcaacccaccaaggagcacaggacgaagaggaaggaaaaaacaggcgagc

SEQ ID NO: 153294 - RNA, 81 nt, Homo sapiens
cggccggacaagcccaggagccgaccagagagcagcacccacccccgagcacgccgcaacacccgcggaacccagcccaga

SEQ ID NO: 153295 - RNA, 43 nt, Homo sapiens
cacacgacccaacggggcaggcagaggggaggagacacgaagc

SEQ ID NO: 153296 - RNA, 88 nt, Homo sapiens
cagagacgcccaacagcccagcccggggcagggaaaggagaaacaccagacacggaagccacgccgaccaggcggagacccggacgac

SEQ ID NO: 153297 - RNA, 107 nt, Homo sapiens
ccggaaaaggcccaaaggccgccaggccgcagacgcgaaggaacggcaaagagaacaagcagaggaaagacacgccagagaagaacaggacacaacaggagacggaa

SEQ ID NO: 153298 - RNA, 72 nt, Homo sapiens
ccggacaccacgccgcggacgcaaggacagacccgagaaaccggacagcagaggaaacgagggacaacacag

SEQ ID NO: 153299 - RNA, 69 nt, Homo sapiens
cccgacgccaggcgcgcgccgccggaacaagaggagaccaagaaaacgaagaaagaaaagaaaagaaca

SEQ ID NO: 153300 - RNA, 79 nt, Homo sapiens
cggagccccagcgcccacgcaccccaccggcgcgcgcggcggcccgcgcacagaaacagaaagcccggccagcgccgaa

SEQ ID NO: 153301 - RNA, 56 nt, Homo sapiens
acgcggaccagaagccagagcgaggacgccggcaggaacaagcagaaagcacgaac

SEQ ID NO: 153302 - RNA, 73 nt, Homo sapiens
cgccgggacagacgggggagccccggcggagacgaaagaagccacacacagaagacccaaagagaacacagga

SEQ ID NO: 153303 - RNA, 71 nt, Homo sapiens
ccaggacaacgccaacaaaccgcggggcagaaagccagaccaacgagcgagcacgcgccaaggaacaaggg

SEQ ID NO: 153304 - RNA, 81 nt, Homo sapiens
gacgccaggaggaagggacaaaagaaaaggagcgccccacagcaaggcgggcaggagggcgcacgcccacagacggggggc

SEQ ID NO: 153305 - RNA, 65 nt, Homo sapiens
aagaaaggccaagaccaggaaaggaagagcgaaaccaccaaggggaggcgcaccccacggccccc

SEQ ID NO: 153306 - RNA, 73 nt, Homo sapiens
caaaggaccgcccccagagagaggcggagaacggaaaagcaccaggaagcagagaggaccgcagaagggaagg

SEQ ID NO: 153307 - RNA, 78 nt, Homo sapiens
ggaaacccacaggaggcaaccacacagagggaggagggaaccgcccgagcaccccccacgacccacacggggcacaca

SEQ ID NO: 153308 - RNA, 75 nt, Homo sapiens
cggaagaaccgaaggacacacaggaggaccgggggaaagcaaaaaaaccaccccaaggagcagacaggaggcagg

SEQ ID NO: 153309 - RNA, 85 nt, Homo sapiens
acaagccgagagaaagcaagcaaaggcagagagacgaagagagaagcagggcagaaagagcggaaacgagaagagcaaacacaac

SEQ ID NO: 153310 - RNA, 81 nt, Homo sapiens
aacgcccacgaggcccgcaaaggcacccgcccaggcgagccccaccggggagcaccggcaacagagaccgccgaccgcgcg

SEQ ID NO: 153311 - RNA, 77 nt, Homo sapiens
gccagcacaaacggacagaagaaaggggaaggaaaggagggagcggcccagcgccacgccacacaaaaacaggagac

SEQ ID NO: 153312 - RNA, 37 nt, Homo sapiens
gaggagagcggaggaggggggaaccgacccagacaca

SEQ ID NO: 153313 - RNA, 83 nt, Homo sapiens
ccaaaggcggcccaccggaagaagcaccagccagcgcccagccggcccggcgagggccaggaccgaaggagaagaaggagaag

SEQ ID NO: 153314 - RNA, 83 nt, Homo sapiens
gggacacaagcgcccgccaccacgcccggcaagcaaacggaaaaaaggccaaaacagaagaggcaaagcccagccacagcagc

SEQ ID NO: 153315 - RNA, 80 nt, Homo sapiens
gagggagaaaggcgggcccgggaacaggacgggccacgaggcaccggccgcgagcaccagcgccccagcacggggaacgg

SEQ ID NO: 153316 - RNA, 68 nt, Homo sapiens
cgcagggcgcccccggcgggaaaaccgccacaaagcccccaagccacaagcaacgcgcaggccggaag

SEQ ID NO: 153317 - RNA, 74 nt, Homo sapiens
agacaacggcaggagagggcccgacaacgaagaggaaagggagcagcaccggccacacccacagcacgaccgga

SEQ ID NO: 153318 - RNA, 66 nt, Homo sapiens
gaaacaacagggcacagaagccaccaagggccagaagcaaccaggggacaacacggcccgcaacga

SEQ ID NO: 153319 - RNA, 84 nt, Homo sapiens
aagcacaccaccaaggaacgggcgcagcgagaggcccagacgcccggagacaacccggaaacacgaagcaaaaacaacccccgg

SEQ ID NO: 153320 - RNA, 61 nt, Homo sapiens
acaccaaaaagcaaacggaccagaccgaccaccaaaagggagaagcagaccgcaccaggcg

SEQ ID NO: 153321 - RNA, 69 nt, Homo sapiens
cagccacgagccaacacagggcagagaggcagcggcgaggcaagagacgaaagcaaaacgaaccaaggg

SEQ ID NO: 153322 - RNA, 78 nt, Homo sapiens
ccggcggaaccaccacaccggccaagagagagacagaacaggcgggcacacaacccgggccagccgccggaacccgaa

SEQ ID NO: 153323 - RNA, 47 nt, Homo sapiens
ccaaaaacagggaaagggccagcacaggagaggcgggcgcggacggc

SEQ ID NO: 153324 - RNA, 72 nt, Homo sapiens
gaaaaggcagagagcacaggagacccggagacaggaagaaaacacgaagaaacgcaggagcccaccgcgagc

SEQ ID NO: 153325 - RNA, 66 nt, Homo sapiens
acccaggcacacacagaacaaaagcacgagacgacgggaccgaaggaccccgccagagacaaccga

SEQ ID NO: 153326 - RNA, 57 nt, Homo sapiens
aacagacgggagacgaacgaggccccgaagagcgaaagcgccaccggaggccgagcc

SEQ ID NO: 153327 - RNA, 73 nt, Homo sapiens
acacaaggccggcccccagcaggaggagggagacaggggcaaaaaacggcagggaagaggcgagacagaagag

SEQ ID NO: 153328 - RNA, 77 nt, Homo sapiens
gcggggcacccgcaggggcagacagcacaaccagcgggggcacccgaggaggaagagggcagggcccacggaaagaa

SEQ ID NO: 153329 - RNA, 57 nt, Homo sapiens
cagcagaagaaggcgcagaaagagagagcacaggacagggacaagcgcacagcggag

SEQ ID NO: 153330 - RNA, 74 nt, Homo sapiens
ggggccacggcccgagaggaaaaagcaaaacggagggaacgaaccgaaaccgcaaagagaggggagaaccaagc

SEQ ID NO: 153331 - RNA, 63 nt, Homo sapiens
gcaagaagcaccagcaagggccccagggcaccccgcgcaccaggagacaaagccacaaaaaca

SEQ ID NO: 153332 - RNA, 54 nt, Homo sapiens
cccagagacccccagcccagcccagggggcccaaccaggagcggagcaaggagc

SEQ ID NO: 153333 - RNA, 82 nt, Homo sapiens
aacccagagcccacaggcaaaggagcacggcaacccaacagagcaggccaggccgaagggaggggaacggaccaccaccgag

SEQ ID NO: 153334 - RNA, 88 nt, Homo sapiens
agagcgagccggcaggcaaccccaaggccaccccaccccagagcaacggggaccagacggggaacaaacggacccaggacaaaacgac

SEQ ID NO: 153335 - RNA, 73 nt, Homo sapiens
gggcgcggacccccggcccgcagggacaccgcacggacccgggccaaacagcagccggaggaggacaaggaga

SEQ ID NO: 153336 - RNA, 73 nt, Homo sapiens
gaagcaagaaggcccggacacagcaaaccgggccacagaaaaggaaccagcaaagaggggaagacacaaaggc

SEQ ID NO: 153337 - RNA, 72 nt, Homo sapiens
gcaagaacagcgacaaggagagaagcgcggagccccaagggaagagcccggagcaggaggagaaaggaaaca

SEQ ID NO: 153338 - RNA, 61 nt, Homo sapiens
gggaggggaccgcgcccgcccagcgccgcagcacgcggaccaggcgcccgaccagcgcaga

SEQ ID NO: 153339 - RNA, 86 nt, Homo sapiens
accggccaaagaagagggcacgacgagaacggggacaccacagcaagagcccgccaagcgacaacaggaggccagcgggagcccgg

SEQ ID NO: 153340 - RNA, 75 nt, Homo sapiens
aagacaaacagcaaggggcaaagacggagaaaagaaacgggagacccacaagagcggccaaaagaaaaccacgag

SEQ ID NO: 153341 - RNA, 80 nt, Homo sapiens
ggaggcccagggcaacagcagcaccgaaaagaacagggacacacagacccgggcccagccccaaggacgcggcgggagga

SEQ ID NO: 153342 - RNA, 75 nt, Homo sapiens
cccggcggagcagaggaaccacacgcgacagcaacagccggagggaaaagacggcgagcagaagcagacgggaga

SEQ ID NO: 153343 - RNA, 78 nt, Homo sapiens
caggccagcagcagaacaggccacgcaagcccccccgggagagcaggaagacagcagggacccagggagccaggagac

SEQ ID NO: 153344 - RNA, 75 nt, Homo sapiens
aaaacgaacggaagaaagccagaacagcaagaaacaaacgcacccagaaacaaggcccggcccggcgaggacccc

SEQ ID NO: 153345 - RNA, 75 nt, Homo sapiens
cgcgacgccaaccacgacgaagcggaaggcagaaggggccgggagaggaaagcggccgagaggaaaacagaagaa

SEQ ID NO: 153346 - RNA, 74 nt, Homo sapiens
ccgccggggagcggcggcggccggacgcgccccgcggagacaggagacacgggaagccgaggagaaaagaaaag

SEQ ID NO: 153347 - RNA, 67 nt, Homo sapiens
cagcacggaaacccgcccgcgagaagcgaccggcccgaggaccgccgcacgaccaaacgcagaaccc

SEQ ID NO: 153348 - RNA, 83 nt, Homo sapiens
cgggccgcgcgcggacgcaagcagaaacgaaggaggcccaaccacaaaaggagccgacggaacccagacggagaacaaaagga

SEQ ID NO: 153349 - RNA, 38 nt, Homo sapiens
gcaaggccccaggaacaccacaggcaaacagaaggaag

SEQ ID NO: 153350 - RNA, 80 nt, Homo sapiens
ggcaccaacacgcggagcggaagacggcaacccaggaagggaccacagaccagcacgccggcgccacgaaccgagcgaca

SEQ ID NO: 153351 - RNA, 77 nt, Homo sapiens
ggaggcccacccgcagaggccagggcgcgccccagcacccgccccggggcaccacccccaagaacacggcaccaaca

SEQ ID NO: 153352 - RNA, 70 nt, Homo sapiens
gcaggaagcaaaagccagaccaggggacgaggggacgacagacaaagcagggaccgcggcggagaagggc

SEQ ID NO: 153353 - RNA, 84 nt, Homo sapiens
cgccggaaggaaccgcgaggaaacggagggacgcaccaaagaagacagacacgcagaaaaggagccggaccccagggcccagag

SEQ ID NO: 153354 - RNA, 69 nt, Homo sapiens
gcggaccggacggccgaggagagaacagaaagaccaagcagaagagaggacaaagcaccgggcaggcgc

SEQ ID NO: 153355 - RNA, 55 nt, Homo sapiens
aaggagcgaagacccagaagcggcaagcggggcaggaaaaggaggacgagccacg

SEQ ID NO: 153356 - RNA, 80 nt, Homo sapiens
cgaggggagcgcggggcccggcagaaaggaaacccaccagagaaggcgcggccacccaggacccgggggaggcagcgaag

SEQ ID NO: 153357 - RNA, 53 nt, Homo sapiens
ccagaagccagcccgcccagcagaccgggaaaaacagaagaaggcgccgagcc

SEQ ID NO: 153358 - RNA, 77 nt, Homo sapiens
gggaaggaggccgagccgggaccaggcccgggggcggcggccacgccaaggacgggcagagaggcggaccccgcggg

SEQ ID NO: 153359 - RNA, 73 nt, Homo sapiens
ggcccagacaaaaacaagaaccccaaacccaccagaaaagccccagcgagcggcacccccacgggaacccaaa

SEQ ID NO: 153360 - RNA, 61 nt, Homo sapiens
gagaggacggagggggcccgacaaagcccccaagagagaaacagcgcgaacgaagaacaga

SEQ ID NO: 153361 - RNA, 73 nt, Homo sapiens
ccgccccggccgccaggagcagccgccggcgccaagagaaggcccagagcaaggaagaacaccaccaagacag

SEQ ID NO: 153362 - RNA, 93 nt, Homo sapiens
ggcaaccaagagagccccaaagccacggagcaccacacgaccgggccaaggggggggaagaagcggaaaggaggggccccggcacgcggcaca

SEQ ID NO: 153363 - RNA, 79 nt, Homo sapiens
ccgaaaggagagaagcagaacaaggacccgagaggacggaccacaccgggccgaacgcgcaccaaccaagcagcgcacc

SEQ ID NO: 153364 - RNA, 73 nt, Homo sapiens
cggaaacgccgcgaagcggagaacgaggcgagaagagacaaacagaaaacaacccaaacgcaaacaagcggaa

SEQ ID NO: 153365 - RNA, 79 nt, Homo sapiens
cacacccgcgaaggaaaaacaaaaccgagaccacccgcccccacaggagcggaagcaacaggaaagacccgcaaccaca

SEQ ID NO: 153366 - RNA, 56 nt, Homo sapiens
gaaacagaccaaagaggcaagagagagaacaaggagaacagcaagagaaagagcag

SEQ ID NO: 153367 - RNA, 59 nt, Homo sapiens
gaaaccccggagcaaggaaaagggaacccaagccgagagcaaggaacaaagagaccgaa

SEQ ID NO: 153368 - RNA, 72 nt, Homo sapiens
aggcggcccgccggcagagcgagggaaggaaggaacagagaagacccgcccccagcagggcacagcagacga

SEQ ID NO: 153369 - RNA, 73 nt, Homo sapiens
gggaagacaggcgacaagcaaggggaggagcagcagcgcggcagagcaggggaaacggcgaggaaagagagga

SEQ ID NO: 153370 - RNA, 67 nt, Homo sapiens
agacccacgacacggcaacggaaccccgacagcagagacgacgcggcaagcagcggaagaggacgac

SEQ ID NO: 153371 - RNA, 75 nt, Homo sapiens
agagagagaaagaaagaaagaaggccgggagaagcaagaaccgggacccccacagagccggaagaagcgaagacc

SEQ ID NO: 153372 - RNA, 73 nt, Homo sapiens
cgggaacaccacaccagaggagggaaaaggcgagaagcaagaccaagggccacaaggggggacgaaccaaagc

SEQ ID NO: 153373 - RNA, 87 nt, Homo sapiens
ccaccacacacggagcggaaccagcaggagcgagaacccgagcagcgccagagcaacacaccgcgccccagcacgcaggccgggccc

SEQ ID NO: 153374 - RNA, 80 nt, Homo sapiens
acaaaaaacaggagaaagaacacaggagcgcaggcgaccaagggcagcggaacgcgccgacgccgcaaccagcaccccga

SEQ ID NO: 153375 - RNA, 66 nt, Homo sapiens
acggccggggcggcgaagcggaggccggagcgcacgcagaagagggagagcagaagcagaaagcac

SEQ ID NO: 153376 - RNA, 82 nt, Homo sapiens
ccagagccagaggcccgccccacccgcagccgcacccccggcggcagcacgaaagaccaaacagaagagaagcaggaaaaag

SEQ ID NO: 153377 - RNA, 78 nt, Homo sapiens
gccaaaaagcggacaaggccccagggaccaaccacaccaccacagcagcaggcgagcacacagagaggggaagggcag

SEQ ID NO: 153378 - RNA, 59 nt, Homo sapiens
gagcccacccccaacgcgacggaaaggcacgaaagccagcaggggaaagcgcgagcgag

SEQ ID NO: 153379 - RNA, 106 nt, Homo sapiens
cagaagcacgaaaaagcgggaaggccggaaaggaccagaccgcccaggaaacggagggcaagagaacaaggagcaacccagaagaccggggccgcgggcagcggcg

SEQ ID NO: 153380 - RNA, 75 nt, Homo sapiens
gccagcggcaaaccgaagcaaacaggccccaagcagcacgcaaacgcaccacagccagaccaggcaagggccaag

SEQ ID NO: 153381 - RNA, 65 nt, Homo sapiens
gggcacggcaaacagggcacaaacccggagccacaacagaccagaacaggcggcccggcgcggaa

SEQ ID NO: 153382 - RNA, 63 nt, Homo sapiens
aggagaaaccggacgcgacgggcccgacccgacaccaaggaagcccagaaaccacgggaaaga

SEQ ID NO: 153383 - RNA, 75 nt, Homo sapiens
cccgccccgccgcgcccgccggccgacgagggagaaaagcggcccgcgagagacagagcagcggcggcgggacgc

SEQ ID NO: 153384 - RNA, 62 nt, Homo sapiens
gcgcgcaggccgcgacgagggcgcgaggaggacacgccccagggccagcccgggaccacgga

SEQ ID NO: 153385 - RNA, 78 nt, Homo sapiens
gggagaaagggagccgagcgagaccacgcaccacgggcgcgagaaagaacgcagcgcagcggacgcaaagacaagcag

SEQ ID NO: 153386 - RNA, 61 nt, Homo sapiens
gcaagaggcggacaggcggaacaaaggcaggccggagcgcgagaggcgcccgcacggcccc

SEQ ID NO: 153387 - RNA, 76 nt, Homo sapiens
cggggcccccagagaccgccagcaggcaggcccgagcacgcgcgggagcagcagggagaccggcgacggccggcga

SEQ ID NO: 153388 - RNA, 76 nt, Homo sapiens
aaaaggagagaaacacggagacagcaccaaacccacagaggcacgaggaggagagaacagagaaaaagaagcaaac

SEQ ID NO: 153389 - RNA, 81 nt, Homo sapiens
cagccccggagagcgggaacagggaaccagggccaccagagaagcgacagaccaggaaccagggggaagggagggcgggag

SEQ ID NO: 153390 - RNA, 69 nt, Homo sapiens
gagggacgacaggccgcccgcgacagaaccaccaccaaaaagccgggaacggcgagcgagcagcaaaaa

SEQ ID NO: 153391 - RNA, 54 nt, Homo sapiens
cccccaagcccagcagcgggcaccggcccgaccagccacgacacccacgaaagg

SEQ ID NO: 153392 - RNA, 89 nt, Homo sapiens
gccagcgacggaagcaaagcgggcacacagccacacaaacagaacaagcagcacggcacacggaacaagagcgaaacaccagacagaag

SEQ ID NO: 153393 - RNA, 29 nt, Homo sapiens
ggggcggcgaacaggagcgaaggacaacg

SEQ ID NO: 153394 - RNA, 72 nt, Homo sapiens
aaggaacagcgagcggaccccgaccccgaggcgagacggaaaggggccgcaaggccaggcgcgcagaggcac

SEQ ID NO: 153395 - RNA, 76 nt, Homo sapiens
gacccagccggcgggcgagcaggaccaggagggggccccggcgggccgggccgagcgcagagcgccgggcggggaa

SEQ ID NO: 153396 - RNA, 83 nt, Homo sapiens
cgggcccgaggaggcagccaagccgggccgcccgcggcaaaggggagcaagaagaaagagcagggaggagggagcgacaggaa

SEQ ID NO: 153397 - RNA, 70 nt, Homo sapiens
acaggagcacacccggagaagcaggagcccaccggcagggggggccccagcccggccgaacgggcgcacg

SEQ ID NO: 153398 - RNA, 80 nt, Homo sapiens
agcgagccccaccgccgccgagaggaggccagagaacagggggggccgaagaagccagggggaggaaagcagacagaccc

SEQ ID NO: 153399 - RNA, 74 nt, Homo sapiens
ggagaaggaccaagaaccagagcacgcgccaagggcacacgcagagggaggaaccggagaggccggagaagcgg

SEQ ID NO: 153400 - RNA, 72 nt, Homo sapiens
ggcacacaagggaaggcgagccggaaggcacgaccacagggagaaaaccccacgagcccaggcaacaccgcc

SEQ ID NO: 153401 - RNA, 80 nt, Homo sapiens
accaccaccaccacccccagcacacacaaaacaccaggacagcccaaggcggaaaagcgaaggaagccacaagcacagcc

SEQ ID NO: 153402 - RNA, 66 nt, Homo sapiens
aacccgcgacgccaaccacgacgaagcggaaggcagaagccccaggcaagagcagagaggagaaaa

SEQ ID NO: 153403 - RNA, 75 nt, Homo sapiens
cggcccgcaaagaaacagccccccgacagcccgggaagaagcagacacaagggacagagcagaagggcgaaagac

SEQ ID NO: 153404 - RNA, 79 nt, Homo sapiens
cagcaggcagcccccaggggcagggcagcaggcccaaacccccacagaggcaaggacaaaaacccagagaccagaaggc

SEQ ID NO: 153405 - RNA, 73 nt, Homo sapiens
ccggaagacccgagcagaggcggcggggcacagaaggagagcagaggcaaaaacaagcaaaccccagacagcc

SEQ ID NO: 153406 - RNA, 72 nt, Homo sapiens
aagaggccgaaaaacggcacacccaccaagcacccaacagaagaagaggcaccggcccagagagcagggaca

SEQ ID NO: 153407 - RNA, 55 nt, Homo sapiens
cgcgccccccgcccccccaccgacacagcccagccggccccgggggcgccgaggg

SEQ ID NO: 153408 - RNA, 82 nt, Homo sapiens
gcgggaacgggagccgggcgcggggagcgcgcgaagccggggcggagcacgcgagcagagccaccggcacccaggcggagcc

SEQ ID NO: 153409 - RNA, 76 nt, Homo sapiens
accaacggagcggggcaggggcgacgagagcgcgcgcggaaccgcaaggaagcgaagggaaaacagacgagcgacg

SEQ ID NO: 153410 - RNA, 76 nt, Homo sapiens
ccaaaggcgcccgcccgaaagcaacagagcgggcccaaccacagaaccagccccaagcacgggaagacccccagcc

SEQ ID NO: 153411 - RNA, 81 nt, Homo sapiens
agggccgcaagacccaagaagaagaaggcgaaggaccccaacggggaggccaacggaagaagggcacgggccccaccccac

SEQ ID NO: 153412 - RNA, 51 nt, Homo sapiens
ccgacgacgggggccccggaggccgcgcggagaccagacccacaccggggc

SEQ ID NO: 153413 - RNA, 66 nt, Homo sapiens
acggcaggccaggggcaggccaagcccagcccgacaccacccaaccgaggcacaggaagacacggg

SEQ ID NO: 153414 - RNA, 62 nt, Homo sapiens
cgaggaccaccacagaaggaagaagggcccgccagcacagagaccagaagacaacaaaaacc

SEQ ID NO: 153415 - RNA, 75 nt, Homo sapiens
gaggaggagacgcaggcggcccaggaccgggaggagagaagggaagcgccggcccagcggaggcaaggcagacgg

SEQ ID NO: 153416 - RNA, 68 nt, Homo sapiens
aaggagagaaagcacgaaggaccggagacagcagcagaagcagaaaaaggcaaacgagaagaaggagg

SEQ ID NO: 153417 - RNA, 68 nt, Homo sapiens
agaagaagaccacaaaaaagagacccacagccagcaacaccgcccgaagcgggaaggcgagagccaac

SEQ ID NO: 153418 - RNA, 74 nt, Homo sapiens
gcacggggacacgggcccaggcccgagggggccggaccgggagggcagggaacgaagcccaaaaggcagagacg

SEQ ID NO: 153419 - RNA, 72 nt, Homo sapiens
ccaggaaagcacagggcagcaaggaggaagcagggggagaagaacgcgcagggaagaacagaagagaagaaa

SEQ ID NO: 153420 - RNA, 68 nt, Homo sapiens
agcgaggacacagcccgcggaggcagcgacgacaagaagccaaagacgggagagagaaggcagaagcc

SEQ ID NO: 153421 - RNA, 60 nt, Homo sapiens
cccgcggggccaggagacacaagcgggacggaagaggcccggcgaccggacagaaaccaa

SEQ ID NO: 153422 - RNA, 55 nt, Homo sapiens
gaaaaggggccaacacaagagaaccaaccgacacgagccaaaaaccccggcagaa

SEQ ID NO: 153423 - RNA, 71 nt, Homo sapiens
ccaaaacccaacagagacccaagccaacagggaaccaggagccgacaacaacccgacgcaaggcagccaca

SEQ ID NO: 153424 - RNA, 77 nt, Homo sapiens
gcgggacagccgcgacacacagcggacaaggcaaaaccagcaagcggacccagacaaaaggcgaacccccggaacaa

SEQ ID NO: 153425 - RNA, 63 nt, Homo sapiens
gagaagccccgggcggagagcgaagagagcgaagaggagccggcagggacggcaggccaaggg

SEQ ID NO: 153426 - RNA, 80 nt, Homo sapiens
gaacaaagccaagcgggcaaacagaacaaagaagcgacgccaagaacaaaaaggacagccaggaaaagggggccaggaag

SEQ ID NO: 153427 - RNA, 92 nt, Homo sapiens
gccgcgcacccccggccggaggcaccagcaacgcagaacgcccccagacaaggccagcgcgagccagagacaacgagaagaaggggagccac

SEQ ID NO: 153428 - RNA, 60 nt, Homo sapiens
ggaacgggcacaaccacggggcagcgaggcagccaacccagagaagcagacgggaggcag

SEQ ID NO: 153429 - RNA, 71 nt, Homo sapiens
aacccggagagccgggggccagccccgccagccacgccagcggcgcaaaagcacggggagccgccccccag

SEQ ID NO: 153430 - RNA, 60 nt, Homo sapiens
gaggaggcagccaagccaggccgccacgcggcgcaggccagacggcacccgacagaagca

SEQ ID NO: 153431 - RNA, 83 nt, Homo sapiens
cagggcgggcacccccagaagcgagaaaggaaggggcccggccaggaccggggaagggggccgagagcagcgagacccggggc

SEQ ID NO: 153432 - RNA, 55 nt, Homo sapiens
ggcccgacccgcgagagacaacaggcacaaagagagaaggaacacccacagggca

SEQ ID NO: 153433 - RNA, 79 nt, Homo sapiens
gccaggcaaaggaaccacccaggaaacagcgcaagggagaccaaggaccaggagcaaccagccgggaacgccggaaaca

SEQ ID NO: 153434 - RNA, 85 nt, Homo sapiens
gcggccccggggacaccagcagccgcgcggagcgggaggaggaccgaaagggggggcgcggggcccacgccccaggacaaaaggc

SEQ ID NO: 153435 - RNA, 78 nt, Homo sapiens
aaagcaaaggagcagggaggcccccaggggccagcgccaccggaccgcacgcgcacggacagcgccggcaaaaacagg

SEQ ID NO: 153436 - RNA, 73 nt, Homo sapiens
caccccacaggaccccagagcgacagcccgggacaccaagaaagaacaaccgcagaaaagcaaacgagaggac

SEQ ID NO: 153437 - RNA, 76 nt, Homo sapiens
ggggacccgacacccccccccaccgaaccgcgggaagaaagcacgggaaaaggccgggcccacaggggagagccca

SEQ ID NO: 153438 - RNA, 69 nt, Homo sapiens
caaaagcagccgggaaaggagccggccggcggcaaagaagcagaaagggccgccaaaacagggagagag

SEQ ID NO: 153439 - RNA, 75 nt, Homo sapiens
ccaggacgacggaccggacacaccgaaccaggaacagacgaggggacacaaaaaacacgcgaaacggaccagaca

SEQ ID NO: 153440 - RNA, 78 nt, Homo sapiens
caagcgagagccgaagagggaccaggaccggagacgagcggccgccaccccagccgcagaggggaagagcgccgacgc

SEQ ID NO: 153441 - RNA, 73 nt, Homo sapiens
ccagccagccacgccaccgcgacccacacgggcaaaacggcaaacaagggagcgaaaccagcacgacaaagcc

SEQ ID NO: 153442 - RNA, 81 nt, Homo sapiens
cccggggcacccgcacgggaagcaggcccgccacaggccaggcgaaccagccgaaaaaggagaaaccaaaaggaaaagcga

SEQ ID NO: 153443 - RNA, 68 nt, Homo sapiens
cgcagggcgcccccgcagacggagccgcccagaagccgcccacagcaagcccagaagccaacccgaaa

SEQ ID NO: 153444 - RNA, 61 nt, Homo sapiens
cgcccggccggacggcaccccccgcaagagaagagaacgagcggaagaggcagaagccgaa

SEQ ID NO: 153445 - RNA, 67 nt, Homo sapiens
ggcaggaaggaccgagaccaggaggaagacggcgaaggcccaggccgcaaaggaacgccacaaagag

SEQ ID NO: 153446 - RNA, 73 nt, Homo sapiens
ggaccgaagcaccacaacgcaacacgcccagccaccagacgaacgcaccacgggaggcgcgagaaggcagaag

SEQ ID NO: 153447 - RNA, 69 nt, Homo sapiens
gcggcagacccggcagagagccccggaccacaaggcagggagagagaaaagaaaccgacccggaaaaga

SEQ ID NO: 153448 - RNA, 115 nt, Homo sapiens
gcggcgccccgcgccgccgcgcccacggccccgccagcaaggcggcgcgcccaggaggaaggcggaaccgagaagggggcccacaggaggagcaagaagagaaacagccggacca

SEQ ID NO: 153449 - RNA, 49 nt, Homo sapiens
gacccccgcaaagcagacaacgaagaaggagagcacggcccggaaagaa

SEQ ID NO: 153450 - RNA, 83 nt, Homo sapiens
ggaagacacaaagccgcgaaaggccgggaagagggagagcaaacggccagcccagaagaaaccgacaagaacaaacgccggga

SEQ ID NO: 153451 - RNA, 71 nt, Homo sapiens
aaaaagaaagcacgcccggcagcaggagaggaggcccagagaaacacacgcaaaacacagcggccggcacc

SEQ ID NO: 153452 - RNA, 72 nt, Homo sapiens
aaagcgccgccccccgcggggcaagacaaagaagccacaccggaccaaccccaccgcgcgccacaacgcaca

SEQ ID NO: 153453 - RNA, 60 nt, Homo sapiens
gacaaggcaccgcccagcacagaaagaccggacacccgcacacagggaagagaaggacag

SEQ ID NO: 153454 - RNA, 50 nt, Homo sapiens
gagacccagcccgcaggagcggcgcgcccaggacccccgccccaacaaga

SEQ ID NO: 153455 - RNA, 83 nt, Homo sapiens
gccgccgcccgcgagcgccagacgccggccgcggaccaggcccagccacgcccaggccaggccaggcccgccgccgccacagc

SEQ ID NO: 153456 - RNA, 48 nt, Homo sapiens
gaacccagccgcaccggaagcggcgcgggcccccccacccccaagaac

SEQ ID NO: 153457 - RNA, 79 nt, Homo sapiens
ggacccgggcccaaggccgcgccgaccgcacgcgcacggaacagcagcaaccccaggaggcagacgggcaaaaggaagc

SEQ ID NO: 153458 - RNA, 69 nt, Homo sapiens
gccacaggaagaaggccacagggcgaagcgagaaacaaggcaggaaaacacacaaagaacccggagagg

SEQ ID NO: 153459 - RNA, 51 nt, Homo sapiens
gcggaacacaggcaaaagggaaaggccgcagaaggaacggcagccacacag

SEQ ID NO: 153460 - RNA, 64 nt, Homo sapiens
gaacgagacagaacaggaaaaaggcaacccggcgacgagaccacggaaaaacgaaaggcaacga

SEQ ID NO: 153461 - RNA, 65 nt, Homo sapiens
acagaaccaacaaagcgggccggcgcccagaaaggagagaaacagcaagaaaacagcgggaacca

SEQ ID NO: 153462 - RNA, 82 nt, Homo sapiens
gagcaagacaccggacaccgagggcccccaaaagccagagcccgggcgcgggaagagacagaccgggagaacaagcgaaggc

SEQ ID NO: 153463 - RNA, 58 nt, Homo sapiens
ccacgggaggaggggagcagcagaagcaaggccacacggcacacagcccaccaggcac

SEQ ID NO: 153464 - RNA, 76 nt, Homo sapiens
agaagcagaggaacacaagggcccgggacgagcggcccagcgacgagcgaagaggcacaaaaccgccaggagccga

SEQ ID NO: 153465 - RNA, 55 nt, Homo sapiens
aaagacccccagacacacacacccaacccaaaccaaggcaacgaagcaagagccc

SEQ ID NO: 153466 - RNA, 81 nt, Homo sapiens
gcaaaaaaaaggcagcacagagcacacgagagcagagccgccgcgacgaccggaggcgcgggccacagcagacccgcgcgg

SEQ ID NO: 153467 - RNA, 88 nt, Homo sapiens
ggaagagcaagagcagcagggaggaggaggaagccaagaacgggagcgaagccacgcagcggcaccaacgaccgggcccggaagcaac

SEQ ID NO: 153468 - RNA, 87 nt, Homo sapiens
aaggggaggacgcagcaaaccaccagaaggcgagcaccacgccgaaaaacgggagaacgccaaaaaacaaacgcccgcaaacaggga

SEQ ID NO: 153469 - RNA, 78 nt, Homo sapiens
cgaggacgaggaacggcggaaccagaaagagacaagaagggaccggcgcgggggacccaccacccccgaccacagccc

SEQ ID NO: 153470 - RNA, 81 nt, Homo sapiens
cccggcaggacgaggacgaaggccgagcagaaaaagccaccggagcgaagcgaaggaagcgaggacaacaccgggagagcg

SEQ ID NO: 153471 - RNA, 66 nt, Homo sapiens
gacaagcggaagcgggaacgacagaaaggccccagaaacagggagaaaacaacagccaagggcaaa

SEQ ID NO: 153472 - RNA, 61 nt, Homo sapiens
cggccggacccccccccggcgcccaagcggaaggagacccgggagccccagaaaaaggggc

SEQ ID NO: 153473 - RNA, 65 nt, Homo sapiens
cggaggcagaaacacccaaagcgaggagccaaaaaccgaacacccggaaggggacaagggacggc

SEQ ID NO: 153474 - RNA, 87 nt, Homo sapiens
gaaaccaccgccaggcggaccccaccccgggcaagagcagcggaggcagcgaaggagcaccgggcgcaaaggccgaccgaacacacg

SEQ ID NO: 153475 - RNA, 55 nt, Homo sapiens
cgaccgagacgggcggagaggagaagcggaagaccaccaaaagcaggaaaacgag

SEQ ID NO: 153476 - RNA, 76 nt, Homo sapiens
gcgaaacaccaaaaccagcggagcgacacagccaaagaaaccaggcggggaacaagccagcagcccaaggagaagc

SEQ ID NO: 153477 - RNA, 71 nt, Homo sapiens
cccggacacccccggcgccagccgggggagacccagccacagaccggcccacaaaaagccgccaggagaaa

SEQ ID NO: 153478 - RNA, 80 nt, Homo sapiens
cgagcgcaggccgaggcaggccgggcaggaggcgaaccgcgagcccagaaggcgagggacgaggaagcccaaggcgcgcc

SEQ ID NO: 153479 - RNA, 72 nt, Homo sapiens
gacaggccaaggccgcaacaccggaaggagcccgaccacacccggcagagcgccgccgcagccgagagcggc

SEQ ID NO: 153480 - RNA, 68 nt, Homo sapiens
gcggaaaacggaccgaaggccgccgaaagcagagaaaggcaaagaagaggacacagagggagacccac

SEQ ID NO: 153481 - RNA, 81 nt, Homo sapiens
agaagcacgaagaccaggacacaaccggaaccgcaggagcaaaaaagcccgacgccacccccagggccagaccggaaccgg

SEQ ID NO: 153482 - RNA, 72 nt, Homo sapiens
gggcgcacagcgcgacgggcggacggaggagggagaaagaagagagaccagaaacgagaggagaagaaacca

SEQ ID NO: 153483 - RNA, 67 nt, Homo sapiens
gagacggccccacccccacccaaagagcccgggcaaacagccacgaagcgacccgcggccccagcac

SEQ ID NO: 153484 - RNA, 72 nt, Homo sapiens
acagcccgagaaaccgcagcacacacgcgaccggcccgaggaccgccgcacgaccaaacgcagaacccacac

SEQ ID NO: 153485 - RNA, 75 nt, Homo sapiens
gggcgaaaccggaccgggcccggaggagcgaacaaggcgacaacacaggagcgagcggccggggagaaccgccgg

SEQ ID NO: 153486 - RNA, 82 nt, Homo sapiens
gggcgccgccgcgggcgccgggagcgagcgggagggagccgcgcgccggcgcgcgccgagccggacaggacaaaaggacaca

SEQ ID NO: 153487 - RNA, 83 nt, Homo sapiens
aaaacaagaaaaaaaccagagagcagcgacaggagaaccaagcccaaaacgagggccggggagacagacaggaggaaagacag

SEQ ID NO: 153488 - RNA, 74 nt, Homo sapiens
aaacacccacgccgacgccacaacagaccaaacacgaggcggacgcagaaaggaagaccccgacaagggaccgg

SEQ ID NO: 153489 - RNA, 73 nt, Homo sapiens
agccaccggcagaggccagccgacaaaagccagagcccgacaaggagcggcagaccgagacagagaggccgag

SEQ ID NO: 153490 - RNA, 76 nt, Homo sapiens
gcgacacaagcccagaaaggacacaaaagagaggcagaaaccacagaggaaaaggacagcaagagcagccccggaa

SEQ ID NO: 153491 - RNA, 76 nt, Homo sapiens
aggaagacaggcgccaccgcggagaaaaggcagcaagacaagaaacgccccgaaaagaggcagccgccagaaccac

SEQ ID NO: 153492 - RNA, 74 nt, Homo sapiens
acaacagcccgacaaccaggcagaagcccccggggagagacagacagagggacacagagaggaagaaaggaggc

SEQ ID NO: 153493 - RNA, 69 nt, Homo sapiens
gaggaccacgccggagcaagcccccgacggacaaaggagagaagccacagaaaacagacagcagcgcaa

SEQ ID NO: 153494 - RNA, 90 nt, Homo sapiens
ggggccaacgacggagggccacgcgaggcccaaaagaagagggaaggcaccaggagaaggcaccgggaaacagaaagcaaggaagcgaca

SEQ ID NO: 153495 - RNA, 75 nt, Homo sapiens
gccggagaagaaagaggccacggaccgaggaaccaggacagaaacccacagaaagagggggcccgggcagggcca

SEQ ID NO: 153496 - RNA, 84 nt, Homo sapiens
ggcccacagcgccacagaaccgcccaaaaaggcaaagaaaccacgaggagccaccaggggaaccccccggacgagcgaggaaga

SEQ ID NO: 153497 - RNA, 74 nt, Homo sapiens
cggcaaaagcagaagggaaggcaaagggacagccccgacaaacaggaaaaccagaaaaaccgggcggaagcccc

SEQ ID NO: 153498 - RNA, 66 nt, Homo sapiens
cgcgggacccagcccaggcggcgcggacggggcggaacgggcagggacgaccgcaaagcgcggagg

SEQ ID NO: 153499 - RNA, 87 nt, Homo sapiens
gccggcggcaggggaggcaagaagcggcgcgggagcgaccgagagccggagaggaggaaggagaagcccgggagcgcgcgggccggc

SEQ ID NO: 153500 - RNA, 69 nt, Homo sapiens
acacaaaggaaggcaaagagccaggacgcacagcaacccgcaaggccaagggcaaggaaaaggcccacc

SEQ ID NO: 153501 - RNA, 74 nt, Homo sapiens
agccagacccaagggggacagcgaggcccaaacaaccacaaggaaacaaggacaacccgggacaacaggaccca

SEQ ID NO: 153502 - RNA, 80 nt, Homo sapiens
cggacgccggagaggcaccggaccgcggacaaggcaaaaccagcaagcggacccagacaaaaggcgaacccccggaacaa

SEQ ID NO: 153503 - RNA, 79 nt, Homo sapiens
gcggccggaggagcccccaggcccgagagaggaacgaggggcacagaaaccagaaaaacggagcgcgcaagacggccgc

SEQ ID NO: 153504 - RNA, 75 nt, Homo sapiens
ccgcggaccccgaaggagcaggagcgagaccaacgggagccccaagcaaggagacagagccgaacagccgcgaca

SEQ ID NO: 153505 - RNA, 60 nt, Homo sapiens
ccgcaaaaagaccaaccccgagagacagacgccaggaagcaggcaccggcgggcaaccag

SEQ ID NO: 153506 - RNA, 69 nt, Homo sapiens
acacgaggagaaacagcagaaacgcaccaggccaaagaaagagaacaccaggaagaagaggcggaagaa

SEQ ID NO: 153507 - RNA, 81 nt, Homo sapiens
ccgcacgaaacgcccgaaaacagggccggccgcagagcccaccggaaggagaaggaagaggagcgagcaccgcacccaggc

SEQ ID NO: 153508 - RNA, 76 nt, Homo sapiens
gaaagagagagacagaagccacaggcccgaagcgccagagccggggcccccaacagcacggcccaggggaccacgc

SEQ ID NO: 153509 - RNA, 71 nt, Homo sapiens
gcacaggagagggaagaaggagcagcgcagggaagcagcaacccagaagggagaagacggagaggcacaag

SEQ ID NO: 153510 - RNA, 64 nt, Homo sapiens
gcgcgggacccagcccaggcggcgcggacggggcggcgcccgcaaggccaagccggcgaagccc

SEQ ID NO: 153511 - RNA, 47 nt, Homo sapiens
gaggcagaggcacagcgcaggcagagaacagcagaccacagcaggga

SEQ ID NO: 153512 - RNA, 85 nt, Homo sapiens
gccgcgcgccgccgccgccgcccagagacgcgagcccgccgccgccgccaccacccacccggacacagagagccacaggccgcac

SEQ ID NO: 153513 - RNA, 76 nt, Homo sapiens
acgaccaggaggcacgaaaaacagaaccacccaaacaaaagagagggaggccagagaaaccagagaggagggaagg

SEQ ID NO: 153514 - RNA, 59 nt, Homo sapiens
ccagagcccgcccgccgggagaagacgggcggagccaggcccagacagccgccgaagaa

SEQ ID NO: 153515 - RNA, 71 nt, Homo sapiens
ggggccgcgccgcgaccccacggccgggcaccgaaaggagcagccagaagcaggaggacaagccaaagaag

SEQ ID NO: 153516 - RNA, 63 nt, Homo sapiens
cagagacggaggaaacccgacagcaaagaccagcagcgagagcacggcgaacccggccccagc

SEQ ID NO: 153517 - RNA, 72 nt, Homo sapiens
aagaagggcggaaggacaggaaggcacacgaaagggcggagaacggaaaagcaccaggaagcagagaggacc

SEQ ID NO: 153518 - RNA, 81 nt, Homo sapiens
ccaggccccccgccccggccgccaggagcagccgccggcgccaagaggaacccagcagaagccagccgccacgccgagcca

SEQ ID NO: 153519 - RNA, 85 nt, Homo sapiens
aaggcaccccacccccagcccaacaacaggaccaagcccaccaagggacgccagcacccaaccgccacagcagaagaaaccggaa

SEQ ID NO: 153520 - RNA, 63 nt, Homo sapiens
cagggaaaggaaccgcggacagggcccagccccggaaggcaggaaggggacggagacacgacg

SEQ ID NO: 153521 - RNA, 75 nt, Homo sapiens
ggcggccagggcgaaaacacggagaccaccccagcacgaacagacagggaagcaccggacgggcaacaacaggac

SEQ ID NO: 153522 - RNA, 42 nt, Homo sapiens
gcccccaaagggggcacagcggcccagcaggagaaccagagc

SEQ ID NO: 153523 - RNA, 78 nt, Homo sapiens
ggcacggagaggcggcgagaccgcaggccccaccgaggcaccaccaaccaaagcggcaacccgacagaccgaaaggga

SEQ ID NO: 153524 - RNA, 73 nt, Homo sapiens
ggcaggaggccgggaggaagaaaaaggaagaacagcccgcccgcagcggagaagagagcggaaagagcaacag

SEQ ID NO: 153525 - RNA, 75 nt, Homo sapiens
gcagcagcagcccgccacccaacagaccggagcgaaccaccccaaacagaacaaacggagccaagaaaaaggagc

SEQ ID NO: 153526 - RNA, 78 nt, Homo sapiens
agaaaagagacgacgggaaaaggaggaaagcaagcgaagcacggcccgcggcaggcggggccaggcccgagccagaag

SEQ ID NO: 153527 - RNA, 79 nt, Homo sapiens
caccagacgccaccacgggcacccgcgccgggcaccgaggaccagccaagacagcgcaggccaagcagaaggcagccgc

SEQ ID NO: 153528 - RNA, 71 nt, Homo sapiens
agaccaaaaggagcagaaaacacagcagcgcgcagacaggacaaccagcggaggcacgacgccaaaccaaa

SEQ ID NO: 153529 - RNA, 83 nt, Homo sapiens
caccgcacgcgcggaggagggcaggcgccccaggagccacacgggcagcggggagaaaagaaggacggcccgccgaggggcgc

SEQ ID NO: 153530 - RNA, 76 nt, Homo sapiens
ggagagccgggagcgcggggcgggggcgcccgccgcgccgccacggggcaacagaaagccacaaccggacaagaaa

SEQ ID NO: 153531 - RNA, 75 nt, Homo sapiens
cgggaaagaaggcaaaacacggacagacaagagaagagaggaaaagaaacccgggggagaggcggagacacgaca

SEQ ID NO: 153532 - RNA, 61 nt, Homo sapiens
gcccgggccagggccaccccggcgagacgggcagacaacgaacaagcgaagaaccagcagc

SEQ ID NO: 153533 - RNA, 75 nt, Homo sapiens
gacgagacagagggaggggacgggaacggcgcaccccaccagccggagggaagggcaacaacccaccgggggaaa

SEQ ID NO: 153534 - RNA, 42 nt, Homo sapiens
gccaagcagccgggacaaggagcgggggccccccccgggcac

SEQ ID NO: 153535 - RNA, 75 nt, Homo sapiens
ggcccggccgggcgcccggggcggcggaggaacaagcagaaagcacgaacaacgagaacaagacacgagcaaacc

SEQ ID NO: 153536 - RNA, 42 nt, Homo sapiens
ggcccaccccccaccaaggaagagcgggaacagcccacggcg

SEQ ID NO: 153537 - RNA, 74 nt, Homo sapiens
gagaagcacgcacagggccgcgggaagaccagccccaaagcgagacgacgggaccgaaggaccccgccagagac

SEQ ID NO: 153538 - RNA, 102 nt, Homo sapiens
gggaaacgcggagaccaagccggagaccacagccgcgcaggagcgggcggggcagggggaaggagccacccccaacccgaaggcaacagcacagggacaacg

SEQ ID NO: 153539 - RNA, 75 nt, Homo sapiens
gaaacagaacccggcccaaaggggaggccggccaagaagggacccagacacgacccggagaaaaagccagaccag

SEQ ID NO: 153540 - RNA, 80 nt, Homo sapiens
aggaagccgagggcgaggaggacccaccaacagagaggggagaagagcgagacgagaaagaagaggaagaagagagagaa

SEQ ID NO: 153541 - RNA, 63 nt, Homo sapiens
cacgcccaagcagcggagcgggcaaggggaaggaacaaagcagagaaaccaaaaggccagacg

SEQ ID NO: 153542 - RNA, 80 nt, Homo sapiens
agaacccccagcacgccaccaaagacggaacccaacaagacccgccccaccaccgaggagcagagggcacccagagaaaa

SEQ ID NO: 153543 - RNA, 78 nt, Homo sapiens
gcaaaccggacagggagacggcccggcggcccggagggcccggccaggccccaccgccacaagcaggggaacaccgcc

SEQ ID NO: 153544 - RNA, 39 nt, Homo sapiens
acgaagcgcccgccaccaaggaggcacagcacaaggggg

SEQ ID NO: 153545 - RNA, 76 nt, Homo sapiens
cagaaagcagggccccccccagggcgcaggagaacccagaaaagccaaagggaaaagaagagaagcacagacagaa

SEQ ID NO: 153546 - RNA, 78 nt, Homo sapiens
gaggaggcccaagagaagagacgccgagaggccaccaccaccacagacagagggaagagcggaacaccaacaaaccag

SEQ ID NO: 153547 - RNA, 53 nt, Homo sapiens
ccaacgagcacgggccaaggagaggccagaggaagcgcgccgaacgggagccc

SEQ ID NO: 153548 - RNA, 57 nt, Homo sapiens
cggcccagacccacacgccggagagcccggaacaagccggccggaaaagcccaaggc

SEQ ID NO: 153549 - RNA, 72 nt, Homo sapiens
aaaggcacagaaaaacaaaaggacaaagcgcacacgagacaaaccaagaaaccacccaaacaagcggccgga

SEQ ID NO: 153550 - RNA, 84 nt, Homo sapiens
gaccggaggcgcacacgaccggccaacaagaaccgggacgaagccacaaacagcgcggaagcgcagggcggagaacggaaaagc

SEQ ID NO: 153551 - RNA, 74 nt, Homo sapiens
ggggggggaagccgcagcggaaagcaggagcacaggggcagggcaagaccccggcagccggaggccccaaacgg

SEQ ID NO: 153552 - RNA, 75 nt, Homo sapiens
caggaccccccagcccagaaagccggcgggaggggggcaaggagaagaccgaccaaggagaagcagaaggcggaa

SEQ ID NO: 153553 - RNA, 79 nt, Homo sapiens
cgacgcggggccaggcaggacccaacgacaggcgccccggcccaacggagagcgacgcaggggaggacagggaacggcg

SEQ ID NO: 153554 - RNA, 89 nt, Homo sapiens
ccgaaggaaagagaggccggggaaagccggggcgcccgcgccggcagaggaggcgagcacccgccagggagaggaacccccgcgcaccc

SEQ ID NO: 153555 - RNA, 62 nt, Homo sapiens
cagacgcagggcgcccccgacccaccaagacaggggagcgcccaggcagcccaccacccacc

SEQ ID NO: 153556 - RNA, 72 nt, Homo sapiens
cccaccacacacagcacaggcggcccagccggaagaagaacggaaaaagaggccacagaaggccagcagaca

SEQ ID NO: 153557 - RNA, 75 nt, Homo sapiens
ggcggcgcccccagggcccggcggccgccgccgcgcgcgcccgccgcaccgacaagcagaccggaagaccgacgg

SEQ ID NO: 153558 - RNA, 74 nt, Homo sapiens
aagaagagaagacgccaccccaagaggagcaagaggggggggcccccccgaagaaaggaaccggggagcggcga

SEQ ID NO: 153559 - RNA, 60 nt, Homo sapiens
ccagaagccccgggagcaccgagaagcggagaaggccgaggcacggaaggccaggacaga

SEQ ID NO: 153560 - RNA, 81 nt, Homo sapiens
gaacaaacaaacacccagaaacaagagcagccaggcaagacaggccaacaccgccaccagagaaccacacaaaggaaaggg

SEQ ID NO: 153561 - RNA, 85 nt, Homo sapiens
cgccagacgcgcacaaggggcaacaccagggaacaccgaggccagggggagccgaccggagcggaaccccggggcgaggggaggg

SEQ ID NO: 153562 - RNA, 65 nt, Homo sapiens
ccgcaagggacaagcccaacagaagagcccaccgggggacgaccagacacgccaccggacgcagg

SEQ ID NO: 153563 - RNA, 68 nt, Homo sapiens
cacgagcccccaggccgagacagggaacgggcggggcaaacaggggagaagccgggggagagacaaac

SEQ ID NO: 153564 - RNA, 72 nt, Homo sapiens
ccgcccagccccaagagcgggacacagggacgggcccggcgacccgaaggcaagcaaaggggggaaaagccc

SEQ ID NO: 153565 - RNA, 81 nt, Homo sapiens
cacccgggcggggcagagcagcccccagccagccgcgaggcgcacggaagaccaggagagagagggacgcagacacgacaa

SEQ ID NO: 153566 - RNA, 72 nt, Homo sapiens
ccacgcaccgcacaacaagaggccggcggggcgacagggggggaaaaaaacacaacggacggagaaaggaca

SEQ ID NO: 153567 - RNA, 81 nt, Homo sapiens
ggcggcgacagccaggcccggaagcgagggcggccgcgccggcccaggagggagcccagccggagacggggccggggaccc

SEQ ID NO: 153568 - RNA, 67 nt, Homo sapiens
gagcgggggaaagaggacaacaggaagccagaggaggagaccccgaccaagaaaggcacaggaacag

SEQ ID NO: 153569 - RNA, 63 nt, Homo sapiens
gaaagagaaggacccgaaaggcacccaggaagaggcgaccgggggcaagcccgccccggggag

SEQ ID NO: 153570 - RNA, 84 nt, Homo sapiens
ggaccgacgcgcgcaggcagaggagaaggcagcggacaaagaggcacacgaccgcccaaggccacaccgccggccggcccccga

SEQ ID NO: 153571 - RNA, 38 nt, Homo sapiens
acacaggacaaccaaacaaaggggcggagcaacggaag

SEQ ID NO: 153572 - RNA, 78 nt, Homo sapiens
gccgcaccaggccaccgccacgggccgagacacgcagcggcggccagggaccaagagaacaaggccccccaacagccc

SEQ ID NO: 153573 - RNA, 74 nt, Homo sapiens
ggaccgggccgagcgggcaccaagggaccgcagggggacccaagcggggaagagggccagggacgaggggagcc

SEQ ID NO: 153574 - RNA, 80 nt, Homo sapiens
ccaccggcgccccagggacaccaagacaccaccaacagcaggggacagggacgaagcacggcaccggcccacgacaccgg

SEQ ID NO: 153575 - RNA, 53 nt, Homo sapiens
gcacgggaaccgaagagagccgggcaagcgaggaaaacgccacgacagacaca

SEQ ID NO: 153576 - RNA, 83 nt, Homo sapiens
aaagaaccgcccacgggccgcgccaggaccagccgacagcgaccaaggccagagcgaaaggccacggccagccgccggcacgc

SEQ ID NO: 153577 - RNA, 72 nt, Homo sapiens
gaaggggaggaggggcgcccgagaaggggacggcgggcgagggaggggaccgccgcggaggagacgaacaag

SEQ ID NO: 153578 - RNA, 72 nt, Homo sapiens
aaagagggcacccacccacgaagggaggaaaagggcagggacagcgcaggcagcagcaaagaaagggagaca

SEQ ID NO: 153579 - RNA, 66 nt, Homo sapiens
aaacagcaagaacccaaaaggcgagccggggaaaaccccagggcaaaacgccagaaaggaccgcac

SEQ ID NO: 153580 - RNA, 88 nt, Homo sapiens
gcggaacaccaaacggaggagccagacccggggaggcgcacacacaccaaagggcaaacccgaggacagagggagcacaaccagaccc

SEQ ID NO: 153581 - RNA, 75 nt, Homo sapiens
gccggggaggaagggcggcggaccgcgagacaccgcccggagggcccgcggccaccagccacaggcaggccacac

SEQ ID NO: 153582 - RNA, 83 nt, Homo sapiens
gagcagacggagagaaaaaaccgggacagagcgggagccaccagcgccaaagggaagccaggagcccgggggcacggggagaa

SEQ ID NO: 153583 - RNA, 77 nt, Homo sapiens
ccgaggcggcgagagaggcaggcggagccgaccgggccagggaaggagaagaaccacagacaaagacgaaagaaaaa

SEQ ID NO: 153584 - RNA, 54 nt, Homo sapiens
cggcagaacagccaagagcgcggaacgcgacccgcccaaggaaagaccaacacc

SEQ ID NO: 153585 - RNA, 72 nt, Homo sapiens
caaacagaaaaggcaaggaccacgccagcggaaacacggcgccacaggagccgcagaagcaaaggcaccgcc

SEQ ID NO: 153586 - RNA, 91 nt, Homo sapiens
ccaagagaggcggggaccgcagcagcgagaaaggagccggggaccccccaaagacaagcaaaccagccagcacgggggcccagccagccag

SEQ ID NO: 153587 - RNA, 79 nt, Homo sapiens
aggaccgcagagccgggagaaccggaggaggaggccacacagaaggacggcccgacggaaggcccaggcagcgcagagc

SEQ ID NO: 153588 - RNA, 94 nt, Homo sapiens
gccgagcaaccagaaccggagcaggaggcgcacaacacccaggggcaacaggaaaacaacccagagaacccaaacccccagacaagacacccca

SEQ ID NO: 153589 - RNA, 76 nt, Homo sapiens
ccgcaaacgaaaaagaacgacagagcaaccaggaaagaagagggacacagcaggggccagacaaccagacccggga

SEQ ID NO: 153590 - RNA, 70 nt, Homo sapiens
gcaacggacagcgggaggggcaagcaaccaggacaggccgccgcgaccccccccggacacaccgaggcaa

SEQ ID NO: 153591 - RNA, 65 nt, Homo sapiens
gaagagccgcggaccagaaaaccaccggcaccacccacaaagggagcaagaggcagacagaccga

SEQ ID NO: 153592 - RNA, 63 nt, Homo sapiens
gcaaagaccaccagaacaggaaaacagagcagcgcagccagaacggggcaacaggacacgccg

SEQ ID NO: 153593 - RNA, 81 nt, Homo sapiens
caggaccgcaccaaggcggcaagcgcagaaccaaaaagagccaagcgagaagagagaaccacaaagggcagagcaaagacc

SEQ ID NO: 153594 - RNA, 75 nt, Homo sapiens
gaccccagaccgagcccagaagggcagaaaggggaaacagccaggcccaccgacaacaggacaaccggcagagaa

SEQ ID NO: 153595 - RNA, 80 nt, Homo sapiens
gcggcccaccgacacacgcggacgccccgccgcaggccgagaaacagacaacccacagaacaaagcggaccaaggcaccc

SEQ ID NO: 153596 - RNA, 76 nt, Homo sapiens
gcggaacccggggccgggacgcagcccggcggcagcaggcgagcccacaccaaccggcccacccaccgacgcggca

SEQ ID NO: 153597 - RNA, 81 nt, Homo sapiens
agagagcggaggacagccgagaggagagccaggccccggggccccagcggcaccagcggagaccacgggagccgcgccgga

SEQ ID NO: 153598 - RNA, 73 nt, Homo sapiens
ggaaaaggcggccacgaggcaaccagcaagcgaaggaggaccagacaagaagggagagacgaagaaaagcgcg

SEQ ID NO: 153599 - RNA, 59 nt, Homo sapiens
cgaccgaaacaccagaccgcaacaaagggaggcgagcccggaacagcacagacagccgc

SEQ ID NO: 153600 - RNA, 58 nt, Homo sapiens
ccgcgggcacccacggaaaagacgaggcgaggaaccaaaggccaccccgccgagccca

SEQ ID NO: 153601 - RNA, 67 nt, Homo sapiens
cggggaggagggggaggggagagagagcagcaggaaaacaaagagagaaggacacaggaaagaaaga

SEQ ID NO: 153602 - RNA, 103 nt, Homo sapiens
cgacagaccaggcccaagcgaaaaagcgggaacgcaggacccaaagcgcacaggccaacgcgccacggcagaacgaagaccagcagacacaaaacaagagaga

SEQ ID NO: 153603 - RNA, 79 nt, Homo sapiens
aggagacgcgagcgggagggagcccggaacgacccgcggaacaagaggcaacagcacccacccggagccggagccgggc

SEQ ID NO: 153604 - RNA, 71 nt, Homo sapiens
agaacacaggaaccgccccgagaggaaacacccccagaagaggagaccagagacagacgaggaagacacca

SEQ ID NO: 153605 - RNA, 77 nt, Homo sapiens
gcggaggaccagggcagccgcaccgcgcaggaccaccaccggaaaacgaggaagaaaaccggaaggcacgcaaggcc

SEQ ID NO: 153606 - RNA, 60 nt, Homo sapiens
gccgcagcggaaagcaggagcacagagccagcccgagaagcaggagagaaagaagccaag

SEQ ID NO: 153607 - RNA, 98 nt, Homo sapiens
agagagcgagcgagggggggcgcgccggaaaccggagcgcgcagcaggagggcagaagccaacagaaccaacccgcggcaggcgaagggaagaagaaa

SEQ ID NO: 153608 - RNA, 73 nt, Homo sapiens
ggcccagaaccaggcccgaaaagcaccccccaaagccggagcgggcaaacagggacacaaggacaacggggga

SEQ ID NO: 153609 - RNA, 76 nt, Homo sapiens
agaagaccggccccgcaaccacgaaaagagcggagccagacggacgcggggggccggcaggcgcccggggccagcc

SEQ ID NO: 153610 - RNA, 82 nt, Homo sapiens
gcagcacgggacccagcccaggccgcacggacggggggggagaagacggcccagcagagcacccaaccagcgggaacacagc

SEQ ID NO: 153611 - RNA, 29 nt, Homo sapiens
gcagggcgcccccggcgcgaaggcggcca

SEQ ID NO: 153612 - RNA, 113 nt, Homo sapiens
ccagccacccgacaggagccccgccgccgcgcaccgcccgccccgcaccggcagaaggagaagacagccgaagaagagcagcgaggagcgcgacgaaggcaccacagagagcc

SEQ ID NO: 153613 - RNA, 76 nt, Homo sapiens
ccacgccgacagccgcagaaccccacccagaccggggcggggaagacgcgaccggggaccgggaaggacgcgaacc

SEQ ID NO: 153614 - RNA, 58 nt, Homo sapiens
cacaacccgacccgacgagaaggccaaccgaaccgggcggcgccagaaaacgaagagg

SEQ ID NO: 153615 - RNA, 77 nt, Homo sapiens
aggcaaagaagcaggagcacacaaagaacagcggcagacggaggagaggcaagggcaagagaacccccaaccaaaga

SEQ ID NO: 153616 - RNA, 77 nt, Homo sapiens
cccagagcacgggagaggcgccagcaacaccagcggccaccgccagccaagcccaaccaagccgggggcgaaagcca

SEQ ID NO: 153617 - RNA, 83 nt, Homo sapiens
gagccagccagggggaggaaggccggaagcccggcccacggcggggacaaaacaagacggaggagaccgaaggaagaggagca

SEQ ID NO: 153618 - RNA, 74 nt, Homo sapiens
gggaagaacgaccaccagaaccgaaggaaaaggagggcgcaaggggcaaccaagagagcagaccagcgagcaga

SEQ ID NO: 153619 - RNA, 88 nt, Homo sapiens
gcaaggcagggcggcggccgccccaacggagcgcagacgaaaggcaagaacggcgaggccgccgaggcaggaggcagccgaagaagca

SEQ ID NO: 153620 - RNA, 80 nt, Homo sapiens
agacgccccacacgcgcccggggcgaggagcccacgaccaccagggaagcgagaaccaggaacgaagaacaaaggggaaa

SEQ ID NO: 153621 - RNA, 78 nt, Homo sapiens
gggggccgggggaacgaggaagcgcccaaggccccagcagccgagcggaacaacaagcccggaaggaaagaaaacaaa

SEQ ID NO: 153622 - RNA, 50 nt, Homo sapiens
cacggaaagagggagaagaaaacaaagccacaagagaagcaagaaggcac

SEQ ID NO: 153623 - RNA, 77 nt, Homo sapiens
cggacaacagacaacacaaaaccagccaaaggggggcaggagcgaccgggaggaaagcaaacacgaagaccggagcc

SEQ ID NO: 153624 - RNA, 88 nt, Homo sapiens
gagccgcacgcggcgaaggaagaggagggcaagaagggcaagaagggaccgccccgagaccgccgaaccaccggaggaggccaggccc

SEQ ID NO: 153625 - RNA, 90 nt, Homo sapiens
ggccagcccgaggaccaccggccaaggaaaccccagggcccgcccaggacccccaagccgccgcggacgcaggaaaaggaccagagaaga

SEQ ID NO: 153626 - RNA, 57 nt, Homo sapiens
aacgcgaggcccgcccggggccgggcacaagagggccagggaccaggggacgcccaa

SEQ ID NO: 153627 - RNA, 83 nt, Homo sapiens
ggcagaggaggggaaacaacaagcaggcaggaagcgagcaacgccaaagccagggcagagaaggccagccaccaaggaaggga

SEQ ID NO: 153628 - RNA, 108 nt, Homo sapiens
gaagggacaacagccaggaaaggaacggagagaaacccaggaacgggaaggggcggaaaagaaccggagagcggaccccccccgagcgccccagccccccgagcacag

SEQ ID NO: 153629 - RNA, 77 nt, Homo sapiens
agccgcagagaccccaaaccccggcccgacaggagcacaggaggagaaccaggaccaaagcaccagcacagaaggga

SEQ ID NO: 153630 - RNA, 65 nt, Homo sapiens
accgcaggagccagaggaagagagcgacaggacagaaggacacgagaagaggagcaggaagagca

SEQ ID NO: 153631 - RNA, 59 nt, Homo sapiens
ggagcagaaggagcaaaaggcggacaggcagagagaacccgaagccccagaggagggca

SEQ ID NO: 153632 - RNA, 87 nt, Homo sapiens
cgagcccagcccagcgagcagcaacccagagcaaccaccaccaagcacagggcacagggaagcagccccccgggagggagacgcacc

SEQ ID NO: 153633 - RNA, 71 nt, Homo sapiens
agcagagggacaaaaaggaggacccccagccagaggaaccaaccacaaaaaaggagaaacgaggaccgaag

SEQ ID NO: 153634 - RNA, 43 nt, Homo sapiens
ccccaaaagaggcaacggcggacaaagacacgaagacgcggga

SEQ ID NO: 153635 - RNA, 68 nt, Homo sapiens
gagcccacggcacaacggaccgacagagcagcaaccggccgcaggccccgggacaaaggcaagaaagg

SEQ ID NO: 153636 - RNA, 56 nt, Homo sapiens
gccaagcagccagcccaggagagacgaagagagaaaggcagggcaccccaccacag

SEQ ID NO: 153637 - RNA, 72 nt, Homo sapiens
gaccgaagagcacagaaagccgcgcgagaagaagcaacggcaaaagcaacaaccagcaaggagaggcaacca

SEQ ID NO: 153638 - RNA, 81 nt, Homo sapiens
gaaccaacaagacccccgcgaggacgaccccaggcgagaaagccaagaagaaaacccagaccagaaggaggggagcgggac

SEQ ID NO: 153639 - RNA, 67 nt, Homo sapiens
gggaagccagagccagggccaacgaccggaacccgccaggacagaagcacggaaggagggccaacag

SEQ ID NO: 153640 - RNA, 71 nt, Homo sapiens
acagaccgcgagacaaccaggaaccagcagaacccgagaccagaaaagcccagaggcgcagcagcgggaag

SEQ ID NO: 153641 - RNA, 58 nt, Homo sapiens
caacaccagaagaagggacaaaagacagaagcgaaggggacagggggagaaccgccag

SEQ ID NO: 153642 - RNA, 77 nt, Homo sapiens
ggaacacaccaagaaggccaaaaaggaaaagaagcagcaacccacccaagcagcgggaaggcgccaacaacacgaac

SEQ ID NO: 153643 - RNA, 63 nt, Homo sapiens
ggcaaccgcgcggcaggccaggggaccgggagaacggcagaaccaagggaccaaagcgggacg

SEQ ID NO: 153644 - RNA, 75 nt, Homo sapiens
agcaaaaggacgacgaaggccgcaggaccagcagagggagaaaacagcagagggcccaggcagcggcaagacggc

SEQ ID NO: 153645 - RNA, 82 nt, Homo sapiens
gccgcgggccgcaggccgcgagcagcggacgccggccgccgcaggagcggcgacagcaggaccgcggagccccacaaggcca

SEQ ID NO: 153646 - RNA, 80 nt, Homo sapiens
cgcagcggcaaggagagacgcgcgaggggcgccgaagcgagggggcgaggcccggaccgcggcaggacggggggcgggcc

SEQ ID NO: 153647 - RNA, 70 nt, Homo sapiens
caggggaaagcccgggccaagcgggaggcgccggaagaaaacgccagagaagcagagcagcccggagcga

SEQ ID NO: 153648 - RNA, 90 nt, Homo sapiens
ggcacaggccgggaaagacacggggagaaaccagagaaaccaggcggggaacaagccagcagcccaaggagaagccccacagagcaagcg

SEQ ID NO: 153649 - RNA, 76 nt, Homo sapiens
cacggaaaaacccaaccagaaaagacgggaaacagggccccaacaaagcccaaagacaacaggcccccccgccccc

SEQ ID NO: 153650 - RNA, 89 nt, Homo sapiens
caggggggccggccgcgcagccgacgaaacggaggagcccaggaggaagaagaagcagccaaagaagagaaagaagaacgagagaagcg

SEQ ID NO: 153651 - RNA, 84 nt, Homo sapiens
gccaacccaaaaccagggcggcaaaacgagcgggccaggcaagagaagccgagccaggccgcggagagccgcccgcgcccaccg

SEQ ID NO: 153652 - RNA, 64 nt, Homo sapiens
gggggaccgaagacgggacaagaccaagcaccggaacaacaggacgcccgccccagggagagcc

SEQ ID NO: 153653 - RNA, 69 nt, Homo sapiens
ggagaaggaccaagaaccaggcacaaaggacaggaacaaagaacaggaccaggggacaggaaagagaga

SEQ ID NO: 153654 - RNA, 79 nt, Homo sapiens
ggcgaagagcgcgccgcccccgcccacccagggaagacagaggaagaggaagacaaaccggcacgaaagaccagagaaa

SEQ ID NO: 153655 - RNA, 74 nt, Homo sapiens
gagaacaagaacgacaagcacacaccaccgcagggccgaaaaggaagcacagggggcaacagaagaggcgcgag

SEQ ID NO: 153656 - RNA, 79 nt, Homo sapiens
agggccagacacaagaagaaaaacgaaccacgagcggaagcacaacgggaagaaagcagccacccagcagagaaggccc

SEQ ID NO: 153657 - RNA, 94 nt, Homo sapiens
cagaagcggcagcggcggcggcgcggcgcaggcaccggcccggggagaggcaccagagcgggaacgcgccaggccacgggccagagaacaggaa

SEQ ID NO: 153658 - RNA, 51 nt, Homo sapiens
ggaggcagaggggaggcgcgaaaggagaaacaaagacgaacaggcgaacaa

SEQ ID NO: 153659 - RNA, 55 nt, Homo sapiens
gaacgaacaacacgcccccaacggcggcccagaaaagccggccagaagacccccc

SEQ ID NO: 153660 - RNA, 64 nt, Homo sapiens
ggcagcaaggagagaggagcaccccgagaagccaagaagcacccaggggcgggaggagcaagag

SEQ ID NO: 153661 - RNA, 67 nt, Homo sapiens
caccaaaaagcaaacggaccagaccgaccaccaaaagggaggcaagcaggggggcaaaggaaagaag

SEQ ID NO: 153662 - RNA, 73 nt, Homo sapiens
cccccaacccagagcaaagaaacgccgggcaagaacggaagcacgggcggaggaaagcacaagcagagccccc

SEQ ID NO: 153663 - RNA, 86 nt, Homo sapiens
ccacgacggcgccacaccgagcgcgaggcgcggagagcaacgccgggacagcgcaaggaagcggaggaggaagaagcaaagggggc

SEQ ID NO: 153664 - RNA, 70 nt, Homo sapiens
agaaacgagagcgacagcgaaacaaacacagagcggacccagcgacacaggacaggaagagcgaacacac

SEQ ID NO: 153665 - RNA, 68 nt, Homo sapiens
agcggagaaagggagagcacaggggggcagaggaggcaagcagcccggcacagccacaaacggcagaa

SEQ ID NO: 153666 - RNA, 82 nt, Homo sapiens
cgggaccgcgcgaccggcgcccgcccgcgcggagaagcggaggagaccaaggaggccaccaccacagaaggagcggcacgga

SEQ ID NO: 153667 - RNA, 81 nt, Homo sapiens
gcgggaccgcgcgaccggcgcccgcccgcgagggacaccacccggacacaacaagaggacccagcgccccgaaccacacac

SEQ ID NO: 153668 - RNA, 74 nt, Homo sapiens
gaagcagaacagaaaagggaaccaaaaggaggcagaaaggaacagcaacaggaagaaggcaccgcccagaagga

SEQ ID NO: 153669 - RNA, 78 nt, Homo sapiens
cccacccccaccggccccccgccggcgcccgacggggggacaggacaacagggcagccaacgccaggcacaccagcgg

SEQ ID NO: 153670 - RNA, 70 nt, Homo sapiens
ccacggcagagcacaacaagagcgaggaaagaagcggaaaggggcccccggagaaaaggccaacccgaag

SEQ ID NO: 153671 - RNA, 73 nt, Homo sapiens
ggagagaacccaaccagggggaaacacagaacgcaggacccagcgccaccccccaccagaagcgaggacaaac

SEQ ID NO: 153672 - RNA, 56 nt, Homo sapiens
gcggagagcaacagcgcgccggcgacaaaagaagacgacccggggcaacaccagag

SEQ ID NO: 153673 - RNA, 72 nt, Homo sapiens
agggcggcgccacacgaagaccgcggagaccaagcccaccaaccaaccacagaaaaccaagaagccacagac

SEQ ID NO: 153674 - RNA, 97 nt, Homo sapiens
gaagaagcaacaacccccccgcccgccacagccggcagcgcgaagcagcaaccagacgagaagaggcgaacggaagcaacacccgggaaaagcagcg

SEQ ID NO: 153675 - RNA, 74 nt, Homo sapiens
gagcaaaagaacaaaccccagaccacgggaagcagagaaaaggccaagagaggccaacagaggaacaaggcccg

SEQ ID NO: 153676 - RNA, 68 nt, Homo sapiens
cgacggggaggcgcggccaacggggccacaagagggaaacggacaggcacggccacagcaggaacagc

SEQ ID NO: 153677 - RNA, 59 nt, Homo sapiens
acagacagccgaagacgggaacgccagcaaggcagaagccccagaggagcccgaaaccc

SEQ ID NO: 153678 - RNA, 54 nt, Homo sapiens
agcacaacaccgcacggggagccaagccggaagcccggggcggcgacggagcac

SEQ ID NO: 153679 - RNA, 73 nt, Homo sapiens
acgcccggcaagcggacgggcaccacacaccacaaaccgagggaagaaaggacaacagaagacgcaaaggagc

SEQ ID NO: 153680 - RNA, 77 nt, Homo sapiens
cgcagggcgcccccgcccgccgagggccgggaaccgcagagaagagcaggggggccaggagaaggagcagccccagg

SEQ ID NO: 153681 - RNA, 64 nt, Homo sapiens
cgcgcggcgccagccgcaccggcaccaccgccggcgcggacggccgaaagaacccggcaagccc

SEQ ID NO: 153682 - RNA, 88 nt, Homo sapiens
gcaaccgcggggaagcggggcggcaccggacaccaagacggagcaaccccaaggccaggggaggccacgaagggggagcccgcagaag

SEQ ID NO: 153683 - RNA, 73 nt, Homo sapiens
gcggccagccccgcaccgccacaaccacaaggcccaacccagcacagagaccaggagaccgggggcccggcgg

SEQ ID NO: 153684 - RNA, 67 nt, Homo sapiens
aaggaccaagaaccaggaaggaaaggagaagccaggacgaacgaagaggcagacccagcgagacaga

SEQ ID NO: 153685 - RNA, 71 nt, Homo sapiens
gagaaggcagaagacagaggaaaagaggaagagggcgggaaggcagggaccgggccaaggggggggaagaa

SEQ ID NO: 153686 - RNA, 84 nt, Homo sapiens
cccgagcgaggccaacccaggaggaggaggcagccgccagaacggggggcagccaaggaaggacggcagaagcacagggcccag

SEQ ID NO: 153687 - RNA, 75 nt, Homo sapiens
ccgcaagccagcaaagccaaagacaaagaggaggggaaagaagggacaggacagaccgccccgcggaaggcggag

SEQ ID NO: 153688 - RNA, 76 nt, Homo sapiens
cagggcgaccggggcggaacccggcgaccacgccccggggcagcaggcgaccagcgccacggggcccgggcagagg

SEQ ID NO: 153689 - RNA, 74 nt, Homo sapiens
gcaccagccagagccagacacggcagcgacaccaaccggaacaggaagcacgccgccaaaacaccagacaacac

SEQ ID NO: 153690 - RNA, 108 nt, Homo sapiens
cgggcgaccgggcaccagcaggacccgaggccaggagccaggggcccagaagggaacccgagcgcagaggggaagcagaggacccaggcgaacagcaaggaggggaca

SEQ ID NO: 153691 - RNA, 73 nt, Homo sapiens
cgccgccaacgcgcccccgaggacacacagcaacgaagcaggggaggagggaagaccggacagcgagccaaga

SEQ ID NO: 153692 - RNA, 73 nt, Homo sapiens
gaaacaccaggcgcggcggcccagccccgacacagaagagcacaacacagaagaaacggcaagcaaggacgaa

SEQ ID NO: 153693 - RNA, 84 nt, Homo sapiens
cggcagggcaccgcgcgaagcggccaaagccgcccagacggccaccggcgggaggaacaaaagagcaaaggcagacaagaccag

SEQ ID NO: 153694 - RNA, 76 nt, Homo sapiens
cggagaagcgcggaggggaggggcgaccccggggcccggccagcacgaccgaggaggggcggacagcggaggagaa

SEQ ID NO: 153695 - RNA, 80 nt, Homo sapiens
agggcaaaggagagcacaaccacgcagggaagcccaggggcagggccacacccccggagaccaagagaagaaacagcggg

SEQ ID NO: 153696 - RNA, 76 nt, Homo sapiens
cccggaccgaggaagaaccagagcaggaagaacgcgggagccagaaggggcagaccaacaccacccagcaaaaacc

SEQ ID NO: 153697 - RNA, 73 nt, Homo sapiens
gagacaaagcggacacccgcccgccgcgcaacaggagacgaacccagaccagcaaaacggagcacaggcgaga

SEQ ID NO: 153698 - RNA, 60 nt, Homo sapiens
ggaacgcggggcagccccccaacacagaccgggccacaggaagaagaagcgcacaaggag

SEQ ID NO: 153699 - RNA, 72 nt, Homo sapiens
ggccgggagacaacgccaacccaaggaaggaccaaacggagaaccaggaaacacacgccgagaagacggccc

SEQ ID NO: 153700 - RNA, 85 nt, Homo sapiens
gagcagcacggaaggagcagcgggccgcgcagccagaaccagagaacagcagaggcccaggaaacagccaccaccccggccccca

SEQ ID NO: 153701 - RNA, 74 nt, Homo sapiens
cacaagagacggaagcagaaagggagaagcagaagcccgcacagagcagggaccccaaccgccgggggaggaca

SEQ ID NO: 153702 - RNA, 71 nt, Homo sapiens
ggaccaagaaccaggaaaacccaagcagacacaacaaaccagaaacgcaagaggacgagaaaagaagaagc

SEQ ID NO: 153703 - RNA, 79 nt, Homo sapiens
gcgccgaggacgcggagcccagcaaggaccgaagaggggcgccggagaggagacgagccacgagaggaccacacacggg

SEQ ID NO: 153704 - RNA, 79 nt, Homo sapiens
gacccaaggcgacgaccgacaggggggaaaggggagccgccaccaaaagcagacggaaaacccacggggaagaccacac

SEQ ID NO: 153705 - RNA, 78 nt, Homo sapiens
ggaaaaagaaccagagcgcgaggaacagccagccagaacaagggaggaagaagaaagaggaagcgcgaaacgaacgga

SEQ ID NO: 153706 - RNA, 66 nt, Homo sapiens
caggccacgcggacaggaggaggcacgacacccaggcaggcaacacagaaggagagagcacgacca

SEQ ID NO: 153707 - RNA, 85 nt, Homo sapiens
gaagcgggagggaccacgggcggagacgagggaggggccaaagggagagggacaacacacgagcacaaacacaagcggagacaga

SEQ ID NO: 153708 - RNA, 87 nt, Homo sapiens
aacagcccccgaaaacgcacggagcgggcccgggccagaggcagaaaacggacggaagaaaaggcggccgagcccacagagaaaaga

SEQ ID NO: 153709 - RNA, 100 nt, Homo sapiens
ggaacgcgggcgccgaaggagggccggcagcgcccgcggagacggaagagaaaaacagagcggggaaagaccaacaaagcaccgagaaagccaaaagaag

SEQ ID NO: 153710 - RNA, 70 nt, Homo sapiens
aggggacccaccaccacccccaaggcagcgcagcacagcagaccgcgaagacgccaagaagcagaggagg

SEQ ID NO: 153711 - RNA, 78 nt, Homo sapiens
cccccgccgggaccggcacccgaaccggccgccggagaaggagggggcagagcacggcaggcagaaggggccaacccg

SEQ ID NO: 153712 - RNA, 75 nt, Homo sapiens
ccggaacaggagagagagagaggccagaaggacagagcaaaagcggcaggcgacagaggcggcccaggacggacc

SEQ ID NO: 153713 - RNA, 76 nt, Homo sapiens
acaaaaaggacccagccaccaaacacgaggaaggaggacccagcccgcgcacacagaaaggaaacagacgaaccca

SEQ ID NO: 153714 - RNA, 57 nt, Homo sapiens
gggcgccagcgcggcgcaggccaagggaaaagccgggccacagaagcaccaccacaa

SEQ ID NO: 153715 - RNA, 71 nt, Homo sapiens
gaccagcgcacacgaccggaccacaaaacaaaccacccaacacaagcaaagaccacgaagccggaaaagaa

SEQ ID NO: 153716 - RNA, 72 nt, Homo sapiens
agagccaagacggagaaacaacccagcaacgggagcagaaggaaaaaaaagcagaaacggcacaacagcagc

SEQ ID NO: 153717 - RNA, 95 nt, Homo sapiens
gagccgcacgccacagcgaaggcgcgagggacaagagcagagaaagggagagaggagaaccaggcagcccgggccagccgcggagccagggacaa

SEQ ID NO: 153718 - RNA, 82 nt, Homo sapiens
cccgagcaccgccagccaccggcaccaagaccggccacacccagcacgcccacccggccagggcccggacaacagagacggc

SEQ ID NO: 153719 - RNA, 34 nt, Homo sapiens
caaccaccaaaacccagccagacagacacagcac

SEQ ID NO: 153720 - RNA, 85 nt, Homo sapiens
gcagcgagcggagccgccggaggccaaaacagaagaggcaaagcccagccacagcagcagcccagcagcaaacaaccaaagagaa

SEQ ID NO: 153721 - RNA, 70 nt, Homo sapiens
aaaaacaaagggaagggccccaagaaaagcggaagaagaccgggagcgcccagaacagggaaaccaaagc

SEQ ID NO: 153722 - RNA, 93 nt, Homo sapiens
ccgccgcagagcgcagccggggccgaggcgcgccgcgaggcccgccgcgccgcgagaccgaccgcaaggcccgggaggaggcgcagcgccagc

SEQ ID NO: 153723 - RNA, 79 nt, Homo sapiens
aaggaaggcggagacggcacgggccgaggggaaagcaacggcgcaagcggcggcggcgggcagaggacacacagagcaa

SEQ ID NO: 153724 - RNA, 41 nt, Homo sapiens
cggccgaaccccaacccagaagaagacaccagcaacagacg

SEQ ID NO: 153725 - RNA, 75 nt, Homo sapiens
ccacaaaacagagagacgcaaaaaaagaagcccgggcggcgagacagcaacgagaaaacaaagacagacaaggac

SEQ ID NO: 153726 - RNA, 38 nt, Homo sapiens
aaccgacaagacaacagaaaaggaagcacacagacccg

SEQ ID NO: 153727 - RNA, 81 nt, Homo sapiens
gcgaccaaggcgagggcgaggaagcagccaaaaagccaaggagcaccaggaagaggcaacgagacagcccgccccgcaccc

SEQ ID NO: 153728 - RNA, 71 nt, Homo sapiens
gcagcccggccgccggcccccaacagcgccggacgccgccagccaccggcgcgaagccagaccagaccagc

SEQ ID NO: 153729 - RNA, 78 nt, Homo sapiens
gggaggggagaggacgaacacaaggaaaaggagaagggagcaccagcgcccaggcgacccaacagaggaagccgcaag

SEQ ID NO: 153730 - RNA, 56 nt, Homo sapiens
acaaccccccaagaggacccagagcaagggaagcgggcgggaagcacggcagcaaa

SEQ ID NO: 153731 - RNA, 71 nt, Homo sapiens
acggcccggcagagccagcaccccccgcggcagccaagacaacagcagcccccacgagccgccggcccagg

SEQ ID NO: 153732 - RNA, 74 nt, Homo sapiens
gggaacgccagacgcgcggcgggccagcgagaacgccgcacaaagccccgcagcggaccagcgagaccccggaa

SEQ ID NO: 153733 - RNA, 69 nt, Homo sapiens
gagccaaaagcggaaagaccaaccgcgaggaaaggaaccaagaagccgaaaagaaggccaaaaggaggg

SEQ ID NO: 153734 - RNA, 69 nt, Homo sapiens
ccccaccagcaaaaccaaagaccgggaagagccacaaaagaagacccaaagcaccaacaaaaagcaacg

SEQ ID NO: 153735 - RNA, 85 nt, Homo sapiens
cgaggagagcggaaaaaccccaaggcgccacggccggaacgcacagcggaaggccgccacccgggccaggagccgccgccgccaa

SEQ ID NO: 153736 - RNA, 44 nt, Homo sapiens
cgcacaccgaccagggcgagcgcagggaccagaccccacaagaa

SEQ ID NO: 153737 - RNA, 72 nt, Homo sapiens
ccaaacaccgccagaaggacacccggacccaagacaagcccaaccagggaccaggccaaaaccagacgccac

SEQ ID NO: 153738 - RNA, 58 nt, Homo sapiens
gcccacaccgaagcgacaagaagcaggaaagacccgacaaggaaacagacaggagcca

SEQ ID NO: 153739 - RNA, 76 nt, Homo sapiens
cgaacagagccgggagcaagaagaacacccagaggcagagggcaccacagacaagaaagcccccacggaaggccac

SEQ ID NO: 153740 - RNA, 75 nt, Homo sapiens
ggacggggaccacacagccagaacagggacgccagccgcagaggaagacccggcaaaacggagcaggagggaaca

SEQ ID NO: 153741 - RNA, 79 nt, Homo sapiens
agagcgcaggccagggcggcgggaaggccggcgggacgaaaggcaaggcaacggccccagagggggcaaccaacaacga

SEQ ID NO: 153742 - RNA, 75 nt, Homo sapiens
agccgaggaccaccacagaaggaagaaggaggggagcagagagggcaagagcccaggaggaagggaagccgaacc

SEQ ID NO: 153743 - RNA, 41 nt, Homo sapiens
ggggcgcgcccgccgacggagcggaagaaacccagacgccg

SEQ ID NO: 153744 - RNA, 78 nt, Homo sapiens
acaaggaaagaagcaaccgagacacaaagggcaaaagcaggcgaaaggcccgagcgagggacggacaagacaaaggag

SEQ ID NO: 153745 - RNA, 79 nt, Homo sapiens
ccacaaggcccaagcacaggacaagcaaacccagccggaggcacccaggggagcaccaagacccccgggagccaaacca

SEQ ID NO: 153746 - RNA, 70 nt, Homo sapiens
gaggaagaccagaggaagcgacagagagaggcaggccacagagcgaaaaaaaccaacacgcaaccagaaa

SEQ ID NO: 153747 - RNA, 74 nt, Homo sapiens
gaggggcggacccccgccgcgacccgggggcccccggagggccacaagccagagcgccccggccaaggcagacc

SEQ ID NO: 153748 - RNA, 77 nt, Homo sapiens
gcccaagccaccagagcggcccccagcaccacagcccgcagccccgccagccacccccagcggaggagcggacaacc

SEQ ID NO: 153749 - RNA, 71 nt, Homo sapiens
ggaggggagcccggaccaaacaaacacggaacagacaaccccgacgacaggaccggggcgccggcagcgag

SEQ ID NO: 153750 - RNA, 74 nt, Homo sapiens
cacgcaagcaggcaaccgaaacaggaaaagcagcagcaacgggaacgaagagagaaagcaaacacgggaccaag

SEQ ID NO: 153751 - RNA, 83 nt, Homo sapiens
gaaaaccaccagcagcaggagggcaggagaggagcccggacccgggggagcaggaacggacgggagacacaggaagagcgggc

SEQ ID NO: 153752 - RNA, 76 nt, Homo sapiens
ccggcgcaggggcgcgcggcacgcagccgggaggccgaggaccggagcaccgcaggggcaaaggaccggaagcggg

SEQ ID NO: 153753 - RNA, 86 nt, Homo sapiens
aagaccaagcgcgaaagcgccaaaaggacagcagggagccccgagaccggcacgcagaggaaaggggggagcaaagcacagcacgc

SEQ ID NO: 153754 - RNA, 73 nt, Homo sapiens
gaagcccaaaacaccaggaaggaacagacagaggacaggaggaaaaccagagaagggcgaagagaaacaaaga

SEQ ID NO: 153755 - RNA, 74 nt, Homo sapiens
aaaacccgcccagcaagcaggacacgaccaacaaggaggaaagcaagaacagagcaacagggaaggcagaagcg

SEQ ID NO: 153756 - RNA, 67 nt, Homo sapiens
ggggacaaaccgcacagcggacaggcgaagaggagacaaaagggaaaccccgacaggcacaagaagc

SEQ ID NO: 153757 - RNA, 80 nt, Homo sapiens
gggcagggaagcagaggcacccacgcccacaaagaagaggacggcacagaaaagagccaggccaccagcccgacgcagca

SEQ ID NO: 153758 - RNA, 73 nt, Homo sapiens
gagaaaccacacccaccaagaaccgaggaaccccagggccaaaaagcagaaaaacaaaccagcccaagaagcg

SEQ ID NO: 153759 - RNA, 87 nt, Homo sapiens
caacagaagaggagagaggaacccgaagaagaaaggacgacagccagagagaccccaagaagaagcggaagaggagccgcggaacca

SEQ ID NO: 153760 - RNA, 75 nt, Homo sapiens
caaacgggcagaaagaaacacgaggaaacgggacagaggaagaggagaaagaacaagggcgaaggccaggaaagg

SEQ ID NO: 153761 - RNA, 69 nt, Homo sapiens
agcacaagcaccccacaggccacggggaaaaggaaggccggaggaggcaacagcggacagcaggaagag

SEQ ID NO: 153762 - RNA, 75 nt, Homo sapiens
aagaggcagagaaaggaggacacgagcccagccaggcgagccagcgccaaagaaaaagaacaagaggagccaccc

SEQ ID NO: 153763 - RNA, 73 nt, Homo sapiens
accaaaggaagaagcgaagacggaaacgaggaaaccgggaaagccaccgaaaagggcccgcgagggggcgcgc

SEQ ID NO: 153764 - RNA, 69 nt, Homo sapiens
caaagcgaaacagcacacggaaaaagagcgagcgaggaaggcaggcaaagacaaggggggaccgcggaa

SEQ ID NO: 153765 - RNA, 75 nt, Homo sapiens
cgcaggcaagcgcaacaggaggaaaacggccaacccaccgcgccgaaagaagaaagcgggccaagaccgaacggc

SEQ ID NO: 153766 - RNA, 77 nt, Homo sapiens
cacaccagaaagaagacaaccccagaacggaaagacgcaaaaagacacgagccaaggggagcgacagaacaagaaag

SEQ ID NO: 153767 - RNA, 63 nt, Homo sapiens
accacaagacccaggccacgccgagccgccaggcagcaggacggagaagcgccacgcagagag

SEQ ID NO: 153768 - RNA, 59 nt, Homo sapiens
cccccaggacgacgggggagccggaccgcccccagccgacagaaacgaaacgagggcga

SEQ ID NO: 153769 - RNA, 71 nt, Homo sapiens
ggccgcagcaggaaaagcgaagagccacgccgagacgggcagagaagaccgcgacaaagggacccaaaaag

SEQ ID NO: 153770 - RNA, 75 nt, Homo sapiens
cagaaacagaaacgagggaaacaggggacagagaagaagggaaagcggcagaacggaagcagcggaaccgcaaag

SEQ ID NO: 153771 - RNA, 79 nt, Homo sapiens
cccagggggaacgacacaacaagccggaagggaagcaggagggcaggagaaaggagaaaaagaggcagggagaagaaac

SEQ ID NO: 153772 - RNA, 89 nt, Homo sapiens
ccggggccacgcacggggacacgggcccaggcccgagggggccggaccgggagggcaggccggcaaagcaccaggcacagcaagcgccg

SEQ ID NO: 153773 - RNA, 97 nt, Homo sapiens
caagagcaccacgggcaggaaggcagcgcacgacagcaaaagggaccaagaaaggcccagggaccaaagcccggacaaggcccgagcaccaggaccg

SEQ ID NO: 153774 - RNA, 82 nt, Homo sapiens
aagaacaacgacgccaagagagaggaccagaaccagaccggaaagcaccaggcaaagaaaaaaacaggagccaagaaggcca

SEQ ID NO: 153775 - RNA, 70 nt, Homo sapiens
ggggacccaccaccacccccaaggcagcgggagagaacagcacacagaggcgcaaggggaagagaaaaga

SEQ ID NO: 153776 - RNA, 59 nt, Homo sapiens
aagaggagcggggccacacgaagagccagaaccagagacgagacgggcggagacgaaca

SEQ ID NO: 153777 - RNA, 72 nt, Homo sapiens
aggcaagcggaagaaccgaacacacaaagaaaaacacggagagcaacaaagagggaagcggagaagaaagaa

SEQ ID NO: 153778 - RNA, 73 nt, Homo sapiens
cggagcaaccccccaggacgggcggaggcggggggaccggcgggcgggaacaggccaagacaaccccagagag

SEQ ID NO: 153779 - RNA, 78 nt, Homo sapiens
agaccggagaccgcgcagaagacacgcccggaagaccagccaacagcaaaccagccggcgggcgccacaacggacgac

SEQ ID NO: 153780 - RNA, 91 nt, Homo sapiens
agcaccacacaaggaccgggccgcaggccaccaagaccgggaacaagcaagacaccagaaaagaaccagaaaaccacaccaagcaccagaa

SEQ ID NO: 153781 - RNA, 79 nt, Homo sapiens
gaagcgaaagaaaaacaggagaagaaggccgacacggagggggccagaagcccaccagaggcgaggggaggaggaagcg

SEQ ID NO: 153782 - RNA, 73 nt, Homo sapiens
cagccaggaagccacagcagccaaggcaacagccaaccagaaaaccagaaacaccggcagggagcaaaccccc

SEQ ID NO: 153783 - RNA, 77 nt, Homo sapiens
ccagaaaacgaaaaggagaaagaagagagacaacaacaaacggggacagcgccgaccggaacagggaccacggaagc

SEQ ID NO: 153784 - RNA, 78 nt, Homo sapiens
gcccgaccacccagcaaaaccagcaaaagaaagaccccagccagaccggaaacgacccaccccagggcaggggcaaga

SEQ ID NO: 153785 - RNA, 53 nt, Homo sapiens
cccaagcgacggaaggaccacgacggccaaggccaggaaggaaacgggagaac

SEQ ID NO: 153786 - RNA, 77 nt, Homo sapiens
cgagcgagggggggcgcgccggaaaccggagcgcgcagcagccccgacacgagacggccaagagacgagggagagaa

SEQ ID NO: 153787 - RNA, 76 nt, Homo sapiens
gagacgagagagaagagcgccgaggaaacagggagacagcagacgacaccccgacaggagggccgccagcaccagg

SEQ ID NO: 153788 - RNA, 75 nt, Homo sapiens
gaagggacaacagagacagcaaacacaggaaggaagaagccaaaagaaggagaaccagggaacacaaaaaaaccc

SEQ ID NO: 153789 - RNA, 76 nt, Homo sapiens
agaaaagcaagggaaagcagcacgagcccccacacggggagaaagaaagaaaacaagacaaaacccaaagaaacca

SEQ ID NO: 153790 - RNA, 82 nt, Homo sapiens
gccccgagagcggaaccacaagcaccagcacgccggcaagccggaacacccagaagagaaggggaccagagcagcaccggcc

SEQ ID NO: 153791 - RNA, 56 nt, Homo sapiens
gaccgcagggaccacccccccgccagcccaggaacacagaagagaacccgaacaca

SEQ ID NO: 153792 - RNA, 71 nt, Homo sapiens
gcaggacacacgcggcgcgggaagacggaccgcagggagaagaacccaacagaaaaaaaaaagcacaagac

SEQ ID NO: 153793 - RNA, 67 nt, Homo sapiens
cggaaaaccgacccaaaaagaaaacaccgaaggaaaacgggaagacccaccgccagcccaccacgcc

SEQ ID NO: 153794 - RNA, 85 nt, Homo sapiens
cgagagggaccagcaccaccggaggacacccgcccgggagccaggccgcaccccagaagccaaccaaaagaaaagcggcgccgcc

SEQ ID NO: 153795 - RNA, 81 nt, Homo sapiens
acggcccagcacaagaccgcgacaggaagaaaacaccggagcccaagacaccaaaacagacgcaggcaagaggcagaagga

SEQ ID NO: 153796 - RNA, 56 nt, Homo sapiens
cgacccaccagcgccgggagggcggagaacggaaaagcaccaggaagcagagagga

SEQ ID NO: 153797 - RNA, 77 nt, Homo sapiens
gggcggcagggccccgagccggcccgggcgagccaccagcccccagccgagaccgaaggcacacaggggagcgcccc

SEQ ID NO: 153798 - RNA, 74 nt, Homo sapiens
cggcgaccgcgccaaagcgcagagcggcgacgcaccgacggccgcgaccgggagaggaaggacacagacaaaag

SEQ ID NO: 153799 - RNA, 74 nt, Homo sapiens
ggacagggggagaaccgccagggaaacccgggggacagacacaagacggacaggcggacccggacgacaccaaa

SEQ ID NO: 153800 - RNA, 76 nt, Homo sapiens
gagagccaggagcgcacacacgacaggagaaaggaggccagagggcccaaagcggagaggcacgagcacagggacc

SEQ ID NO: 153801 - RNA, 83 nt, Homo sapiens
accaagagcaacagaccacgaaaagggacacagacgccaggcagccggggcagaggaagagaagcccggccgcgcgccggccc

SEQ ID NO: 153802 - RNA, 84 nt, Homo sapiens
cgggcgcggacgccggcccgcgcgcgcaccccgcggacgccacagcgcgggcggccgagcccgggggaggccccggagcgcagc

SEQ ID NO: 153803 - RNA, 81 nt, Homo sapiens
cgcggcggggcccggacagaagagggcagaagaaaccagccgaaccagggccaccgcgcaagaggagacccacagacacgg

SEQ ID NO: 153804 - RNA, 76 nt, Homo sapiens
cggcgccagagaagaggaacaagggcagagagggggacggaaaggggcgacagggcaccggccccgcaccagaagg

SEQ ID NO: 153805 - RNA, 98 nt, Homo sapiens
cacggccgagcagacacaacacaggggaagaccgggaggcaacgaggcaccagagacaggggaaacgaacaagaaagaagagcaacaggccacaaagg

SEQ ID NO: 153806 - RNA, 74 nt, Homo sapiens
aagggcgggagaaccaggaagccggcagcaacaaccacccagggagaaaaacaagaggacagacaccagaacac

SEQ ID NO: 153807 - RNA, 83 nt, Homo sapiens
cgggacagcccaagggccagcaccgcgcccaggcagagccagaccggcggagaacggaaaagcaccaggaagcagagaggacc

SEQ ID NO: 153808 - RNA, 82 nt, Homo sapiens
accccagcaccgaaagggaccgaaaggagagcaaaggggaagagagacgacgagaagggggaagagaagcgcccccgcgaac

SEQ ID NO: 153809 - RNA, 75 nt, Homo sapiens
caaggcaaaacgaaaggaacaggggcagaaaaagcacacaccacgcaacggccagaaagcaccgggaggaaagag

SEQ ID NO: 153810 - RNA, 75 nt, Homo sapiens
ggggggggccgcgcccggccccgcgcgggcggacggcggaggcgcccccaggaggggcgaacacagggacagccc

SEQ ID NO: 153811 - RNA, 73 nt, Homo sapiens
aaaacccgcaacagcccccgcccaaggagacaacagccacacaaagcagcaacaggagcagggaagaaaaggg

SEQ ID NO: 153812 - RNA, 52 nt, Homo sapiens
cgcagggcgcccccggcaagaacggaagcacgggcggaggaaagcacaagca

SEQ ID NO: 153813 - RNA, 75 nt, Homo sapiens
cgccgaccaagagcgaagcgacgggacgaagcacggcaccggcccacgacaccggcccacgagaagaaacgaacc

SEQ ID NO: 153814 - RNA, 73 nt, Homo sapiens
ggcagaccaaaccgcccccacggccagacacggaaaaagagcggacaggaaggaaaccgaggcggcagccaaa

SEQ ID NO: 153815 - RNA, 79 nt, Homo sapiens
agacaccgcacagccgcagccggaggagcgcgccgacgccaaccagcgcgcgagcgcccaaggcggcccaaccggggga

SEQ ID NO: 153816 - RNA, 60 nt, Homo sapiens
ggaggaggaacggacaagaagacagaaaccggggaaagcagaagagaaagaagaagcacg

SEQ ID NO: 153817 - RNA, 32 nt, Homo sapiens
aaaagacgggcaacaggcacggagaaagcgca

SEQ ID NO: 153818 - RNA, 79 nt, Homo sapiens
ggcgccaacgccccagcccggccccgcgccgcaccagccgccagagacccagagaaaggccacgcgagccaggcaggga

SEQ ID NO: 153819 - RNA, 90 nt, Homo sapiens
ggccgggcgaccgggcaccagcaggacccgaggccaggagccaggggcccagaaggaccgagcccgccaccgagcaggccggagggaagg

SEQ ID NO: 153820 - RNA, 72 nt, Homo sapiens
agccacaacagggcggcaacaggggcgagaaaggaacgcccaacccgacaagagacgaacaccagaaagggg

SEQ ID NO: 153821 - RNA, 106 nt, Homo sapiens
gcaaagaagcgaaaccgagcaggcagagagcagaagaacacagacagcggaagaggaacaccgagagaagaaggcaaacgcgccgaggaaacacccaaacaagcgg

SEQ ID NO: 153822 - RNA, 71 nt, Homo sapiens
gaaaaacgaccacagcggcaacaaacaacagggacacagaaaacagagaagacagcccaacaaggcgggac

SEQ ID NO: 153823 - RNA, 78 nt, Homo sapiens
caacagaggcaccagggacggcagcccacgccgcaacccgccccagagccggaagacggccaagcacccgccgacccc

SEQ ID NO: 153824 - RNA, 65 nt, Homo sapiens
caagacagaaaacaccgacaggagaggccacgcacacaaaacaaaacagcgggcacaacaacaac

SEQ ID NO: 153825 - RNA, 80 nt, Homo sapiens
gccgagcggccaaaaccacaggaaagaacaaggacaaccaccaccagcgagcaaaagaacaaagaccaagaccaagaagc

SEQ ID NO: 153826 - RNA, 74 nt, Homo sapiens
agcgcgcggcggcggagagcaagggccaggggagcccagcggcgcgccggcagcagcgagacgacgggaccgaa

SEQ ID NO: 153827 - RNA, 71 nt, Homo sapiens
ggaacgggccaggaaagacaggccaaacgccagggcgaaggaaccacagcacagccacagccccccagaac

SEQ ID NO: 153828 - RNA, 65 nt, Homo sapiens
caggaagggacggcacgaaccaaaagcgcaaagcgggaaaacggcacaaggcgacgagggagggc

SEQ ID NO: 153829 - RNA, 67 nt, Homo sapiens
aaacaccagaaggagcgcaaacaaacggacagaaacaggagagcaacggggaagagggacacgaagg

SEQ ID NO: 153830 - RNA, 72 nt, Homo sapiens
gccgacgcgccggcgcaaagaagcccaagccaggacggaccccaagcaagccgcccgagaaaagcacagcac

SEQ ID NO: 153831 - RNA, 77 nt, Homo sapiens
cggcgcgcgaccgacacgaagaaaagaagacacggacaacacacaacaggaaggcagcaacgaggcccagcacaaag

SEQ ID NO: 153832 - RNA, 42 nt, Homo sapiens
gccggggacccgaaaaaaaaggaaacgaaggaggcccaacca

SEQ ID NO: 153833 - RNA, 77 nt, Homo sapiens
cccagaacacgggagaaaaaggaaaacgcggaaaaccgacacaacagagaacacgagcgacccgaagacagccccaa

SEQ ID NO: 153834 - RNA, 74 nt, Homo sapiens
cccaaccaccagaagaggcagaaacgaagcgaaaggaaaccaaaaggaaaaaacagaagaaccaaagaaaaaga

SEQ ID NO: 153835 - RNA, 73 nt, Homo sapiens
cgcagaccaagacaggaaaacccaggacaacaaacagcaagaggcgacccgcggcgagagcccccccagagcg

SEQ ID NO: 153836 - RNA, 66 nt, Homo sapiens
aggaaaaagcaaaagaaagaccacgagaccaaaaacaaacggacccaggacaaaacgacaccagcc

SEQ ID NO: 153837 - RNA, 56 nt, Homo sapiens
aaggaccaagaaccaggcgaacccaggcacccagagacggagcggaaaccaaggaa

SEQ ID NO: 153838 - RNA, 72 nt, Homo sapiens
ccgccaagcacaggaaccccggggaagaagcgcccgagaaaaagcgaccaggcaggaccaagagaaaggaaa

SEQ ID NO: 153839 - RNA, 51 nt, Homo sapiens
gccgcaaggagaacgcagacaccacgccacccaagagagagcaaaaaccga

SEQ ID NO: 153840 - RNA, 56 nt, Homo sapiens
aggcagcgcacgacagcaaaaggaggacagcacaaaaacacaccaagagagcgcga

SEQ ID NO: 153841 - RNA, 80 nt, Homo sapiens
cagccccgagagcgggaacagggaagagacccccgacgacagagaagagccgcagggacagagcggacacagcaaccgga

SEQ ID NO: 153842 - RNA, 69 nt, Homo sapiens
acacgaagcacagcaagccaagagcgaagaaggaaagacgaggccggaagccacaggagaaaggaggag

SEQ ID NO: 153843 - RNA, 78 nt, Homo sapiens
cagaccacgccacacagcaacaaagggcagggaagaaggggcagagcgggaacacagccccacgggcccaacgcagga

SEQ ID NO: 153844 - RNA, 73 nt, Homo sapiens
cggaggcggaggcggccggcccgggagagaagaagagcccccaagcaccacggagggggagagcacgccaccc

SEQ ID NO: 153845 - RNA, 80 nt, Homo sapiens
ccgacccgaagaccgacccgagagcccacccccaacgcgacggaaaggcacgaaagccagaggggaacccgcccaaaaaa

SEQ ID NO: 153846 - RNA, 72 nt, Homo sapiens
gaaacagcagaaaccggaaccacacacaccacaggaagccagaaccacgaccacccgaaggaaagcccagaa

SEQ ID NO: 153847 - RNA, 56 nt, Homo sapiens
gaggagggaaacgcgagggcaccagggcgggaaaccaacccgcaaggcagaaccag

SEQ ID NO: 153848 - RNA, 80 nt, Homo sapiens
gaggggagcaccaggaccgggccggaacgagacgcacgcgagaccagcccagagagcagggaggaggaggaggcagagcc

SEQ ID NO: 153849 - RNA, 77 nt, Homo sapiens
cggccggggccggaaccaaaggcaaaaaagccgaaaggaagcacgcgggaaaaagagagacagccaaaaacaagcgc

SEQ ID NO: 153850 - RNA, 84 nt, Homo sapiens
agccacagcgacaacagccggaccccgaacgaagcagagcccacgcagagaacaaaagagagagcagacgcaggaaaagcacag

SEQ ID NO: 153851 - RNA, 58 nt, Homo sapiens
ccgaccgcgggcaggcggacgaggggaagcgacagcgacaacagacacacccagaagc

SEQ ID NO: 153852 - RNA, 81 nt, Homo sapiens
gcggggaccgaaaggacagaacaggaccggaaaggcgccccgcacaccaagccaggccgagacaacaccacaaccgaccac

SEQ ID NO: 153853 - RNA, 70 nt, Homo sapiens
acaggcgcgcagaccggccgggccaaaccgaacagaacgccccaggggccccccaccaagacacacggac

SEQ ID NO: 153854 - RNA, 71 nt, Homo sapiens
gaaccccccccagcagaaaccgagacgaaggggggagaagggaccaggaagacacgggggcaggcagagaa

SEQ ID NO: 153855 - RNA, 76 nt, Homo sapiens
cgcgagccccaggcgaccagaaagaggaaagagagccgggcgacccaaccaagggaccagagccggaaaaagaaga

SEQ ID NO: 153856 - RNA, 82 nt, Homo sapiens
cagaggccagcacgagaacccagaggaccacccgcacccaggggacgcacggcccaaccccgagcaaggacgcccacccagc

SEQ ID NO: 153857 - RNA, 74 nt, Homo sapiens
cgcggcagggagcgcgggggcccgcgcagcagcgaccacggacacggacaaaacccgcgcagcgcgccacccaa

SEQ ID NO: 153858 - RNA, 81 nt, Homo sapiens
ggcgacgggcagaggaaggcgggagccggggcaccgccagccccggagggcaggacccggccaaacaaggaggacacgcgg

SEQ ID NO: 153859 - RNA, 81 nt, Homo sapiens
gcaaggagaagaaaaagaaccaccaaagcagaaccggaggcacccgcagccagaaaggagaaacagaacgaaccgaagaca

SEQ ID NO: 153860 - RNA, 77 nt, Homo sapiens
ggggccaggcacacaggggccggccagccaaagcaccggacggaaacccagagcaaaagggaggacaggaagacaga

SEQ ID NO: 153861 - RNA, 78 nt, Homo sapiens
accgacaagacaccacggacgagagacaaacgccgaaggaacagagaagcgcggcggagggcccagagccaaagaagg

SEQ ID NO: 153862 - RNA, 110 nt, Homo sapiens
cgcagacaggaggccacaccaagaaggggaagggccagccaccggaccggggccaagcagcgaggacccagaagaagagccaggaaagcaggcaggcgcagcagcacacg

SEQ ID NO: 153863 - RNA, 69 nt, Homo sapiens
agacggcgaagagcggaacaggcccaagccaggaccacgcaccgggaggggaagcgcagggcgcacagg

SEQ ID NO: 153864 - RNA, 81 nt, Homo sapiens
ccggagcccgagcggaggaagcccccagggccaggacgcccggaccgaacagcagccggaagcgagggccgggcagaagaa

SEQ ID NO: 153865 - RNA, 76 nt, Homo sapiens
cgaaacacagcgaaaagaaacggaaagcaagcacagagcacaccaagggaccccacaccacaaaccgaggaaagaa

SEQ ID NO: 153866 - RNA, 67 nt, Homo sapiens
ggcccccacacagcgaagaggcgcaagccgcagcgggccccgcggaccggaagcccaagaccaccca

SEQ ID NO: 153867 - RNA, 77 nt, Homo sapiens
cgccgccagccgaaggaggaagggaaccaacccacccggcgccgcggcccaaaagggcagagacaggcaacagacgg

SEQ ID NO: 153868 - RNA, 73 nt, Homo sapiens
caggcccaagcaacaagccaaacggagacagggggccccaggagaggacccagcagggcaggcgcgcagaaca

SEQ ID NO: 153869 - RNA, 82 nt, Homo sapiens
cccggagcggagcagccccagcgccacggaggaccgcgccaacaggacgaggagaccgaccaggagaccccagcggagacga

SEQ ID NO: 153870 - RNA, 71 nt, Homo sapiens
gacacaaccgacccgccaagcgcacacaaaagaggagaaaaccgggcgcagccgaccagccaaggaagcaa

SEQ ID NO: 153871 - RNA, 78 nt, Homo sapiens
gccgagcagacggcacgaagggcggccgccgccgagccagaccaggaccaggcggggcgaaccagcgcggaccaggga

SEQ ID NO: 153872 - RNA, 84 nt, Homo sapiens
ggagcaaagaaaagagccggaagcgaggagacagaagacagagccaaacacccagcaacgaagggggaacagaaaaggcaagaa

SEQ ID NO: 153873 - RNA, 83 nt, Homo sapiens
gaacgggcacccgcagcgcagaaggaaccggcaaagcgcaggaacgggaacgcaggagcgaccaggaaggacaacccggggga

SEQ ID NO: 153874 - RNA, 72 nt, Homo sapiens
aaacgggaaacagggaacaggaaggacagggaagcagacacaggagggagacggggggcggccccggacacg

SEQ ID NO: 153875 - RNA, 78 nt, Homo sapiens
gcagcgcggcacccgagcccgcggagcgcgcgaggcgcagagaaggacggagaagcgaaagccagaccggcaagagcg

SEQ ID NO: 153876 - RNA, 76 nt, Homo sapiens
gaacgggagcgccgcaagcggaagacggaagacgagcgacacacaaaaggcagaaacgaaccgaagcagccgggag

SEQ ID NO: 153877 - RNA, 71 nt, Homo sapiens
gaaagagagccgggcgacccaaccaagggaccagaagacgcgcgcccagcaagggaccacacccagacacg

SEQ ID NO: 153878 - RNA, 80 nt, Homo sapiens
aagaaggacacaggagaagaaaggagaaacagagggagaacaagcagaccgaaaagggcggaaaaggaccaaggcccgca

SEQ ID NO: 153879 - RNA, 71 nt, Homo sapiens
ggggcagcacggaaccacacagggccgccaccaacagagaagacagagcaccaacgagagacgggagggac

SEQ ID NO: 153880 - RNA, 84 nt, Homo sapiens
ccgcggcgaggagcgagcgcgcgaggggcggccgaggagaccgaggacaggccggacaccgcagcccaaaggagagagggcccg

SEQ ID NO: 153881 - RNA, 79 nt, Homo sapiens
agggcccaccaagcccagacgacgcgcggccagggccaggcggccagaacgcccgagccaagcaggcgcaacccacggc

SEQ ID NO: 153882 - RNA, 66 nt, Homo sapiens
ccacggaccgcgggacaagaaaacagcggacagagaggcgcaggcaagacccggaaggcccagaag

SEQ ID NO: 153883 - RNA, 80 nt, Homo sapiens
cgaccgagggacgggagcgaggagggaggcaccgccccaacccccccccgcccggagaaccccgcggaacgagcagcggg

SEQ ID NO: 153884 - RNA, 55 nt, Homo sapiens
agaagcagcccagaaaaccaacgaaacacacagaggggccgcgggagaaaggaac

SEQ ID NO: 153885 - RNA, 75 nt, Homo sapiens
ccagcacgcggggcccggccgggcggagaaagacaaacagagcggaggaggagaagcaggacggggggcccgggc

SEQ ID NO: 153886 - RNA, 83 nt, Homo sapiens
cgcccgcgggcccggccacggcggagccaagaacccagcggggccgccccacccgaggcccaccccaacgagccagccaggcg

SEQ ID NO: 153887 - RNA, 81 nt, Homo sapiens
cgaggaccaccacagaaggaagaagcaggacagaaggagcaagcgggaaggaaagaaaggagaagaacggaaaaaggaaag

SEQ ID NO: 153888 - RNA, 98 nt, Homo sapiens
ccgccccagaacgcagacagaggagcggacccccgcggcgcgcagcccagcaggacacagcaaccaagaggagaagaaccagaggcaaagcacacagg

SEQ ID NO: 153889 - RNA, 78 nt, Homo sapiens
ccgacggcgaagccaggacaccgccacaggagggaccagcaccggaggaaccgcaccgcacagaagaagccaaaaacg

SEQ ID NO: 153890 - RNA, 72 nt, Homo sapiens
acagccaagccggggccggccgcacgccaccaacacaggacgagacgaggacgcgcacaggaaaggacgcgg

SEQ ID NO: 153891 - RNA, 68 nt, Homo sapiens
ccgccgaccccccggcgccgcgccggcggcgggaggacggaggcacaggaggaggagaggacacggga

SEQ ID NO: 153892 - RNA, 73 nt, Homo sapiens
gcccccgagaccccgcggaacgcccaccgcggagagcagcacgaccccagcacagacaagcagaccggaagac

SEQ ID NO: 153893 - RNA, 74 nt, Homo sapiens
caaacaggaaaagcccacgagcacagagggccccagagggcagacaacaaccccccccgcgaaacgcgaggaag

SEQ ID NO: 153894 - RNA, 68 nt, Homo sapiens
acagaaaaagagaaagaagagcccccccaccacgaaaaccggagaggagcggcgcgacacacccgggc

SEQ ID NO: 153895 - RNA, 72 nt, Homo sapiens
ccaccggagaagggaggaaaaccaacaagaggccccaccgacccaagagaccgggcagggccaaaccagaga

SEQ ID NO: 153896 - RNA, 81 nt, Homo sapiens
aggagacggcagcagccagccgaacgaccacgcccacggacgccagaacacgcggacagcgaaagggaaaccgggcgcaga

SEQ ID NO: 153897 - RNA, 39 nt, Homo sapiens
gcgacgcaaggcgacgggcgaaaaaggcacaaacccagc

SEQ ID NO: 153898 - RNA, 56 nt, Homo sapiens
gcaagcagagcgcggccaagaacagaggaaggggcgccaaaagcagggcccgacac

SEQ ID NO: 153899 - RNA, 65 nt, Homo sapiens
caacggcggaaagcagggccagagggggcagaaacgggacgggagcgccacggggggaagagagg

SEQ ID NO: 153900 - RNA, 86 nt, Homo sapiens
ggcgagccaccggggagccaccgcccagcccaaaccaggagagcgagggagcgagcgggcagcgcggagaggggacggggcaaccg

SEQ ID NO: 153901 - RNA, 54 nt, Homo sapiens
agaagaaagaggccagacaggaggccgcaggagggaagcgcacggaaaccgccc

SEQ ID NO: 153902 - RNA, 81 nt, Homo sapiens
gacccaggcgagggaaaagagcccacgaagggcgacggacagagaacagacacggggaagcgcaaaaacaagacggggcgc

SEQ ID NO: 153903 - RNA, 84 nt, Homo sapiens
caccggccggacgcgggagaccagcggccccgcgaacagccccgggcgggagaccaggaagcgagccggggcagacgacaacga

SEQ ID NO: 153904 - RNA, 69 nt, Homo sapiens
ccccagagagccacccacaagacgccacaggccggcaacgccaggccccggggcagaagagcggcgccg

SEQ ID NO: 153905 - RNA, 83 nt, Homo sapiens
ggcggggaggccacgggggagaaaggcgcgcacgagacccacaggacggcgcagcgggacgcgaggaaccccccaagagccca

SEQ ID NO: 153906 - RNA, 75 nt, Homo sapiens
aggagccacagaggggaggacagcagagagaaaggcgggcacaaaccgaagaggacaaggagagaagcagacaga

SEQ ID NO: 153907 - RNA, 75 nt, Homo sapiens
agagcggagggcaggcccaagccaaacagaccgccaaggacagcagcagaaaaagcaaaggggaaaaccaaacca

SEQ ID NO: 153908 - RNA, 86 nt, Homo sapiens
gccgcccaagccgcacagccgcggcggcagcagcaggagagggacccagacagcgggcccgcccggccagacgaggaggaggagga

SEQ ID NO: 153909 - RNA, 67 nt, Homo sapiens
gggccaaaggacgaagaacccacagagggcagccagacaagaaggacacagaagagagcaaagaagc

SEQ ID NO: 153910 - RNA, 78 nt, Homo sapiens
gggacaaccgcgcgccccaccccccacgggccgcgaagaccgggacaaaccggcgaccacacacggggacgacgggga

SEQ ID NO: 153911 - RNA, 79 nt, Homo sapiens
acagccagagcccaggccaggccagggcacacccagcaccacggagaggaccacccggccagggcggagaacggaaaag

SEQ ID NO: 153912 - RNA, 90 nt, Homo sapiens
ggcgaggcgaggcggccgccggcgcccgggacgcggaccgccaggaaaaagcaacggacacagaaccaaaggaaaaaaaccggaacaacg

SEQ ID NO: 153913 - RNA, 75 nt, Homo sapiens
aacggagggcgacggagggaggaagaccgaggagcagggagcaaccacaaggaaaggaaaccaccgaaccgagcc

SEQ ID NO: 153914 - RNA, 79 nt, Homo sapiens
acccaggccaaccgcccaaagaaaaacaagcagacccggggggggcaaagggaagcggaagaggggaggcacaaccgaa

SEQ ID NO: 153915 - RNA, 51 nt, Homo sapiens
gccacccaacagggcagaagagggacaggcaacaagaagagcaccggacac

SEQ ID NO: 153916 - RNA, 78 nt, Homo sapiens
gaagacagaccagaccacgaggccgaagcccagccaaaaccagacgagagacagaagacgaaagggcaagaaagagag

SEQ ID NO: 153917 - RNA, 81 nt, Homo sapiens
ggggaagaaaagcaggggcggcaggacacaaacccaggaagaaaacaggcagaggcgcggcaaaagcaaaccacagcggac

SEQ ID NO: 153918 - RNA, 80 nt, Homo sapiens
ggggacagaagagccaaaaggaaaaaaagaggcacgaagcgggcgggacccgagagaacgcaagacccacccccccacac

SEQ ID NO: 153919 - RNA, 55 nt, Homo sapiens
gacggagagggagaagagaggaaagaggcacagagaaacaacgaaccagaaagcc

SEQ ID NO: 153920 - RNA, 33 nt, Homo sapiens
cacccccgcacaacaccgggaaagaagcacaac

SEQ ID NO: 153921 - RNA, 71 nt, Homo sapiens
ggcgcccacggggcaacaccccggcacacgagagccgggcccagacccggccggccgcgcgccgggagaga

SEQ ID NO: 153922 - RNA, 57 nt, Homo sapiens
cgggcggcgcggcggccagaggaaccccgaggaaaaggggacccaaccacagccccc

SEQ ID NO: 153923 - RNA, 84 nt, Homo sapiens
ccggaaccaaaggaaaacagacacgacccaagggacaagaacccaagaaacaggaaaaaacccaaaacaccaaaaggaccagcg

SEQ ID NO: 153924 - RNA, 76 nt, Homo sapiens
gaggagcggggagggggacacacaaccgcccagccggcgagggacgccgcaggaggcagcaacacagagaccagaa

SEQ ID NO: 153925 - RNA, 75 nt, Homo sapiens
ggagccaccggccacaaggcccgagggaccaagacacccaggagaaagacagcggggaaaagaaaaaggaggggg

SEQ ID NO: 153926 - RNA, 78 nt, Homo sapiens
ccgcgcggaccagcgcgcccacagcccccaccaacacaggaagaaaccgagcagaggcaggacagccaacaacaaaaa

SEQ ID NO: 153927 - RNA, 58 nt, Homo sapiens
aacaacccccaaggacgccccggcagacagaccccagaagggaggcagggccaaccaa

SEQ ID NO: 153928 - RNA, 33 nt, Homo sapiens
caacccgacccgacgaacccggccgaaccacgc

SEQ ID NO: 153929 - RNA, 76 nt, Homo sapiens
cgccgccccagaaccggcgaaaaccggagagggacaccggccagcgagaaccagccaaaacacacgaacagggaac

SEQ ID NO: 153930 - RNA, 49 nt, Homo sapiens
gaaaggggaaccccggagaaaaggccaagaaggcagaagagagaagaag

SEQ ID NO: 153931 - RNA, 65 nt, Homo sapiens
cgaccaagcacgccaagccaacccaggagcggcagcccacaagcaggaagaccagccccaggagg

SEQ ID NO: 153932 - RNA, 74 nt, Homo sapiens
gacaggcgacaacgaacagcccaccagaaaggaagagaggaagggacaagggagaagaagccacaccaaaccag

SEQ ID NO: 153933 - RNA, 67 nt, Homo sapiens
gaacgaaccgccccgcccaaggagagaggagaggcagaagccaaaacccagcgaaaggagaaggaaa

SEQ ID NO: 153934 - RNA, 75 nt, Homo sapiens
cagcccaaccgggcgcagaccggccagccgccacgccacgcacccaccgggggacggcacggcaggcggacgccc

SEQ ID NO: 153935 - RNA, 71 nt, Homo sapiens
cgcagaagggagccaaacaggcaaacaaagaaccccccaagagagacccgggccagaggccaggcaccaca

SEQ ID NO: 153936 - RNA, 52 nt, Homo sapiens
gaacccccacgcggccagcgaaaacgcccaggggacaccagcagcgccgccg

SEQ ID NO: 153937 - RNA, 74 nt, Homo sapiens
ccggagaaccgggcccagcagcacgggccggcaccaccccagaggcaccacgaagaccccgcccagcccgccac

SEQ ID NO: 153938 - RNA, 79 nt, Homo sapiens
cagaccaggaggagaagaagggaggcagagaagccccacaccaggagaagcacagcaccggaacgcgagaaagcagggc

SEQ ID NO: 153939 - RNA, 78 nt, Homo sapiens
cacgacaagagcgccgcgccagcccacccccccaacccccacgggaaagggagcagcaccggccacacccacagcacg

SEQ ID NO: 153940 - RNA, 84 nt, Homo sapiens
ccgcccacccacccggcagcgggggcagcagagcggagccaagagcgaagggacaaaaagaaccccgaagaggacaggaggaag

SEQ ID NO: 153941 - RNA, 71 nt, Homo sapiens
gcgggggacgggagcggcagccccgcaaccccaggagcggacacggaaccacgcccagcccagaacccaag

SEQ ID NO: 153942 - RNA, 53 nt, Homo sapiens
cccgaaggcgcaaacgacaccacccgaccgcccgcggaaacgccagagaaagc

SEQ ID NO: 153943 - RNA, 70 nt, Homo sapiens
gggccacagcacccacagccaaacacaccgacaagcaccagaagaaaggagagagccgaaagagaaaagc

SEQ ID NO: 153944 - RNA, 71 nt, Homo sapiens
aaaagggacgagagcacggagggaaggagggcagccaaaaagagagacacacaaaagggaagaagaagaaa

SEQ ID NO: 153945 - RNA, 41 nt, Homo sapiens
cccgagcagcgggacacaggcagagaccgggcacaaccagc

SEQ ID NO: 153946 - RNA, 70 nt, Homo sapiens
agacgagaaccggcaaagggaggggagagagagcggcaggccagacgcaggggcaagccaccccagagga

SEQ ID NO: 153947 - RNA, 69 nt, Homo sapiens
gacccgcagagggacccacagagaaggagagagaaagggaacgggccacggagcgggcgcgcgcggaac

SEQ ID NO: 153948 - RNA, 88 nt, Homo sapiens
acaggcacgcacacccaccccacaggcccggccggcgcggacccaaagacaggaccacgcaccagcagagaaggaaagcaaaccgaag

SEQ ID NO: 153949 - RNA, 70 nt, Homo sapiens
cccggcaaaccgaagagcaacgaggcacgaaaacagaagacaccccggaagacgaaagaagacggagcgg

SEQ ID NO: 153950 - RNA, 85 nt, Homo sapiens
gaagcgggggagaaaaggaccagaagcggcgggccgccagcccgagcgaaagggacgcgaacgggcaggcgcgcgcggggccggc

SEQ ID NO: 153951 - RNA, 78 nt, Homo sapiens
cgccgggagcgccaaccccccaggagagaagcccacaggccaagcggggaagacccccagagggaagcaggaaggcaa

SEQ ID NO: 153952 - RNA, 54 nt, Homo sapiens
cgcagacaccaggccaacaaagcgcgggccaaaggaaaaggggaggggaaacac

SEQ ID NO: 153953 - RNA, 71 nt, Homo sapiens
acgcacagcgacaaggcggccccagcgcaggaaggggagccgcacggaacgggcgcaccacgccaccccgc

SEQ ID NO: 153954 - RNA, 52 nt, Homo sapiens
caaggaaaaacggagagccacaaaaaaggaagcgaaaaggaagaacgcgccc

SEQ ID NO: 153955 - RNA, 50 nt, Homo sapiens
gaaggacaaaaacgcgaagaacaagggccggcgcacagcggaggaaagcc

SEQ ID NO: 153956 - RNA, 72 nt, Homo sapiens
caccacaccaagacaccaggggagaccgggccaccacagagcccgcagggacacagcagaacaagcaacccc

SEQ ID NO: 153957 - RNA, 78 nt, Homo sapiens
ggccacagaggccccccagcagaccagaacgaagcccagaagagagggaaaaagcgacgcaggaacacgaaagacccc

SEQ ID NO: 153958 - RNA, 53 nt, Homo sapiens
gcaggcgcacggcaaacgagcggaacagcgaggaaggccacaggcccggggca

SEQ ID NO: 153959 - RNA, 129 nt, Homo sapiens
aagcacacccaaaagagcacagaaccaagggaagagaacacacggaccgagagagaaggcccgggggaagaggaaaagggagaaggccaaaggcaccccagcaggaagcgaagcgcgagagaaggagag

SEQ ID NO: 153960 - RNA, 56 nt, Homo sapiens
gcccacaggagccaggacgcaggacccaagaggaagaaagaacgaaaagaacagag

SEQ ID NO: 153961 - RNA, 69 nt, Homo sapiens
accaccaagcgaaaaacccccaaccacggagaaaaaacccagaaacaacaaaaaaccccgggccgagag

SEQ ID NO: 153962 - RNA, 80 nt, Homo sapiens
cgaggaggaaaggaggacgagaaggaggccccaacccgagcacaacagcaaccggccaaacagaggggcgcagcaaacaa

SEQ ID NO: 153963 - RNA, 75 nt, Homo sapiens
ccccagaccaaccagaaaaccccacgcgccagaaccacccaacagcagggagccaggagacggaagaccaccaac

SEQ ID NO: 153964 - RNA, 54 nt, Homo sapiens
gagaagaggagagagaagaagaggccgccggaaacaccaggaggagggagcgaa

SEQ ID NO: 153965 - RNA, 76 nt, Homo sapiens
gggaaggaagcggagaacgcgggcagcagcgagagccagacaagccagacaccaagaccccacgaaagaccgggag

SEQ ID NO: 153966 - RNA, 35 nt, Homo sapiens
cgcccgcagggccaggacgaccccgggggcacggc

SEQ ID NO: 153967 - RNA, 55 nt, Homo sapiens
agaaacccaggacgagaacagcaacaggcggcaccccaaacgccaaagcaagcga

SEQ ID NO: 153968 - RNA, 75 nt, Homo sapiens
gcgaccacagagaacaaagacgagacaggaaccccgacagcagagacgacgcggcaagcagcggaagaggacgac

SEQ ID NO: 153969 - RNA, 55 nt, Homo sapiens
aagcaaccgagaggaaacagacccagcacgggggggggagccgcacgacccgaac

SEQ ID NO: 153970 - RNA, 75 nt, Homo sapiens
cgccaggggcagcaagcaagacaagaacgcgcgcccaacaggaggaacgagccagcaccgccgaccgccagcgcc

SEQ ID NO: 153971 - RNA, 75 nt, Homo sapiens
agcaccggaccacgccacccccacggcccacggcccggggagacaccagcagcaaagcccgcgacacccgacgag

SEQ ID NO: 153972 - RNA, 111 nt, Homo sapiens
ccaaagacaaaacgaaccaccgaaggccaagagaaggggggaagagaacaaagccgaagcaggacacaaagaaaagacgaaggaagcaacacaaggaagcggagggaacca

SEQ ID NO: 153973 - RNA, 53 nt, Homo sapiens
aggaccacgcaaaaaaaaggcagcggaaagaagaaaagaaacggcccacaaga

SEQ ID NO: 153974 - RNA, 72 nt, Homo sapiens
gagagagaaaaaggacagaggaaagcacaacaagcaggccaaacgaccgcggggccacgacaaaggggacgg

SEQ ID NO: 153975 - RNA, 74 nt, Homo sapiens
gagaagacaaccggaagcggcagagagggaaacagacaacacaccaaaggagagagcagacaagggcccacacc

SEQ ID NO: 153976 - RNA, 87 nt, Homo sapiens
gcgggccacggaagccaccgacaggcccgagggcccgagagcaccgcgccagacagggaggcggaccggcggaggaggcgggagccc

SEQ ID NO: 153977 - RNA, 83 nt, Homo sapiens
gcgcagacgccgcccagcccagcagaggaccagccgcagcagggcggcgacggcggcgcgaggaccgaccgggcccgcggacg

SEQ ID NO: 153978 - RNA, 76 nt, Homo sapiens
agcggggaggccgcccggcgcagcggggaccggcggcggcgcccaggcacccggcccggggggcacccgaggagga

SEQ ID NO: 153979 - RNA, 38 nt, Homo sapiens
gcgaccgggagaacaagacgcggccaggcgacgagaga

SEQ ID NO: 153980 - RNA, 80 nt, Homo sapiens
gacggacggcgggcaccggccgacggagaccaaggaccggacagaggaagaaacccggaaggggaagaggaaagcaaagg

SEQ ID NO: 153981 - RNA, 58 nt, Homo sapiens
agaggaggacgcccacagccacccaaaggcgacgacgagcggccaccgaaaggaggac

SEQ ID NO: 153982 - RNA, 78 nt, Homo sapiens
gccggcagcaaaaaaaagaagcaggaaacccggcacaagaccccccagagccaagaagagagccaggcgaacaaaagc

SEQ ID NO: 153983 - RNA, 81 nt, Homo sapiens
ggcgacagggcgacccaccaggggggacaggccccacccggacacaggcggggcgcagcgcgggggacagagacgcccaag

SEQ ID NO: 153984 - RNA, 60 nt, Homo sapiens
ggaagaccgcaccacgcgcccacacagggaaccagggcgggaacaaaagaccacaccgaa

SEQ ID NO: 153985 - RNA, 83 nt, Homo sapiens
cacaccaccccgacggagacggacggcaaaagaagcggaagcagaagaggcgccaaggaggcagagaccccaggccaagaaga

SEQ ID NO: 153986 - RNA, 84 nt, Homo sapiens
agaaacacagggcaccaacagaagacccagggcgcgaaagaagacagagaccccaagaagaagcggaagaggagccgcggaacc

SEQ ID NO: 153987 - RNA, 82 nt, Homo sapiens
aaagcgggagaagacacggcgagaacggggccagcacagagaggcgacagcggagaagggaaggcggaggcagggcagaccg

SEQ ID NO: 153988 - RNA, 62 nt, Homo sapiens
cgcccgagcccagagggggcacagagagcggagcgccaacaccccaggcagcacgggaaagg

SEQ ID NO: 153989 - RNA, 75 nt, Homo sapiens
aggaccacccaccagccaccaggagcgaggggggcccacacgagaacacgcgggcgggaaacagagggagagaca

SEQ ID NO: 153990 - RNA, 72 nt, Homo sapiens
cccaaccggagaaagacacggacgcaggaaagcccgagcagaaacaagggggaaagcggaccaagaggaaac

SEQ ID NO: 153991 - RNA, 40 nt, Homo sapiens
gcacgagcccgaggcgagcccaggggggcaggccggaccg

SEQ ID NO: 153992 - RNA, 120 nt, Homo sapiens
ccacaaaagcgcgaccccacaggcccagaaaagacgagccaggacgcaaaagaaaacgccggcccagggcacccaagccccgcaggagaagggccgccagccagcccagccaaagccacc

SEQ ID NO: 153993 - RNA, 64 nt, Homo sapiens
cagaacccagcccacccccaaccccaaccggccgcgaggacccagaagaccccaccccaccccg

SEQ ID NO: 153994 - RNA, 76 nt, Homo sapiens
ggcaagaacggcgcacgacaagagcaagaacgaggccaaggaggagggacacagagacagcgaagaaagaacgccc

SEQ ID NO: 153995 - RNA, 126 nt, Homo sapiens
agcacggaggacggggccgggcgaccgggcaccagcaggacccgaggccaggagccaggggcccagaagacgggagagaagcgccggccggaaagaagacggggaggagcaggacgagcccaaggg

SEQ ID NO: 153996 - RNA, 74 nt, Homo sapiens
aaacgaaccggacccagacccagaggcagagccgccccagcagcaggggcgccaggggggcgccccaggaggag

SEQ ID NO: 153997 - RNA, 60 nt, Homo sapiens
cgcagaggccgacgggagaggcccagcaccgcaagggcaaaaaaccggcaagaaacggaa

SEQ ID NO: 153998 - RNA, 51 nt, Homo sapiens
ccgacagccgcagaacggcggaagagcgcgggaggggaggccaccaagaag

SEQ ID NO: 153999 - RNA, 82 nt, Homo sapiens
gaggggagccggcgaggacaaaaccgaaggaggcaggaggccacgcgcagccccggaagagccacccagacccaccccgggc

SEQ ID NO: 154000 - RNA, 75 nt, Homo sapiens
ggccagcgcaccaaccagggaggagccacaacccgacaagaccacacgacacaaggccaaaagcccaaaagaaga

SEQ ID NO: 154001 - RNA, 76 nt, Homo sapiens
cagcaggggccgagagagccccgaagaccccgcgggagcgcccgggacagaccccggaaagggacagggcagcggc

SEQ ID NO: 154002 - RNA, 85 nt, Homo sapiens
gagcagagccgcgggcgccggagccgaggcgagcgccgcgcgcaccacgggcacaaaaacaaaggacgaagaaaaagagaaaaga

SEQ ID NO: 154003 - RNA, 77 nt, Homo sapiens
ggcaggaaggaggccgacgagcccaggagcccggcagaggcgaaagaaccacaaacaagcagaaggagagaagcaag

SEQ ID NO: 154004 - RNA, 56 nt, Homo sapiens
cagggcgcccccgaaccacccaccgccaccaagaagaaagaagaagaaggccggcc

SEQ ID NO: 154005 - RNA, 72 nt, Homo sapiens
gccggcggacgcagcgagaaggccgaaacacaagcaaggaacacaaagaagaaagaaaggaacggaaggaag

SEQ ID NO: 154006 - RNA, 81 nt, Homo sapiens
cagggccacccggcccaaaaggccaccggaacgcaggagacagggaccaccaggcgcggacacaccgagaagccgaaacag

SEQ ID NO: 154007 - RNA, 68 nt, Homo sapiens
agaaaagacaggcgccaggagcacagaagagcgaggaggggagaaaaacaggaaaagaaagacgcaca

SEQ ID NO: 154008 - RNA, 78 nt, Homo sapiens
cggagggaagaccacggaaaaacagggaaggggaggagcaagcaaacacccaggacgccaggaccagggagggaagga

SEQ ID NO: 154009 - RNA, 78 nt, Homo sapiens
accgcggcgggcgcgagcgaggcgcccagacaccccccccgcccagcagacgacccagacaccaaggcaacacggaca

SEQ ID NO: 154010 - RNA, 83 nt, Homo sapiens
gggaaggcgccggggccagcgcagccgcggcggagacgcacaggcccgccggaaccaaaaagaagccccagagccggggccag

SEQ ID NO: 154011 - RNA, 60 nt, Homo sapiens
ccccagagcgacagcccgggacaccaagaaagaacagaaaggggaccggccggaccggag

SEQ ID NO: 154012 - RNA, 71 nt, Homo sapiens
aagagcccggagagagggaagaaacacagcacagaccagggcaaagcaccccagagcaaaaaacggggaga

SEQ ID NO: 154013 - RNA, 52 nt, Homo sapiens
aggagaaggaccgaagagccacagacgagagggcagacccggacccccacag

SEQ ID NO: 154014 - RNA, 83 nt, Homo sapiens
cacagccacggaagaaagcaaagacaggaagcagagaggaagagagaagacaggaggagggaagaaggccaccaaaaacaacg

SEQ ID NO: 154015 - RNA, 66 nt, Homo sapiens
gcggggccagaacgaagacggccggaacccgaggacccagcacaggacaaaagcaccacgccgccg

SEQ ID NO: 154016 - RNA, 76 nt, Homo sapiens
agaccgcccagaggggcccaccgcgcccgaaacaggagccagaaaaaaaaaaagaaaggacaagggaggccaggaa

SEQ ID NO: 154017 - RNA, 56 nt, Homo sapiens
accagccagggcacggccgggacggacggaaaccagaacgaaaacccgcccaacag

SEQ ID NO: 154018 - RNA, 84 nt, Homo sapiens
ggcgagcgcagcgccgggccggggcgcgggccggccggccaccggcagccaggcacgcccgcggcacccgcaaagcccagggag

SEQ ID NO: 154019 - RNA, 73 nt, Homo sapiens
caaaaccagaagcagggccgcccgcagccggaggaagcacgaaagcccaacaccacgcaagccaccccaagcc

SEQ ID NO: 154020 - RNA, 73 nt, Homo sapiens
caccagacagccaacaagccccccagggaaagcccaaccagcagacacgccaaaacacagagcagaagggaaa

SEQ ID NO: 154021 - RNA, 60 nt, Homo sapiens
gccagggaacccggcaccgccccaggagccccagaaaaagaccagggaaaagcccagcga

SEQ ID NO: 154022 - RNA, 50 nt, Homo sapiens
cggcacaaccccgggaaagggccagaaagcaccagcgccggacacaagag

SEQ ID NO: 154023 - RNA, 65 nt, Homo sapiens
aagccaaggaaaaacggagagccacaaaaaaggaagcgaaaagggccacgaccggcgcgcgcgaa

SEQ ID NO: 154024 - RNA, 82 nt, Homo sapiens
ggaaaaaaaacagaacaggaggggagagggcaggaaccaccgcccaaagagccccccaagagaacccagggggagccacgcc

SEQ ID NO: 154025 - RNA, 65 nt, Homo sapiens
cgaaaggccccgcagcgcagacgcggacgggagggaaaaccaggcaggaggcagaaaagaaagag

SEQ ID NO: 154026 - RNA, 85 nt, Homo sapiens
gcgacaccaggccagccccaaagcggcggagaacccggacgcacgagccagggagccgccgggaccggcccgggagacgacaacc

SEQ ID NO: 154027 - RNA, 55 nt, Homo sapiens
gggcacgacggagagagggccgacccccagaagagcggggcccggcgcacccacc

SEQ ID NO: 154028 - RNA, 35 nt, Homo sapiens
gcccgagagagaagggccaaggaaaaggaacagag

SEQ ID NO: 154029 - RNA, 84 nt, Homo sapiens
ccccgccaaccgcaaccagacgccagcgggacgaggaccgagaccgcggccgggaccgagggccgcgggagagcgggggcggga

SEQ ID NO: 154030 - RNA, 63 nt, Homo sapiens
gcacccgacacccggaagccccccggagaacacggagccaaaccagagggacccacacaaaac

SEQ ID NO: 154031 - RNA, 61 nt, Homo sapiens
gaaacaaacagaggcaccgcccgagaaagacagcaaagaaaaggagaagaaaggaaaaaaa

SEQ ID NO: 154032 - RNA, 72 nt, Homo sapiens
acgcccacacacccacgcgggcgaaggcgcaggaagaaggaacggccgagcgaccaggagaggagcccccgc

SEQ ID NO: 154033 - RNA, 69 nt, Homo sapiens
aaagcccggggagcgaagggcagaagagagaagaagcaaaccgggaccggaagcaccaaggagaaaaag

SEQ ID NO: 154034 - RNA, 44 nt, Homo sapiens
cacacggcagaaggaagagccaggcgccaccagcaaaaccagag

SEQ ID NO: 154035 - RNA, 69 nt, Homo sapiens
cgcccgcggccggcccggcggagagggacggcccgccacgggccccgcagccgcgcccgagcgcccgag

SEQ ID NO: 154036 - RNA, 85 nt, Homo sapiens
agaagaccagcaaaaggagaccccccgagagcagagaacacggggacggccggagcccggagccgggagaacgagcaaaagcgca

SEQ ID NO: 154037 - RNA, 74 nt, Homo sapiens
caacgcaacaacaacgcgacaaaggagagaaacagccaaaacagcacaacagcagggaacaggcacgccccacc

SEQ ID NO: 154038 - RNA, 77 nt, Homo sapiens
gccgggaagcagcaccaacccggcccaccaaaccccgagaagaagcagaagaagacaaagcagcaaaaacaaagaag

SEQ ID NO: 154039 - RNA, 58 nt, Homo sapiens
gcgaggcgagaggaccggagccgagcgggagagcaccagacaggaggagacgcgcagg

SEQ ID NO: 154040 - RNA, 51 nt, Homo sapiens
gccccaagacccggccggcgccgcggccgcggggggcagcacgccgaagga

SEQ ID NO: 154041 - RNA, 53 nt, Homo sapiens
cgcagggcgcccccggcgagagcagaaaacgcggggaaagagcagaaaacaga

SEQ ID NO: 154042 - RNA, 73 nt, Homo sapiens
caggcacccgggcccagccgggaacccccacgcggccagcgaaaacgcccaggacaccgccgcccagccacag

SEQ ID NO: 154043 - RNA, 68 nt, Homo sapiens
gccgcgacgagccagaccgccaaaccagagaaagaaacacccgaacagcgaaggcgcgaacagggccc

SEQ ID NO: 154044 - RNA, 73 nt, Homo sapiens
gaggacgcccaccgggcaggagaaggcagagcggggcacccacccaagggccgcaaaggaacgccacaaagag

SEQ ID NO: 154045 - RNA, 34 nt, Homo sapiens
cgccacggcgcagacgcgagacggaccgccgggc

SEQ ID NO: 154046 - RNA, 68 nt, Homo sapiens
cggagaaggaaaggaagagcacaagcgaaggagaagagaagaggcaaaaaccaaggagcgccggccca

SEQ ID NO: 154047 - RNA, 87 nt, Homo sapiens
ggaaccggccagccagggccgggccgcgaccggccccggagcacaccggaaccaaaaagaagccccagagccggggccaggagcccc

SEQ ID NO: 154048 - RNA, 53 nt, Homo sapiens
agccggcacacagggagagccagggaaggaaggccgaaaagacagaaggcagg

SEQ ID NO: 154049 - RNA, 77 nt, Homo sapiens
gccccagcacccccccccagccggggagccgagccaggaggaaagcggacagaagaagccaaaacgccaagaaacaa

SEQ ID NO: 154050 - RNA, 39 nt, Homo sapiens
ccagcaggaaaggggcaggacaaggccaacaggaaaaag

SEQ ID NO: 154051 - RNA, 75 nt, Homo sapiens
cccaaccacaccaggcaagggggaaaaaagcagcggaggagaaaaaaaagaagaccgcagcaaggaagaggcaaa

SEQ ID NO: 154052 - RNA, 81 nt, Homo sapiens
gcgggggaggcgagcgcgccgcccggagccgcgcacacggcacccaggccacggggggacccaggacaagccaaagagagg

SEQ ID NO: 154053 - RNA, 72 nt, Homo sapiens
cacggacagaaagcagagaaggacgcacagcagacgcaaaccaaagagccagaaggaaaagccaaccgaagg

SEQ ID NO: 154054 - RNA, 74 nt, Homo sapiens
agcgaagacaagcgccgagaaagaaggcccaaaagagagccagagcagccagaccaaggcacgaaaagaagcaa

SEQ ID NO: 154055 - RNA, 70 nt, Homo sapiens
cgcgggagcagcagcgcccgcagagccggacggccccccacgccccggggagagaagaacacagcggaca

SEQ ID NO: 154056 - RNA, 57 nt, Homo sapiens
acaggaccagcagggcgggcaggcccacacagcgggcaccggggcccacagaacaag

SEQ ID NO: 154057 - RNA, 82 nt, Homo sapiens
gccacgggaggacccacccggcagaccccccacaccccccagccacgcagacagccgcccaaccccagccagaccaacagcc

SEQ ID NO: 154058 - RNA, 96 nt, Homo sapiens
gccccaggggagaggcgcccgggagagcaggaccgaggcccaggagaaaagaaagccagaaggaaggaagcaacgaaccaagaaaaaacggaacag

SEQ ID NO: 154059 - RNA, 84 nt, Homo sapiens
ccgcccggaaggcaagcgcagcaacaacagagagcacggggaagcagagccccgggccgggaaggggaaacggccacgcaggaa

SEQ ID NO: 154060 - RNA, 75 nt, Homo sapiens
ccaagaagacaccgacacgaaaacagggcggaaacagggagggccacagcccccgcccgggagacaaagccccag

SEQ ID NO: 154061 - RNA, 70 nt, Homo sapiens
ccccaggcaacaccaagccagaacaaaaggaccgcggcagcaccaagcaaacaagcggcgaaaggcaaga

SEQ ID NO: 154062 - RNA, 61 nt, Homo sapiens
gccaaagaagggagagagaaacagaagaggaggaaaagcaaagagcaaaagcaagaagaag

SEQ ID NO: 154063 - RNA, 52 nt, Homo sapiens
cgagcagagccccagagacagaacggccgcagagaaaaccgcacacaaaggg

SEQ ID NO: 154064 - RNA, 73 nt, Homo sapiens
gaccggggcccagcaaagccaaaggaaggaccagagcccagagggcccccaaaggccggcgcgagaccaggcc

SEQ ID NO: 154065 - RNA, 41 nt, Homo sapiens
ccggcagggagaaggaggaggcgaggcaggagaacgcgaac

SEQ ID NO: 154066 - RNA, 76 nt, Homo sapiens
aaaacggaagaaacagcgaccccgaacaggcaggagacagagagaaagcaacagcaggccagccccagagcccggg

SEQ ID NO: 154067 - RNA, 55 nt, Homo sapiens
cggaaaccgccgcggacccgcacagcacccggacagggcaagcggaaagaccgga

SEQ ID NO: 154068 - RNA, 52 nt, Homo sapiens
cgcgccggcccagcaccccgagaaccgcaggagccagaggcccaaagcccag

SEQ ID NO: 154069 - RNA, 71 nt, Homo sapiens
ccgaggcgcgggacgcgaagcaacaggcagagaggaaggaacagagcaacgaaaacgaaaacgaaggccag

SEQ ID NO: 154070 - RNA, 68 nt, Homo sapiens
aaggcaacagcgccaccgacccaacagaggcaaggaaccaggaaagccagcgcaaggagccacgggac

SEQ ID NO: 154071 - RNA, 81 nt, Homo sapiens
gggcgcccagagacaacgagagaacaggaagcgcagcgggaaagaaagcagccggcgcccgaaggaggagccgcaacaagg

SEQ ID NO: 154072 - RNA, 77 nt, Homo sapiens
aaaccggaccaccccgaagaaagcacaggagcgcaagcagccgccaaagcgggcaaggcgcagcgcccggcccaagg

SEQ ID NO: 154073 - RNA, 82 nt, Homo sapiens
aaacaacaagaagaggaacacgaacaaccacgccacggggacaagaaggccgaggcacccgaaagaagaaagaaaaccggag

SEQ ID NO: 154074 - RNA, 87 nt, Homo sapiens
gcggccgcgcccaggagcacggacgccagaacggacccaaagacaggaccacgcaccagcagagaaggaaagcaaaccgaagcaggc

SEQ ID NO: 154075 - RNA, 84 nt, Homo sapiens
ccggcggccccaccagcagacgcagccgagacaccagcccgaaacaccaccaagcagagcagaaaaggcaaccacgcaaggacg

SEQ ID NO: 154076 - RNA, 58 nt, Homo sapiens
cgccagaggagccgcccgcccagaacggcggaccggaggccaaggaagcgacagccag

SEQ ID NO: 154077 - RNA, 76 nt, Homo sapiens
ccccggcggaagccacagcaggagaaggcagagacaccaggcaaagacggcaggaaccggcaaacgggggaaagag

SEQ ID NO: 154078 - RNA, 71 nt, Homo sapiens
aagaaaggcgaaggaaaaccccagcgaaacaccaagaggaaaaaggcgaacaggacaagaagaaaaacgca

SEQ ID NO: 154079 - RNA, 77 nt, Homo sapiens
gccacagaaacacacaggcaccacccaggggcacaaggacgagaacagccccccacagaaagccgggcacagggacg

SEQ ID NO: 154080 - RNA, 56 nt, Homo sapiens
cacagagagagagagggagggggcgaagagagaacacgcacggaaggaaggagacc

SEQ ID NO: 154081 - RNA, 69 nt, Homo sapiens
gcgggcagagccaggaccaaggaggcaaaagcagggcacaaccagggggcaggaacaggagaaaacgaa

SEQ ID NO: 154082 - RNA, 103 nt, Homo sapiens
gccaagagagcgacacgaagagaaggaaaacacaaggggaagcgcacagaggacccgaaaccggagagcaccgcgaaaaggcggccgagggcagcgaacacag

SEQ ID NO: 154083 - RNA, 74 nt, Homo sapiens
acaaagggagagcggggcagagaggagcacacggccagggcaggcggccggcagaggagaaggaccaagaacca

SEQ ID NO: 154084 - RNA, 81 nt, Homo sapiens
acaagaagacccagagagagaccaccgcccacgaagcccgacgaggcccgagagaagagcagaaacgggagaagggaaggg

SEQ ID NO: 154085 - RNA, 75 nt, Homo sapiens
aggcaagaacgccaaagacgcaagcaaaagagcaacgccacaagagccacagagccaagcgcagcccagaaagcg

SEQ ID NO: 154086 - RNA, 70 nt, Homo sapiens
aaagcagagccagcagcccagaaacgagaaccagccccccaaacggcccaaacggagaacacagagcacg

SEQ ID NO: 154087 - RNA, 82 nt, Homo sapiens
ccagcaggggcccaggacggcaccagaaaagagaagaagcacagacgagaaacaaggcaagaaggcagccgagaagccaagg

SEQ ID NO: 154088 - RNA, 72 nt, Homo sapiens
agcaaaacagggacagagggagaagacagaaagcaggggaagaaacccgaaggcgggcccaagaggcccaga

SEQ ID NO: 154089 - RNA, 77 nt, Homo sapiens
gaggccggagggccacccccggaagcaaaggccggggcagaccccaaagcagaagaaggacaccccacaccgaaaca

SEQ ID NO: 154090 - RNA, 76 nt, Homo sapiens
gaacggcgacgaccagagccccccgcccagcgcccggaacacaccaccaaccaggcagggacaggcccaaggcaag

SEQ ID NO: 154091 - RNA, 76 nt, Homo sapiens
aaagacagcccgcagcacgaccagcaggaacgggagagcacaacaggaaccagagaaacaaggagccaggcgcaga

SEQ ID NO: 154092 - RNA, 76 nt, Homo sapiens
cacaaacgcgcagacccgggacccacccgggcggagaccggaaacgagagaaacgaagacgaagaaacagccgcac

SEQ ID NO: 154093 - RNA, 74 nt, Homo sapiens
ggaaacagcccgggcaccccgaggacaaccgagacacgagaggcgagggacgacagagcaagcggcagagggca

SEQ ID NO: 154094 - RNA, 99 nt, Homo sapiens
gcaagacgacaaggaggcagggacccggagccacccacaggacccgccaccaaagcggagaagcggaggagaccaaggaggccaccaccacagaaggag

SEQ ID NO: 154095 - RNA, 84 nt, Homo sapiens
cggcggcaaacaagaaaaccccaagcggaccaaggaaaaaagaggaccaaccaccccaagccaagaaggcaaaaggaagaccag

SEQ ID NO: 154096 - RNA, 71 nt, Homo sapiens
cacgcgaacaagccccagaggggacagagaggggacagacgcagcagggcagccacacaaaagggaagcgg

SEQ ID NO: 154097 - RNA, 77 nt, Homo sapiens
cgccgcgcggcggcggggccaggcggcccgaggagaagacagaggagccagaccaagagacagcacaggcgagcgag

SEQ ID NO: 154098 - RNA, 91 nt, Homo sapiens
cgccgagcccacccgaccgaaacaaccacaaaggacagaacacaggaaacaaggcccccacgccggccagcggccccaaacccggccgggg

SEQ ID NO: 154099 - RNA, 88 nt, Homo sapiens
acaaaagaaaggcgagcgacccaggaggagaaggagcacggaagcacgggaaaggcagcagcaaggacaagaggagaaaagccagcaa

SEQ ID NO: 154100 - RNA, 77 nt, Homo sapiens
ggcgaagggcaaaggggagaagcgccagcgggaggagcacagcgcgcaggagcagggcccaggggggaagagccggg

SEQ ID NO: 154101 - RNA, 72 nt, Homo sapiens
agccgccggagcagcggggacaggaaggggcagacaagcacgccgcccagacaacccaaaggaccagcagga

SEQ ID NO: 154102 - RNA, 77 nt, Homo sapiens
ggggccggcagccgagaggagcggagcgccagggggccacagggagcacgagacagcgccggccccaacgagggaga

SEQ ID NO: 154103 - RNA, 78 nt, Homo sapiens
cgggggggaacagcgagcggagccggcaggaaggggaccgggcggcggagcggcggaagaaggggagcgacagaaaag

SEQ ID NO: 154104 - RNA, 37 nt, Homo sapiens
accgaaacgccaaaaaggggaccaaagccaacccagc

SEQ ID NO: 154105 - RNA, 68 nt, Homo sapiens
ggaggagcaggcgagaagagaagacccaaagcggaaaacccgcaagggccagcaaaaccgcaagcaga

SEQ ID NO: 154106 - RNA, 85 nt, Homo sapiens
cggcggcggagagaagcgccaaaggaccggacccagagaagaggaaaaccaccgggcagacagggaggccgcacagaggaggagc

SEQ ID NO: 154107 - RNA, 33 nt, Homo sapiens
aacacacaaaaagcaccagaggcacagcgacaa

SEQ ID NO: 154108 - RNA, 63 nt, Homo sapiens
cagggaaaccgcagaaagagccagggaggcggcaaccggaaacaagaccgcgcacgggagcgc

SEQ ID NO: 154109 - RNA, 107 nt, Homo sapiens
cgggacaggaggccgacccgggcagaaggcacggccccaagacccagcaaacacaagagcgagcaagccgccgcagcaagccagagaccaaagccacagcaagacaa

SEQ ID NO: 154110 - RNA, 75 nt, Homo sapiens
aggccccgaggcgggagcccaggaaaggcacggagcgcaagagcagggacaacccaccaaacagcggaagggccg

SEQ ID NO: 154111 - RNA, 52 nt, Homo sapiens
aacagacagcgcgcacaaaagaaccgcagccagaagcaaagcagacagacgc

SEQ ID NO: 154112 - RNA, 55 nt, Homo sapiens
ccggccacggaccacacgagcccgacacccccaaagccacccgcgcccaggcgga

SEQ ID NO: 154113 - RNA, 76 nt, Homo sapiens
caagacagcccaaacgccccacgaccagaagaaggaaccagcaaagcgccacgaagcacaagcaagaggaccagcc

SEQ ID NO: 154114 - RNA, 80 nt, Homo sapiens
aagagcgcaagcagaccggacaaggaacaccacacgggggccacagaccggacaccgcacagagcccacaggcggggagc

SEQ ID NO: 154115 - RNA, 70 nt, Homo sapiens
caggcaaaacgaggcgcagcggggaagccgcgcaaccacgccgcagccgaaagaaaaaaacccaccggac

SEQ ID NO: 154116 - RNA, 83 nt, Homo sapiens
gggggacggccggcggcacccgcacccggggacaagcgcgggaacggcgcggaagacacgagaggcgagggacgacagagcaa

SEQ ID NO: 154117 - RNA, 70 nt, Homo sapiens
caccggggaccccgaaccaaacggaggcccacccgacgcggagcgaccggcacgggcggccgacaccacc

SEQ ID NO: 154118 - RNA, 37 nt, Homo sapiens
caacacagacccagagccaaaagccaggaacaccgaa

SEQ ID NO: 154119 - RNA, 65 nt, Homo sapiens
gacgaggaaaaccagaagcgaagcgaaggcagcccacgaccaaagagaagcaccaccgggagaaa

SEQ ID NO: 154120 - RNA, 52 nt, Homo sapiens
ggaggccaaagagcgcagggaaagcagggagccaggagacggaagaccacca

SEQ ID NO: 154121 - RNA, 41 nt, Homo sapiens
gacggaccggacacaccgggcaggagaaacccagcgggccc

SEQ ID NO: 154122 - RNA, 73 nt, Homo sapiens
gagacacaaacgaagagaaacagagaggcgcagaggaccacgcagcaaggcgcacacagggccagaaggaaag

SEQ ID NO: 154123 - RNA, 96 nt, Homo sapiens
ccgcggcggccgggccgggggcgccggaggagggcggcccgccggcgagaggccgaaaggcgccagccaagaacacaccaagccagcaagaacaac

SEQ ID NO: 154124 - RNA, 82 nt, Homo sapiens
gggagccccaggcggcacgagccgaggaaacaggacccgagcgaagccaagccgggcggcaggaaaaaccagaagagaaaaa

SEQ ID NO: 154125 - RNA, 71 nt, Homo sapiens
aagcaagcgagcaggcagcagcaaagagagagcgaacgaagggccgagccgccacaccccgcaccgggaca

SEQ ID NO: 154126 - RNA, 61 nt, Homo sapiens
cacacacacaaaaaacccacacaggacgcggacaagggcggcaggaccccggacccagcga

SEQ ID NO: 154127 - RNA, 62 nt, Homo sapiens
cagcccccagagcgggacacagccacaggaaggaggggcaggaacagcagaggagacggcac

SEQ ID NO: 154128 - RNA, 72 nt, Homo sapiens
acacagaaagagcaaaagacggacggaaccacaaacaaggcgcagaggacggccggagcagcagaacaagag

SEQ ID NO: 154129 - RNA, 80 nt, Homo sapiens
aggcaccgcgccgcacgcgcagaccccccggcggaaggcacacgcacacaccgagaccaaaggacccgggagaccacacc

SEQ ID NO: 154130 - RNA, 61 nt, Homo sapiens
cagaggcaaaaaaaaagcagcaaagaccccaggcaaggaggagacagcaaggaagaagaaa

SEQ ID NO: 154131 - RNA, 37 nt, Homo sapiens
ggaggagggcagcggccggggaccccaaaccagcaaa

SEQ ID NO: 154132 - RNA, 57 nt, Homo sapiens
cgcagcacgaccagcaggaacgaaaagggaaagggaacgcaaacccgagaggaccga

SEQ ID NO: 154133 - RNA, 59 nt, Homo sapiens
gagccaccgagcgcgagccacgcggcaacaagcacaaagaccgaccgacaagaaaagac

SEQ ID NO: 154134 - RNA, 55 nt, Homo sapiens
agagaggcagaagggaggcagaaacacagcgaccgagaggaccagaacagagaag

SEQ ID NO: 154135 - RNA, 80 nt, Homo sapiens
cgggacgccggagaggcaggcgcggcccgcggggcgccaggcacgcgaggcccccagaaacgcagaagaggaagcgagca

SEQ ID NO: 154136 - RNA, 74 nt, Homo sapiens
agccaacgcccggagagacggggaaaagcgcagcaacaggaaaaaagcagaagacaaaaaggaaccgaaggaaa

SEQ ID NO: 154137 - RNA, 69 nt, Homo sapiens
gaaaaacggagggagaaaaagcaagaggaaagcaggcgacacaggaggggagaaccacccaaagaacaa

SEQ ID NO: 154138 - RNA, 71 nt, Homo sapiens
gaacgcaacgcccagggagacccggaaggagacaacaggcacaaagagagaaggaacacccacagggcaga

SEQ ID NO: 154139 - RNA, 70 nt, Homo sapiens
ggaaagcggaagaaagcgaccccgcgggcaaagagaagaaaacaccccagaggggagcccaaaagcacga

SEQ ID NO: 154140 - RNA, 83 nt, Homo sapiens
gaccgaacagaaggaacgacgcggaccagaagccagagcgaggacgccggcagaagcccaccagaggcgaggggaggaggaag

SEQ ID NO: 154141 - RNA, 34 nt, Homo sapiens
aaacagccaccagaagacggagaggccgcccacg

SEQ ID NO: 154142 - RNA, 79 nt, Homo sapiens
ccggagagagcacgaaggacccagcagggcaccaggcaagaacgcgcaacacagcgaccgacgggaccggcgcaagcag

SEQ ID NO: 154143 - RNA, 80 nt, Homo sapiens
agacgacccaagaaccaagggccggcccagggagaacgcaaaaccaccacccccacaaaaaacgcagggagaaaaggacg

SEQ ID NO: 154144 - RNA, 51 nt, Homo sapiens
cacacaaaggcgcccaaaagcccaacgagacaaaaggcacaacaaaccggg

SEQ ID NO: 154145 - RNA, 70 nt, Homo sapiens
aaaaaaaaccaacacaagagccagaacacaaggacagaaaagaggaaaaaacggaccgcaaacacagacg

SEQ ID NO: 154146 - RNA, 63 nt, Homo sapiens
gaccagcccaaggaacaccaccaaaaacaggccgagaaacagacaacccacagaacaaagcgg

SEQ ID NO: 154147 - RNA, 72 nt, Homo sapiens
cggaacaggcaccaagccggcggggcgggcgggggagccaagggagagggaagaaaacaccggcgaaaccaa

SEQ ID NO: 154148 - RNA, 57 nt, Homo sapiens
gacacgagagaagccaaagagaagaaacgaggcccggaggaaggacgccccccagcc

SEQ ID NO: 154149 - RNA, 49 nt, Homo sapiens
gcaccccgggccaggaaacaagggccagcaccccaagccaggccagccc

SEQ ID NO: 154150 - RNA, 55 nt, Homo sapiens
gcccagccagaagccaggagcccggggcagaaaagcacggagaggggaccaagga

SEQ ID NO: 154151 - RNA, 74 nt, Homo sapiens
ggcccacggacaacacgcacccagggggcacccgaggaggaagagggcagggcccacggaaagaagggaaaccc

SEQ ID NO: 154152 - RNA, 73 nt, Homo sapiens
cggcacacaaaagacaaccccagggaaggggcagcacacgacagaccaaagccgcgcccagcaggcgcccagc

SEQ ID NO: 154153 - RNA, 76 nt, Homo sapiens
caggcaaacaaaagaaggcccgggaaggaaagaccacacagggaaacgaccagggagagaccaacaggaaccacag

SEQ ID NO: 154154 - RNA, 61 nt, Homo sapiens
cgcacccagagaacggagaagagccacaacgaccggggcgaggacaagcccaagagacgga

SEQ ID NO: 154155 - RNA, 78 nt, Homo sapiens
aaaaggaggagcccccgggaggaaccgcgcaagccccggggcagagacacaggacacccacccgccggggacagacgc

SEQ ID NO: 154156 - RNA, 55 nt, Homo sapiens
ggacagcgcaggcagcagcaagaaggagaacaagaagcaaaccaagaaagagcag

SEQ ID NO: 154157 - RNA, 115 nt, Homo sapiens
gacacaagcccaccaagcaaagaggcgcccagaaagcagaacaggccaccgggccaacgaaacaaggcgggcggaaagccgccaccccccaccaaagacacggcaagaccacagc

SEQ ID NO: 154158 - RNA, 71 nt, Homo sapiens
gcagggcaaggaaacggccacaagaaagcgcaaagccgacgaggagagaccccgcagcggacaagacagaa

SEQ ID NO: 154159 - RNA, 59 nt, Homo sapiens
cggggccaggcaggacccaacgacaggcgccccggcccaacgaaggcagaacgccaacc

SEQ ID NO: 154160 - RNA, 65 nt, Homo sapiens
gcgagcgggaccagcgccggaggcgccgcaggaaacaaacagaagcgcacgagaacccaggccgc

SEQ ID NO: 154161 - RNA, 62 nt, Homo sapiens
gccccggcgcagaaggccgcgggcgcaccagcggagccggagcgaggcgggggaggcagcag

SEQ ID NO: 154162 - RNA, 70 nt, Homo sapiens
acccacagcgacaccccagaaagagccagagaccaaaaaaccgaagaaggagcccaaacaacccagaggc

SEQ ID NO: 154163 - RNA, 79 nt, Homo sapiens
aaaccagccgaaccagggccaccgcgcaaggccgacccccccaaggacagccgcagccccacgacccaggagaggggcc

SEQ ID NO: 154164 - RNA, 54 nt, Homo sapiens
ccccggcgaacagcaaggcacaaggaccacccagaaaaagaggaagcaccaacg

SEQ ID NO: 154165 - RNA, 78 nt, Homo sapiens
ggaaagaaggaaccccgaccgcagcccccgggcacgaccccggacacgggcaggcaggccgcgggggacccgaggggg

SEQ ID NO: 154166 - RNA, 67 nt, Homo sapiens
aggagccaggacgcagcccggcggacgccggcacagaacggaaagggagcagcaccggccacaccca

SEQ ID NO: 154167 - RNA, 61 nt, Homo sapiens
aaagaggagagcaaaggcagcaagagagcacaggagcaccaacagggacgcagcaacgggc

SEQ ID NO: 154168 - RNA, 78 nt, Homo sapiens
agagaggaggcgcgcgcgcgccgagccgcgggcccgcaggcaaaggaacgaaacccgaaaacccggaaaaacagaaaa

SEQ ID NO: 154169 - RNA, 81 nt, Homo sapiens
gaaaacacgccaacgccgcccaagagagcaagaccgggcccacgagggaccaagaaaggcccagggaccaaagcccggaca

SEQ ID NO: 154170 - RNA, 82 nt, Homo sapiens
cagcggaagaccaaagaggagagaaggacgacaagcccaccgagccgaaagccaccggaacccaccagaggagcaagaacga

SEQ ID NO: 154171 - RNA, 69 nt, Homo sapiens
cgacaaaaccggcgaaccaggggagaagcacgacagcagcaaggcgacagcaacgggaagagacagcaa

SEQ ID NO: 154172 - RNA, 111 nt, Homo sapiens
ggccaaaacgcacagggaaggcacccagaaacgagaagccaaagaaccagacaacagaggaagcgagaacggggcagagacaagccgacaagaaaaaagggaagaccacag

SEQ ID NO: 154173 - RNA, 81 nt, Homo sapiens
ccgggaaccggcacaaggcacgggcacggcggacaggccaaaggcgacaaaaaagccggagccagaaaggaaacaaacagg

SEQ ID NO: 154174 - RNA, 81 nt, Homo sapiens
gacaccacggacgagagacaaacgccgaagcccacagccgaaaagaagaagcaaccccacacccgaaaaaaccccaacaag

SEQ ID NO: 154175 - RNA, 36 nt, Homo sapiens
gaagagagggagacgcaggccaagcagaagaaccag

SEQ ID NO: 154176 - RNA, 77 nt, Homo sapiens
acggaggagaaaaagaacgggaacaagagcaacaagaggccggccagagaaccgggggaccgaagaaaagccacaaa

SEQ ID NO: 154177 - RNA, 72 nt, Homo sapiens
gggacagccaggcagacgccgcgcagagacaagagaacagaaccagaaacaccccacaaagacacacagcca

SEQ ID NO: 154178 - RNA, 59 nt, Homo sapiens
cgaaaaacaggcgccaaagcaggcaccaggagaagcagagaaccccagacacagagcga

SEQ ID NO: 154179 - RNA, 84 nt, Homo sapiens
aagcggaaccacgggagccccgaccgggagaggagagcccccaggggagccggcggaacgggcgacgcacgaggcacacaggaa

SEQ ID NO: 154180 - RNA, 70 nt, Homo sapiens
caaagcagacaaaacagagggacacaacagacggaaggacagaacggaaaagagaaaacaaagccaccaa

SEQ ID NO: 154181 - RNA, 74 nt, Homo sapiens
cgccaaaagacgccccacaaaggcaagcggcacaggcgccagcgaccaaggcccaagggaaagccaaggggcaa

SEQ ID NO: 154182 - RNA, 81 nt, Homo sapiens
acgggccaacccaaaaccagggcggcaaaacgagcgggccagacgcgccaggagagaggggcggagagcccggaaggagag

SEQ ID NO: 154183 - RNA, 83 nt, Homo sapiens
gaaggccaggccagggagacaacggcaagcggagaagagcaaggccgaaccgagaggaagggcaacaacgcgggaagccccaa

SEQ ID NO: 154184 - RNA, 58 nt, Homo sapiens
ggaacggcaaacaggaagggaaaaccagacgagagacagaagacgaaagggcaagaaa

SEQ ID NO: 154185 - RNA, 82 nt, Homo sapiens
aaaggaacccacaacgaagggaagccacggaagaaaggcagcagcccaggagggagcgggaaaggaagagaagacagaagca

SEQ ID NO: 154186 - RNA, 99 nt, Homo sapiens
gaggaggggggcaaggacggcagaggcacccgagagggggacgagacagagcggggcagcagaccgaaaagggcggaaaaggaccaaggcccgcaaaag

SEQ ID NO: 154187 - RNA, 72 nt, Homo sapiens
ccaccacaaaggcccacaacagcggaccaacagcgcacccaacagaaaacacacgcccgcgcgcagaaaaga

SEQ ID NO: 154188 - RNA, 86 nt, Homo sapiens
cgaggaggacaccaggaggaaaagaaaagccaaccaagaccccaaaacggagcgggcgaggcgggaaggagggagggagcgagcca

SEQ ID NO: 154189 - RNA, 83 nt, Homo sapiens
cccgggggaggaaccagggggccgggcagccgcggacccgccaagaagcgcccacgcagcagccgaccggagagcaaggggac

SEQ ID NO: 154190 - RNA, 62 nt, Homo sapiens
gaaacacaaaaccccacgcgcgggaggagacgggcccccccagagagagagcgagagccgcc

SEQ ID NO: 154191 - RNA, 72 nt, Homo sapiens
acgcggccaaacccggaggaggaggacccagagagggaccagggccaaagaagagccggggggcaggcggac

SEQ ID NO: 154192 - RNA, 55 nt, Homo sapiens
aaaacaagacgcgcaaggacaagcacgacagaacgccagggaagaaaaaggccgc

SEQ ID NO: 154193 - RNA, 75 nt, Homo sapiens
cggaaaaggagcaccccaggcgagcagcaggcacaccgcagcaagggagagagaggggcacaacccccacagaaa

SEQ ID NO: 154194 - RNA, 77 nt, Homo sapiens
gaggagcgaagcaacgaaacagccaaaaagcagaggaggagacaggaagagccagggacggagagaaaaacagagag

SEQ ID NO: 154195 - RNA, 57 nt, Homo sapiens
cccgcggccccacggggccccaaacagcagaaaggccccgggacagaggaggaagag

SEQ ID NO: 154196 - RNA, 68 nt, Homo sapiens
cgcccgccgcgggagagaggacccccccccccccccaaggccgccccccccacacaccagcccgcgca

SEQ ID NO: 154197 - RNA, 59 nt, Homo sapiens
aaaacacgggccaacacggcgcgaaagccagggaagagagaaacagcggaaaaaaaagg

SEQ ID NO: 154198 - RNA, 78 nt, Homo sapiens
gcgccagaaggaagaggcggacggaggagcaggcgagaagagaaggagcaggaccagaagcggaaggccagacggagg

SEQ ID NO: 154199 - RNA, 40 nt, Homo sapiens
caccggccaccggcggagcgagcaggaggccacgcgcagc

SEQ ID NO: 154200 - RNA, 79 nt, Homo sapiens
gaccccagcgcccaccgaccccggccaccccccgcggacgccggggagaacccaggacaggggaacccaccagccggac

SEQ ID NO: 154201 - RNA, 58 nt, Homo sapiens
ccgggagcccagggaggcaggaggaacagccggggagcagcaccacaggggccccaca

SEQ ID NO: 154202 - RNA, 73 nt, Homo sapiens
ggcagcaggcccgaggcgaccacccggacggcggcggggcggaggggaggaaggaagcgaggaggaaagagag

SEQ ID NO: 154203 - RNA, 52 nt, Homo sapiens
agcagaagccgaccagagaagaccaaacagacaaacaggcggaagaaagagg

SEQ ID NO: 154204 - RNA, 67 nt, Homo sapiens
accaggagcacagggccgaagcaaaaagcgccagcacaaacaacaggaaagaggagccgccgggccc

SEQ ID NO: 154205 - RNA, 82 nt, Homo sapiens
gggggcggggggccaccgaacgcgcacgccggcagggccggccgcgcacccagacccgagccgccgccgccggccaggaggg

SEQ ID NO: 154206 - RNA, 83 nt, Homo sapiens
gggagcccagcaggagcgggaaaaccgagcgcgggagaagaccgacacaaggacagagcaccaagaccgaagaaacggcacaa

SEQ ID NO: 154207 - RNA, 79 nt, Homo sapiens
caaacaaccaaccgcgcccagccacagcaaaaggacacgcccaagcaagggagccaccaccagaagaggaagcgggggg

SEQ ID NO: 154208 - RNA, 76 nt, Homo sapiens
gcgggcgcggacgaccggagcagagagcggcgagcaagaaccgcacggccaagcccacacagaggaaaccgggaga

SEQ ID NO: 154209 - RNA, 63 nt, Homo sapiens
gcggcgccgcggccgcgcggacggacgccgccgccggcgagggcgggaaggaagagccaaccg

SEQ ID NO: 154210 - RNA, 86 nt, Homo sapiens
gccaccgcagacagcggcaagacaagcacggaaccgcccgagacgccaggcagagcagcccaccagggaggggagggggggaggcg

SEQ ID NO: 154211 - RNA, 68 nt, Homo sapiens
caagggcaccaaagaacacacacaacaacgaagagcaagcccacccaccgggagcacccagacaaacc

SEQ ID NO: 154212 - RNA, 48 nt, Homo sapiens
gacaggacgcgggaccggcagccgacagaggccgggaagaaggaggga

SEQ ID NO: 154213 - RNA, 82 nt, Homo sapiens
gcaacccgccaggcaggccccccggagcggccccgccgcggcccaaccaaaaagaggcaagaccacagggaccagcccacgc

SEQ ID NO: 154214 - RNA, 89 nt, Homo sapiens
gcaaagcaacgagccagcccgaacgaaaacacagaaacccaagaggaggaggaggagagcaacaccagcaaaggcccacgcggcagagg

SEQ ID NO: 154215 - RNA, 78 nt, Homo sapiens
gaagcaggaggcaagaaaggggaaccccggagaaaaggccaagaaggcagacgacgaaaacacaccagacgggagccc

SEQ ID NO: 154216 - RNA, 77 nt, Homo sapiens
ccagggagaaaggcccaccggccgggagggcccagggcggggcccgagaaccagacgccgggcccccagcaggcagc

SEQ ID NO: 154217 - RNA, 77 nt, Homo sapiens
aacaaaggaaagaggaccagacaagcggcaggggcgagcggaccagcgaaaaggaacaacgaagaggaagcaacgaa

SEQ ID NO: 154218 - RNA, 65 nt, Homo sapiens
aacgcaggggggaaaggcccaagggcgacgggaggcacaccgggagggccagacagcaaggaaag

SEQ ID NO: 154219 - RNA, 90 nt, Homo sapiens
gaaaagacagaccgccgacagacagcagccggggcagcccagcggccgcggaaggccaacagaaagggagaagggaagaaagcgcagaca

SEQ ID NO: 154220 - RNA, 54 nt, Homo sapiens
aaagaaaagcgagaccaggcgaaaagaaggaggccagcgggacacacaaagaaa

SEQ ID NO: 154221 - RNA, 118 nt, Homo sapiens
caagcacgagccacagagagagaagaggcagggagcagcaagacaacacgcagagaaccagggagagaacagcacacagaggcgcaaggggaagagaaaagacagaagcaccaaacag

SEQ ID NO: 154222 - RNA, 82 nt, Homo sapiens
caacaggagaacaagaccacgggggcagcgggcccacggcggccagaagaaggggacgggggacaagggggcacaaggagag

SEQ ID NO: 154223 - RNA, 74 nt, Homo sapiens
gaaggggcgcgcggccccgccgccccagcccgccccccgggccgggaggagacgacacccaaccggggaggacc

SEQ ID NO: 154224 - RNA, 78 nt, Homo sapiens
gacccaccgcagaccggcaaagccccaaacaggcgggacagggagcaacaccggagcgggcacgcggggggcagagca

SEQ ID NO: 154225 - RNA, 76 nt, Homo sapiens
gacccggagccacccacaggacccgccaccaaagcaaccgcggcagacccagcccgccgccccaggacaccccgcg

SEQ ID NO: 154226 - RNA, 60 nt, Homo sapiens
aggccaagaaggcaggccaccagcccccgggccaagagcagcacggagacagagccacac

SEQ ID NO: 154227 - RNA, 71 nt, Homo sapiens
ggaggacgcaggacgcacaggagagcaagcgaacaagaggcgccagcgggcgcgccggaagaacagcgcca

SEQ ID NO: 154228 - RNA, 79 nt, Homo sapiens
acgcgggcccgaggcgcaccaagggcgaaggagccggcccaagaacccaggagaaacgagagggacagcaaggaagacg

SEQ ID NO: 154229 - RNA, 73 nt, Homo sapiens
acaccaagaaccgggaaaacaccggagaggcggagagggaagagagaacaacaggggggagaggagagaacca

SEQ ID NO: 154230 - RNA, 69 nt, Homo sapiens
ggcgcgccccacgagggaccgcaggaacaaccgcgaagaaccagcagggagagccggacccgaggagaa

SEQ ID NO: 154231 - RNA, 76 nt, Homo sapiens
acggagagccggcgcacccgaagagcaggcaaggaccccaagaagcaggcagacacaggcccaccaggacgagaga

SEQ ID NO: 154232 - RNA, 77 nt, Homo sapiens
cacccggcaaccagaaacacaggccaagcagcacaaggaaaacgagagaaacgaaggcgagagaaacagcaaggccc

SEQ ID NO: 154233 - RNA, 87 nt, Homo sapiens
agaagagaagaagaagcaggagaacgaaacggagccagagaaggcagaagggcccgcacagccgcggcccggaagggaaacacggac

SEQ ID NO: 154234 - RNA, 75 nt, Homo sapiens
aaggcgcgcccggcgggccggaccaaggagagcgcaaccaacccacgaccgcaacgcaagcagaaaggaggaaaa

SEQ ID NO: 154235 - RNA, 85 nt, Homo sapiens
gccaccgcaccggggagccccgccaccgcaagagccgcagcagcgccccgcaggacgaccccgaccacgggcaagccccgacaac

SEQ ID NO: 154236 - RNA, 79 nt, Homo sapiens
gaaacggcaagaccaaaaaacacaaaccaggcaacaggcagaaaaagaaccagggaaagacaaggagccgggccgagaa

SEQ ID NO: 154237 - RNA, 83 nt, Homo sapiens
cgggccaggccgccgccgagccgaggggaggggcgaccccggggcccggccagcacgaccgaggaggggcggacagcggagga

SEQ ID NO: 154238 - RNA, 80 nt, Homo sapiens
cgcaccccccacgaccaggcggacagaacaagcgagggaggcggcgggcgcaggaccgggggaagggggccagcgggggc

SEQ ID NO: 154239 - RNA, 61 nt, Homo sapiens
cgcggggaaccaaggagacgcccggcacgcaggccagcaacagaagaaagcaagcaccggg

SEQ ID NO: 154240 - RNA, 80 nt, Homo sapiens
caccaggcgcggcggcccagccccgacacaggaaagagaaaggagaccacaagaccccgcgccaccaaagggagggcggc

SEQ ID NO: 154241 - RNA, 76 nt, Homo sapiens
cagcaagcacaccaacaggcaggccccggcgccacagggaaagcaacggcgcaagcggcggcggcgggcagaggac

SEQ ID NO: 154242 - RNA, 71 nt, Homo sapiens
ccagagaagaaagagacacagcccaggacggacaacaccaaccaagaagacaggcggagcaggccagaaac

SEQ ID NO: 154243 - RNA, 67 nt, Homo sapiens
aaggaccaagaaccaggggacaaagccgcgaaaaggaacccacaaacaccacacaagaggaccagca

SEQ ID NO: 154244 - RNA, 73 nt, Homo sapiens
cgaaagccccacccgccgcagcaagcagaggagcccaggagaaacgccaaggccgcagcagcaggacagcaga

SEQ ID NO: 154245 - RNA, 71 nt, Homo sapiens
accagaccccaaagaagccacagaacaggggaggcagccaggaagagacccagacgaagagcgcacagaaa

SEQ ID NO: 154246 - RNA, 83 nt, Homo sapiens
gcggcaaaaaaaaaaaaaaaagccaaaaagaaaaagcccggagaaccagagacagaaagagaaaagggacagagcgaggaaaa

SEQ ID NO: 154247 - RNA, 79 nt, Homo sapiens
accgaccccaggcagcgcagcaaagagagacagcaagcccccaccagagccggcccagagacgaagcccaggaggggcc

SEQ ID NO: 154248 - RNA, 76 nt, Homo sapiens
cgcgccgccgcgccgcgccccgcagccggcggcggagggcccccccgcagcccggccgagcgcaaccgccccgcca

SEQ ID NO: 154249 - RNA, 77 nt, Homo sapiens
gcacgcgcagccaggcgaagacagagggccgacggcgacagagaaaaaaacagggggaagagagaaagacacaaggc

SEQ ID NO: 154250 - RNA, 78 nt, Homo sapiens
gaaggcagggacgccgcccgaaacacccagagaccgaagccgaagcaggacacaaagaaaagacgaaggaagcaacac

SEQ ID NO: 154251 - RNA, 50 nt, Homo sapiens
aaagggcaggcaccagaagacacagccccgaagcgaaagagagccaaccg

SEQ ID NO: 154252 - RNA, 86 nt, Homo sapiens
gaacaggcggcgcgcgcggcgcgggacgcgcgcgggcacccacggagccccggggcggcacacgggcagaccgggcgagcccccca

SEQ ID NO: 154253 - RNA, 65 nt, Homo sapiens
ccaccaggacaaaaaggaaacgagcccagaaaaggaacagcggggaaccacaaaaccaagaaaca

SEQ ID NO: 154254 - RNA, 59 nt, Homo sapiens
cgggcggcgccgccccaccggacccgcagaaagggagcaccagcagggcggaggaaaaa

SEQ ID NO: 154255 - RNA, 73 nt, Homo sapiens
cgaccgaaccgaaccgaggcaaaagaaagggccgagaagaagcggggacggcaaaacagccaacggaacacca

SEQ ID NO: 154256 - RNA, 78 nt, Homo sapiens
gccgcgccagcgacaaacaaggggagggccacagcaggccacgggggagggcgcagaccacagcaccgccacagcggc

SEQ ID NO: 154257 - RNA, 78 nt, Homo sapiens
aacgggcacggggaggaaaggggcagacacacaggaaaaacaggcaaaacaggaagccaggaaaagaaagcgggagag

SEQ ID NO: 154258 - RNA, 62 nt, Homo sapiens
aaaggagggaaaaccagccaaacaggcggacaaaaacacagaacgaagaagggaccagggcc

SEQ ID NO: 154259 - RNA, 67 nt, Homo sapiens
acaaccaagaggagagagcccacaggacgggcagacaacgacgaaagacccacagaagcgcgccggg

SEQ ID NO: 154260 - RNA, 81 nt, Homo sapiens
ggaggggagacccacaggagccccggaccaccgagcacccaggacaccgcacaaagggaccacagaagcccagaaggacaa

SEQ ID NO: 154261 - RNA, 80 nt, Homo sapiens
cggcccgcagcccccgccggccgcccaacaccgaacacccccagggcccacaacggcaggccacagcgggaaaggggagc

SEQ ID NO: 154262 - RNA, 97 nt, Homo sapiens
aggcgcggccggaggaaaccaagacagcccaaacgccccacgaccagggcccacgagcagcgagcgcccccggcccccggccaccaaccacagcccc

SEQ ID NO: 154263 - RNA, 83 nt, Homo sapiens
cagacccaaaaaacaccagcccaaaaccaccgcacgagccgccgagacacgcggacagcagcagcacagcaaagaacccaggc

SEQ ID NO: 154264 - RNA, 81 nt, Homo sapiens
ggccaaaggaacacggaggaaaagcagccaggagcacggggggggccagggagcccggaaggccagaggcagaggcagcag

SEQ ID NO: 154265 - RNA, 80 nt, Homo sapiens
agcccccgaaaggggcccgaggagcacagaaaaagaaccaaagagagcaacaccaaagggaaccggagaggacacagcag

SEQ ID NO: 154266 - RNA, 81 nt, Homo sapiens
ccccggcagcgccgggacaaggccgagacacaaagcggcagggaagggacaacagccaggaaaggaacggagagaaaccca

SEQ ID NO: 154267 - RNA, 86 nt, Homo sapiens
aaaagagcccgcaagaagaacagagacagcagccaaacccccaggggccaagcgacagagaagcgacggaacagaaggagggagaa

SEQ ID NO: 154268 - RNA, 70 nt, Homo sapiens
cgcccagacggagcgagcgagcgggggaggggccggacccccacgaagacggagccgccgcacccaggcg

SEQ ID NO: 154269 - RNA, 88 nt, Homo sapiens
cccggccccagccccaggaccccgagcaggggaggggcgaccccggggcccggccagcacgaccgaggaggggcggacagcggaggag

SEQ ID NO: 154270 - RNA, 83 nt, Homo sapiens
aacgaagcgggaggggcgaaacgaggaggagaaacgcggccgggccgggcggcccagcagggggagacaggaggccaccccac

SEQ ID NO: 154271 - RNA, 71 nt, Homo sapiens
acgagcaacagacgagcgcgccaggccgacagccgcggccgggcccgagggagagcccagagacaagcaaa

SEQ ID NO: 154272 - RNA, 79 nt, Homo sapiens
aaaaagagaggagaagcgcacggcgggccggaacaggacaggcaggggcccgaagaaaggagaacagagcgaggcaccg

SEQ ID NO: 154273 - RNA, 86 nt, Homo sapiens
cacgaggccacccagcccaccaaacacgccggaaaccccgcccacagcacgagcaccagcgagcccagacgacccagggcccaaag

SEQ ID NO: 154274 - RNA, 86 nt, Homo sapiens
gaggcccccggaaggagaagcacgcccggccccgaaaagcaaaggcccacccaggcacagggagaaacaggaagacgaagcccagg

SEQ ID NO: 154275 - RNA, 67 nt, Homo sapiens
aacgccccgaaaagacgggcaacaggaaggcccgccgaaggagaagggcaggaagacccagcaggcc

SEQ ID NO: 154276 - RNA, 82 nt, Homo sapiens
gcagaggagcgagcgggcgccagaagaagcgaaccacgaaagcaagagaacaaagcacgaacaacgacgaagcacaacaagg

SEQ ID NO: 154277 - RNA, 75 nt, Homo sapiens
cccaccagaaccagccacgcgaacgaaaccagaacagaaagggacgggacagcaaaaggcgaccaggacacaaga

SEQ ID NO: 154278 - RNA, 37 nt, Homo sapiens
cgcacgacagcaaaaggaaacagaacgacagcccgca

SEQ ID NO: 154279 - RNA, 56 nt, Homo sapiens
gcgaagacagcgaccccagacgccgcaacggcggacagacaacaggcacaaagaga

SEQ ID NO: 154280 - RNA, 84 nt, Homo sapiens
accaacgaagacaccgagcgaaagagaaagagaccccagccacagcggaggacgaggccaacaaggagcaggaacagaggagga

SEQ ID NO: 154281 - RNA, 39 nt, Homo sapiens
cacacggcagaaaaagaggggaagcgcgcgcggacggag

SEQ ID NO: 154282 - RNA, 70 nt, Homo sapiens
cgaagggaagcgcagaaaggaaaacaaaggagcacaggaaagcgacagcccggggcgagacacaagagag

SEQ ID NO: 154283 - RNA, 46 nt, Homo sapiens
ccaaagcaggaaccaggacacagaaagcaagcacacccaacgaaaa

SEQ ID NO: 154284 - RNA, 78 nt, Homo sapiens
agaagcacgaaagccccacccgccgcagcaagcagagccccaacaccacacaagcaaagcgggccacagagaagagga

SEQ ID NO: 154285 - RNA, 80 nt, Homo sapiens
ccaccgcgggagaacacaaggccagcaccggaaaccccccaggcaagaggcgcaggaccgggaagaccaacaaacgcacc

SEQ ID NO: 154286 - RNA, 76 nt, Homo sapiens
cgaacacaagcaccaccaacagcgagcagacccaccgacgcccccaggcaacggcagccagacacaccaacccaaa

SEQ ID NO: 154287 - RNA, 78 nt, Homo sapiens
gggaccaaccagccggacaacacgcccacccccaccgcagaagggcggggaacacagaggaaggacggcgggggcagg

SEQ ID NO: 154288 - RNA, 83 nt, Homo sapiens
aggccccaaaaggccagcgggaagaagcacagacagcacagagggccaagccagaacaggggaaagccaaggcgagcaggagc

SEQ ID NO: 154289 - RNA, 81 nt, Homo sapiens
cgacaacagccggcgccgccacgcaccggggggaagaagaagggaacaagcggagggacgcacgagaacgaggagcgggca

SEQ ID NO: 154290 - RNA, 63 nt, Homo sapiens
gacaccgcacgcgcacggacggcacagcccgccgaacccgaaaggaggaaccgaggggccgcc

SEQ ID NO: 154291 - RNA, 66 nt, Homo sapiens
gcgaacgcggagagcacgccagaaggcccgggcacggaacgcacaccagcaccagcccaccaaacc

SEQ ID NO: 154292 - RNA, 75 nt, Homo sapiens
cgaagaggaagaaggagaacagcaacagacggcggggccccccgggcaggcagggccacaccaccgagagcagcc

SEQ ID NO: 154293 - RNA, 70 nt, Homo sapiens
caggaaccaccaccacagacccagacaggacccggaggagcacccgaagcaaccacaaagccaggaacaa

SEQ ID NO: 154294 - RNA, 79 nt, Homo sapiens
ccgcgagcagcggacgccggccgccgcaggaggcaaaagcagaccggaaaacccaccggcaagaccacacccgagggga

SEQ ID NO: 154295 - RNA, 79 nt, Homo sapiens
cgcccgccggccgcggccgggaaggcgcagccgggaggggccaaagggagagggacaacacacgagcacaaacacaagc

SEQ ID NO: 154296 - RNA, 55 nt, Homo sapiens
gaggacacgggggccacaaagccccccggagacgcaaccaagcggaaacccagga

SEQ ID NO: 154297 - RNA, 64 nt, Homo sapiens
acggaaagacagggagagggcaccagcaccgggaacagggaaaggaagcagaaacagggggaac

SEQ ID NO: 154298 - RNA, 75 nt, Homo sapiens
cgggcccaagacaaaagacgcaccaaaaaagagggcgaaagcaagaaaaagcgcgaaccgaagaaagacggcaga

SEQ ID NO: 154299 - RNA, 74 nt, Homo sapiens
aagaagcaaacggagaggacacgcccgagcgccgacgcaggaagccacccagagacacaggagccaggaacacc

SEQ ID NO: 154300 - RNA, 81 nt, Homo sapiens
gaccagacggcaggaggccgagcaacaagaaccagacgaggcggcgacggcggcgcgaggaccgaccgggcccgcggacga

SEQ ID NO: 154301 - RNA, 79 nt, Homo sapiens
ccaacaagaccaagcccgcggacgccaggggccagacccacggagcgacagcacaacaagcaaccaagaagcgaaacag

SEQ ID NO: 154302 - RNA, 77 nt, Homo sapiens
gcacccccgcaaagacccaacacacagcaggacagaaggagcaagcgggaaggaaagaaaggagaagaacggaaaaa

SEQ ID NO: 154303 - RNA, 87 nt, Homo sapiens
cgaggcggaagaccgcgcgcagggccgcagcgggagcggacggcgagcgcgagcggcgcgagaaagacccccagaggaccccaacac

SEQ ID NO: 154304 - RNA, 88 nt, Homo sapiens
gcagaggccggaccccagcacacagaagccgagacgccaagagcgaagcaaaccagaagcaaccagccacccgggcggaacaacgacc

SEQ ID NO: 154305 - RNA, 72 nt, Homo sapiens
ccccacgaggcccaaaccgccaaggaagggaccacagcgggcagcccggagcgcacagacaaaccgccagca

SEQ ID NO: 154306 - RNA, 46 nt, Homo sapiens
ggacaccggggccgccgaggcaaagggcaaggcgcagccaccggac

SEQ ID NO: 154307 - RNA, 66 nt, Homo sapiens
cggaaaaaaacgggagggaacaaagcagaaaaagaagaggagggagggcagaaaaacaagccgaga

SEQ ID NO: 154308 - RNA, 103 nt, Homo sapiens
gcaccccggcccacgagcagaccgggccgggcaccaggccacggcacagggagaccgggagccgcccccgccggcgcagcgcaccagacgggcggcggccgcc

SEQ ID NO: 154309 - RNA, 79 nt, Homo sapiens
gcccacccccaacgcgacggaaaggcacgaaagccaggaacacgacacagaccccggccggaacccagggagaccagcc

SEQ ID NO: 154310 - RNA, 60 nt, Homo sapiens
cgcgggcaccggcagaaaggaggaggaaaacacccccaggccggagcgagggagagcagg

SEQ ID NO: 154311 - RNA, 77 nt, Homo sapiens
ccacaagcggccagacccaagaccagcgggccagcggcagaaggaaaccgaacaggaaggccccggaaccacagagc

SEQ ID NO: 154312 - RNA, 52 nt, Homo sapiens
gggaggaacggcccggaaacaggaggacggagcagggagcgcaggcaaggag

SEQ ID NO: 154313 - RNA, 94 nt, Homo sapiens
agggcacgacgcgcaagggcagaagcggaaccaccaggagacaaggaggcgcgcccaccaggaagccggagcacacccggaagcagggggaccg

SEQ ID NO: 154314 - RNA, 118 nt, Homo sapiens
gcgaacgagcaaaggcacgggcagccggaaggacaccaagagcggaccgggccccgaaggacccagaaagagacagaagaagaggaagccaaggggacacaccgcccagcaggaccag

SEQ ID NO: 154315 - RNA, 63 nt, Homo sapiens
gcggcgcgcaaacccgcacagcaaagacaaaccagacacagaccgaccaaaccaaaaccaaca

SEQ ID NO: 154316 - RNA, 65 nt, Homo sapiens
cggacacagaccacgcgggacagaaaagggccgccagacgaagaaacaacgccgaagacccagag

SEQ ID NO: 154317 - RNA, 82 nt, Homo sapiens
agcgcgagacccagccaaagagagcccggagccagcggggaggccgcgccgcgcgcgccggccagggagaccagggggcagg

SEQ ID NO: 154318 - RNA, 74 nt, Homo sapiens
agggcccaacacggacgggaacgacaccgggccagcccgaggggagaggccaagcaacaggcccacccccaccg

SEQ ID NO: 154319 - RNA, 71 nt, Homo sapiens
aacggaaagcgaaggaaagagccaaagagggaagcccaacccagaaagaggacagcagcggacggccggac

SEQ ID NO: 154320 - RNA, 76 nt, Homo sapiens
ggcgagaacgcgcagaccggggagggaaagaaaacaagaggaaaagggagaaccaacaaagagggcaccacgaaac

SEQ ID NO: 154321 - RNA, 66 nt, Homo sapiens
cgacagggaggagggagaacacagcaaccgaccaggaaacacggccagggagcccaccgccagaaa

SEQ ID NO: 154322 - RNA, 79 nt, Homo sapiens
agaacgacccgcccggggcagcagacggaaaaaccgcagcgagcggacgacgcggagggcccggccagcgggacgcggc

SEQ ID NO: 154323 - RNA, 73 nt, Homo sapiens
ccggcaaggaggcaccgcggcagacgggaccacgaggcaacgccccaggaagcgggcaccaacagacaaccag

SEQ ID NO: 154324 - RNA, 79 nt, Homo sapiens
aaaacaacaagagaaggacagcggccaacaagaaggagcgaaaagacagcaaagagagaagaagaacgcaaaagaagag

SEQ ID NO: 154325 - RNA, 67 nt, Homo sapiens
ggacagcccacgggaacaagaggggacagaaaggaacacaagaggacagcgaagccccgccgagcgg

SEQ ID NO: 154326 - RNA, 82 nt, Homo sapiens
cgcggggcgcgcggcgccggcggcgcgcgacccccgcgcagggcggggggacccgagggcaccaaagaaagaacaaagccca

SEQ ID NO: 154327 - RNA, 78 nt, Homo sapiens
agaacggaagaggacaacccccagaaagcgaaccaggcggcgaggagcggaacagaaagaagggcagaccagagcgaa

SEQ ID NO: 154328 - RNA, 74 nt, Homo sapiens
ccgagcggcgcggacgaagaacccaggagaaacgagagggacagcaaggaagacgccagagagcggcacaccgc

SEQ ID NO: 154329 - RNA, 61 nt, Homo sapiens
gacgggaccaggcgaagcggccgagcaggcgagcgaacgacgcaaggggcgaacgccacgg

SEQ ID NO: 154330 - RNA, 74 nt, Homo sapiens
agaccgccacgcccgggcccccgggagccacaggacagggggagggcagaggcgcgcgcagccgacagcgggcc

SEQ ID NO: 154331 - RNA, 77 nt, Homo sapiens
aacaaccaaagaggaagccaccgggaaagcgggaacaacaccgccaagcgaccggacagaagacagaccgacagacg

SEQ ID NO: 154332 - RNA, 78 nt, Homo sapiens
gaacccaggccggccggagaaggagcaaaaacggagcaaaaggacaggcccaacgcacaaccaccacaggccggcgca

SEQ ID NO: 154333 - RNA, 61 nt, Homo sapiens
cagcaggagagcaccaacagggcgcgcagcccgagccaaaaagcaccacccccaaccggga

SEQ ID NO: 154334 - RNA, 62 nt, Homo sapiens
cagaaacaaaagcaacaaagagggcggccagcaaacagggaccagcacggcaggggccacac

SEQ ID NO: 154335 - RNA, 63 nt, Homo sapiens
gggggggcccgcagaggaagaaaagggaaccagcggagcgggacaacgcagcaacggcgccca

SEQ ID NO: 154336 - RNA, 56 nt, Homo sapiens
ccaggaaaaccaccaaaacaaccagcgccccaggaccaggcacagacaccacgaac

SEQ ID NO: 154337 - RNA, 77 nt, Homo sapiens
gcgcgcgcgcgcggccccgacgccggcaggcggggccgcgccacccgcaaacagggcaggggaggcagggcggaccg

SEQ ID NO: 154338 - RNA, 68 nt, Homo sapiens
ccgagaagcggggcaccacgaaggaccgaagaggcgaagaaacgggaacaaagacaagaaggagaaca

SEQ ID NO: 154339 - RNA, 65 nt, Homo sapiens
aaaagaaagacaaggacaagaaggaagccccgcgacagggagcacacagggaggcagcgcgagga

SEQ ID NO: 154340 - RNA, 81 nt, Homo sapiens
cgaagcgaacaaaaagcagcaaaccggaccaccccgaagaaagcacagaaacagccagcaacagaaggagcccagccaccc

SEQ ID NO: 154341 - RNA, 77 nt, Homo sapiens
ccagccccgagaagcgggaacaggcgacccaaaggcagaggagagaaaacaaggagaaccgcaacaggccggaaaca

SEQ ID NO: 154342 - RNA, 79 nt, Homo sapiens
aaaagcagccggagacaggcgagaggaagacgacgaggaagagcccgccgaagggacacaagggcgcaaccaaagcacc

SEQ ID NO: 154343 - RNA, 75 nt, Homo sapiens
gacaagaacggcggacccgggggaaaccgcaaaagccaaaacgacacagggggagcagacaaaaggcaacacaga

SEQ ID NO: 154344 - RNA, 76 nt, Homo sapiens
acgaaagaaaacacacacacacaagcaacaccaccgagaacggggaaaaagacggccgacacaagccgggggccgg

SEQ ID NO: 154345 - RNA, 64 nt, Homo sapiens
gcgagaaccaaacgaacacagaggccgggccaggaccgaaaggcggcaaagcggaacccccacc

SEQ ID NO: 154346 - RNA, 70 nt, Homo sapiens
ccacaaaagcgaaagggcacaccacaggggaggggacagacagaaggagaggaggaccgcaagagaaaaa

SEQ ID NO: 154347 - RNA, 86 nt, Homo sapiens
agaggggacacacagcagagaaaccggggcaaccggaggagacagacgacgggaggaccagaacaccagaagcagccgaaacgaac

SEQ ID NO: 154348 - RNA, 83 nt, Homo sapiens
cggggcccaaccacaagacgaccaaaggaggaaggggacccaccggaaccgaggaagggaaacaggcgagcagggacgacgag

SEQ ID NO: 154349 - RNA, 86 nt, Homo sapiens
cggaaaggcgcaggcagagaaggacgagacgagaccgggacggaagacggcaaagacgagaccgagaacggaagaggagaagagag

SEQ ID NO: 154350 - RNA, 73 nt, Homo sapiens
aaagcaaacaaggcgggaagaagagggcaaaacccaggacccacagcgcaccagaaagccggaggaaacaaga

SEQ ID NO: 154351 - RNA, 73 nt, Homo sapiens
ggaaggacgaggaagggacgaacaggaagcggacgcgcagcggaacagcggccaaggggaccccagcggaaca

SEQ ID NO: 154352 - RNA, 78 nt, Homo sapiens
cgccacggaccgcaagccaaggcagaagcaaagaagcgcggcagcaaacggggagaggcaccagcaacagaccaaccg

SEQ ID NO: 154353 - RNA, 70 nt, Homo sapiens
gaaaccacaaggacccaggcgccccccccaacccaacggcaccaaggaagagagaagggaaaccaaagga

SEQ ID NO: 154354 - RNA, 75 nt, Homo sapiens
gcaagggccccagaaaacgggacaaaccaggggaagaaagcaccgggaggaaagagagccacacgaagaacacgg

SEQ ID NO: 154355 - RNA, 60 nt, Homo sapiens
ggaggagaggaagccccccaagagaaccaggggagccacagcggggagccggaggaggca

SEQ ID NO: 154356 - RNA, 53 nt, Homo sapiens
ggagaagaccgaagcgcaggaaccgccgaccagccagaaggaaagaacaaaaa

SEQ ID NO: 154357 - RNA, 56 nt, Homo sapiens
aagccggccgcaacggccaaagaagagacaccgaacacacgcacagcgacaaggac

SEQ ID NO: 154358 - RNA, 76 nt, Homo sapiens
cgagcacgccgcgcagcccggccgccggcccccaacagcgccgaggaccacccgcacccaggggacgcacggccca

SEQ ID NO: 154359 - RNA, 68 nt, Homo sapiens
aaagaaacgcagaaccaagacacaggcggagccagaaagcgcaagaaccagcccgcacggcaaagcaa

SEQ ID NO: 154360 - RNA, 80 nt, Homo sapiens
ccgcccagcgacccgccgccgcagacaacagggagaccccacgggacaccagcccaccggccgaggcggggccgaagaag

SEQ ID NO: 154361 - RNA, 83 nt, Homo sapiens
ccccgaggccccgaccgcggcggagcccgacccacccaagaggacggcgggcccggaaggaacgcccggaaggccgcggaaac

SEQ ID NO: 154362 - RNA, 71 nt, Homo sapiens
cagcagaaaaaaggggccaccccaggaggaagacccaaaggaagacccgcaggcgagaagggcaaagcaga

SEQ ID NO: 154363 - RNA, 78 nt, Homo sapiens
ccagcagacagccgaggggagcgcggggcccggcagaaagaaaagaaacgaagccgggcacggacaggacagagaaag

SEQ ID NO: 154364 - RNA, 74 nt, Homo sapiens
agggcgccaacacgaaaagccagccgccagcagagacacaggaagcgaccgggaggaagaggagacgggagcgg

SEQ ID NO: 154365 - RNA, 71 nt, Homo sapiens
gaaaaagcagccagagcacacaaacggaggaaccaaggaacaggaaagaacgaccccgggggccaacaaag

SEQ ID NO: 154366 - RNA, 59 nt, Homo sapiens
gagagacaaaaaagcagcccccagccaaggaggggaggacaaaaccaacaacaagccac

SEQ ID NO: 154367 - RNA, 76 nt, Homo sapiens
gcggccgcgcgccgccggcgaaggaggaggcggccggaaaacccaagagaccaacaaaagacaaacaaaagcacac

SEQ ID NO: 154368 - RNA, 71 nt, Homo sapiens
gacagcccccacccgcaagagcagccgcggcgccacaaaaggggaagaaggccaaccgggggccaaggggg

SEQ ID NO: 154369 - RNA, 79 nt, Homo sapiens
acccaaccgggcaggcgagacgcagaggagccaggacaaaaccaggcagaaccaacacgaacccaagcacaaacaagaa

SEQ ID NO: 154370 - RNA, 74 nt, Homo sapiens
gccgacaggccaagagcagcaggaaaccccccaggcaagaggcgcaggaccgggaagaccaacaaacgcaccgc

SEQ ID NO: 154371 - RNA, 65 nt, Homo sapiens
gcgaaccgcccgggcacgcccccacacggggcgcacaaaagagcacaaaagcaccaaggcgcaca

SEQ ID NO: 154372 - RNA, 69 nt, Homo sapiens
cagcgcaagaggagccaagcaaacagaagcgcggccaagcgggccccccagagggccccaccgcgccag

SEQ ID NO: 154373 - RNA, 54 nt, Homo sapiens
ggaggggcagccacccccgggcgcccagagaaggaaaagaagcaaggccgcggg

SEQ ID NO: 154374 - RNA, 57 nt, Homo sapiens
gggcgaacgcacagccaaaacggcaaagagaggggaaaggagaaaggaccgcacaga

SEQ ID NO: 154375 - RNA, 77 nt, Homo sapiens
gggaccaagcccaaagaggagaaagagccaagggaggcacagcagaaagagacaagcagaaccgagaaacgaaaaag

SEQ ID NO: 154376 - RNA, 65 nt, Homo sapiens
acccgcgacaccgcgagggacaaagaccgaaaaaggccgagcccacagagaggaagaacccacaa

SEQ ID NO: 154377 - RNA, 81 nt, Homo sapiens
ggaagaggcggacggcgggaccacaagacaacgcggagcggcgaagagcaaccaggaaaccccccaggcaagaggcgcagg

SEQ ID NO: 154378 - RNA, 81 nt, Homo sapiens
agagcagcggacacccagaaggggcccgcagggacgaaagcggcccaaagcaccaggggacacccgccaggagagcccgag

SEQ ID NO: 154379 - RNA, 85 nt, Homo sapiens
acagaggcaccaaggaccccaagacaggacaccaggggggaaaaaccacacaggcaaagaacgcgcaaaacaggacgaaaacaaa

SEQ ID NO: 154380 - RNA, 74 nt, Homo sapiens
gaaaacaccagccggcccaagcgggcccccgggcccaacgaaccgaagagaaaaggccaccaggaaacccaaaa

SEQ ID NO: 154381 - RNA, 63 nt, Homo sapiens
ggcggcgggccggacccggcagcagaaggggaaaggagagagaaccgaaagagccccaaaccg

SEQ ID NO: 154382 - RNA, 83 nt, Homo sapiens
ggcgcgccgcggcgcccaacccaggccccgaagcaagccccgaaaaggccaacccccaaggagcgaacgcagggccccacacc

SEQ ID NO: 154383 - RNA, 74 nt, Homo sapiens
ggccggaggagccagagcgcagaaagagccaaagcagccgaaggaagaaaggacacgagaagagcaggcaagag

SEQ ID NO: 154384 - RNA, 72 nt, Homo sapiens
cggaaagagcgccccagaccacccgacagaccagaaaccacccagagcaaagaaggagaaccagccaaaaaa

SEQ ID NO: 154385 - RNA, 62 nt, Homo sapiens
agagagggggggaccgaccgcaacagaacggacccggcaaaaggccaaaacggaagaacccc

SEQ ID NO: 154386 - RNA, 77 nt, Homo sapiens
agccgaagccggagggccacccgacgcagagggcaggccccagccagaagccgggacacgcccgcacaccaaagagc

SEQ ID NO: 154387 - RNA, 79 nt, Homo sapiens
acccacaaaagacgggcgagccagcccccacccagaggagaacgaaaccacgacaaccagcgcccaccaccaggagacg

SEQ ID NO: 154388 - RNA, 58 nt, Homo sapiens
gccaacccaccaggagagggacagcgccaagaaagggacgaaacaacaacaggcccac

SEQ ID NO: 154389 - RNA, 71 nt, Homo sapiens
ccgaccgagacgggcggagaggagaagggcaagaaacacggcagggcagagagcgaaacgcgaagagccgc

SEQ ID NO: 154390 - RNA, 67 nt, Homo sapiens
aacagaacaggcccaggggcaaccaggcagacccgaccccagcgacgggacagccggagggggcagc

SEQ ID NO: 154391 - RNA, 75 nt, Homo sapiens
gcgggcgcgggaagcaaggaaagaggagagggaaaagcccagccaaccagaaaaaaaggaaaccgaagccagaaa

SEQ ID NO: 154392 - RNA, 74 nt, Homo sapiens
aggcagcagcgaccagaaagaggagcaacaggacccaaagacaggaccacgcaccagcagagaaggaaagcaaa

SEQ ID NO: 154393 - RNA, 57 nt, Homo sapiens
aagcacgaggccggcaccaaggcagaaaacacgggaagacacacaggacacagagaa

SEQ ID NO: 154394 - RNA, 67 nt, Homo sapiens
caacagaagaaaaacccggcaaacagccgaggggcccgaagcaggcgcccccagcaggccaggaaga

SEQ ID NO: 154395 - RNA, 81 nt, Homo sapiens
caaaccgcacgacacaggaaaggacaaaaccagaagcagggagagaggagcgagaggaagcggaagaaaaccaacaaagga

SEQ ID NO: 154396 - RNA, 77 nt, Homo sapiens
cgagacagacagcaacgaaggggcaacaccccggaaacacgacaagccaaagcaagagaccaagacacaccacccca

SEQ ID NO: 154397 - RNA, 82 nt, Homo sapiens
cagccacggacaccaggcaggccagagcagcaccaggccagagccagaacaggaaagccaccaggggggggcgagccgggac

SEQ ID NO: 154398 - RNA, 69 nt, Homo sapiens
gggcagggacagcgcaggcagcaggaacagagacgcaggcaagagcgcggaggagagagccaaaagaag

SEQ ID NO: 154399 - RNA, 81 nt, Homo sapiens
agaaaccgcgggcgggagaggcggcggacgggccggagggaggagaaagccccgcggaaagaccacagcaagaccacgccc

SEQ ID NO: 154400 - RNA, 82 nt, Homo sapiens
ccgaggcgcggcggcgagaagacagggagccacccagcggggagcacggacaaggagacaaacgcccagcagccgcgccgcg

SEQ ID NO: 154401 - RNA, 79 nt, Homo sapiens
ccgcccgaacacacaccgaccacaaagcaagccagaagaacacacacacagcacaggaagaaaggaggcgggagaagga

SEQ ID NO: 154402 - RNA, 37 nt, Homo sapiens
gacgggaccgaaagacaacaccgagagagaagaaggc

SEQ ID NO: 154403 - RNA, 61 nt, Homo sapiens
ccaggcggaacgcccgccccgcagagaggcccgaggccaggcaggacggggacgcgcgcgg

SEQ ID NO: 154404 - RNA, 56 nt, Homo sapiens
agcgagccaagcgacgggcagcgacgaccagaaccggcgcaacaccccagccaaag

SEQ ID NO: 154405 - RNA, 74 nt, Homo sapiens
ggccgggcccgaaccacgaccccgccgcggcccccgcaaaacaagagggaaagggccccaagagccgggcggaa

SEQ ID NO: 154406 - RNA, 74 nt, Homo sapiens
cacgagagacccaacaggggcagagagaagagcacacagaaggccaggagcgacagagcggggaacacgagaca

SEQ ID NO: 154407 - RNA, 78 nt, Homo sapiens
aggcacccagcagagacagcaaccggccacgaggagggacgaccaaagcaaaaaaaaggccagaggacaggccgagag

SEQ ID NO: 154408 - RNA, 37 nt, Homo sapiens
gacacgacacacggccgcagcaggcgcaaaaacgaac

SEQ ID NO: 154409 - RNA, 75 nt, Homo sapiens
cccgcggagacagacaagacaagaccggcggggaagcgggaaaaaagcccggcgagcgacggaagcccacagaac

SEQ ID NO: 154410 - RNA, 78 nt, Homo sapiens
gaacgaacaggaaagaaaaggcaaaaacagaagagaacaaccgggaccgccgcccccaaagcgacaaaagaagcgaag

SEQ ID NO: 154411 - RNA, 72 nt, Homo sapiens
ccggagacacacgccagggggggcgccagcgggacgacaaacagcaaaggggggacaaacacgaaagggccc

SEQ ID NO: 154412 - RNA, 79 nt, Homo sapiens
cgccgcacccgcccccagggcggaacagaacgacaggagaacagaccagagcgaagaacaggaccacccaggcaaccac

SEQ ID NO: 154413 - RNA, 75 nt, Homo sapiens
gcgcggagggccgagggagggccgagccagccgcggccggaggagcccccaggccgaagacgacccgggcccacc

SEQ ID NO: 154414 - RNA, 81 nt, Homo sapiens
cagaagcaagggacaagggccacacccccaggcaggagcagcaggacagaggggcaagccaccgggcgaaagccgcagcag

SEQ ID NO: 154415 - RNA, 84 nt, Homo sapiens
accccagcagcaagagcagcagcccagcaacccagcagcccggccccccgcagcgaccccgggccgggcccagcgcccgaccag

SEQ ID NO: 154416 - RNA, 69 nt, Homo sapiens
accgcgacacgagcagcgcagggaagcaagagcaagacgagcgggagcaagacccgacagacgcaagaa

SEQ ID NO: 154417 - RNA, 76 nt, Homo sapiens
ggccgacccacccggcggaggaacggggcccgcccgcggcccccgcgcggaggacaccagagaggagcgcggccca

SEQ ID NO: 154418 - RNA, 76 nt, Homo sapiens
aagacggggcgggagccggcagccgacggcaaagggcgggggcaaagcggagaccgggggagagccagcaaccgga

SEQ ID NO: 154419 - RNA, 76 nt, Homo sapiens
gcccagccccggaaaggggcaggaacgacaaaccaaagccagggccggagcgagggagagcaggaacacagagagg

SEQ ID NO: 154420 - RNA, 74 nt, Homo sapiens
ccagggagaaccacaacaacaggagcggagccccaacaaagccaaagccacccccaaaggcagaggaagaacga

SEQ ID NO: 154421 - RNA, 74 nt, Homo sapiens
acaaagcaggccgcgaggacccacaagaaccgagaggaccaacaccgcagacgaagaaagaacgacaggcagac

SEQ ID NO: 154422 - RNA, 78 nt, Homo sapiens
agggaacaaggagaagcaaagaggaaggaagagagaaggccacgcccgaccccaagcaacaacggggcagggacaggc

SEQ ID NO: 154423 - RNA, 85 nt, Homo sapiens
accagaacaaaaccgagcaacagggaagcagaggagaaccgggagccacagaaaagccccagaggacgacacaaaggggggagag

SEQ ID NO: 154424 - RNA, 75 nt, Homo sapiens
cggggcgaacccgagaggaggggaccagaacggaacaggccggcggccccaccccccagacaacaggcacaaaga

SEQ ID NO: 154425 - RNA, 60 nt, Homo sapiens
cagacccagacggagagggacaaagcaggcggcacaaccaggggccagaccccggaaccc

SEQ ID NO: 154426 - RNA, 53 nt, Homo sapiens
ccccgaccccgaggcgagacggaaaggcacgcagcacgggggcaggggccgac

SEQ ID NO: 154427 - RNA, 75 nt, Homo sapiens
ccgcccagaaacgcgggagagagagcaccgcagagagagccaaaccggcgccaagccccaacacaggccaaggac

SEQ ID NO: 154428 - RNA, 76 nt, Homo sapiens
ccgcacagggccagcacccccccaacagaaaacggccggaacgcgggacggagggacagagacagagcaccaggcc

SEQ ID NO: 154429 - RNA, 58 nt, Homo sapiens
aagacgccacaggccggcaacgccagaccaggccccaagagaccggacacaaccaccc

SEQ ID NO: 154430 - RNA, 34 nt, Homo sapiens
cccgagagcgggacacagagagaaccccacccaa

SEQ ID NO: 154431 - RNA, 72 nt, Homo sapiens
ggcggagcccggccaccagcgggggcacgagggagaggccgagaagaaacagggaacggagcccgcaagaag

SEQ ID NO: 154432 - RNA, 78 nt, Homo sapiens
cggaagagcaagggaggagccggaccggaaccagggcaagaaggaacagacaaaaacggccggaaggaaacacaggac

SEQ ID NO: 154433 - RNA, 73 nt, Homo sapiens
caagagaggaccccgaagcggaagggcgagcaaggcaaccagcaagaacaggccacgccagcaagcgcgaaac

SEQ ID NO: 154434 - RNA, 78 nt, Homo sapiens
gacgacaacacacgggacgcggccaaacacgagaggcgagggacgacagagcaagcggcagagggcaagcgggaaaaa

SEQ ID NO: 154435 - RNA, 76 nt, Homo sapiens
aaaacaaccccggggccacaaagcgagcgaggagccacgaggaaccaaaagaacagaagagaagaaccacccacag

SEQ ID NO: 154436 - RNA, 95 nt, Homo sapiens
gcggacccccgcgaccgcgcggaccagggcgacaaagggacccgggaagaagagaaagccgaaaaagacaaggggaggacagcggaaaaaccgga

SEQ ID NO: 154437 - RNA, 77 nt, Homo sapiens
ccggcgacaacacccggccccgagacagaagccggaccgaagaggggcgccggagaggagacgagccacgagaggac

SEQ ID NO: 154438 - RNA, 79 nt, Homo sapiens
gaccagcccgccgcccgacggcccccgacgcagcgcaccagggcacaagagacaagccccggcagaggcagcgcgagaa

SEQ ID NO: 154439 - RNA, 70 nt, Homo sapiens
ccagagcggaccggggcagaccaaacggcaaggcccacaaccggcccggagaaggaggcagagccgaggc

SEQ ID NO: 154440 - RNA, 74 nt, Homo sapiens
ggcccaagacccacaacaaaaggggaacacccaggcaggccgaagccggcagcaaggcgcggcgaggcggggcc

SEQ ID NO: 154441 - RNA, 59 nt, Homo sapiens
gcagaagcaaggacaaggcagagagagagaaccggaaagaagacggaaaagccaggcgg

SEQ ID NO: 154442 - RNA, 71 nt, Homo sapiens
cgcggggagccgccggagcgagaagccccagcccccggcagaacaccacacccagaccggcggcccgcagg

SEQ ID NO: 154443 - RNA, 77 nt, Homo sapiens
cagacccgggcagcaccagaacacaaaagaacccaccaaaccaacacccagccaaggggcaggagagaagggagcga

SEQ ID NO: 154444 - RNA, 58 nt, Homo sapiens
cgaaaaagacaacagaccaaagggccagaaggaagccccaacagaggacacagaaccg

SEQ ID NO: 154445 - RNA, 80 nt, Homo sapiens
cgagacaccgcccagcggcagaggccaggcgaggacgggcaccacaaggcaaacaccagaggccgaagcaacgaagacca

SEQ ID NO: 154446 - RNA, 75 nt, Homo sapiens
acagagcaaaacaaaagggaccgacggaacgcacaggcgccccggcaaggccaccgcagaagccacaggagaccg

SEQ ID NO: 154447 - RNA, 72 nt, Homo sapiens
cagcaaggcaggacaacacaggggggggggggagcaggaagcggcgcgggcccccccacccccaagaaccca

SEQ ID NO: 154448 - RNA, 64 nt, Homo sapiens
ccagcagcgacaacaggaagcaagacacaggacaaagagagaaaaggaacagccgaagccaggg

SEQ ID NO: 154449 - RNA, 79 nt, Homo sapiens
ggcccagcaggcagggccggccaaagcaagacagccgacaaccccggaacgcgggcaaaaggccccaggggaccggggg

SEQ ID NO: 154450 - RNA, 70 nt, Homo sapiens
agcccccacgagaacaggaacagaagaaacggaaaggcagggcgggcgccacggaaaggagggcggccag

SEQ ID NO: 154451 - RNA, 79 nt, Homo sapiens
cccgccaagagagccccggacaccgcgcggcggcccagggcggagaacggaaaagcaccaggaagcagagaggaccgca

SEQ ID NO: 154452 - RNA, 67 nt, Homo sapiens
cggcccagccccagcggcagacggaaacgacagaagcagagcacccgacagcacacagccgagcagg

SEQ ID NO: 154453 - RNA, 84 nt, Homo sapiens
gcgggcgccgggccaggacggaagcccagaggcccaccccacgggaggaaggcgaggccaagaccccggaagagaggaccgcgg

SEQ ID NO: 154454 - RNA, 83 nt, Homo sapiens
aaagcccacagccaaagccgggcggacgcggaggagcagcccccacaacacgaccaagagggggggccaggggcggcgggcac

SEQ ID NO: 154455 - RNA, 80 nt, Homo sapiens
gcacagcccaagaagaaggggacaaagaccaagccaccaacgacacagggaaggaagacgagcgagcggagaaagaagag

SEQ ID NO: 154456 - RNA, 74 nt, Homo sapiens
cgaaggcgagccaggagagacggcgaaggccagcgaggcccgccaagcccccagccggcacacccagaccgaca

SEQ ID NO: 154457 - RNA, 70 nt, Homo sapiens
aggggagccacaggagagcgcccaggaagaacaagcgggggaacggagggaaacgacccgaccaccacaa

SEQ ID NO: 154458 - RNA, 70 nt, Homo sapiens
gcacacaacccgaaggcgaacacagaggaaaccgcaccgcccggaggggacaccaaaaggagcacgcaac

SEQ ID NO: 154459 - RNA, 60 nt, Homo sapiens
caacccccgcgccgaccgggcccgggcggaagggagcgcgcacgcgagaaggggaggggg

SEQ ID NO: 154460 - RNA, 54 nt, Homo sapiens
accaccgagcaccagaacaggagcccacccagcagaagcacaaggaccgaggaa

SEQ ID NO: 154461 - RNA, 106 nt, Homo sapiens
ccggccgccagaccacagcacagccgggaaggggagccaccagccccccgcccagaggcaggcgaaccgcagaagcgcccagagaaggacgcccaagaggcggcga

SEQ ID NO: 154462 - RNA, 73 nt, Homo sapiens
gcaaacccaaggcccaaaacccacagaaggaagagagacagagaagacgcagacgagaggaccgccgaagagc

SEQ ID NO: 154463 - RNA, 74 nt, Homo sapiens
aagcacccacgagccccggaaaacgccggagagagcggaagcccggggacgcccccaggggagcgaacgaagaa

SEQ ID NO: 154464 - RNA, 88 nt, Homo sapiens
cccggacgggacgggggcggcggcggggccccggacccgcggcgcacaccccgcccagcgcagaggacgcaagaggaggaaggcggga

SEQ ID NO: 154465 - RNA, 56 nt, Homo sapiens
gaaagaaacacccgaacagcgacgcgcaagaaacacgcgagcgagcggcaaagagg

SEQ ID NO: 154466 - RNA, 84 nt, Homo sapiens
gcacaaccacccacccccgagacagaagaaagggagcgggcggcgcgcagagcagaaccacaagggacacgccgccacacaaca

SEQ ID NO: 154467 - RNA, 58 nt, Homo sapiens
cgaaggagccgggagaagacaggcggccaaacagcaccacacccgacccggggacaac

SEQ ID NO: 154468 - RNA, 73 nt, Homo sapiens
caggcggaaaacggcggccaacaccagggaccagcaaagagagggccaagaacccggaggagggcagccggac

SEQ ID NO: 154469 - RNA, 76 nt, Homo sapiens
acccagagggcaagaacaccccaggacaaaccaggcggacaaagagccaggcggagaacggaaaagcaccaggaag

SEQ ID NO: 154470 - RNA, 70 nt, Homo sapiens
agaggcccaaagaggcgcaagagagaggagggggcaccgagcaacgagggcagcccaccacaaaccaaac

SEQ ID NO: 154471 - RNA, 57 nt, Homo sapiens
ggagccccggggaacccgcagcacaccagggggcaggcccgagggaggaaccgaaag

SEQ ID NO: 154472 - RNA, 79 nt, Homo sapiens
ggaacagacacggggaagcgcaaaaacaagacggggcgccccacagaggggcgacgagagaaggcagaaacaaaaaagg

SEQ ID NO: 154473 - RNA, 63 nt, Homo sapiens
ggccaccgcgccccgcccacagggcccgaaagaggacacccagcagcaaagcggccaagagaa

SEQ ID NO: 154474 - RNA, 79 nt, Homo sapiens
aaaagcaggacacaagacacaagaaggaaaggggaggacagcccaggaaacccgcagggaggagggacacacgacaggc

SEQ ID NO: 154475 - RNA, 74 nt, Homo sapiens
gaagcggaagcgagccacgaaacacaaggaaagcgacgacgaagcaaggcaaaacagcaaagaacaacagcagc

SEQ ID NO: 154476 - RNA, 62 nt, Homo sapiens
aacccagcacggaggccgagcgagaaggagccgaggccggcccacacgaaggagaggagacc

SEQ ID NO: 154477 - RNA, 81 nt, Homo sapiens
gccgggcaagcgcggagagggagacaaggcgcccgccccccaaagcgaagccaaagcgaaggcaaaggccaagaaggcagg

SEQ ID NO: 154478 - RNA, 58 nt, Homo sapiens
cacccaggaccaccagaacggggaaaggggcggaaaaacagggcgccaaaaacagagc

SEQ ID NO: 154479 - RNA, 58 nt, Homo sapiens
ggaggaaaagggcagggacagcgcaggcagcagccaagggaagaagcagaagcaagcc

SEQ ID NO: 154480 - RNA, 83 nt, Homo sapiens
ggacacggcgagcgcaggaggggccaggaaccgggcaccccgggccaggacgccgaggagggcagaaaagcacggagagggga

SEQ ID NO: 154481 - RNA, 84 nt, Homo sapiens
cgggggggcgcgcgcgggggaggagaggagcggccggcccgccgagcggacccaggggagccgcgacgacccaacaccaagcgg

SEQ ID NO: 154482 - RNA, 75 nt, Homo sapiens
gagcccgagccacgcagggaaagggagcagcaccggccacacccacagcacgaccggaacccagcgaccgacgcc

SEQ ID NO: 154483 - RNA, 79 nt, Homo sapiens
gggggaccgaccgcaacagaacggacccgcaccaggagacaaagccacaaaaacaccagaaaaaccaagcagaaaagga

SEQ ID NO: 154484 - RNA, 75 nt, Homo sapiens
gcgcccacggccgcgaccggccggagggggaagacagagaagaccacacaaccgaaggggccgggcaggacggcc

SEQ ID NO: 154485 - RNA, 67 nt, Homo sapiens
agcagaaacacaacgggaggcgagggaccagccggaagggcacgacgagccaccgcacccggacccc

SEQ ID NO: 154486 - RNA, 82 nt, Homo sapiens
cagaagccgggaacagcgaaaaaggggacacggaaagcaccaaaaccaggaggacccaccgcggccagcggccccagggcga

SEQ ID NO: 154487 - RNA, 114 nt, Homo sapiens
aaccagagccaagaacgcggggacaaccaagacacaccaacacaagacggccccgcacgaggcaagacaacacagaggagacgagaaagaccagaagaaaagaagccgacacaa

SEQ ID NO: 154488 - RNA, 50 nt, Homo sapiens
aagagagggaacacgcaggagggaaagcagcagaagcacgacgcccaaca

SEQ ID NO: 154489 - RNA, 68 nt, Homo sapiens
gaagcccagcgggccggacggggcggggggaacggcgggcacaaaccgaagaggacaaggagagaagc

SEQ ID NO: 154490 - RNA, 84 nt, Homo sapiens
gcgcgccacggcggccggacggggagaacagagccaccggggaccgcaaggccgcggggcccaacaaggcaagacacagcgggg

SEQ ID NO: 154491 - RNA, 78 nt, Homo sapiens
aaaagggccgaaagcagaagaaaagggacgcaagaaacccaggacgagaacagcaacaggccacaagggcagaggaga

SEQ ID NO: 154492 - RNA, 64 nt, Homo sapiens
cccagcgcaaaggaagaggaagagaagacggcccagcagagcacccaaccagcgggaacacagc

SEQ ID NO: 154493 - RNA, 76 nt, Homo sapiens
cgagaccgcaccgcacggcggagcccgcacgcggcgggcaggaggacagcacaaaaacacaccaagagagcgcgac

SEQ ID NO: 154494 - RNA, 72 nt, Homo sapiens
ggcccagcagcagcgaaacagggcccacccagaaaacacgaaggagaagcggaaggaaaagccccaggaaga

SEQ ID NO: 154495 - RNA, 84 nt, Homo sapiens
ggccggcccccgccaaccgaccggccaacgacgccccaaggcgccaaggaggggacccccaggggggggacaggaggacacccc

SEQ ID NO: 154496 - RNA, 79 nt, Homo sapiens
ccgaaggcgggaagggaagcggccaaggcacggaggccgcggacaccccgggccaagaggacaacaagaagcgccggcc

SEQ ID NO: 154497 - RNA, 106 nt, Homo sapiens
aaaccaggccccaaggaaaagaccaaccaggcccgacccacagggaaaaagcgcggggggaaacgaccaggggcagacagagaagaagccaaagaaaaagagcaaa

SEQ ID NO: 154498 - RNA, 73 nt, Homo sapiens
aggcgaagaccggaccgggggcaccggaccgaggcccaaggcagccagagaacccacccggaaacccaggaag

SEQ ID NO: 154499 - RNA, 105 nt, Homo sapiens
ggacaccggcggccccaccagcagacgcagccgagacaccagcccgaaacaccaccaagaaaggcagacccggcaccacagggaaaacggggcaagcccagaaac

SEQ ID NO: 154500 - RNA, 56 nt, Homo sapiens
cagacggggccacccccacacgcccccagccaaacagaagagcacaacacagaaga

SEQ ID NO: 154501 - RNA, 67 nt, Homo sapiens
cagaggcgagaaggaggggcgagaagaagcagaagacagcgacagcacaaacgcccagacaaggcga

SEQ ID NO: 154502 - RNA, 77 nt, Homo sapiens
cgcaggcgcacggagacccgccggcacaggagaagaaaggaagagacgacagccagcaggcaggagcccgcccagaa

SEQ ID NO: 154503 - RNA, 54 nt, Homo sapiens
cagccgggcgagccggaccaacagcgagcgcgaaagcgggggaccaagaggacc

SEQ ID NO: 154504 - RNA, 77 nt, Homo sapiens
agcgcgcccagccaccaggggaagggagaacaaggaggacggggaagagacgaagaagccaaagagaaaaaaagagg

SEQ ID NO: 154505 - RNA, 84 nt, Homo sapiens
cgaggcccaccaacgcacacacgcaaaaggcagcagaagccagccggccccaagaggaagaagccccacccgccaccgccccag

SEQ ID NO: 154506 - RNA, 58 nt, Homo sapiens
caggggaacagacagaaggagcaggaaccaaaggcgaacagaggaggaagccgagaga

SEQ ID NO: 154507 - RNA, 86 nt, Homo sapiens
cgcccgagccggagcgccagccagcggcccacccggggggcagcaacggcgacaccagcaaggagggccccaaggcggcagccccg

SEQ ID NO: 154508 - RNA, 74 nt, Homo sapiens
ggcccgcagcccccgccggccgcccaacaccgaacaccgcgggccacgaaaacgccacagagccagaccagcac

SEQ ID NO: 154509 - RNA, 64 nt, Homo sapiens
gagaccgcggaacgcgagggaacaggaaccggacagccgggggagacggagaacaaaaacaaga

SEQ ID NO: 154510 - RNA, 76 nt, Homo sapiens
ccgagagccgcccgggccagcggccgcgcacccccggccggaggcaccagccgcgggccaggcacgacaccgcaac

SEQ ID NO: 154511 - RNA, 59 nt, Homo sapiens
accgccgcccccgcgcgcgacaccacccccagaggggagagagccgcccccaggaccgg

SEQ ID NO: 154512 - RNA, 65 nt, Homo sapiens
cagacgccaaggggacaaccggcgaaaggcccccagaggcacacccagaagccacaggagaagca

SEQ ID NO: 154513 - RNA, 78 nt, Homo sapiens
agagcggaagccgcgccaagagaagaagacgggcgcaaacagagcaggaccgcagggagagcagcagaaggcaaaaga

SEQ ID NO: 154514 - RNA, 57 nt, Homo sapiens
aggccggcaaaaccacacagggacaccccaggaacccggacgccaaaaagcacccca

SEQ ID NO: 154515 - RNA, 61 nt, Homo sapiens
gggccccagcaccaaacgccaagaccacggcaccaaggaggcagccgaagaagcaggaagg

SEQ ID NO: 154516 - RNA, 72 nt, Homo sapiens
caggcacaaggaccagcagcaggaaagacaagagcagcggaacgaaagaaacaaagaagagccgagcacaag

SEQ ID NO: 154517 - RNA, 56 nt, Homo sapiens
agagagacccgacgacggaccgcacacggagaaggaagcagagacgggggcaccag

SEQ ID NO: 154518 - RNA, 100 nt, Homo sapiens
aaaaacgggaagagaccaggagaccaggcaagcccgaccaaacacgaggcccggcccagagggacaaaggacggaaagaaacaaagacaaagagaaacaa

SEQ ID NO: 154519 - RNA, 74 nt, Homo sapiens
aagagggcggaggagccccaagaacagagggcagcggaggaccgaagagacgccgaagaccaggacggacagga

SEQ ID NO: 154520 - RNA, 65 nt, Homo sapiens
gcggacgccgaggcaccgaggcaccagaggagcggccccggaggcggcagcaggaggcaggacag

SEQ ID NO: 154521 - RNA, 53 nt, Homo sapiens
aggagagcccagggaagcgacaaaagaagcgaagccaggaacaagaggcggaa

SEQ ID NO: 154522 - RNA, 58 nt, Homo sapiens
ggggcggcgccgcgcggccgagaaggagaacacccagcaccaacgaaagcgcgcacgg

SEQ ID NO: 154523 - RNA, 73 nt, Homo sapiens
gagagaaagacggggacgaggaaaagcaagaagagggaaggagaaccaaaagacagcacccaagaaaacccag

SEQ ID NO: 154524 - RNA, 78 nt, Homo sapiens
cgccaccacgggcacccgcgccgggcaccgaggaccagccaagacagaacagacgaggggacggcccaacccgcgccg

SEQ ID NO: 154525 - RNA, 67 nt, Homo sapiens
cgaggcaaccagagaagacggagccgaggagaaaccaagaaaaacaaccacccgggacacaaagaaa

SEQ ID NO: 154526 - RNA, 87 nt, Homo sapiens
ggcgcagccggagggggccggagggcccagcggcgaaggcgcccacgcggcccagaggaggagaccgaaggcgcgggagcaacaccc

SEQ ID NO: 154527 - RNA, 79 nt, Homo sapiens
gaaggagcgaacacgcaaaggccggagagcccagagcgacccccggccaccgggcgggcccggagaagaagcaacggaa

SEQ ID NO: 154528 - RNA, 75 nt, Homo sapiens
cgggaagcgcgaggagagcgacggccagcccaccggaaccccaagaggaacgccaggccccgggggggggaccag

SEQ ID NO: 154529 - RNA, 88 nt, Homo sapiens
cggggggcgggcgaccgcaggcagcaccggaggcccaggcccggcagcccaacccagcaggacaaggcgggccggagaaggggcgacg

SEQ ID NO: 154530 - RNA, 57 nt, Homo sapiens
cgagagcaccgggcgcacccaggaacggacgcccaggcgaagggagagcggggagcc

SEQ ID NO: 154531 - RNA, 54 nt, Homo sapiens
gccgacagacaaccaggccaggggggcacaccgaacccagcacggggaagccag

SEQ ID NO: 154532 - RNA, 52 nt, Homo sapiens
cgcgaagagccaaggagagacgaagaagagggaccagacgcggcgcacaaga

SEQ ID NO: 154533 - RNA, 38 nt, Homo sapiens
ccgacgccccacccgcccacccccccgaagggcggacc

SEQ ID NO: 154534 - RNA, 72 nt, Homo sapiens
cgccgaagcaaaggccgggcacaaggaaggacgagcccccgcggagacagcccgaagaacccgaacgcaagc

SEQ ID NO: 154535 - RNA, 78 nt, Homo sapiens
agaagccaacggagaaccaaggccaagaccagaaccagcccgggaaaggaaaccacgagcggggagaaacagcaagga

SEQ ID NO: 154536 - RNA, 76 nt, Homo sapiens
aggcagccagaaccaagcggagagagcagcccggcagacgcagaaccagcggggggaaaaggacacgaggaagggc

SEQ ID NO: 154537 - RNA, 74 nt, Homo sapiens
cggcgaggaggggaaccggccccacccgggaggggggagcggcgggaggccaccgccagcggcacccccgcccc

SEQ ID NO: 154538 - RNA, 85 nt, Homo sapiens
cggccgccgccgcggcggcacgggcaaaaagggcgagacgaaaaacaagcaccaggaaggagcaagaccggcacaccacgccggc

SEQ ID NO: 154539 - RNA, 80 nt, Homo sapiens
aaaagacaaagagccacccccagcaggacggccaaacgcgcagaaaccgcgggacccgcggcagagaaggaagacgacga

SEQ ID NO: 154540 - RNA, 90 nt, Homo sapiens
gaggcggcgccgccccaagagcgcagacggccagccgaaaccacgagaaaggacagggacaggaaagaaagaaaaagaaaagaaaaacag

SEQ ID NO: 154541 - RNA, 66 nt, Homo sapiens
ccaagaaccaaaaaggaccacgaagacggcaccaggacaagcgagggagacacgggcggaagccga

SEQ ID NO: 154542 - RNA, 129 nt, Homo sapiens
ccgaaccccagccaggggcgccccgggagcagccagcccggggcgagccgcccgcccgccgagcagccagaggcggccaagaccgaccaccggccagaaaagaccacacccaggagacgcgacacccgc

SEQ ID NO: 154543 - RNA, 76 nt, Homo sapiens
cgggacccagcccaggccgcacggacgggggggggccccgagccccggccccaaagacccaaaacagagacacccc

SEQ ID NO: 154544 - RNA, 69 nt, Homo sapiens
cggaggcacacagaaccacaggaaagcagcgaggaacacaggaacacgaggacccaaagaacaaacccg

SEQ ID NO: 154545 - RNA, 48 nt, Homo sapiens
ggcagccaggcagaccacaggcgaacaagaggcgccagcgggcgcgcc

SEQ ID NO: 154546 - RNA, 89 nt, Homo sapiens
cagcacaccccgcgagcaagcccggcagcacgagcaggcagggaggagaccgcggggggcggcccgggaggacggcgagaccagggagg

SEQ ID NO: 154547 - RNA, 56 nt, Homo sapiens
gagagacccgagagccaagggggaaaagcccaaaggaacccaaacaggccacaaag

SEQ ID NO: 154548 - RNA, 60 nt, Homo sapiens
agacagaacagaacccaaaagccgacaaccccagaaacagcacccaccaaggcccggagg

SEQ ID NO: 154549 - RNA, 72 nt, Homo sapiens
cgcagccgcggcggagacgcacaggcccgggggcagcacgccgaaggagagaccagacaacaggccagggaa

SEQ ID NO: 154550 - RNA, 62 nt, Homo sapiens
agcgcagcgacggggcgcgccggcccaggcgcacacggaagggcgcccaagaacaaaccacc

SEQ ID NO: 154551 - RNA, 78 nt, Homo sapiens
acaccacagaagacaggacacaaagcacgcgacaggaaccagaccacgcagagagaaagagacgaaccgggggccaaa

SEQ ID NO: 154552 - RNA, 86 nt, Homo sapiens
agaaggacaggcgacaaggacccaccgagaagcgaggcccgggcagcgccgccagaagaccagggcccggggcacagagcacagcg

SEQ ID NO: 154553 - RNA, 88 nt, Homo sapiens
cgcgcgcccacccaacccgagccacaaaagaagacccaaagcaccaacaaaaagcaacgagaacaaggacaaagggacgcagacaaac

SEQ ID NO: 154554 - RNA, 75 nt, Homo sapiens
aggaaaggaaagcaacggcaaccgaaagggcaagccacaagagggcgcacagagccaacgcaagaaccccaaggc

SEQ ID NO: 154555 - RNA, 64 nt, Homo sapiens
cgcagacagcagcagggcggaacagcagcggaggggccaggagccgggggggcgagcccgccga

SEQ ID NO: 154556 - RNA, 73 nt, Homo sapiens
gggagaccacagagcaaacgagagaccaaccagggcggaggaaaggacaacacacacaaagaggcagaaaaag

SEQ ID NO: 154557 - RNA, 73 nt, Homo sapiens
agaaggccaacgccaaaaaagcagagaaaccccaaaacagaaacaaccaagcagggacagaggacccaaagac

SEQ ID NO: 154558 - RNA, 103 nt, Homo sapiens
ggcgaacacaaaaggcgccgaagcaggacccgaagccaaaccaggagggcgaagccgacgagcccgaacagacgcaccagcgggaggaagagggacggcccag

SEQ ID NO: 154559 - RNA, 91 nt, Homo sapiens
cccagcagccgacccgaggacggggaggaggaggaggcggcgcccgcggacgcaggggcgcaaggagaacgcgacacacaccaagcgaagc

SEQ ID NO: 154560 - RNA, 82 nt, Homo sapiens
cagaggccagcaggaaggaaggggcagaagcgacacaccaggggggcgcagaaggagggcggaaccacaccagaagacaccc

SEQ ID NO: 154561 - RNA, 59 nt, Homo sapiens
agcaggcccacaacggggcacgaccgagggcaggagaagacagcacggggagcccacag

SEQ ID NO: 154562 - RNA, 75 nt, Homo sapiens
aagagaccaacgccaccaaccaaccggcagacggcagaaaacagacgaagcaacagcgaacaaaaaagggacagg

SEQ ID NO: 154563 - RNA, 79 nt, Homo sapiens
caaagcccgccggccacccagaagcacggcaacagccaaacagacagaagagggacaagccaagaaacccggaacgagg

SEQ ID NO: 154564 - RNA, 73 nt, Homo sapiens
cccccccccccccaaggcgaacggaaggacacccaagagaaaggagagaacgaaagacacagcacccagaaaa

SEQ ID NO: 154565 - RNA, 77 nt, Homo sapiens
aacgagaaaaggaacgggccgacagaggaaaggagaagcaagaggggcagaagcgccaaggacggcccggaggagcc

SEQ ID NO: 154566 - RNA, 70 nt, Homo sapiens
gagaaaagaacacagaagcaaggcagcaagcgcggcgagaaggaaaacacaagacacccaccgaaagaag

SEQ ID NO: 154567 - RNA, 80 nt, Homo sapiens
aacacgcaagacacagggaccaacgggaaggggaaggaacgcagcacaacaccgcgggagagcacggaacgcgccaggag

SEQ ID NO: 154568 - RNA, 91 nt, Homo sapiens
gccccagccccaggcccggcagcacacagcacgaccaccacgccccgacaagggaccgggcgggccccgcaggaaacccccaccggcccac

SEQ ID NO: 154569 - RNA, 72 nt, Homo sapiens
aaccccaaaccaacgaagggagccggcaaacgcagagaagggaggcgccggcagaaaaccagggaacacgaa

SEQ ID NO: 154570 - RNA, 75 nt, Homo sapiens
gaaggagccgcaaagcaccagagaaagccaaagcgaaggacggaaccccacccagaggcgacccgagaaaaaaac

SEQ ID NO: 154571 - RNA, 84 nt, Homo sapiens
gcgcagaggaggcggcgaggcgccgcggggcggccgccagcacaagcgcacccgcacaggaaaacccccgaagacaaggaggac

SEQ ID NO: 154572 - RNA, 82 nt, Homo sapiens
aggaagaggcacgcgagggggcgcgaggggaacggaggccagagcgcgcacagaaggaagacggaggaagacagcagagaga

SEQ ID NO: 154573 - RNA, 78 nt, Homo sapiens
aggagacacgcccggcacccagcacaagaagacaagacaaagcaaaggaaaaacgagacccggcggccagccagcacc

SEQ ID NO: 154574 - RNA, 81 nt, Homo sapiens
cacagccacccccaaggaccagcgacgaggccggacgaagaagaggagaggcaccaagggggagccccgagcagcgaacca

SEQ ID NO: 154575 - RNA, 77 nt, Homo sapiens
aagaagggagccgaagcgaggcggaaaacgaagacagcaacgggcggcagagaagagaagagcacagcgggaggaaa

SEQ ID NO: 154576 - RNA, 78 nt, Homo sapiens
gcaggaccagacgcggcagcaacagcgagacccggggcgaggacccccgagccagaccgaggaggggaccggcaacag

SEQ ID NO: 154577 - RNA, 84 nt, Homo sapiens
cccccggcgggagccccgcgacgcgcccggcccggagcccccagcgcagcggccgcggggagaccacagcaagccccaggccga

SEQ ID NO: 154578 - RNA, 85 nt, Homo sapiens
acagccagggcgccagaagaaaacggcgagaggggcgagaacgccacgcgggccggcgaaagcggggccaaggggacccgaggcc

SEQ ID NO: 154579 - RNA, 81 nt, Homo sapiens
ccggggcgaggaggccccaagggcgagcgggaccgagaaggagagaaccaggagaccgaagcaaccaacaagcgaggagga

SEQ ID NO: 154580 - RNA, 96 nt, Homo sapiens
ggcggacgcgcgggagaaaacggcgcaccggagagacgcagaggggcggcgggggaaggggcggaggacaagaacggcgggcgagcaccaccccac

SEQ ID NO: 154581 - RNA, 78 nt, Homo sapiens
gaggggcaacaccgaacgaacacccaacaagccgcaacgaaaaccggaaaagggaaacacaaagccggggaagcaaag

SEQ ID NO: 154582 - RNA, 82 nt, Homo sapiens
cgacgaaagccacccaagcgaccaggaaagaaacgacaacaggagacccagcgggcaagaggccagccgaacgagagccaag

SEQ ID NO: 154583 - RNA, 57 nt, Homo sapiens
cggcagcgggccgcagcaacgaggggaagagcaagcgaggaaaaacaccaacaggca

SEQ ID NO: 154584 - RNA, 76 nt, Homo sapiens
aagagaacagcgaaggccaagccgcgcaagaagagaaccgacagcacaaggaaaggaggaaagagaaagaagaaag

SEQ ID NO: 154585 - RNA, 68 nt, Homo sapiens
aacaaccgaaagaaggcggaaccacacagcagcagcccgggaacgaagcagagcaccggaagacggaa

SEQ ID NO: 154586 - RNA, 68 nt, Homo sapiens
cacgagcaagccaccgaaacccagccagaaacgcaacggacaaaaaaggaccgccacacaaaaagaac

SEQ ID NO: 154587 - RNA, 73 nt, Homo sapiens
ccccaaagccacgggagcgagaaaaaggggggaaggcaccggcagccaaggcaccggacaagagcagagaaag

SEQ ID NO: 154588 - RNA, 102 nt, Homo sapiens
ccacgccgccagaccgcgcgccaagccgcacgcaaccaccgcccggccacaccaggggcaccacagaacagccgaagcaggccaccagccgagaacgaggaa

SEQ ID NO: 154589 - RNA, 82 nt, Homo sapiens
cgggcagcgcaggggcgggaaagacccaggagaagccgcccaaagaacgaaagcaccgggaggaaagagagccacacgaaga

SEQ ID NO: 154590 - RNA, 69 nt, Homo sapiens
gagagcgggcaccccccaaacgacgcagccacggagagggcgagaaaacaaaaaagcagaaaagggcca

SEQ ID NO: 154591 - RNA, 77 nt, Homo sapiens
caagggcagaagggaagaacaggagagagcgcaaaaccaccccggaaacacaagcgaagcccaacacaacacagagc

SEQ ID NO: 154592 - RNA, 73 nt, Homo sapiens
acgaacagacgcacaccacgaagaacccaaaacaaaacagaacgcaaaagcaccgacgacaaaccaacaggag

SEQ ID NO: 154593 - RNA, 74 nt, Homo sapiens
ggacaagaaagcgccaaaaacaacaccaaaaagccgcagggaagagagaagaagcaaaccgggaccggaagcac

SEQ ID NO: 154594 - RNA, 74 nt, Homo sapiens
cacccccgcggcggagccgagccgaggcccggcggcgcaccgggcggcagcgcccaaggggcggcccacggaac

SEQ ID NO: 154595 - RNA, 74 nt, Homo sapiens
agcagcagacccaagaagacagaccccgaggagacggggccagagaacaagcccagacagcaagacgcgagcgc

SEQ ID NO: 154596 - RNA, 76 nt, Homo sapiens
caagccaaacagcaaccgagggagcgaagcaacaagcacaggaaaaaagaaaaaggaagcacggcggaaaagcccc

SEQ ID NO: 154597 - RNA, 56 nt, Homo sapiens
cccagggcggggaacggaggagcgccgagccagaacgaaggcagaagcagcaagga

SEQ ID NO: 154598 - RNA, 80 nt, Homo sapiens
cggcagcaagcccggagagacgcggccggcaagaacggacgggcgccacaagccacacggaggggccaccgaacacgcag

SEQ ID NO: 154599 - RNA, 72 nt, Homo sapiens
cagggagaaggcagcgcggacccgagggggcagcggcaagcaggggagccagccacacagagacagaccacc

SEQ ID NO: 154600 - RNA, 78 nt, Homo sapiens
cccccacccacggggcagcgagacgaggagaaggacagaaaccgaagggagaagagccacaaccaggagaaccccgac

SEQ ID NO: 154601 - RNA, 96 nt, Homo sapiens
ccagaggagaagcaaggcgacgccagaggaggaaaggaagacaagaacaaagggcaaaggacacaccgcacaaacggccgcgcaccacacaacacc

SEQ ID NO: 154602 - RNA, 77 nt, Homo sapiens
aacccggggcagacagagaagaacagacgccgcacccccgcgacacagagaagcgacgcgaagggcacaaccaaagc

SEQ ID NO: 154603 - RNA, 80 nt, Homo sapiens
aaagcgccaaggaaaaggacgagaacgccgcgacagaaacagaaaaagggacagggcaggcgaaggaacgaggaaaaacg

SEQ ID NO: 154604 - RNA, 73 nt, Homo sapiens
agaaaaaaaaacaggagaaagaggagaaaagcgaaaaaacccccaggccgcaggagcccgacccaggggcaga

SEQ ID NO: 154605 - RNA, 81 nt, Homo sapiens
aagcacaggcagcgcagagccagagaccacaggagcgagagcaaacaggcaggaaccaccacacacgacaccgcaggagga

SEQ ID NO: 154606 - RNA, 85 nt, Homo sapiens
aaacacacaacggaacgccacacagaggaaagcacaaaggaagacgaaccggagaagagacacacaccagagggagcaccgacgg

SEQ ID NO: 154607 - RNA, 79 nt, Homo sapiens
ggaggagccggagcaaaggagacgcgggcgggaggccacgaccgaggagcgaagcgagaggagaagcgggggcccccca

SEQ ID NO: 154608 - RNA, 78 nt, Homo sapiens
cccggagccggaggaagaaccaggaggcgccgcagaagccagccagggacgaaagacacccagcagccagccgcagca

SEQ ID NO: 154609 - RNA, 69 nt, Homo sapiens
ggaggcggcgggaggaggcggcggccgacccggggaaggaggcgaaacacggagccaaagagaaccacc

SEQ ID NO: 154610 - RNA, 89 nt, Homo sapiens
cgcccgccgcagaggaaagcgggcggcaggcgagggagcccgcgcggcgagagcccacaggcccccacagaaaaaggcacaaacccagc

SEQ ID NO: 154611 - RNA, 78 nt, Homo sapiens
cccgcgcggggcgcgggcgcggccggaccgcagccgcaaggcaagagccaaaggaggaaaaacaaaggacgaacacgg

SEQ ID NO: 154612 - RNA, 74 nt, Homo sapiens
aagagcagccccggcccggacaccacgccgcggacgcaagaagcacacagcaaaaccaggacgaaagcaacaga

SEQ ID NO: 154613 - RNA, 74 nt, Homo sapiens
ggaccagagaaccagaagagaagacaggccccagccaacgaaagacggccagcccaacagaaaaggacaggacc

SEQ ID NO: 154614 - RNA, 67 nt, Homo sapiens
cgccacagggcaacgcagaacaaaaaaggaaacaaaaaagggccaagacagcaacaaggaccacgga

SEQ ID NO: 154615 - RNA, 70 nt, Homo sapiens
gccggggggcaaacaacccccaaagcacacagaacaggaaccggagaagaaacccagaggaaaacccaga

SEQ ID NO: 154616 - RNA, 47 nt, Homo sapiens
caccgggagcggcgaagaggcaccggaggagccgcgcgccagacccg

SEQ ID NO: 154617 - RNA, 72 nt, Homo sapiens
gcaacaggcagcaagacccaaaggaagagagggcgggcggcagaggggggccgaaaggaacccacagaccaa

SEQ ID NO: 154618 - RNA, 74 nt, Homo sapiens
cgcgccaggagcccagcagcaaggcccccaaggcgacccgggcagggggccagcccgggaagccaccccccgca

SEQ ID NO: 154619 - RNA, 68 nt, Homo sapiens
gaagacaggccccgcgagcccagccaccgcagccgccagcgcccgcacaccaaggcccccaggcacac

SEQ ID NO: 154620 - RNA, 69 nt, Homo sapiens
gcacggccccagagaaaaacggcagagacagcgccagaaccacggcaaaaacagggaacacagagagcg

SEQ ID NO: 154621 - RNA, 78 nt, Homo sapiens
agacagggcggcgggccggacgacaagcaaaagagagcaagagaagccgcaaaagaagcaccaaagaacagaagcacc

SEQ ID NO: 154622 - RNA, 81 nt, Homo sapiens
gccggccccgcacgggagagcggaagaagaggaggagagccggccccaggagccaaaaccgcagcggaagccgaagcggcg

SEQ ID NO: 154623 - RNA, 77 nt, Homo sapiens
caggagccagacaagcccagcaagaccaaacagccaaaccagacagagcggggcccggcgcacccaccaccgccgcc

SEQ ID NO: 154624 - RNA, 92 nt, Homo sapiens
gggaagccccgcagggggaccgcccaagaaaaggcgaacccgacagggggcagcacgccagaccacgaggcgcagcgccgccccacccaagg

SEQ ID NO: 154625 - RNA, 77 nt, Homo sapiens
cgcgccggagcggagcgcgggcgccggggagccagggccaaaagggcggggaacggaccaccagccccaacgcacgc

SEQ ID NO: 154626 - RNA, 34 nt, Homo sapiens
cagaccccgcacagacagggcgccggccgagccc

SEQ ID NO: 154627 - RNA, 71 nt, Homo sapiens
accacgagcccccaggccgagaccgcaaagaaaaaaaggaccacaaaaacacacgacagcccagagcaccc

SEQ ID NO: 154628 - RNA, 64 nt, Homo sapiens
cccgcgacgccaaccacgacgaagcggaaggcagaagaagaccgagaccacaggggcaacccaa

SEQ ID NO: 154629 - RNA, 56 nt, Homo sapiens
acgcacaagcgggcaccagggccgaccgccgcagggaacgaagcccaaaaggcaga

SEQ ID NO: 154630 - RNA, 72 nt, Homo sapiens
ccaggacagaaggagaaggagacccggaacaagcaaagggagaggagccaagcccaacgggacgggaaaacg

SEQ ID NO: 154631 - RNA, 77 nt, Homo sapiens
gaaggggccagcggagacagcaaggggggagaaaaggccaagggcaggagacacgagacgcaggaagcagcgaaaga

SEQ ID NO: 154632 - RNA, 81 nt, Homo sapiens
agcggaccaggaacccggaccaagggagccccaaacaagggggacggacagagagccaggcaccagccagagcggcgcgac

SEQ ID NO: 154633 - RNA, 71 nt, Homo sapiens
cacgcgcaggccgggcccggaccgcccccgagcccggaggggggagaaaaggggccgcaaggccaggcgcg

SEQ ID NO: 154634 - RNA, 72 nt, Homo sapiens
ggagaggacagcagggaggcgggacgcggagcacaggggaggggaagcaacagggcggggggaaccgccacc

SEQ ID NO: 154635 - RNA, 76 nt, Homo sapiens
agaaccgcgcgcaacaggaaccggaccgcggccccccaggaaagggagaacccaaaggaggagggccgaaaacccc

SEQ ID NO: 154636 - RNA, 79 nt, Homo sapiens
cccaccgccaaggagaggaggaaccaaccaaaccagccagcccacaccagaaggaggcgccggcgggaccgcgggaagg

SEQ ID NO: 154637 - RNA, 83 nt, Homo sapiens
caacccccaaaggcgggacagggagggcgaggcgaacggaacagaaccgagcggaccaaaagccccagagcaagcgagaggga

SEQ ID NO: 154638 - RNA, 40 nt, Homo sapiens
aaaagggcaagaagccagaagagagaagaagaaggaggcc

SEQ ID NO: 154639 - RNA, 68 nt, Homo sapiens
ccgggcgaaaccggaccgggcccggaggagcgaacaaggcgacaacacaggcagccgggagccaccac

SEQ ID NO: 154640 - RNA, 75 nt, Homo sapiens
gacaggcgccccggcccaacgaagaaaaagcagcacgaaggcgaggaaccagcagacaaaaaagaagaaaaaccg

SEQ ID NO: 154641 - RNA, 73 nt, Homo sapiens
gcaacgccgcccaccgggagccgggacagggcgacacccggaccgacgagcgcccccgagcccccccggaggc

SEQ ID NO: 154642 - RNA, 78 nt, Homo sapiens
aaccacccgggaaacaggaacccccaccaacaccgaagagcgggacgacccgggacagcccacggggcagaccagcga

SEQ ID NO: 154643 - RNA, 73 nt, Homo sapiens
gggaccccggagcccagaagacagagggcgagaccaaggagaagacgcagacgagcgagaacaaacaaggaag

SEQ ID NO: 154644 - RNA, 86 nt, Homo sapiens
ccgcggcgccaagcggccccagcggccgcgaccgagcaggcgagaccacgcgcagacccaggggagcccaccagccagcaacaggc

SEQ ID NO: 154645 - RNA, 79 nt, Homo sapiens
cccggaaggccagggaggaccccagacaccggagacgggaaagagcggggaggagacaaaggagacgaaaaaaaggcca

SEQ ID NO: 154646 - RNA, 75 nt, Homo sapiens
gggagcggccaacccaagggccccagcccgggcccccaacgagagaggaaaagaggcccaaagaaggagccacgg

SEQ ID NO: 154647 - RNA, 71 nt, Homo sapiens
agacccaaggaacaggccaagagagccgaacccaccgagccagggagggaacggaggaacaacgcagaaga

SEQ ID NO: 154648 - RNA, 72 nt, Homo sapiens
gcaccgggacgcgcacccccgcgccgcacggggacgagacgcccaggccgccaggcaccggaacacgacccc

SEQ ID NO: 154649 - RNA, 71 nt, Homo sapiens
ggagaggacgcgcgaaccagcagcaggcccagcaccagagacacgacgcaaaggccaccaggcagccgcga

SEQ ID NO: 154650 - RNA, 70 nt, Homo sapiens
agcagcacgagagaacaaaaaaacaacaccgcgaaaggaagaacaacacccacaggaggaacaaaccccc

SEQ ID NO: 154651 - RNA, 76 nt, Homo sapiens
ccgaaggccaagacccggacagagaacgcagaggacaagcagccaacgggaggcgcccggcagggaaaccaggccg

SEQ ID NO: 154652 - RNA, 84 nt, Homo sapiens
gaggagccagacgacaagcacacacaggcgcgaaacggaaaaagcagccgaagacgacccagccaggacaggaggacaggacag

SEQ ID NO: 154653 - RNA, 74 nt, Homo sapiens
caccacccgagagccccaagggacgcagaaaacgcacagcacgagaaaagcgaaaagaacacaaccagcacacc

SEQ ID NO: 154654 - RNA, 84 nt, Homo sapiens
caagcaagggacggcacccgagggcgcggcgaaggggcgggccccggccagggcccaggcagccggggcggaacccccagacag

SEQ ID NO: 154655 - RNA, 68 nt, Homo sapiens
gggaggggcacaggaaacacgccacaaaagaagacccaaagcaccaacaaaaagcaacgagaacaagg

SEQ ID NO: 154656 - RNA, 49 nt, Homo sapiens
caagcgaccggaaagaccaccacacagcaagggggcgcccggacccgcg

SEQ ID NO: 154657 - RNA, 67 nt, Homo sapiens
agcgagcgaggacgaggaacggcgaaggaagaggcccagcagaagggaccgcgagccaccccccgcc

SEQ ID NO: 154658 - RNA, 74 nt, Homo sapiens
ccaggagagcgccccagggcaagccccgcccggccaacaagaggcaagcgccagcagccgagcaaagaaaaaac

SEQ ID NO: 154659 - RNA, 70 nt, Homo sapiens
aaacagcaagagccggaagaaaggaaagaggacacacggggacgcccccccaggcggccgagcgccaagc

SEQ ID NO: 154660 - RNA, 72 nt, Homo sapiens
gggcgccaaagcgcgaggaggaagcgcccggccggagccagggacaagacagcgcgggagccaggaaacgca

SEQ ID NO: 154661 - RNA, 75 nt, Homo sapiens
aacggaagaagcaaagcagcgagcagcaggcagaacacaagagccaagggacgaaaacccgaggcaccggacaga

SEQ ID NO: 154662 - RNA, 44 nt, Homo sapiens
gaaagccgaccacccggcgaagaagggccaccagaacacagagg

SEQ ID NO: 154663 - RNA, 31 nt, Homo sapiens
ccaaacagacgacgcaaacggccgcgagaac

SEQ ID NO: 154664 - RNA, 58 nt, Homo sapiens
gcggaagcaggagcaggacaggacagcagagcaaaggccaagcaaaggaggaccacag

SEQ ID NO: 154665 - RNA, 57 nt, Homo sapiens
cagggcccgcggcaggcgcccgagaacccgagggaagaacaaagggagcagggagaa

SEQ ID NO: 154666 - RNA, 70 nt, Homo sapiens
cagagcacgagcacaaacagcaggaacccacaggccaccgggacaagacacagaagccacccccggggcc

SEQ ID NO: 154667 - RNA, 87 nt, Homo sapiens
aaacgaggggcggaacacccgccaaagcagagaaaagacgcggcagagcgcaagccgacacgaggcgggccacagccacgagcagag

SEQ ID NO: 154668 - RNA, 78 nt, Homo sapiens
aaacaaagagaaaggcggaaccgggagcaccagcgcgccacgacccgcagacaagaaagcggcagaaccaagaaagac

SEQ ID NO: 154669 - RNA, 56 nt, Homo sapiens
cggccgaggaccgccgaccagcaagaggcacggagcccaggcgccggaacccggac

SEQ ID NO: 154670 - RNA, 77 nt, Homo sapiens
ccccacccgagcagccagagcggaccggggcagaccaaacggcaaggcccagacagcagagacgccggaaagcccga

SEQ ID NO: 154671 - RNA, 76 nt, Homo sapiens
accaccgcccaaggcgcccgccgaccaccaggacaccaacgggaagcccccacacccacacgagcccaaaagcaaa

SEQ ID NO: 154672 - RNA, 79 nt, Homo sapiens
cgaggaagaagaggaggaagaaacgagagcagacccaggaggggaaaaagccggggaaaggaaacggacgcccgaacac

SEQ ID NO: 154673 - RNA, 78 nt, Homo sapiens
ccgagaggaagacgagccgggaggaacggcccggaaacaggaggacgccaggcagagcagcccaccagggaggggagg

SEQ ID NO: 154674 - RNA, 55 nt, Homo sapiens
cgggaccgcgcccccaccccgcaaagaagccggagcccagccccgcgcccacacc

SEQ ID NO: 154675 - RNA, 61 nt, Homo sapiens
cgggaaaccccagccccccgggggggacaggaggagagacacaacaacgaggacagcgaca

SEQ ID NO: 154676 - RNA, 77 nt, Homo sapiens
acggggcgagcaggcgcgcgcgagaggggggcgggccgagcacccgcaggccccgcagaggcgcccacagcggacgg

SEQ ID NO: 154677 - RNA, 76 nt, Homo sapiens
acgggagaaagcacgggaggagagcccacaccgcggacagagcaaacagcaacaaggagcggggggaccaggagca

SEQ ID NO: 154678 - RNA, 52 nt, Homo sapiens
cgcggagaaccagagaagccgggacgaagggggggggcgggcgccgcaggcg

SEQ ID NO: 154679 - RNA, 84 nt, Homo sapiens
gccaagccgccccccaccgcccgggcccgaggaggcagccaagccgagccgccacccggcacgggagagaagcgccggccggaa

SEQ ID NO: 154680 - RNA, 71 nt, Homo sapiens
ccaaaccaccacacggaaaggagggacaaagccagaagacaccgcaggggacagaacggcgcaacacgagc

SEQ ID NO: 154681 - RNA, 69 nt, Homo sapiens
ccggccaagagccccagaacgaggaagaaaggaccgccgcgccgaccggagacaacagacgcaccagcc

SEQ ID NO: 154682 - RNA, 78 nt, Homo sapiens
gggcgcccgcgggccgagccgggcggccgcgccgcgcagcgacagccagaaagcaccgggaggaaagagagccacacg

SEQ ID NO: 154683 - RNA, 77 nt, Homo sapiens
aaaagcgaacacagggaggggcagcaggcgcccagcgacaaagaaaagccagcggagggcagagccccaagaagcag

SEQ ID NO: 154684 - RNA, 80 nt, Homo sapiens
aagaggaagaaagaggaaggagaaacaaaccagccgaaaagaagacgcaagggaggaaggggaaaaaaaccgcccgccag

SEQ ID NO: 154685 - RNA, 79 nt, Homo sapiens
gcaccaagaccgccaacccaaccggagccccgggaaagggagcagcaccggccacacccacagcacgaccggaacccag

SEQ ID NO: 154686 - RNA, 82 nt, Homo sapiens
acaacagagggcgaacaccgggaaggaaggcacggagccggacaacaaaacgaaaaaacgggacggcaaagagcgagcagcg

SEQ ID NO: 154687 - RNA, 62 nt, Homo sapiens
ggggccaaaaccagacgcgagaccaggagcacgaaacaggaagcagaccagcggggcccgcc

SEQ ID NO: 154688 - RNA, 81 nt, Homo sapiens
caagcaccagcagaagaagggcgagacgcaaccgcgcgcaaaaaccaccgggccaggagcaccagagccccccggaagaag

SEQ ID NO: 154689 - RNA, 76 nt, Homo sapiens
caagagaagagcgagccgcagccgacaaagccagcaccagcccccaccccaggccccccagccccagcacaaacag

SEQ ID NO: 154690 - RNA, 79 nt, Homo sapiens
aaggagacaaaggaacggaggaaggggacagggaccacaacaaggacacaaagcgagaagacccagcaaccagcagcaa

SEQ ID NO: 154691 - RNA, 72 nt, Homo sapiens
ggcagggcgggcaggacgccggagcagccacgcagccccaccagcacgggagagcgccgggccggccacaca

SEQ ID NO: 154692 - RNA, 77 nt, Homo sapiens
ggccgcgccacccgcaaacagggcagaacaagaaccccgaccagacccaccagcaaaacaaggcagacacccaccac

SEQ ID NO: 154693 - RNA, 80 nt, Homo sapiens
gccgaagcgggggcgcgcggcggaggaccaggcgcggcgcggcgcggcgaggaacgaggcgcgacacaccagcggagcgg

SEQ ID NO: 154694 - RNA, 83 nt, Homo sapiens
cccagaagacacccccagggcagaaaagcgaccaggcgagggaggcaccacagaggacgcggacaagcagggaccccacagcc

SEQ ID NO: 154695 - RNA, 70 nt, Homo sapiens
cccgcacgcccgcggcggggcaagaggcaacagccgcccgggcgcggcaacagggcgccggccgagcccg

SEQ ID NO: 154696 - RNA, 52 nt, Homo sapiens
ggaaaagggcagggacagcgcaggcagcagagaaaccaggcggggaacaagc

SEQ ID NO: 154697 - RNA, 74 nt, Homo sapiens
aacagcaacagggacgggcccagccacgggaaagggccgcgaccacggaaaggaccgccagaggcaaggcgcca

SEQ ID NO: 154698 - RNA, 52 nt, Homo sapiens
aaagaacggagcccaccgcaggacaccgggcgggaaaacggcacaaggcgac

SEQ ID NO: 154699 - RNA, 81 nt, Homo sapiens
cgcgcgcagcgggagagcccggggacacggccgaagaaaagacgaccccgacgcaggccaggagccgcggacagaagccga

SEQ ID NO: 154700 - RNA, 83 nt, Homo sapiens
gagaggacaggcggaggccccagggaagcgcagaaagcaggcgaacccgcggcgcaaaacgacagaccaggagagcaccaaac

SEQ ID NO: 154701 - RNA, 61 nt, Homo sapiens
ggagcgcggcgggcgcgcgccagaagccagcgagaagaccgagaggccgcgacccaacacc

SEQ ID NO: 154702 - RNA, 81 nt, Homo sapiens
ccgaccgcaacagaacggacccgcggcccccaggcacgaagcgaagaagaggagagaagcagcggcgcagacgacggcaca

SEQ ID NO: 154703 - RNA, 73 nt, Homo sapiens
gaggaccacccagaggagcaacgcaagcagaagaggaacagaagaagcagagcagagacggagcagcagcccc

SEQ ID NO: 154704 - RNA, 85 nt, Homo sapiens
caggagccacgcagggcacgggagcggagacccccgaggaccaaccacaggcaaacggggacagcgccgaccggaacagggacca

SEQ ID NO: 154705 - RNA, 82 nt, Homo sapiens
caaaagacgcagagccccagggcggacagcagcccggggcaaccggagccccccaggagggccaaaggccaaagaaggaaca

SEQ ID NO: 154706 - RNA, 46 nt, Homo sapiens
gagggagagccaaagaagggaagagcgaaagagagaagcgacaagg

SEQ ID NO: 154707 - RNA, 39 nt, Homo sapiens
aagagaagggaaccgaaccaagacgccagggaacacaag

SEQ ID NO: 154708 - RNA, 77 nt, Homo sapiens
agcggcgcccgccaccggcccccgggagccaccgggggcggaggagggagccagcacaggcacgcagcacgggggca

SEQ ID NO: 154709 - RNA, 69 nt, Homo sapiens
ggcggcggccagcgccacgcgcacacagagaaaaaaagggaacaaaacacagcaagcagacaaaagggg

SEQ ID NO: 154710 - RNA, 74 nt, Homo sapiens
ccgggccggaacccacgcgcccgggagcacgagagccaacggcacggggaaagcgaacgcgaaaagaaaagccg

SEQ ID NO: 154711 - RNA, 85 nt, Homo sapiens
cgggagccaggagcgcggcccggggcccgggggcgcgggccggggggggaacgcccgcggacggcagggcgcgacaagaagcgcc

SEQ ID NO: 154712 - RNA, 65 nt, Homo sapiens
gggcaacccagggggcaggacgaccagcgggaggccagaggaaggcaccaaagccacccagaagg

SEQ ID NO: 154713 - RNA, 73 nt, Homo sapiens
agcagaaaaacagacacgcaagagaaacaggcacacaagggaggaggcaaagccagggcacggagcgagcaga

SEQ ID NO: 154714 - RNA, 78 nt, Homo sapiens
gggaggcggaggggagcggagcccggagcgcgggaaagaacacggggacggaaagagccacacaacagacagaaccgc

SEQ ID NO: 154715 - RNA, 76 nt, Homo sapiens
cggacaaggacccgaccgccgcgcgggggccaacaagcagcggcccagcccaaccagcaccccccccaaggcccca

SEQ ID NO: 154716 - RNA, 81 nt, Homo sapiens
acccaggccgcacacacgcagagccgccggggccacacccggcagcccccccagagacgcgaggacacccccacaggcccc

SEQ ID NO: 154717 - RNA, 73 nt, Homo sapiens
ggcaagcagccccccccaggaccccaggcaggcggagacacgaaaacagggcaaaagcagaccggaaaaccca

SEQ ID NO: 154718 - RNA, 56 nt, Homo sapiens
ccccgccagcagccgccggagccagccaacgagcgagcccaaaaggcagagcgagg

SEQ ID NO: 154719 - RNA, 68 nt, Homo sapiens
gacaaggagcggggaggagggggccacggaaaccgcaccaggaagcagccccaacacacacacccagc

SEQ ID NO: 154720 - RNA, 81 nt, Homo sapiens
cagaaaaacaaaagaaaggcaagagaaacacagaaaggggagccgcgcagcaccacccccagacgggcaaagacaagaaac

SEQ ID NO: 154721 - RNA, 84 nt, Homo sapiens
cagacacggccgcagcagggacggccagaaaaacagaaaggcagccggcgcaggcccgggagagaccaaacagaggcagaacga

SEQ ID NO: 154722 - RNA, 55 nt, Homo sapiens
cagcgcgcgggcacgcccgaccaggcggaacacagggccgccgcacgccaacagg

SEQ ID NO: 154723 - RNA, 82 nt, Homo sapiens
cccagacaaccgcgggcagcaggccgagcccgggcccacgggacgggcgaggaacccacgggggaagaacacagaagggcaa

SEQ ID NO: 154724 - RNA, 78 nt, Homo sapiens
aggcgaccgagacggggagcccaaagcaaagaaacagcgcgaacgaagaacagacacgagaacaaagagaacagcagc

SEQ ID NO: 154725 - RNA, 71 nt, Homo sapiens
agagaagaaagccaacaagaggaagcaggaaaaacaaagaagacccagggcacacagggaccaagaagccc

SEQ ID NO: 154726 - RNA, 77 nt, Homo sapiens
ccggaacacgcgcagcgcggcagggccagcgaccggccggggccggccgggcgggcagcgagacgacgggaccgaag

SEQ ID NO: 154727 - RNA, 37 nt, Homo sapiens
caccgaaggccacagcgaaaagagccaccacaaaagg

SEQ ID NO: 154728 - RNA, 71 nt, Homo sapiens
gcgaaggggacaaggggggaagacaaaaggaaacaaaacagaagacaacaagcaaggcgaaggagcacgca

SEQ ID NO: 154729 - RNA, 78 nt, Homo sapiens
gggacagagggagccaggcagaggggaacgcccgcggacggcagggcgcgacaagaagcgcccgcccgacgagcggcc

SEQ ID NO: 154730 - RNA, 85 nt, Homo sapiens
gcagaagccggcgcgcggaggggcccgccaccagagcacacagaacaggccgcgagcaagccgagcgagacgaagagaccagaag

SEQ ID NO: 154731 - RNA, 53 nt, Homo sapiens
caacggcccagagcccggaacaagggccaaaagaaacacagggagaaaacaac

SEQ ID NO: 154732 - RNA, 74 nt, Homo sapiens
cccccgcgcgcgcaccggggcgggaacaccaacccgggaacaaaccgagagagaaccccaacacacggagcaag

SEQ ID NO: 154733 - RNA, 69 nt, Homo sapiens
agacccacccgccacggcaccagggaggacagggccaccagaagaccaggagccgggaacggagaccag

SEQ ID NO: 154734 - RNA, 72 nt, Homo sapiens
ggggacacaggaaaacgcccgccccccccaagggcgcgagaggccgggaaacgcaagcaagacggaccgaag

SEQ ID NO: 154735 - RNA, 82 nt, Homo sapiens
cggcagggcaccgcgcgaagcggccaaagccgcccagacggccaccggcgggaggaacaaaaggagggcgcacggccaacgg

SEQ ID NO: 154736 - RNA, 74 nt, Homo sapiens
ccgcgcggccacgggcagacccacgagcaggagcagacagaacgcggaaccccagagaggacagaagccaacgc

SEQ ID NO: 154737 - RNA, 76 nt, Homo sapiens
gagacgacgcgcgggccgcgagcggggcgacccgaggcaccaagcagccgaagagaaacaagggacagcagacaag

SEQ ID NO: 154738 - RNA, 73 nt, Homo sapiens
gacacgagcacaaacggaacaagcagaaagcacgaacaacgagaacaagacacgagcaaaccccaccgagggg

SEQ ID NO: 154739 - RNA, 71 nt, Homo sapiens
gaaggaccaagaaccaggcgggaccaagaaaggcccaacccgaccaaagggggagaggcaagaaggggcag

SEQ ID NO: 154740 - RNA, 52 nt, Homo sapiens
gcagggcgcccccggcccacagcagccccccgcccgccccccaccaaagaag

SEQ ID NO: 154741 - RNA, 69 nt, Homo sapiens
agcacacgaaaacggccaaggacagaaccaccacgaaaagcaaaaaagacagagcccagaccccacagc

SEQ ID NO: 154742 - RNA, 75 nt, Homo sapiens
ggcagacgcgaaggagaaaaagcaggggaagcagcgcacgccaggggaggcaagcaggggggcaaaggaaagaag

SEQ ID NO: 154743 - RNA, 67 nt, Homo sapiens
acaccacagacgcccgggagaaaagaacaagccagccagcaggcaacaggcccagaccaggcccaaa

SEQ ID NO: 154744 - RNA, 82 nt, Homo sapiens
gaggccagccccccgagggcaacgagaaagagacgcacccgagggacccgaggagcccaccaagccgaccgcaggcaagggc

SEQ ID NO: 154745 - RNA, 73 nt, Homo sapiens
gaggagggaaacacccgaaacagcgcggaaaggaaacccggcccagaaggggaagacccccagcgaacagaga

SEQ ID NO: 154746 - RNA, 74 nt, Homo sapiens
ccccaagcagcgagacacaggcccagcacgacagagacccggaaagcgagcagcaaagacccagcacccaacaa

SEQ ID NO: 154747 - RNA, 74 nt, Homo sapiens
caaaggaacgcagacgcggaggcggaagccgaagcggcgggccagggagaacagagggagccgcccccgaagcc

SEQ ID NO: 154748 - RNA, 78 nt, Homo sapiens
ggaagggcgggaccaacagggagccagagacccacggcagggggaggccgggcgggggcagccccccccgccacgaca

SEQ ID NO: 154749 - RNA, 78 nt, Homo sapiens
cagcaacacagaaacaggaagcgccaaaaggacaagaaaggaccggcccaaggaggagaaacccagcaggcacgaaag

SEQ ID NO: 154750 - RNA, 75 nt, Homo sapiens
agggaaccccgaggaagcagcgcgcggccagagaaacggcagacgaacacgaccagaggagcgagagcagcaaga

SEQ ID NO: 154751 - RNA, 67 nt, Homo sapiens
gcccaccggccggcgccagaggcccggacgacagcccccaggcacaggaagagggcggcacgcggcc

SEQ ID NO: 154752 - RNA, 71 nt, Homo sapiens
agccgaccgagcccaggagcgccacgcgcggaaggcagcgcccagcagcgcaggggggaacaagccagggg

SEQ ID NO: 154753 - RNA, 88 nt, Homo sapiens
gggcccccaggacccaagggcgccaaaggagaaggggcccccccggaccaccagccagacggaaggcacgagggccgacacgcccccc

SEQ ID NO: 154754 - RNA, 69 nt, Homo sapiens
agaggggggaagaggcgcccagaggagcaacacccaaggagaaaccaccacaggaacaagcggaggaaa

SEQ ID NO: 154755 - RNA, 72 nt, Homo sapiens
gaccggccgcgacagcgaacagcgcggccgcagaccggaaggccaaaacaagggaagcaaaggaaacggaga

SEQ ID NO: 154756 - RNA, 80 nt, Homo sapiens
aggaaaaaagaggcggcgggccggacgcggacgaggcccaacagcgaggggacgagaaaggaacgaagcgcgcggcaggc

SEQ ID NO: 154757 - RNA, 68 nt, Homo sapiens
caaagccagcccagggaagagaagagcgcgccgacgaaaagccacagaccccgaggagggagaccgac

SEQ ID NO: 154758 - RNA, 71 nt, Homo sapiens
ccgaagccgaacccgcgcgacaaaaggaccagacaaacaaaagggggccaggcaccaacgcggaacaggag

SEQ ID NO: 154759 - RNA, 76 nt, Homo sapiens
gggggaaaaaacccaaggcgcaaagaaagacagaaccagcacagcaaaaaaggcagcgcaccgaccccaacgaaca

SEQ ID NO: 154760 - RNA, 74 nt, Homo sapiens
gaagacggcgaagcaccaacgccaagaaggaccggggagggcgcccacagggaaggaggcgggaccgcggcagg

SEQ ID NO: 154761 - RNA, 80 nt, Homo sapiens
ccagggacccaaacccacaggcgaaaccaagcaaaggaacggcaaaggggaacgagagaccaaaaccaaagcacagcaaa

SEQ ID NO: 154762 - RNA, 73 nt, Homo sapiens
gcggagaaggagaggggaccgcccggacacaagaaaaagagcgaaaaagacacgccggggaccgaggaaggaa

SEQ ID NO: 154763 - RNA, 85 nt, Homo sapiens
caaccagcgaagagcgacaagccgcggcagccgcggaccaccgccgccaggaacaccccaccagaccacccagcaagcccacaaa

SEQ ID NO: 154764 - RNA, 67 nt, Homo sapiens
gaaaccccaggacccagacacagggaacacccaggcaggccgaagccggcagcaaggcgcggcgagg

SEQ ID NO: 154765 - RNA, 72 nt, Homo sapiens
cacagccacaggggggagacgggaccagcaagccgagaaagggaggcggaacagcggcgaagaggaaaaaaa

SEQ ID NO: 154766 - RNA, 87 nt, Homo sapiens
gacgccgacacccagcgcccggcaagacgcgcagcgggacgccgcggcaggagaaggcggaggggccgaggggaccaagcggagaga

SEQ ID NO: 154767 - RNA, 75 nt, Homo sapiens
ggaacaagcacagcaggagaagccggaaagaacaagagccggcaaagcaccaggcacagcaagcgccgaaagacc

SEQ ID NO: 154768 - RNA, 75 nt, Homo sapiens
gggcaggagccgcgagccagcgcgcgaagggcacaggcaaccagaaggggaaagggcgcaacagcggggagggga

SEQ ID NO: 154769 - RNA, 93 nt, Homo sapiens
ggaaacggcagccgcggcggaaggcacagcggagagacaggggagaacgcggcagaacggaggcaggcagcacgagacacaccacaagaggga

SEQ ID NO: 154770 - RNA, 71 nt, Homo sapiens
gaagagaggagggagaacacagaaaccggccccaggagaagcaggaaggaaaaaaaccagaagaggaccag

SEQ ID NO: 154771 - RNA, 65 nt, Homo sapiens
cggaacacgagagggccgggaggcacggacacacaaaaaggaacacagagacacggcgacggaag

SEQ ID NO: 154772 - RNA, 75 nt, Homo sapiens
gcacacacacagacaggacccgaaccacaaagacacacagaggacaagaaagcagaaagcagcacagcaggcagc

SEQ ID NO: 154773 - RNA, 75 nt, Homo sapiens
cccccgaccgagagcgccaggcacaggagaacagagagagggaaacgaaaagggaaggacgagagagacaaagag

SEQ ID NO: 154774 - RNA, 98 nt, Homo sapiens
acccgcaacccagaccacaaagaggaaaggacgccaggacacacggcacaagacggcaaacagaagggcgcaggaaaaggcgcacagagaacgacaac

SEQ ID NO: 154775 - RNA, 56 nt, Homo sapiens
gcggaccccgcggcgggaggagccgccccgaggaacaagacaacacacacgcacca

SEQ ID NO: 154776 - RNA, 61 nt, Homo sapiens
cgaaggaccccaaccaagaacaggccgagaacgcacagacgggagcagccgcggggccccc

SEQ ID NO: 154777 - RNA, 87 nt, Homo sapiens
cagaaacacaaagcagcccaaccaaaggggcaaccgccccccaccagagaagacaccaggagggggggaagacggagggcacggaac

SEQ ID NO: 154778 - RNA, 47 nt, Homo sapiens
gaacgggcagagaaaacaaacggacagcccagcggagcggaggcaga

SEQ ID NO: 154779 - RNA, 80 nt, Homo sapiens
gcggcccaggagggcgcaggagcgggacgagagcgccggaggccgagcggaggcagcaggcgagaggcagaacccggaaa

SEQ ID NO: 154780 - RNA, 79 nt, Homo sapiens
aagccggagcacggaccaaaagccacccaaaagcaaggagcaggggaaggagacgggcaggagcgagccacccggaaca

SEQ ID NO: 154781 - RNA, 77 nt, Homo sapiens
agaagacagcaagcccacgagcggccccccgagacggaggagagggccggcacgacgaaaacaacaagcaaaaaagc

SEQ ID NO: 154782 - RNA, 78 nt, Homo sapiens
cgaaacgcagacgggcgcaacggcggagcggaggcacccgaagcgcccggggagaaggagaagaagcaccaacaggaa

SEQ ID NO: 154783 - RNA, 58 nt, Homo sapiens
accagggaagagacacacccaggcacgcagaaaagaagagcgaaacgggaccacacgg

SEQ ID NO: 154784 - RNA, 72 nt, Homo sapiens
ccacgggggcaaggcacggggagcgcaggagagacaccccacgagacagaggccgcagaagcagggccaggg

SEQ ID NO: 154785 - RNA, 74 nt, Homo sapiens
ggcaccacaaaaaggacaggcaaaccgacaccagcgacacaagcgcgagggaaccacagaggacaggcgagggg

SEQ ID NO: 154786 - RNA, 77 nt, Homo sapiens
cgcagaccaccaaacccaggaggagacccccggaaaaccccccccggcggaacaacagaggcagggaagacgaggac

SEQ ID NO: 154787 - RNA, 73 nt, Homo sapiens
aaaccagccacgaagcgaaccaggacaaggaagaggaacaccaagaacgggcaagaaaagagcacggaagaag

SEQ ID NO: 154788 - RNA, 55 nt, Homo sapiens
gagccgcagccgacaaagaggcaggagaggagaaccaaggaagagccagacccag

SEQ ID NO: 154789 - RNA, 73 nt, Homo sapiens
ggacacaacgagggaccgggcacgaaacgcgcgcccccgaaggcggccaacggccagccagaagagaggacag

SEQ ID NO: 154790 - RNA, 75 nt, Homo sapiens
accaaagccaagagcccaggggccgggcacggaagagccaagacaggaaaaccaagcagaaggaggaggcagcca

SEQ ID NO: 154791 - RNA, 71 nt, Homo sapiens
cggacagcacgagacacgcagggccgccaagaccggagacaggaacacggccccggggaccgccggagggc

SEQ ID NO: 154792 - RNA, 54 nt, Homo sapiens
cccaaggagaccaccgcaaggagcgcgcgacgaagaaaaggggggacaggcaca

SEQ ID NO: 154793 - RNA, 49 nt, Homo sapiens
gggagcacaccacaggcaaggcagaaccagaacgggaaagggacggacc

SEQ ID NO: 154794 - RNA, 63 nt, Homo sapiens
cggccacggccaacgccgcgcccgcggagggaaaagggcgagacaagaagcccaagaccgaag

SEQ ID NO: 154795 - RNA, 87 nt, Homo sapiens
cgaggaggagcgacccggaggagcgagaccacccacccaccccacaccgaccggcggacaacacgagcgcccaaagccaacgaggcc

SEQ ID NO: 154796 - RNA, 78 nt, Homo sapiens
ggggccagccccccacaacccagccagccaccacagcaggacacacagcgccgaaccccacgccagcgggcacacacc

SEQ ID NO: 154797 - RNA, 71 nt, Homo sapiens
gcagcggaccggcaaaaaagcaaagaaagaagcaccgaagggaaaaaagacgacaagaaggagcgaacgag

SEQ ID NO: 154798 - RNA, 66 nt, Homo sapiens
gcggaggcagaggggaggcgcgaaagcgacagcagccaggcgagcggcagggagacagcgcacccg

SEQ ID NO: 154799 - RNA, 73 nt, Homo sapiens
cgcagggcgcccccggcagcgaaaccaccccagagcaagcacacgggaccaaggagcaaggaccagccacggc

SEQ ID NO: 154800 - RNA, 81 nt, Homo sapiens
ccacgcgccgccacacacgaagcaacagaaccggaagaccggaaggcgcgagaaagaacgggaaaggcggaacaggaaaca

SEQ ID NO: 154801 - RNA, 78 nt, Homo sapiens
acagcagacagccaggaaggaacaagccaagaggacccgaagccacagccccaagcccaagacacagccccagcagcc

SEQ ID NO: 154802 - RNA, 85 nt, Homo sapiens
gaggcccaaagagcccaggagaagcggagcggcagagaaaaaggccaccgagaccgaaggagaagaaggagaaggggaggagaag

SEQ ID NO: 154803 - RNA, 56 nt, Homo sapiens
aagcgaccccgcccagccccgagagcaaacaggacaaaccggcgaccacacacggg

SEQ ID NO: 154804 - RNA, 66 nt, Homo sapiens
ggggcccgcagcaggaggacgccaggacgacaaggggcggagaagccgaagggccagaaccacccc

SEQ ID NO: 154805 - RNA, 80 nt, Homo sapiens
aagcaagcaagaaacaggcacaaacagaaaaggaaggggaagaagaacaaaccccgagacaggcagggaggaaagacagg

SEQ ID NO: 154806 - RNA, 80 nt, Homo sapiens
aagggcaccaacacagccccaacagccaaggacgaggagggagaaacgccacaccgggaaaggagggcccagaagccaag

SEQ ID NO: 154807 - RNA, 73 nt, Homo sapiens
gccgcccccaggagcacaaaagggccagcaagacgacacaacaaggaacaagaggcgagggcaaacgacagac

SEQ ID NO: 154808 - RNA, 71 nt, Homo sapiens
aaggagacaccagcacaagggcgcccgcggaccaggggggacggggcccgagggaccaccacacgaaacca

SEQ ID NO: 154809 - RNA, 78 nt, Homo sapiens
caggaaacgacccgggggcggcgaccggagggcgaaagcaccgggaggaaagagagccacacgaagaacacggccaaa

SEQ ID NO: 154810 - RNA, 69 nt, Homo sapiens
caacaggccccccgcgcgggcgcaaggagcacaggcggaggcagcggaggccccgccgcgccgcagccg

SEQ ID NO: 154811 - RNA, 63 nt, Homo sapiens
ggaagcggaacccagacagagcagagggaaggcaacacgagcggaagaacacacaccgggacc

SEQ ID NO: 154812 - RNA, 77 nt, Homo sapiens
ccaggaccagacacggccggacagggagaaacggacaacacccggagcagaaggcacgcaagcggcgaccgggaggc

SEQ ID NO: 154813 - RNA, 74 nt, Homo sapiens
gcccagagaagagacaccaaaggcgaaaagaccaaggacgaaccagagagcaaggaggaagcaggccaggggaa

SEQ ID NO: 154814 - RNA, 80 nt, Homo sapiens
ccaagagcgggacacaggggaggggcgaccccggggcccggccagcacgaccgaggaggggcggacagcggaggagaacg

SEQ ID NO: 154815 - RNA, 37 nt, Homo sapiens
gggggaccggcgggcggaccccaaggaggaagcgggg

SEQ ID NO: 154816 - RNA, 77 nt, Homo sapiens
cagaccgagacgaccaggagacaaagacgcggcccagaccgacagaccccaggggcagccaccacagagacagagaa

SEQ ID NO: 154817 - RNA, 53 nt, Homo sapiens
gccacagaaggcgcgacgccggggaagaaggaaggggaagggcgacagcaaga

SEQ ID NO: 154818 - RNA, 72 nt, Homo sapiens
gcacaccaacaaggcccggacaaagccgaaaccaggacccgacaaaagacacagcagccagaagaggggccc

SEQ ID NO: 154819 - RNA, 71 nt, Homo sapiens
ccccaccgcgggggcgcagagcgggcaaggggccagcacgaaagcagccaggagaagagcacaagaaacaa

SEQ ID NO: 154820 - RNA, 66 nt, Homo sapiens
gcaacccacgaaggaagaacaacgggcaagaagaccgcgagaggacgccaggaaagcaggcagagc

SEQ ID NO: 154821 - RNA, 78 nt, Homo sapiens
cccggacagagcccgggcgcgcaggagccgcccagcaaaacccaacgggaacccgccggaaaacggagagcaggcagg

SEQ ID NO: 154822 - RNA, 81 nt, Homo sapiens
acgccagaaacagccaccagaaggcccgacaagagaggcggagccacccccacaacggaccaggagaagggccggaaaccg

SEQ ID NO: 154823 - RNA, 78 nt, Homo sapiens
gaaaaaccacgaagaagaaaccggcggccaaaaaaaaaaaaggaagcacaccaagggaaccaagaccaggacaaagaa

SEQ ID NO: 154824 - RNA, 80 nt, Homo sapiens
gccacccaccaggaccccgcagagccgccccaggaaccaggaccccgggagggcgggacacccaggaggaagggggcagc

SEQ ID NO: 154825 - RNA, 78 nt, Homo sapiens
ccccaagaacacacagcccagccaccgcggcaccaccaaaccccacagcggagaaaaaggagaaacccccaagacaaa

SEQ ID NO: 154826 - RNA, 54 nt, Homo sapiens
caccaccagcggaggccggcggcccccaagcagagggaaaggaggacaaaagga

SEQ ID NO: 154827 - RNA, 67 nt, Homo sapiens
acgggacggcaaggcggcggcgccgggggaccccaaagccccaccccacaaaggcgagaggcccggg

SEQ ID NO: 154828 - RNA, 84 nt, Homo sapiens
agccaagagggcgcccagagacaacgagagaacgcagcagagaccacacggcggcgcagacgccccccgcagcgccccaggccg

SEQ ID NO: 154829 - RNA, 87 nt, Homo sapiens
cgcgaacgcacgcagccccgagcagagccagggaccacaccaccaccaccacaaccaaaggccaggaaccaccagagcccggcaaaa

SEQ ID NO: 154830 - RNA, 109 nt, Homo sapiens
aaacaaaggagcggcccagcaaccccagaacgcaccgcaagcccccccgggcacagcgcgagcgccgcgccgggaagcaggacaggagaggcgcaggagccgagcggac

SEQ ID NO: 154831 - RNA, 70 nt, Homo sapiens
cggaaacagaaacaaagggcaaaaggcgcaaaacaacacagccaccagaacggcacaaaacggggaacgc

SEQ ID NO: 154832 - RNA, 78 nt, Homo sapiens
gagaccagacgcgcaacacaacccgggcagggcggcaaccgagacacaaagggaaagcggccaaaacagaagaggcaa

SEQ ID NO: 154833 - RNA, 76 nt, Homo sapiens
gcaaccgagacacaaagggaaagcggaacgaacgcacaaacaaaaaaaaccagacgccccgagagacaaagaagca

SEQ ID NO: 154834 - RNA, 67 nt, Homo sapiens
agaccggcgaggacaccgcccagcccgagcaggccaacccaggccagacaccgaaaacgagaaacga

SEQ ID NO: 154835 - RNA, 77 nt, Homo sapiens
accccccgaaaggaccccccaggacccagagagggaccagggccaaagaagagccggggggcaggcggacagcaagc

SEQ ID NO: 154836 - RNA, 74 nt, Homo sapiens
aggagcgagcggcgaggcgcggcccggcggccggaaaggaaaagcacagggccaggaagcagagggacagccag

SEQ ID NO: 154837 - RNA, 74 nt, Homo sapiens
caggaccagacaggccagaacagacacaaagccagagacaagcaaaggagaaaagagaagaggcagagagaccc

SEQ ID NO: 154838 - RNA, 67 nt, Homo sapiens
aaagaaaccgggaccacagaaccggcccgggagcgagacgcaacagaaaagccgagacaggagaaga

SEQ ID NO: 154839 - RNA, 85 nt, Homo sapiens
cggagggagagcaggagccacgagagaggaggcgcgcgcgcgccgagccgcgggcccgcagggcggcaccccaccgcccagccac

SEQ ID NO: 154840 - RNA, 81 nt, Homo sapiens
gaagaggagacagaccgacagggagggagggacggaaacaaagacagaagcccagcgaggggagagcgacgccgaggccga

SEQ ID NO: 154841 - RNA, 78 nt, Homo sapiens
cccgcccggaagaagcgaccaaagcgccgaggaccggcaacagggcggcggggaaaaggccaccacgcccccgaacga

SEQ ID NO: 154842 - RNA, 74 nt, Homo sapiens
cggaaccaggcacccagcacgaaggaggaaccaacaacaacacaaaagccgaggccgccagcgccaagaaaaaa

SEQ ID NO: 154843 - RNA, 48 nt, Homo sapiens
gacgacgaagcagcgcagaaggagaccaaaagggggaagaggagagcg

SEQ ID NO: 154844 - RNA, 37 nt, Homo sapiens
ggccggaggcaggggaaaggcaaaagcagaccggaaa

SEQ ID NO: 154845 - RNA, 75 nt, Homo sapiens
ccggcaggaccgggcagaacaacgaacagaagcacaaccagagccggccccgagagacggcaggaccacaggaag

SEQ ID NO: 154846 - RNA, 61 nt, Homo sapiens
gcaaaacacaagagagcagggaggagaacacagaagagaacccgaacacagcaggagcaag

SEQ ID NO: 154847 - RNA, 82 nt, Homo sapiens
cacaacagcaaccagcgcgccccggccaggccgcgcgggccccagccccaccccagccccaaaggaggcgcgagagggacgc

SEQ ID NO: 154848 - RNA, 67 nt, Homo sapiens
gacgcaagaacgccgaaccaggaacaacaagaaccaagccacaggccagggcgacagacaagaaggc

SEQ ID NO: 154849 - RNA, 83 nt, Homo sapiens
gggagacagggacaagccccggaacacaaccggacagggaccaagaaaggcccagggaccaaagcccggacaaggcccgagca

SEQ ID NO: 154850 - RNA, 77 nt, Homo sapiens
cagaaacgaggggacaaacacaccagagggccacgagcagggaggcaagaaccacaacaaccagccaaacgcacaaa

SEQ ID NO: 154851 - RNA, 63 nt, Homo sapiens
gaggccagcgcaaacggcaacccaacggagcgcagcggcgcaggggggaagaagaaaacaaac

SEQ ID NO: 154852 - RNA, 67 nt, Homo sapiens
gagccaagcaggaaggcccagcaaagagaagaagggcccagaccaagccccaccaacagaagagccc

SEQ ID NO: 154853 - RNA, 56 nt, Homo sapiens
acaagcgggggaggcaggccgccccccagcgggcgcgcacccggaggagaagaggc

SEQ ID NO: 154854 - RNA, 71 nt, Homo sapiens
agggacacgaagcgagcgccgaggcggaggagggcgcaacggacaccacaaccccgccccaggcaagcgac

SEQ ID NO: 154855 - RNA, 91 nt, Homo sapiens
ccaaccacccccaaacaggcggccccgcccaggccccaaggagccacaccggaccagaccccaggaaaggagacagcacgcccgaagagac

SEQ ID NO: 154856 - RNA, 79 nt, Homo sapiens
gccacagacccaggccagcacccacccaccgggacaggcagcccgcaaggggggccaggagagaggcacaccaggcgag

SEQ ID NO: 154857 - RNA, 71 nt, Homo sapiens
gaaccaaaagaccaggagcccccacccacaaggacggccaggaacagccacggggacaaagaaacaccaag

SEQ ID NO: 154858 - RNA, 113 nt, Homo sapiens
gcgccggaaggccgcaccgcccccccgcccccagcagcgcggaggccgccgcagcaagggacagcggacgcaagcgcccgaaggccaccagcgcaccggcggaaggagccggc

SEQ ID NO: 154859 - RNA, 76 nt, Homo sapiens
cggagaggaaaggggaaaaaggaacagacccaacaaagaggagaacgccaagccaaccgaaaaagccgacaaaaaa

SEQ ID NO: 154860 - RNA, 64 nt, Homo sapiens
gcgccgacgggccccgaggccgcgggcgggaagggcaggcgaaaaaaacgagacaagacaaaaa

SEQ ID NO: 154861 - RNA, 62 nt, Homo sapiens
cacacaccccgaccacgcggccgagaggccgaacgaggcggggggcccgagaccacaccaca

SEQ ID NO: 154862 - RNA, 77 nt, Homo sapiens
caagcagagagacagccaagcagcgggaagccagcccaccagagagcgaagaaagcaccggaaacggggaagaaaag

SEQ ID NO: 154863 - RNA, 42 nt, Homo sapiens
gggcgaccccgcccgggcccgggccggacaaagggaacagcg

SEQ ID NO: 154864 - RNA, 88 nt, Homo sapiens
aaaaagagcacaagcaccaaaagcaccacaagaccacaagcaggcaaggccaagcaaggggcggacacaaggcggggcccaaaaagag

SEQ ID NO: 154865 - RNA, 61 nt, Homo sapiens
gcccaaccgggaggagggaggaaaacgcagggcaagaaggaacagacaaaaacggccggaa

SEQ ID NO: 154866 - RNA, 67 nt, Homo sapiens
cgagaagaagagaaacaacgggcccccagaaacacgaggaacaaagagaaaaagaaagagaaacaca

SEQ ID NO: 154867 - RNA, 76 nt, Homo sapiens
ggacccgaccaggcacaccgcgaaccgccgggcacaacccaacagaaacaacgaagcaagcccaagggcgcagggg

SEQ ID NO: 154868 - RNA, 67 nt, Homo sapiens
aaacacagaagaaacagccccaggaccacaggggcacaggagaaagcaggaaggacagggaaaaaca

SEQ ID NO: 154869 - RNA, 84 nt, Homo sapiens
cgggcagccaaaggagcagacgcccgagaagcccaggacccaaagacaggaccacgcaccagcagagaaggaaagcaaaccgaa

SEQ ID NO: 154870 - RNA, 66 nt, Homo sapiens
aggaccgcccacaaaggcgaagcccccagacaccgaaaacgagaaacgaaagagacacgggggcac

SEQ ID NO: 154871 - RNA, 46 nt, Homo sapiens
cgcggcgcaggaggaggaggagaggcagccgagcagagcgggagag

SEQ ID NO: 154872 - RNA, 85 nt, Homo sapiens
gacgagggaggaacacccgaggaagcccaacccagagcccccggcagagacgaagagaccgcagaagcgaaaaggagggaaagaa

SEQ ID NO: 154873 - RNA, 72 nt, Homo sapiens
cggaggaggagccggacgggccaggaaggacggccagagaccccagccgcaccgaccacaggcgaccccgga

SEQ ID NO: 154874 - RNA, 53 nt, Homo sapiens
caaaccccagggaagaggaccaaagcgaacaccacaccagcggacagccacca

SEQ ID NO: 154875 - RNA, 62 nt, Homo sapiens
gcaacacggccaagaagaggaaaggcacagagaaaacccaccacaacagcccgcagaaaaga

SEQ ID NO: 154876 - RNA, 84 nt, Homo sapiens
caagagcccaacaccacccgagagccccaagaacacgaagagagggccggcacccgccggaaccgagcaacgcgagcagaagcc

SEQ ID NO: 154877 - RNA, 74 nt, Homo sapiens
ccaccccaccgggccccagaccggcgaccgagagcccggaccagcagagggccgacggacaccaacaggaaaag

SEQ ID NO: 154878 - RNA, 77 nt, Homo sapiens
gaaaggagccccgcgccgagcccggggcgaggaggccccaagggcgagcgggaccgaggaccaaccggagagacacc

SEQ ID NO: 154879 - RNA, 62 nt, Homo sapiens
ggcgcgccaaggacacggcacaccgaccgacgggccggaaagagggcgggcccgcacggagc

SEQ ID NO: 154880 - RNA, 59 nt, Homo sapiens
cgcgggagagcccgggccacccccccaggcaagggacgggagcagcggaaggcccagac

SEQ ID NO: 154881 - RNA, 56 nt, Homo sapiens
ccgcggagcggcgccgacaagggaagagggaacagaaacgcccccgacggaaaccg

SEQ ID NO: 154882 - RNA, 65 nt, Homo sapiens
ggaaacagaccgagcaaacaaagggaagggaggcccaggacgggagagacaagcagggaccggag

SEQ ID NO: 154883 - RNA, 68 nt, Homo sapiens
cagcccccaagagcggaacaggaaccaaccggagaagcagagggggaagagaaaagggcccacccggg

SEQ ID NO: 154884 - RNA, 56 nt, Homo sapiens
ggacggccgcgaagaggcgggccggaagcaaacaggggcaggaaaacccaaaacga

SEQ ID NO: 154885 - RNA, 81 nt, Homo sapiens
gggaaggaaacagcaagcgaagccgaaaaagcgcccgagacgggcccgccgaaagcggaacccaaagcccaaagaggaagg

SEQ ID NO: 154886 - RNA, 70 nt, Homo sapiens
ccagcaccccagagagcccccaacccaaggcaccaggcgaggccccgcgccccagcgccccaggcacccc

SEQ ID NO: 154887 - RNA, 55 nt, Homo sapiens
cagcccccgggagcgggacacagccacacgggcaagcaaaacggagaccgagaag

SEQ ID NO: 154888 - RNA, 84 nt, Homo sapiens
agacggcaaggaggagccagaggcaacaaggcggacaagagaagccgccaggagaacgcacaaccacggggacgggcagaggac

SEQ ID NO: 154889 - RNA, 121 nt, Homo sapiens
acaagggagaaaacacgagaaaacagaaccgaccccccgggaaacaagagacgacgggaaggaagggagagaccagcagccgcgaaaccacccgaaagaacaaaaagaaaaggaaaaccag

SEQ ID NO: 154890 - RNA, 88 nt, Homo sapiens
ccaaaagcaccggccccgcacagcaaaccaggaaaaccaacggcccggaggaccacagcccaggggccccaggcgaaacccagccgga

SEQ ID NO: 154891 - RNA, 47 nt, Homo sapiens
ggaggccgcacggcccacgcgaggaacaacgagagcgccccaaggga

SEQ ID NO: 154892 - RNA, 75 nt, Homo sapiens
cacagagcaacaggggagcagagaaacagcggacaggggggagggacgaccaggacagaaacagaagaaagaggg

SEQ ID NO: 154893 - RNA, 82 nt, Homo sapiens
gcgggccgggagcgcggcggagacgagccgagacagagcacgcccggaggggagcccaaaagcacgaagcgccagaggacac

SEQ ID NO: 154894 - RNA, 69 nt, Homo sapiens
aaaagaaagaaaagaagggcccaacacccacagggaaggaacgagaacaggacggacaacagaaccaga

SEQ ID NO: 154895 - RNA, 87 nt, Homo sapiens
cgggaggggccgggaggcagaggggcaggggaggcagggagaagggacacagcacaccacggccgcgggaagaaggagggcgggccc

SEQ ID NO: 154896 - RNA, 84 nt, Homo sapiens
gagcgacgggcaggaaggagggggcgcacaaacgagccagaagacagggccagaaacggcgagccacgagggacaggaggacgg

SEQ ID NO: 154897 - RNA, 71 nt, Homo sapiens
gccaagaagaccgagagcaccacaaggccaagggcaaggagacaggccacgcgcgcccaagcacaaggccc

SEQ ID NO: 154898 - RNA, 70 nt, Homo sapiens
cagcaagggccccagggcaccccgcggagaaaaccggaagagaaaggccgggaagcaggaaagaaaaaaa

SEQ ID NO: 154899 - RNA, 74 nt, Homo sapiens
aggcaagacccacccaagcacacccaaggacagcagcccaccaagcacagacaagcagcaggaagggagcagga

SEQ ID NO: 154900 - RNA, 70 nt, Homo sapiens
gaaaacacaaacccaggagcaccacgggggaagcagaccaagaagacagaaggggcccgccaccgcaaag

SEQ ID NO: 154901 - RNA, 87 nt, Homo sapiens
ccgggcccaaggccgcgccgaccgcacgcgcacggaacagcagcaaccccagcagcgcacaaaacgacacaaacccgaaagcacccg

SEQ ID NO: 154902 - RNA, 76 nt, Homo sapiens
acagaagacagcggcccccaggaaccggcaagaccacaagcacggcggcccgggcccgcgggcccagcaccaaaga

SEQ ID NO: 154903 - RNA, 52 nt, Homo sapiens
ccagaacaacgacaaaggcagagagcaccaggacccgaaaagccagcaagcg

SEQ ID NO: 154904 - RNA, 60 nt, Homo sapiens
agaaccccaccagcaggaggggagagccaagcgagccagccccaggccgcgagccggaca

SEQ ID NO: 154905 - RNA, 74 nt, Homo sapiens
gccaacacccccgggccccaccggccaagcgcaagcagcgccaacggcaagccgcgcagcgagacggggcccac

SEQ ID NO: 154906 - RNA, 72 nt, Homo sapiens
aaacccaagagggaaccacccccaacaaccagggcaagaaaggagaaaacaaacaaggggagagaggggaac

SEQ ID NO: 154907 - RNA, 62 nt, Homo sapiens
caccaaaggagccagcgcggagcaggcgcagagcaggaagcagaacacagagagccagcaga

SEQ ID NO: 154908 - RNA, 71 nt, Homo sapiens
ggaccccacccagccccgggacacaggagcgcgcacaggcaaaagacgggcgcacccggcgcaggcgcaag

SEQ ID NO: 154909 - RNA, 69 nt, Homo sapiens
acggagggagcggaaaccgacgcagacggaacacaaccaagacgggacagccagaaacagcacacaaga

SEQ ID NO: 154910 - RNA, 79 nt, Homo sapiens
ccgagagccgcggcccggcggaaaggacagcagaccagcaccgaaaggaggacccgaggcccccccgaccgggggagcg

SEQ ID NO: 154911 - RNA, 78 nt, Homo sapiens
agacccacggccagaacaagggacaacccgccacaacgacaaaggaccccaaagaccccggaaggcggaccaggcaca

SEQ ID NO: 154912 - RNA, 72 nt, Homo sapiens
gaaaacgaggaagaaggaccaaaacagcagccagacgagacggaggcacacgcggccaggacacacagacaa

SEQ ID NO: 154913 - RNA, 74 nt, Homo sapiens
gaagacgaagcagaaacgaaaaaacaccaccaacaggaaagcaagggaggcagaaagcaacagaagcagaagaa

SEQ ID NO: 154914 - RNA, 54 nt, Homo sapiens
cacggggaaacacagcagaacacagcgaaagcaggcaaacacaagccgggcaag

SEQ ID NO: 154915 - RNA, 56 nt, Homo sapiens
ccccaggggaaaacccccgggaccagggacaagaccaccccagcacaggcgccagg

SEQ ID NO: 154916 - RNA, 31 nt, Homo sapiens
gaagcagaaaccaagccaacgccaagaacca

SEQ ID NO: 154917 - RNA, 75 nt, Homo sapiens
acaggaccggacagagaccacccccaggacccccacacccccagcaccaagacaagagaggcagccaggacccga

SEQ ID NO: 154918 - RNA, 76 nt, Homo sapiens
cggagaaggagccaagaaagagaagcaaaacacaagaaggcagaaggaaagaaaggcagccggccaagcagagacc

SEQ ID NO: 154919 - RNA, 82 nt, Homo sapiens
acaacaagccaacccaagaagcggagcgaagcgcgggaggcccccagccccgccagccccccagaccaggcccgaaggaaga

SEQ ID NO: 154920 - RNA, 81 nt, Homo sapiens
ccgagccaggagcaggggccacggagcccccacccccccgccaggccccagagacaccagagagggagagaccagaggcgc

SEQ ID NO: 154921 - RNA, 51 nt, Homo sapiens
agaagggaaaaggaggaccaacaagcacaaagacagagaggcaacgcggca

SEQ ID NO: 154922 - RNA, 70 nt, Homo sapiens
aaacggccaaaacaaaaccagagcaacacaccgacacaaaggaagaaccgaagagcaggaccgagacacc

SEQ ID NO: 154923 - RNA, 83 nt, Homo sapiens
ggcaacgcgcagaacaccaaccgccacccgcggggagacacggcaaagggccaccaggacgaagaggaggaggaaggcacaga

SEQ ID NO: 154924 - RNA, 81 nt, Homo sapiens
agaaccccaggacgcgcccccgggagcgggcgcccagagaggggggaggggaagaccaagggaaaaaagcaaaagcacgag

SEQ ID NO: 154925 - RNA, 82 nt, Homo sapiens
acccgcgcgcagagccgcacagcgaaggccgcccaggagacccgcggacacggccggccacagggaggggcgaggacaacga

SEQ ID NO: 154926 - RNA, 65 nt, Homo sapiens
ccagagacccacagaccaaaggacagggaaccagaggaccaggccacaccagaggagcaccggcc

SEQ ID NO: 154927 - RNA, 57 nt, Homo sapiens
gcggaaaaaaggaaagccaccggaaaaacaggcacaggcgcgccggaagcaagcaga

SEQ ID NO: 154928 - RNA, 80 nt, Homo sapiens
aacagccccagcccggccccaggaacgaccgcaggcgggacaagaaaagaaaaagcaacagaaaaacaaccggaagccgg

SEQ ID NO: 154929 - RNA, 72 nt, Homo sapiens
ccacaccgccaccgacacagcggcggaccccacaccaaggaagaaaaaagcgggcacgggcagcacaaagcc

SEQ ID NO: 154930 - RNA, 58 nt, Homo sapiens
cggggaccagcagccgggccagggccagagcaaagcggcgagaggacgcccaccccgg

SEQ ID NO: 154931 - RNA, 64 nt, Homo sapiens
gcgaccagggcgcccgcccccccaccgaggaaggccggcaaaagcagaccggaaaacccaccgg

SEQ ID NO: 154932 - RNA, 43 nt, Homo sapiens
caccacccgacagcgaccagacccaacagaggaagccgcaaga

SEQ ID NO: 154933 - RNA, 79 nt, Homo sapiens
cggggacaggacggcggggcgagccagaacaccaggcagaacgaaaacaggcccaacagcccagaggacgagcaaaggg

SEQ ID NO: 154934 - RNA, 68 nt, Homo sapiens
agagaagaccccgcgggaggcgagcagcgagcagcgacaggcgcgccagcggcggcggcgaaccgggg

SEQ ID NO: 154935 - RNA, 81 nt, Homo sapiens
ccgcggcagccgcggaccaccgccgccagggaagaagaagcgcacaaggagcacaacagggagcggaagacgacagcaagg

SEQ ID NO: 154936 - RNA, 81 nt, Homo sapiens
cacccgcgcgccgccgccgaggagaaagacaagcagaccggaagaccgacggaagaccacaccccgagggagcccaggaca

SEQ ID NO: 154937 - RNA, 77 nt, Homo sapiens
agcaaaagacaaacgaagcacaaaccaggggagccgccaccaaaagcagacggaaaacccacggggaagaccacacc

SEQ ID NO: 154938 - RNA, 76 nt, Homo sapiens
caagagacagggcacaccaaacccacgggggagccccccagacccgaaaggagacaagaggacagccgcacggaac

SEQ ID NO: 154939 - RNA, 82 nt, Homo sapiens
caggccaccacagaaacaaaagcaacaaagagggaggaggaggaggaggcccggcggccagcagcccgccggaggcgggacc

SEQ ID NO: 154940 - RNA, 73 nt, Homo sapiens
gagagcgagcgagggggggcgcgccggaaaccggagcgcgcagcaggaaccagacacaaagaggaagcccaca

SEQ ID NO: 154941 - RNA, 74 nt, Homo sapiens
ggccccacagaccggcacaggcacaaaacaacaagagcccgagcgccacggaacgaggcaaggggcagacagaa

SEQ ID NO: 154942 - RNA, 71 nt, Homo sapiens
cagagggaaaccagcccaagcaccacccacgaccgggaccgagacagcccagcggggcacagagcaccaag

SEQ ID NO: 154943 - RNA, 64 nt, Homo sapiens
ggaacagacgcaggaaggggacggggaaagccggaaggccaacgcaagcccacggggaaacggc

SEQ ID NO: 154944 - RNA, 64 nt, Homo sapiens
cacccgcgaaaggcgcccccaggccgcgccaaaaccccaggcggcaaggaagaggcccggaaag

SEQ ID NO: 154945 - RNA, 69 nt, Homo sapiens
acggaaagacaggaagcaccccggaaccgcagcgggcgcagagacggaggggcgaggaggcgggccagg

SEQ ID NO: 154946 - RNA, 66 nt, Homo sapiens
agggaaccaccggacggcggaaaggcccaggcgccccgcagggaaacagcacaacggaacaacagg

SEQ ID NO: 154947 - RNA, 76 nt, Homo sapiens
cagccaccacaagcccgagcccgaagagagaaggcaaagaacccggggaaaggcccccccaccaagcaaccaagcg

SEQ ID NO: 154948 - RNA, 75 nt, Homo sapiens
gcgcgcgcacggcaggacggagcccgacggagcagcagcgccgggaaggaaagcacacaggacagaagcagagaa

SEQ ID NO: 154949 - RNA, 70 nt, Homo sapiens
aagcaggacggaggagcgaccaccgcgcggggaccacgagccaggacccagcgcccccccggggaagaca

SEQ ID NO: 154950 - RNA, 57 nt, Homo sapiens
acaaaaccggggaaagcgaacaaagacccgcaccgagaacacagccaagaagaaaag

SEQ ID NO: 154951 - RNA, 78 nt, Homo sapiens
accaccaccaccaccacagagcgggaagaggggcgagagagccgccaggggcaaagagcaaacacgcggaggaaccac

SEQ ID NO: 154952 - RNA, 88 nt, Homo sapiens
caaccgcaaccagacgccagcgggacgaggaccgagaccgcggccgggaccgaggccgaacacccaacaagaaggcaacgacaaacag

SEQ ID NO: 154953 - RNA, 88 nt, Homo sapiens
gagagcgagaaggagaaagacacgaacaagacgccaaggagacgccgcagagacccccgggagcggagccgcagccccacgagcgcgc

SEQ ID NO: 154954 - RNA, 87 nt, Homo sapiens
aagggggaccgaccaggacgacacgaaggaggaagaagagacgaagagacagcggagaagggaagcagggaaaggccggagagagga

SEQ ID NO: 154955 - RNA, 81 nt, Homo sapiens
cccgagagaaccgcggcagaagccgagcaacaccccggccaccgacccacaagaaaccagcaggagccaccggaacgacgg

SEQ ID NO: 154956 - RNA, 71 nt, Homo sapiens
aggccaagaaccccacaggccgaggagcaggaagggccaaagccccaagaacccagccacgcaaagcgggg

SEQ ID NO: 154957 - RNA, 76 nt, Homo sapiens
agaaggccgaaagagcacggacccggaaggggaaaagccacggcaggacaaggggcagaccacaaggagagaagag

SEQ ID NO: 154958 - RNA, 74 nt, Homo sapiens
gagaacaccgaagacaagcccaaagaaaggcaaagaaaaagccagccgaggacgggaaccagaccccgaccagg

SEQ ID NO: 154959 - RNA, 69 nt, Homo sapiens
ggacgcagcccggcggacgccggcacagaacggacaagagaaaaaaagggcgggcgaacaaaaagagca

SEQ ID NO: 154960 - RNA, 92 nt, Homo sapiens
agagaccacggaagccccgacggccagccaggagaaggagcggcggaggagaagcagagagaagcacggagggagcgggccaaggaggaggc

SEQ ID NO: 154961 - RNA, 61 nt, Homo sapiens
caccacccaggaggagcgccaaagaaggaggcccgacacgcgggagccgcccggcaaagcg

SEQ ID NO: 154962 - RNA, 70 nt, Homo sapiens
gcaacccaaacacagaaggccgcgggagcaggggcagggcaccccaccccacccaagaaaacgggcaggc

SEQ ID NO: 154963 - RNA, 72 nt, Homo sapiens
cggcacggaacgagggccccagagacgcccgcaggaccggagccgcagcagcgcgcgcggcagcgggcaccc

SEQ ID NO: 154964 - RNA, 84 nt, Homo sapiens
agagccgcagggcccagacaccagcagagacaaggagcgcagagcggacgggcgcgagaacccacagaaaaccagaaggcaccg

SEQ ID NO: 154965 - RNA, 80 nt, Homo sapiens
agaagcagaagcgcccgcgaggcccgcgccaaggagacagacggaccagacccccgcggagagcgcaccgaagggccgca

SEQ ID NO: 154966 - RNA, 74 nt, Homo sapiens
cgggggcccccgaacggaccaaacgggaaaagagacgcaaaccacgaggacagagaagagagaagccaccagca

SEQ ID NO: 154967 - RNA, 66 nt, Homo sapiens
gaggagagcgaacaaccccagaagagggggaaacccgcccagggcgggagaccgccaagaaacacc

SEQ ID NO: 154968 - RNA, 65 nt, Homo sapiens
cccgacccgcccccccagaaacgcgaagacgacgagcgcaccaagaggaacacaggcgaccgcca

SEQ ID NO: 154969 - RNA, 56 nt, Homo sapiens
gagagcggccgacaccggccacaagggcgcagaagccggcagagcccaagagacaa

SEQ ID NO: 154970 - RNA, 43 nt, Homo sapiens
cgagcccgagcggcagcgccggagcccgggcgcgccaggcaca

SEQ ID NO: 154971 - RNA, 58 nt, Homo sapiens
agcaggcgaacccgcggcgcaaaacgacccacccagccaacaaacacccgaaggacca

SEQ ID NO: 154972 - RNA, 87 nt, Homo sapiens
gaaaagaccagccgagccagcccaccccagccccacgcccaccccagcgacacaggaccccgggagcacggcacccggaaacccagg

SEQ ID NO: 154973 - RNA, 100 nt, Homo sapiens
gagcaccagcgaacgagcaaaggcacgggcagccggaaggacaccaagagcggaccgggccccgggaaccaagaccaggacaaagaagacccggagagac

SEQ ID NO: 154974 - RNA, 71 nt, Homo sapiens
ggaccaagcaggagggccaccagggagcgccagcaggcgggaaagacacaaagcaggcaaaaacacagagc

SEQ ID NO: 154975 - RNA, 81 nt, Homo sapiens
cagagaccgccagcaggcaggcccgagcacgcgcgggagcagcagcgacagcagccaggcgagcggcagggagacagcgca

SEQ ID NO: 154976 - RNA, 76 nt, Homo sapiens
cgaccgccgccccacgccggaggaaccgagaagagcagagcggagggagccccagacacgggacaagagaaaaaaa

SEQ ID NO: 154977 - RNA, 79 nt, Homo sapiens
gccgcaacaggaaagcagcccgaaaaagacgcgagaagccacacggcaacggggaccccggagcccagaagacagaggg

SEQ ID NO: 154978 - RNA, 57 nt, Homo sapiens
cgcagcaagacggccgcgcggcccgcagggggaggcaagcaggggggcaaaggaaag

SEQ ID NO: 154979 - RNA, 80 nt, Homo sapiens
caccagcacaggaaaacccccgcccgcccaagcagaaaagcgagaagagagccccggaacggcccagcaaaaaaccaaaa

SEQ ID NO: 154980 - RNA, 71 nt, Homo sapiens
ggggcgaggcgggcgggccggcgagcgcagcgcgaccgggaggcccagcgaaggagccggaaggggcacca

SEQ ID NO: 154981 - RNA, 65 nt, Homo sapiens
aggcggcccaccgggcccccacaggcggagcaggagcaaaggagcaagaaaccagacccggaaac

SEQ ID NO: 154982 - RNA, 69 nt, Homo sapiens
aggcccgcaaacagggaacaagcaggcaccgaggggccgcaaggccaggcgcgcagaggcacccaacgg

SEQ ID NO: 154983 - RNA, 77 nt, Homo sapiens
gaaaagaacacagaagcaaggcagcaagcgcggcgagaaggcgacaagaccacagacgagaaaacgcacgagaaagc

SEQ ID NO: 154984 - RNA, 67 nt, Homo sapiens
caggccggaggaacggagcaccgcgcaaaaaaacgggacaagacaggaggacacccgaaacaagggg

SEQ ID NO: 154985 - RNA, 72 nt, Homo sapiens
acaggggcagccaggccggggacgggagaccggcgacggccggcgacacccccaccgccacgggcaaccgcg

SEQ ID NO: 154986 - RNA, 75 nt, Homo sapiens
gagccaaggaaggcgccacacaaggaggggccgaaaaaaaggagaacgacaagagaagaaagcggaggaaggcgc

SEQ ID NO: 154987 - RNA, 61 nt, Homo sapiens
gagaaggaccaagaaccaggacacccccgccaaccgcccccgagccaggcccaagcgggcc

SEQ ID NO: 154988 - RNA, 82 nt, Homo sapiens
caaggccgagagccggaacaaacgagggcccgggaggaccgacgcagccaggaaaaccgccgccggggccagcaagaacaaa

SEQ ID NO: 154989 - RNA, 78 nt, Homo sapiens
gcccggcagccaccccgcgggaaagccgagggccagggagcgcggaaggaccacggagccggcagacggcaacggagc

SEQ ID NO: 154990 - RNA, 77 nt, Homo sapiens
cgggaaccgaagccaccgaggcagaacaacaacggaaaaggagaagccacagcacacaggaacagacaaagaagaag

SEQ ID NO: 154991 - RNA, 79 nt, Homo sapiens
acaagaaaaacagccgaaggaaggaaacggaacgccaagcgaagaagaacgaaacggaagcacaaagcagcgcgagaaa

SEQ ID NO: 154992 - RNA, 104 nt, Homo sapiens
cccaaccccaagcccgagcagcgcgaccggcgacgaccggaccacgcagggggaaacagagccccagggccaagggaaccgaaccaccaggccaaaaagcgccg

SEQ ID NO: 154993 - RNA, 59 nt, Homo sapiens
gacacagaccacgcgggacagaaaaggggccagcagacccagcggggcggagcagggag

SEQ ID NO: 154994 - RNA, 67 nt, Homo sapiens
cgcagaaccggccagccacgcacagcaggaggagaaagaccacagggaaccggaacgaagccagaga

SEQ ID NO: 154995 - RNA, 81 nt, Homo sapiens
ggcgcccccgggggcccgacgcacacgggggcggacaccacaagaagggcgccaggcacaaaacagcgccacggccaccag

SEQ ID NO: 154996 - RNA, 71 nt, Homo sapiens
ccaggcccagcgggccccgaggccccagaccaacaaccccacgagacgcacaaccggggggaacacacggc

SEQ ID NO: 154997 - RNA, 69 nt, Homo sapiens
agacccacggaaaacgcaccaagagaagccgcgggagcggaagacaggcccggagcccgacggaccgga

SEQ ID NO: 154998 - RNA, 79 nt, Homo sapiens
ccgcaaagcggagagcgcgaagcccaccgaaagcaggcaggagaagggcaccggggaggaccgcgcgacgcgccggagc

SEQ ID NO: 154999 - RNA, 83 nt, Homo sapiens
cgcccagcggccagacagcgggcgcggggcgggcacggcgggccggggagagcgccggcgcggaaggcgggcccccgcgcaag

SEQ ID NO: 155000 - RNA, 62 nt, Homo sapiens
accgcaggggacagaacggcgcaacacgagcccgcacgagaacaccaggccaccagggcccc

SEQ ID NO: 155001 - RNA, 76 nt, Homo sapiens
aaccagaagagggcgacaccgaggaagaccgacaggccaaagagaagaggaagcccggaggaggagagagagagag

SEQ ID NO: 155002 - RNA, 59 nt, Homo sapiens
gaagacaaaacaggcagaaaacaagccagccagggcagcagcaaggagaacaccagagc

SEQ ID NO: 155003 - RNA, 38 nt, Homo sapiens
aagcagggcacgagacggcaaaagcagaccggaaaacc

SEQ ID NO: 155004 - RNA, 81 nt, Homo sapiens
gaaaaagggagagagacaaaaacagggacagaacagcacccacagcgggagggacaggagaacaggcacgaccccaccggc

SEQ ID NO: 155005 - RNA, 74 nt, Homo sapiens
ggcagccccccaggggagacacggcagacgcgaggaaaagggccccaggcagagagacaccgggcccagaaaaa

SEQ ID NO: 155006 - RNA, 61 nt, Homo sapiens
ggcgggcgaggcggcccagcggcggcagggggggccccagcccggccgaacgggcgcacga

SEQ ID NO: 155007 - RNA, 82 nt, Homo sapiens
caccgcggagcaaaaaaagagcccgcaagaagaacagagacagcagccaaacccccaggaagcgggcaccaacagacaacca

SEQ ID NO: 155008 - RNA, 82 nt, Homo sapiens
ggcggcaggagagcaaggagaaggacgccagggcggaggaccccaacggcaccaaccagcggacacacggaaaagggacggg

SEQ ID NO: 155009 - RNA, 74 nt, Homo sapiens
accaagccacggacaacgaaacaaaaaggaaaaggcagcaaacccaggacaagcaccacaagccaacaaaccga

SEQ ID NO: 155010 - RNA, 78 nt, Homo sapiens
accgacagaacgaggacaggcacagcgcaggaaagaagcagcgaagcaaagacggcaaacagaagggcgcaggaaaag

SEQ ID NO: 155011 - RNA, 83 nt, Homo sapiens
aacagagaaaggacgaagacgcccgggaccgcaggccaggcagagcagcagcgcaggggaaggagcgcgccaagaggcacaaa

SEQ ID NO: 155012 - RNA, 71 nt, Homo sapiens
cagggaaccacaccaccacgaccacacgacagcagcagccggcaggagcggacaacggaggagaggagagc

SEQ ID NO: 155013 - RNA, 37 nt, Homo sapiens
cacagaggggcgacgggcccgacccaggcaagcgagc

SEQ ID NO: 155014 - RNA, 77 nt, Homo sapiens
cagcgccacacaaagaccaggcaagggccccagaaaacgggacaaaccaggggaagaaaggcaagaacagcagcggg

SEQ ID NO: 155015 - RNA, 82 nt, Homo sapiens
cggcgcgccgaggcgcccaccagagcaaagaggacagaaccgacggaagccacgggagcgaacgagaaccacaagcaggagg

SEQ ID NO: 155016 - RNA, 80 nt, Homo sapiens
ccacaccagcggacggcgagggccccccgccggacaacacaccgcccaaccgggacaaagaaaggaaaagagaagaaccg

SEQ ID NO: 155017 - RNA, 82 nt, Homo sapiens
gcaacggacaccgcaacacaagggagccggggcccccagcaagaacgggaacaaaaccgcaaggcgccaccggaagaaacgg

SEQ ID NO: 155018 - RNA, 79 nt, Homo sapiens
gaggaggccccccagccagggaacggggcagggccaggccaggaccacaccccaacaacacaaaagaggggaaggacgg

SEQ ID NO: 155019 - RNA, 78 nt, Homo sapiens
agcgggcagccgccgccaccccgcggccgcacccccgccccaggacacgaggaggggacggcccgccacaggcacaga

SEQ ID NO: 155020 - RNA, 79 nt, Homo sapiens
aaacgacacccccccaagcccccacagcacccaacccaaacaacaaccaagccagaagagcgccgcgccaggcggaggc

SEQ ID NO: 155021 - RNA, 78 nt, Homo sapiens
ccccagccaaaccaccagcgcaaacaaccagagacggcgaaaaaccaaaaagccaggaaccacgacaagacgccaggc

SEQ ID NO: 155022 - RNA, 59 nt, Homo sapiens
aggagcagacggagaaagagaccacgagcccgaacaggcacgccggcggcccaacccag

SEQ ID NO: 155023 - RNA, 39 nt, Homo sapiens
acgggcggagcgaacggacgaaaaggaggggcaaaggga

SEQ ID NO: 155024 - RNA, 65 nt, Homo sapiens
cggcggcggcgcgcagcggcaggcggagagacccgccgccaggacgccagaaagagggcaacggc

SEQ ID NO: 155025 - RNA, 68 nt, Homo sapiens
cgagaacgccgaccgcacccagcgggcacaggacagcagcacacaggcgaaccagaaagagggcaaca

SEQ ID NO: 155026 - RNA, 67 nt, Homo sapiens
ggagggcagcagagaacacgggcacacagagcacgaaggaagaggcccggaaaggaaggggggaaag

SEQ ID NO: 155027 - RNA, 76 nt, Homo sapiens
gacagcaagggacagacgggaaaaaagagcaccaaaaccaacccaggcaagaaggccagaccaaagaaaagggaga

SEQ ID NO: 155028 - RNA, 67 nt, Homo sapiens
gaaccgaagagacccaaccaccagaagccccaaaacccagaaggaagaagaagaaagacaggaacca

SEQ ID NO: 155029 - RNA, 70 nt, Homo sapiens
ggaggaaggcacaggggcagagagcagcccaccacagcggagaagagaacccgaccgaagaaggaacagg

SEQ ID NO: 155030 - RNA, 75 nt, Homo sapiens
aacggacacggcacgccacacccgggggcccggaagggaccaacgcaaggaggcaccacccaccagaccccggag

SEQ ID NO: 155031 - RNA, 84 nt, Homo sapiens
ccaggggcagccgaacagccagcaggcgaaaaaaaggcaaagaagccgcccgggaagagcaaggggaacaaagcggcaaaagaa

SEQ ID NO: 155032 - RNA, 77 nt, Homo sapiens
agggaagcggcaagcagagaaaaccgccaacaagagagagggccccccaccaggcgcccaccccaccaaccaacaaa

SEQ ID NO: 155033 - RNA, 76 nt, Homo sapiens
gcaagccacaggccagcgcacgcggcaagcagaagaggaacagaagaagcagagcagagacggagcagcagccccc

SEQ ID NO: 155034 - RNA, 70 nt, Homo sapiens
cgacccgcgaacgagcaaccaacagcaacggacaggacagaaccagagcccaaggaagcaaagccaacca

SEQ ID NO: 155035 - RNA, 75 nt, Homo sapiens
accaagaacccacaagaaacagaacgacagcccgcaccgacgccggcggccagccagagagcacgccggccgcaa

SEQ ID NO: 155036 - RNA, 67 nt, Homo sapiens
caaacaagaaaagccaacgccggggagacaaaggaggaaaaacaggggccgaaagaagagccagagg

SEQ ID NO: 155037 - RNA, 77 nt, Homo sapiens
cgccggggacccgaccacagggggacgcggaagagacagcagaacaagagccaggaccggacaggaagggagcccgg

SEQ ID NO: 155038 - RNA, 81 nt, Homo sapiens
aaaggagcggaagaggccacgaggcgcacaccgccagcccaagaaaaagaggaagcccagacccacgccccgcgcaggcag

SEQ ID NO: 155039 - RNA, 83 nt, Homo sapiens
cacaggcagcagcacggcacagcacgccgaccagccggcgccaaagaacaccccaccagaccacccagcaagcccacaaaaaa

SEQ ID NO: 155040 - RNA, 81 nt, Homo sapiens
cgcgagaagcacgcacagggccgcgggaagaccagccccaaaggcgaaaaggaaacacacaaaaaaacgaaagaaaggaag

SEQ ID NO: 155041 - RNA, 72 nt, Homo sapiens
aagccaagacacacagaaccgacagggaggaacgcggggaggaggaggacaggaagagagaagggcacagac

SEQ ID NO: 155042 - RNA, 105 nt, Homo sapiens
cgcaaccagacgccagcgggacgaggaccgagaccgcggccgggaccgagggagagacagcccagaagcccagccgcacgaagcaaggggggcaacaacaagcac

SEQ ID NO: 155043 - RNA, 78 nt, Homo sapiens
cgaccccccacgacgcgcggaaaagagcgcccgcgagcagacacacgcaagccacggagggcagcccaggccggaaaa

SEQ ID NO: 155044 - RNA, 83 nt, Homo sapiens
gacgggagacgacggcgagaaacacgaccccagcgaacacgaagagaaaagagacaaaagcagcagaccacaccgagacagca

SEQ ID NO: 155045 - RNA, 72 nt, Homo sapiens
gcagcccccagcacggacaggaaaacaaggaaaaggccgcgggaaaaaacgaagccagagggacaccgagcg

SEQ ID NO: 155046 - RNA, 83 nt, Homo sapiens
aggaggaggcggcacagagaccggcagaccgccgggggacggaggcccagaaacgcgcggaaacgcgcgccaggcgcacagcg

SEQ ID NO: 155047 - RNA, 65 nt, Homo sapiens
gagcagcggcgccaggagcccggcgcggcccgggcagccgcgccccaggggcagcacgccgaagg

SEQ ID NO: 155048 - RNA, 35 nt, Homo sapiens
gcgggcccgcccgacgcggaagaacagagagaagg

SEQ ID NO: 155049 - RNA, 76 nt, Homo sapiens
caaaacgagaacagagagcagaccaggaagcgcaaagaaccccaaaaacgacagcaacaagccacagagagaagac

SEQ ID NO: 155050 - RNA, 57 nt, Homo sapiens
ggagacccgccggcacacccaggaccgggcaacccagaccagaagaaacagcagagc

SEQ ID NO: 155051 - RNA, 74 nt, Homo sapiens
ccccagcgccgaaaaaaaagggaaggcgccagacacagaaaagaaagagagcaaccacccacaaggaccgagaa

SEQ ID NO: 155052 - RNA, 106 nt, Homo sapiens
cccagcaagcgggacgcgggaggaaacccacacaacgagcacaccggagccagaaacagccaagggacaaggagacaaaggggaacacccaaccggagaaagacac

SEQ ID NO: 155053 - RNA, 83 nt, Homo sapiens
gccaacacagggaaaggcgaaggagccgaaacagcagagcaggaaccggcacggaacaagaggaaaaaccggacccaagagca

SEQ ID NO: 155054 - RNA, 71 nt, Homo sapiens
ccccaaaggcgggaacagccgcccaagccagagaaccaccacagggcccgaaaaacacagagccaggagaa

SEQ ID NO: 155055 - RNA, 83 nt, Homo sapiens
accagggcgcgccagcaccgccaccagagcgcccgcgcgggaccccaggccacagaggagccaggggccgggagccaaggagc

SEQ ID NO: 155056 - RNA, 54 nt, Homo sapiens
aggggcagcgcggacccgagcacaccaaaccagcggaagagcaacaaggaccag

SEQ ID NO: 155057 - RNA, 89 nt, Homo sapiens
cgaacaggacgccgcaacgcccaaccaggaggcacagcaagcagaagcacggcagccagggaaggcccccaaccaggcaacggacggag

SEQ ID NO: 155058 - RNA, 76 nt, Homo sapiens
ggccaccgaccgccccggggccacaccacagccacggcccgccgcgccacaccccaaaccacacaaccgcagagag

SEQ ID NO: 155059 - RNA, 77 nt, Homo sapiens
cgcccaacacaagaaggagaggccccaagcacccaagccaagacaagcaaacccaggaacacccggccggcccggcg

SEQ ID NO: 155060 - RNA, 39 nt, Homo sapiens
gcgagcgccccggccaagacagccagcaaagggggagag

SEQ ID NO: 155061 - RNA, 75 nt, Homo sapiens
cgggcggggcagagcagcccccagccagccgcgagcaaaccaagccaggcccgaagagcacccagacagggaccc

SEQ ID NO: 155062 - RNA, 84 nt, Homo sapiens
gccccccggcgggagccccgcgacgcgcccggcccggagcccccagcgcagcggccgcggaccagcaacaaggcagagcgaacc

SEQ ID NO: 155063 - RNA, 82 nt, Homo sapiens
gccagccccagagcggagacaacagcaggagcaagcgaccgaagaagaagaacggcagcgaaccaaggaacaacaagagaag

SEQ ID NO: 155064 - RNA, 77 nt, Homo sapiens
aacagagaaaaaaaaacaagccggagaggcgacaacaccccggcacacagcagaccaagggaggcagagacacggaa

SEQ ID NO: 155065 - RNA, 54 nt, Homo sapiens
agccgggaacccccacgcggccagcgaaaacgcccaggacgaacggagaaggaa

SEQ ID NO: 155066 - RNA, 59 nt, Homo sapiens
cagggaccaccaaccagcagccgaaagcaggaaaacggcgcaaacggagaggcgcaccg

SEQ ID NO: 155067 - RNA, 65 nt, Homo sapiens
caggaaaaaggcagaccgaggaccggaacagggcgccaaaaacaaagaaaggccaccaggccaga

SEQ ID NO: 155068 - RNA, 67 nt, Homo sapiens
gggaagaagacggcgaagcaccaacgccaagcacagaaaggggaggccacacaggaagaaaagaagc

SEQ ID NO: 155069 - RNA, 83 nt, Homo sapiens
aaagacggcaaaagcacaaggaccgcggacagagacaacaccgagagagaaaccccgcacagacaacccagagccacggcgga

SEQ ID NO: 155070 - RNA, 76 nt, Homo sapiens
cggccaaggggacgagcaaaggaagcgcgaacagcagcgcaggcacgggcgagagcgggaagagcacgcacaagca

SEQ ID NO: 155071 - RNA, 72 nt, Homo sapiens
gggaaccgaacccaaaacgagccacacccgggaaacacacccaagcacggcgcggaagcaggaaaggcagac

SEQ ID NO: 155072 - RNA, 87 nt, Homo sapiens
gcacaagccagcgcacccaggagcacaggagagagcagaggccaggaggggcccagcccggccaggaggcggcggaaaaaggacaga

SEQ ID NO: 155073 - RNA, 77 nt, Homo sapiens
ccggcgccggcaggccccgggccggacaaggccgcccggggacggggcacccgggcgggaccccccacaggaccggc

SEQ ID NO: 155074 - RNA, 69 nt, Homo sapiens
caggaccgaagcccgcgaggacaagagacacgcaaaccaaggcgacggaaggcagccaaaaaaacagac

SEQ ID NO: 155075 - RNA, 88 nt, Homo sapiens
aacgaccggggcaccagggaaaacacacccgagacccagacagaggcagacacacaggaaaaacaggcaaaacaggaagccaggaaaa

SEQ ID NO: 155076 - RNA, 70 nt, Homo sapiens
gcggaggcggggggaccggcgggcgggcccggcgagcgaccgccgggggaacgcccgagcggagcagcag

SEQ ID NO: 155077 - RNA, 54 nt, Homo sapiens
gacagcccaaccgccacagggaggaggacagggcagaccgccagcagcacagca

SEQ ID NO: 155078 - RNA, 69 nt, Homo sapiens
ggaacacacaacacccgcccccgcaaaacgcaggacagcaaaggaaacacagagagaaaaccagaaaaa

SEQ ID NO: 155079 - RNA, 74 nt, Homo sapiens
gaaccgaccgcggcgcgccacccggccgcagcaaacagggcagaaaagaacagacccagaagaagcgaaagggg

SEQ ID NO: 155080 - RNA, 71 nt, Homo sapiens
ggacgaggaggcgaaggaccgccccgccaggaaggaagaaggaaaagcggaagcgcagacaagaaaagaga

SEQ ID NO: 155081 - RNA, 37 nt, Homo sapiens
aggccaagaaggcagaaagcaccgggaggaaagagag

SEQ ID NO: 155082 - RNA, 111 nt, Homo sapiens
gccaagagcagaccgggcgaagggagaggacagcagggaggcgggacgcggacagggcgggaccaccaggagcagagcggaggccaccagcccaacaccaccgggaagcag

SEQ ID NO: 155083 - RNA, 70 nt, Homo sapiens
cgacgcagaccaaaagcagagaggcgcgggcagccccagccccagcggcaggcaggaacccaggcccagc

SEQ ID NO: 155084 - RNA, 66 nt, Homo sapiens
cgacggaccgggaaggagcacccaggaccaccagaacggaagaaacaagcccaggacgaagaaaac

SEQ ID NO: 155085 - RNA, 33 nt, Homo sapiens
gaagaggcgaacaagaacaaacagccccccaga

SEQ ID NO: 155086 - RNA, 79 nt, Homo sapiens
gaaaagccgccgggccaggagaaggagagagccagcccgggcgcgcgcaccgccgccggccagccaccaggcgcagccc

SEQ ID NO: 155087 - RNA, 81 nt, Homo sapiens
gagcccccacagggagaaaccccacccccaagaaccaacccccaaaggcgggacagaagagagaagaagcaaaccgggacc

SEQ ID NO: 155088 - RNA, 77 nt, Homo sapiens
cgcccagagagcgggggggggaccgccggcacgcgacccccccgggcccaaaaccggagagaacagaaaaaaagcgg

SEQ ID NO: 155089 - RNA, 71 nt, Homo sapiens
aagagaagacagcggaaaaaaaaaaacacgggcggacggaacgggaaacacaaagaagacaccagaagggc

SEQ ID NO: 155090 - RNA, 73 nt, Homo sapiens
gggacccaggaggccgaagaaaccgacccacaaaaaagcgcaccacagaagccacaaacaggacagcagacca

SEQ ID NO: 155091 - RNA, 74 nt, Homo sapiens
gaaagcaggaaagaaaaggcaggaaacccagagacgggcgccaaaggaccgaacggggggcaaaccgagggaca

SEQ ID NO: 155092 - RNA, 72 nt, Homo sapiens
cggggacagcaccccaaagaccaaagccagagaaaacggagaagaaggagccggagcgggcagggcacacaa

SEQ ID NO: 155093 - RNA, 84 nt, Homo sapiens
aaaagggccgcgccacaacgaagggaacccgagaaacaccacaacacacaagcgcaccaggaggaccgaggaaacagaagaaaa

SEQ ID NO: 155094 - RNA, 53 nt, Homo sapiens
cgcacaacgcaggaccggcgccgaaggcccgccagcgggggaccaagaggacc

SEQ ID NO: 155095 - RNA, 71 nt, Homo sapiens
aaggcagcgcccagcagcgcaggggccgcaaggccaggcgcgcagaggcacccaacggcacagaccccaca

SEQ ID NO: 155096 - RNA, 71 nt, Homo sapiens
cacagcagcaaggccaaaacacacaccgagaagcagccaggcaagacaggccaacaccgccaccagagaac

SEQ ID NO: 155097 - RNA, 54 nt, Homo sapiens
cccagaggaagaggcaaccagaaagaacaaaggcaaaccgacaccagcgacaca

SEQ ID NO: 155098 - RNA, 59 nt, Homo sapiens
cccccagagacacaccggaggacagggcagaccgccagcagcacagcaagccacagaga

SEQ ID NO: 155099 - RNA, 80 nt, Homo sapiens
gccgccgagcgcgcccgcgcccacaccccggacaccgcgccacacaccggcagagccggccacaggaaggaacccaagag

SEQ ID NO: 155100 - RNA, 91 nt, Homo sapiens
aagaaagaaaacgagcgcgagagggggaaaagcgagcgacgagcgagcgcgcgcgcgaaaacccgggcaggcgggggagcgggaggagcca

SEQ ID NO: 155101 - RNA, 37 nt, Homo sapiens
gccggccggaacggccagcccaaggagcggaccccgc

SEQ ID NO: 155102 - RNA, 54 nt, Homo sapiens
gaacccgccgcgcccgacagacggcaaagcggaaacacagcgcgggaaggaaca

SEQ ID NO: 155103 - RNA, 86 nt, Homo sapiens
cgcccgcgcagccgagagccgggggagcggggccccacacccccccggggggggacagcccagagcaagcacacggaggcccggga

SEQ ID NO: 155104 - RNA, 63 nt, Homo sapiens
cgaaaacaccagccggcccaagcgggcccccggaccgacggacgaggcggcaccgcagaggaa

SEQ ID NO: 155105 - RNA, 71 nt, Homo sapiens
aaccggggagcacacagagagccgcggagaagaagacaagagcagacgagggagaagcgggcaaaacagac

SEQ ID NO: 155106 - RNA, 55 nt, Homo sapiens
ccagagaagcaccggccacaagggcggagaacggaaaagcaccaggaagcagaga

SEQ ID NO: 155107 - RNA, 57 nt, Homo sapiens
ccacccccagcggaaaggaacaacaagaaggagaaagacacaacgacagaagaaaaa

SEQ ID NO: 155108 - RNA, 83 nt, Homo sapiens
gacccccaaaaccacaaacgccacgcagaacagccaccaagacagagggcggcgggcggaacgccgaacaagcagaagggggc

SEQ ID NO: 155109 - RNA, 96 nt, Homo sapiens
gacggcccaccacgccccggcgagcagggagcggagaccagcaccaccagcaggcacagggggcagacccaaaggaaacgcacgaaagaaacagga

SEQ ID NO: 155110 - RNA, 86 nt, Homo sapiens
agccgggagacaccgccaccgccaggagcagcgagagccagaccgggagacgcagcagccgccaccagacccgcaccgagaagcgg

SEQ ID NO: 155111 - RNA, 70 nt, Homo sapiens
gcaaacgaaaccgggaaacaggcagagcgggaggaagaaggaggaccaccggaccccgccgagcgaggac

SEQ ID NO: 155112 - RNA, 86 nt, Homo sapiens
ggagaccagaccacgcagccacgcgggcgagcggcggggagcggcgaagccgcgggcgagagaaggagggggcagagcacggcagg

SEQ ID NO: 155113 - RNA, 72 nt, Homo sapiens
ggacgagagcgcagaccgaacgagaccgcaggaacagaacaccgcagaggccgcccacaggaaggcggggcc

SEQ ID NO: 155114 - RNA, 69 nt, Homo sapiens
gacgacccagcagccgccaggccgcccgagacaggagccggcacggagcacccgccgccgaccaacacg

SEQ ID NO: 155115 - RNA, 78 nt, Homo sapiens
gagacaagcggcagcgccaacgccgcacgcgcacccgacaacaacgcagacccagcagcccagcgccgagcgcaggga

SEQ ID NO: 155116 - RNA, 80 nt, Homo sapiens
aaagaagccaaacgcggccaaagagaaaaggcaacaccgcacaggccagccggcaaaaacgaagagagaaggccacgccc

SEQ ID NO: 155117 - RNA, 75 nt, Homo sapiens
aaggggcgcaaggcaagcaagaaggaggagcagccagaagcaggaggacaagccaaagaaggagcaaacgagaaa

SEQ ID NO: 155118 - RNA, 58 nt, Homo sapiens
aaagagaggagggagaacacagaaacccgccccggaacccaagaaggcagaagccagc

SEQ ID NO: 155119 - RNA, 83 nt, Homo sapiens
cacacaccagcacgaggggccggcgagaggagcgggcgcacgggaggggaacgggccgaacgcagccgccgcgcccaggcgga

SEQ ID NO: 155120 - RNA, 75 nt, Homo sapiens
caccccagcccgggccgagccaacaggaccagcagggcgggcaggcccacacagcaacggggcggcacacaagga

SEQ ID NO: 155121 - RNA, 84 nt, Homo sapiens
agaccgggccggaagacgcgccacgacggggacgcccgggggccgcgcacgggccccaggaagccacagcgccggaccagaaaa

SEQ ID NO: 155122 - RNA, 102 nt, Homo sapiens
cacacccagcacggcaaacaaagcaaacagccaaccacagggccacaaagccacacgcgcacaccgcgaccagaagaccagaaaaaggaggaaaggaggaga

SEQ ID NO: 155123 - RNA, 76 nt, Homo sapiens
gccgggcccaggcccgcgaccgccgccagcgcccgaggccccccccccggaggcagccggccccgggcccaggcca

SEQ ID NO: 155124 - RNA, 77 nt, Homo sapiens
cgcacccagaaacagggggaagcgggccagggagggaaaacccaggagacccaaacgccccccgccaacccggagcc

SEQ ID NO: 155125 - RNA, 80 nt, Homo sapiens
ccgaaagccgccaccaggacagacggcaaggcaaagaaaccccaaagccagcaagaccacagcagcacgcaccagccagc

SEQ ID NO: 155126 - RNA, 77 nt, Homo sapiens
ggaaggaggcagaggcacaccgaaagggagcacagaccagaagaaccaagcccaccaacacccaggaagggcgcgcc

SEQ ID NO: 155127 - RNA, 103 nt, Homo sapiens
gaccacggcgcagacgcgggcgagcgcggccggacgccagcggacacgcgggcgagagaggacggggacgggccccaggacgaggaagacaaggccagccacg

SEQ ID NO: 155128 - RNA, 78 nt, Homo sapiens
gaacgggcaagcggggccgcaagcaggcaagacccaccccacggacccaccgcgcaggggacccaacaagccccagga

SEQ ID NO: 155129 - RNA, 89 nt, Homo sapiens
ggggcgcggcgggacgcgagcggcgagccggagcgcggagcccggccccgcaccaggaggaggacgacagcacgagagacggggcacca

SEQ ID NO: 155130 - RNA, 72 nt, Homo sapiens
cggaccaggaggaggcaggaccaaaagggaaaagcaccgaaggaaccaagaagaaaaaaggagcaaaggcca

SEQ ID NO: 155131 - RNA, 77 nt, Homo sapiens
cgacagagccccaacgcaacgccacaaagcggcgcggcaccccagaacagcccggagcagacagccaagcaagcaga

SEQ ID NO: 155132 - RNA, 82 nt, Homo sapiens
gcaccaccgagaagcgccacaaaccaggccaagaccacgcgacgcagagcggaaggagaaagccacacacgaggaggggcac

SEQ ID NO: 155133 - RNA, 110 nt, Homo sapiens
ggaggagaggggaggagaagagagggggaaaccaagaccccaggacaacaaggaggggccaaacggaaccgaaggagaagaggaggcggcagagggcccgaaggaacccg

SEQ ID NO: 155134 - RNA, 54 nt, Homo sapiens
gcgagcgcagcgcgaccgggaggcccagggcgaagagagaacacgcacggaagg

SEQ ID NO: 155135 - RNA, 69 nt, Homo sapiens
aagcaaacagaagcgcggccaagggggcaagcgcgagaagagcggcgcccacaaccccccgagcgcacc

SEQ ID NO: 155136 - RNA, 68 nt, Homo sapiens
ccagcaggccgcggacagagaagaggacgcggagacaagaggacggaccacgcagcggagggggaccc

SEQ ID NO: 155137 - RNA, 58 nt, Homo sapiens
ccgcagagggggaaaaaacagaagaggcggagggagggaacgcaaagaccggaaagga

SEQ ID NO: 155138 - RNA, 79 nt, Homo sapiens
gccaggccgccgccgagccgagacccaacagaggaagccgcaagaaacgggacgacaggaaggccagagaaggcgggcc

SEQ ID NO: 155139 - RNA, 77 nt, Homo sapiens
gaaaacagacagacccacagacacgcaggaggccggggaacagacacacccacggcaccacgccggccaacacgggc

SEQ ID NO: 155140 - RNA, 87 nt, Homo sapiens
gcgaggcaggcgccgggggaggccacagcggccgggaccaagcgaggacaaccaccaccagcgagcaaaagaacaaagaccaagacc

SEQ ID NO: 155141 - RNA, 49 nt, Homo sapiens
aaaacaggagaaaaagacgaggcccccaagcgggggagcggcggcccca

SEQ ID NO: 155142 - RNA, 54 nt, Homo sapiens
ggaaacaaaaggcgaaccggggagaaaggcggagccaaggccagaccaagggaa

SEQ ID NO: 155143 - RNA, 78 nt, Homo sapiens
ggccacggcccccggcgcggacaagcaggagcggcgggcccacccagagggaacgccagccacgacgagacaagcccc

SEQ ID NO: 155144 - RNA, 82 nt, Homo sapiens
cggccaaagccgcccagacggccaccggcgggaggaacaaaaggcaagaagcaccggagcacgacgacagcagaagccccga

SEQ ID NO: 155145 - RNA, 75 nt, Homo sapiens
cccacggcaagggcccgcggggacagaaaaacaaggccggacagggcgggagggccgggcaaaggaaaaaaaaga

SEQ ID NO: 155146 - RNA, 53 nt, Homo sapiens
aaaagagcgaaaaagacgaaccagacagaagcgagacagcagggcaccaccac

SEQ ID NO: 155147 - RNA, 70 nt, Homo sapiens
gggggaggagagggcagagaggcaacgaaccggccacgccgcccggggagaggaaccaaccaccaaaccc

SEQ ID NO: 155148 - RNA, 52 nt, Homo sapiens
ggagcgacagacaacgcccgaagacccgcagcggacggcgcaagccccgggg

SEQ ID NO: 155149 - RNA, 72 nt, Homo sapiens
gacagaacgcccgccgggccccagaaagacccgccgaaaaagcgagacaggaagaccgcaggaaagcaggaa

SEQ ID NO: 155150 - RNA, 77 nt, Homo sapiens
gaaaggaacccgcagcccccagcacggacaggaaaacaaggaaaaggccgcgggaaaaaagaaaagaacccccgcgc

SEQ ID NO: 155151 - RNA, 77 nt, Homo sapiens
ggagaccaccaaacccccaccaacaaacaaacacaagcccccccagaccaggacaaaggcaggagcaagccaaaaag

SEQ ID NO: 155152 - RNA, 72 nt, Homo sapiens
cagccggggaacgcacaacggcaaaagagaaagagcgcgcacgaaagcacacgaaaaggaaggaaaaacgca

SEQ ID NO: 155153 - RNA, 111 nt, Homo sapiens
gggcgcggggacgagaaaacaaaagaaacaaaacaacaggggaaagaaaacagcgaggcaagcaccagcacccagagagaagacgcaaccaacaaacagaccgcgcagaaa

SEQ ID NO: 155154 - RNA, 72 nt, Homo sapiens
ccggagaggccggggggccaggcccaccgccacggcgaaagaaaccagaggagaaggagagaaaagaggaag

SEQ ID NO: 155155 - RNA, 124 nt, Homo sapiens
cgagcggccgagggagcccagcccaaccgggccccggccccgcgcgccccggcccggccccgcgagccgccaccgcaagagaaaagcgggcccgagaaccaaagaagcccacccacaagccgag

SEQ ID NO: 155156 - RNA, 100 nt, Homo sapiens
cagagcgcccggccgcggccagcggagcccgggcggggcaggagccggacccgaagacaaaaccacccacgaaagcgaaaagacccaaaacaaggcagcc

SEQ ID NO: 155157 - RNA, 76 nt, Homo sapiens
agccagaacaaaaggaccgcggcaggaccgacagcccccaggaaggaggcggcggccgcgagagcccagccgccgg

SEQ ID NO: 155158 - RNA, 74 nt, Homo sapiens
agccgacccagcgcggcccgagaagcaaacaaccagcccgagcccccaaaccacaggcgaccacagcacacaag

SEQ ID NO: 155159 - RNA, 82 nt, Homo sapiens
gccagccgcagccagcgaagccacagcaggaaggagggccccggagcagccacaccaccgaggccccacccagcacgagcac

SEQ ID NO: 155160 - RNA, 87 nt, Homo sapiens
gggacggccggggcagcgcccggcgcgcggcgcgccgcccggcgagcgggccggaggaaaagaaaggacgcggcagagcgcaagccg

SEQ ID NO: 155161 - RNA, 78 nt, Homo sapiens
cgagggagaaggacacacacaagagggagagggcccaaacgacaccccaaggcaaaaccagacgagagacagaagacg

SEQ ID NO: 155162 - RNA, 72 nt, Homo sapiens
cagaacccgaggcgcggcggcgagagcccgggggcgcaccaggcacaggcccgagaggccacacacagagca

SEQ ID NO: 155163 - RNA, 88 nt, Homo sapiens
caagcagcgacgccagcggcggagaaccgacgaaagcgccagcaaagcacggacagagaaggaggagaagcgagccaggccagcaaca

SEQ ID NO: 155164 - RNA, 80 nt, Homo sapiens
ggaagcggcggcggcggcgccgggcccggggggggacagcaggcgagggggaaacagcagcacagacagacaagaggcag

SEQ ID NO: 155165 - RNA, 57 nt, Homo sapiens
agaaggcccagcccaccagcggaccggacgcagaagcgagacccccaaccgccgagc

SEQ ID NO: 155166 - RNA, 72 nt, Homo sapiens
agagaggaagaagaacgacccgcccggggcagcaggagagaggaagagagcaaaacgaagaacagaaagaag

SEQ ID NO: 155167 - RNA, 50 nt, Homo sapiens
cagcaaagcacgcccaggcgccacacaaaaccacaaacagaccgcagcac

SEQ ID NO: 155168 - RNA, 76 nt, Homo sapiens
ggggacgcagggaggagggggccagccgcacggcggagaccgaccaggacaagggaacacaagcccaaacccagaa

SEQ ID NO: 155169 - RNA, 82 nt, Homo sapiens
cggcggagcggcagggcggcgcgaggaggcggggcggggggcaaggcacgcagccgggcccgacccgcgggccgcgggcgca

SEQ ID NO: 155170 - RNA, 77 nt, Homo sapiens
ccagggccagggagccccaggcagcccgcgcacgcggggggagcaggagcggcaggcggggcagaagagaccgaagc

SEQ ID NO: 155171 - RNA, 90 nt, Homo sapiens
gccagagagggaaggaaacaagccagcagaaaaagccaccggagcgaagcgaaggaagcgaggacaacaccgggagagcgaggcacgaag

SEQ ID NO: 155172 - RNA, 80 nt, Homo sapiens
gggcgccaccaccccagccggagaccccaaagcccacaggggcaacacagcccaacgccaaacacggacgcacaccccaa

SEQ ID NO: 155173 - RNA, 73 nt, Homo sapiens
cacagacgcaaacaaagcgccccggcaaggccaccgcagaagccacaggagaccggaggccaacggcagaagc

SEQ ID NO: 155174 - RNA, 78 nt, Homo sapiens
gcgacaaaagcagagcagcgcacccacaggccacagggccagacaaccacgccgggcgcccaggcgggaagaaagaaa

SEQ ID NO: 155175 - RNA, 99 nt, Homo sapiens
ggaacagcggacaagaagaagacagaacgcccccaccaccgcaaacaaacaacaagaaggagaaagacacaacgacagaagaaaaaacacaagaaaaga

SEQ ID NO: 155176 - RNA, 80 nt, Homo sapiens
caaggggacccacccaccacacccaggggggggaaagacagggagacccagagaccggggaggggcaccgagaacagacg

SEQ ID NO: 155177 - RNA, 63 nt, Homo sapiens
gggccaaagaagggagagagcgacagcagccaggcgagcggcagggagacagcgcacccgcgg

SEQ ID NO: 155178 - RNA, 124 nt, Homo sapiens
agggaggcgggaggagcggcagccgcgaggaggcgcgggagggcgagaacgaccccgagacggagaacacgagacccgcacaaaaccccgccccccaggccacacaggggccgagacggggggg

SEQ ID NO: 155179 - RNA, 80 nt, Homo sapiens
cggaacagacccgggaagccagggagaagaggaggccccaggaagaggagaagaccagaggcacagcagacacgaagcca

SEQ ID NO: 155180 - RNA, 80 nt, Homo sapiens
caagagacgacacgcaagcaggcaaccgaaacagaaaacagggccagacgggaagaaacgagaagggaccaggggcggaa

SEQ ID NO: 155181 - RNA, 67 nt, Homo sapiens
gagacagagagcaagagcaccccaacggcccagagcccggaacggggacaggagccagagaaaaaac

SEQ ID NO: 155182 - RNA, 52 nt, Homo sapiens
agaccgacacccaagacaagacagcgcaaggcaggaaaggcccgagccaaaa

SEQ ID NO: 155183 - RNA, 77 nt, Homo sapiens
cgagcaaaggacccagcgcacaaggaggagggaaccgcccgagcaccccccacgacccacacggggcacacacagaa

SEQ ID NO: 155184 - RNA, 76 nt, Homo sapiens
aggcgccagaagaaaaggaaggcaaccaagcaacaccaggcaggaggagagcgacacgcgggaggcaaaggcgaga

SEQ ID NO: 155185 - RNA, 66 nt, Homo sapiens
acaagcaaaccaccaccaggcgaacccgaggcaggaaaagagcgcgggaccacaggccaagccacg

SEQ ID NO: 155186 - RNA, 81 nt, Homo sapiens
ccaaccccaaaagagccaaaccagccgcccggccggcgaagacagcacaggcgagcgcaggcacgacagagcagcagcagg

SEQ ID NO: 155187 - RNA, 49 nt, Homo sapiens
aagaggaaccaagaaacaagaccagaagagaggggcaagaagcgaaaga

SEQ ID NO: 155188 - RNA, 57 nt, Homo sapiens
cagagccgagaaaggaagggcgggaccaacagggagccagggacgcgagagcccacg

SEQ ID NO: 155189 - RNA, 92 nt, Homo sapiens
cgagaaaacacaaaccgaaaggaaaggaagcacaagccagcagacgacaacaggcgcaggagacacagcaaagacgcaagaacggaacgaaa

SEQ ID NO: 155190 - RNA, 38 nt, Homo sapiens
ccgaagcaccgccagcccggaccagaacagagaagaaa

SEQ ID NO: 155191 - RNA, 60 nt, Homo sapiens
caaccccaggggaccagaggaaccagcccgagcggacccccaaggaaggggagaggacgc

SEQ ID NO: 155192 - RNA, 51 nt, Homo sapiens
agacccgcccaccgaagcaacacaaggaggaaggcccgcacgcagaggaaa

SEQ ID NO: 155193 - RNA, 54 nt, Homo sapiens
ggagagccacggaagccgacagacaaccagggcgggcacaggaacggcgaagag

SEQ ID NO: 155194 - RNA, 75 nt, Homo sapiens
cagccacccacgagcccggcaaaagcgcacaaacgcccaaggggcccgggggcggccagggcggcgggcgcagga

SEQ ID NO: 155195 - RNA, 74 nt, Homo sapiens
cgccagagccgagcaggcacagagacgaagacccggggaccggcgcgccacaccgcccccagacagcagaccca

SEQ ID NO: 155196 - RNA, 78 nt, Homo sapiens
cgaagaggcgcacagcagcgccgaaagggcaaaaagcaccaccaagagccaaagagcggggagacaggaaggaaaggg

SEQ ID NO: 155197 - RNA, 77 nt, Homo sapiens
aaagggccaaagaagggagagagaaagcgcgcgcccggcccaggagaggacacccgaccgccagccccccgcgaaac

SEQ ID NO: 155198 - RNA, 63 nt, Homo sapiens
gcaaacagacaacagaaaagaagggccaaacgaccaggagcaaagggaagaccacggaaccaa

SEQ ID NO: 155199 - RNA, 71 nt, Homo sapiens
caaagggagacgaagacggcaaaaagccaacagagccgcagcagaaccaaaggcgaagaggacagaaggaa

SEQ ID NO: 155200 - RNA, 79 nt, Homo sapiens
ggaaccacccgacccggagaaccagaacggaagcaagcagcgacacccgagcgcaaaagcgcagccccacccaggagca

SEQ ID NO: 155201 - RNA, 81 nt, Homo sapiens
aggggagcgaggacacaccacgaaaaagagccgcagacgcacagcaaccaccggacccgaaggccaccacccagaggggcc

SEQ ID NO: 155202 - RNA, 75 nt, Homo sapiens
acgggacagagaaacgaaaaaccgaggaaggacagacggccagccagcacaaacggcaaagcaaaacagacggca

SEQ ID NO: 155203 - RNA, 84 nt, Homo sapiens
acccgggggcagcgggccgaccaacccgaaaacagcaggccaccagcccccgggccaagagcagcacggagacagagccacaca

SEQ ID NO: 155204 - RNA, 71 nt, Homo sapiens
gaggccaacacggggaaggcccaaacccgacaaaaggcgagagcggcagcgcgacaaggagcaagagggga

SEQ ID NO: 155205 - RNA, 78 nt, Homo sapiens
acaggcggggggagcgcagcgaccacagagcaggaaccaagggggagcccaccagaaacccccagggaaggagaccgc

SEQ ID NO: 155206 - RNA, 59 nt, Homo sapiens
gcgggaggacgacgagagaggccgcgcaaccggagcccgcgcggcacgggcgagcccag

SEQ ID NO: 155207 - RNA, 75 nt, Homo sapiens
cgaggagcccaccgccgaaggcccgggccgaggacgccgcagagcgagacgaggcgagaacaagcccacacggga

SEQ ID NO: 155208 - RNA, 77 nt, Homo sapiens
cggggcgggggcgcccgccgcgccgccacgaggaagagaaacaccaaggaaccacacaagaaaagaaagcaaaagga

SEQ ID NO: 155209 - RNA, 76 nt, Homo sapiens
ggcgcgcacggacgcggagaggggagccgcaacgaagaccggagaacaaaaacaaccagaggaagaagcacccaga

SEQ ID NO: 155210 - RNA, 58 nt, Homo sapiens
gacaccggaccgcagggcagaggagcggagggagcacacgggcgaagaacccccaaac

SEQ ID NO: 155211 - RNA, 78 nt, Homo sapiens
gcaggaaggagaagaaagcaaaccccagccacgcggaaaggagagaggggagggacggggaagaggaggagagagaag

SEQ ID NO: 155212 - RNA, 75 nt, Homo sapiens
ggcagagccggcaggcgaacaggaacggagccaaccgcccaggaaggacaaagaaacagacgcacgccgaaaaaa

SEQ ID NO: 155213 - RNA, 76 nt, Homo sapiens
cacccgcccacgccacaaaggcagggaagcaaagagcacccgagcccagcaggcaagcagccggcaccaagacagg

SEQ ID NO: 155214 - RNA, 37 nt, Homo sapiens
gccaacggaccgcgccgccagcggaaggaccgggggc

SEQ ID NO: 155215 - RNA, 81 nt, Homo sapiens
gcacagccgcccagccacccccaggacgcccgcaacccgacacggacaacccccaagaaagggagcccagaacgaaacaac

SEQ ID NO: 155216 - RNA, 66 nt, Homo sapiens
cccgcgagcaggaaccccaggaaacggccagcgagacgacgggaccgaaggaccccgccagagaca

SEQ ID NO: 155217 - RNA, 81 nt, Homo sapiens
cggggagggggacacacaaccgcccagccggcgagggacgccgcaggacaccaggggggaaaaaccacacaggcaaagaac

SEQ ID NO: 155218 - RNA, 49 nt, Homo sapiens
gcagcacgaaaacggaaagggaaggaagaaggggacccaaagcaggcac

SEQ ID NO: 155219 - RNA, 39 nt, Homo sapiens
caagggacggccaccccaggcgaagccagggcccgcgcc

SEQ ID NO: 155220 - RNA, 72 nt, Homo sapiens
acagacgggcacaggaaggcgccgggcccccccggaacacccacgaaaggaaaaccggaaaggaagcgagga

SEQ ID NO: 155221 - RNA, 76 nt, Homo sapiens
aagcgcacggacgcaccccacgggaacccacgaccaaagcggaaggccaggagaaggcagagcccccccaggcaga

SEQ ID NO: 155222 - RNA, 75 nt, Homo sapiens
gacacacaaagacaaaaaacgggcccccagcgccacaccacccgagggccaaagccgccagcgcacaaccaggcc

SEQ ID NO: 155223 - RNA, 67 nt, Homo sapiens
gggaccaagcacgccagaaagaagagagaagaagcaaaccgggaccggaagcaccaaggagaaaaag

SEQ ID NO: 155224 - RNA, 77 nt, Homo sapiens
cgggggaaaaaccaggagacacaaacagaaaaggaagaaagggacaaagagaggagcaggacaaccaccaccagcga

SEQ ID NO: 155225 - RNA, 77 nt, Homo sapiens
aaacccaaacaggagaagaacccagacgacccacaacacgcgcaaaacacaacgggaagcaaacggccaagggaaaa

SEQ ID NO: 155226 - RNA, 38 nt, Homo sapiens
acgaggacccggcagcaaaggagagcgccggcccaggc

SEQ ID NO: 155227 - RNA, 69 nt, Homo sapiens
cggccgggccaccaccacagcacaccaagcagccaggacgaggaaagccccaggaagaagaagaagccg

SEQ ID NO: 155228 - RNA, 54 nt, Homo sapiens
cacggaccccccacagcggggccgcaaggccaggcgcgcagaggcacccaacgg

SEQ ID NO: 155229 - RNA, 74 nt, Homo sapiens
ccggacgaaaaggagaccaaagggagcaaaggacgaccaaggaacgaccaaagcagaagccgcaaacagccaaa

SEQ ID NO: 155230 - RNA, 69 nt, Homo sapiens
gggccaggagacgcgaccgccggagagaggagaaacgacaggaaaaccaaaggaccgaaaaccccagga

SEQ ID NO: 155231 - RNA, 68 nt, Homo sapiens
caccaacggaggaagcagaaccaaccaccaaagaccaagggcgcgaccagccacagaagccagccaac

SEQ ID NO: 155232 - RNA, 104 nt, Homo sapiens
accgcggagcaaaaaaagagcccgcaagaagaacagagacagcagccaaacccccagggaccaagaaaggcccagggaccaaagcccggacaaggcccgagcac

SEQ ID NO: 155233 - RNA, 83 nt, Homo sapiens
gacaagcaaggaccgcaggacccaggccagaccggagcagcggggacaggaagaagaaggacgagaagaagagaagagaggag

SEQ ID NO: 155234 - RNA, 39 nt, Homo sapiens
accgggagggacacaagaagcggagaccaggccaaaagg

SEQ ID NO: 155235 - RNA, 91 nt, Homo sapiens
cgggggaggcaaagaacccaccgccggagccagacccggagccggagcaggaggccccaggcagaaccaccagccggacagggaccacacg

SEQ ID NO: 155236 - RNA, 111 nt, Homo sapiens
gaggacagcaaagaagacagggagcaagccagaccggcccggaccgcccccagagcaaaggcaggagagggaaaaccagcagacagagaaaagaacagcgagcacggaaag

SEQ ID NO: 155237 - RNA, 72 nt, Homo sapiens
ccgcgggccgcccgcccagggcaagggacaaacaaacaacccaagccccacccaccaccagcacccccaccc

SEQ ID NO: 155238 - RNA, 83 nt, Homo sapiens
agacacaagcacacgaccgggagcgaggagccccgagaagcaagagggcacgagcagccgggggaagcagcggcagaaccaca

SEQ ID NO: 155239 - RNA, 57 nt, Homo sapiens
gaaagagccacggagacacgcggaaaccgcggccggcacaaaaccggcacacaaaac

SEQ ID NO: 155240 - RNA, 74 nt, Homo sapiens
cacgaaggaggaaccaacaacaacacaagcagggagaccccaaggcaaaaccaccacacgacaaaaaccggaac

SEQ ID NO: 155241 - RNA, 80 nt, Homo sapiens
ggccgaaacacagagcaagcggaacgggccagacaggcgcacggacaccaaggcaggcaggggcgggacgagacacaacg

SEQ ID NO: 155242 - RNA, 62 nt, Homo sapiens
gaggacgaggaccaggggaggaggagcagaggacacagagaaagaccggccagaaagccacg

SEQ ID NO: 155243 - RNA, 64 nt, Homo sapiens
gaccgacccacccgcgcggcccaggggaaaagcacagaaagagacacagaccggggcaacgaaa

SEQ ID NO: 155244 - RNA, 76 nt, Homo sapiens
gacagggacagaggccaagcgaaccagcaagccgggaaaaagaaaagggcgaagacccgaagcagcgcaggaacag

SEQ ID NO: 155245 - RNA, 73 nt, Homo sapiens
aacgaaccagaagaagaacggaacacaggccaggaacaacacagcggagcggcggacaccagaagagaaaagg

SEQ ID NO: 155246 - RNA, 81 nt, Homo sapiens
gacagccaggagaagaagagaaaaggagggaacacagacccagccgccaaaaggccggaaaaagaacccccccgagaaacg

SEQ ID NO: 155247 - RNA, 55 nt, Homo sapiens
cagacgggacccccagccaaaggcaaagggaggcgggacagaacgaacaaaaggg

SEQ ID NO: 155248 - RNA, 79 nt, Homo sapiens
gcacggagaggacagagagcgggcgccgccacacaacgagacccaagcagggggaaaccaggagcgcaggccagacagg

SEQ ID NO: 155249 - RNA, 73 nt, Homo sapiens
cccagcaggaccaagaccagcggcagcacccccaacagaaaagaggagaaggcagagcccccccaggcagaag

SEQ ID NO: 155250 - RNA, 54 nt, Homo sapiens
agaccggcacgacgcgaaaacagaagacaccccggaagacgaaagaagacggag

SEQ ID NO: 155251 - RNA, 82 nt, Homo sapiens
gaccaggccggccgcgccccccaggacccgccggcgcgagaaaacccaagaaggcagaagccagccccgcaggccgccaccc

SEQ ID NO: 155252 - RNA, 43 nt, Homo sapiens
agccgcgacgaaaccagggaccacagacgcacggcacagaggg

SEQ ID NO: 155253 - RNA, 66 nt, Homo sapiens
ccacgaaggaaggccaccccgagaaaaaggaggacgcacccagacccagccaacgagcacagccca

SEQ ID NO: 155254 - RNA, 85 nt, Homo sapiens
cagagccagcgacgccggccgccggcacccacagcaacgggaggcagcagaaggaccgggcacggggagcgcgcgagagaaggcg

SEQ ID NO: 155255 - RNA, 79 nt, Homo sapiens
ggggagcggcggccacggcaccggcggggggcacgaggaaaggaccgcacaggacgagcgaagacagggaaaagaaaag

SEQ ID NO: 155256 - RNA, 76 nt, Homo sapiens
ggggggagcggccaacccaagggccccagcccgggcccccaacgagggcagcaccaccccccccaacaccaacaaa

SEQ ID NO: 155257 - RNA, 112 nt, Homo sapiens
ggcaggagggacaagaccggaccagccagaggacgcgggccgaggagagcggaggaggggggacggacagcaacggagagcgccccaacaggccagagcagccgccccaggg

SEQ ID NO: 155258 - RNA, 74 nt, Homo sapiens
acccaaaaagcccagaggcaaccacacaggaaccaacaaccaggacccagaggaacccgaaagcacgaaccagc

SEQ ID NO: 155259 - RNA, 72 nt, Homo sapiens
cggcgcggccccgacccccgcccggcgccggcccgggccgccagggcaggggacagggcgagcaggacacca

SEQ ID NO: 155260 - RNA, 60 nt, Homo sapiens
ccaggcccaagacgggccccgacaagggaccgggcgggccccgcaggaaacccccaccgg

SEQ ID NO: 155261 - RNA, 76 nt, Homo sapiens
gagcaccgggccccgcgaccggggcccggggaaggcccgccgcccgccccagcgccccacggcaaggaagaggaag

SEQ ID NO: 155262 - RNA, 75 nt, Homo sapiens
agggagcggaaaccgacgcagacgccggaccgggaaaaaggcagcgcccaccaccaccagacagaccaccgaccc

SEQ ID NO: 155263 - RNA, 74 nt, Homo sapiens
aggcaagcaacacagagggcgcccaaccaaccccgacaaaagggcagaaggacagaagacagcagacacaaaga

SEQ ID NO: 155264 - RNA, 81 nt, Homo sapiens
agccggagccgcggacccgcgagacacacgggaccaccagggccagaaccagaccacgcaaaaagggccgccccacagccc

SEQ ID NO: 155265 - RNA, 56 nt, Homo sapiens
cagcaacagaggcacagccaagggggaggaggccagcagacggcggccagccaccg

SEQ ID NO: 155266 - RNA, 67 nt, Homo sapiens
aggacgaccagcgggaggccagaggaaggacagaggcacaaaaggagaaagcagaagaaacaggaga

SEQ ID NO: 155267 - RNA, 74 nt, Homo sapiens
gcgacgccaaccacgacgaagcggaaggcagaagagacagacgcagccgaggaaggggcacccacagccaaccc

SEQ ID NO: 155268 - RNA, 68 nt, Homo sapiens
ccacgaaacacggcaagaccggaacgacagaccccgggcacaggaagaccgcccagcgaccgcgaaac

SEQ ID NO: 155269 - RNA, 74 nt, Homo sapiens
cccaccacggcgcgagccaggaaggcaggcgcgccggccccagcgggacccgaccgcagcgcaggacccgccaa

SEQ ID NO: 155270 - RNA, 76 nt, Homo sapiens
aacccccacacgcccggggaaccaggaaaccccccaggcaagaggcgcaggaccgggaagaccaacaaacgcaccg

SEQ ID NO: 155271 - RNA, 70 nt, Homo sapiens
aggcgcaaaagaacgagcaaaggaaaggccacacacaaaaaggcccaccacaaccaagcgagaggaccca

SEQ ID NO: 155272 - RNA, 78 nt, Homo sapiens
ggacaacagcccaacaacacccagacaagagacccaccagcacaagaagaggacggagcaacgccagaaccagaccgg

SEQ ID NO: 155273 - RNA, 59 nt, Homo sapiens
cggcaggagcaagccaagaaagaaccgaagacagaaacggcgccaacggccgacaagcc

SEQ ID NO: 155274 - RNA, 73 nt, Homo sapiens
cacacagcgcccaggccagagaaggggaaggaggggcagcggagagagagcggagacaaggccacagcaggcc

SEQ ID NO: 155275 - RNA, 78 nt, Homo sapiens
gacaccaccagcggccaaggaaggcggaacacggaccggggagacccggagcgcagaaccgagcgggcgcgcagacca

SEQ ID NO: 155276 - RNA, 80 nt, Homo sapiens
ggcagcggccaccgaggacgccaaccaggcgacagacacagcaccggccccggcagcgggacgcaggacggcagccgggc

SEQ ID NO: 155277 - RNA, 78 nt, Homo sapiens
cacgaaaggagcaagagcaagacaccggacaccgagggcccccaaaagggcccggccaggccccaccgccacaagcag

SEQ ID NO: 155278 - RNA, 63 nt, Homo sapiens
ccccagagaagccaggagcacccggcgcccagacaaggcggagaacggaaaagcaccaggaag

SEQ ID NO: 155279 - RNA, 78 nt, Homo sapiens
gcggccggcccgggaccggggggcgaccaggagggccggggccgcgccggacccggaggaaaaccaagagggaaaaga

SEQ ID NO: 155280 - RNA, 75 nt, Homo sapiens
accacaggagaaaggcgacgaaggaagggagcggacaggaaacccacccaccacccgagaggaaacgcaaccaag

SEQ ID NO: 155281 - RNA, 106 nt, Homo sapiens
aggccagggcggcgggaaggccggcgggacgaaaggcaaggcaacggccccagaggcagagagggagccgcccgggcccaggcccccccacaagcgcgccggcccc

SEQ ID NO: 155282 - RNA, 61 nt, Homo sapiens
aaaacacgaaaacaaaaagcaggaaggacgggagaaccaccacagacgacgagcagaagag

SEQ ID NO: 155283 - RNA, 78 nt, Homo sapiens
caacacccacaggacacgaaggcggcccgccggcagagcgagggccggcccagggagaacgcaaaaccaccaccccca

SEQ ID NO: 155284 - RNA, 77 nt, Homo sapiens
agacgacgaacgcgccccccgccggaaaacggcgaggaaagagaggagccccggaaagaaaaggacagacccggcca

SEQ ID NO: 155285 - RNA, 81 nt, Homo sapiens
gcggaaggcagcgcccagcagcgcagggaagaaggacagaagcaccaggcgagcagacagacgcagaggcaagaagaggag

SEQ ID NO: 155286 - RNA, 83 nt, Homo sapiens
cagcagcccagcagcagcccacccccaccggccccccgccgagggacaaccaggccagggacgaccagacccagcccccaagg

SEQ ID NO: 155287 - RNA, 59 nt, Homo sapiens
cggccgccggcgcccagccgcccggagggccggaaagcacagaaaagggccaacagccg

SEQ ID NO: 155288 - RNA, 71 nt, Homo sapiens
cgagcagaacagcccagccagcccaaaaggcagagcgaggagagaagaaggagggaaagccaaacaacgga

SEQ ID NO: 155289 - RNA, 73 nt, Homo sapiens
gaccgaaaaaaaaagaaggagaccgccaccgggaaaaggagaacgcgccgcaggggcggaccagaaaccgggg

SEQ ID NO: 155290 - RNA, 41 nt, Homo sapiens
cggccggaggcaccagcagaaacacagcccaaagaaacaca

SEQ ID NO: 155291 - RNA, 82 nt, Homo sapiens
ggcacccgcgagcaccagccccccccgccacccaagggcagacgaagcaggacccagcaggcccgccccagggcaggcgcca

SEQ ID NO: 155292 - RNA, 75 nt, Homo sapiens
aacagcaagaaaagcacaacggagcagcagacacgccccagagggaccgaagcaggaaacaacccacagccagcg

SEQ ID NO: 155293 - RNA, 78 nt, Homo sapiens
cgagaagcgggggagaaggagaggagcgagcgaggaagaggaagcgggcgaagggcccaaaccgacaaagaggcacgg

SEQ ID NO: 155294 - RNA, 84 nt, Homo sapiens
gccacaagggaacgggcggccccggagagagagccgcgcacgcacagacaaggaagagagaagggcacagaccaagacaacgaa

SEQ ID NO: 155295 - RNA, 85 nt, Homo sapiens
gggcgcagggccgggccgccgcgcaccgcagcgccggggcacgacacaaaaacaggggacccaagaacagggaggaaagcagaga

SEQ ID NO: 155296 - RNA, 71 nt, Homo sapiens
agaaggcagaggcgggaacgccaggagcgccgggagacacacgcaaaaagaaaaggaagaaaagagaaacc

SEQ ID NO: 155297 - RNA, 90 nt, Homo sapiens
ccagcgcgaagcccgggaccacgcccacgggccggacccgcggccgcgcggaagcccaccagaggcgaggggaggaggaagcgagcgaaa

SEQ ID NO: 155298 - RNA, 79 nt, Homo sapiens
cggccaggccggccggccggacaagcccaggagccgaccagagagcaggcccgccccggcggcggccggcgggaccaaa

SEQ ID NO: 155299 - RNA, 75 nt, Homo sapiens
gagcacagccgaacaggaggccaaacaggagaaagcaacacacgaagggccaggggaacagggcggaacagcacg

SEQ ID NO: 155300 - RNA, 75 nt, Homo sapiens
cacaaggcacacggggcacccggaccggagaggaggggagggggagcgggaagacccggacaacggaccggacgg

SEQ ID NO: 155301 - RNA, 73 nt, Homo sapiens
aggggaccgccaaaccaggaaagccaccgaagagccaggggcccggacaaaaggggccggacaaggacgacag

SEQ ID NO: 155302 - RNA, 84 nt, Homo sapiens
gccacaccggggccgagggggccggcggagcccgagcgcggcccggcccgcagcgggggccccgagcgcgcgggcaacaaccag

SEQ ID NO: 155303 - RNA, 58 nt, Homo sapiens
cgaacacagagggaagagaaagcaaacgagcagggcaaggcagcagggagaccagacc

SEQ ID NO: 155304 - RNA, 87 nt, Homo sapiens
cccagagcaggacagcggcccggaggaccgccccgcaggcgggcacgaaaggaaagccgagaaggcacgacaagccggaccccccac

SEQ ID NO: 155305 - RNA, 76 nt, Homo sapiens
caggcggcacgacaccgcccaggcaacggcacggccccggcacgacacagcaaagaccccaccagagagcaccgcc

SEQ ID NO: 155306 - RNA, 58 nt, Homo sapiens
cggcccccgccccagcccgccggcggcggcgggacaaaagccacgaggcacaaagagg

SEQ ID NO: 155307 - RNA, 61 nt, Homo sapiens
cgaacaccgaggaggccaaggccggccaggaacacacccaaaggaaggaggcacgcacccc

SEQ ID NO: 155308 - RNA, 73 nt, Homo sapiens
ccacaaccgggaccgggccggccaccgcggaccaagaacgcccagcccgcgggcaccggcagaaaggaggagg

SEQ ID NO: 155309 - RNA, 68 nt, Homo sapiens
aagaacaaccgcggacacggagaggaaggggccggggacacaagcaacagccagaacaagccgaagca

SEQ ID NO: 155310 - RNA, 76 nt, Homo sapiens
cgacaggaggcagggcccaccccgcccagagaagccagggcgcaggcaaacaagggccgaaaagaggaagaccagg

SEQ ID NO: 155311 - RNA, 67 nt, Homo sapiens
ccaccccggccaagcccgacccagacaccacccccgagagaagggaacccgcgcacagacgagaacg

SEQ ID NO: 155312 - RNA, 111 nt, Homo sapiens
ggaggcccacgcagaaccggggagccaccgaggacacaggggaagaaggaggacaacagaccacccaagaagaccaaggcccaaaaggacccaagagagaagcgacaggag

SEQ ID NO: 155313 - RNA, 82 nt, Homo sapiens
cgaggcgcgccccgcccggcagcgaccggagaggacacgagcccagccaggcgagccagcgccaaagaaaaagaacaagagg

SEQ ID NO: 155314 - RNA, 76 nt, Homo sapiens
cagcccccgaggcgggacacagggacggggcgaaagacaaagaagcaacacagaaacggaaaaggaaccacccaag

SEQ ID NO: 155315 - RNA, 67 nt, Homo sapiens
agggcgacccggcccgggggagagcagaaaagacaggaccagaagagacaagagaacaagaagagcc

SEQ ID NO: 155316 - RNA, 79 nt, Homo sapiens
ggcggagccaaccggagcgcaaggcgccaaccccgaacggggggagacgccacggaacgcaggacaccagccaaggccg

SEQ ID NO: 155317 - RNA, 78 nt, Homo sapiens
agaggaagcggaggcgcgaccgagaccccgccccccacaacgggagagcgcgggaccacgccagcaaggcgccaacaa

SEQ ID NO: 155318 - RNA, 66 nt, Homo sapiens
aaacagagaagaagagaagaaagcacaaaccggccaggcgggcgcggacggcaggggcgccgggga

SEQ ID NO: 155319 - RNA, 70 nt, Homo sapiens
cgcccaccaaccgcgccggggcgggggaccgcccacccaaccgcccccagcgagaaccgccggcgagaga

SEQ ID NO: 155320 - RNA, 84 nt, Homo sapiens
gcagaagggaaggagcagaacggaggggaacacaaaaaggcacacagagaaaaaaagggaacaaaacacagcaagcagacaaaa

SEQ ID NO: 155321 - RNA, 63 nt, Homo sapiens
cgagaaacaccggggccagacgacccagaagagcccggggaagcgagcaaaaggcagaccagg

SEQ ID NO: 155322 - RNA, 80 nt, Homo sapiens
agggcacccggggcgagagcaccgccaggaaccaccgagagcggcacgcagaggggagcgaagaagggagccacccaaaa

SEQ ID NO: 155323 - RNA, 87 nt, Homo sapiens
ccgagccacgaccgccgagaggccagcacaagcccgggggaaaggcagcgcgcagcagcggcacacaagccaaacagagagaaggcg

SEQ ID NO: 155324 - RNA, 84 nt, Homo sapiens
cccgccaaaagaacagccggacgaagagaagcagcgcagccaaccagcgaaggagcaaggacagaacggaagagccaggcacgg

SEQ ID NO: 155325 - RNA, 77 nt, Homo sapiens
acaggcacacaaagaaggagacgggggcacgggagcaggaagagggaacaggcacgccccacccgccagccgagccc

SEQ ID NO: 155326 - RNA, 86 nt, Homo sapiens
cagcccagccggagggcagacagcacggcgggggccaagcccaccagccaaccagcggggggcagccacgcagcaggaaacgccaa

SEQ ID NO: 155327 - RNA, 74 nt, Homo sapiens
gcgacgccgagacaagaggggaacgagaagccacacgcagccacaggaaccagccaggaaaccaaaagcaggcg

SEQ ID NO: 155328 - RNA, 81 nt, Homo sapiens
ggaagcagacgggaccaagaagagaacccccggcccagacagcaagaggcacagaaaacgcagaaaggaccgaaccaagac

SEQ ID NO: 155329 - RNA, 67 nt, Homo sapiens
accaaagggaagagaaacgcaaccggagcaggcccagaaagaacagacaaagaccgaaaaacacgag

SEQ ID NO: 155330 - RNA, 61 nt, Homo sapiens
agaggggagacagaacagcgccgaggacgagacccgccgggggaggcacgacgcgggccgg

SEQ ID NO: 155331 - RNA, 83 nt, Homo sapiens
gccggcaggaccagggggcgaaggcaggaaccaccaggagggacggccaggcacggccaacaacacgcagggaagaagcgcag

SEQ ID NO: 155332 - RNA, 75 nt, Homo sapiens
gcgcagccgagggccgggagcccggcacgagcgccgacaacccggcgccagagccgaaagccaggcgaaaccacc

SEQ ID NO: 155333 - RNA, 83 nt, Homo sapiens
ggaccaaaaggacaagcagggccaagaagaagccacacacagaagacccaaagagaacacaggagaggcaagaggggaaaggg

SEQ ID NO: 155334 - RNA, 86 nt, Homo sapiens
cccccgggggcccgacgcacacgggggcggacaccacaagaagggcgccaggagcggaaagaagcggagcgggccgcggagacgca

SEQ ID NO: 155335 - RNA, 76 nt, Homo sapiens
gggaggcgaggcgggcggacacgagagaggccacaacgaaaccaggccacagggaccgcaggcccgagaacacgca

SEQ ID NO: 155336 - RNA, 75 nt, Homo sapiens
agccccgagccaccgagaccggaacaaacaaaagaagcgccagacggacacaccaaagaacacacaagaagggac

SEQ ID NO: 155337 - RNA, 74 nt, Homo sapiens
ggcaccaacggacggaaggcacgaggggaacagcacccacgagcaacgcaaaacagcgccggccgggggaagcg

SEQ ID NO: 155338 - RNA, 78 nt, Homo sapiens
ggacccgcgccccagacagccgcccaccagggccaccagcgccccgggaaaaagcgcgaaaaggccgacgaggagggg

SEQ ID NO: 155339 - RNA, 70 nt, Homo sapiens
aggaccaagaaccaggcgcggacgcagacagacccgacaaagacgcacaacggccaaagcgaaaaaagcc

SEQ ID NO: 155340 - RNA, 81 nt, Homo sapiens
accgaagggaaggccagcagcgcgcggagaagaacggggagccagaacaccccaccagaccacccagcaagcccacaaaaa

SEQ ID NO: 155341 - RNA, 61 nt, Homo sapiens
cggaacacaggccaggaacaacacaggggagaacagccgacaccaacccacacagagcaga

SEQ ID NO: 155342 - RNA, 30 nt, Homo sapiens
cccagacagcgaaagggcagagcggacgga

SEQ ID NO: 155343 - RNA, 79 nt, Homo sapiens
gaagaccgggggacgaccaacggcccccacggggaggagcgggagcacccgagcggaagacccggacaaccggggaggg

SEQ ID NO: 155344 - RNA, 84 nt, Homo sapiens
agaagaaaaacggaacagagccaaagagcaggaacaggacgggaacgggaccaacagaaaccaaaaggccgaacgcagaagagc

SEQ ID NO: 155345 - RNA, 54 nt, Homo sapiens
aacacggcgccagcgagagcccaacaagagaccacaccgcgccagaccccccag

SEQ ID NO: 155346 - RNA, 79 nt, Homo sapiens
ccagccaccccgccacggaagcgccaccagaaaccacacagcacgaggaccgcgggcacgagcgaccagcaaggcgggc

SEQ ID NO: 155347 - RNA, 62 nt, Homo sapiens
accgcgaagcaacaaccgcaccaccaggcagagcggcgccaaaccaagcccccccaccacac

SEQ ID NO: 155348 - RNA, 70 nt, Homo sapiens
cgagacccgcccgacacaccggcacgaaaaacccgcaggacagggcagaccgccagcagcacagcaagcc

SEQ ID NO: 155349 - RNA, 57 nt, Homo sapiens
cgaaaacccggcaggaaacagaagaaggccagcgaggaagccgcagcccaccaagcc

SEQ ID NO: 155350 - RNA, 43 nt, Homo sapiens
cacccacaggccgcaaaggacacaaagcgagaagacccagcaa

SEQ ID NO: 155351 - RNA, 74 nt, Homo sapiens
gacgaagcagaagcgaaggcaacggcgagcccagagcagagacggccggcaacaagcgaggggggaggccaggc

SEQ ID NO: 155352 - RNA, 78 nt, Homo sapiens
ggcccgacaagccgaccagccaagaagacgaccccgacgcaggccaggagccgcggacagaagccgagcacggccgag

SEQ ID NO: 155353 - RNA, 67 nt, Homo sapiens
gaaacagaccacagaaggagcaaaacccagaaccaagaacagagaccagcacaaccagggaagaaga

SEQ ID NO: 155354 - RNA, 76 nt, Homo sapiens
gccgccgccaccccgcggccgcacccccgccccagaacgcaagggggaaacggccagccaagccaaggggaccggg

SEQ ID NO: 155355 - RNA, 76 nt, Homo sapiens
caaagaagaaagggggaggaacacaaggagcccaaaagcgacgaggagaaaggcagcggcacagaccgaccagaca

SEQ ID NO: 155356 - RNA, 81 nt, Homo sapiens
gagcaaggagcgcggaacggggagcgccggagcagcggacccaggcagggaaagggagcagcaccggccacacccacagca

SEQ ID NO: 155357 - RNA, 73 nt, Homo sapiens
cccaacagacgcggacaaaagagaagaaccaaaacggccccgccgccccagacggcgcgacgaggagcggggg

SEQ ID NO: 155358 - RNA, 60 nt, Homo sapiens
gcagccgcagccgacccagcccggagcagcagccgcgcagaggcaaagaccagcaaggca

SEQ ID NO: 155359 - RNA, 64 nt, Homo sapiens
acccagggggcaggacgaccagcgggaggccagaggaagggaccgcgacgagaagagcaaaacg

SEQ ID NO: 155360 - RNA, 38 nt, Homo sapiens
gggcggcgccaggccggcccacgacggagcggaccaac

SEQ ID NO: 155361 - RNA, 74 nt, Homo sapiens
ccggggcgccgagggaaggacggccgcgcacgacgccaccggccggacccccagacggccaccaccgaccccgg

SEQ ID NO: 155362 - RNA, 45 nt, Homo sapiens
ccagggaagagacacacccagggaagaaggccgaagaagaacccc

SEQ ID NO: 155363 - RNA, 81 nt, Homo sapiens
gaaacaagcagaccagcacgacacgacccacgaaacagggaggggaaagggagcagcaccggccacacccacagcacgacc

SEQ ID NO: 155364 - RNA, 77 nt, Homo sapiens
ggcaccgggacggaccgagaccggaccgagagcggaccgagagcgcgaaacgcacgagaaggacgggaacagcgacc

SEQ ID NO: 155365 - RNA, 80 nt, Homo sapiens
cagacaaccggaaccgcagagggcacaggcaacagaaccagccggagggcagggaacagacaagcaaacaacggaaagga

SEQ ID NO: 155366 - RNA, 79 nt, Homo sapiens
cagcggggaggagccaaagcccggcgccaccaagccgcagggagaacacccaacgggaggggagaagcagaccgcacca

SEQ ID NO: 155367 - RNA, 70 nt, Homo sapiens
agaagaccaggaaagacaggaggccacccccaaagaaaagcgggggaacaggaaagaaaaaggacggcgc

SEQ ID NO: 155368 - RNA, 85 nt, Homo sapiens
ggcagagacagagaggacaggagaagaacacacggagggcaaagagaagcagacacagggccaggaaaaggaagaaccaaaacgg

SEQ ID NO: 155369 - RNA, 55 nt, Homo sapiens
aaggccagagcacgagcacgggaaggcggggggcgcacaggaaccaacggaagag

SEQ ID NO: 155370 - RNA, 38 nt, Homo sapiens
cgaagcgaccaagcagaagagagcgagccaccagaaag

SEQ ID NO: 155371 - RNA, 80 nt, Homo sapiens
caaccccccgcaagccgggcccagaagcaggcagcaccccacggccccacccgccgccgccgccccagggcacccaccgg

SEQ ID NO: 155372 - RNA, 59 nt, Homo sapiens
gaaggaccaagaaccaggggaggggacagacagaaggagaggaggaccgcaagagaaaa

SEQ ID NO: 155373 - RNA, 76 nt, Homo sapiens
cggggcgcaggcgcccggcggaaggcagcgccgaaaagcgaaaagaaacaagccgcggcaacagcgaccccaagcc

SEQ ID NO: 155374 - RNA, 66 nt, Homo sapiens
cggcgaaagcgacgggaccggaaagcagaagccacggagaaaaacggccaagaggcagaccaggaa

SEQ ID NO: 155375 - RNA, 70 nt, Homo sapiens
aagacgccaaccaccaaaacccaaacccgacagagaacagcgaggcagaagcacggagccacacaaagcg

SEQ ID NO: 155376 - RNA, 73 nt, Homo sapiens
gcccaaaacccacagaaggaagagagacagagaagacgcaggacagagaggaaggcacgcagagaacagagag

SEQ ID NO: 155377 - RNA, 80 nt, Homo sapiens
gccaacgccccggggagaagcgagggaaccaagaccaggacaaagaagacccggagagacaagccggaggacgcaaacga

SEQ ID NO: 155378 - RNA, 36 nt, Homo sapiens
aggcgcagaacgagggacaaacccagcagacgcgcg

SEQ ID NO: 155379 - RNA, 80 nt, Homo sapiens
cgcagcccgaccggcgaggcggcgcggcagcggagggacggcagccgcgcgagaaggcagcaggaagaaacagcgaacca

SEQ ID NO: 155380 - RNA, 80 nt, Homo sapiens
cggcgcgaccccaacccagccccaaccagacaaagggagcaccagccagaccgggaagaaacgaaggggggaggcccagg

SEQ ID NO: 155381 - RNA, 69 nt, Homo sapiens
ccacacgggacagggcccagaaaaggaaccaaggcgcgcgacgggaccacaggcgaccgggaccacgcg

SEQ ID NO: 155382 - RNA, 87 nt, Homo sapiens
gggccaacagcaacagagagagccaggcccggcccagcgaacgaaaccgaggcgcccgagagcgggcaaagcacagcagaaacggag

SEQ ID NO: 155383 - RNA, 54 nt, Homo sapiens
ggcaacaccccggaaacacgacaagccaaagcaaacccacagcggggccgggcc

SEQ ID NO: 155384 - RNA, 76 nt, Homo sapiens
acagaacaacagaagaggagagaggaacccgaagaagaaaggacgacagccagagaggaaaccagaaccgcacagc

SEQ ID NO: 155385 - RNA, 78 nt, Homo sapiens
gggaggaggaaaacacacagacgaaggcaaaagagacagggaggccgcacagaggaggagcaccaaaccgagggaggg

SEQ ID NO: 155386 - RNA, 68 nt, Homo sapiens
gaaacgccgagaggagcagagggcccagaccgcaaccacaggcaccccaagggagaagcgggaacgga

SEQ ID NO: 155387 - RNA, 75 nt, Homo sapiens
caagcacaccgcggaagcaaaccaagcgcgggggaagaagagaaagaaaaccagggaaaggggcccagacagcgg

SEQ ID NO: 155388 - RNA, 70 nt, Homo sapiens
ggggcacacaagagccacaaacgccggggagacaacgcagagaggacagagacgaggcgggcccaagggc

SEQ ID NO: 155389 - RNA, 81 nt, Homo sapiens
cacggcgcccacccaacgcgaagacggaacccgggacgacgggcggcacagggagaacacagggccccaccgcgccccaca

SEQ ID NO: 155390 - RNA, 77 nt, Homo sapiens
ggcccaggccaaaagaaccggaaggccaaaacaagggaagcaaaggaaacggagagacagaagaaggagaagcgacc

SEQ ID NO: 155391 - RNA, 68 nt, Homo sapiens
ggcacacacccggggccccgaaggacacagacaggccaaccaagcacacagccagcccagggggcaga

SEQ ID NO: 155392 - RNA, 79 nt, Homo sapiens
caaaaagacggacagcccacgggaacaagaggggacagaaagggcccaccccaggaccccaccacccacagagaagccg

SEQ ID NO: 155393 - RNA, 71 nt, Homo sapiens
aaagcagaaaagccccagcaaccaccgaaacgggcgaaaaagaagaacagcaaaacacgaaaggcaaagag

SEQ ID NO: 155394 - RNA, 58 nt, Homo sapiens
aacacagaccaggaggagaaaaggaaccaaagaaggcacccagaggccccacaggcgc

SEQ ID NO: 155395 - RNA, 39 nt, Homo sapiens
agaagcgcccaagcggacgggaagcagagagcaaccaag

SEQ ID NO: 155396 - RNA, 70 nt, Homo sapiens
ccaggacagaaacaacagccaccagccccgacacccagccagccccagcccggagaccacaccaggacga

SEQ ID NO: 155397 - RNA, 108 nt, Homo sapiens
cgcggcgggccggacgcagaagaacaaggggaggggccccagaacagacacaagagagcagagcgacacgaaaagacagaccgacaacagcccagaagaagccaggag

SEQ ID NO: 155398 - RNA, 51 nt, Homo sapiens
agaggccagagcggaagccaaaggcaacgacgcaaggccaggaacccccac

SEQ ID NO: 155399 - RNA, 70 nt, Homo sapiens
gcaccaggaaccccaccaacaaggagggaggaagaggcgcggcaagggcgcggcaagaaaaccggggccg

SEQ ID NO: 155400 - RNA, 86 nt, Homo sapiens
gaacgagacgcaaggggacacgccaaaccgagcacagaaagagaccgcccgcccaacggacagggcagaccgccagcagcacagca

SEQ ID NO: 155401 - RNA, 77 nt, Homo sapiens
caaccccgcccccgggcaagcaacccgcccagccccaagagcgggacacaggccgcgggagagcgggggcgggaggc

SEQ ID NO: 155402 - RNA, 82 nt, Homo sapiens
gccgcccaggcgcagagcgggcccgcggaccagccagggcacggccgggacgaaacgcgaccccaccaaggggcccgagacg

SEQ ID NO: 155403 - RNA, 77 nt, Homo sapiens
ccaacccaagggccccagcccgggcccccaacgaggcggggccgaggcgcggcagacagggacaacggccagcacag

SEQ ID NO: 155404 - RNA, 54 nt, Homo sapiens
accaacacacaaagccgcagaaagcagcagaccagaaagaagagaaggcaaaga

SEQ ID NO: 155405 - RNA, 65 nt, Homo sapiens
gcgcacccgcgcagccgcccacgggccacggccaggcccaggaggaccgacaagacggaaaccgg

SEQ ID NO: 155406 - RNA, 74 nt, Homo sapiens
ggcggccggaggagcggcgcgcgcgcgcgcgcggggccccgcagcaccaagaaggcggagaggaaagagaggga

SEQ ID NO: 155407 - RNA, 57 nt, Homo sapiens
cccgcccaccccccacgccagagacggcgagaaccccgcaggccgggaacgccacac

SEQ ID NO: 155408 - RNA, 82 nt, Homo sapiens
gcgaagggaaagaggcagacaccggccggggccaaagcgaccaaccccccaccgcacgcagggggccccccgcccggggcaa

SEQ ID NO: 155409 - RNA, 79 nt, Homo sapiens
agcccacacaacccaggagaggacacaggcaggaagcagaaaccaaggaaaaaacccaggaccaaaacagagaaaggag

SEQ ID NO: 155410 - RNA, 65 nt, Homo sapiens
cggagcgccaggacgcacaccgccacagagcaacccagggccgcagagaggagaggcaccacccc

SEQ ID NO: 155411 - RNA, 69 nt, Homo sapiens
caccaggaaaaaggacgagcagggaaaccggcacagggaagagaaacagagaaaccgcgaccaagccag

SEQ ID NO: 155412 - RNA, 50 nt, Homo sapiens
gcacggcaaccgcgcggcaggccaggggaccggacaccagaggaccagaa

SEQ ID NO: 155413 - RNA, 69 nt, Homo sapiens
ggagcaagaccccgaaaccagaagggggaaaggaaacacccaaggaaccaaagcaggccagcagaaaac

SEQ ID NO: 155414 - RNA, 72 nt, Homo sapiens
gaaccgccaaccccaacacccaacacaagacacaaaccgaggagcagccggggaaagaggcaagagaacgcc

SEQ ID NO: 155415 - RNA, 68 nt, Homo sapiens
aaccggggacccacgggccaaaaagcacagaagaaaaccaggcacaggcggcacggaccccacccacg

SEQ ID NO: 155416 - RNA, 82 nt, Homo sapiens
gggagggcccagaagaaggagacccagaaggaaaagaggacgaggcgggaacagagcccaagggccccaagccaaccgcccc

SEQ ID NO: 155417 - RNA, 85 nt, Homo sapiens
gagagccgcgagggcagcggccgcggcgccaagccggggaggagcggaccgaccgcccaagaacgcaaggagggacaggacggaa

SEQ ID NO: 155418 - RNA, 79 nt, Homo sapiens
cgggaccccggaagccaaaaagggagggcgggggcggcagagggcacgcccaggggacgggcagacaagcgcgcgggca

SEQ ID NO: 155419 - RNA, 68 nt, Homo sapiens
cgaggagagcgaaagaacaaggaaggccacagaccaccacaacccgcaacgccacagcgagaacagac

SEQ ID NO: 155420 - RNA, 51 nt, Homo sapiens
gagggcaccggagacacagaaggggcaggcagccagccacagaccagccgg

SEQ ID NO: 155421 - RNA, 76 nt, Homo sapiens
cgccggggcggcgacacccgggagccgccggcaccgccggaaccggcgcaggaacgggaagggcacaggaagaaag

SEQ ID NO: 155422 - RNA, 63 nt, Homo sapiens
ggcaacaagaaccgaaggcaaagggcaaaacaacggcaagcggagaagagcaaggccgaaccg

SEQ ID NO: 155423 - RNA, 111 nt, Homo sapiens
cgagcccccccccggaccgccaggaacaccagcaaaaccgagcagacccacggcagggcaaccccaccgcggaaggcaggcacacagacgagaacagagaggacccgagac

SEQ ID NO: 155424 - RNA, 52 nt, Homo sapiens
acagcggggccacccagaacaaaaagggccagaacaaggaaagacgcagcag

SEQ ID NO: 155425 - RNA, 57 nt, Homo sapiens
ccccccggacccagccccgggcacgacaggcagaaccaccagcacacaccaggaccc

SEQ ID NO: 155426 - RNA, 79 nt, Homo sapiens
cgaaagcgaagcaggaagaggacaaccccaaacggggcgacggcacgagagaagaggcgacaagggccagagcaacaga

SEQ ID NO: 155427 - RNA, 58 nt, Homo sapiens
gcccagcccccagcagcgggaacagagccaccgaagaaagggacacacggcaaaccac

SEQ ID NO: 155428 - RNA, 76 nt, Homo sapiens
ggaaaacagaagcgggcgcaaggaaaaacaccggaggaaccaggcacagccaaacgaaaagcggacaaggagaagc

SEQ ID NO: 155429 - RNA, 73 nt, Homo sapiens
caccgcgccaccacccaggagaccccacgccgccaagcaggcagaaccaggcaaaagcagaccggaaaaccca

SEQ ID NO: 155430 - RNA, 74 nt, Homo sapiens
acggcacaccgccaccggagcgcgcgcggccagcgccaggggcagcagaaggagagcaggggccaggagggccg

SEQ ID NO: 155431 - RNA, 72 nt, Homo sapiens
gcaagaacaggaaggggccccggcgagcaccgcaggcccgcagagggcagaggacgaaagcacgccccgcag

SEQ ID NO: 155432 - RNA, 76 nt, Homo sapiens
cggggcgcggagccagcgggagcgcaagggcggacaggcgaggaggccgcggacgaaagaagaacaacaggacccc

SEQ ID NO: 155433 - RNA, 76 nt, Homo sapiens
agcgaacagaagaagagcaaagaaagcgccccaaaagacaggcccaccgaaggaacacagcagcccaacacagaca

SEQ ID NO: 155434 - RNA, 76 nt, Homo sapiens
gcccagcagcccaggggaaaggaacacccccagcggccagggagaccccacgcagggcagagcgcggcggcagcag

SEQ ID NO: 155435 - RNA, 77 nt, Homo sapiens
gggaagaacacagccaaaaccacgaagcacgaccaaaaacgaggcagagagccaaaccgacacagagcggcaggcca

SEQ ID NO: 155436 - RNA, 56 nt, Homo sapiens
cccccgcccggcgccggcccgggccgccagggcaggcaccagcccagccacagcca

SEQ ID NO: 155437 - RNA, 38 nt, Homo sapiens
gccgagcacggggaaacggagaagagacgggaaagcca

SEQ ID NO: 155438 - RNA, 66 nt, Homo sapiens
ccgagacaccacaggaggcccgggaaccgaaaaaagcagggaagaaggcgcaaggggacggaaacc

SEQ ID NO: 155439 - RNA, 76 nt, Homo sapiens
acaaccgccccgagggaagggaggcggcggccccaaaaagacagccggagcggcccaaagaaggaagcaagccaac

SEQ ID NO: 155440 - RNA, 81 nt, Homo sapiens
agcagaagcgggagaccgcaaaaaggggaagaagcgaccgccgaaaagaaaaaaaacagaaaacgcgagggaccaagccag

SEQ ID NO: 155441 - RNA, 55 nt, Homo sapiens
aggagaaaaaaaaccgccgaacaaagaacaacggcgcgaaggagacacaaacaac

SEQ ID NO: 155442 - RNA, 80 nt, Homo sapiens
caaagccgcccagacggccaccggcgggaggaacaaaagggccgaggcaaacaagggccacgcgcccagggagcccgaca

SEQ ID NO: 155443 - RNA, 81 nt, Homo sapiens
ccaggaggggagaggaggcaggcccgcggaaacagcaccaggcagaccgaccccagcacagccgcagcgccacgcgagcag

SEQ ID NO: 155444 - RNA, 69 nt, Homo sapiens
ccgccgacgggaggaaccaaggaaccacacagaaagagaacgagagcccagacagagaaagcagacacg

SEQ ID NO: 155445 - RNA, 77 nt, Homo sapiens
gaccgcccgcccccaggaaaccaagaagcaacgaaggaagcgccacgggagggcaggagaaggagaaaaccacagga

SEQ ID NO: 155446 - RNA, 80 nt, Homo sapiens
gaccgaggaccgcggcggcaaaacagaccgaccgccacagagccacaggggccaaccgcagcccgggaaaagagaacacc

SEQ ID NO: 155447 - RNA, 40 nt, Homo sapiens
aggaagcggagaacgcgggcagccacgggccccgccagca

SEQ ID NO: 155448 - RNA, 63 nt, Homo sapiens
gagcgcgggagagaggcgaggcaggccagaacgggaggccccgcaaagaagggggcgagaaga

SEQ ID NO: 155449 - RNA, 69 nt, Homo sapiens
ggggcgagaggaaccggagaccagaaaagggaagggacgcgaagaaccccaaggacaagaaggaagcga

SEQ ID NO: 155450 - RNA, 67 nt, Homo sapiens
aacggcccaacagcggaggaaacccgggccagcggaagggcgcccccccggcaccgcaccagccggc

SEQ ID NO: 155451 - RNA, 57 nt, Homo sapiens
ccgcgccaccagagacggccaaaacagaagaggcaaagcccagccacagcagcagcc

SEQ ID NO: 155452 - RNA, 75 nt, Homo sapiens
aaggcgccgaagaggacgaaggaacgaggcgcgacacaccagcggagcgggggaacccccccgggcagccacgcg

SEQ ID NO: 155453 - RNA, 65 nt, Homo sapiens
gggcacgcgcggaaacggagggggaagaagaaaaggaggagggacagacgagagacaacagaaac

SEQ ID NO: 155454 - RNA, 56 nt, Homo sapiens
ccacaagacgacacccgacggcggagcaggagcaaaggagcaagaaaccagacccg

SEQ ID NO: 155455 - RNA, 83 nt, Homo sapiens
ggagacagcgccacagccgccagcaccggacacacaccggaaagggagcagcaccggccacacccacagcacgaccggaaccc

SEQ ID NO: 155456 - RNA, 78 nt, Homo sapiens
ggcggggagcaggggaacaggcggaaacccaaccaagaaggcccaggcaacccagagacacacaccagacagaagcca

SEQ ID NO: 155457 - RNA, 38 nt, Homo sapiens
aggacgcaggccaaacaaaacgaaggacaggagaaaca

SEQ ID NO: 155458 - RNA, 77 nt, Homo sapiens
gcggcacgagcccggggcggcagcgcggacccgcccggagagaggcagaacgcacacgcagggggaagaaagaaacc

SEQ ID NO: 155459 - RNA, 81 nt, Homo sapiens
gcgaccgacccggacgagaaacgcaaggcaaaagcagaccggaaaacccaccggcaagaccacacccgaggggagcccagg

SEQ ID NO: 155460 - RNA, 71 nt, Homo sapiens
gaaaggagggaagccagaggccaaaggcaggaggccaggcggcaaccgaaaccaaccagagagagcgacga

SEQ ID NO: 155461 - RNA, 81 nt, Homo sapiens
cgggaggcaagggcggcgaacccgcggcggacacgcacgccccggcacagggccccaggagcacagcaacgccgcggagcc

SEQ ID NO: 155462 - RNA, 71 nt, Homo sapiens
acaagcggaaaggacacaggagaggagccaagcccaacgggacgggaaaacggccacagccaacgacgcag

SEQ ID NO: 155463 - RNA, 75 nt, Homo sapiens
agcccagggcgacggcagcgaaccggcgcagcaaggcgccaccggaagaaacgggaggggaggagccgggaaaga

SEQ ID NO: 155464 - RNA, 83 nt, Homo sapiens
agacaaccgcagggggaccggccgcggcacaccggagagcgacgggacccccccgcagaaggcccagagggaggcacaacagc

SEQ ID NO: 155465 - RNA, 79 nt, Homo sapiens
aggaggacaccgagacgccccacgcgccacccagcgccgggccccgacgagagccagggccccccgggccggccgccgg

SEQ ID NO: 155466 - RNA, 88 nt, Homo sapiens
gaaccagaacacacagcaggaggagcagcgggcaaccccagcggccggccccaaaaggagggcgagccggcccaggccaccagagccg

SEQ ID NO: 155467 - RNA, 81 nt, Homo sapiens
ccgcagggagcagaggggacagaggcaccaaggaccccaagacagggggggcaggccacagcagcagcccgggagcaggcc

SEQ ID NO: 155468 - RNA, 75 nt, Homo sapiens
gggccagagacgacacgccgcacgacgcgccaacaacgggcacacaagggggagagagacgcgggaaccgccagc

SEQ ID NO: 155469 - RNA, 68 nt, Homo sapiens
gcgggcgcggggcaccacagaagcccagccgaccacgagagcacagaaggacagcgcccgcgccgacc

SEQ ID NO: 155470 - RNA, 74 nt, Homo sapiens
aggagagagagcaccaccggcgcggacgaccggagacccgccacaccagacagcgcgggagccaggaaacgcag

SEQ ID NO: 155471 - RNA, 79 nt, Homo sapiens
gggggaaccggcgcgccggcgcgcggcgcggacaggcccaaacggcgcagagacgcaagcggaagaacagcgcaaggag

SEQ ID NO: 155472 - RNA, 42 nt, Homo sapiens
cacagacgacccgcaccgcaaggacaagcgccacccgggaaa

SEQ ID NO: 155473 - RNA, 65 nt, Homo sapiens
acggagcaccgacccaacaccaggagacagacggacccaacgacagcccacgggggagacccaag

SEQ ID NO: 155474 - RNA, 100 nt, Homo sapiens
gaggaaagcaagaaagaagcggaagggaggcgcgcgaccagagagcaaagccgagcgccagaaaagaagagagccagcaggaacaagcaggaccaagcaa

SEQ ID NO: 155475 - RNA, 75 nt, Homo sapiens
aaaaaaggagggcaaggagaaacgaaggaaaagagaaagaccggcacaaggacacccccacacggggagacccaa

SEQ ID NO: 155476 - RNA, 63 nt, Homo sapiens
cgggcccgacgacgggcggagaacgagcggaaaggagccagagcaagaacagaggacacaagc

SEQ ID NO: 155477 - RNA, 91 nt, Homo sapiens
caggcccagacacggggccaccacgggaaaaagggccgggaagcgacagagaacccagcggacaaagcagccgacgaggagcaacgacaca

SEQ ID NO: 155478 - RNA, 72 nt, Homo sapiens
cacagaggccaaggcaagccagagaacacccgccgcgcaaaagagacacccggagcgcggacaggaaaagag

SEQ ID NO: 155479 - RNA, 65 nt, Homo sapiens
cgaggcccccgcacagcacgcgcagaacaaagggacaggcagaaggagagcaggggccaggaggg

SEQ ID NO: 155480 - RNA, 74 nt, Homo sapiens
cccacccccgggggaaaagaacgagggaccaaaagacacagcagggacgaaggagaaacagaggcgcaccggga

SEQ ID NO: 155481 - RNA, 74 nt, Homo sapiens
aagagagaagggcggcggggacggccacggcgcgcagaaacacagcaagaggaggagcccggcccgaaccgcgg

SEQ ID NO: 155482 - RNA, 40 nt, Homo sapiens
ccaaaggcaggccccgcaggccccgcacacaggaagaacg

SEQ ID NO: 155483 - RNA, 79 nt, Homo sapiens
cgcccaccaggagaggagcagcagaagggggaggcaggaaaaagacacaagacagcaggaccgggaccagcccgaagac

SEQ ID NO: 155484 - RNA, 69 nt, Homo sapiens
acccagaagagcgaaggacccagcgaggagggaacagcgacacccagcagaagcagcaggaaacgaacc

SEQ ID NO: 155485 - RNA, 74 nt, Homo sapiens
ccagggcggccagacccgaagccgcgccccgcaggcacccgggcccccgcccaaacgagcggagacggaggcaa

SEQ ID NO: 155486 - RNA, 38 nt, Homo sapiens
aagaaaaagcccggagaaccagacgagccagagaggca

SEQ ID NO: 155487 - RNA, 76 nt, Homo sapiens
gaagaaaaacagaaccacacaaacggcgcccaagaacaaaccaccgggagaaccaccaaaagaaacggccagaaaa

SEQ ID NO: 155488 - RNA, 86 nt, Homo sapiens
gagccgccgccaacgcgcagggcagcggcccccgcccgcaggaccgcaagaaccagggagaccacaaaagagcagaggaggaacac

SEQ ID NO: 155489 - RNA, 125 nt, Homo sapiens
gaggccccagaggggaagagcccaaacccagacagcgcaccccaagcccgggagcccaggccgggcgggggaggcgagacacgggaggcacacacaacgccaacgggagcggagcgcaccaacca

SEQ ID NO: 155490 - RNA, 80 nt, Homo sapiens
ccaggaagcggaggagccccggaggcagagcggcgccagacccaacagaggaagccgcaagaaacgggacgacaggaagg

SEQ ID NO: 155491 - RNA, 78 nt, Homo sapiens
cacaaccacgaggacgaccccacaacagggagcagcagagcggcaagacgcacaacagcaggaagaccccaggagcag

SEQ ID NO: 155492 - RNA, 85 nt, Homo sapiens
ccgggaccaggcccgggggcggcggccacgccaaggacggcggcaaccggcacgcaccagagcagcccacaggacggcacccgcc

SEQ ID NO: 155493 - RNA, 77 nt, Homo sapiens
gcccagggagaaaggcccaccggccgggagggcccagggcggggcccgaggacacacagcaacgaagcaggggagga

SEQ ID NO: 155494 - RNA, 69 nt, Homo sapiens
cacaggaacccaacgagccaaagaacagaagcagagacagaagcccaagccagaagcggcaacccgaca

SEQ ID NO: 155495 - RNA, 69 nt, Homo sapiens
cagcgcgcgccccgcccccccccagagcaagacacaagcgggacggaagaggcccggcgaccggacaga

SEQ ID NO: 155496 - RNA, 80 nt, Homo sapiens
gccccccagaaggaggagccagagaggggcggggcccggccacagccgcaacgccccgcgggccagcagcagcacccccc

SEQ ID NO: 155497 - RNA, 61 nt, Homo sapiens
ggagccgccccggccgcaccgagcccacagcccgggccccccgagcggacggaccggagcc

SEQ ID NO: 155498 - RNA, 79 nt, Homo sapiens
ggaacaggcggcgcgcgcggcgcgggacgcgcgcgggcacccacggagccccggggcggaggcaccaggacagaacgag

SEQ ID NO: 155499 - RNA, 83 nt, Homo sapiens
acggcgccgcggggaccgggcagggcccccgcggaggcacgcgccggacaccaagcacgacgggcccccgagagaaccgagga

SEQ ID NO: 155500 - RNA, 76 nt, Homo sapiens
cgagcaccaacggaaacagccacgagagacgagcaacccccgggaagccaagccgcaggcgcaccagggcagcagc

SEQ ID NO: 155501 - RNA, 81 nt, Homo sapiens
gaccgccaggcgcccaaacccggaccaggagaggccccccacccgaaggagggggccgcaggaagaggaggaaacgaggag

SEQ ID NO: 155502 - RNA, 75 nt, Homo sapiens
cgacccgccccaacaccggggaggaaggaaccaaagaaccccaaaacgaaacaagcaaacaggagaagaaggaaa

SEQ ID NO: 155503 - RNA, 73 nt, Homo sapiens
gagagcgccggcggagaaaaagggagcccaagacgaaggggccacggaagaagagcgcaggagccgcagacga

SEQ ID NO: 155504 - RNA, 48 nt, Homo sapiens
ggaacgaccaggagacgcggaaaagcgcccaggaagcggaaaaacaaa

SEQ ID NO: 155505 - RNA, 68 nt, Homo sapiens
cgggcggaggcgcaaaggcagcggggaaccggagccgcaaggccggacagcccccagcccgacaccac

SEQ ID NO: 155506 - RNA, 75 nt, Homo sapiens
cggacacccagcggcgacacgcgacgcgccaaaacccgcccggaaaggggacaccggcgaaggagcacgcaagca

SEQ ID NO: 155507 - RNA, 61 nt, Homo sapiens
agcacccaggagacgggccgcgaaggcgaagcgacacggggaccggagcagggcacacacc

SEQ ID NO: 155508 - RNA, 84 nt, Homo sapiens
cgggggggacccgggggcggggcgcaaaaggccgagacgcccgggagaggagcgcggccgcgcgagccagccaccccgcggaag

SEQ ID NO: 155509 - RNA, 69 nt, Homo sapiens
ggacccgcccagcagaagaagagaggagggagaacacagaaaccggccccaggaacaggaaaagggagg

SEQ ID NO: 155510 - RNA, 75 nt, Homo sapiens
agaaaaaaccaccaggaaagaaaagaacggaaaaacaaaagcgaaccgaaaacgccagaagcagcgaaaaagaac

SEQ ID NO: 155511 - RNA, 101 nt, Homo sapiens
ccaagagcggccccgagagccgcgccgcagggcgcccggccgccaggccagcgagacgccggcccaccagccagcggggagccgcccaccccacaagggag

SEQ ID NO: 155512 - RNA, 33 nt, Homo sapiens
ccccaagagcgggagcagcggagagccccccag

SEQ ID NO: 155513 - RNA, 78 nt, Homo sapiens
aggagcaacagcaacaaccgccagcacagcaaccggccagccgaggcccagcgagcacacaagaaaagaacagaacag

SEQ ID NO: 155514 - RNA, 65 nt, Homo sapiens
cgggggcggccgggacggaggacgcgcagacggcaagaagaagcgaaaaccgcccacaacaccag

SEQ ID NO: 155515 - RNA, 86 nt, Homo sapiens
gcggcagcgcggccaggagaccgaggcggaggacgaaccagaaccaaccaggaccaacaaaaccagacggcaagcagcacaaagac

SEQ ID NO: 155516 - RNA, 75 nt, Homo sapiens
agaagacagggcggcgggccggacgacaagaaacaaccaacccaggagcaaccgggagggagagagaagaaagga

SEQ ID NO: 155517 - RNA, 94 nt, Homo sapiens
accaccgccccgcagccgccagcagccaaggacaagggcaaagcgggcgggcaagccacgagggaacacgcgcaagccaaaggggaagcaaacc

SEQ ID NO: 155518 - RNA, 74 nt, Homo sapiens
ccccaccgggcagccccaccaagacaccaaggagaggccaaccagcgccgaaaagcgaaaagaaacaagccgcg

SEQ ID NO: 155519 - RNA, 61 nt, Homo sapiens
cagagcggaacgaacaaggggagcccacgaaagggccagcagcccccagaagaagccagaa

SEQ ID NO: 155520 - RNA, 102 nt, Homo sapiens
agaaaagcaggagcaggaggaagcgggcccacagaaaagcagcccaacgaaaaccgcgaagcacaaaagcagaaacacaaacgaacccgggaaacacgaaca

SEQ ID NO: 155521 - RNA, 84 nt, Homo sapiens
cgcaccgcagcgccggggcacgacacaaaaacagcgggacgacaagaccaagggacaacgaagggcgccgagcggagagccgcc

SEQ ID NO: 155522 - RNA, 51 nt, Homo sapiens
gcagcggcggacaggggcacgggcagagcgggccggcaccggaaagcggga

SEQ ID NO: 155523 - RNA, 79 nt, Homo sapiens
aggagccagacccgagcgggagagaaggagaccaaggacagaacaagaaacagcacggaagggagaaaacaaaagagac

SEQ ID NO: 155524 - RNA, 73 nt, Homo sapiens
gcgcaaggacagacgagaacggacaccgccccccagaacaccagcaggaaaaaagagcggcagaaggccaaac

SEQ ID NO: 155525 - RNA, 71 nt, Homo sapiens
aggccaccagcccaacaccaccgggaagcagcagaccagacgacaagcccgacacccagcggcaccggaca

SEQ ID NO: 155526 - RNA, 68 nt, Homo sapiens
agagggaccgacccgaggccagcagggaaagccccgcagcaacaggcgcaggaggacgcggcacacca

SEQ ID NO: 155527 - RNA, 92 nt, Homo sapiens
agagaggaggaggaggcggcgcggcggccccgggaccaaggaggcacgggcgagagcgggaagagcacgcacaagcagagcgcacaccacgg

SEQ ID NO: 155528 - RNA, 84 nt, Homo sapiens
ccaaaggccggccagaagacgcgagagcaccgaagacggcaagcacggccacgccaagagcgccgggcacaggcacgcagcggc

SEQ ID NO: 155529 - RNA, 63 nt, Homo sapiens
aggggagaagagccagccgaaagcagaacaggccaagcaggggcagacccaaaggaaacgcac

SEQ ID NO: 155530 - RNA, 42 nt, Homo sapiens
gccaaccggccagaggacgaggggaccggcagaggacgccac

SEQ ID NO: 155531 - RNA, 73 nt, Homo sapiens
ggcggacggaggagcaggcgagaagagaagggaacggagcgggcccgggcggcaaaagcgcaggaaccccggc

SEQ ID NO: 155532 - RNA, 78 nt, Homo sapiens
caaaaaaaagaggagcagcaggcacagcacgggcagagccagaccagaacaccaagaccccagcccggagagccccac

SEQ ID NO: 155533 - RNA, 80 nt, Homo sapiens
agaacgggagggcagaccagaaaaaaggagccacagcccgggaacacaggccgagacaaagccagaaaacagcggcaccg

SEQ ID NO: 155534 - RNA, 74 nt, Homo sapiens
gccacgggccgaaaaacagagggacggcagcggaccgggcccaagcaacccccagccacaacgcgaaccgggcg

SEQ ID NO: 155535 - RNA, 61 nt, Homo sapiens
aaacacgccggaaaccccgcccacagcacgaggcccggccaacgcaacagggagcccacgc

SEQ ID NO: 155536 - RNA, 68 nt, Homo sapiens
aaagcacagggagcgagcacacgggggagcccagaggagacagcaccaggcagaagcgaaagcaaaca

SEQ ID NO: 155537 - RNA, 69 nt, Homo sapiens
gacaccaccaacggaaaacaacacagcaccgccaggcaccagcgcgccgcacgccacccccagcgggcg

SEQ ID NO: 155538 - RNA, 76 nt, Homo sapiens
ggccgggggcagaccccagcccacaacccacgcgcaccgggaacaggaaaaagggcaagaagcaccaaaaggaaga

SEQ ID NO: 155539 - RNA, 77 nt, Homo sapiens
cacacacagaacaaaagcagaccccaaaccagcaaagaagaagaacaagaagaggggaagaggaaggaaaaccgggc

SEQ ID NO: 155540 - RNA, 60 nt, Homo sapiens
cgaagggaagcgcagaaaggaaaacaaaggagcacaggaccgaacacaaccccagagccg

SEQ ID NO: 155541 - RNA, 70 nt, Homo sapiens
ggcgggacagacgggcgaagcgagccccagacacgggaagcaggacaccaaccgacaagccaacggaaca

SEQ ID NO: 155542 - RNA, 65 nt, Homo sapiens
agaaccagaaaaagagaaggaggcgcgaggcacggaaacaggccgagaagaacgggagaagaaaa

SEQ ID NO: 155543 - RNA, 77 nt, Homo sapiens
cccaccagccgcaccaaggagacaggacgaagcccaaaccacaagccacaaaaggggcagggaagccgggagggccc

SEQ ID NO: 155544 - RNA, 75 nt, Homo sapiens
gcggaggccccccgggcacaaacgggaaaccagcaccacgaggaaaggggagaagaacaaagccccgcaggcacg

SEQ ID NO: 155545 - RNA, 82 nt, Homo sapiens
agccccagcaggaccaaccaggccaaaaccaggaggaagccagcccgagcaggcccaggggaggaggggcaaccacagaccc

SEQ ID NO: 155546 - RNA, 83 nt, Homo sapiens
gaagcccaaaaagcgaaggggaggcgccgcaagcgcgaggggaaaagagacgcaaaccacgaggacagagaagagagaagcca

SEQ ID NO: 155547 - RNA, 81 nt, Homo sapiens
agccggggacgacacacacacggaggaacccaacacagggagggccaagaaccccagaagagggaaagccggacccgccca

SEQ ID NO: 155548 - RNA, 56 nt, Homo sapiens
ccaccggaaaacgacagaaggaaccaacccgccaccaagaaagccccccagaaagc

SEQ ID NO: 155549 - RNA, 71 nt, Homo sapiens
aaaggaaacaacaggacccggaaaacagaacggagacagaaccgaggacgccaaaaccagacccccaagac

SEQ ID NO: 155550 - RNA, 72 nt, Homo sapiens
cgaaacggaagaggacccggcaaagccaaagaagccacagagggccgccagcacaagaccggaggaagaagc

SEQ ID NO: 155551 - RNA, 76 nt, Homo sapiens
cgggggagaggaccacacaaaaccaggcgaacgaagaagcgggccacccacaaagaggacgaagaggcccaacagg

SEQ ID NO: 155552 - RNA, 70 nt, Homo sapiens
gaagacaaaaagaagacggacagggcacacagaaccgaaaaagagcgggcgaccagccaaggaagcaaca

SEQ ID NO: 155553 - RNA, 64 nt, Homo sapiens
aaaacagaaagaggaggagaagggagaaagggggcgaaacaccacacccaggccgacacaagaa

SEQ ID NO: 155554 - RNA, 79 nt, Homo sapiens
caaaacccagaggaaaaaccggcaggacagacaaacaggaagggggggcgggccgacaagaaagccgaggcggggcggg

SEQ ID NO: 155555 - RNA, 76 nt, Homo sapiens
gaggaagagggcggcgacgggggggacgagcggagcccgggacaggaggaagcggggaaagccagggagaagacaa

SEQ ID NO: 155556 - RNA, 83 nt, Homo sapiens
gcaacacgcccccccagaggagggaagaggccccccaaccaccaccaaaaaaggaggggaaagaaaggaagaagaaaaaccag

SEQ ID NO: 155557 - RNA, 110 nt, Homo sapiens
gcagcggacccccagggcaccggagacaggccggaccaggccccccgcggcaaagggagcaacagcgagcaacaggcaacgaaaacagacaaaacaacggaaaagcaggg

SEQ ID NO: 155558 - RNA, 61 nt, Homo sapiens
accaagcgcgacaggccaggcagaacaaacggaccagcgaccgggcaggagcaagaaagcg

SEQ ID NO: 155559 - RNA, 37 nt, Homo sapiens
accgcaccagcagaagaaaaggcagggcccgggaaag

SEQ ID NO: 155560 - RNA, 77 nt, Homo sapiens
gggccaggccagaagagccgaccacaaggggaggacaaccgcccgggaccagagaggggaaaggagaaaggaccgca

SEQ ID NO: 155561 - RNA, 75 nt, Homo sapiens
cagccaccccgcccccgccccccccgccgcaccagaccccgcgagcaagaaggggagaccgcccgcggcacgagg

SEQ ID NO: 155562 - RNA, 76 nt, Homo sapiens
cgggggcccggccagcagggagacacaggccaggacgcgccaaggcgcagagaacaccgagcggagcaaggagaag

SEQ ID NO: 155563 - RNA, 75 nt, Homo sapiens
accaacggacgaaggaccagccagccaccagaaccagcaacacacaagaaacccagccaccaagggaaaagagaa

SEQ ID NO: 155564 - RNA, 81 nt, Homo sapiens
acggccgcgaagaggcgggccggagagagcccacacaaaccgccagccagacaaagccgccgaggagcgggcggaggagac

SEQ ID NO: 155565 - RNA, 71 nt, Homo sapiens
acagaggcgagagcggcagcagcaccagcccaagagaaggcacgacgacggagagaggaagaagacggggc

SEQ ID NO: 155566 - RNA, 60 nt, Homo sapiens
agccacggcagaaccaaacccaccgcaagacagggaagcccgagacggcccagacgcgcg

SEQ ID NO: 155567 - RNA, 102 nt, Homo sapiens
acacaccagacgagcagcacagacacgggcacagcagaacgccggagggaagccgaaacaggaacacgaaagaggaaaaacgcacaagaaaccgaagccaag

SEQ ID NO: 155568 - RNA, 68 nt, Homo sapiens
caaaacaagaccggcagaaaccccagcgcaggaaggcgacagacacagcaccggccccggcagcggga

SEQ ID NO: 155569 - RNA, 80 nt, Homo sapiens
cagagaagagaggcaaaaccaccccaccaaggaacgcggaacaagcaaagcacaagacgagaccagaacagagggccaac

SEQ ID NO: 155570 - RNA, 71 nt, Homo sapiens
gaagacagagcggaacagaggcaaccaacacaaggacagagacggaaagggcaaagaagcgcccccacaga

SEQ ID NO: 155571 - RNA, 67 nt, Homo sapiens
ccgggaacagcccaagaggaacaaagacggagagcccagagacacaggcacaggaagggagaccaac

SEQ ID NO: 155572 - RNA, 75 nt, Homo sapiens
ggccccaacccaccaaaagcacagggaggacaccaggagaacgaagcaaaagcgggccgggaccggcacagcagc

SEQ ID NO: 155573 - RNA, 41 nt, Homo sapiens
ccccaaagcgcgggaacaggagggaagaacaagagacagag

SEQ ID NO: 155574 - RNA, 87 nt, Homo sapiens
cgcagacggcgcccagcaacacagaagccgacaaggcgcaagcgaaaacagaccgcgagcccagaggaaagagaagggagggcgacg

SEQ ID NO: 155575 - RNA, 87 nt, Homo sapiens
gacaggccaaagagcggcaccgggaggaggaggagacgcaggcggcccaggaccgggaggagagaaggacaagagcgccgcgagaca

SEQ ID NO: 155576 - RNA, 117 nt, Homo sapiens
ccggggcagggcccggccccgaccccgcggccggacgacccaagcccgcgagcaggagaggagagaagagggggaaaaaggaaggccgccggacagcgcagagccaagacggagaaa

SEQ ID NO: 155577 - RNA, 55 nt, Homo sapiens
gcagagaagggcacagacaacacagacaagaaaaaccaaaggacgcaaaaaagca

SEQ ID NO: 155578 - RNA, 55 nt, Homo sapiens
cacaccggggcgcagggcagcgagccggccggaccgaacagacgaacaggggaga

SEQ ID NO: 155579 - RNA, 51 nt, Homo sapiens
acccggacccaccacgcggcagagcgcgaagccccgacaccgccaagacgg

SEQ ID NO: 155580 - RNA, 84 nt, Homo sapiens
cgcccagccccgagagcaggaacaggacagaagcagacaacaccacggggaacgcggacaaaggacaaaagaccaaaaacagcg

SEQ ID NO: 155581 - RNA, 70 nt, Homo sapiens
gacccggacagaaacaagaaaaaaaagaaacccaaaacacgaacaggaaaaagaacgaccaggacacaga

SEQ ID NO: 155582 - RNA, 77 nt, Homo sapiens
agggggggcgcgccggaaaccggagcgcgcagcagggcgaccagacgaggggagacggacgggggagagaggccaaa

SEQ ID NO: 155583 - RNA, 73 nt, Homo sapiens
cggcccgaggacgagagaagcccacgcaaacaaccacagggaacaaagagcaccccagagcgaagcagaacac

SEQ ID NO: 155584 - RNA, 77 nt, Homo sapiens
caaaaaccagaaaaacgggggagagccacggaagccgacagacaaccagcagcagggaagagcacgcaagcaaacac

SEQ ID NO: 155585 - RNA, 81 nt, Homo sapiens
ggagccacggagaagaaggccccgacgggcccccggagggccacaagccagagcgccccggccaaggcagaccagcgggca

SEQ ID NO: 155586 - RNA, 82 nt, Homo sapiens
gcgcagccaggccgagaaccccagcggagaaccaccgcacaagagccaagaacaagggccgcgagggaacaaaaccgcacgg

SEQ ID NO: 155587 - RNA, 73 nt, Homo sapiens
ggacccgcagagcggcgggcagagcgcgggccgcgagggcccggaacaggggcacgcacgaggcggaaccaca

SEQ ID NO: 155588 - RNA, 66 nt, Homo sapiens
aagcaagcaaaaggaaccagcgggaaaccagagaccccaaaggagcaggaccgacgacaaagcggg

SEQ ID NO: 155589 - RNA, 76 nt, Homo sapiens
aggcgggaggagcggcagccgcgaggaggcgcgggagggcgagaacgaccccgagacgacgacgcaccaaaccccc

SEQ ID NO: 155590 - RNA, 88 nt, Homo sapiens
cagggaacagcggggcaaacagagcggccgccagcgaggccacgcggccaccagaccgaccgagggcccgcacacgcacgcacagcag

SEQ ID NO: 155591 - RNA, 86 nt, Homo sapiens
ggcccaggaggagcaggggggcccgcggcgcaggacgcccaggaaggcagcgcgcccaggagaaagacgggagacgaggggaagag

SEQ ID NO: 155592 - RNA, 83 nt, Homo sapiens
ccggaagcgcccgaggcccgggcccgcgggggcaaccgggcgcagacgagggggagccccccagacccgaaaggagacaagag

SEQ ID NO: 155593 - RNA, 51 nt, Homo sapiens
agaccagaacgaacccccccccccggagaaagaagaaacaaagagggaccc

SEQ ID NO: 155594 - RNA, 43 nt, Homo sapiens
ccggcggcgcgagcaggaagggggccgacgacgagccccgcga

SEQ ID NO: 155595 - RNA, 56 nt, Homo sapiens
gcggagaaaaggaaccggccccggcaaaaccccggacaagaaagccagagaaacga

SEQ ID NO: 155596 - RNA, 68 nt, Homo sapiens
gagagggaagagaaaggacccagcagaccacaacggcaagcggagaagagcaaggccgaaccgagagg

SEQ ID NO: 155597 - RNA, 73 nt, Homo sapiens
cagggcaaaggccccgacagggcggagaacggaaaagcaccaggaagcagagaggaccgcagaagggaaggag

SEQ ID NO: 155598 - RNA, 55 nt, Homo sapiens
cccccggagggaaaacaccaaggccaacccccaaggagcgaacgcagggccccac

SEQ ID NO: 155599 - RNA, 85 nt, Homo sapiens
gcggaccgcccggagcaaaagaggacgccgggacaccaagaagcagggaaagaagccagcgaagagagggggaaaaccccagacg

SEQ ID NO: 155600 - RNA, 71 nt, Homo sapiens
ggaaccaggcacccagcacgaaggaggaaccaacaacaacacaagagaagggaaaagaaggagaggagggg

SEQ ID NO: 155601 - RNA, 74 nt, Homo sapiens
gacagccaaaggcacaggaaggaaacgcgcaacaagagggggaagagaccgaaaccaagggggaaaggcacgag

SEQ ID NO: 155602 - RNA, 83 nt, Homo sapiens
ccgagccccagagcagcccccccgcccagcgcccccaggccgccccggggccacgggcaagccagcgacgagacaccagagga

SEQ ID NO: 155603 - RNA, 74 nt, Homo sapiens
aaacagcggaaacccaccaacagcagggaccagaagacacggaacggacaggccaaggaagaagaaaaaaaaag

SEQ ID NO: 155604 - RNA, 76 nt, Homo sapiens
acaccgacgcaggaagccaccgagacggcgaccgggcgccgagacaccagagccacaagaggaggagcggcagaga

SEQ ID NO: 155605 - RNA, 61 nt, Homo sapiens
cgggcaccccggaccgcgcagccaccgcggcccccgcggacaacaggcacaaagagagaag

SEQ ID NO: 155606 - RNA, 72 nt, Homo sapiens
aacgccaggcacggaggcagaagcgcggccgggaaacccggaggaccagaccacggagacgccacagagaca

SEQ ID NO: 155607 - RNA, 42 nt, Homo sapiens
cccgaccccccaagcagagagcggcaggccagacgcaggggc

SEQ ID NO: 155608 - RNA, 105 nt, Homo sapiens
cccacccaaccacgggcccaacaaacaaaacagcgggaagggaacaagggacgaaagagagagaggcaggggggaccagacacaccccgaagacaagcaccaacg

SEQ ID NO: 155609 - RNA, 108 nt, Homo sapiens
ggacagaaggacgaaagcaaggaggggaaaaaccgcgaagcaggggccgcgggaaggacaaggacggcaaggaaaaagaaggacaagaacggaacgcggagccgcccg

SEQ ID NO: 155610 - RNA, 73 nt, Homo sapiens
aaagaccacaagaccagaagccgagccacggagcacccaaagagaccacccgcagcgagcagcggaaagaggc

SEQ ID NO: 155611 - RNA, 81 nt, Homo sapiens
gcggggaacagccggaagggcggggggcgggccggaggggagacgggaggcagggccaaccgccccccagcagcaggcacg

SEQ ID NO: 155612 - RNA, 107 nt, Homo sapiens
ccgcaacaccccgccgacccacaggccgacaagaaccccgcagccacccacagcggccaccagcgccacgggccagagcccgcccgaagagcgcgccgcaaggagga

SEQ ID NO: 155613 - RNA, 81 nt, Homo sapiens
agcaaacgcagaaggacgcccacgagcaaccaagagaagcgagcagcgcaaagcacaaagaacgcacaccaccagaacgag

SEQ ID NO: 155614 - RNA, 82 nt, Homo sapiens
ggagacggccccaccggcaccgagaaagacaaggcggaaaacaccccaaaagccaaaagggaaaggaaaagaccaacaacag

SEQ ID NO: 155615 - RNA, 57 nt, Homo sapiens
ccgggccaggaacaccgcagacaagggacaaagccagaagacaccgcaggggacaga

SEQ ID NO: 155616 - RNA, 76 nt, Homo sapiens
cggagccccagccagggaaccacggagcacgagaaaacggcgggagaaacaggcaggagaccaacaaaacaaaccc

SEQ ID NO: 155617 - RNA, 88 nt, Homo sapiens
cggcaagagcgagaccggagcccggcgcaccagcagaaccggagagagcgcagcccagccagcagaaagcgggcggagaaccacggcc

SEQ ID NO: 155618 - RNA, 90 nt, Homo sapiens
acaaagggcggccacagcaggaccggccaggaaaacaagagcaagaccccaagcagccccagcccagcagaagccccaggggacagggag

SEQ ID NO: 155619 - RNA, 83 nt, Homo sapiens
cagacggcgcccagcaacacagaagccgacaaggcgcaagcgaaaacagaccgcgagcccagagcgaggggcccccccacccc

SEQ ID NO: 155620 - RNA, 77 nt, Homo sapiens
caccacggacccaagcccagggcaacgggcagaggaggaggcagcgccgggaggacagacaaacagacacaaccgca

SEQ ID NO: 155621 - RNA, 73 nt, Homo sapiens
acaggcgcccacacccaagcagagcccaaggacccagaacccaaaaagaccccggcacagcaacaaagagaag

SEQ ID NO: 155622 - RNA, 87 nt, Homo sapiens
ggaggagcaggcggggaggcgaggcccgaggaggcagaggaggaggagggaccacaagccacaaggaaagaagacgaaggaaagccg

SEQ ID NO: 155623 - RNA, 83 nt, Homo sapiens
aaagcaaaacagagcggaggaaaagaaggcacggaagggacccgagaaggaggcaaacagccggccagcaaaaggaaagggcc

SEQ ID NO: 155624 - RNA, 72 nt, Homo sapiens
ggccccgcagacccaacggcagcgggccggcaacagcggagaagaccaggcagggacagcagacgcaaaccc

SEQ ID NO: 155625 - RNA, 83 nt, Homo sapiens
ccggcggcgggccgaggagccgggcgcaaggagcggaagaggagaccaaccggagaggcaagacacgggcgaggggccaccag

SEQ ID NO: 155626 - RNA, 69 nt, Homo sapiens
ccgcccccgccaacgaagaccgagaccaggagagaagaagagcccccaagcaccacggagggggagagc

SEQ ID NO: 155627 - RNA, 72 nt, Homo sapiens
ggagagcgcgccagccggccgcgagccgcaaaggaacgccacaaagaggagggcaaagcagaaaagcccacg

SEQ ID NO: 155628 - RNA, 89 nt, Homo sapiens
cccacacaacgcagggagagagggaggcaagagaaaagccagacacccaggaacagcaacagcaacaggaccagacgaggacgaacaac

SEQ ID NO: 155629 - RNA, 77 nt, Homo sapiens
aaaagcggccccgggacggaggaagggaagcgcaccaacaagagaaagcccgaaccccagccccaggagagaagacc

SEQ ID NO: 155630 - RNA, 78 nt, Homo sapiens
ggagcgccagcccgcggcgagaaggcagcaggaagaaacagcgaaccaaaaaccagcagaagcagagaagccggcggc

SEQ ID NO: 155631 - RNA, 68 nt, Homo sapiens
gccgagccagaaaaagccgaaaaaaacacacaaagcgggaccccgacggagagacaaagaagacggag

SEQ ID NO: 155632 - RNA, 80 nt, Homo sapiens
agccgggggcgcccgcggaggccggggagcagccgaccaggagccccagaggggcagcacgaaaacaccaacgacgcaac

SEQ ID NO: 155633 - RNA, 75 nt, Homo sapiens
ccaaggagccgaaaagaggaaggggcaggccacacgggcagaacaacaggagggccggagagcaggagcggaggc

SEQ ID NO: 155634 - RNA, 64 nt, Homo sapiens
ccgaaagcaagcgcggaagccccgaaaccccaggacccagacacacgcagaaaggccagacagg

SEQ ID NO: 155635 - RNA, 74 nt, Homo sapiens
acccacaacgggaggggccaccggaccccccaacaccccacgaaggcggcaccaaggagaagacagaggagcca

SEQ ID NO: 155636 - RNA, 69 nt, Homo sapiens
gggccacaggaggacaccgcaggggcgagcgccgcagagacaaaaccaaggaggacacaaccgcgagaa

SEQ ID NO: 155637 - RNA, 60 nt, Homo sapiens
cccaccgcacggagggaagccggccagaagacggccacccaggacgcacaaaacagaaac

SEQ ID NO: 155638 - RNA, 85 nt, Homo sapiens
cccaggcagcaaacaggagcgcaggacccaaggggacagcaaaaccggcgccacggaccaaacacaaccaagcacgacccccgca

SEQ ID NO: 155639 - RNA, 59 nt, Homo sapiens
cacagcaccggaaggagcagccggagcaggaagcgcacacgccaaaggagagcgcggag

SEQ ID NO: 155640 - RNA, 74 nt, Homo sapiens
acaaacaaacggaggaacaaacgggaggacagagcccaggaccaagagcacaacaacacggaccagaaaaaaca

SEQ ID NO: 155641 - RNA, 72 nt, Homo sapiens
caccgaggcagaaagaaacgccccaaagcagaacgcacgagagaaacagaggacgaccgggaggacaagaag

SEQ ID NO: 155642 - RNA, 62 nt, Homo sapiens
cccgcacccgggaccagcacaaggggcgccccacgcccccaccaaagcccagaaggagcgag

SEQ ID NO: 155643 - RNA, 69 nt, Homo sapiens
acaggcccgagccgcaacaggaagcaaacggccccagaacaaaaggcagccaacgacagcaaggaagcc

SEQ ID NO: 155644 - RNA, 76 nt, Homo sapiens
ggaggagccgccagaacgcggaagcgagaaccgccgcgcccaggcggaggcaggggccgcgcagcccccccccagg

SEQ ID NO: 155645 - RNA, 55 nt, Homo sapiens
ggcggaaaaccccaaaaggacaaaggacaaacccgaggcgagaaccaagacaaca

SEQ ID NO: 155646 - RNA, 69 nt, Homo sapiens
ccgacaaaggcgccgcacaccgcgacggcgcgcggcgcgagaaccaaaggcaagaaccggagcaggaga

SEQ ID NO: 155647 - RNA, 70 nt, Homo sapiens
caaggaccagccgggcccccgcgccccccagaggcggccgaaggaaaggccgggccgcccccccccaccg

SEQ ID NO: 155648 - RNA, 75 nt, Homo sapiens
cccacggagcagcacccacccgcacagccgagggcagcggggaagaagaaaaggaaccgaggccccccggcgaca

SEQ ID NO: 155649 - RNA, 77 nt, Homo sapiens
cggcgcaaccagcccagggcggcggaggggggaagccagccaggacaaagagcaaccgaaggaaggaaaagaaggag

SEQ ID NO: 155650 - RNA, 73 nt, Homo sapiens
aaagacgagcagaggccagaagaggaaagagagaaggacacagagaaccagcacgggaagagaaggaaggcga

SEQ ID NO: 155651 - RNA, 76 nt, Homo sapiens
ccgcgcggggcacgcgccagcccccaacaccgagccccaggcgcagggagcaggagaagcggagcgaaggggcggg

SEQ ID NO: 155652 - RNA, 63 nt, Homo sapiens
agcacagggagcagaaggagcgcaagaagaagggagacggacccgccgagcgccgaacgccca

SEQ ID NO: 155653 - RNA, 80 nt, Homo sapiens
cccgccccccagcaccgggcggacggcgggaccacagcaccagacgaccagccagaggaaccgagcaaacacaacacagg

SEQ ID NO: 155654 - RNA, 84 nt, Homo sapiens
ccggccgcggggcacggcgcaggggacgcgggggcgcaggacgagcaagcgcccaccccacgggaggccgggacgggacaacga

SEQ ID NO: 155655 - RNA, 56 nt, Homo sapiens
cggagcccgcacgcggcgggcaggccgcgggagagcgggggcgggaggcgggcccc

SEQ ID NO: 155656 - RNA, 74 nt, Homo sapiens
ccgcccggccgggcgcgccgcaccccagcagcacccaagcagaggcagcgagaagaaaaagaagagagagacac

SEQ ID NO: 155657 - RNA, 82 nt, Homo sapiens
acagcaacagcaccccaccaggaagaggacaccagcccgggagaagaggcaacacccgagcggggcccgaaaacgcagagaa

SEQ ID NO: 155658 - RNA, 77 nt, Homo sapiens
gccaggccccaccacggcgcgagccaggaaggcaggcgcgccggccccagcggggccccgagccccggccccaaaga

SEQ ID NO: 155659 - RNA, 60 nt, Homo sapiens
gccgcgaccgcccgccggaaagagccgcagacgcacagcaaccaccggacccgaaggcca

SEQ ID NO: 155660 - RNA, 37 nt, Homo sapiens
ggggcgcagagcgggcaaggcaccagacccggaggag

SEQ ID NO: 155661 - RNA, 69 nt, Homo sapiens
gaacgggagaagaggcaaagaaacaccaaaagcaaccagcccaacgccagaacgcacagcccaccgcag

SEQ ID NO: 155662 - RNA, 58 nt, Homo sapiens
aacccagaacaaaaggagcaagcccgccgacccgaaggaaacaagaagcgccgcaccc

SEQ ID NO: 155663 - RNA, 78 nt, Homo sapiens
ggcgacagcaccaagaacccacgcagccgggagaccacagaggaaggaaacgcggagaccccggcggccgcccccacc

SEQ ID NO: 155664 - RNA, 81 nt, Homo sapiens
cgcccagccgcagaaagcacaccaaccagaggggagccgccaccaaaagcagacggaaaacccacggggaagaccacaccc

SEQ ID NO: 155665 - RNA, 40 nt, Homo sapiens
agcacagccggcgacggcgcggcagacggcagaaaacaga

SEQ ID NO: 155666 - RNA, 82 nt, Homo sapiens
ggcgccggcgacggaccagcgacccaagcgccgcggaaccacgccgccacgacccccaggcgcacacacaaaggggagccag

SEQ ID NO: 155667 - RNA, 75 nt, Homo sapiens
agcggcagcgacgagaaccggacagaccggaaggccaaaacaagggaagcaaaggaaacggagagacagaagaag

SEQ ID NO: 155668 - RNA, 49 nt, Homo sapiens
ccaagggaggccacagagacaagagagaggaggagggagacaggggcaa

SEQ ID NO: 155669 - RNA, 77 nt, Homo sapiens
ggggaggccaggagaagaaagcgccagcagcgaaccccagacggaaagcccacccacacaagacacccccggagggc

SEQ ID NO: 155670 - RNA, 77 nt, Homo sapiens
gccgccggaaggggagggcgccaccggcgccggaggccgaagggaccaggaggagaagcaaccagagaggaagcgag

SEQ ID NO: 155671 - RNA, 36 nt, Homo sapiens
acagcagcccgcccgccacaggcgaacccaggggag

SEQ ID NO: 155672 - RNA, 76 nt, Homo sapiens
cgggcgcgccgcgcgcgcgcgcgcgccgggccagacggggcgggagcgcgcccacgagacaccgaaccaggaggca

SEQ ID NO: 155673 - RNA, 76 nt, Homo sapiens
gacaggaaaaggccaaaggcagagacagaccgcgcaggcgcggcaagaggaagaccacccacagcacccaaacgca

SEQ ID NO: 155674 - RNA, 75 nt, Homo sapiens
ggaccacccagaggagcaacgggcaacccaccagcaggcggaaaagggacccggaagagagacccaagccaagag

SEQ ID NO: 155675 - RNA, 86 nt, Homo sapiens
ggcggcgcggcggcggcgagccggccgcggcagccggaccagcaggggcgccccagaacaaaccagaagcagaagggaggaaaaaa

SEQ ID NO: 155676 - RNA, 56 nt, Homo sapiens
gcgacaggggagggacccagggcgccacaaaggggggagggggccaccccgaagcg

SEQ ID NO: 155677 - RNA, 79 nt, Homo sapiens
ccggcccaagggaacacagcacgagaccccccgcgagagcgcaaacacccccagacaaagaacccgccacccccacccg

SEQ ID NO: 155678 - RNA, 75 nt, Homo sapiens
aggcccgccccagggcccagcggccaaggcaccggggaggaaaagcacgaaacacaaagcaaaacggagaaggac

SEQ ID NO: 155679 - RNA, 86 nt, Homo sapiens
caagaacaaccgcaaagccaagaggccagacgagaccaaagccaacggagaggaaagccacaccaagcgggccccagcaccggccc

SEQ ID NO: 155680 - RNA, 65 nt, Homo sapiens
aaaggacaaaagccaagaggaggacagcgcacacagcaagcacgaggccacacccagcaagggac

SEQ ID NO: 155681 - RNA, 70 nt, Homo sapiens
caacagacaaccaccaaaggggaaacagaaacaagaccgagagcaagcaccaaacgcacccaaaagggcg

SEQ ID NO: 155682 - RNA, 41 nt, Homo sapiens
cccgcgccggacccgaggcagcgacccagccggcccgggac

SEQ ID NO: 155683 - RNA, 76 nt, Homo sapiens
acagcgcacaaccggacagggccacaggcccgggagcggcgcggaggcaaacggagaggcaagaccagcagaggga

SEQ ID NO: 155684 - RNA, 78 nt, Homo sapiens
gcgcgaggcgggcgcgcccgcggagaggccggggacggacagcgcaggagaagagggccacaagcgaaggcaaaacca

SEQ ID NO: 155685 - RNA, 77 nt, Homo sapiens
gcgacgcccaggaagggcgacgagaagccccaacagcacggcgggccccagcccgcaagacagaaaggagaacccgg

SEQ ID NO: 155686 - RNA, 110 nt, Homo sapiens
agcgaagggcagaggaagcgccgccaggcccgcaggaccgccggagacagggcaagaaacccagcggcggcagaaccagccggcacaaagccgaaccagagagagcaacg

SEQ ID NO: 155687 - RNA, 69 nt, Homo sapiens
cacccaccgagccaaggacagacgggaaacgaaagaccggcgagaagcgcaaaaggcggaaacgacccc

SEQ ID NO: 155688 - RNA, 71 nt, Homo sapiens
cccacagggggagaacaagggacaggaaacagaagagggacaacggaaaaagaacgaccaggacacagagc

SEQ ID NO: 155689 - RNA, 79 nt, Homo sapiens
cgacagagaagcgaaacacaagcagaaaaagagaaaaaaacaaaggagaggaaaggaaacacagggagcgcgcaaggaa

SEQ ID NO: 155690 - RNA, 64 nt, Homo sapiens
gcgcggacggagaggaaagcggaaagaccggaccgggcccacgcgaggaggccaggagacaaca

SEQ ID NO: 155691 - RNA, 74 nt, Homo sapiens
cggacacgggagagaggccgggcgagcagcaggagcaccggcccaagaaacaggaagaaaggaaggggcaccac

SEQ ID NO: 155692 - RNA, 81 nt, Homo sapiens
aagcaccaagacgcaagagcccgagcgagggagggcaccaacaaggccagccagcagggcagacggccaggcacccggcgc

SEQ ID NO: 155693 - RNA, 75 nt, Homo sapiens
gcaaacagggaagacgggccaaacaaggcaaggcaccggagcggaaaaaccgaacaagagaagaacggcacacac

SEQ ID NO: 155694 - RNA, 78 nt, Homo sapiens
ccaggccagaaaacagacagggcagcaggagcagagagaccaagggaaaccgagaaggccaggagcaacaggggcaag

SEQ ID NO: 155695 - RNA, 69 nt, Homo sapiens
gaaacagcccaccgggcacagaacgaacagagcagcgaagaacaccggacagaggaagacgcaggagcc

SEQ ID NO: 155696 - RNA, 68 nt, Homo sapiens
ggcgcgcggcccgggcaccacaaacccacagaccaagccagaggagcaacagaaaaccacaaaccagg

SEQ ID NO: 155697 - RNA, 52 nt, Homo sapiens
accggccgcccgcacaagccagaggccaacccaggaaagcaccgggaggaaa

SEQ ID NO: 155698 - RNA, 87 nt, Homo sapiens
gaagagagcaaaacgaagaacagaaagaagaaaagaaagagcagaggaagaggaaagcgaacgacaaacggaaggagcacacagaca

SEQ ID NO: 155699 - RNA, 75 nt, Homo sapiens
aagaaaagaaagccagacagaagccaaacaggacagaaacccaaagaaccaaagccgagagggaaaagacgggcc

SEQ ID NO: 155700 - RNA, 87 nt, Homo sapiens
gacacgagcacgggaaggagcccggcgagacccaggagcagccaggggccacgacagcacggaggaccgcaccagcagcccggaacg

SEQ ID NO: 155701 - RNA, 131 nt, Homo sapiens
agggagaaaacgaagagacggaggaaaccacaggacggaagcacaggggccaccagagcgcccgagaagacccaccggagggccacccagagaacaaagagccggagagagggaccgaagagcgcagggga

SEQ ID NO: 155702 - RNA, 51 nt, Homo sapiens
cggaagcacagacccgccacagaaaaagcacagaaacgcggaacagagagg

SEQ ID NO: 155703 - RNA, 74 nt, Homo sapiens
ccggagccgaccacgcaagccccagaggcgcgcccacaaaagcaaggacgcagcagcagggaaaacgcaggaag

SEQ ID NO: 155704 - RNA, 75 nt, Homo sapiens
cgcgcccgccgcgggagagaggacccccccccccccccaaggcaaaagcagaccggaaaacccaccggcaagacc

SEQ ID NO: 155705 - RNA, 79 nt, Homo sapiens
cgcgagaacggccgcccgccgcagcggaggccggacacccaacagcacgcagacaaggcaccaacagaacggccccaaa

SEQ ID NO: 155706 - RNA, 76 nt, Homo sapiens
agcgcaccaaggggaacacgaagaggggcaacccaaccccccagcagagacgaaaaaaccggaaaaacagagaaga

SEQ ID NO: 155707 - RNA, 53 nt, Homo sapiens
gacaaaaggagagagaagggccaaaggcaaagaaaaagccagccgaggacggg

SEQ ID NO: 155708 - RNA, 77 nt, Homo sapiens
acgagcggccccccgagacggaggagagggccgagggaacaggcacgccccacccgccagccgagcccccgacgcag

SEQ ID NO: 155709 - RNA, 73 nt, Homo sapiens
acaaacccagggagagaggcaagacaagcgacgccgccgagaaacaaggaaccacaacagcacaagccagaca

SEQ ID NO: 155710 - RNA, 56 nt, Homo sapiens
ccgcagggcagccaggcaaggagagagagagccggagggcaggaagccgccaccag

SEQ ID NO: 155711 - RNA, 76 nt, Homo sapiens
acggcggaacggggaacgacggcccagcaggcggggaagagaaaggagcacaaaggacccaaacccaaaacaagag

SEQ ID NO: 155712 - RNA, 85 nt, Homo sapiens
ggacgcgggaggacggcacaccgcggcggcagaagaccaagcacgcgcgcgccaccacagaagcgcacaagggcacaaggagacg

SEQ ID NO: 155713 - RNA, 57 nt, Homo sapiens
ggagcccaaaagccgccggaccaaaaacaaagcgagagacggggcacccgagccagg

SEQ ID NO: 155714 - RNA, 77 nt, Homo sapiens
gccaggacaaaggaggacagcaccaaaaaccgaagagggggggaaaggcccagaaccagaggcaagcacacagcaga

SEQ ID NO: 155715 - RNA, 76 nt, Homo sapiens
cgaccgggagcacaccacaggcaagacgggccaagcagggaagaggaacccgaaggccgagagaaccaaggaagag

SEQ ID NO: 155716 - RNA, 62 nt, Homo sapiens
gcagaggaaacggcagcagaacggagaaaacccccaacaccgggaaaacaaagcccaaagga

SEQ ID NO: 155717 - RNA, 77 nt, Homo sapiens
gacaaagaaacagccagaacccaagccaaaacacagcgaggagaaacaggaggaggcagaacagaaaaacaagaaag

SEQ ID NO: 155718 - RNA, 62 nt, Homo sapiens
cgggcggcggagcggcggaagaaggagcccaccaccaccagccacgcacccagcgggcccca

SEQ ID NO: 155719 - RNA, 76 nt, Homo sapiens
gccgaaaacagacagaacagaacccaaaagccgacaaccccagaaacaggccgggcaccccagcagccccagcagc

SEQ ID NO: 155720 - RNA, 85 nt, Homo sapiens
gcacgcggagccccacgcgcgcgggcggcgcaggcgagcagaagaggcggagcaggaggcagagccacggagagaaccagaccag

SEQ ID NO: 155721 - RNA, 68 nt, Homo sapiens
acgcggaagagccaccacgcaagcgacggcagccagcgagcgacgacaaaccggcgaccacacacggg

SEQ ID NO: 155722 - RNA, 90 nt, Homo sapiens
gagcgggaccggggcggaggagcgcacaaggcggaggacagccccggccgccgaagaggccgccgccaaggccgagaccgggaggaagcg

SEQ ID NO: 155723 - RNA, 56 nt, Homo sapiens
cgcccacagccggcgaccaccccggcgcccccggaggagacagacccagcacggac

SEQ ID NO: 155724 - RNA, 66 nt, Homo sapiens
agccagaggacgcgggccgaggagagcggaggagggggacggccggagcagcagaacaagagcgga

SEQ ID NO: 155725 - RNA, 74 nt, Homo sapiens
cccccgaacgcaaggagcgcggaaggggggaagaaagagaaaaggaaaaagaaagagaagaacgagggaaagag

SEQ ID NO: 155726 - RNA, 72 nt, Homo sapiens
cccagggccgaggccccacagcgaaagccgagacagcgccgggcgacgagagcacagcgccgggcgacgaga

SEQ ID NO: 155727 - RNA, 68 nt, Homo sapiens
caaagcagcagccacgcgccggaggagagacaaagaaagaggcgcgaacagggcccacccgccacgac

SEQ ID NO: 155728 - RNA, 71 nt, Homo sapiens
gccgacgaacaaaagcggcagcccaacccagaggaacgacccagcaaagcagcccgaggaggcacgcaaaa

SEQ ID NO: 155729 - RNA, 70 nt, Homo sapiens
cggcacgccgaccccgggagcagcgcaggggccgcaaggccaggcgcgcagaggcacccaacggcacaga

SEQ ID NO: 155730 - RNA, 66 nt, Homo sapiens
gagggcggcggagaagaggcaggaagaccgccaacagggggcggaacaggaacggggagccgcgaa

SEQ ID NO: 155731 - RNA, 89 nt, Homo sapiens
aggccggagaaacaggcgccgcgggcccgcgcccggccggacccgggcccgagcaggaggcaaagggaccccaagaaaccaaagggcaa

SEQ ID NO: 155732 - RNA, 74 nt, Homo sapiens
cacacagaccgccccccaggaccacaggaccgcagacaggggcccacccagcccgaaccacacgggcgacaagg

SEQ ID NO: 155733 - RNA, 61 nt, Homo sapiens
ggagaaggaccaagaaccaggggaaaaaagagccggacgacagagcacggcaagaggagca

SEQ ID NO: 155734 - RNA, 63 nt, Homo sapiens
gacccagccccgggcccaaggcaccggaaggaagaaagagccccccggccccccccccagacc

SEQ ID NO: 155735 - RNA, 86 nt, Homo sapiens
ggaaaccgaggcacggacaacacaccggaggcagggggacacagccacccagcccggcaagccgaaacggcagaccccaaaaggag

SEQ ID NO: 155736 - RNA, 72 nt, Homo sapiens
ccagaaggcagcgacaggcaaggggacagacaccaacaagaaagccacggcgcaggccaggcaggccacaga

SEQ ID NO: 155737 - RNA, 55 nt, Homo sapiens
aaggaccaagaaccagccagaggagcagccaagaagccccccaggggcccgcaga

SEQ ID NO: 155738 - RNA, 83 nt, Homo sapiens
gagcgcggccccgccggcccgggcggaaccgcggcagaggcagccagcgcacccccagcagacccccacccccggcaacaccc

SEQ ID NO: 155739 - RNA, 64 nt, Homo sapiens
ccgagcaccgcgacacacaccccgcaagaaacagcacagagggagaagcgccggaccgaaaaca

SEQ ID NO: 155740 - RNA, 79 nt, Homo sapiens
cggcccggggcacccgcacgggaagcaggcccgccacagaaccaagacaggcgcccagggcacaaaggggcgcgaagcc

SEQ ID NO: 155741 - RNA, 77 nt, Homo sapiens
gaagggaaacagcagcacagcaaacaggcaagaggagccaccagaaaggaacagaaacaggccagaaaacaacagcc

SEQ ID NO: 155742 - RNA, 125 nt, Homo sapiens
aagcagcacaggaagcccaggcaacccaaccggccgccggaccccgcacccaaaccacggaggacaagcccaaccagggaccaggccaaaaccagacgccacgccccacgggccccacgccccag

SEQ ID NO: 155743 - RNA, 76 nt, Homo sapiens
cccagacccaaggacggagagaagggcacaagaaccaagcaacagaagccccccggaggccagccccccgccccca

SEQ ID NO: 155744 - RNA, 85 nt, Homo sapiens
ccggggacaaagaccaaccaacccaccagaagcaaaaaagaaaagaaaccagcccccaggaacagcaggggagccaccgcgccca

SEQ ID NO: 155745 - RNA, 73 nt, Homo sapiens
cgcaccggccacccagaagcacagagcgaggacaaccaccgagcaaacacgcgcagaagaagcccacccagaa

SEQ ID NO: 155746 - RNA, 71 nt, Homo sapiens
cccccgggcgggagagacccacggccacggccagaggaccccaaagaccaaaccgccagacacccgaagga

SEQ ID NO: 155747 - RNA, 77 nt, Homo sapiens
agagaggccacgacgcacagccacaggaggcccacccccacacagccgcacgcccaaagcggaaacgcggaagagac

SEQ ID NO: 155748 - RNA, 70 nt, Homo sapiens
ggccaacaccccaaaggcgcgaaaaagacccccacagccacaagaaagacgaccgccaaccagggagaac

SEQ ID NO: 155749 - RNA, 67 nt, Homo sapiens
caccccggcggccgcggaagcggggcgcacaccaccggacaaccgacaaaaagagaccccgcgcacc

SEQ ID NO: 155750 - RNA, 83 nt, Homo sapiens
gcggcccgcgccgggcgccggcaccgcggcagcgagagccgcggcagcccaagcgaacaccgaagggagagcaagccggcccg

SEQ ID NO: 155751 - RNA, 79 nt, Homo sapiens
ccgccccagagcggcgccgagagacggcgacgaccaggacgagcccagggcccacaacggcaggccacagcgggaaagg

SEQ ID NO: 155752 - RNA, 83 nt, Homo sapiens
agcaagacccaggaccccggaagccagaaagccgaagcgcccaacagccaaacggaacgcgacgcggccaggccggaagcaca

SEQ ID NO: 155753 - RNA, 83 nt, Homo sapiens
agagaccacgcaaagggcggccaccgccccgacagaccagacgcaggcacgggggaggggagccagacaacaaaaagaacaag

SEQ ID NO: 155754 - RNA, 63 nt, Homo sapiens
gccaggccaccaccggccgcccagccaggacgcgcccggagaagagaagcacggacacccggc

SEQ ID NO: 155755 - RNA, 71 nt, Homo sapiens
caccggccgccaccagggcacgacagccaccacgccgagggcacccggagaagccagaggaggccaccggc

SEQ ID NO: 155756 - RNA, 70 nt, Homo sapiens
agccccgaaaccccaggacccagacacaagaccaagaggcacaccgaaacggaaaggacagggagcaacc

SEQ ID NO: 155757 - RNA, 82 nt, Homo sapiens
aggccggcacggcgaaacaggaagaggcaccgcacacgcccccggcaccggcagcgccaacggcaagccgcgcagcgagacg

SEQ ID NO: 155758 - RNA, 77 nt, Homo sapiens
ggagcccacaggggcacggggcggagcccaggccacaagggccgcaagccccgacagcacccaagaaaacccaggcc

SEQ ID NO: 155759 - RNA, 81 nt, Homo sapiens
gcacgagcagaccggcccgaccgcccacagacccaaacaaagaagaggccccaggaccggcgaggccccccccccagcagc

SEQ ID NO: 155760 - RNA, 77 nt, Homo sapiens
cgaaagcgggagagggaccggaacggcggcgacaaggggcccgaacagagggaaccagggggaaggccccgggcagc

SEQ ID NO: 155761 - RNA, 80 nt, Homo sapiens
cgcggacgccgaggcaccgaggcaccagaggagaaaagaggaggcgagcgggaacaagcaaaaaagacgacagagacgcc

SEQ ID NO: 155762 - RNA, 109 nt, Homo sapiens
cacccagaggaccgcggcgaagcaaaggaacgcgccggaagaaaaggccacagaagaaagggagcccccaagaacagcgagcacaggaaggaaaccggaccgggggcag

SEQ ID NO: 155763 - RNA, 80 nt, Homo sapiens
caaagcccggcccaaccgggagcagcggccgggccgaacaccgaaacgcaagaggcaagggcaacaaaccaggacccccc

SEQ ID NO: 155764 - RNA, 68 nt, Homo sapiens
ccagaacacgggagaaaaaggaaaacgcggaaaaccgacacaacaggggcgaagaagaagcacaaaac

SEQ ID NO: 155765 - RNA, 73 nt, Homo sapiens
aaaccagagcggagacacccaggaggcagaagccaaaaggaccagaaccaaggaagaaaccggcagaggaaca

SEQ ID NO: 155766 - RNA, 64 nt, Homo sapiens
cgagcagaacacggcgagcggacgcgagaaggaagaagaacacaacagaaagagcggagaaagg

SEQ ID NO: 155767 - RNA, 67 nt, Homo sapiens
acacaaaaccaccgaggacgagaaaacccaccggacgaacaaaacgaaggagaaagacagcaaagaa

SEQ ID NO: 155768 - RNA, 83 nt, Homo sapiens
accggacccgggcagggccaggacccagcgaggggggccagggacgaaaaggaggggcaaagggaaaggaggacgagcacaga

SEQ ID NO: 155769 - RNA, 75 nt, Homo sapiens
gcaaggacaacaccggggggaaccagcagcgcccacaccaccaaacaggcacggacacaagcgacccaagagccc

SEQ ID NO: 155770 - RNA, 72 nt, Homo sapiens
ggaaaccagacggccggcaagaacagcgacaaggagagaagcgcggagccccaagacgagggggaccaagaa

SEQ ID NO: 155771 - RNA, 64 nt, Homo sapiens
cacacgcaccaggcaaaacccacagagagcacaaggaaacaccagcgaagagaggcaaccagcc

SEQ ID NO: 155772 - RNA, 83 nt, Homo sapiens
ggccgaacccagagcgagggggggaccaccgccggccaggggcggaaacgcacgggggccacaggcgaccagcagcccagccc

SEQ ID NO: 155773 - RNA, 94 nt, Homo sapiens
gcaaacagagaaaaaacagcaaaaaaacgggggaggggagaaccggagccgcacaagcaacagcaaaggagcacggcgaacgcacagagcaaga

SEQ ID NO: 155774 - RNA, 49 nt, Homo sapiens
ggaagccaaggccaccaaaacaggcaaacgcggaaaagccagggcggaa

SEQ ID NO: 155775 - RNA, 57 nt, Homo sapiens
gccggggccgaccgccacacagccagccacacccccggaccaccaggacggccaagc

SEQ ID NO: 155776 - RNA, 34 nt, Homo sapiens
aagaaaacccagcaaggagcggggggccgagcac

SEQ ID NO: 155777 - RNA, 77 nt, Homo sapiens
ccgccgacccggaagaccgccgccgggcaacaacacggcaccacacaagcgaagaagccgagaaaccagccacgcag

SEQ ID NO: 155778 - RNA, 80 nt, Homo sapiens
ccgaccccccggcgccgcgccggcggcgggcgggaaaagaaccccagcgcgggacgaggacccaggcccgaaggcagccg

SEQ ID NO: 155779 - RNA, 59 nt, Homo sapiens
acggaaaggcgccacaagggacaccaagccccacccaaggggagacagcgccgggggac

SEQ ID NO: 155780 - RNA, 69 nt, Homo sapiens
gggcagccagaagaaggaccggaagcacacaacaggaaaacaaaagaggagaaagggagcggcagggga

SEQ ID NO: 155781 - RNA, 83 nt, Homo sapiens
caggcagacgggaagaacccagaaagaaaggagcgccccaaaaggaaacaccaagcgaaagacagaggcccagccgaaagagg

SEQ ID NO: 155782 - RNA, 68 nt, Homo sapiens
gagaaaagaaacggcccccaaagggcgccggagacagaaacgagccccagagaagaacggcacacacc

SEQ ID NO: 155783 - RNA, 70 nt, Homo sapiens
ggagcacggcgagcagccaggccaggagaggccacggcacggcaaggagagaaacggagggccggaagga

SEQ ID NO: 155784 - RNA, 64 nt, Homo sapiens
cgaaaagccagccagaggcccgacaacaagccaaaacgcaccaaaggcagaggacagcaaagca

SEQ ID NO: 155785 - RNA, 57 nt, Homo sapiens
gaaggaagcgagaccaacgcaacccaaggaacaacgaagcacaaagccgaaacagaa

SEQ ID NO: 155786 - RNA, 67 nt, Homo sapiens
ggccacagaagacgacggacagagagacacagaaagaaggccgagaaagaacaccacaagaagaggg

SEQ ID NO: 155787 - RNA, 73 nt, Homo sapiens
ggaccgaagaaaccaaaacgggccaggaaggacaacagcaggggccggcacagcagcaagaccggaacccaga

SEQ ID NO: 155788 - RNA, 74 nt, Homo sapiens
gcgcagaaagagagagcacaggaacaagccccgggcgcacaccagggaaaagaaaggacagaaacaagaccgcg

SEQ ID NO: 155789 - RNA, 80 nt, Homo sapiens
gcagcagcggacggccaggggagagcgaggccgagcccgcgcagggcggagaacggaaaagcaccaggaagcagagagga

SEQ ID NO: 155790 - RNA, 78 nt, Homo sapiens
gcgccggaccgcaggacgacagaccgagggaggacaccggaccccggacgcgggaaagggaagcaccgggcacaagac

SEQ ID NO: 155791 - RNA, 83 nt, Homo sapiens
ccaaaagaggagccagaggaggcagaggaaacggagaggccggacacccaacagcacgcagacaaggcaccaacagaacggcc

SEQ ID NO: 155792 - RNA, 80 nt, Homo sapiens
ggcccccgcggcgccgggaggaggccggggccgcgcgagggcgcccagcggccaaagccgacagaaaaggaagagaccca

SEQ ID NO: 155793 - RNA, 80 nt, Homo sapiens
cagcacggacccagcagggccggcccacgcccaggagaacgggcaccccgggcggaaaagagggaaggcgacaccccaga

SEQ ID NO: 155794 - RNA, 65 nt, Homo sapiens
ccagagaccaccccacagaaacggcgcccgaagcggagaaccagccaaaaaagggcagaaccgac

SEQ ID NO: 155795 - RNA, 60 nt, Homo sapiens
cagcagggagccaagacaacgaagccacaaccaagaaagggcggcgcgcacaaggccgag

SEQ ID NO: 155796 - RNA, 83 nt, Homo sapiens
gcgagccggcgcggggcggcgcgggcggaggcggcggagcgcgagagccgagcggaccaggcggaaggaaaagcagaaaagag

SEQ ID NO: 155797 - RNA, 74 nt, Homo sapiens
aaaggacacaggccagaggagcacacacaaagaggacccgacagggcaaggccagagaaggcgggagaaagaca

SEQ ID NO: 155798 - RNA, 76 nt, Homo sapiens
gacaacgaccacgcccaaaagagcgcaccaacccccacgacgggaaacaacgagccaaggcgaagacagagagacg

SEQ ID NO: 155799 - RNA, 52 nt, Homo sapiens
gcgcgcaacgccaacccaggcgagagagcggaggccgcagccaaccgggcgg

SEQ ID NO: 155800 - RNA, 58 nt, Homo sapiens
cagcacgcccgaaggccaaagcacaccccacaacagaagccgggagaggagccaagcc

SEQ ID NO: 155801 - RNA, 83 nt, Homo sapiens
gaagacagagagagacagagcccggacggaccagaggagagcaccagaccaggcggccacaggacagggcccagaccaaggca

SEQ ID NO: 155802 - RNA, 76 nt, Homo sapiens
agccaaagccagcaaaaacagggagaagccaacccgcaagcaggccgaagaacagaggcggcaaccccggagggag

SEQ ID NO: 155803 - RNA, 74 nt, Homo sapiens
caaggcccaagacccaggcggaaagaaagccaaaaacccgaagcccagaaaaacgcagagacaaaagaaggaaa

SEQ ID NO: 155804 - RNA, 78 nt, Homo sapiens
accacgcggccgagaggggagaaccgccagcgacgggaaggcaggacccacgcacgagcaacgagaagagagaaggcg

SEQ ID NO: 155805 - RNA, 82 nt, Homo sapiens
cgccagggcgcggggccgcggccgcgcgagcagcgccgcgggccgagggaaaaaacaagaacgaaaaagaaggagaagaacc

SEQ ID NO: 155806 - RNA, 64 nt, Homo sapiens
gcggaaggagacggagaagaagcccacgaggccgagaacaccaggcgggggagcaagagacgag

SEQ ID NO: 155807 - RNA, 82 nt, Homo sapiens
ccgagagggagagacgccgaacgacgccccgcacaccggagcgcccagcgcgaggaggcaaaagcggaccggaaaacccacc

SEQ ID NO: 155808 - RNA, 63 nt, Homo sapiens
cgaaaaccccggagggaggagcaggagggcagaagccaacagaaccaacccgcggcaggcgaa

SEQ ID NO: 155809 - RNA, 60 nt, Homo sapiens
agacccagcaaaacgggcacagagcaaggcagggacaagaccccaccaggaggagaccac

SEQ ID NO: 155810 - RNA, 85 nt, Homo sapiens
ggccgggcaagacggcgaagcgcgcgccgcgcccggaccccaggcgcaagacaaggcccgcgggccaagacaaacaccacacaag

SEQ ID NO: 155811 - RNA, 79 nt, Homo sapiens
acggggagcaaaaccaacgccggccggagcagcagcccgagacggcccgccacgggccccgcagccgcgcccgagcgcc

SEQ ID NO: 155812 - RNA, 55 nt, Homo sapiens
ccggaccacgggaaggcaacagggcacagcacgcaccaggagccgaagacgagga

SEQ ID NO: 155813 - RNA, 91 nt, Homo sapiens
agaccccccaaagcccaccagcacaggaaacgggccggcgagagcacagcggcagaagaacgagcacgacaagaccccggagcacagcagg

SEQ ID NO: 155814 - RNA, 88 nt, Homo sapiens
cgcacacacggggcccgaggaagagaaaaaaccagaggaggagaagagccgcagggcccagcgggggcgagggcaggagccagagcgc

SEQ ID NO: 155815 - RNA, 85 nt, Homo sapiens
ggagaggccgccaggcgacgggccaagggacagccggcggacaccccaccaggagacgcaggaaaaccagcaagaagcgacaaaa

SEQ ID NO: 155816 - RNA, 74 nt, Homo sapiens
gaccccgcaacgcggaacccaagaaggcggagagaggaaggggagcagaaagaaacggccacgaccgggagggg

SEQ ID NO: 155817 - RNA, 83 nt, Homo sapiens
cagcgaggggcggggagacgagaacaacccacgcaaggcccggcacagagccccagcccccagcagccgacaggaggcccgca

SEQ ID NO: 155818 - RNA, 61 nt, Homo sapiens
acgcccgggcagggcccaccccgcgcccgacagccaaggagaccgggagagagacgaagga

SEQ ID NO: 155819 - RNA, 81 nt, Homo sapiens
aaaagacagcccgcagcacgaccagcaggaacgcgcagacggagacagcaaggacaacccccaagacggcaaaagaagaag

SEQ ID NO: 155820 - RNA, 75 nt, Homo sapiens
agcccccaccaagagcccccggccagaaggcgaccagagccgggacccgcagaagagaccgaacaagcaagccag

SEQ ID NO: 155821 - RNA, 85 nt, Homo sapiens
cccagaccggggagaaggagcaaccgcccggcacagcccacagggagaaagagcaggcaggggggacacagcaggcaggaacgcc

SEQ ID NO: 155822 - RNA, 68 nt, Homo sapiens
gggagcacgacgggccagacggagccaaggaaggcgccacacaaggaccaccacccggagcagaccgg

SEQ ID NO: 155823 - RNA, 68 nt, Homo sapiens
gacaacagcagcacagagaggggagaaccaaaccggacgaacgcagcacaccgacagagaacccaggc

SEQ ID NO: 155824 - RNA, 74 nt, Homo sapiens
aagagaagaccgcccaagcgcccggaggcccacagcagggggcagagaaccagagagcacagagaaagcgggaa

SEQ ID NO: 155825 - RNA, 76 nt, Homo sapiens
ccagaggggaagccaagcaaacgcagaaggacgcccacgagcaaccaagaggaagaaggaagagccagggcgagag

SEQ ID NO: 155826 - RNA, 53 nt, Homo sapiens
gaccccgcggggccacgcaccggccagccagaaagaggaggagacacaaaacg

SEQ ID NO: 155827 - RNA, 75 nt, Homo sapiens
cagccccaggacagggcagccaggcccaccaccagccggacacccagaaaaacaagaaacacccccaccgaggcc

SEQ ID NO: 155828 - RNA, 73 nt, Homo sapiens
cggaaacgcacaggcggacaaggcgccaaacaagaaaaacaaagccaaggaaaccccaacacagagccaagcg

SEQ ID NO: 155829 - RNA, 39 nt, Homo sapiens
ggggaaaagccagcgaaaggaggaacgaaccaaagaaaa

SEQ ID NO: 155830 - RNA, 72 nt, Homo sapiens
gaggagcagcggaagccgggcgcgcccccccgcgggcgccgcccaggggggcggggcagaacccaaagcggc

SEQ ID NO: 155831 - RNA, 72 nt, Homo sapiens
caaaccaagaccagaagaccgacaggaggccccggaagacgggcaagaaaggcaaccacagaggagccaggc

SEQ ID NO: 155832 - RNA, 76 nt, Homo sapiens
agcggcggcgcaccaaccgcgcgcaccgccgacccggaagaccgccgccgaaaagcggacagaagagagagacacc

SEQ ID NO: 155833 - RNA, 61 nt, Homo sapiens
cggaccccagcccagaccggggagaagagacccgaagccacagacacacccagccagaaac

SEQ ID NO: 155834 - RNA, 75 nt, Homo sapiens
gaccgccccaagacccagcccgggcggaggagagcgggagcccaaagccacacaagaaaccgcccccaaagccag

SEQ ID NO: 155835 - RNA, 75 nt, Homo sapiens
aggaagcccgagacaagagaggaaaggagagcagaccaacaagacaaaggggagaggaaagcccggagggccaaa

SEQ ID NO: 155836 - RNA, 84 nt, Homo sapiens
ggccaggaggagcgaaccgccgcacgggacaaggcccgcaggcaccaaccagcggacacacggaaaagggacgggaaaagccga

SEQ ID NO: 155837 - RNA, 70 nt, Homo sapiens
ggaagaaaaggaacaacccggcagcacccacaacacccaacagagaaggccagaaagaacccacggaggg

SEQ ID NO: 155838 - RNA, 79 nt, Homo sapiens
cagccggacacaggccccccgaccaagaaacagagcaaagcagcgacaacaaagacagaggaagaaaaacagacagacc

SEQ ID NO: 155839 - RNA, 67 nt, Homo sapiens
caccgccccgcacgggacccgcgggccccggcccagcaaccgacaacgcggcccggaaggccgcgga

SEQ ID NO: 155840 - RNA, 66 nt, Homo sapiens
acccaaaaaaaaggaacaccgcaagaccaaagacccacgcagaggagcacaaacggcagaacgaag

SEQ ID NO: 155841 - RNA, 71 nt, Homo sapiens
agaacaaacaccacacaaaaaaggcccccacagagagcacacaaacaaagcgaaaccacggaagaaaaggg

SEQ ID NO: 155842 - RNA, 76 nt, Homo sapiens
gcggcagaacacaaagaccacagcggagaacgcaggagggggcgccggagacgcagggccgcaaagggaacacacg

SEQ ID NO: 155843 - RNA, 78 nt, Homo sapiens
cgggagaaggcgcaacgcggcgcggcgggcagcagcggcgcacaaaagcaggaaaggcagccgacaggggaaagaccc

SEQ ID NO: 155844 - RNA, 77 nt, Homo sapiens
gcgcgcagcgccccccgcccaggagaaccaaacccaaggaccagggaagcacggcggcgggagagacccaaggcccc

SEQ ID NO: 155845 - RNA, 76 nt, Homo sapiens
aggcaacagaaagagcaacagcagggcaacagcgggggaccaagaggaccaccaacagcaaggaaaccggcagcga

SEQ ID NO: 155846 - RNA, 70 nt, Homo sapiens
accacaacacaaaaccaccaccggggcagccaccgagagacaaaccggacccacccagacaagaggacgg

SEQ ID NO: 155847 - RNA, 77 nt, Homo sapiens
caagcaggacgacgacgggggccgaaccggccggggcagcgcaggagcgcgcgggccaagaggcccacagccaggac

SEQ ID NO: 155848 - RNA, 81 nt, Homo sapiens
gggacaaggaccagacagacaaccaaaagccaacagcaacacccagggaggagacccaggagcaaaaaggcacccagaaag

SEQ ID NO: 155849 - RNA, 88 nt, Homo sapiens
caggggaggaggagcagaggacacagagaaagggcgaggaggcccgaggaggcagaggaggaggagggaccacaagccacaaggaaag

SEQ ID NO: 155850 - RNA, 78 nt, Homo sapiens
ccgcagggcgaggagaccagaaacgagaacggcaccaagcagccgaagagaaacaagggacagcagacaagccccgcg

SEQ ID NO: 155851 - RNA, 80 nt, Homo sapiens
caacaaggcagggaggaaccccgccccgccagagcgacaggaaaccggaaggcagcaaagggggaaaccgcagaggccgg

SEQ ID NO: 155852 - RNA, 55 nt, Homo sapiens
cggaggcggggggaccggcgggcgggccccgggggcgccgagggcacaagggcaa

SEQ ID NO: 155853 - RNA, 71 nt, Homo sapiens
aacacagagacaaaaacaggagaaggaacacgggacagggacaaggaacaaacacggagacaggggaagaa

SEQ ID NO: 155854 - RNA, 78 nt, Homo sapiens
cgggaaggcgggagacgagaagccgaaaagcgcagcgagcggagccgccggagccaaagcaaacagagcagaccaacc

SEQ ID NO: 155855 - RNA, 88 nt, Homo sapiens
gagggggggaccacgaaaggagcaagagcaagacaccggacaccgagggcccccaaaagagccagcagccacccccgcccagccaaca

SEQ ID NO: 155856 - RNA, 110 nt, Homo sapiens
accaagccacggagaggagagcgcacaggccacacaaacaagcaacggggcgacaaaaacaggaaagagcagagacgaggacaacagacggaacagcagagcccccaaac

SEQ ID NO: 155857 - RNA, 61 nt, Homo sapiens
aaggagaaaggaaccgacagaaagagccgcagacgcacagcaaccaccggacccgaaggcc

SEQ ID NO: 155858 - RNA, 80 nt, Homo sapiens
cgcgagggcccgggcaaggcccgacagacagagagagcaaaacgacgaaggagccaagaggaccgggacccaaacagggc

SEQ ID NO: 155859 - RNA, 50 nt, Homo sapiens
cggacgaccaaccaaaagacaaggagacggccacagaggggggggcagcc

SEQ ID NO: 155860 - RNA, 73 nt, Homo sapiens
ccgaggaaggaacggcccccccccagcccgccccaaaaggcagaagcccccggggagagacagacagagggac

SEQ ID NO: 155861 - RNA, 81 nt, Homo sapiens
aaaacccagcgagaccgggccggaacgaaagcaggacggaggagcgaccaccgcgaagcagcaggggaacgacgcggaaaa

SEQ ID NO: 155862 - RNA, 71 nt, Homo sapiens
caaaaaggcaagaaccgaggaaaccgcgaaggaacaaaaggggccaaaggcaagggagaaagggagacccg

SEQ ID NO: 155863 - RNA, 70 nt, Homo sapiens
ggaaagacccacaccaagaggccaaagccacccccaaaggcagaggaagaacgagcagggaaccaagaca

SEQ ID NO: 155864 - RNA, 55 nt, Homo sapiens
agacagggaagccagggcagagagaaacaagagcacccagggacagggcccccaa

SEQ ID NO: 155865 - RNA, 87 nt, Homo sapiens
caggagcggcacagaagggcagacagaacgcccaaaggcagagaaaagacaggcgaacacaagcccagcgccgagacacaaagagca

SEQ ID NO: 155866 - RNA, 82 nt, Homo sapiens
caaaaaagcaccgccgcagggcgccggcacgggcagggcaaggcaggcgacgagcccgcccgggccgacgcagcggaggagg

SEQ ID NO: 155867 - RNA, 63 nt, Homo sapiens
cccaaaccaggagagcgagggagcgagcgggcagcgcgacccacagcggggccgggccccgac

SEQ ID NO: 155868 - RNA, 81 nt, Homo sapiens
agccacagaacacccccaaagagcaacgaagacaacgcagcggcagaaacaaggcgcaggagcacagcaagcgggagcagg

SEQ ID NO: 155869 - RNA, 73 nt, Homo sapiens
gacagaggcagacaacacaaaagggggccaggcaccgcaagggccagcaagagaggaccggcagggcgggggc

SEQ ID NO: 155870 - RNA, 71 nt, Homo sapiens
cgcacaccacaccaaaaagaggcgaccaagcaagccaaccaggcagagaggagcgagaggaagcggaagaa

SEQ ID NO: 155871 - RNA, 74 nt, Homo sapiens
gcccaagcaggagaacagcaggacccaaagacaggaccacgcaccagcagagaaggaaagcaaaccgaagcagg

SEQ ID NO: 155872 - RNA, 81 nt, Homo sapiens
ccccggacggagcgccggccgcaccaccgccccggccggcccaccgggcaggggaagggacgggaaggcagaagaaggcag

SEQ ID NO: 155873 - RNA, 76 nt, Homo sapiens
cgccgaagaagcacgaaagccccacccgccgcagcaagcagaggaacccagaggagcagcccaaggaccagagcgc

SEQ ID NO: 155874 - RNA, 77 nt, Homo sapiens
cacgcacagggccggcgccaggcaggccaaaacagaagaggcaaagcccagccacagcagcagcccagcagcaaaca

SEQ ID NO: 155875 - RNA, 77 nt, Homo sapiens
cacgcaagagacgcaccgagagaagcgcagcaccagaaaaaggaaagcccaagcaaaggaccaagagagcccccgag

SEQ ID NO: 155876 - RNA, 71 nt, Homo sapiens
aaacccagaacagccccagggccacgaggaaaggcaagggcagaaaagaggggaaaaggccagccgcacgc

SEQ ID NO: 155877 - RNA, 71 nt, Homo sapiens
gccagcacaccaccacaacagacagcgcacgaaacacacaaagaaccaccaccgggaggaagccagacaac

SEQ ID NO: 155878 - RNA, 84 nt, Homo sapiens
aagagaagacacaccaccacgccaagaaagagccgcagacgcacagcaaccaccggacccgaaggccaccacccagaggggccg

SEQ ID NO: 155879 - RNA, 82 nt, Homo sapiens
gaaacagacccggcgcccagcggagcccccgcgccccgacccaggagcagaacagaaggcgcacaaaggaaagagaagcaaa

SEQ ID NO: 155880 - RNA, 76 nt, Homo sapiens
gggggggggaaaaacaagcgaacgaggaggggagggaaaggcacagacccccggacgaagcacgcagaacaccggc

SEQ ID NO: 155881 - RNA, 79 nt, Homo sapiens
cgagaccagcccaacaggaccaggagcgggagagggccagccgcccgacggcgcgaccagaccgagcgcggcggcgagc

SEQ ID NO: 155882 - RNA, 66 nt, Homo sapiens
gccaggagcaccgccgaggacccagcacaccgagggagcaggccgggcccgccagggcacgcgccc

SEQ ID NO: 155883 - RNA, 74 nt, Homo sapiens
agacacagagcaggaacgcagccggggacaccaaacaggccaaaacagaagaggcaaagcccagccacagcagc

SEQ ID NO: 155884 - RNA, 65 nt, Homo sapiens
cagccaccaccaaccacaaagcaaaacgaccagacagaacacggggcgggaagaagcccgccgcc

SEQ ID NO: 155885 - RNA, 59 nt, Homo sapiens
agaagcccggcagaagacacaccgggcagagaacaccagcccgcgcccccgcagaccgg

SEQ ID NO: 155886 - RNA, 72 nt, Homo sapiens
gcccggacgggcgccacaccaacaccacggaaccagaccagggaacgggacacacagacggaggaaacgaaa

SEQ ID NO: 155887 - RNA, 91 nt, Homo sapiens
ggcgcccgcgggggaaaaaggcggacgaagaggaggcgacccagggggaaagccaccgaaaccaccgaagacaacagccaaaaccaagaga

SEQ ID NO: 155888 - RNA, 85 nt, Homo sapiens
ggccgacaagaggcggacggggagcgaacgggacagcccacacccggcgcggaggggcggagaacggaaaagcaccaggaagcag

SEQ ID NO: 155889 - RNA, 110 nt, Homo sapiens
aaggggaagcacacaaggcaagcacacgaacagggacggcaacgagaagcgcccaacccaagcaaaggcgaaagagagaaaaccagaggaggagcagggaaagcacaggg

SEQ ID NO: 155890 - RNA, 76 nt, Homo sapiens
ccagggcgcaggggagaaacaaggcgccggagcagaagccaggaaaaagcccaggaggcggggaggcggaaggcaa

SEQ ID NO: 155891 - RNA, 62 nt, Homo sapiens
gaaaacacgcccagacgaacacaagagaagcagggcccgagcggaagaggaaagaaggagcc

SEQ ID NO: 155892 - RNA, 52 nt, Homo sapiens
accaagaaaaggcgcaaccgaaaggcagacggcagaaaacagacgaagcaac

SEQ ID NO: 155893 - RNA, 76 nt, Homo sapiens
caagacacgaggggcaaccaggagggcggggcgcagagcacacaggggcgaacagggcaaaaccccacccgagaca

SEQ ID NO: 155894 - RNA, 75 nt, Homo sapiens
ggcggcgccaggcagggcgcaggacccaaagacaggaccacgcaccagcagagaaggaaagcaaaccgaagcagg

SEQ ID NO: 155895 - RNA, 82 nt, Homo sapiens
gaggcgagcccggaaggccggcgcccagagcaacgggagcccaggcaaaagcagaccggaaaacccaccggcaagaccacac

SEQ ID NO: 155896 - RNA, 66 nt, Homo sapiens
agagcccgccaccaaccccgacaggagggagcacacgcagacacagaaaagcaacgaagccacaac

SEQ ID NO: 155897 - RNA, 73 nt, Homo sapiens
agacccagacggaacaagaaccacgaaggccagcaacagaagaaagcaagcaccggggaaagcggcccgaaac

SEQ ID NO: 155898 - RNA, 74 nt, Homo sapiens
ggcgcggcaaggccacgcgcaaccgggcccgcccgccgggagaaaccacaaccccagaacgaacaaagacaaca

SEQ ID NO: 155899 - RNA, 74 nt, Homo sapiens
agaacgacggcaccggaagacggcccgccacgggccccgcagccgcgcccgagcgcccgagcagggacagcgac

SEQ ID NO: 155900 - RNA, 43 nt, Homo sapiens
gggggcggcggccacgccaaggacgggaaagagcagccaaagc

SEQ ID NO: 155901 - RNA, 89 nt, Homo sapiens
aagagaaaaacgcccggcacagaccccgaccgaagaacgaggagcagagaaagacgccccccaaaagaaaacgggcaaaaaaagaacaa

SEQ ID NO: 155902 - RNA, 53 nt, Homo sapiens
aaacacacgggagggaggaagcagggccccgaagggcagacaccgcaaaagca

SEQ ID NO: 155903 - RNA, 76 nt, Homo sapiens
ggaaggggaaggaaaccccgaaacgacaccgcccccggcaaggaaaccgcaggcgggaccacaacagacaaagaac

SEQ ID NO: 155904 - RNA, 61 nt, Homo sapiens
gggacgcgggaccaagaggcggcggagcggggaggccaaagcagcacccacagggcacacc

SEQ ID NO: 155905 - RNA, 67 nt, Homo sapiens
gcgcggccgaagacgcaaagagaaagcggagcggagccaagcagcgccccgcggggcgcgaaagaag

SEQ ID NO: 155906 - RNA, 79 nt, Homo sapiens
gccgcaggccaccgacacgagacaaccgggagccggccacaaaagaagacccaaagcaccaacaaaaagcaacgagaac

SEQ ID NO: 155907 - RNA, 71 nt, Homo sapiens
accgcggcggcgcccgcaccgcgcccgcaaagacaaggcacgaggcgcggcgaccaccacagcagagcccg

SEQ ID NO: 155908 - RNA, 53 nt, Homo sapiens
caagagagggggaggagcgggcaggacgggaacagcgacccaggaggaaaaaa

SEQ ID NO: 155909 - RNA, 72 nt, Homo sapiens
caacaaaacacaggagggggaagaaaccggagaagacacaccacagagcacccagagcgacgccgggaacag

SEQ ID NO: 155910 - RNA, 65 nt, Homo sapiens
agcgccagcgcagccgccagcgccggcacacaaacgaaggacaaaacaggcaagcacgggcacag

SEQ ID NO: 155911 - RNA, 82 nt, Homo sapiens
cggggccacgggcccgagccccggacgcgcccggacgcccggccggccgcgcgagaaacaccaggaagcgacccacgcgcca

SEQ ID NO: 155912 - RNA, 70 nt, Homo sapiens
gggacggacagaggaagcagggcggagcccacgccccaggacacgcagaggagcacacaaggggcgagag

SEQ ID NO: 155913 - RNA, 78 nt, Homo sapiens
cccacccacggaagagcagcagcgacggaggagagcaaacacacacggagaaagcgacggcgccggaaccagaccaag

SEQ ID NO: 155914 - RNA, 74 nt, Homo sapiens
gggaacacaagcaagagagagggggagacacagccaaacgaacagagcaacgaccgaaaaaagccggcagagca

SEQ ID NO: 155915 - RNA, 76 nt, Homo sapiens
ggcccggccacccgcagccggagcgggcagggcacacaaccgggcagcggacacggagcagggccgcccggggagc

SEQ ID NO: 155916 - RNA, 48 nt, Homo sapiens
acaggaagaaaggaacagagagaaagagcagaaacgaaccagaagaag

SEQ ID NO: 155917 - RNA, 85 nt, Homo sapiens
aaacagcccccgaaaacgcacggagcgggcccgggccagaggcagaaaacggacggaagaaaaggcggccgaagcccggcgcagc

SEQ ID NO: 155918 - RNA, 76 nt, Homo sapiens
aaaacgcgagcaccaaaagaaccgggggaagagagaaagccaagcaaaaaggccagagaaggaaccaacggaaaga

SEQ ID NO: 155919 - RNA, 77 nt, Homo sapiens
agacagggcacgcaccacccacgcgcacaaccggggggcaagcgcagcggggcgacaagagcgccgcaaggcacagc

SEQ ID NO: 155920 - RNA, 84 nt, Homo sapiens
caagaccagagccgggaccccagccagagagaaccgagccaccgcaacggaggcgaaccggcaggagaaaggagcagccagaaa

SEQ ID NO: 155921 - RNA, 86 nt, Homo sapiens
aaaagaacaccaagaacaaggacagaacaaccccaggacagagcccgagaaaaggagaagggcacgaccaaaaacacccgaccggc

SEQ ID NO: 155922 - RNA, 73 nt, Homo sapiens
gaaagccacggagcacccggcaaacagaggagaggggcgggagccgagagaagccaacccggggagacaacca

SEQ ID NO: 155923 - RNA, 116 nt, Homo sapiens
caaggcaagaccgaacagaaggaacgacgcggaccagaagccagagcgaggacgccggcagagaccggccagccacagagcagagaaagccggaccagcagggagccggggcaacg

SEQ ID NO: 155924 - RNA, 79 nt, Homo sapiens
aggagcgccacgcgcggaaggcagcgcccagcagcgcagaggagaaggcagagcccccccaggcagaagcccgagcggg

SEQ ID NO: 155925 - RNA, 81 nt, Homo sapiens
gggaaccaaggggacaaaccaacagaagggcaaccaggcggagcccggcacgggcaaacagagcaggcagggaaccgccaa

SEQ ID NO: 155926 - RNA, 78 nt, Homo sapiens
ggcgacggacacccgaggggcaccgccaagaccagcacgaaagcacagcggagagagagaccggacagaggggcgaaa

SEQ ID NO: 155927 - RNA, 59 nt, Homo sapiens
cagaaacaagagcagaagccagcccaacaagacgggacaaacagcaggggccaagaaag

SEQ ID NO: 155928 - RNA, 62 nt, Homo sapiens
gaagcaagcaagggcaaaacgaaaaagccaagcccagaaacagccgagaacagggcccggag

SEQ ID NO: 155929 - RNA, 75 nt, Homo sapiens
ccacggccacagccgccgcagacccagcagccaagagggaagcagacgagagcaaggcgaaccccaggagcgacc

SEQ ID NO: 155930 - RNA, 77 nt, Homo sapiens
ggcccagccgggggagagaggaaggaccacggcacgaacaggacaggcgccaaccggaacagcaaacggaacaagag

SEQ ID NO: 155931 - RNA, 72 nt, Homo sapiens
agaggaacacaaacggcgcacaggagagggaaggaagccagcacaacagacacccggccagaccagcccaaa

SEQ ID NO: 155932 - RNA, 55 nt, Homo sapiens
aaacaggggcagagggcggccaccaaacacagggagaaaccggaggccaggaggg

SEQ ID NO: 155933 - RNA, 59 nt, Homo sapiens
cgggccccgggcacaccaacaagccacgaccggggagcagggccagaggggcacgcccg

SEQ ID NO: 155934 - RNA, 54 nt, Homo sapiens
cccccacgcggccagcgaaaacgcccaggcgcacccgccggaggaagcagacgc

SEQ ID NO: 155935 - RNA, 71 nt, Homo sapiens
cggagagaaaaggaagaaaacaaagacagcgaacaggggagaggaacaggcgcccgaagggcaaaacagca

SEQ ID NO: 155936 - RNA, 77 nt, Homo sapiens
aaaaggggaaggggccgacaaaagcgcagcaagacggccgcgcggcccgcaggaacaaaaccagccaagcagaggag

SEQ ID NO: 155937 - RNA, 81 nt, Homo sapiens
gcccccccaagagcaaaagcaaagggccacgccgcaagaagagccacaggaaagcaaagaggcgagccacgaaaagccaag

SEQ ID NO: 155938 - RNA, 80 nt, Homo sapiens
gcccgccagaaccgcgcgccacccacaaccagggcaacgcccccagccccccacccccgaccccggaacagcacggacac

SEQ ID NO: 155939 - RNA, 68 nt, Homo sapiens
ggagaagccccccaccgcaggcaggcacacgccgaccagaccgggggagccagccgcggacgcacagc

SEQ ID NO: 155940 - RNA, 75 nt, Homo sapiens
cgggcagagagcgcagacaggacaccaaacaccgccgccgcacacggcggcggcgaagccaagacacgggcccgc

SEQ ID NO: 155941 - RNA, 78 nt, Homo sapiens
gaagacgagggccggaggaaacaggagaacagaagcccaggagcagacaaaagaggacggggccacccaggaggaggg

SEQ ID NO: 155942 - RNA, 95 nt, Homo sapiens
cgcagcaaaaagcagcaacagaaccgcggaggagccagcccagcgccaacccaaacgagcgagacacacagaaaggaaaagggaacagcggcaag

SEQ ID NO: 155943 - RNA, 59 nt, Homo sapiens
cgcgccccggcagcgcaaacgggcgcgacccaaccagcagcacccaggccaggccacca

SEQ ID NO: 155944 - RNA, 73 nt, Homo sapiens
cagagcgacagcccgggacaccaagaaagaacgggcagggcacagcagccgggaagaagcagagggccgcaag

SEQ ID NO: 155945 - RNA, 78 nt, Homo sapiens
cgccccccgggccgaaagggacacgggccgagcaggcgcgcgggagccgaggcgcgcaccgggagcagaaaaccaagg

SEQ ID NO: 155946 - RNA, 85 nt, Homo sapiens
agcgggagcgggagccggagcgagagcgcgcgggcgcggccgacaggcaacagagggaaaagacaaacggagcaggaaaaagaac

SEQ ID NO: 155947 - RNA, 63 nt, Homo sapiens
ccgccagcacgcgccgccccgcgcgcgagccacgcagcccccagcacccccacgcgcgcggcc

SEQ ID NO: 155948 - RNA, 78 nt, Homo sapiens
gaacacgagaccaagacgaccacacccgccaccaccagggaagcgcagccaacagagagaagaggacagaaggaagac

SEQ ID NO: 155949 - RNA, 85 nt, Homo sapiens
ggcacgccaggcaaccagagcagaccggggccgggagcccgcccgggcaggagggcagggggagcggaaggccacaagaccagga

SEQ ID NO: 155950 - RNA, 57 nt, Homo sapiens
cacgggacaaaaaccagaccaggggccgcaaggccaggcgcgcagaggcacccaacg

SEQ ID NO: 155951 - RNA, 38 nt, Homo sapiens
gaaggagcgacaaagcaaagacccgaaaggccgccccc

SEQ ID NO: 155952 - RNA, 90 nt, Homo sapiens
cccgcgaggcgcgcgggcgcgcacgccgccagggggaaggaagccgggagaagcccggggagcacagaggggacaaggcggcggacaaga

SEQ ID NO: 155953 - RNA, 82 nt, Homo sapiens
aaggagaggggaccgcccggacacaagaaaaagagcgaaaaagacacgccggggagaacagagagagggaacaacaaaagga

SEQ ID NO: 155954 - RNA, 64 nt, Homo sapiens
cccgcaaaacaacgagaaggcggaaacagcccgcaaaggaagaagagagggcgaaggaggccac

SEQ ID NO: 155955 - RNA, 107 nt, Homo sapiens
aaggagagggggggccagaccagggcgcgccgcggaggaaggaagcagaggcgggggacagagagaggcagaagaaaaagcacccccaagcgagagagcggcccaaa

SEQ ID NO: 155956 - RNA, 74 nt, Homo sapiens
caaaacaaaaaggcgcggagaaaagaggggaaacaagagcgacgaaggagcaagggcaacacccggagagaaga

SEQ ID NO: 155957 - RNA, 54 nt, Homo sapiens
aacaaaagcaacaaagaggggacccaagagcgaagaagacaaagaaccagaacc

SEQ ID NO: 155958 - RNA, 72 nt, Homo sapiens
acgagacagaggaacccagggcaagaaccggacaccggaagggcggacgcagcccccaacccgaccggcaac

SEQ ID NO: 155959 - RNA, 82 nt, Homo sapiens
aacgcaagacaggaagagaggccggcccccaggacgcacaggaggagcgccccgaggccggggagcaccccgaggcgggcaa

SEQ ID NO: 155960 - RNA, 73 nt, Homo sapiens
cgaagacaggcggcggaggaaacaacaggagcgacaaccaaggaaggacaacccgggggacgccgccacgaag

SEQ ID NO: 155961 - RNA, 86 nt, Homo sapiens
cgcgccgacagcacgcagagcggagaagccccagaccagcgacacaccccgcccggagagccggaacagccggcccaaagcagccc

SEQ ID NO: 155962 - RNA, 79 nt, Homo sapiens
gggaagcagccgccacggaggcaaagcagccgcaaagaaccccacaggaggcgaacacgaggagcccacagaacccgaa

SEQ ID NO: 155963 - RNA, 43 nt, Homo sapiens
gacaacaaccgccccacaccagggcagacagggacagaaacac

SEQ ID NO: 155964 - RNA, 52 nt, Homo sapiens
gaaaagcaggggagggaagaccgccccacaaaaggccacagagcaaccaaaa

SEQ ID NO: 155965 - RNA, 48 nt, Homo sapiens
cacagagagggccggcagggcgggcaggaagccagacacagcaggagg

SEQ ID NO: 155966 - RNA, 91 nt, Homo sapiens
cccacccccacggcccccggcgccccggcccccgccccagcccgccggcggcggcgggaagaaccggcaccggaagaaaagggaggagaag

SEQ ID NO: 155967 - RNA, 73 nt, Homo sapiens
ccccaccaagcgaagcgggacaaaaagccaaaggcagacaccccgggggggcagcggacaaaagaacaccagc

SEQ ID NO: 155968 - RNA, 70 nt, Homo sapiens
gccggaagaggcacaggaggaagcaggcggagcacccaaggacaggagaaacaggggccaaaaaaccaaa

SEQ ID NO: 155969 - RNA, 82 nt, Homo sapiens
aacaaagggagagcggggcagagaggagcacacggccagggcaggcggccggcagaggggaccggacgggaagaagggcgcc

SEQ ID NO: 155970 - RNA, 69 nt, Homo sapiens
gcccgccgaacccgaaaggaggggcaacgaggaacaggccaagaaacaacacagccaaggccagcgcca

SEQ ID NO: 155971 - RNA, 77 nt, Homo sapiens
acagccccaggagccggggccgcagccaccaggacgcaaaggagcggacccgaggagggcggacaacccaggaggag

SEQ ID NO: 155972 - RNA, 79 nt, Homo sapiens
gccgccgcgagcgccacgccaaggaggggcagcgccggccgcccgcaggacaccgagggcccagccgcgcaccagcgac

SEQ ID NO: 155973 - RNA, 80 nt, Homo sapiens
ccgagggggagccccgcgcgcggcgcgggcggagaacggaaaagcaccaggaagcagagaggaccgcagaagggaaggag

SEQ ID NO: 155974 - RNA, 58 nt, Homo sapiens
gcggccggggccaggcccgcagggggggagccgcacgacccgaacgccagagacaaaa

SEQ ID NO: 155975 - RNA, 71 nt, Homo sapiens
caagagccccgggacgaggccgcccgcacccagcggaggggaaggccaggggagaacagccgacaccaacc

SEQ ID NO: 155976 - RNA, 76 nt, Homo sapiens
gaagcgcccgcaagaagagaggacaagcgcccaccacagcccagaaaggagggccagacaaggggaacacaagagg

SEQ ID NO: 155977 - RNA, 78 nt, Homo sapiens
gcacgccacccgggcaaccgcaaaccagcggcccgcgcagcgccccccacagcccccccaggagagccacccacggac

SEQ ID NO: 155978 - RNA, 62 nt, Homo sapiens
caaacagaaaaagcggagacagccgaagaccaaaggaaggaggacccaagaagaccagccga

SEQ ID NO: 155979 - RNA, 80 nt, Homo sapiens
gagagcgagcgagggggggcgcgccggaaaccggagcgcgcagcaggccccggccccaacaggcccgcgcccagagcccc

SEQ ID NO: 155980 - RNA, 68 nt, Homo sapiens
gccccacacaagacacagcagggacacgagacggcagacccagcgccggggggagccacggaccaggg

SEQ ID NO: 155981 - RNA, 69 nt, Homo sapiens
agccacccgcgggaacggcagggaccggaaccaagaacagagaccagcacaaccagggaagaagacaga

SEQ ID NO: 155982 - RNA, 82 nt, Homo sapiens
agcgaccaagaaaaaaaagaagaggcgcagaaagcaaacggccaagagaagaaggaagaccaacacgcacgaagggaacaca

SEQ ID NO: 155983 - RNA, 53 nt, Homo sapiens
caggaagaaggaaggacccccaaccgacacgcgcccgaaagagagaagaccac

SEQ ID NO: 155984 - RNA, 70 nt, Homo sapiens
cccgacgccccagggagagcaggggggaaaaagacccgaacggaccagcagacgggaacaaaggagaaag

SEQ ID NO: 155985 - RNA, 90 nt, Homo sapiens
cagaacacgccccggagcagccaggccagggcggcagcaccagcgcccgagcagcgcagaggcccgcggagcacacagaagccgcgcaga

SEQ ID NO: 155986 - RNA, 59 nt, Homo sapiens
cacaagcggcacaggaaaaaaccagacgccgccagccaccggcgcgaagccagaccaga

SEQ ID NO: 155987 - RNA, 72 nt, Homo sapiens
agagcgggagcaccggcaacagaaccccaaagaggcccggaggaaacaggaacacccaagacaaaaaggcaa

SEQ ID NO: 155988 - RNA, 57 nt, Homo sapiens
agcacgcagccccaggcagaagcacccaagccagggagcggcaaaagcaaaagggcc

SEQ ID NO: 155989 - RNA, 51 nt, Homo sapiens
cggaaaagaaacaacaccacaagaaagaagaagggagacgcagccccgcga

SEQ ID NO: 155990 - RNA, 69 nt, Homo sapiens
gggaacccaccgccaccagcgcgggcgcgggccaagaccagagacaaggccccgagggaggagcccgaa

SEQ ID NO: 155991 - RNA, 76 nt, Homo sapiens
cgaggaaggcaccaagcccccagacaaaccgaaggcgacagagacaggggccagccccaccccaaccaagacaaac

SEQ ID NO: 155992 - RNA, 47 nt, Homo sapiens
gagcggagggggggcgccagcacccgacgaggaggcaacccgagcaa

SEQ ID NO: 155993 - RNA, 70 nt, Homo sapiens
agggaggcaggggcagaaacagagaaggaacagaacgggcacggagccggagagcgaaggagcgggaaaa

SEQ ID NO: 155994 - RNA, 76 nt, Homo sapiens
gggcaccccacccacacaccacagggaagcgcagaaaagagacagcgaccgcacaaggagccgcacgcgcccaggc

SEQ ID NO: 155995 - RNA, 57 nt, Homo sapiens
ggagagggacaaaaacggccacgaaagagccgaaaccaggcagcgcacagcccagcg

SEQ ID NO: 155996 - RNA, 67 nt, Homo sapiens
ggagaaggaccaagaaccagacacgcacagaacccaaagcccaagagggccccagggacccaccccc

SEQ ID NO: 155997 - RNA, 63 nt, Homo sapiens
ggacgccccaccgccgacgcccccagccaccagacaacgaagagaggaaagaagcggaaagga

SEQ ID NO: 155998 - RNA, 81 nt, Homo sapiens
ccggagaacacacaccgccgcaggcgcccccgggaaagaaggaccaggaagggggggaagcaaaaggacgacgaaggccgc

SEQ ID NO: 155999 - RNA, 78 nt, Homo sapiens
ccccccgccccgcaccaccgccgacggccagggcacgagagagcgcacggcaggcagacgggagcgggccgagaaaaa

SEQ ID NO: 156000 - RNA, 80 nt, Homo sapiens
cccaccagaggagaggagcaacaccaccggacccgggcaaggacacagaaagaagaccccccgagggccgcccccagccg

SEQ ID NO: 156001 - RNA, 77 nt, Homo sapiens
ggagccgccaagaagcgagacgaagaagaggccgcacagaagccacgggcacagagagacccagcgacgagcaaaag

SEQ ID NO: 156002 - RNA, 73 nt, Homo sapiens
gcacagaaaggaagaaacggaagacaccgcggcagacacaccaaaacgaaagaagagcagcggaggcaaaaga

SEQ ID NO: 156003 - RNA, 80 nt, Homo sapiens
aagggcggcgacacgacggcggaacggggaacgacggcccagcaggcggggaagagaaaggggcggcggaagacgggcag

SEQ ID NO: 156004 - RNA, 42 nt, Homo sapiens
aggagaggagggaacgcggagcgggaaagcacagagagcagg

SEQ ID NO: 156005 - RNA, 81 nt, Homo sapiens
gggcgccagccgggccacggagaggagcagcccccggagacagcggcacagagggccgccagaccgcaaaacgggacaagc

SEQ ID NO: 156006 - RNA, 59 nt, Homo sapiens
ggccggacgccagcggacacgcgggcgagagagccaacggaccacaacagagaaccaag

SEQ ID NO: 156007 - RNA, 55 nt, Homo sapiens
ggaccggcgcccagaagccccgggaggagaagaagagcccggacccccggcgggc

SEQ ID NO: 156008 - RNA, 75 nt, Homo sapiens
cccgacaccaagagcgggaggagcaggagcgccaagaccaagaaaggccgagacgacccgaggagaaacaagcgg

SEQ ID NO: 156009 - RNA, 87 nt, Homo sapiens
ccgggagccggggccgccgccggagcggcgccggagccggagccggaacccagccgcgccaggaggaccgcgccaacaggacgagga

SEQ ID NO: 156010 - RNA, 51 nt, Homo sapiens
aggacccacccgcaccggagcaggcaaggagcacccacgggagaccggggg

SEQ ID NO: 156011 - RNA, 69 nt, Homo sapiens
ccgccggacccggcgacacggggcaaggggagcgggcgcgcgcgaccgcgccccggggaaccggggacc

SEQ ID NO: 156012 - RNA, 98 nt, Homo sapiens
aaagccccggaacaaaaagccccagaccagagacagaagcagaggacgccagacagccagcaggggcagaagcagcagacggaacgagggcaaagaag

SEQ ID NO: 156013 - RNA, 82 nt, Homo sapiens
gccggccccaccgccgcacgccgccggggcgcggccgcccgagggcccaccgcaccggacgacgggggacacagaacgcaag

SEQ ID NO: 156014 - RNA, 62 nt, Homo sapiens
aaggaccaagaaccaggcgagagacaccaggcggaagagaaaggagagaagcccaaaagaca

SEQ ID NO: 156015 - RNA, 76 nt, Homo sapiens
aggcagcgcccccaaacggcaggaggggaagcagaaagcaaacggccccgaaggaggaggaccgggaagagcacag

SEQ ID NO: 156016 - RNA, 80 nt, Homo sapiens
ggacgaacgagcgcaggagggacgcaacaaaggccaggggcagcaccccaccagccaccccccacgcccacacgacagca

SEQ ID NO: 156017 - RNA, 100 nt, Homo sapiens
aaccaggaaacagaaaaaccaggagcgaggaggaaagcgaaaacaacacggaagccaagacaagaagcggagaagcgagagaaacacagggacagagcaa

SEQ ID NO: 156018 - RNA, 76 nt, Homo sapiens
caaaccccaggccaagcagccaccagcagcccccagagcgggaccacaggacgcaaaaacacggacccagggaaac

SEQ ID NO: 156019 - RNA, 83 nt, Homo sapiens
cccccggcccaagaaggaccccagccaacagagcggggggaccagaagcagcagccccagaagccccgaagccggggcacccc

SEQ ID NO: 156020 - RNA, 82 nt, Homo sapiens
gacagcaacagggacgcgacaccgcacgagcggcccaggacaaagcagccagaccaaagcacagcgccagagacccccggca

SEQ ID NO: 156021 - RNA, 84 nt, Homo sapiens
caggagggcaagcaaacaggagcagccgaccccaagaggagaaaggagcccagggcagaccgggagacacaaagaaacacgagg

SEQ ID NO: 156022 - RNA, 70 nt, Homo sapiens
ggacaaagggcggaaagggccggaacgggcggacccagagccagcggaccacacacagggggaagacaac

SEQ ID NO: 156023 - RNA, 77 nt, Homo sapiens
gaagcgagggaagggcggacacaccggacaaaaaggaccagaagaaaggcgcacaaaaccagaacgacagaaaaaca

SEQ ID NO: 156024 - RNA, 86 nt, Homo sapiens
gcagacgggacacagcggggcaggagcgcccgcaccacaccccacggacgcggagcgcaggggagagagcagcgcaaccgcgggac

SEQ ID NO: 156025 - RNA, 75 nt, Homo sapiens
gagcacgggagaaggagccggaggcggggagaccccgcaccaggacagcggaggcccacccgacgcggagcgacc

SEQ ID NO: 156026 - RNA, 79 nt, Homo sapiens
cggcgcgcggaccccgccgagccagcgccggccgcgcgccgcgcccgcgccacaggccgagcgcaccagccgagagcag

SEQ ID NO: 156027 - RNA, 67 nt, Homo sapiens
gaccagccacaggaagcccgacaacgacaggaagaaaggaacaggaaaagggaggcaaagacaacca

SEQ ID NO: 156028 - RNA, 92 nt, Homo sapiens
gaagaagcaaagccaaaagaaggcagcggagggaacgaaggaacaaagaagaggccccaggaccggcgaggccccccccccagcagcaaagg

SEQ ID NO: 156029 - RNA, 53 nt, Homo sapiens
cgaaacaaccaacgacaacaaggcagaagagccagagacaaggcccacccagc

SEQ ID NO: 156030 - RNA, 67 nt, Homo sapiens
caacagaaggaacaacagaacgcacgaagcaagcgccagcagcgcaggccgagacgacaggcccacc

SEQ ID NO: 156031 - RNA, 79 nt, Homo sapiens
gggggcagcccagccaggaagagccgggaagcagcaccaacccggcccaccaaacccccacggagaggaaaaagaagga

SEQ ID NO: 156032 - RNA, 55 nt, Homo sapiens
gcacggggagccaagccggggaacgcccgcggacggcagggcgcgacaagaagcg

SEQ ID NO: 156033 - RNA, 82 nt, Homo sapiens
gaacagaggcacccgaagccaaagggaaaagggaccaagaaaggcccagggaccaaagcccggacaaggcccgagcaccagg

SEQ ID NO: 156034 - RNA, 76 nt, Homo sapiens
aggaacaccggacagaagccacccaaaggaacaccgggcgcccgccaggagccccagcccagccccgccagaggaa

SEQ ID NO: 156035 - RNA, 65 nt, Homo sapiens
gaaagagcaacaaagcggcgagggggagagggcagcacgcgcgggcacaccgacagagaacccag

SEQ ID NO: 156036 - RNA, 72 nt, Homo sapiens
cccgagggcggaaagggcaaagcgaggaagccgaagaccgcaggaaagcaggaaggcaagaaagccaaggac

SEQ ID NO: 156037 - RNA, 79 nt, Homo sapiens
gccagcggagcgaacccgagagcgggagcgggcgggccagggaaacccagacgacaaggaaggccaagggacccacgac

SEQ ID NO: 156038 - RNA, 79 nt, Homo sapiens
caaaggagacccaaggaacaggccaagagagccgaacccaccgagccagggaggagcacccacgggaacagcccagaaa

SEQ ID NO: 156039 - RNA, 81 nt, Homo sapiens
aaaaaaccagagggaaacggcacaccaggcggcaggggcaaccagacgggccaaggccgagaagcaggagaaaggagaaag

SEQ ID NO: 156040 - RNA, 92 nt, Homo sapiens
gcgcgaagcggccaaagccgcccagacggccaccggcgggaggaacaaaagagccccccccagcgccgaaggcccgacccagcagcccggcc

SEQ ID NO: 156041 - RNA, 74 nt, Homo sapiens
caaagaggccagcacgggaccccccaagagaagcgcaagagcaacaccccaccccaagaacgccaggagccaga

SEQ ID NO: 156042 - RNA, 45 nt, Homo sapiens
caggacaacccgaggagccaccagaaccaaaggcagacccagaag

SEQ ID NO: 156043 - RNA, 81 nt, Homo sapiens
ggcgccgcgcgcgcagggccgccggcccgcagccgccaccacccaggaccagaaggggaccccagcggaacacacccacca

SEQ ID NO: 156044 - RNA, 83 nt, Homo sapiens
aaaggggaagaaaggccacgcgagacagagaaacggccagccccggaggaggaagcggacacagcaacaaagagagaaacagc

SEQ ID NO: 156045 - RNA, 74 nt, Homo sapiens
acgacccaacagcaaaggacccccacccacccgagaacagaagaccgggagcacagaagaaaagaacaaggcca

SEQ ID NO: 156046 - RNA, 81 nt, Homo sapiens
cagcgcacgggcggaagaccgccgggaggaccgacggcagcggagagcgaggagaagggcaccagaccacagggcccaacg

SEQ ID NO: 156047 - RNA, 80 nt, Homo sapiens
cacaggagcacccgaaggaaaggcccagaagacccaagggagaaaagagcgagaaacaaggcaacgcaaaccaacgggac

SEQ ID NO: 156048 - RNA, 78 nt, Homo sapiens
gggaccagacaggcgcgcgaccaacccgagaccaagggaagggaccacagaccagcacgccggcgccacgaaccgagc

SEQ ID NO: 156049 - RNA, 74 nt, Homo sapiens
cgacaacaggaaaagaaacacacgagcaaaggagacgacacgagaaagcggacaggaacggcaagaaaaggagc

SEQ ID NO: 156050 - RNA, 70 nt, Homo sapiens
gcccaggacaagccgcgcggggacccgacgcccgcacggacgccaagaagcggaacaaaccagcaagaag

SEQ ID NO: 156051 - RNA, 53 nt, Homo sapiens
gaaaagaccaaaacggacgaaaagaaacagaccaagcacgaagcccgagcaaa

SEQ ID NO: 156052 - RNA, 83 nt, Homo sapiens
acgacccgaagacccacgcggaggaggacgaggacacggccgcggcaggaggagcaagcacaacaggccgaagaggccggaga

SEQ ID NO: 156053 - RNA, 83 nt, Homo sapiens
accggaagcccgaggagggagaaagaccaaaaacccagaccagaagcgcaagccagagacgcaccacgccggaacgggccaca

SEQ ID NO: 156054 - RNA, 85 nt, Homo sapiens
cgagagacgagagcacgacacggccgcacgggcccacgccagaaagaagcggcacggaaggaaacggcccagcagacaagcagga

SEQ ID NO: 156055 - RNA, 76 nt, Homo sapiens
gaacacgccggagccgccaggaagaccgaggagcagggagcaaccacaaggaaaggaaaccaccgaaccgagccag

SEQ ID NO: 156056 - RNA, 77 nt, Homo sapiens
gccagccgggcgcgcgaagcggcgcggggaggcagcggaaggcggcaggggggaccaaggcaacgaacacaagcagc

SEQ ID NO: 156057 - RNA, 78 nt, Homo sapiens
gggaaacggcaaagcgcagcccgcagacagaggggcgacgaccgcacaacagaagcggagccacacacccccacacca

SEQ ID NO: 156058 - RNA, 57 nt, Homo sapiens
cagcagaagacggagacaagaggggcgagcaccaaagccaaggaagcccagaagaaa

SEQ ID NO: 156059 - RNA, 85 nt, Homo sapiens
cgagcagcagccaaagaaagcggacccgcggcgggaaaaggacgggcgacaaagccacaacacgagaaaaccaggaccgcaggaa

SEQ ID NO: 156060 - RNA, 74 nt, Homo sapiens
accgaagaacagcgggaaagaaggcaaaacacggggcagcgcaagaccccgcacggaagcagcaagcacaggca

SEQ ID NO: 156061 - RNA, 78 nt, Homo sapiens
gggggcaacggcacagaaccgcagcagggacgcgggcacgggaccggcgaggacgggccacagagcaaccaaaaaccg

SEQ ID NO: 156062 - RNA, 76 nt, Homo sapiens
gggggacgcagggaggagcgggacaccccggaagcgggaaaggcaccaggagaaaaaaaaacaaagagggcccagg

SEQ ID NO: 156063 - RNA, 54 nt, Homo sapiens
gcgggagagaggacccccccccccccccaaggaaaagcggccaggaccaccagg

SEQ ID NO: 156064 - RNA, 79 nt, Homo sapiens
gggcccacgcccaccagcgggaccagcgaacccgaggccaaggacaccacggaaccacaaagagggcacaagaagagaa

SEQ ID NO: 156065 - RNA, 85 nt, Homo sapiens
cacccgagaagggagacgacgcgcgggccgcgagcggggcgacccgaggcgggaggaaccaggaaccaggggggaggccaagcag

SEQ ID NO: 156066 - RNA, 82 nt, Homo sapiens
aaggcgcagcagaggggccacgcgggcccgaggcgcaccaagggcgaaggagccggcccaaggcacgcagcacgggggcagg

SEQ ID NO: 156067 - RNA, 75 nt, Homo sapiens
gccgaggagcgggacaacccaggagcagacagagaagcgcgcagcagccaaaagcaggccggcaccggaggcaga

SEQ ID NO: 156068 - RNA, 77 nt, Homo sapiens
gagaaccggcagcccccacacccaacgaggggaacggcgccccgaacccggagagagggcacagcaaaggccgaagg

SEQ ID NO: 156069 - RNA, 86 nt, Homo sapiens
cagccccgggccaggccgcggccggggcaggagcgcaggaacagcgacacccagcagaagcagcaggaaacgaaccgacaaaacac

SEQ ID NO: 156070 - RNA, 69 nt, Homo sapiens
ggagggagcccaggacacaaggaggacaccaacagagagacagcgcagaaaaacgcaaccaacgggaag

SEQ ID NO: 156071 - RNA, 89 nt, Homo sapiens
gccgcgcggagcacgcggagccgcccaggcagcccagaggacacagggaccaggcgcccgcagagcccaagggaggcgaagaagcacaa

SEQ ID NO: 156072 - RNA, 67 nt, Homo sapiens
caacacagcaacccgcgacagggacacagagccacaaaagaggaaacaaacaggaacgacaaccgca

SEQ ID NO: 156073 - RNA, 77 nt, Homo sapiens
aggcaggacgccgggcaagagaccgacggcggagcaccgccccggcagaagcggcagcaaaaaccagcaggcgaaga

SEQ ID NO: 156074 - RNA, 73 nt, Homo sapiens
gaaccaccaccccagagcacgaacaagcaagggcccgagaaaaaaaaaaaaagaaaaggaaaaaagaaagaag

SEQ ID NO: 156075 - RNA, 78 nt, Homo sapiens
agcgccggggcacgacacaaaaacaggggagccccgagcgggaagagaaggaaaccaggaaaaaaagacaaaacaaac

SEQ ID NO: 156076 - RNA, 74 nt, Homo sapiens
accgccaacaggacaccgaagccaaccggcagagagcaagaggcgaagcacggcacaagcaccccgcccaagag

SEQ ID NO: 156077 - RNA, 85 nt, Homo sapiens
ggaggcggggaccccaaagccagaggcccaggacagcgagacagccaggacggcaagaccagccaagcccgggcaacggacgggg

SEQ ID NO: 156078 - RNA, 81 nt, Homo sapiens
gggcgccccacagaggggcgacggaaaggccgaggggcaaagaaaaggaaagcacggccgaaaagaaggcgaaaacccggc

SEQ ID NO: 156079 - RNA, 75 nt, Homo sapiens
gaagaggcggacggaggagcaggcgagaagagaaggcccggccaaagaaccgacaaccaagggccccgcggacca

SEQ ID NO: 156080 - RNA, 83 nt, Homo sapiens
ccgaaacgagaccgggcagaggcgcaaggcggagaacacaggaaaacaacaccagggcaagaaggcaccaccaagcgaagacg

SEQ ID NO: 156081 - RNA, 76 nt, Homo sapiens
ccgggaagcaggaagccaaggcagcgcccaagacggagggccgagaggaagccacccccaacaccacacgccggga

SEQ ID NO: 156082 - RNA, 74 nt, Homo sapiens
gagcccgaggcccaacaacaacagaagaagagcagaacccaggagcccccgcaaggggccggcacgggaaaaca

SEQ ID NO: 156083 - RNA, 83 nt, Homo sapiens
cggacggcgcgcgcccgaggcgaggaggagcgcggcgaagcagggcgagcgcgagcagccgggaacgaggccaacaagggagc

SEQ ID NO: 156084 - RNA, 78 nt, Homo sapiens
cgacggaaaggcgccacaagggacaccaagccccacccaaggggaaagcaacggcgcaagcggcggcggcgggcagag

SEQ ID NO: 156085 - RNA, 72 nt, Homo sapiens
cacagagaacaagacgacaacaccaacaagcgaccagcccaacggggacccagcaggaccaagccagcccac

SEQ ID NO: 156086 - RNA, 89 nt, Homo sapiens
caggagcggaacaacgcggcgagcggggggacggcaaaacagaacagaaaggcggagaaaaaagagggggaaaagaccacgagaagaca

SEQ ID NO: 156087 - RNA, 86 nt, Homo sapiens
cacaccaacagggaagaaaacccagaaagcaacacagagaccggagagcacacgggaagcagccgagaggcgagaaagaagaaaga

SEQ ID NO: 156088 - RNA, 85 nt, Homo sapiens
cccgcggggcaaccgccacgagacaccaaggagggggaagacagagaagaccacacaaccgaaggggccgggcaggacggcccgg

SEQ ID NO: 156089 - RNA, 80 nt, Homo sapiens
gcaccgggacggaccgagaccggaccgagagcggaccgagagcgcgaaacgcacgagaaggccaagacaaggccgagacc

SEQ ID NO: 156090 - RNA, 116 nt, Homo sapiens
gcacaccaggcacccgggcccagccgggaacccccacgcggccagcgaaaacgcccaggaaagaccacagcaagaccacgcccccagccgggggaccaggccgaacgacccggaca

SEQ ID NO: 156091 - RNA, 76 nt, Homo sapiens
gaaggcgaacacagaggaaaccgcaccgcccggagggagggacaccgccaaacaaggaccgaaaggcggcgcaagg

SEQ ID NO: 156092 - RNA, 79 nt, Homo sapiens
cagcggagccggccggaaagcgaaagaaaagcaggcggaaccagcggagccgcccgccagaagaaagaaaaagcagagc

SEQ ID NO: 156093 - RNA, 85 nt, Homo sapiens
gcgcccgccgcgccgccacgggacagggcggaccccgccaacagagcccaccgggccggaggagcagcgagagagcgcggacagc

SEQ ID NO: 156094 - RNA, 87 nt, Homo sapiens
aaagccgagaaggagaacaccccgagcgaggccaacccaggaggaggaggacggccggacgaggggcgcccccgcccggcaaggagg

SEQ ID NO: 156095 - RNA, 76 nt, Homo sapiens
agaagagaagaacgggcaaacaaaaccagcaggcgaagacgcaggagagcacagacggacccgcacgacccggagg

SEQ ID NO: 156096 - RNA, 103 nt, Homo sapiens
ggcgaagaaacaaggagaaacgaagaaaacacccaccggaagagggccgcaggggcgcggcacaggagagggggccaaaggcgcgaggggggcgggaaacccg

SEQ ID NO: 156097 - RNA, 76 nt, Homo sapiens
cgaagcaaagaggaggaaggagggaccggcccccagcaagccccaggaccccaaagcacaagaaggagccacaaca

SEQ ID NO: 156098 - RNA, 38 nt, Homo sapiens
aagcgacgagccgcgaggaggaagcccggggcggcgac

SEQ ID NO: 156099 - RNA, 80 nt, Homo sapiens
aacaagagaagacccagaggaagccaaaaggcaggaaaagggccaaaccaggagcagaacccagaaccaagccaaccgaa

SEQ ID NO: 156100 - RNA, 73 nt, Homo sapiens
agcccgggcgcgggggcggcggcagggggcggagcgaaagccgagccgggccagcccacacaccgcccccccg

SEQ ID NO: 156101 - RNA, 61 nt, Homo sapiens
aaaaaacagcacacaaaccggagaaacacgcgacggccggagaacccacgccgcccccaca

SEQ ID NO: 156102 - RNA, 79 nt, Homo sapiens
ggacacgagcgggccacgaggacccaaagccagcaaggacacaggaacgccacaagaaacaacagcaaggcgagggcca

SEQ ID NO: 156103 - RNA, 76 nt, Homo sapiens
ccggagagcacccaacaggaagacagccgccaccaggcgcccccccagcaaccacccacagacccgagacaggacg

SEQ ID NO: 156104 - RNA, 70 nt, Homo sapiens
cagccgagagagcaacaagccagcccgggaccgagggaccaggcagacgaccaaggagcaggcggggcag

SEQ ID NO: 156105 - RNA, 80 nt, Homo sapiens
acaccgggggcaggccaggccgcaggaagcgcggaaaagccagagagagacccaggccaccgcgagggaccgcgcaggca

SEQ ID NO: 156106 - RNA, 89 nt, Homo sapiens
ggcggacggagcgggcgccaccccgcaacgacgaagcggaagccaagcgcacacaggcagccaggaagacccgcgcagaccagcgaaaa

SEQ ID NO: 156107 - RNA, 76 nt, Homo sapiens
agcacaagagaaagaaggaagcggcgccgaaaaaaaggggaacaaagcgacgagggcgagaagaacaggaccccga

SEQ ID NO: 156108 - RNA, 54 nt, Homo sapiens
gccaccggacaacaccgccccagcccaccagacaagcaaaaccagacgagagac

SEQ ID NO: 156109 - RNA, 70 nt, Homo sapiens
gcacccaggccacaaccacccaaagacacggcaacccacagagagagaggaaacgaagggagcgacacac

SEQ ID NO: 156110 - RNA, 85 nt, Homo sapiens
ggccacccgacgcagagggcaggccccagccaggaagcggccagccccagggcagcacacagagacaccaggaacacagccaccc

SEQ ID NO: 156111 - RNA, 72 nt, Homo sapiens
cgaagaacgaccaaaagggaagggacccaggcgacaggacagacacaccagaggaagaggcgaaaccaaacc

SEQ ID NO: 156112 - RNA, 78 nt, Homo sapiens
cggacgggacgaagacggcggcggcggcgacggcaaacaaggcgggggacccagcaggcaggagaagacccaggagag

SEQ ID NO: 156113 - RNA, 70 nt, Homo sapiens
acacaaagaggacccgacagagcaacaccgccggaaccggacgggaggaacacgcacggaagacgcgcag

SEQ ID NO: 156114 - RNA, 83 nt, Homo sapiens
cgaagaagaagcaagcgaggcccacaagaagacgaaacggaggagcccaggaggaagaagaagcagccaaagaagagaaagaa

SEQ ID NO: 156115 - RNA, 78 nt, Homo sapiens
agcacacagagagccgcggagaccaagacacccaggagaaagacagcggggaaaagaaaaaggagggggcaaaagggg

SEQ ID NO: 156116 - RNA, 58 nt, Homo sapiens
cgggaccacaagacaacgcggagcggcgaagagcaaccagacaacaggcacaaagaga

SEQ ID NO: 156117 - RNA, 66 nt, Homo sapiens
cgcgcaggccgagaagcgggcagccgagaagggccgaggcccgcaaaaggcccccgggcaccgggc

SEQ ID NO: 156118 - RNA, 78 nt, Homo sapiens
cgggaaagcacaaagcaagagacagcgaggacagaaggaagcacgccaggaaagagagaagaaaaccgaacaacaaac

SEQ ID NO: 156119 - RNA, 74 nt, Homo sapiens
gccaccaggaggccagggggcgccagagagaaacaagcaggaaaacagcgccacacgccgcacaaggacaggag

SEQ ID NO: 156120 - RNA, 80 nt, Homo sapiens
acgaggagcacagccgggccgcgcgaaggacccagagagggaccagggccaaagaagagccggggggcaggcggacagca

SEQ ID NO: 156121 - RNA, 73 nt, Homo sapiens
ccgcccccagcccggaaagggcagcaccaacccagggcagcgccacggagaacaggggccacacgcaaacccg

SEQ ID NO: 156122 - RNA, 88 nt, Homo sapiens
aacgcagcggcgggcgccagaaacggggcgcgggggccgcgcgaagacaggaccagggcacggaggggacggcaaaacagaacagaaa

SEQ ID NO: 156123 - RNA, 80 nt, Homo sapiens
agacaagagagcaccgagcccagaaggagcccaggaagcgaggaaagcgcggagagcgcacacaaacgaaggacaaaaca

SEQ ID NO: 156124 - RNA, 81 nt, Homo sapiens
gaagggccgagcacagcaagcaaaacgaggaaagagagccaagcccaagccccacaggcccaaagagggcgaagacaaaca

SEQ ID NO: 156125 - RNA, 70 nt, Homo sapiens
gaccgagaacccacgagggagagaaacggagcagccaagaaggccgagaagaaaccgcaagaaagaaagc

SEQ ID NO: 156126 - RNA, 71 nt, Homo sapiens
cagaagcacagaaaacaggacagggcagaccgccagcagcacagcaagccacagagagggccggcagggcg

SEQ ID NO: 156127 - RNA, 73 nt, Homo sapiens
cccgaggggaaaaaagcgaaagagaagaaaaacccaagccggaacacagcgagggagacgcacaccgaaagcg

SEQ ID NO: 156128 - RNA, 55 nt, Homo sapiens
gcaaggcaggcaacaagcaccacccgaaggcccaaaccccgccagagccgacggg

SEQ ID NO: 156129 - RNA, 62 nt, Homo sapiens
acggcaagacaacaaacagaagacggaacagccggagaaacagcgcaaggacaacccaaaca

SEQ ID NO: 156130 - RNA, 75 nt, Homo sapiens
agcagaggaaggcacgggaaggagcagacccagacaggaggagggcagagccaagacgccagggaagaagggaca

SEQ ID NO: 156131 - RNA, 77 nt, Homo sapiens
ccgagaccgggaacagggaaagacaaaggggacccagaggaagcccgcccgcgcgacccgagcgccggaggagcagc

SEQ ID NO: 156132 - RNA, 73 nt, Homo sapiens
gcaccaaaggccaacaaccccagcgaggaaaggggagcgggggaggaggaaggaagagggagaccacacaggc

SEQ ID NO: 156133 - RNA, 69 nt, Homo sapiens
cccaggccagcgccccaggccaagagggacccacccggcgggccaaaaacaaacaaaaaagaacccacc

SEQ ID NO: 156134 - RNA, 84 nt, Homo sapiens
accagagaccaggaacgggggaaggaacgaccaaggacgggcacaggagccaggcacaacagagaaggagggaaggaacaggga

SEQ ID NO: 156135 - RNA, 70 nt, Homo sapiens
aaaagaggcgggacgcgaacacagagggaagagaaagcaaacgagcagggcaagcagccaggagccggac

SEQ ID NO: 156136 - RNA, 42 nt, Homo sapiens
ggaggcaggaccagcgcagcgcgcacaagggagcgccggaaa

SEQ ID NO: 156137 - RNA, 69 nt, Homo sapiens
aacagaggcaaagaggaacagggcaaagagaggcaacgagaagcgggggacagagggcacaaacagaca

SEQ ID NO: 156138 - RNA, 83 nt, Homo sapiens
caagaaaaagagcccggaaagaagagacagagaggggagaacccccaggcggggccgggcgggccgggaagggcaaggcagaa

SEQ ID NO: 156139 - RNA, 53 nt, Homo sapiens
acaagagacacaaggaagacaagaacccgacacgggccccgggcgcgggagcc

SEQ ID NO: 156140 - RNA, 69 nt, Homo sapiens
cggccgaccagagaacagagcccaaaaggcagagcgaggagagaagaaggagggaaagccaaacaacgg

SEQ ID NO: 156141 - RNA, 57 nt, Homo sapiens
acacagagggcacacggcacagaccagagccagcaagcaaaagacagaaggggagcc

SEQ ID NO: 156142 - RNA, 71 nt, Homo sapiens
ccacccagagcgcacggcgacgccccaggggaaaacccccgggaccaggcggcggaagccccgcccaccag

SEQ ID NO: 156143 - RNA, 78 nt, Homo sapiens
ccccgagggcgggaacaggaacgacgagcccgggacagcaccccgcccagacccccgccccggggaaaccgccacgga

SEQ ID NO: 156144 - RNA, 67 nt, Homo sapiens
caaggcggaaaaagacaccaccaacggaaaacaacacaggcgccacggcccgcccccagacgcgccg

SEQ ID NO: 156145 - RNA, 79 nt, Homo sapiens
gagaacgaaaaaaagagaaaccggggaaccacggacaacccagaggacaacgaaggcggaggagagaccgccgggcgca

SEQ ID NO: 156146 - RNA, 81 nt, Homo sapiens
aggagggaccgacgaagcacgggcgacgagagcgaaagacagaagaaagacgagagccagaaggaccagcagcagcaacac

SEQ ID NO: 156147 - RNA, 80 nt, Homo sapiens
cccagaacaaaaagggccagaccacgaacgaagaaaccacgccaaagcaaagacagccccaccagacaagggagacccca

SEQ ID NO: 156148 - RNA, 82 nt, Homo sapiens
ggcgcggccagaacggagccccaaccgcgcgccggaaagaccacagcaagaccacgcccccagccgggggaccaggccgaac

SEQ ID NO: 156149 - RNA, 79 nt, Homo sapiens
cggaaagagccgacggaaagagccgacggacggccggcgagggcacgggggaaagcagccagaagaaaaacaaagacag

SEQ ID NO: 156150 - RNA, 41 nt, Homo sapiens
aggcagcacggcacacgccaacaaaaggaccaaccccgaac

SEQ ID NO: 156151 - RNA, 74 nt, Homo sapiens
cccccagggcgccccggccaccgcagaaaggaagcaaccaccgccggaccagaagcggaggagaagaccgaaga

SEQ ID NO: 156152 - RNA, 75 nt, Homo sapiens
gagagaggccggagaaaagcgagacggaagaacaggaccaggccgaggagggcggaaccacccaggaagaggggc

SEQ ID NO: 156153 - RNA, 84 nt, Homo sapiens
cgccacacagaccggggggcggccgcgcggccgggggcgcgggcggcggcgccggcaggaagaaacgccaagggaccacggaac

SEQ ID NO: 156154 - RNA, 76 nt, Homo sapiens
cgacaccgccgcagaacagggagcccgacagcggaggcgccggcggcccacccggaagagaagcacgaccacggca

SEQ ID NO: 156155 - RNA, 75 nt, Homo sapiens
cgggccacagggcagagaaagagcagcgcccgaaggcgggccggagaaggggcgacgcgggcaccccccgaagga

SEQ ID NO: 156156 - RNA, 81 nt, Homo sapiens
ggggaggcgaggccggacgcacccggggggcccagggacgcaggagcggcaaacgagggaacggcaaaaccagcacgggaa

SEQ ID NO: 156157 - RNA, 74 nt, Homo sapiens
agaagaagagcgccacagcggcaaacaggcagacagggaaggcgccagacacagaaaagaaagagagcaaccac

SEQ ID NO: 156158 - RNA, 75 nt, Homo sapiens
ccgacgacagcgggccgggaaaagggcacgaggccggaaccgcccagccccggaccaaaacagggaaggaagaac

SEQ ID NO: 156159 - RNA, 77 nt, Homo sapiens
aaaaccccggaagggcggacaccccacacgccgccacccccaccggagaggaggcaggaccgggcaaaaaggcagca

SEQ ID NO: 156160 - RNA, 71 nt, Homo sapiens
gagcgggacaggcgagcgaccgaggggaagaagaggcaccaagaaaacaagagaacgagcacccaaagcca

SEQ ID NO: 156161 - RNA, 74 nt, Homo sapiens
gggcccagggggcaggcaggaggccacagaacccaccaaaggcaaacaacaggaggcacgcgcggaccagccgg

SEQ ID NO: 156162 - RNA, 80 nt, Homo sapiens
gacgggggagacggagccccagaggacgcgggagaaggagaagaagaaaaagaacaccaaacacaacaagacacaagggg

SEQ ID NO: 156163 - RNA, 52 nt, Homo sapiens
gaaccacccgcgcccccaggagaggagccaagcccaacgggacgggaaaacg

SEQ ID NO: 156164 - RNA, 71 nt, Homo sapiens
aaaacccagaaaacaaaaaagaaggaccagcgcgcgggaggacacagcagagagacccacggcaaagacgg

SEQ ID NO: 156165 - RNA, 74 nt, Homo sapiens
agaccggaccgagagcggaccgagagcgcgaaacgcacgagaagcgccacgccaggaggcccgaaccggaagga

SEQ ID NO: 156166 - RNA, 58 nt, Homo sapiens
gaaaccagaagggggaaagagagaggaaaacgagacagcccacccaccgccccgcaga

SEQ ID NO: 156167 - RNA, 67 nt, Homo sapiens
gcaccaaaggccaggagaagggagaaacgaaggcggggccggggagcccgggccagaccccccagac

SEQ ID NO: 156168 - RNA, 79 nt, Homo sapiens
ccagcagggggcggaaagggcggaggacaagcaggcaaagcgagaggagcacaggcccaggcgacggaacccgacccaa

SEQ ID NO: 156169 - RNA, 76 nt, Homo sapiens
aaacccagaccgggccgagcgccggcgcggcccgcgagccaccaggcccgcgccggccaagccccggggaaccgga

SEQ ID NO: 156170 - RNA, 75 nt, Homo sapiens
ggaggcggcgggcagcgcccgggaaccaagaccaggacaaagaagacccggagagacaagccggaggacgcaaac

SEQ ID NO: 156171 - RNA, 87 nt, Homo sapiens
agccgaacaggcagggccagacccaggacaccggaacacgggggcaacggcccggagggacgagaccccccacggggcacgaccgga

SEQ ID NO: 156172 - RNA, 69 nt, Homo sapiens
gccaaaggacgaagaacccacagagcacaccaaaagcagagccaaacgccaccaagagcccaacaacac

SEQ ID NO: 156173 - RNA, 65 nt, Homo sapiens
ggcgagcaccaccggaacgccgcacgggcccagacgcagacaaacgagaagagagaagagggaca

SEQ ID NO: 156174 - RNA, 81 nt, Homo sapiens
cagaaaacccaccgagacggccacagacaacggagcaacagcgaagaagaggcagcaaaccccgagccgagaagcccggcc

SEQ ID NO: 156175 - RNA, 84 nt, Homo sapiens
ccgcggcgcggcgcgggcgccccggaagcagcggagaagccgaggcgcggggcacaagcagcaagacagcgcgcgggccacaga

SEQ ID NO: 156176 - RNA, 70 nt, Homo sapiens
ggcacagaaaggagcacggacagaggggcaacgcaaacgggggagacaggaaccaggacaacaagcagac

SEQ ID NO: 156177 - RNA, 76 nt, Homo sapiens
ccggccaaagacacaagacagagcccccaagcccccgagacgcgcagcgcggaccgccgagcaccgaccccgcagc

SEQ ID NO: 156178 - RNA, 78 nt, Homo sapiens
gcgagcgcaccggagacgccgaaggaccggaggaggaccacgccgcaccccacaaggaccgacagcccccaggaagga

SEQ ID NO: 156179 - RNA, 72 nt, Homo sapiens
ggcagcccgagacccaccagagggcgccacaaacggcggaacgcagggcgcaccaccagagacccaacacac

SEQ ID NO: 156180 - RNA, 79 nt, Homo sapiens
ccgaagacaagggacacagcaacaacaagggggcgcaaaagacgagagacagagacaaaaacaaagcacgccgcaaaaa

SEQ ID NO: 156181 - RNA, 80 nt, Homo sapiens
cagaagagcgaagcgaggacacacccaggaaaagaccaggacggacaagcacagccggaagggaccaggacaagccggac

SEQ ID NO: 156182 - RNA, 70 nt, Homo sapiens
gacgcaggcgcacggagacccgccggcacaacccccagccacaacgcgaaccgggcggacgaaggaggcg

SEQ ID NO: 156183 - RNA, 75 nt, Homo sapiens
ggacacggagaggaaggacgagaacacacaagaaaaacccggggaaggcaagacggggacgccagagagaacaca

SEQ ID NO: 156184 - RNA, 70 nt, Homo sapiens
aaacggaccagaccgaccaccaaaagggaacgcccgcggacggcagggcgcgacaagaagcgcccgcccg

SEQ ID NO: 156185 - RNA, 74 nt, Homo sapiens
gaaccaagcagcagaagaagcgccaagaacaagaaaaggaccaggcgacgagagaccccaggggagcaaaggcc

SEQ ID NO: 156186 - RNA, 64 nt, Homo sapiens
cagcccaaccagacacaaaaacgagaaggaagacacggaggaacaaagccccagcccaggcgga

SEQ ID NO: 156187 - RNA, 56 nt, Homo sapiens
agacccggacggaacaggcaaaagagacccaaagacaggaccacgcaccagcagag

SEQ ID NO: 156188 - RNA, 66 nt, Homo sapiens
acccaggaacaaaccgggggcaaggccaaaaagaagaaaggacgagaccgaagagaaggaaggaca

SEQ ID NO: 156189 - RNA, 97 nt, Homo sapiens
gggcacgccgaccgagagacccaggcacccagggaaacgagaggggagaagaggagcaagcaaccacccaagcaggaccacaaggcacaggcgaaac

SEQ ID NO: 156190 - RNA, 78 nt, Homo sapiens
gaccggcaacagggcggcggggaaaaggaaggaggcagaaagggagccccaagagagagggccaagccaaccggccaa

SEQ ID NO: 156191 - RNA, 72 nt, Homo sapiens
gaggacaccccagggccaagaaaagagaaccaaacaccccaaaggcccccggcgaaaaggaagaaggaaaca

SEQ ID NO: 156192 - RNA, 72 nt, Homo sapiens
cgggaagagaacaaaaaacaccacagacacgcacaggagaagggcccggagagaaagaccacagcaagacca

SEQ ID NO: 156193 - RNA, 67 nt, Homo sapiens
cacacaccgaaacccacggagaaacaggcgccaaacgacagagaccccaccacgggccggcgaacac

SEQ ID NO: 156194 - RNA, 47 nt, Homo sapiens
agaaggaccaagaaccaggaagaagaaccgcagagaggaaaggcgcc

SEQ ID NO: 156195 - RNA, 86 nt, Homo sapiens
aaagccggcggacaagcaaggcaaaggaagccggacccggccacaagaccagcacaaggacaggagcccaagaagaggccgaaacc

SEQ ID NO: 156196 - RNA, 78 nt, Homo sapiens
agagagggaagagacagccagcacaccccgcgagcaagaagcagaagaaggacaccccacaccgaaacagaccccaga

SEQ ID NO: 156197 - RNA, 54 nt, Homo sapiens
ggaaacggcgaccaagggaaggaaacagaaaaccaacagagacaacaaagagaa

SEQ ID NO: 156198 - RNA, 39 nt, Homo sapiens
acccggacagggcaggaaacagagagacagggcaccgga

SEQ ID NO: 156199 - RNA, 72 nt, Homo sapiens
cggacgggcacgggcgaccggcccgcgagggcacaccggccaacgacccgggcacagcacccagaaggcccc

SEQ ID NO: 156200 - RNA, 79 nt, Homo sapiens
cagcagagaccaaaggcagggcaaggaaacggccacaagcccccacagagagcacacaaacaaagcgaaaccacggaag

SEQ ID NO: 156201 - RNA, 69 nt, Homo sapiens
gcacaaaaccaaggccaagcaaggagggcaccggaaaaagaaaaagcaaaacggcaagcaaaccgcggc

SEQ ID NO: 156202 - RNA, 62 nt, Homo sapiens
agggagaagagcagagacgagaaccgcagaccaggcggccaagaccaccaaagagggccccc

SEQ ID NO: 156203 - RNA, 80 nt, Homo sapiens
gccgcccggcccgggcgcccgggcgcccgcaggcggcaggaaccccccggcgaaggcgaaaacaagagccagaaagaaga

SEQ ID NO: 156204 - RNA, 84 nt, Homo sapiens
aggacacacagaggggcagccaaaagaagaaaggacgcggacagaagaaaagcccccccggacagaaacaccaaacacgaggga

SEQ ID NO: 156205 - RNA, 38 nt, Homo sapiens
ggagacaggaaaaggccaaagaaacccgcaaagaagcg

SEQ ID NO: 156206 - RNA, 55 nt, Homo sapiens
gcgcagaccaggcccgggccaccacccaccaagaacagaaggggcaggcacagga

SEQ ID NO: 156207 - RNA, 75 nt, Homo sapiens
gagccaccggacgagagccagagaccacgggcagcggaaaaaagccaccgaaggcagccaaaagaggccagaaaa

SEQ ID NO: 156208 - RNA, 69 nt, Homo sapiens
gaacgcagcaaggacaaaaaccgagccaaaccgacacaaggaaaaaacacgccaggcaagcaggaaagc

SEQ ID NO: 156209 - RNA, 78 nt, Homo sapiens
gcgccgcgcccggcggccagggaccccccccgcgccgcacagccccgcgcccgagggcccgacgggccaggagggggc

SEQ ID NO: 156210 - RNA, 83 nt, Homo sapiens
cccgcaaacgaaaaagaacgacagagcaaccaggaaagaagaggccggggggaaagacagcccgcagccaacgcaccccagag

SEQ ID NO: 156211 - RNA, 108 nt, Homo sapiens
cgcgaaggccgggacccggccccggcccacaggggggggcaaacccgagagaacggggggccaaagggcgagggcacaaaaaaccacaccccccaccgaggaagagcg

SEQ ID NO: 156212 - RNA, 51 nt, Homo sapiens
gcgccggccgagaaggcagaggcgaccgagaagggcggcccaaaacgacag

SEQ ID NO: 156213 - RNA, 83 nt, Homo sapiens
ggcggcggggaccgccagcccagcgaccagcaggccaaacacacaggaacgccagaccccagccgagggaggcaacagcaaag

SEQ ID NO: 156214 - RNA, 80 nt, Homo sapiens
cggcaagccccacacgcccgcaagggcccgggagcgggggagccagcccagccggaccgcgggagcccagggcaggcggg

SEQ ID NO: 156215 - RNA, 77 nt, Homo sapiens
acagaagcagaggacgccagacaacagcagcgagagagaaaagaaggaaggcaggacgggcaagggcaccacccaac

SEQ ID NO: 156216 - RNA, 79 nt, Homo sapiens
gggggcggcacccggcaaaggaagggcagggaagcaaagagcacccgagcccagcaggcaagcagccggcaccaagaca

SEQ ID NO: 156217 - RNA, 53 nt, Homo sapiens
gaagacaacgcagcggcagaaacaaggcgcagcgccagagccggcagggcggg

SEQ ID NO: 156218 - RNA, 76 nt, Homo sapiens
ccggacccgcccagcagaagaagagaggagggagaacacagaaaccggccccaggggcaggggaagaaccggagcg

SEQ ID NO: 156219 - RNA, 84 nt, Homo sapiens
aggagaggccggacggcgcgggcgccggcgaggagagcccgcggcgcagggagacccgaccaccggaagccacggcccggaccc

SEQ ID NO: 156220 - RNA, 69 nt, Homo sapiens
cggcgagaccagaccaggacaaagaagcccacagcaagcagccgcccgacccgccccgaaccgaccgcc

SEQ ID NO: 156221 - RNA, 70 nt, Homo sapiens
agagcccggcagcgacaagcccagccccgcaaaccggaaggacccacagagacaccgcaagaacaggaca

SEQ ID NO: 156222 - RNA, 76 nt, Homo sapiens
gcaaaaaaacaagaagggaggagaaggaggcagagaacgagggacaagagccggacagaagagagaggggagacag

SEQ ID NO: 156223 - RNA, 76 nt, Homo sapiens
gcaccacgcccggggggacgcccccaccacaccgggagcacgcagaggggcgggcacgcacgacagcgggcagagc

SEQ ID NO: 156224 - RNA, 53 nt, Homo sapiens
cccgaccacacacaccaggaaaaaggacgagcaggaccaggagggaaagggag

SEQ ID NO: 156225 - RNA, 77 nt, Homo sapiens
ggcagggcaaggaaacggccacaaggcgaaccagacacgcaagaaaacaggaagagcaagaaaacaagcgaagaccg

SEQ ID NO: 156226 - RNA, 60 nt, Homo sapiens
aagacaaacagacaagacaccagaaagacagcggagcccccgggccggaggcgggagcgc

SEQ ID NO: 156227 - RNA, 83 nt, Homo sapiens
gcggcgggcaggccccggggcaaaggagaaggggcagaccaacaccacccagcaaaaaccccgacgaacgcgccagggagcgc

SEQ ID NO: 156228 - RNA, 68 nt, Homo sapiens
cgacagcccgcaaaacgaaagacgaggccggaagccacaggagaaaggaggagcaaaccgggagcgac

SEQ ID NO: 156229 - RNA, 84 nt, Homo sapiens
ccgccccgcgcacccacaccaggaggcaccacagcgaacacaacccccggggccggccagaacacagggccccccagcccacca

SEQ ID NO: 156230 - RNA, 71 nt, Homo sapiens
acggcagcccgaagccaacagaaaaaacaagaggccagaaaagaggagacagagcaccgacagagaaacga

SEQ ID NO: 156231 - RNA, 70 nt, Homo sapiens
aagacgaagggaaaaaagcagagcccaggagaaaccggacgcgacggggaagaagacggcacgggacccc

SEQ ID NO: 156232 - RNA, 83 nt, Homo sapiens
agaaagagacccggggaaaccggagggacccggcccggaggaagaaagccaaggagggacgcggcagagcgcaagccgacacg

SEQ ID NO: 156233 - RNA, 76 nt, Homo sapiens
gggggcacccgggaagaacacagcccgggaaagcacagaaagccaaaagacacccagcagaaacaagaaaaacaac

SEQ ID NO: 156234 - RNA, 53 nt, Homo sapiens
aacacaggacggcgggacggagccgacccacccggggaaggacccccacaccc

SEQ ID NO: 156235 - RNA, 71 nt, Homo sapiens
agggccaaggaagaaagaagagaacaaagaacgcacaaggaaggaagggaacacggacgacgagacacgac

SEQ ID NO: 156236 - RNA, 81 nt, Homo sapiens
cagaccaacaaccccacgaggccgaggaacccaaggaccagagggcagcggcggccggacaggcccgggggcagccaaaag

SEQ ID NO: 156237 - RNA, 77 nt, Homo sapiens
caacacgcccagaacagcggaacagcggaaccggagacaggcagacccaaagagaagagaagggcgccccacccaaa

SEQ ID NO: 156238 - RNA, 70 nt, Homo sapiens
gcccaagacacagaccaggcccagcagggcggaaggcacaaagaaaacaccccggaagaaaaaagaaaaa

SEQ ID NO: 156239 - RNA, 83 nt, Homo sapiens
gacgagaacggcgcgggggacaccagaacgaggagacgagacgaggccggcaacccacaggcggaggggagcgaccgcgagac

SEQ ID NO: 156240 - RNA, 83 nt, Homo sapiens
ccagcagggacacacggcagagcaggccaagccagaaaggagccacacgaccccgccagcgcagaaaccaaagagccaggcga

SEQ ID NO: 156241 - RNA, 68 nt, Homo sapiens
ccgaaaaaagagagggggggaccgaccgcaacagaacggacccgcaagggcaagagaacccccaacca

SEQ ID NO: 156242 - RNA, 75 nt, Homo sapiens
ggagcgcgaaggccgggacccggccccggcccacaggggggggcaaacccgagagaacggggcgaagcgggagcg

SEQ ID NO: 156243 - RNA, 58 nt, Homo sapiens
aaacagccagaacccaagccaaaacacagcgaggagaaacaggagggcaaacgcagac

SEQ ID NO: 156244 - RNA, 80 nt, Homo sapiens
gcgcgcccggcccgccccccgcaacgagaaccaagagaaccagagagcacagagaaagcgggaaacggccaaacagaaca

SEQ ID NO: 156245 - RNA, 74 nt, Homo sapiens
ggaggacaccaacagagagacagaacagaaggggcaggcacaggagacacagggcgccccgcacgccgacgggg

SEQ ID NO: 156246 - RNA, 81 nt, Homo sapiens
cacacccggccccgacagcccaaccgccaaagggccccggggagcagacaccaccgcagaacacacgccgagcgagagcgc

SEQ ID NO: 156247 - RNA, 78 nt, Homo sapiens
cgagcggaagagaggaggcaggaggggaggaacgcaagcacaggaccagaaacgaaaggcagcagaagaggaaagcca

SEQ ID NO: 156248 - RNA, 77 nt, Homo sapiens
ccgcgggcgcgaccggaggcaggaagcgagagaaaagaagaaggcacaaaggaagccaaggagccaaaaaacccggg

SEQ ID NO: 156249 - RNA, 81 nt, Homo sapiens
gaagaagcagcggacccgccaccacacggcaccggggcccaccggccccgggccagcgccaggccgggccgccccaggagg

SEQ ID NO: 156250 - RNA, 73 nt, Homo sapiens
agcacagcagggcgaaaaaaaggcaacaaagcaaccaggcccacagcagcagaacaaaagcaaacccagaaag

SEQ ID NO: 156251 - RNA, 71 nt, Homo sapiens
cagcggcagcacccgagggccaaagccccacggaagggcccacggcagaagaaagacaacggccagccaaa

SEQ ID NO: 156252 - RNA, 74 nt, Homo sapiens
cggcggggcccggcaccaggaccaccgcggcagcacgcggcgggaaacccagacgacaaggaaggccaagggac

SEQ ID NO: 156253 - RNA, 86 nt, Homo sapiens
cccgaccaacgcacggagccgccaaggccacgagcagccagacaagacgaggcacgcagggacgcacaacgagagcagaccaaggg

SEQ ID NO: 156254 - RNA, 57 nt, Homo sapiens
agcgacacaccaagcggaggggacgccacgcaacgccggaagcccggggcggcgacg

SEQ ID NO: 156255 - RNA, 56 nt, Homo sapiens
aaggaggagaacgcaaacaccaggaggaagaagccagagccacgaggagggagccc

SEQ ID NO: 156256 - RNA, 82 nt, Homo sapiens
ggcgcagggagaacgcgagacgccggggacaccgccgaagcagcccgagggcaacacccgagaccggcaagagcccagagga

SEQ ID NO: 156257 - RNA, 66 nt, Homo sapiens
aagaggaccgaaaaaagagacagaagacccgacagcccaggagcccgccgacagaaggggaacggc

SEQ ID NO: 156258 - RNA, 86 nt, Homo sapiens
gccagccggccagggcgccccggcaaccacgagcccagccaacagcgccccggacgcaccagagccaggagacagggaaacgaaaa

SEQ ID NO: 156259 - RNA, 61 nt, Homo sapiens
aggaggggagcggggaagagcgggaccgccagcaccgccgcagcccgccgggagcgcccca

SEQ ID NO: 156260 - RNA, 68 nt, Homo sapiens
cgcgcgcaccgccgacccggaagaccgccgccgaaaagcgcccaggaagcggaaaaacaaaagagccg

SEQ ID NO: 156261 - RNA, 74 nt, Homo sapiens
ggaacgcacccggcggccccacgcagccacccaaaaacaggacacacagcaacgaagcaggggaggagggaaga

SEQ ID NO: 156262 - RNA, 76 nt, Homo sapiens
aaagcacaaaagcaacacagggaaaagccaaccggcccgaagaacacaggggacccccacccagagaccccaggag

SEQ ID NO: 156263 - RNA, 75 nt, Homo sapiens
ggccgccgcaacgggcaccacgccggccacccacgcccacggccaccgaagagaggaaccagagaaggagaaaca

SEQ ID NO: 156264 - RNA, 69 nt, Homo sapiens
cagcacgaaaacggaaagggaagggacggccggacaaacgaaacgcgacgcaagaaagaccagagggga

SEQ ID NO: 156265 - RNA, 78 nt, Homo sapiens
ggggcgaggaccgggacccggcccgcgccgggcccggccaggccccaccgccacaagcaggggaacaccgccaacccc

SEQ ID NO: 156266 - RNA, 66 nt, Homo sapiens
ggcacagggaagacaccaaccagaccaacaccaaagaagcgcaaaagagaaaccacaagaaggaag

SEQ ID NO: 156267 - RNA, 81 nt, Homo sapiens
cgagccggagaagcaggggggccaggaggggagaggaggcaggcccgcggcgacagaaggcagagagaggcagcagaaagc

SEQ ID NO: 156268 - RNA, 67 nt, Homo sapiens
gaccacagccagagcagccggcgaccaggcggccgcgcccgagggaggcgcaagagagcaaagcggg

SEQ ID NO: 156269 - RNA, 55 nt, Homo sapiens
cacaaacggggcggggccggggaacacacagacagccagcaggggcagaagcagc

SEQ ID NO: 156270 - RNA, 73 nt, Homo sapiens
cagaggagccgagccggaggggacaggggaccccagggcaggagggcgcccccagcgcccagccaccagagcc

SEQ ID NO: 156271 - RNA, 72 nt, Homo sapiens
cgaaacgaggacaaggcccgccgccagcaaagacaaccagacggcacccggccagcgccggggaggcagaag

SEQ ID NO: 156272 - RNA, 77 nt, Homo sapiens
cccagccgcgccagcgcccggcgccgcgcgccacccccgaaagacgaccccgacgcaggccaggagccgcggacaga

SEQ ID NO: 156273 - RNA, 74 nt, Homo sapiens
ccaggaaccccaaacgcccccgccacggccgccgccccgaaggcacagcagaggggagcccagggccgcaacag

SEQ ID NO: 156274 - RNA, 76 nt, Homo sapiens
aaaggaggagagaccccggacgagcaaggaaacaggaaaagcaaccacgccaaccagccgaagcgccgggagcgcc

SEQ ID NO: 156275 - RNA, 110 nt, Homo sapiens
aaaaagaagaccacagacgcaacaaagagccagggccaaagggcggagcacgaaaggaccagcccaggagaggaaccgagaacacgacacccgcacagaacaaagaacgg

SEQ ID NO: 156276 - RNA, 83 nt, Homo sapiens
accgacgcaaccggcagcagcgcgccgccgcgcccagccaccgccccccccacgagcacagaccagccaagaaaacgaaaaga

SEQ ID NO: 156277 - RNA, 73 nt, Homo sapiens
acgcagaaagagacacaccgacgaaaaaccaaaccgacaccccacaaaaaagcacaaaaacagccgcggaggc

SEQ ID NO: 156278 - RNA, 69 nt, Homo sapiens
agcgagggccagaacacagccagaccgaaacagggcgcaagagcagagaagaccaagcacgggcgccgc

SEQ ID NO: 156279 - RNA, 79 nt, Homo sapiens
ccccacccagacgaagacagcccggacaccgacagcacagacagaacccgcaccagaccagagaagacacacaacaacc

SEQ ID NO: 156280 - RNA, 75 nt, Homo sapiens
gaagccgcgccccgcaggcacccgggcccccgcccagacgagacgagacagaccggacgggagggacgggaggga

SEQ ID NO: 156281 - RNA, 68 nt, Homo sapiens
ccagcggccacggaggggaagagaagcccagacacgaagaagagagccagagcacaagaaagacaccc

SEQ ID NO: 156282 - RNA, 76 nt, Homo sapiens
aaaagggaaagagacggagaaaagaagaacacgcccaaaacgacgaacaggaaaagaaaaccaaaggaagacgcaa

SEQ ID NO: 156283 - RNA, 52 nt, Homo sapiens
agcccccaagaggggaacagccccacaccacacaccccccccggcggagcgg

SEQ ID NO: 156284 - RNA, 49 nt, Homo sapiens
gcagggcgcccccgacagcagaacaccgaacaggggacccaagccagag

SEQ ID NO: 156285 - RNA, 75 nt, Homo sapiens
gaaaagcggagaaggagccaaacccaaagaggaagcacagaggccgggaagaaggagggacacagcagcgcggag

SEQ ID NO: 156286 - RNA, 80 nt, Homo sapiens
gcgggaaaaggagagccggcgccagccaggggaacggcaccgggagaggaggccaagcggaggaccgagccccccagagg

SEQ ID NO: 156287 - RNA, 82 nt, Homo sapiens
ccaccgggcggaggcacagcacgggcgcgggcaagacacacggacggaacgagccagcagaaaccagggaaaagaaccccac

SEQ ID NO: 156288 - RNA, 63 nt, Homo sapiens
gaccccagccaaggagacacacacaggggcgcaagacagcgcaccacgacaaagaagagaaaa

SEQ ID NO: 156289 - RNA, 93 nt, Homo sapiens
ccgccgccacaaaggcagcagcacgggacgcacggcccggggggagacagccacgggaagggacgaacagcggggacgccccagcagaccgcc

SEQ ID NO: 156290 - RNA, 51 nt, Homo sapiens
accagagaggaaaagccgaggggagagcaaaagagacggaaaaggacacac

SEQ ID NO: 156291 - RNA, 81 nt, Homo sapiens
cgcaacaaccagcagcacagaggggacccagaaagaagcacaaaacaaacgacagcagcagagaaacacgcaaagccgagg

SEQ ID NO: 156292 - RNA, 79 nt, Homo sapiens
ggccacaagggccgcaagccccggggggaacgccaagcacaacggcagcagaacacccacaggcaagaaaggaaggggg

SEQ ID NO: 156293 - RNA, 74 nt, Homo sapiens
aaggaccaagaaccaggaagcaagaaacagaaagcaagagaagggagaaccgaaagaagaagcaaaagcggaga

SEQ ID NO: 156294 - RNA, 69 nt, Homo sapiens
aaaacagcaggacacaaaggccgccgcagaaccacaggccgaggaaacgagacagaacggcgcgacagg

SEQ ID NO: 156295 - RNA, 79 nt, Homo sapiens
aaaaagaacccggagaaacgaagcgggacggagggcaccccagcagggacgggcagaccacacaagcgacgaaaccgac

SEQ ID NO: 156296 - RNA, 69 nt, Homo sapiens
aagcccaaaacacacccgcccggacggccggagccaggcccaaggggcagagaagaacggagagaacaa

SEQ ID NO: 156297 - RNA, 44 nt, Homo sapiens
gacccagaaggcgacaagcccagagcacgccaggaaagagagaa

SEQ ID NO: 156298 - RNA, 64 nt, Homo sapiens
cgaagagacccaaagaaacaaaagaaaccgaaaaacaccgcccggacacagaggagcgccagcc

SEQ ID NO: 156299 - RNA, 39 nt, Homo sapiens
gagggaggaagacagccagcagccaggcggcccgggagg

SEQ ID NO: 156300 - RNA, 67 nt, Homo sapiens
cggggggaggacccgaccaggaccggacagaaaagcgaggagaaagcccgggagcgaccgccggacc

SEQ ID NO: 156301 - RNA, 76 nt, Homo sapiens
ggcccgaggcgcaccaagggcgaaggagccggcccaaggacccgaacacggaagaaagacacgcaggaggccgcgg

SEQ ID NO: 156302 - RNA, 75 nt, Homo sapiens
caaccccccgaagcaccgcgccggggcccagagcccaggggggcgcagagcaggcaacacgcccacgaccccaca

SEQ ID NO: 156303 - RNA, 72 nt, Homo sapiens
gacaccccaccaacacgggggcaaggaggagccccggaggaggaggaagaggaggaaggggggaggaccgga

SEQ ID NO: 156304 - RNA, 78 nt, Homo sapiens
aggcacgaacaggggagaagcagaccgcaccaggcgggaccccgaaaaagcccaaacagacaggcacggaggaagcag

SEQ ID NO: 156305 - RNA, 73 nt, Homo sapiens
aagcgaagcgaaccccacaaacgggcgcgagaaaagaggcgaagcaacccgcaaaagaaagcgaacggcaaca

SEQ ID NO: 156306 - RNA, 79 nt, Homo sapiens
cgaaacgaaaaacaaccaacccggagcgaaaacgccgcagaaggccgccaggacagcgcaaggggaacagcacccagga

SEQ ID NO: 156307 - RNA, 70 nt, Homo sapiens
agacacgagaggggcacagcacaggcaaagacacccgccacgggcccccacgaacgaagacgcccggaag

SEQ ID NO: 156308 - RNA, 76 nt, Homo sapiens
gaaggagagccccagcgaggaagcacaccaccaaggaacgggcgcagcgagagggcgccggccgagcccgggaaaa

SEQ ID NO: 156309 - RNA, 106 nt, Homo sapiens
cggggagggggggaccacgaaaggagcaagagcaagacaccggacaccgagggcccccaaaagccacaaacccccccacgacaccgaagcagcgacggcacagcgg

SEQ ID NO: 156310 - RNA, 73 nt, Homo sapiens
cgggacccgacggccccgcagccccgcggggccggcgagcggcccaggacagccagacaagaccccaacgaag

SEQ ID NO: 156311 - RNA, 75 nt, Homo sapiens
ggccaaagcccaaaccccaggccaagcaaccaccagcagcccccagagcggaacacagcccagagaccgagacgc

SEQ ID NO: 156312 - RNA, 58 nt, Homo sapiens
gggccagggcagggccacccaggaccagaggacgcaccagaagacagggcaaccagaa

SEQ ID NO: 156313 - RNA, 78 nt, Homo sapiens
cgcgaagaagggaaacgaacaaaggccaaccaagccccgagcagacccagccgaaaccaaggaaggggcaaacagaaa

SEQ ID NO: 156314 - RNA, 91 nt, Homo sapiens
cccaggccccagccgcgccggcccgggcacgcagcccacgcccagaggaacccaagacagaccaggagaggagcagccggaaagcaacgag

SEQ ID NO: 156315 - RNA, 74 nt, Homo sapiens
gccgcgaaacacaacggaggagcgagcgacagaaaccaacccaagagcgcccagcggaaaggcaaagaaaagga

SEQ ID NO: 156316 - RNA, 74 nt, Homo sapiens
gagaagcgcggagccccaagaaaacgaggaacacgggagcagcgacaggaggacggggacaaagaccgaggaac

SEQ ID NO: 156317 - RNA, 84 nt, Homo sapiens
ggagggaggaaggggcaagagggggaaagcacaggggaggagaaggcagagcccccccaggcagaagcccgagcgggaaccagc

SEQ ID NO: 156318 - RNA, 99 nt, Homo sapiens
ggaccgccgcacaccagcgaggcccaccagccggggagccagcgcaggaccagagaacacccgcgagggcccaggccgaaacaaccagagagcacggga

SEQ ID NO: 156319 - RNA, 80 nt, Homo sapiens
gggagcgggaacgggcgcaaccagcgacacaggaagaacagggcgaggacgagggcagccaaagcaggcacaggcaaggg

SEQ ID NO: 156320 - RNA, 77 nt, Homo sapiens
ggcgccggcggacgcacccggacgcaaagcgcacggaagaacacagcccggccagcgggccgaagaccgaccaggag

SEQ ID NO: 156321 - RNA, 79 nt, Homo sapiens
aacgacgcggcgcgcgcggacgaagagccccccccccaacaccgcgacacgcaggccccggccccaacaggcccgcgcc

SEQ ID NO: 156322 - RNA, 54 nt, Homo sapiens
agaggcgcccaggagcacagcggcacggccagcggcccgcgcgccgggcggcga

SEQ ID NO: 156323 - RNA, 72 nt, Homo sapiens
cgcacgcggacggacacggagaccgggcggagccggacgagcgcgggcgggaaaacggcacaaggcgacgag

SEQ ID NO: 156324 - RNA, 67 nt, Homo sapiens
gccggcgcgcacaagggcagagggccagagcccagaaaagagcccaggcagcgcagacgaaacagcg

SEQ ID NO: 156325 - RNA, 84 nt, Homo sapiens
acccccaagagagccgcagccgccagggacgggggccaccggacagacagagcgccgccaccgccgccaccacggagcgagaag

SEQ ID NO: 156326 - RNA, 69 nt, Homo sapiens
aaggcggcagagggcgagacccaacggccggcccgcacccagcaggcggccagccgaagccgcccgcag

SEQ ID NO: 156327 - RNA, 59 nt, Homo sapiens
acagacccaccaccgggagcagagagccagacaagaacaaccgcaagagacaaacagaa

SEQ ID NO: 156328 - RNA, 78 nt, Homo sapiens
gggccaaagaagaggaggaaaacagaagacaccaaaagccaaccagccggaagaacaccggaagaacaggcaggcggg

SEQ ID NO: 156329 - RNA, 55 nt, Homo sapiens
gaggaggcgaagcgagaggacaggaagaacgagacgccaaacaagaagaaggaac

SEQ ID NO: 156330 - RNA, 107 nt, Homo sapiens
cacaggggccgaaacacgacaagaagagaacgggagcagcagccagagaacagaggaacaaaccacgagcacccaaggcacggaccacccgcaccccacagagagaa

SEQ ID NO: 156331 - RNA, 73 nt, Homo sapiens
gcacagaggcacacacggaccccccaaaggggaacaacggagacggagaagaaccaccaagaaagaaccgaca

SEQ ID NO: 156332 - RNA, 75 nt, Homo sapiens
acacaagaagaaggaaggcaggacagagcgggagccaccagcgccaaagggaagccaggagcccgggggcacggg

SEQ ID NO: 156333 - RNA, 73 nt, Homo sapiens
ggaccccaggcccagccccggaaaaagagaacggcaaagaaagcaacgggggaagaacaaggagcgcacgagg

SEQ ID NO: 156334 - RNA, 75 nt, Homo sapiens
gcaccagcggaaaggagcccgccggcccaaacgcggacacagcaacaagagagcggaagccggcagaagaagacc

SEQ ID NO: 156335 - RNA, 69 nt, Homo sapiens
gaaacgcgaagaaaaacgcgggggacacccagccacacgcggagaagaggcgcggcacgaaacaaggcc

SEQ ID NO: 156336 - RNA, 38 nt, Homo sapiens
gcagcccaggacgcaaaaggcaaagcgcggccgaaaac

SEQ ID NO: 156337 - RNA, 79 nt, Homo sapiens
ggacggcgaggaccaaccggggcccaaagggaccaaaagagcacccacccgcgagacccccaagagacaaaagaaggga

SEQ ID NO: 156338 - RNA, 76 nt, Homo sapiens
ccaggccccgcgccgcgcgcccaagccggcggacggcaggccccaggagaaccggggcaagagacggcagacaaac

SEQ ID NO: 156339 - RNA, 50 nt, Homo sapiens
gagggcggaacggcggaagacgacgcaccaaacccccacggacagcccca

SEQ ID NO: 156340 - RNA, 74 nt, Homo sapiens
acaccgcaaggccggaggaacaagagacgaaaccagcaccgaggccgcccccaccgagaggacaccagagcagg

SEQ ID NO: 156341 - RNA, 81 nt, Homo sapiens
cggaccgggcgccgcgagccgcccaccggcgccacgcaagggcgaggcagccccaaacaccggggaagaaacgagcgagcc

SEQ ID NO: 156342 - RNA, 78 nt, Homo sapiens
ccaccggcacccgcaagaagcaccagcaagggccccagggcaccccgcgccgccgcgggccccgcgccccaccgccca

SEQ ID NO: 156343 - RNA, 78 nt, Homo sapiens
gacaccgaaaccgggagagggccagacgcgccaggacccacaaccccagcccggccgaccgacagaagaccggcaggg

SEQ ID NO: 156344 - RNA, 79 nt, Homo sapiens
ccggccgcccggagccgcagacccccggacggagggacgggccacgcaggggcccagcaggaggagcgagagagcccag

SEQ ID NO: 156345 - RNA, 71 nt, Homo sapiens
gaaccacccagcagagagcaaccgaaggacaaaccaccccgacccagggcaccccacaacgaaaccccgaa

SEQ ID NO: 156346 - RNA, 47 nt, Homo sapiens
aacaaagaagaccaaaaccacgcacaagcggagagacggagcaccgg

SEQ ID NO: 156347 - RNA, 55 nt, Homo sapiens
cgcccgcggcgcggggacccgcgagcaggcccaaagcacaagcgaccgccgaagg

SEQ ID NO: 156348 - RNA, 60 nt, Homo sapiens
gccgaccagcaggaaagcgcgacgagaaaccaaagaaaaaggaaacaaaggaacacagcc

SEQ ID NO: 156349 - RNA, 84 nt, Homo sapiens
cggccgccggcagcggccgcgccgcgccacccaagggagaagagcaaccggacacagaaggggaaggaaaccccaagcagcaga

SEQ ID NO: 156350 - RNA, 80 nt, Homo sapiens
agcgggggccaggagccggacaacagccagagaagagcaagagaccgaccaaaacacaaccgggagccaagaaacagcca

SEQ ID NO: 156351 - RNA, 78 nt, Homo sapiens
gcacagcgaggggccaaggcagaagaaacggagaagggcaaagccacagaaagcccgccccagacagggccccggccc

SEQ ID NO: 156352 - RNA, 81 nt, Homo sapiens
aggccgggcagagggaccacggggagccccacgagggagaccagcacgagccgggcgggacgccggaaggggcacaagaca

SEQ ID NO: 156353 - RNA, 82 nt, Homo sapiens
cagggagggcggaccgcccaaaccgccaagggaagggacgcaaaaaggaagccccacaaggaccaggcaaaacggaagagca

SEQ ID NO: 156354 - RNA, 75 nt, Homo sapiens
gaaccaggcggcgcgacaccaagaccaaagacacaggccaaacagaccgcaacagagaccaaggaaggggaagcc

SEQ ID NO: 156355 - RNA, 85 nt, Homo sapiens
aggaacggggcgagccagagagggcccacacgacagaaggacgacgccggcgcgaacaaaaagacccagaagaccccagacgggg

SEQ ID NO: 156356 - RNA, 101 nt, Homo sapiens
gaaccggcagcgaacaaggagaaagccacaacagggcggcaacaggggcgagaaaggcgaaccagaaaaggaaaacgggaccaacggggaaagggaaacgc

SEQ ID NO: 156357 - RNA, 55 nt, Homo sapiens
cccaagggccccagcccgggcccccaacgagacgcaaacagcagacggaagaccc

SEQ ID NO: 156358 - RNA, 88 nt, Homo sapiens
ggaagaccacaccccgggccagaccaggccgcccacaccagaagcagagccgcaaaaagggagacacacaggcggcggaccgaaaccg

SEQ ID NO: 156359 - RNA, 83 nt, Homo sapiens
gacaccaaacaccgccgccggaagccgacggccacgcggacggaggacgccggagcacagggcggagacaccgaaaccggcgg

SEQ ID NO: 156360 - RNA, 80 nt, Homo sapiens
agaaagcccggccagcagcaaaccgccacaaaaaccccggacagaggcacaggaagacaacagcacaagaaaggcccaac

SEQ ID NO: 156361 - RNA, 71 nt, Homo sapiens
cgaaagggcaagccacaaggcaacacgaacaggaccgagcacggaggagggcaccccccacagcgagaagg

SEQ ID NO: 156362 - RNA, 115 nt, Homo sapiens
aaggaccaggcgggcacgcggcagagggcaccacagcggcgggccaggcgaccgggcccagggagggaggggaaaaaggcccgaacccccccaggagaaccaccgccagaagaca

SEQ ID NO: 156363 - RNA, 58 nt, Homo sapiens
acgagggagaagcacaagacagcacagaggacgagaagaagcagaagaagcaaaaggg

SEQ ID NO: 156364 - RNA, 73 nt, Homo sapiens
cagaaacgaccgcaaaggcacccggggcagaccggaccaagaaggagcgacagaaaagcagaaaggcagaaca

SEQ ID NO: 156365 - RNA, 64 nt, Homo sapiens
aacgaccggaccgcccaacccaggcccacccaaaaacagcgggcaaagacacaaagcgcgcagg

SEQ ID NO: 156366 - RNA, 65 nt, Homo sapiens
caaggaagggcaaacaacggaagaccagaaacaccaagccagcaccagagccggagagacggagc

SEQ ID NO: 156367 - RNA, 75 nt, Homo sapiens
cgagaccggcgccacccgcaggcaggaaagggaagcccccaggggcgcggagaacgcagcagggccgacacccgc

SEQ ID NO: 156368 - RNA, 68 nt, Homo sapiens
agaccaaagccacccaaaaagagcaaacaaccggggcagacaacagaggccaacagacccacacccag

SEQ ID NO: 156369 - RNA, 86 nt, Homo sapiens
ggagaaagggaaaaggcagagggaaggagagaacagaggaaccaggagacagagcccaaaggaaacgaaacagccacaccacaaag

SEQ ID NO: 156370 - RNA, 63 nt, Homo sapiens
cgccgcagaggcgagagcacgcagagacaccagcagaggagcagacaaaccaggcgggcaacc

SEQ ID NO: 156371 - RNA, 70 nt, Homo sapiens
acacaggcacaccaaggggcgcagggagcaggagaagcggagcgaaggggcgggcaggcagaggcggcgc

SEQ ID NO: 156372 - RNA, 84 nt, Homo sapiens
cgagcgcgacccgggccgcccggaggaggagggggagaaacagcccggcagagggaccgccaggaaaagcgggcccaagcccaa

SEQ ID NO: 156373 - RNA, 71 nt, Homo sapiens
gaagaagagagacccagacggggcgaagagaggagaagcgcggcgaggagaccaccaggaagaagccacga

SEQ ID NO: 156374 - RNA, 80 nt, Homo sapiens
ccaagagggacccacccggcgggaacacaagccgagaacagccgagcccagccccacagagcccagcccaagcgaaggcc

SEQ ID NO: 156375 - RNA, 82 nt, Homo sapiens
cgcagacacggaccgcgggccagccgccaaagaccccgccggagcgagagccgcggcagcccaagcgaacaccgaagggaga

SEQ ID NO: 156376 - RNA, 74 nt, Homo sapiens
gcgccacgccgcccggaccgcacaaaggagcgcgccgccgccgccgccccccccccggaacaggaggcccggac

SEQ ID NO: 156377 - RNA, 81 nt, Homo sapiens
cccagccacccacaaacagagagaaggaaccacccacgcaggcagcacaggccagcccaagaaccaggaaggcaaagaagc

SEQ ID NO: 156378 - RNA, 88 nt, Homo sapiens
ccgagaccggaccgagagcggaccgagagcgcgaaacgcacgagaaggagcaggggagagaagacagaagaggggagaggcagggagg

SEQ ID NO: 156379 - RNA, 83 nt, Homo sapiens
ggagaccagcgccgggggcaggaggacaggaggagcccagagcggacgggcgaacagcccgggcaccggcgagggggagaagc

SEQ ID NO: 156380 - RNA, 79 nt, Homo sapiens
caaaccacggacgccacagccagcacgagcgcgacccaccaaggaccgcgacgagaagagcaaaacggagcccaaaaaa

SEQ ID NO: 156381 - RNA, 76 nt, Homo sapiens
gccacaacacggccgcacggcccgccccggcgggcagagaccagcaccggagaaggaaccgaggaggcgcaaaggg

SEQ ID NO: 156382 - RNA, 75 nt, Homo sapiens
agggaacagcggacaagaagaagacagaacgcccccaccaccgcaaacaacaaccggagcgagcgagcagcggga

SEQ ID NO: 156383 - RNA, 67 nt, Homo sapiens
cccaagacaagaccaaaagaaagaaggccgagaaagaacaccacaagaagagggaacagaaggaaaa

SEQ ID NO: 156384 - RNA, 81 nt, Homo sapiens
gcgccgcccggcgccggcccgcccccgcagcagcgccaggcccagcccccggacacgggcggccggaaggcgaggccccgc

SEQ ID NO: 156385 - RNA, 77 nt, Homo sapiens
cggcaggagagaagcgaagcaggccggggccgaccgccacacagccagggacgaggaaacagaaaacaacgaaaaca

SEQ ID NO: 156386 - RNA, 71 nt, Homo sapiens
acagaccgccacaccagaaagagaaggaagaggaggacgcagcagagagggcaggcgcaagcaggggagag

SEQ ID NO: 156387 - RNA, 55 nt, Homo sapiens
ccgaaggacgacccagaagacaggaagagggcccaaccaagacgcccaaagcccc

SEQ ID NO: 156388 - RNA, 86 nt, Homo sapiens
gggaggaggaagaggcggcgggggcgaggacagagcgggagccaccagcgccaaagggaagccaggagcccgggggcacggggaga

SEQ ID NO: 156389 - RNA, 70 nt, Homo sapiens
cccggcggaccacggccgcagcacggacgaccgaaggcaccggaacaggcagcacagcaaaacagaaaag

SEQ ID NO: 156390 - RNA, 71 nt, Homo sapiens
cggcggggggcggacaccagccaagcagcggaacgacagagacgaacaaaggaggagaaccgcaagagaaa

SEQ ID NO: 156391 - RNA, 78 nt, Homo sapiens
gaaggggcacaagcaagcagcaaagcacacaaggaggaccgaacaaaagaagcccaagaaagaaaagaaaaagaaaga

SEQ ID NO: 156392 - RNA, 65 nt, Homo sapiens
ggagccagacacgaaacgggagcaagccggcgaaggcccacgcgagaccgggacaccgaggcggg

SEQ ID NO: 156393 - RNA, 76 nt, Homo sapiens
ccagcagcaaaaggggcaaggggaaaagacagcaccaggacaaaagaagggcagcacaaaggaaagccccaaaccc

SEQ ID NO: 156394 - RNA, 72 nt, Homo sapiens
caacaaacagaagaagaagcaaccaaggaagaagcaaagcacacagagaggaaacgccaaaagaaaacggag

SEQ ID NO: 156395 - RNA, 79 nt, Homo sapiens
ccggagccggaccgacccgccgcacaccaaagacaccagaaacagaacggaggccggaagcgaccgaaacaccaaacac

SEQ ID NO: 156396 - RNA, 78 nt, Homo sapiens
cgaccaagaccacagggcacaggccagacgaggggagaaaaccagcagagacccagaagaagcgaaggacacacgagc

SEQ ID NO: 156397 - RNA, 76 nt, Homo sapiens
cggggacgaaacaaaaagaccggaagcgagaccacagaaggagaccggagccgccccgccagaaagccaggggcac

SEQ ID NO: 156398 - RNA, 62 nt, Homo sapiens
gaagaaacaaaaggccaccgaagaggcacaaagccacgccgcaacggcaagggaccgccaac

SEQ ID NO: 156399 - RNA, 81 nt, Homo sapiens
agaggcagggcgcgagggcgggggcagcggcagagcggggacgggaaagagggcagaagcagcaagaaaaggccaagagag

SEQ ID NO: 156400 - RNA, 80 nt, Homo sapiens
cgaagcagccaccaggaggcgcaggcacaaggagcagcaacgaaaagacaccacaagaaaccgggagaagcagaaaaccc

SEQ ID NO: 156401 - RNA, 106 nt, Homo sapiens
ggaaaaaggcaaaacacgaagacacaggaaaaaggaaaaacaaacgcaagcaaggaccagcccaggcccacaggggcccccccacgaaaaagacacaagcacaccc

SEQ ID NO: 156402 - RNA, 71 nt, Homo sapiens
aggcacggaccgccagcgcggagcaggagaaacagaaggaaggaagaccgggaggaacagagaaaagaacc

SEQ ID NO: 156403 - RNA, 58 nt, Homo sapiens
gaggggccgggaacggcgccggaggaccagacccaggagggagcgacaaggcggaaca

SEQ ID NO: 156404 - RNA, 78 nt, Homo sapiens
cggaccaggcacgcacaaaaagggggggaccaggcgcagcagcgacagaacaagcggcgccagaaaggaggaaacgcc

SEQ ID NO: 156405 - RNA, 78 nt, Homo sapiens
gcacggggcaaagagccaacccagaacaagccagaccaccccagggagaggaagaggaagaaaaccagaggcaccaga

SEQ ID NO: 156406 - RNA, 73 nt, Homo sapiens
cacaacaacgagaaaagcaaacaaaacaccaccgcaggacagagcacaaagaggcaggacaacacagggggga

SEQ ID NO: 156407 - RNA, 70 nt, Homo sapiens
ggacaaggagaaaaccacagggaaacacgcgagccgggaggggccccaggcccaagccgaagccgggagc

SEQ ID NO: 156408 - RNA, 75 nt, Homo sapiens
cagaaccagaagagggaaaagaaaagagcgcagaggcaggcgggccgggggcagcgagcccgggcaagagaccgc

SEQ ID NO: 156409 - RNA, 81 nt, Homo sapiens
cgcacccggccgcccggcgccccggggacgccgccccccggaggaaacggggacagccagacagaagagaagcaaggaggg

SEQ ID NO: 156410 - RNA, 88 nt, Homo sapiens
accccacgcggggggggccaagagacagggcacaccaaacccacgaggcgggaggcggcagaagcagccagaggagggcacaggcggc

SEQ ID NO: 156411 - RNA, 65 nt, Homo sapiens
cgcccgccggcagcgccgcccccagggagggagccgcagccgaggccccgggaccaaggacacgc

SEQ ID NO: 156412 - RNA, 75 nt, Homo sapiens
agccggggcaccacagagagcggaccagaaccgagaagcagcccgggaggagaaaccaacagaccccaccagaaa

SEQ ID NO: 156413 - RNA, 77 nt, Homo sapiens
cgaagcgagggcgaagcacgacacagaaggggaggggagggaaaggcccaggaaaaagaaccgccgcgcccgggaaa

SEQ ID NO: 156414 - RNA, 79 nt, Homo sapiens
gagggggggcgcgccggaaaccggagcgcgcagcagccaggggcacagaagggaccacaaacgagggccaagaggacac

SEQ ID NO: 156415 - RNA, 75 nt, Homo sapiens
gcggaggcggagcggcgccgagaacagcaagcccgagaagcaagaccgccccaaaaagcaagaaaagaccggagg

SEQ ID NO: 156416 - RNA, 73 nt, Homo sapiens
acaaagagaaagcgagggaagcggcacgaacaccaaggagggagggggggaacggaacccaggcgcaaagcgg

SEQ ID NO: 156417 - RNA, 77 nt, Homo sapiens
gcccaggcacagccgacgccgcggggggccccagacacgacgcccccggccggcccgggccgcgccagagcgcggcc

SEQ ID NO: 156418 - RNA, 49 nt, Homo sapiens
caacaagcggcagcaaggaccaggcaagcgcgccaagagacgcagcaaa

SEQ ID NO: 156419 - RNA, 74 nt, Homo sapiens
accaacaccaacacgagggcggcggaaaaagccgccacacgccaaaggggcaaaggagcagagaacgacaagcc

SEQ ID NO: 156420 - RNA, 82 nt, Homo sapiens
cgccaacccggacggacaacaccggggagcgcgggaaacaaagcaacgcgacaccagaaaaaccaacaaaagaaccccaaca

SEQ ID NO: 156421 - RNA, 56 nt, Homo sapiens
gacacaacaagaccaaccgaccggacacaggggcaccacagggagcagcagcggag

SEQ ID NO: 156422 - RNA, 69 nt, Homo sapiens
aggccaagaaggcagcgccggcccaggcggaggcaggggccacagccaacccgaccccggacaaggacc

SEQ ID NO: 156423 - RNA, 73 nt, Homo sapiens
agacaacaggaaggaaaacaggacgaaagacacccagcagccagccgcagcaggccgccgacgacccagccag

SEQ ID NO: 156424 - RNA, 75 nt, Homo sapiens
gggaacaagaggccacgcagagccacgccggaccgaaaagacgcggccccaaaggaaacacccgaagaacacagc

SEQ ID NO: 156425 - RNA, 78 nt, Homo sapiens
agcggcaccagcgccagccgcccagacacgcccgcagagagaggaggaggggaggagagccaaccgagggagggaggg

SEQ ID NO: 156426 - RNA, 75 nt, Homo sapiens
ccaccgccggcgcgggaaacgggcgaagcgacgagccgcgaggagaacgagacaggggcaaagaagagaccgaac

SEQ ID NO: 156427 - RNA, 71 nt, Homo sapiens
caaaagacgcaaaggagaggaccaggcgcggacccaaaaagggcagaacacggaggaccgcgcgggcaccg

SEQ ID NO: 156428 - RNA, 70 nt, Homo sapiens
acagcaagcaccggagggagaagacagggccggcccagggagaacgcaaaaccaccacccccacaaaaaa

SEQ ID NO: 156429 - RNA, 73 nt, Homo sapiens
cccacccacccaagagagccagcccgccgggacccaccaagggcccccacgacgcaggcggacgagaccacac

SEQ ID NO: 156430 - RNA, 82 nt, Homo sapiens
aagaagcaaaaccaacagggcagagcaggggaacaaggacagccggaagcaaggcagcggaaagcacagccaggccacagcc

SEQ ID NO: 156431 - RNA, 73 nt, Homo sapiens
gggaggacaggggcagggggaaggagaccgaaaagaccgaagaaacggacgaaaggggaacacccaggccagg

SEQ ID NO: 156432 - RNA, 78 nt, Homo sapiens
aagacacaaacccgagcaccaacacccaaaacagaagagcaaagaagcggcgggaggaaccgccagccaggagccaag

SEQ ID NO: 156433 - RNA, 72 nt, Homo sapiens
gcagaccgcagaaggccggagacaccagcagaaacaagacagacgaagaaggaaaagcgaacagaaccagcg

SEQ ID NO: 156434 - RNA, 58 nt, Homo sapiens
acaaaccaagcgccgacaacacccgaaccaagaccagccggaaccaaaaagaagcccc

SEQ ID NO: 156435 - RNA, 102 nt, Homo sapiens
gggaaccaccgcccccgcaccgacgccggccccaaaagcaccagaggccacccagagacagaacgccaccaagacaggccaaaaaccggagacaacggaaac

SEQ ID NO: 156436 - RNA, 78 nt, Homo sapiens
agagccaggggccgggagggcgccaggagcaacgacaaggacagaacaccaggccccgaaggccaaaacccggagcgg

SEQ ID NO: 156437 - RNA, 72 nt, Homo sapiens
gacgaccggcgcgccccgcccggaccgcgcagaaccagggcggcggccagcgccacgcgcgacacgggcgga

SEQ ID NO: 156438 - RNA, 76 nt, Homo sapiens
gacagcagaacccgcgcgcgcccgcccgcccagcagcgggccaggagaaccccagcacagaaggcggggacgagac

SEQ ID NO: 156439 - RNA, 39 nt, Homo sapiens
cacggccagacgcccccaggcaagaaagccaagagccag

SEQ ID NO: 156440 - RNA, 78 nt, Homo sapiens
ccacgggccgcgccgggcacagccggaaagcaggaccgcgacggcagcagagcagacaaggcgggaagaaagaaaaac

SEQ ID NO: 156441 - RNA, 81 nt, Homo sapiens
gccgcgggcccgcggcccggaagcgggccgcgcaccggaaagaggagcgaagagaaagaggcccaccgagccggacccccc

SEQ ID NO: 156442 - RNA, 83 nt, Homo sapiens
ccggcggggggcgcggcgccgggacgcaccgcaccgagggcgagcccaggacggggggcccccgcaagcccccagcaccgaag

SEQ ID NO: 156443 - RNA, 66 nt, Homo sapiens
agaccacacaaggaaggcaggcgggagcgaccccggcaggaaggcgacccaggagaggacgaaaac

SEQ ID NO: 156444 - RNA, 51 nt, Homo sapiens
agccggaaccaagaaccgcagcaggccagcccggccaccccgccacaaacg

SEQ ID NO: 156445 - RNA, 77 nt, Homo sapiens
gaagaagagaaacgcaaagaagggaaaaggaggaccaacaagcacaaagacagaggaggaaacaccaaggaagcccc

SEQ ID NO: 156446 - RNA, 72 nt, Homo sapiens
agaaacacagaagggaccggagcccggaaaaagggcggacacaaggaccaaccagacgccgacacgcagggc

SEQ ID NO: 156447 - RNA, 81 nt, Homo sapiens
cgcggagccgcgcagccccggagcacgggccaaccgccccccagcagcaggcacgggcgaaccccgagccccgccccacgc

SEQ ID NO: 156448 - RNA, 75 nt, Homo sapiens
cgcagagccggaggggcgcgggacacacccccaggaggcccggcagagcagggagaagaaaaagcagaaaggaac

SEQ ID NO: 156449 - RNA, 70 nt, Homo sapiens
gggcgcggcggccagccgcaccgggacgacaccggggaccggacagagacaccaccagaaaaaaacacaa

SEQ ID NO: 156450 - RNA, 69 nt, Homo sapiens
agagaacagaaccgagcagagaaacgacggaccgaacagcccagcgagcgaaagaagaagagaaagaca

SEQ ID NO: 156451 - RNA, 60 nt, Homo sapiens
gccagagggcgaggggagagcacggcgccaggggcggcggccgcccccgccgccagccgc

SEQ ID NO: 156452 - RNA, 55 nt, Homo sapiens
ccacccacgagaacagcgggcagacgaagcggcgggccggagaagagaccaagca

SEQ ID NO: 156453 - RNA, 81 nt, Homo sapiens
cacaacaaccaagaaaaacgggggccgccgccaagaggcgacccgcggcgagagcccccccagagcgccagggcccgagaa

SEQ ID NO: 156454 - RNA, 82 nt, Homo sapiens
ccaaaaccacgaacagcggagcaaggcgacgaaccggagagaggagaacgaacaccggaccgccagacaaggccgacgcgca

SEQ ID NO: 156455 - RNA, 63 nt, Homo sapiens
ccaaaccagccaaaggaaacgccacacccgcgcagaagccaggaacagggaccagacaaagaa

SEQ ID NO: 156456 - RNA, 43 nt, Homo sapiens
acgaagaccagaacggaaacaaaaagccaacggaaaaagaaac

SEQ ID NO: 156457 - RNA, 81 nt, Homo sapiens
aaaggaggccagcagcgagaaggaggcaggaggggggaagacagggcccagcaccacaggacgggccgggaagccgccagc

SEQ ID NO: 156458 - RNA, 77 nt, Homo sapiens
gcccacgcagcggagaccgcaggacaccgggaccgggggcgcagcaccggcaagaacgccccggcaaggacggaggc

SEQ ID NO: 156459 - RNA, 78 nt, Homo sapiens
ccgcaggaaaagggccccgagccagagcccagcagccgagggcgggccgaggcggaaaggggccggaccagaaaaagc

SEQ ID NO: 156460 - RNA, 65 nt, Homo sapiens
cgaggagagccccgccaggaccccaacacgggccgacagagcaggggccgcaccaggggccggaa

SEQ ID NO: 156461 - RNA, 121 nt, Homo sapiens
agaagcccgggcagaaggagcgggggaggcagggccacggcagggggcaccagcagagccgcccccccacagcaacagccgaaaaaggaaaaacagacaccgaaagccccaaaaaacaacc

SEQ ID NO: 156462 - RNA, 52 nt, Homo sapiens
gacggaccggacacaccggcacagaaacaccaacacacacccagaaggccac

SEQ ID NO: 156463 - RNA, 102 nt, Homo sapiens
ggacaagaccaacaaacacaaggagccacaaggacgggaagcaccaaagcgcgccaagagaacacgaggacccaaagaacaaacccggagagaagaaaaccc

SEQ ID NO: 156464 - RNA, 45 nt, Homo sapiens
ccggccacccaggaaaggaggcccgcccgagaggaacccagcaag

SEQ ID NO: 156465 - RNA, 74 nt, Homo sapiens
ccaccacggccaacagaacgccccagaggacagcccacggacccaacaagccaaagaacagacacacagaagaa

SEQ ID NO: 156466 - RNA, 73 nt, Homo sapiens
aagaaaccgcagcaaaagaaaggacaaagacaaccagggcacgcggaagcgcagcaacccccagccacaacgc

SEQ ID NO: 156467 - RNA, 76 nt, Homo sapiens
cagacagcaggagcgaggccgggaccggagcaccggcagacccggggaccgggaaggcaaccagggaccaggagga

SEQ ID NO: 156468 - RNA, 72 nt, Homo sapiens
ccagccgaccgagcccaggagcgccacgcgcggaaggcagcgcccagcagcgcagcccacaccgggggcacg

SEQ ID NO: 156469 - RNA, 81 nt, Homo sapiens
ggagaggggcccaggacacagaccgcggggccgcgccccagagaaggggcagaagccaaaaaaaccaaagaaagaccaacc

SEQ ID NO: 156470 - RNA, 97 nt, Homo sapiens
gcgcgagcgagaggaaccggaaccgcaccccccccagagaggagccgccgggccgccggacacccccgcggggccgagcccaacaggacacgacgag

SEQ ID NO: 156471 - RNA, 81 nt, Homo sapiens
ccagagagaccaacagcgcaccgagggcagaacaacggggaacgcacgcggaggaagaaaccggagagcggggccaggagg

SEQ ID NO: 156472 - RNA, 74 nt, Homo sapiens
caaccgcagaggccgacgggaaggacgaacgagagccaacagaagcaacgggacaggcgcagcggacaaccacg

SEQ ID NO: 156473 - RNA, 77 nt, Homo sapiens
cacaagggcacgaaagaggaaaccacggacggcaaagacccaccgaggagaagacaaacacagagagagaagggcgg

SEQ ID NO: 156474 - RNA, 71 nt, Homo sapiens
gaggcaccgacagcaacccccccacgccacacagggaaggcacacagcagggaagcgagacaacagaggga

SEQ ID NO: 156475 - RNA, 83 nt, Homo sapiens
gagacagccaggcggaaacagagcaacccccggcagacaagcagcccacgcaggagacgggaggagcgacaacggagcacacc

SEQ ID NO: 156476 - RNA, 71 nt, Homo sapiens
ggaggagcgaccaggacggaccgggggagccaaacaacagggaaacccagacgacaaggaaggccaaggga

SEQ ID NO: 156477 - RNA, 60 nt, Homo sapiens
ggaaagacccaggagaagccgcccaaagaacggccgaaagaagaaaacccgagcagagaa

SEQ ID NO: 156478 - RNA, 53 nt, Homo sapiens
gagaggaaagaagaaaaccaagaaagccccacggacagacgcaaagagacagg

SEQ ID NO: 156479 - RNA, 92 nt, Homo sapiens
ccaccgcaaggcgcccagaccagaccacacaaacagacagagccccccggaaccagcagcgcagccgggggccagaaaagaagccgagccca

SEQ ID NO: 156480 - RNA, 71 nt, Homo sapiens
aagcaaccgcggaacagaagcggaacgcagagccagaagagacgaaggacccagagacacaaagaaaacag

SEQ ID NO: 156481 - RNA, 78 nt, Homo sapiens
gagcccaggagcgccacgcgcggaaggcagcgcccagcagcgcagggcaaggagcgagcccccacaggggcccaggga

SEQ ID NO: 156482 - RNA, 77 nt, Homo sapiens
gagcgcgcagagggacccggaaacgcccagaggggaggccacaccggagggccacgagaccggagaggagaccaggc

SEQ ID NO: 156483 - RNA, 62 nt, Homo sapiens
acaccaagcggaggggacgccacgcaacgccgaagacgaccccgacgcaggccaggagccgc

SEQ ID NO: 156484 - RNA, 50 nt, Homo sapiens
agaagcggcagcggccagaagacaacgaggcaagagagcaaagcgaacaa

SEQ ID NO: 156485 - RNA, 77 nt, Homo sapiens
cgcacaccggcccacaccacagcaagccaacaccaggggagaaggaacggaaaagaagaagcgagagaggcgaagaa

SEQ ID NO: 156486 - RNA, 57 nt, Homo sapiens
acaagaccaagagaaaaaaaaggagcaagaggaaacagggaaacccagacgacaagg

SEQ ID NO: 156487 - RNA, 82 nt, Homo sapiens
caacaagcccggaagaccggagcgacgaagaagacgggcccaagagggcgcgcaccggggcagggaaaggcaaaggcaggca

SEQ ID NO: 156488 - RNA, 53 nt, Homo sapiens
gaaacgcggaggagccggcggaggacaaaccggcgaccacacacggggacgac

SEQ ID NO: 156489 - RNA, 62 nt, Homo sapiens
gaggacacacccaggaaaagaccaggacggacaagcacagccggaagaaaagcaaacgccag

SEQ ID NO: 156490 - RNA, 63 nt, Homo sapiens
gcggagagaccccgcggcgggcgcacaccacgccggacacagggaacacacggcggagaacga

SEQ ID NO: 156491 - RNA, 90 nt, Homo sapiens
gaaaccccagggcccgcccaggacccccaagccgccgcggacgcagaaagcaccgggaggaaagagagccacacgaagaacacggccaaa

SEQ ID NO: 156492 - RNA, 37 nt, Homo sapiens
gggcggccacaagcaaagagggagcacagcgcggaag

SEQ ID NO: 156493 - RNA, 60 nt, Homo sapiens
gagccagacgaaccgggccccgcagcagaacggcaggggaagagccaacgagccaccggg

SEQ ID NO: 156494 - RNA, 75 nt, Homo sapiens
gagaagaaccaggagacggaggaagaacccaagccagagcccagagaggagcacggcagccaggaggccgacccg

SEQ ID NO: 156495 - RNA, 71 nt, Homo sapiens
ccacgcgcgccccaccggcgcccgggccgcgagggcccggaacaggggcacgcacgaggcggaaccacagg

SEQ ID NO: 156496 - RNA, 81 nt, Homo sapiens
caaaggagaaaggaaccgacagaacagaacacgagcgagaaaacagagcagacagagacaaaaaccagcacagaacagaca

SEQ ID NO: 156497 - RNA, 80 nt, Homo sapiens
cgacaggacgggggcggccggcccccagcccagccaacaggcaaggccccggggcaccagccgagggacaacgggcgccg

SEQ ID NO: 156498 - RNA, 76 nt, Homo sapiens
gaccagaacgcagcaacaaagaagcgcacacaacagaagagaagcaaaaagcagagaacaggaaaagggaaccaaa

SEQ ID NO: 156499 - RNA, 79 nt, Homo sapiens
cggagggagcagagccccaggacaaacaaggccaagaacccaaagcaaggcgagacaaggggccaaccagccagggcca

SEQ ID NO: 156500 - RNA, 92 nt, Homo sapiens
cgccgccaccagcccaagagaaagcccgggaccgggagcccgggaccgggagccggggggccaccccgaccggaggagcggcgcaggccggc

SEQ ID NO: 156501 - RNA, 85 nt, Homo sapiens
gacaaaaagcaagaggagacagccgacggaagaggaggagagaagagaggaagcgagcagcacgggcaagcgggcagcgaagaga

SEQ ID NO: 156502 - RNA, 73 nt, Homo sapiens
gacagaccagacggaggaggagccggacgggccagcacacagcacagcacgcgcaccacaacgcaggaaggaa

SEQ ID NO: 156503 - RNA, 77 nt, Homo sapiens
cgacaaggccggagccgcggggcgcgggcggcggacagagacccagagcgagcaacggggcggcacacaaggagcga

SEQ ID NO: 156504 - RNA, 73 nt, Homo sapiens
gcagaaaccgaaggcaagaagggggaggagcaaaacgacacccaggagaagccggcagcgagcacacggacaa

SEQ ID NO: 156505 - RNA, 70 nt, Homo sapiens
aagccaaggcccgaaagaaagcagaaagggccgccaaaacagggagagagacgcaacagaagccgagaac

SEQ ID NO: 156506 - RNA, 62 nt, Homo sapiens
gcaccccacccgggccgcccgaagagagaggaccagaaccagaccggaaagcaccaggcaaa

SEQ ID NO: 156507 - RNA, 70 nt, Homo sapiens
agaggaacgaaaggaaaagagacgcagacaggggaggcaagcaggggggcaaaggaaagaaggcagaaag

SEQ ID NO: 156508 - RNA, 65 nt, Homo sapiens
gccagaggagcacacacaaagaggacccgacagggggcgggccccagacaagcaccaacaaacaa

SEQ ID NO: 156509 - RNA, 74 nt, Homo sapiens
cagcaccgccacaccacagcccacaagccgggagcccacacaccacaccggcgcaacaacaaggacccgccaca

SEQ ID NO: 156510 - RNA, 80 nt, Homo sapiens
gacaagaaaaacaacgccaagagggaaggggacccgccgggaggacgcgagggcaagcccagaaaggaaccagagaaaga

SEQ ID NO: 156511 - RNA, 71 nt, Homo sapiens
cacgaggggcgaaccacggaaaggaggaagaagacaccggggacagacagggagaccaagacacaccaccc

SEQ ID NO: 156512 - RNA, 78 nt, Homo sapiens
gggggcggagaccaggagaccccacggagcgggcgacgagcgacccgggagacacgacgggcacagagagcgcgaagg

SEQ ID NO: 156513 - RNA, 69 nt, Homo sapiens
ccagagcaccagacccaggagaaggaagccaacaccggagccagaaagccgaacccacggccagaggaa

SEQ ID NO: 156514 - RNA, 79 nt, Homo sapiens
ccgggacggaccgagaccggaccgagagcggaccgagagcgcgaaacgcacgagaaggggaaagagggaccagcgcagc

SEQ ID NO: 156515 - RNA, 42 nt, Homo sapiens
ccccgagagcgggacgcaggacggccggagcagcagaacaag

SEQ ID NO: 156516 - RNA, 85 nt, Homo sapiens
gaggggccgcggaggggcacgagcgccacaaccccagaggagcgacacgcagaccggcgagccggaaccccgaggagagaccgcg

SEQ ID NO: 156517 - RNA, 62 nt, Homo sapiens
ccgggagcgcggccgccgcggcacggggaacgcagggcagggaaagccaccaggggggggcg

SEQ ID NO: 156518 - RNA, 77 nt, Homo sapiens
gagcgaccaagacaccaacaccaggaagagaggaagcgggggccgagaccacacagggaggggaacgaaacaccaag

SEQ ID NO: 156519 - RNA, 61 nt, Homo sapiens
agcgagaacagccagagagggaaaagccgggccacagaagcaccaccacaagccacaccaa

SEQ ID NO: 156520 - RNA, 79 nt, Homo sapiens
aaacaggaaccggaggaccagacgcacggaggcaaaaacgagagaagagggcagcagacaggacccccgcacggcacaa

SEQ ID NO: 156521 - RNA, 70 nt, Homo sapiens
ggcgaaccagagagaagagacaggaagaagagagcggaacagcagagcgcacaaggacaagggcccacga

SEQ ID NO: 156522 - RNA, 75 nt, Homo sapiens
caaccaccgagcaaacgacgagccaggaccagcaagacagaagacgacaaccggaacgggacaacccagaagcca

SEQ ID NO: 156523 - RNA, 80 nt, Homo sapiens
agccggacccggaacagcaagaacgcaccgaaccagaacccaagcaaagaggccaaccggggaaaaagccagcccggaga

SEQ ID NO: 156524 - RNA, 76 nt, Homo sapiens
gcggcccaggaaaagcacccggaggaggaagaagaaggaagccaaagaaggcagagaggagcgcaagccgagggag

SEQ ID NO: 156525 - RNA, 74 nt, Homo sapiens
gacaccaagcagcccacggccagcgacaacagcgcgccgggacggaaacaggggagacgcaagccacccggacg

SEQ ID NO: 156526 - RNA, 82 nt, Homo sapiens
ggaggagcccggcagagcgcgaagcagcgaggcccacagagacgagaaacgccggggggagcccacggggcacccagaccgc

SEQ ID NO: 156527 - RNA, 79 nt, Homo sapiens
cagagagccagaaggaagacaagcgacccgcaagagagagcagaaggaagaaaacgaagcaaaacagaaaaccaagcgg

SEQ ID NO: 156528 - RNA, 87 nt, Homo sapiens
aaaaagcaagcgaagacacaagaagaccgagcaaagagaccccggaacgaggccccgggggccgcggcccggccccaccaggagcca

SEQ ID NO: 156529 - RNA, 47 nt, Homo sapiens
aaacccccagacaaaggcagggccccagcagaacacccacacccccc

SEQ ID NO: 156530 - RNA, 55 nt, Homo sapiens
caggaacacaccaagccgaccacggaaggacagaacggaaaagagaaaacaaagc

SEQ ID NO: 156531 - RNA, 85 nt, Homo sapiens
gcgaaccggcaggccgcgccaggagccaccaagcgcagccccagagaccagaacgaccagagcggagaaagaagccgaaggccag

SEQ ID NO: 156532 - RNA, 70 nt, Homo sapiens
acaaggacaagaaagccaccaggacgagaaaaaccaccggacagaacagagcagccgcaacagcgcaccg

SEQ ID NO: 156533 - RNA, 76 nt, Homo sapiens
cagaaacccagcagaaaggcaaaccagccagggacggccagggggcagacccaaaggaaacgcacgaaagaaacag

SEQ ID NO: 156534 - RNA, 59 nt, Homo sapiens
cgcgccggcgcgagaagagcagcgagaaggcgcgcgggaagcaaggagacaagccgaga

SEQ ID NO: 156535 - RNA, 56 nt, Homo sapiens
ggacccccaaggacacacacgaggacacaaaagcaaccgagagggaaacaaccacg

SEQ ID NO: 156536 - RNA, 75 nt, Homo sapiens
gggaaccccaggcccgggggcacaaggggcagaacgagggcaaacccacagacaaccagagccaaagggcaccgc

SEQ ID NO: 156537 - RNA, 80 nt, Homo sapiens
ggagaagggacgacgggcgccggaggagcgaccgcggcagcgccacgcagagccccgccaggaagacacgccggggaacg

SEQ ID NO: 156538 - RNA, 77 nt, Homo sapiens
aaaacaagacggggcgccccacagaggggcgacggccaaagcaggaagcaaccggccaaaagaccacccagcccagg

SEQ ID NO: 156539 - RNA, 71 nt, Homo sapiens
aggcaacagaagacggggcacagacaccagaaacaacagacagcgggcaaaacggcgaggaaagagaggag

SEQ ID NO: 156540 - RNA, 56 nt, Homo sapiens
ggaacccccacgcggccagcgaaaacgcccagccgcagggaggagaagaagagaac

SEQ ID NO: 156541 - RNA, 77 nt, Homo sapiens
acacgggccaacacggcgcgaaagccagggaagaagccagaggacaacagagcaaccagccgggcaccaggaacccc

SEQ ID NO: 156542 - RNA, 65 nt, Homo sapiens
ggaagggaaacaacgacggagacaccgccagaagcaccaggacagccacaagggcccaccaggcg

SEQ ID NO: 156543 - RNA, 64 nt, Homo sapiens
ggagaagaggagaaaacccccagacggaaaaggccacccgcgccgagaaagcgaaagaagcaag

SEQ ID NO: 156544 - RNA, 56 nt, Homo sapiens
ccacaccaccacccaggccacacagacccgggccagccgccggaacccgaacgggc

SEQ ID NO: 156545 - RNA, 65 nt, Homo sapiens
gagccacccgcacacgcacccaggggcagccgcaaggacgagccagagaggcaccaacacaagag

SEQ ID NO: 156546 - RNA, 68 nt, Homo sapiens
caagcggcgacacacgacgggacaagggccagaggacggacggccagacacgggcccccagcgacccc

SEQ ID NO: 156547 - RNA, 66 nt, Homo sapiens
cgaaagccagggcccgcccgcaggaggaaaagccggacgcgaaggcccagcaggaagagaggcgga

SEQ ID NO: 156548 - RNA, 78 nt, Homo sapiens
gaaagcaaggaaacgagcagaaggggggccgcacagagccagagagcacgaccagcaaacgggcaacgaaaccagcag

SEQ ID NO: 156549 - RNA, 54 nt, Homo sapiens
agaaccgaccccccgggaaacaagagacgacgggaaggaagaagagagggcgaa

SEQ ID NO: 156550 - RNA, 77 nt, Homo sapiens
agcgacaacaggaggccggaagacccaaagcgagggcgcggggcgcgggggcccaggccggaggaaccaccgagcaa

SEQ ID NO: 156551 - RNA, 85 nt, Homo sapiens
ccgaggcaaaccaacgcggcccggcgaggacccccggcccaggagggagaccgacagaacaccgaagaagcaggcacacccccca

SEQ ID NO: 156552 - RNA, 82 nt, Homo sapiens
aacgggggcaaccggaagaccacggaggagaaaagaggcggcccacccccccggccgcgaggacgcgccaaggcgcagagaa

SEQ ID NO: 156553 - RNA, 56 nt, Homo sapiens
aagccggaaagcagcaggaaacagacgagacgccacaggcacacggacacccacgg

SEQ ID NO: 156554 - RNA, 69 nt, Homo sapiens
acaaccagaaggggagaaggcaggcaccacaaaaaggacagaagcagaagaaggacaccccacaccgaa

SEQ ID NO: 156555 - RNA, 79 nt, Homo sapiens
gcagccgagcccgcccgcgcgccgaggcaagcaccagcacccagagagaagacgcaaccaacaaacagaccgcgcagaa

SEQ ID NO: 156556 - RNA, 70 nt, Homo sapiens
gcgcggcgcggggaccgcggcccggacgaaaccgacccgagaccggggcaaaggcgcccccaacgacccg

SEQ ID NO: 156557 - RNA, 86 nt, Homo sapiens
gaggacagcacccgccaaccccggaagggccccagggaaaggaccgaggcaggaaagaggccagacgcagggaccggcaccgacgg

SEQ ID NO: 156558 - RNA, 55 nt, Homo sapiens
cgaggagagggaacgggaggcacgcgcgcaacgaaggagaaccccagccccacac

SEQ ID NO: 156559 - RNA, 82 nt, Homo sapiens
caaaaaaccaaacaccgcaaccaccaagacaaaaaaggcgaagcacgcgaggcagcgggaacgagcccaaagaagaaaagga

SEQ ID NO: 156560 - RNA, 81 nt, Homo sapiens
gaggagacgcaaggagccaccagcacggaccaggaggcgagcaacagaccccaacaagccgaagcacaaggcagccagaac

SEQ ID NO: 156561 - RNA, 61 nt, Homo sapiens
cgcgaacggcgaacaagagcaacgaggccggagaaccccaggcccggcaccggccgccgga

SEQ ID NO: 156562 - RNA, 41 nt, Homo sapiens
ccaccaagggagccgggccgcaccgcacaggacagccacca

SEQ ID NO: 156563 - RNA, 79 nt, Homo sapiens
ccgcccccgcaccagccaagaggagggagccccaagccggcggccaagacggagccgagaagaagacggcacgggaccc

SEQ ID NO: 156564 - RNA, 79 nt, Homo sapiens
gaccaccaggccaacaacacagcagaaccgccagagaagagagagaagaggaccccaagggaccgaaagacaagagcac

SEQ ID NO: 156565 - RNA, 71 nt, Homo sapiens
aagagagcaaaaacaaaaaacaacacggagcagcagacccacaaggaagagccaggcggagcgacaaaacg

SEQ ID NO: 156566 - RNA, 60 nt, Homo sapiens
gacaccgggcccaggaaaagaacaagaagcaccccaggcaaagccaaaccacaccagccc

SEQ ID NO: 156567 - RNA, 40 nt, Homo sapiens
aaccagaggaacccaaacagaggcggaggcagggcacgac

SEQ ID NO: 156568 - RNA, 73 nt, Homo sapiens
cagccgagaaagagaagacagcggaaaaaaaaaaacacgggcggacggaacgaggaccagcagaaacagaagg

SEQ ID NO: 156569 - RNA, 70 nt, Homo sapiens
ccgcggcgcccgccagccggaggaggaggcgcccgcagcaggcccgggcccgccggccacaccacacgcc

SEQ ID NO: 156570 - RNA, 38 nt, Homo sapiens
acacaaccagagcgaggacgaaagaggcgcgacggggg

SEQ ID NO: 156571 - RNA, 74 nt, Homo sapiens
ggagggcggagccaggggggggccggagggcccgagggccggggacaaccacagcagcggggagaggcggggcg

SEQ ID NO: 156572 - RNA, 89 nt, Homo sapiens
gcgcggaacccgcggggaggccccaaccaggggcgagccgcgcgggagaagccagaaaaagggacgagaccagaggaaggggcgacagg

SEQ ID NO: 156573 - RNA, 73 nt, Homo sapiens
agggccaaagaagggagagagacagaaaagagagacaaaaagcaaacgagcaacacgagcaaaagggcgaaag

SEQ ID NO: 156574 - RNA, 61 nt, Homo sapiens
aagaacaagccagcccgagagaccccagaaagagcaacagaaggagacagagcacggaagg

SEQ ID NO: 156575 - RNA, 75 nt, Homo sapiens
agccgacacgggggcagccgcgagccccgcaccccgagagcggagaagcccgacaccagaaaagaaccagaaaac

SEQ ID NO: 156576 - RNA, 115 nt, Homo sapiens
aagaaccgaagaaaaacgaagacccggaagcaccacagcaaacaacaagcagccacccaggagccggccccacacacagcacgggagggaagccgccgaccggaacggcgggggc

SEQ ID NO: 156577 - RNA, 76 nt, Homo sapiens
caaagagcgaagcgcagaagcccgaagaaaacagcgggaagagacagccaaggccaaacgaccaagaaagcgggac

SEQ ID NO: 156578 - RNA, 63 nt, Homo sapiens
caggagagcgcagggccgagcgggccgggacaggcaacaggaggacgaaccagaaccaaccag

SEQ ID NO: 156579 - RNA, 127 nt, Homo sapiens
caccccgcgaccacaaggcccccgaccacgcccaaacaggacacagccccaggaggcaggccaacaagcacaagccaggagaggcagagaccagggcacgcaggagaagacaacacggccacgaacc

SEQ ID NO: 156580 - RNA, 73 nt, Homo sapiens
cgccacagggagaggcaaggaaaaaggaacccgagaaaagcccccaaaacaaaacaaaccaagacaaaaagag

SEQ ID NO: 156581 - RNA, 75 nt, Homo sapiens
gaggaacggaaagccagagcccgaaaagaagaaccgcaacagcaaagggccgagaagaagcggggacggcaaaac

SEQ ID NO: 156582 - RNA, 38 nt, Homo sapiens
gaggaaccaaagcacccaagccagccagcaggcaacag

SEQ ID NO: 156583 - RNA, 71 nt, Homo sapiens
cagaagcacggagcccaaggaccgacaccaccaaccaaggacgaacacgcagaaccccccccagaaagcac

SEQ ID NO: 156584 - RNA, 74 nt, Homo sapiens
gggaccgaagaagccaaaggggagaaccgaaacaagaccaccaggacagcaaaagaaggagagaggaggagaag

SEQ ID NO: 156585 - RNA, 77 nt, Homo sapiens
gaagcgagagaaaagcccccaaaagcagcacaggccgacagcaggaagcaccagacaccaaccacagcgcagcaggc

SEQ ID NO: 156586 - RNA, 83 nt, Homo sapiens
gagcacgacggcaggaaggaggagacgaagaaaggaggagcgagaacccgagcagcgccagagcaacacaccgcgccccagca

SEQ ID NO: 156587 - RNA, 71 nt, Homo sapiens
aagaggagaaaaccgggcgcagcccccaaaagagcgggaacagacacagcagagcagaagaaaaagaggac

SEQ ID NO: 156588 - RNA, 69 nt, Homo sapiens
ccacggcgaagccagcggacgggcagggcccagacacgggaagcaggacaccaaccgacaagccaacgg

SEQ ID NO: 156589 - RNA, 68 nt, Homo sapiens
ggagagcaggccgaccacagaaaaccgggcgccgaggggaaagacgcgcaaaacgacaacacagaacc

SEQ ID NO: 156590 - RNA, 75 nt, Homo sapiens
ggggcccgaccagaagccccccaagccaggccaccccccccacgcaacgccgaacgcggagcggaagaaaccgac

SEQ ID NO: 156591 - RNA, 73 nt, Homo sapiens
gaagccagcaccggaaacagaacccacacaaagaacaaaacgcccggaccgaaagagacggggcgccagggcc

SEQ ID NO: 156592 - RNA, 74 nt, Homo sapiens
ccaggagccacccagaaagggaaacaccgccacgagcaccccgacaggcacaaacagggagaaacaggaggaga

SEQ ID NO: 156593 - RNA, 81 nt, Homo sapiens
gccagccagaacgccggggaccaggcccgggcgccgcaaaaggaggcgcgccccagaccccagagcacgccggcaccacca

SEQ ID NO: 156594 - RNA, 81 nt, Homo sapiens
gggcaccgcgcgaagcggccaaagccgcccagacggccaccggcgggaggaacaaaaggagaaaaccggaagagaaaggcc

SEQ ID NO: 156595 - RNA, 75 nt, Homo sapiens
cgggaagacggagagagagggcagggcggacgaccggaaagcggcagaaaaacagccggacgggacagaacacga

SEQ ID NO: 156596 - RNA, 64 nt, Homo sapiens
agggagcgaaaagaacccccaaaaggaaaaaaggcagcggaaagaagaaaagaaacggcccaca

SEQ ID NO: 156597 - RNA, 76 nt, Homo sapiens
cgaagggagaccaagggagcaaggaacaccgacaaaccgaccgaccaggagccacaggaaccaaagaggggaaagg

SEQ ID NO: 156598 - RNA, 80 nt, Homo sapiens
aaacaacgacaacgagcacagagggcaggcacgagcaaggaggagccccgaaaagcaaagaaaaaggaaggacgaacgca

SEQ ID NO: 156599 - RNA, 73 nt, Homo sapiens
cacacgccacccacacaggagccccgccccgggaggaacgggaagggcacaggaagaaaggaccaaggaaaca

SEQ ID NO: 156600 - RNA, 72 nt, Homo sapiens
gccaccaaccccgacaggagggaaaaaccagaagagaaaaaacaaaggggagaggcaccccgcgggacgacc

SEQ ID NO: 156601 - RNA, 52 nt, Homo sapiens
aagaaccaaagaagcaaaacacgaggaaaccaagagaacccgaaaggagaag

SEQ ID NO: 156602 - RNA, 52 nt, Homo sapiens
cgccggccgagaaggcagaggcggaagggcgcgcaggaacaagaagaagggc

SEQ ID NO: 156603 - RNA, 78 nt, Homo sapiens
ccacgcacaggaagcaggcaaggcagacccgcagaccaacgaaaaccacggcgccacgaagagggaaaaggacagcgc

SEQ ID NO: 156604 - RNA, 76 nt, Homo sapiens
acacggcgagggggaagcggcccccgcagacgccggcaggcaaagagcacacgccggagccgggaagaaaacgagc

SEQ ID NO: 156605 - RNA, 108 nt, Homo sapiens
aaaaggccggagaagggaaacgggccccccggcgagagacgcagccccgcacagaacgaagggccccacaccaaaccgccacgcaacagacgcagagccagccaggag

SEQ ID NO: 156606 - RNA, 82 nt, Homo sapiens
cgcgcgacgcccagagccgcgaaccccgcccgagcccgccggaccccccgacccagacggagcgcgccagcgccgcagcggc

SEQ ID NO: 156607 - RNA, 57 nt, Homo sapiens
caaggcccaagcccagccaaggaaggaagggaacacggacgacgagacacgaccaac

SEQ ID NO: 156608 - RNA, 73 nt, Homo sapiens
cagagggaccaccaagacagaagaaggagaaagacaaagccccgagaaagaccagcaccgccgaaaagcaaaa

SEQ ID NO: 156609 - RNA, 72 nt, Homo sapiens
gaggaggaggcgggcgcgccggaaggggaccccagcccaacgccaaacgagccggacccggaggacggaaaa

SEQ ID NO: 156610 - RNA, 66 nt, Homo sapiens
cagagaaggcagccaagcccggggaccccgggagggcccagcaaccggccagcgaaccggagacaa

SEQ ID NO: 156611 - RNA, 58 nt, Homo sapiens
gggccgccagcggggacaggcagcaaagcaaggcaaaccagggggccacacagagcgc

SEQ ID NO: 156612 - RNA, 75 nt, Homo sapiens
aaaaaacccagaacacgggagaaaaaggaaaacgcggaaaaccgacacaacaggcaagaacggaagcacgggcgg

SEQ ID NO: 156613 - RNA, 69 nt, Homo sapiens
gagagcaaagaaaccaggcacagacaggcgagcggggacggcagagcgggccgaacccagagcgagggg

SEQ ID NO: 156614 - RNA, 70 nt, Homo sapiens
cgggcgccgagcgaacgcgcaacagggccgcacgcaaggggccgggcccagaggacagaccacgccaagg

SEQ ID NO: 156615 - RNA, 66 nt, Homo sapiens
gaccccgagcgacacagaaccaccccaacagacaaacacaacgaacaagaaaggagacaaagacgg

SEQ ID NO: 156616 - RNA, 77 nt, Homo sapiens
cggaagaggcgcccacgggggcccgcggcgcccggcgcgaaggggaacaacagcaccaccaaccgcgacggcggccc

SEQ ID NO: 156617 - RNA, 73 nt, Homo sapiens
aaaacccagagaaaagagcaagcaaagcaaggacaaggaggaagccacagagaggacaaacaacaacccccca

SEQ ID NO: 156618 - RNA, 73 nt, Homo sapiens
acgacgaggacacggcccaggccgacggcagcgccggcagcacgaacacagaaggaagccaggccccgcagcc

SEQ ID NO: 156619 - RNA, 72 nt, Homo sapiens
gcaaaagacacaagcgaaaaacaagacccagaacccaggagcggcagccgcgaacccccagaaccgaaacga

SEQ ID NO: 156620 - RNA, 77 nt, Homo sapiens
cggcagggagcgcgggggcccgcgcagcagcgaccacgcacgagccagggagccgccgggaccggcccgggagacga

SEQ ID NO: 156621 - RNA, 83 nt, Homo sapiens
ccggggagcccgagaaccccgagcgcggaaggggacccggggacgcggcgagacaggaagaggaaggaaacccagaagaggaa

SEQ ID NO: 156622 - RNA, 76 nt, Homo sapiens
agagaggagccaaccacgcgaggccaaccacacagccacgacggagggggcaaaccaaacccgggccagccgccgg

SEQ ID NO: 156623 - RNA, 68 nt, Homo sapiens
acggcagaaccaaacccaccgcaagacagggaagcggacacgagccgaacaggcgcaagaagaacgaa

SEQ ID NO: 156624 - RNA, 70 nt, Homo sapiens
aacggagaagagacaagcgacgaaagaggaacagagccaccccggggaaaacgaaccagaagcccccgaa

SEQ ID NO: 156625 - RNA, 82 nt, Homo sapiens
ccagcgcagaagggccgcaggagacagacagagcaaggaggcggacggccaggggagaaaggaggcacgcgcggaccagccg

SEQ ID NO: 156626 - RNA, 78 nt, Homo sapiens
gaaacacaaaacaagcgggaaagaagccaagggaagggggaaagggagagacaggaaacccaacgagaaggaggccga

SEQ ID NO: 156627 - RNA, 71 nt, Homo sapiens
gcgcgcgcgagaacgaggggcccaccagacagcgaacagaggcagaacaaggacccaaagacaggaccacg

SEQ ID NO: 156628 - RNA, 85 nt, Homo sapiens
gcccgcccccagagaggggagccggcgaggacaaaaccgaaggaggagccccaggagggacagcgggaaccaccagcgcggagac

SEQ ID NO: 156629 - RNA, 81 nt, Homo sapiens
cccggaagagcgccccaggagaaacaagacggaccaccacagcccagcaaggcagagcaggagccaccccggcacccagag

SEQ ID NO: 156630 - RNA, 65 nt, Homo sapiens
acacagcggccgaagcaggaaccagcaacacacaacagggacgggaaaagccagccggcacggcc

SEQ ID NO: 156631 - RNA, 70 nt, Homo sapiens
gacgcccgcgccccccagcaagggccagcaggcgaaagagaagcaaaggaagaagcgaagcaacggagag

SEQ ID NO: 156632 - RNA, 103 nt, Homo sapiens
cacagaggaccgccgggaagggaacaagaacagagggaaaggaccaggaccaagaggaaccgcgcgcggccgaaccaagcccgggcgcccccaccaggaggaa

SEQ ID NO: 156633 - RNA, 66 nt, Homo sapiens
ggaggagcgcagcagcccaccgcgcaggccacgaaaccccggaacgggaagaagaggagaacgaac

SEQ ID NO: 156634 - RNA, 56 nt, Homo sapiens
cagcccgccggagcgacgggacgcggcggcggcaccaggagacaaagccacaaaaa

SEQ ID NO: 156635 - RNA, 81 nt, Homo sapiens
ggcaaagggcagcaaccaaaagccagccccacacaaggagagcaagcagggagggcccacgaaggacagagaagaaagggc

SEQ ID NO: 156636 - RNA, 69 nt, Homo sapiens
gagccacggacaagaccaaaagggaccgacagcaagaaaaggagaaaacaaggccgcgggcacacagca

SEQ ID NO: 156637 - RNA, 75 nt, Homo sapiens
gacccgccgccggggacccggaggggggaccccgaggaaggagggccccggagcagccacaccaccgaggcccca

SEQ ID NO: 156638 - RNA, 77 nt, Homo sapiens
gcaccagcggaaagggaacccgacaagaccaagacacccaagaacccaaaagccaggaaaaccaagaaacaccgagg

SEQ ID NO: 156639 - RNA, 71 nt, Homo sapiens
accacccaagaagggggaacacaagaaaccaaacaagccgaaagagcaaggggaggaaggaacagccaaag

SEQ ID NO: 156640 - RNA, 69 nt, Homo sapiens
caaccgcccccagccccccaggcccaggggagggccggaaggcgcgagcagcaagcccagagcccgggg

SEQ ID NO: 156641 - RNA, 75 nt, Homo sapiens
aaagaagcaagaggccaacacaagcccaaaagaaccccacacacagcaagaagcccgccaaggacaggcgaggcg

SEQ ID NO: 156642 - RNA, 75 nt, Homo sapiens
agcacgcagagcccgcggggccggagcggcgcagccggagggggccggagacaacggcaagcggagaagagcaag

SEQ ID NO: 156643 - RNA, 78 nt, Homo sapiens
aaagaaaggagcgccccaaaaggaaacagaaccaacgcagagccccagaacaaaagaacacagaggaaccagaacaga

SEQ ID NO: 156644 - RNA, 76 nt, Homo sapiens
acgggacccggccgcccagagccacgcagcagggacgcaccaaaacggacagccgaagacaggcgacccaccacca

SEQ ID NO: 156645 - RNA, 69 nt, Homo sapiens
acgggagaagaaaagacgagcaccacgaaaagcgaagcgaaccccgaagcgggagaggaccacggaaac

SEQ ID NO: 156646 - RNA, 73 nt, Homo sapiens
agggcaagaagccagaaggagcaaaccccgaagcagcagaaagccacggaccgcaggaccggaaagccaaaga

SEQ ID NO: 156647 - RNA, 49 nt, Homo sapiens
acacgacgggaaccccgacagagaaaccggggaaacagccaagagggaa

SEQ ID NO: 156648 - RNA, 60 nt, Homo sapiens
gacgacaggagggacaaaaagacccaccaagccacacgacgacgagacacggaagcagcg

SEQ ID NO: 156649 - RNA, 64 nt, Homo sapiens
gacgcggcaacagaacggaaggcacagggagccaagagcagcccgagcgagccggcaaccaggc

SEQ ID NO: 156650 - RNA, 69 nt, Homo sapiens
cgagcagaacccccgaacagaacggaggccgaaaggcgccagccaagaacacaccaagccagcaagaac

SEQ ID NO: 156651 - RNA, 83 nt, Homo sapiens
gagagccgagcagccccggccgggcacggacagggcgaaagccgaccacccggcgaagcgggaaggaagaaagaggaaagcgg

SEQ ID NO: 156652 - RNA, 73 nt, Homo sapiens
gagcgagggggggcgcgccggaaaccggagcgcgcagcaggagaaccacacggccgcacaaggggcacccgag

SEQ ID NO: 156653 - RNA, 34 nt, Homo sapiens
aggagacccacccaaacaacaagggggcagcgac

SEQ ID NO: 156654 - RNA, 75 nt, Homo sapiens
gcacccaccacggagggaaagaccaggcaggacccggcgggggcaaggaagcacggaggcccgggaacaaggaca

SEQ ID NO: 156655 - RNA, 83 nt, Homo sapiens
gaagagacagaggcagacgagagaggagacccaaggagggcaaaaaaggagaaagccacaaggacaaaagacacggacaacca

SEQ ID NO: 156656 - RNA, 75 nt, Homo sapiens
ggggggaagcggaggcacgggcggcccgcaggaccggaccgggggagaagcaaacaggggcaggaaaacccaaaa

SEQ ID NO: 156657 - RNA, 76 nt, Homo sapiens
cggggccgcgggccggccggcagagacgcccccgcaggcgcccgcggcagcgaacgaagcaccagcaccaagacca

SEQ ID NO: 156658 - RNA, 33 nt, Homo sapiens
ggaggagcggcgagggaaaaccaacggcccgga

SEQ ID NO: 156659 - RNA, 84 nt, Homo sapiens
ccgagacccggaggaggcgaagcgagaggacaggacacacagcaacgaagcaggggaggagggaagaccggacagcgagccaag

SEQ ID NO: 156660 - RNA, 35 nt, Homo sapiens
ccgacagcagagacagcccacagagacaaggcaag

SEQ ID NO: 156661 - RNA, 81 nt, Homo sapiens
ggcgccgccgcgggcgccgggagcgagcgggagggagccgcgcgccggcgcgcgccgagcccaaggaaaggcccaggcaca

SEQ ID NO: 156662 - RNA, 82 nt, Homo sapiens
gagaaggggaagaaagaaacgagccgccccgaaaaacaccccccacacacacaacaacaggaggcaaacccacagccgaaaa

SEQ ID NO: 156663 - RNA, 67 nt, Homo sapiens
cagacaccacgcaaaacaaaagacccaaaaggccggaaaggaaaaacaccagaacggaaacagaagg

SEQ ID NO: 156664 - RNA, 81 nt, Homo sapiens
acaaaagcacccagaggggcgggcacgacaagggaagggcgagcacgggccagcccggccacagcagcacgagcggccgcc

SEQ ID NO: 156665 - RNA, 87 nt, Homo sapiens
gccgcagacccacagcggcaccgcaccgagacccgccccgccggagccagccaaccgaacccacagcggaaacgacaaacagccccc

SEQ ID NO: 156666 - RNA, 53 nt, Homo sapiens
ggacagcgcaggcagcagcggaagaccaccaaaagcaggaaaacgagacggcg

SEQ ID NO: 156667 - RNA, 82 nt, Homo sapiens
caacaaagcgagcggcgcgcgccaggaacgaagaagcccgagcaagcggcagagcagccgagaagaagccaaaaaacacgga

SEQ ID NO: 156668 - RNA, 80 nt, Homo sapiens
cccggagcaagcaaagcgccaaaccaagagccccaccaccaagagagagacgcgggcgacacgaccgagaggggaggaca

SEQ ID NO: 156669 - RNA, 82 nt, Homo sapiens
gcggcccgcgaacggccaaggaaggcccaagaggaagggccaggaccggaccgagacgaaaggacccgagccccaaagacag

SEQ ID NO: 156670 - RNA, 66 nt, Homo sapiens
cggggagacagaccaaaagcggggagaagagggaccgagccggaagaaaagacacggcaccaggaa

SEQ ID NO: 156671 - RNA, 87 nt, Homo sapiens
cggccgggcgggggagaggcggcgcgaggagcagcgaaaacggggagagccggaccccagagacaggggccaggccaggggcagggg

SEQ ID NO: 156672 - RNA, 54 nt, Homo sapiens
gggccgcgcaaaccaacccaagcagaagacaaagagcacaacggagccccggcc

SEQ ID NO: 156673 - RNA, 45 nt, Homo sapiens
ggggccgaagcaaccagccccccgagaaggggaaaaggggggacg

SEQ ID NO: 156674 - RNA, 85 nt, Homo sapiens
gacccacagaggcaccccagacacaaaagagccgcagacgcacagcaaccaccggacccgaaggccaccacccagaggggccgcc

SEQ ID NO: 156675 - RNA, 74 nt, Homo sapiens
ggagaaggaccaagaaccaggaagaccgcaggaaagcaggaaggcaagaaagccaaggacgaaacccacacgga

SEQ ID NO: 156676 - RNA, 80 nt, Homo sapiens
acagaggagggcccgggaaggagaaagacagcaaagaaaaggagaagaaaggaaaaaaacaaccccgggcaccccgccag

SEQ ID NO: 156677 - RNA, 83 nt, Homo sapiens
aaaagaaagcaacgcgagcccgcacagcaacccagagacacacaccagacagaagccagaagcccccccagaccgcaacagcc

SEQ ID NO: 156678 - RNA, 76 nt, Homo sapiens
ggccaaccaggcgcccagggcagacaaaggcaaacaaggacccgaaaggaaaccaaacaaggacaagccagaacaa

SEQ ID NO: 156679 - RNA, 80 nt, Homo sapiens
cgcgggaagcagcaccaagcacggccaacgccggcacaggggacaccggaccgagccccgaagccgcagccacaagcaac

SEQ ID NO: 156680 - RNA, 83 nt, Homo sapiens
gcagacagacagccaggcgcccagaggggccccggagccaggggagagcacaagcgaaaccaggccccagcacaccagagcgc

SEQ ID NO: 156681 - RNA, 83 nt, Homo sapiens
aaaacgaagaacagaaagaagaaaagaaagagcagaggaagaggaaagcgaacggacaggaacacaagacacaaacaaaccac

SEQ ID NO: 156682 - RNA, 41 nt, Homo sapiens
cggggagcgcgggcgccccgcccagcaacgccgacacccca

SEQ ID NO: 156683 - RNA, 79 nt, Homo sapiens
cacgccgccgcaccccaaaaacaggcgagaagagggccaagcaccgaccgcacgagcaacccggaagagcccgcacaaa

SEQ ID NO: 156684 - RNA, 74 nt, Homo sapiens
aaaaaagggcggcccgaaggcaagaccgacagaacaagcgcaaaaaaagaagagcagaaacgccaacaaaaaga

SEQ ID NO: 156685 - RNA, 83 nt, Homo sapiens
cggacgcaaacaacagccaaccgcgcaagaggagaagagaagagcacagcaaggaggaaacagcaagggaacaacaacaggac

SEQ ID NO: 156686 - RNA, 50 nt, Homo sapiens
agcagcccccagagcggaacacagacgggagagaaaacgccagacgcccc

SEQ ID NO: 156687 - RNA, 83 nt, Homo sapiens
cgagcggaccgccgccacggggcagccagcacaacgggcggaggggcgcgcccccaggccgacaccggaccaaccgcgggggg

SEQ ID NO: 156688 - RNA, 77 nt, Homo sapiens
gaccgagagcggaccgagagcgcgaaacgcacgagaagccacaaaagaagacccaaagcaccaacaaaaagcaacga

SEQ ID NO: 156689 - RNA, 79 nt, Homo sapiens
ccggcggcacggcgccgaccagcaccaggggaagcgggacaacggggacgagaaaaggaaccacagaacccaagaacca

SEQ ID NO: 156690 - RNA, 63 nt, Homo sapiens
ccagcagcgcgccgccgcccagggacgcacaccgagacgaacacagaacagcacgaccagagg

SEQ ID NO: 156691 - RNA, 88 nt, Homo sapiens
cagcgacggagcagcagcaggccgcgacaggggggagaggggaccgaggaccggaagaagcagaggagccagacaggaggaagacgag

SEQ ID NO: 156692 - RNA, 56 nt, Homo sapiens
aaaggaaggggaagaagaacaaaccccgagaaggcacagaagagcaaaaggagccc

SEQ ID NO: 156693 - RNA, 72 nt, Homo sapiens
gcagacgagcggaggacacccaacccgggccccgggacaaaggcaagaaaggacgagccagcccacgggccc

SEQ ID NO: 156694 - RNA, 65 nt, Homo sapiens
gagcggaggcgacccagccagaggcccaggcggagagcaaagcgggaccaaagcgcgcagaaaac

SEQ ID NO: 156695 - RNA, 79 nt, Homo sapiens
caggaaacagaacaggaggggcacagaccaaaccgaggacccaagggaacgaggagaagagccaggacacagcaggcaa

SEQ ID NO: 156696 - RNA, 75 nt, Homo sapiens
ccaaccaccggaaccacagagcaggccacaaaaccaaagagagagccccacccacgagggccccaccaggaccac

SEQ ID NO: 156697 - RNA, 82 nt, Homo sapiens
ccaaaaccagccagcggagcgaggggaagcgcccggagagaggagagaaaagccacggacccgccagaaacaaccgagacca

SEQ ID NO: 156698 - RNA, 72 nt, Homo sapiens
gaggcggcccgggacaagggcacgcgccaggcgaagcaacccgacgagggagggggagaaagaggacacggc

SEQ ID NO: 156699 - RNA, 81 nt, Homo sapiens
ggacaggccgcagccgccggggcaggcgggaggggaccacagcaggcccaccccaccaaccgcaacgagcagccggacggg

SEQ ID NO: 156700 - RNA, 82 nt, Homo sapiens
gacggagccggaggcgggagccgcggcggccgggggagaccgccaagaacgagagaaagaagaaaagcgaacgcgggcacca

SEQ ID NO: 156701 - RNA, 76 nt, Homo sapiens
cgcgccccagaaggcagaggaacacaacaggcagacgcacacaggcccgaacaagcgacaaaaacgagaaaagcag

SEQ ID NO: 156702 - RNA, 73 nt, Homo sapiens
agacaaaaaacagcaacagacagcacgcgaacaacacagaaaggggaaaaagcacagaccagggcagccagcc

SEQ ID NO: 156703 - RNA, 78 nt, Homo sapiens
aagcccaagccgagagaaccaccagggggagggcaaggaacccagccacgagggagacaacagcaaagacagcgaagg

SEQ ID NO: 156704 - RNA, 80 nt, Homo sapiens
gggcccgcagacggcaggagcagaccaaaggcacaggaagaagcgcaggcaaaagagacacagcagaccccaggagaaaa

SEQ ID NO: 156705 - RNA, 80 nt, Homo sapiens
aagagaaaacaagaaagacaaacgaaaccgcccgccaggccaaaagaagagaaggcacagaagaggacacaaagaagaag

SEQ ID NO: 156706 - RNA, 71 nt, Homo sapiens
ggggcggggccccacggcgaagagaagcacaaaaagccgaggaagcacacggaaccggcaccaggggggcg

SEQ ID NO: 156707 - RNA, 68 nt, Homo sapiens
cccccaggagaacggccaaaggggggcacaacagaacggaaaaacaaaccaaaaaccaaacaagaaca

SEQ ID NO: 156708 - RNA, 80 nt, Homo sapiens
cccggagcaggcagagcagccgagccaggcgagcagcaaaccgagcgcaagaggcaagggcccggcccaccggaccgcgc

SEQ ID NO: 156709 - RNA, 69 nt, Homo sapiens
aggccacaaggaaccaagacagcgccacagacagaaaaggcccagggaaacacccggagaacccaggca

SEQ ID NO: 156710 - RNA, 78 nt, Homo sapiens
ccaacgcccgcaaaacgcgaccacagagagccaccggggagaagcccaacaaggacgagggacgaaaaggagcagcga

SEQ ID NO: 156711 - RNA, 84 nt, Homo sapiens
aggagcgggaccccgagcaccgggccccgcgaccggggcccggggaaggcccgccgcccgccccaggaagaagacggcacggga

SEQ ID NO: 156712 - RNA, 77 nt, Homo sapiens
cacaacgccacgcagacaaggccccggccagacaaggagcccacagagggcacagcgaaaagcggcaggacaaggaa

SEQ ID NO: 156713 - RNA, 61 nt, Homo sapiens
ggggaggaggcgccggaccgggggggacgcaagcgcaaacacaccagcacccccaggggaa

SEQ ID NO: 156714 - RNA, 46 nt, Homo sapiens
ccacacagcgccaacagcgaacgcaccgaagggggggaaacggagg

SEQ ID NO: 156715 - RNA, 82 nt, Homo sapiens
gaagaagaaaaagaaggcccgagcaaagaagagcccgaacaaacaaacacccagaaacaagagggcggagaacggaaaagca

SEQ ID NO: 156716 - RNA, 80 nt, Homo sapiens
cagcagacgccccgaagccaccgcaccgccggcagcggaagacgacgaggacgcaggcaagcacgcagcacgggggcagg

SEQ ID NO: 156717 - RNA, 86 nt, Homo sapiens
aggcacacagaaacaacacaagccacaccaggccggaagacagcagggagagaaaacaaagaacaggcacacagcacccggaccac

SEQ ID NO: 156718 - RNA, 68 nt, Homo sapiens
agaacaagccaggaaaaccccgaaaacgcaagaagcgagccgagggaaaaccagccagggagccaaga

SEQ ID NO: 156719 - RNA, 75 nt, Homo sapiens
agaacgcagaggcccacagcaaggcagaaaccacgcagaggagagaagcggagacagggggcgacagaagcagag

SEQ ID NO: 156720 - RNA, 76 nt, Homo sapiens
cgcagggcgcccccgcagccgcgaacgcggccgggaggcagagcgaggcaccggcgccacaaggcaacacgcccac

SEQ ID NO: 156721 - RNA, 72 nt, Homo sapiens
aagagccacaaaggagcgccagacaacacagacccgagaggcgaggaaagggccgcccccaacaagaccccc

SEQ ID NO: 156722 - RNA, 74 nt, Homo sapiens
gcggaacaccccagaccgaagacgaaagaacagcgaggggacacagaagagagccgaagcgacagaaccccaag

SEQ ID NO: 156723 - RNA, 68 nt, Homo sapiens
aaaagcagaaacaagacaggaggaagaaacagacacggacagaaaccgccgggaacccaaacagcaaa

SEQ ID NO: 156724 - RNA, 76 nt, Homo sapiens
agaaccagagaccacagaagaaggaagggccacccaggacaggggcacccaggaacgagggaaaggaacccgacac

SEQ ID NO: 156725 - RNA, 80 nt, Homo sapiens
ggagccgcggcgcggggccgggccgggagccccagggcagccgccccgccgagcgcaggcgggcaacacaacaaggcgcg

SEQ ID NO: 156726 - RNA, 75 nt, Homo sapiens
cgagaagaaggcacacaagaacagaagagccaagggggaagagccaccggaccaggaaaccacccgagccggaag

SEQ ID NO: 156727 - RNA, 74 nt, Homo sapiens
aagaccaccccccagaggccgcgacgacccccagacggcggaaaacccgaagcagaagcccgacacaggcacaa

SEQ ID NO: 156728 - RNA, 82 nt, Homo sapiens
agggcaccacgacccgaaggcggagcagccgagaacgagccaaccaggaaaaagcaaaccgccacgccaaggcagcgaggcc

SEQ ID NO: 156729 - RNA, 73 nt, Homo sapiens
aacccacggagagaacagccaggggagaaaaccagaagcccacccagagagagaagaacaaggcggccaaacc

SEQ ID NO: 156730 - RNA, 78 nt, Homo sapiens
cgggcccgaggaggcagccaagccgagccgccacccggcggcccagggggaggcagggcaggggaaacaagacaaacg

SEQ ID NO: 156731 - RNA, 51 nt, Homo sapiens
aaaaagggagacagcagaagcagcacacacaaagaacaagaaacacaagaa

SEQ ID NO: 156732 - RNA, 59 nt, Homo sapiens
gccgccccaacaccagggaagagacacacccagacccggaacaaaggacccagcgaaag

SEQ ID NO: 156733 - RNA, 76 nt, Homo sapiens
agcaaaagccggacagcaggacacaaaccaaaacgagcgcccgcagggcacggcaaagaacaaggccccaggcgag

SEQ ID NO: 156734 - RNA, 68 nt, Homo sapiens
ccaggcagacagacaacccccggagccggggccacacccacggaaacaagcaccaggagccgaagacg

SEQ ID NO: 156735 - RNA, 80 nt, Homo sapiens
gaagggcgggggcgagggcccgggacagcgcacccacacagggccaaaacaccagaccagacccaaccagcggaccggag

SEQ ID NO: 156736 - RNA, 60 nt, Homo sapiens
cggcacgcacgcgggcagggaacaggcggagcggaaggcaaaaggcagaccgaaaaaaca

SEQ ID NO: 156737 - RNA, 70 nt, Homo sapiens
gaggcggggagccaacagggaagcacccacaaaagacggagcgagaggagagagagccagagcgacaaca

SEQ ID NO: 156738 - RNA, 73 nt, Homo sapiens
ccccaggccaagcagccaccagcagcccccagagcgggaccacagggccggggacgccaaacgcaagggagac

SEQ ID NO: 156739 - RNA, 79 nt, Homo sapiens
agcccagccccaacacgcgcaccggaagacggaggcccccgccaacgcagccagacgaggcgaggaaccaaaggccacc

SEQ ID NO: 156740 - RNA, 75 nt, Homo sapiens
ccgcacagcagagagcaacccgaaaaggccccacgaagagcccagccccccccagccggaagagcccccgagcga

SEQ ID NO: 156741 - RNA, 80 nt, Homo sapiens
ggaagccggcggagcgagacgagaacccggccgcgcaagggaaaaacaagagcggaccagaggagaccaccggcccccgg

SEQ ID NO: 156742 - RNA, 107 nt, Homo sapiens
aaagacccggaaagaagggacacagacggagcaaacccccagggaccaagaaaggcccagggaccaaagcccggacaaggcccgagcaccaggaccgcagaaggccc

SEQ ID NO: 156743 - RNA, 59 nt, Homo sapiens
gaaaacacagcaaaggcagaaacaagagaggcaagagcaacgaaccaaagcaaaggagg

SEQ ID NO: 156744 - RNA, 73 nt, Homo sapiens
gccacacgggacagggcccagaaaaggaaccaagagacagagaagaaaggcaacaaagaaaacacagagacaa

SEQ ID NO: 156745 - RNA, 74 nt, Homo sapiens
aggcgagaaacggaccaccaccgaaggaacggacaacaagcccaaaaacaggcccggcaccgaggccggaacgc

SEQ ID NO: 156746 - RNA, 86 nt, Homo sapiens
acaagaggggacaagaccagaaccaggacccaagccgggagcaggaaagaaaagaagcagaagaagcagcaaaaggaaaagaagaa

SEQ ID NO: 156747 - RNA, 78 nt, Homo sapiens
ccaaaggaaagccacggccgagaagaaacagaaacagaaaggaggaagggaaacaccccaagccaagcgagccagccc

SEQ ID NO: 156748 - RNA, 80 nt, Homo sapiens
cgagcagaccggcccgaccgcccacagacccaaacaaagagaaagacaagagcaccacagcaaaacccaaaaagaacgaa

SEQ ID NO: 156749 - RNA, 62 nt, Homo sapiens
acccggcgacaacacccggccccgagacagaagccggaaagcacagagagcaggaacaaggc

SEQ ID NO: 156750 - RNA, 73 nt, Homo sapiens
ggccccgcggggcaaacggagggacgaggaagacccacaggcagaacggccacacaggcagaggcaacgcagc

SEQ ID NO: 156751 - RNA, 77 nt, Homo sapiens
acacagcacaccggagagacgaggaacaaaaccagccaagcagaggagaaaaagacagcaccccagagccagaacca

SEQ ID NO: 156752 - RNA, 63 nt, Homo sapiens
aaggaaaaggacgaagaaagcaaaggggaagaacacggaaaccggacagggacaggaaagaac

SEQ ID NO: 156753 - RNA, 55 nt, Homo sapiens
cgcgcagcgggcacggaggccggggccagaacgggcaagcggacacaaaaccaag

SEQ ID NO: 156754 - RNA, 80 nt, Homo sapiens
cagcggcaggggccccgaaccagaagccgaaaagacgagggaagaagaccgacaacaaccaggggaagggaaaaaagaag

SEQ ID NO: 156755 - RNA, 83 nt, Homo sapiens
ggaccccgcggcgcccccggcccggagcaacgagcgcagcgccggccgacgcccgccgcggccggggaacaggccacagccag

SEQ ID NO: 156756 - RNA, 61 nt, Homo sapiens
gcaagaaggcacagaaaggaagaccagcagaagaaagccaaggacacgcaggacgaagaag

SEQ ID NO: 156757 - RNA, 82 nt, Homo sapiens
agggccgggagcccggcacgagcgccgacaacccggcgccagagccggagaaagaagcaggagagaccaaggcagggagggg

SEQ ID NO: 156758 - RNA, 75 nt, Homo sapiens
cagacaccgagccagcaagcccccaacgacagaacaccgcccggcggaagcgccaggacgggcacaggagaacac

SEQ ID NO: 156759 - RNA, 49 nt, Homo sapiens
gaaggaccaagaaccagccagcgacagcccaccacaggaggagcagggc

SEQ ID NO: 156760 - RNA, 76 nt, Homo sapiens
aaaggccccgacagccgacacggccggcgccggggacgcaaggcccggacagcgagaacgagagccgggccgagcg

SEQ ID NO: 156761 - RNA, 37 nt, Homo sapiens
ggggaccccgaggccgcgcgcggggggacggaagcgg

SEQ ID NO: 156762 - RNA, 75 nt, Homo sapiens
gagcgaaagggcgacacaagaggggaggagaggaggaccagaccacggagacgccacagagacaaggccaagaaa

SEQ ID NO: 156763 - RNA, 70 nt, Homo sapiens
cgagacggaaagagacccagggcgccaaaaacaggcaaccccgcacaaacccagcgaacaacggaggagg

SEQ ID NO: 156764 - RNA, 72 nt, Homo sapiens
gggagccggcggcgagcggcagaagagcacaacacagaagaaacggcaagcaaggacgaacacacaagccga

SEQ ID NO: 156765 - RNA, 81 nt, Homo sapiens
gccgggcaggacgccgagcgggacccccgccgccccgggggccggacggggacggaaagagagccgcagcgcagaacaagg

SEQ ID NO: 156766 - RNA, 73 nt, Homo sapiens
agcggcaaagggaccaccacagaacggagggaaggaagcaagaaacagggaggacagaaacacgggaggggga

SEQ ID NO: 156767 - RNA, 53 nt, Homo sapiens
cggcaggcaaacacggaacgcggcgaccgccaggaaaacgaacacaggcgagg

SEQ ID NO: 156768 - RNA, 75 nt, Homo sapiens
cggagggaggggacgcagagagagcgcagggagagaaggcgcgcaggagagcgcagagacccgcccggaagcgag

SEQ ID NO: 156769 - RNA, 79 nt, Homo sapiens
gaggggacggacaacccgacgaggaacgaagggacaagacccgccagaacagagagaaggcagaaacaaaaaagggaga

SEQ ID NO: 156770 - RNA, 78 nt, Homo sapiens
agggcgcagcagagagcgggcgggggggccgcaaaccaagccaggcccgaagagcacccagacagggaccccgcccgc

SEQ ID NO: 156771 - RNA, 89 nt, Homo sapiens
cgccgagcaacaaccgccgagcgaggacgggaggggcaagcgcggccaaccaaggccaagagcgagcggaagaagaagagccggccgcg

SEQ ID NO: 156772 - RNA, 68 nt, Homo sapiens
acgcagggcgcccccgacagcccaggaagcccagggcgaggacgccacggcgcgcggaacagggaaga

SEQ ID NO: 156773 - RNA, 82 nt, Homo sapiens
gggggaaccgcaagcggccaagcacaaagagcgccccacgagagaacggcacacgcgagcgaaaccccaaggcgcagacacc

SEQ ID NO: 156774 - RNA, 77 nt, Homo sapiens
ggaggacagagacaagcggacaaaagggcagcaacgcccacggaccgagaaaaggaacaggacggacgagaagccag

SEQ ID NO: 156775 - RNA, 67 nt, Homo sapiens
cccagggaaaacacacacaaacaaaggaagagcagcgcggcccgagccccaggagagccgaggaccc

SEQ ID NO: 156776 - RNA, 87 nt, Homo sapiens
caggggccccgaacccgggaaaagaggaacaaggcggaggaacgagacgcgaaccagaagccgaggcagggaaaccaaaaggagaac

SEQ ID NO: 156777 - RNA, 73 nt, Homo sapiens
caggcacagcacgggcagagccaggccaaggaaaaggaacagagagagcagaaccgaaacggggaaagaccga

SEQ ID NO: 156778 - RNA, 62 nt, Homo sapiens
agcccaagaaacaccaccaacaaaccgcagcagccgcccaaaacacaaaccaaagaagaaac

SEQ ID NO: 156779 - RNA, 72 nt, Homo sapiens
ccggaaaaggcccaaaggccgccaggccgcagacgcgaaggaacggcaaagaacagacgacacaggaaaacg

SEQ ID NO: 156780 - RNA, 77 nt, Homo sapiens
caaggcaaagcagacacagcagccgacaagacaagaccacagaaagaagcgaacaggagcagggacggggggaaaag

SEQ ID NO: 156781 - RNA, 73 nt, Homo sapiens
ggggagccgaccacggacgccagaaaccacacagcacgaggaccgcgggcacgagcgaccagcaaggcgggcg

SEQ ID NO: 156782 - RNA, 82 nt, Homo sapiens
gccggcaaaccgggcacccgaaccaccccacagcagggcagcaaacaagccagcagcaaaccaggaccacaccccgacccca

SEQ ID NO: 156783 - RNA, 74 nt, Homo sapiens
ggacggaagcgagggcacgggcggcagcccgagaccgcagcagagagcccacgaacggcgggaacagaaagcca

SEQ ID NO: 156784 - RNA, 80 nt, Homo sapiens
gcaaagagggcggaggcaccaagggagaaaagggggaaccagcagcaacgaagagcaccgaaaagacaacccgagggaag

SEQ ID NO: 156785 - RNA, 72 nt, Homo sapiens
acaggaggcgcggaggacgccccaccgccgacgcccccagccaccaggccccccagggcccgcagggccgag

SEQ ID NO: 156786 - RNA, 81 nt, Homo sapiens
gcaacgccgccccccccgccgcggcggccggcgaagcccggcgccagacagggccccccaaagaaccccagacgcaagaag

SEQ ID NO: 156787 - RNA, 77 nt, Homo sapiens
aaagaccacggacagcaggcccacacccaggaaagaggagcccccaggacaggcacacccgggaaaaccgaacaccc

SEQ ID NO: 156788 - RNA, 72 nt, Homo sapiens
acccgaaaagcgccaaggaaaaggacgagaacgccgcgacagaaacggagaagcggaggagaccaaggaggc

SEQ ID NO: 156789 - RNA, 76 nt, Homo sapiens
agcgaagaccgaagcccaaagcaggcacccacccgcgagacccccaagagacaaaagaagggagaacggaaagaaa

SEQ ID NO: 156790 - RNA, 71 nt, Homo sapiens
ggcccagggccccgggccgccgggaggcggcagcagaaggaaaggacggaaacagaacccacgcacccagc

SEQ ID NO: 156791 - RNA, 80 nt, Homo sapiens
gggcagccccgggccaggccgcggccggggcaggagcgcagaggaccacacaccccgaccacagcgcaacaacccacgca

SEQ ID NO: 156792 - RNA, 77 nt, Homo sapiens
gcgcacaccgggcacgaacccagcggccagacacaacacgcgagggcagaagggacaggagagagggcaagagacga

SEQ ID NO: 156793 - RNA, 90 nt, Homo sapiens
cagcaagcgggcggcaagacacggggcgacgccacagagaaagacgggcccgggacacccagacagagagagcgcacgaagaagggcgga

SEQ ID NO: 156794 - RNA, 74 nt, Homo sapiens
ggagaggcacccagagccgaagagcacgaaagccaccgcacaaaggaagagcgacagcagagaccccaacaccc

SEQ ID NO: 156795 - RNA, 77 nt, Homo sapiens
accagagagccgcggggaaaggaggacacgagggcccagcagcagcgaacagagagagggaagagaaaccagagaga

SEQ ID NO: 156796 - RNA, 77 nt, Homo sapiens
gcgccgcccggacggccgcagagcgcgccacagaggggaaaggccagacagcgcagcagccgccagcacgcaacacc

SEQ ID NO: 156797 - RNA, 67 nt, Homo sapiens
agggaccaccagaacagccacagaacagggaccccgacggagagacaaagaagacggagggggggcc

SEQ ID NO: 156798 - RNA, 98 nt, Homo sapiens
gagaaaggcggcgggcgggcgcgaggggacgcgcacggcgggccggccaggagccggggggggcagcggagaagaaaggacagagaggagcgaccaga

SEQ ID NO: 156799 - RNA, 100 nt, Homo sapiens
acagagaaagagaagagaagagaaaggcccggagaccccgccgcagcaagagagagcaaggagcaggcgcagagcagagcagagcagggcggggaggcga

SEQ ID NO: 156800 - RNA, 52 nt, Homo sapiens
cgcagacgccccagaaggacagcagaccacagcccggcaggcccaaaaaccc

SEQ ID NO: 156801 - RNA, 70 nt, Homo sapiens
agacacagacaccagcagacggccaagacagagaaggacagcaaaaggagaaccagggagaggaggagaa

SEQ ID NO: 156802 - RNA, 117 nt, Homo sapiens
aacagacagccacgcagacggaaacaaggcaacagaaagagcaacagcagggcaacagcgcaaaaggaaacaaggcccccacggagccaccggccaaggcccaccccacagcaccgc

SEQ ID NO: 156803 - RNA, 80 nt, Homo sapiens
gcgggcccgggagacccaggcgggacagagggagccaggcagagacacgagaggcgagggacgacagagcaagcggcaga

SEQ ID NO: 156804 - RNA, 72 nt, Homo sapiens
aagaagcacgaaagccccacccgccgcagcaagcagaggacccggcccaacgagcccacgaagaacacacca

SEQ ID NO: 156805 - RNA, 76 nt, Homo sapiens
gaagacacaggggaacaccaaggggcaacgggccagagagggaaggaaacaagccaggggcaaaaggaaaaaggaa

SEQ ID NO: 156806 - RNA, 63 nt, Homo sapiens
gcgaacaaccccagaagaggaaacaaacagaagcgcacgagaacccaggccgcaaggaacgaa

SEQ ID NO: 156807 - RNA, 74 nt, Homo sapiens
ggaaaagcagaggagcccagggagcaacacagcccccagggcagaacaagaagggcaaccaggggggaaggagg

SEQ ID NO: 156808 - RNA, 63 nt, Homo sapiens
gcgcccgggccgcgccgccccgccccagacagagaaaaggcacagacggaggaggaacgcaca

SEQ ID NO: 156809 - RNA, 55 nt, Homo sapiens
agaggcagagagcaaagaacccccaagcaggaaggccgggaggcccagcccccgc

SEQ ID NO: 156810 - RNA, 72 nt, Homo sapiens
cgacaagcacccagcagccggaacagggccagcaccgcaagcgaggacccaaaggagacaaccagcagcagc

SEQ ID NO: 156811 - RNA, 89 nt, Homo sapiens
acggagccggcagcggcgcgggaggccggcgggcccccccaaggcggcgaaagagccacccagggaagggaaccgggcagcaaggaggc

SEQ ID NO: 156812 - RNA, 88 nt, Homo sapiens
gcggacgagcggagaaggccacaccacgcagaacgcaacaccaaggcacaccaccccagggcaccggcacagacagaagcgcggcccc

SEQ ID NO: 156813 - RNA, 67 nt, Homo sapiens
gaagaaaaagcagaagggaagagaggacaacggcaagcggagaagagcaaggccgaaccgagaggaa

SEQ ID NO: 156814 - RNA, 80 nt, Homo sapiens
ggcagcagcggcgggggcaggcgccagaagaagaaaaaagcgccgcccagcgcgcagcccggagagagagaagagagaac

SEQ ID NO: 156815 - RNA, 61 nt, Homo sapiens
ccgaaagcaccaaagacgagagagaacgagggccaaagccaacgaagaaaagaggagcgcc

SEQ ID NO: 156816 - RNA, 83 nt, Homo sapiens
cgggacggagcggccggggccggggcgccgccgggcggccgggcgcggcgagcccaggaaaagacaggcagggaggcagcggc

SEQ ID NO: 156817 - RNA, 74 nt, Homo sapiens
ccgccagggagccgagcaacaaaaaggaccgaggggccgagcgggagggcccggccgccgcccgccagcggacc

SEQ ID NO: 156818 - RNA, 73 nt, Homo sapiens
gaacggaggagagaaaccaagaagaaaccacagaagcagacacagcaccagagaaaaaaaacggaccaccgcg

SEQ ID NO: 156819 - RNA, 78 nt, Homo sapiens
cagcaccacacgcccccaagacaacgaaggcagagagacgaagagagaagcagggcagaaagagcggaaacgagaaga

SEQ ID NO: 156820 - RNA, 71 nt, Homo sapiens
aaacaaccggggcagacaacagagaaaaacccagacagacagaacaggagagaaagccgaaagcggagaga

SEQ ID NO: 156821 - RNA, 86 nt, Homo sapiens
gcgagcgccgaggggacaggccgagcgcggggcgccggaggcaggaaaaagccaggaccacgggccggcacacgaagagcgccccg

SEQ ID NO: 156822 - RNA, 57 nt, Homo sapiens
aggaggggcaggcccggcggacgaagagaaaaaccaccgcacagcgcgagaagaggg

SEQ ID NO: 156823 - RNA, 78 nt, Homo sapiens
ggcagcgggaccggcggccaaggcaaaacggaggaggcagggagagagcaccggacacagccagcaggacgacgagag

SEQ ID NO: 156824 - RNA, 73 nt, Homo sapiens
cacagaaagacgcgcgaagacgccaaaaaagacacacgcccaagagcggggccggacgggcacccagaggcgc

SEQ ID NO: 156825 - RNA, 62 nt, Homo sapiens
cggaaggcgggcgacagcggcaggggccccgaaccagaagccccagcagggagaagcgcgga

SEQ ID NO: 156826 - RNA, 80 nt, Homo sapiens
gcgggagcggacggcgagcgcgagcggcgcgagaaagccggcccggccacccccgggcccgcgccccaggcgagagcccc

SEQ ID NO: 156827 - RNA, 55 nt, Homo sapiens
aacccggcggcccgaaggaggaaagccggacaagggcaccgccgaccgaaaccgc

SEQ ID NO: 156828 - RNA, 79 nt, Homo sapiens
ggagaggcgacggcccgcagccggaccccaccggacggcggggccacgggcgccgggaggaagcgccaggacgaaacca

SEQ ID NO: 156829 - RNA, 87 nt, Homo sapiens
aaggccagaaagaggagcagagacgccggacagaaacaacgaacgagcaaggaagggccaaggcagaccccacaccggagaacgcaa

SEQ ID NO: 156830 - RNA, 80 nt, Homo sapiens
gcggcgcggggcccccagaaggacgccagcggagaacgcggcaaagcgaggccaccacacgggcgcggggaacgaggggg

SEQ ID NO: 156831 - RNA, 81 nt, Homo sapiens
aacccagagaaaccagaaaaagacgacgcccggaagaggcgaaacgcaaagcagcccgaggaggcacgcaaaacaacaggg

SEQ ID NO: 156832 - RNA, 81 nt, Homo sapiens
gcggccgggggcccagcccgggcggcgcggccaggggaggagcagagcccaggaagccagggacggcagaaccgaacgggg

SEQ ID NO: 156833 - RNA, 68 nt, Homo sapiens
ggacccgcagccccaaagggggagacacagccagagcgaggaaaacccagcccggacgccacaagaga

SEQ ID NO: 156834 - RNA, 41 nt, Homo sapiens
acaaagcaggcggcacaaccaggggagcgacgccccaccac

SEQ ID NO: 156835 - RNA, 76 nt, Homo sapiens
aaagaaggccgcggcaaagagagagcagagcccgagaacacgaaacaaggaagaaagaagcaagaaaaacagaccg

SEQ ID NO: 156836 - RNA, 46 nt, Homo sapiens
ccggcggcaaaagcagcagaagggaaaggaccacaaagaaagagcg

SEQ ID NO: 156837 - RNA, 87 nt, Homo sapiens
agcgcaccaccgcagcggcgccgcgggcacggcgaggggggcggccgcccaccggccagccgccaccggggaggcagaggcagccgg

SEQ ID NO: 156838 - RNA, 72 nt, Homo sapiens
ccagcccggcgaaagggcccgagggagcccacggcccggagcacacaaggcgaaagaaaaggcaagagaacc

SEQ ID NO: 156839 - RNA, 38 nt, Homo sapiens
gccgggagccgccccgccagcgcagacggggcgccagg

SEQ ID NO: 156840 - RNA, 80 nt, Homo sapiens
aacaacccgcaaacgaaaaagaacgacagagcaaccaggaaagaagaggacgaacaggacaaggaacggagccccagcgg

SEQ ID NO: 156841 - RNA, 72 nt, Homo sapiens
cggcagggggcacccgcggccggcccggggccccgggaccggcgcccccccggaggcagcacggcaggagac

SEQ ID NO: 156842 - RNA, 51 nt, Homo sapiens
gacagacccacaacaccaggcgccagagagagcaggagacggagggcagag

SEQ ID NO: 156843 - RNA, 65 nt, Homo sapiens
agaaaaaaaggacccaaaaggaagaaggagccccccgagagcaaaccagaaaaccagaagccccg

SEQ ID NO: 156844 - RNA, 55 nt, Homo sapiens
agaaacaggcccacaccccccaggcagcacgcggcccccgaaccccgccgccggc

SEQ ID NO: 156845 - RNA, 85 nt, Homo sapiens
cagccccaaggccagcggagccagcacccccacaagcagcaggggcaaaggagcagagaacgacaagccacacgaggacagcccg

SEQ ID NO: 156846 - RNA, 68 nt, Homo sapiens
gagaagagccagcacccaacgagccaagccgacgccagcgggcgccacccaacaggcgcaccgcccac

SEQ ID NO: 156847 - RNA, 58 nt, Homo sapiens
cgaaccaggcagcccaaagcgcaccagggcagcagccggcgcacacaacggcgaagac

SEQ ID NO: 156848 - RNA, 66 nt, Homo sapiens
ccggcgcgggaaacgggcgaagcgacgagccgcgaggaggagaacacgagacccgcacaaaacccc

SEQ ID NO: 156849 - RNA, 52 nt, Homo sapiens
gcccccgagagaaaggagcagcaggcgcaaaaacgaacccacaaccgaacga

SEQ ID NO: 156850 - RNA, 75 nt, Homo sapiens
cagccacgcagacggaaacaaggcaacagaaagagcaacagcagggcaacaggaagaagagagggcgaaggaggc

SEQ ID NO: 156851 - RNA, 78 nt, Homo sapiens
agcagacggcgcccgcccaggccgcccggacggggcgggaaaaaccagaagagaaaaaacaaaggggagaggcacccc

SEQ ID NO: 156852 - RNA, 52 nt, Homo sapiens
cacacggcccaacaccgcaaaggaagaaggccggaagggaacagagaaacgc

SEQ ID NO: 156853 - RNA, 81 nt, Homo sapiens
ggaggacggcggcccccgcccacaccccaagcacccaggaaccggcaacagcagcgcggagagcgaggggccaaaagccgg

SEQ ID NO: 156854 - RNA, 69 nt, Homo sapiens
cacccggcgacaccaaagagcaccgcgaacaacgcaaaacagcgccggccgggggaagcggcaagaagg

SEQ ID NO: 156855 - RNA, 72 nt, Homo sapiens
cgaaacaggccggggcacagcacagcgccggcgcaagagaggaaacagcggaggaggccacaggcacgcacg

SEQ ID NO: 156856 - RNA, 79 nt, Homo sapiens
ggaacacaacagccagccacgcccggaggaccagggggagagggaggaagaaggccaaggagaggagccgccgcaccca

SEQ ID NO: 156857 - RNA, 49 nt, Homo sapiens
gggcccagcccaaggacccgacagggcccgagggcaggacagcaggcac

SEQ ID NO: 156858 - RNA, 79 nt, Homo sapiens
ccaggcaccggcaagacgcacgagggaggcaaaagcaggggacgaagagccagcgaggcgcacaacggggaagcagcca

SEQ ID NO: 156859 - RNA, 81 nt, Homo sapiens
gcggcacacccccgacccacgcacccgcaggagagcccgcgagccagaccaacacggagcaggagggggaccaaaaccagg

SEQ ID NO: 156860 - RNA, 77 nt, Homo sapiens
gagggaaacgaaaacacaagaccacaagaaagaagacacacagggaaaaccaacccagcaacagagcgccaaaaaga

SEQ ID NO: 156861 - RNA, 49 nt, Homo sapiens
aaaagcaagaaaggcaggaaccaggaacaggccaggcgccggcaggagc

SEQ ID NO: 156862 - RNA, 66 nt, Homo sapiens
acccgcacgcccaggaggagcaagccgaggagaggcaagcggggaccaccaggcaggaaaacaagc

SEQ ID NO: 156863 - RNA, 76 nt, Homo sapiens
caggcccggacccccgaccgccggccggccccagcccaggaccaaaggagaaaaggagggaccagaaccgggaaga

SEQ ID NO: 156864 - RNA, 75 nt, Homo sapiens
acaggaggcagcccaaaagaaaggaagaaccacacgacaaagagagaggagcgaaagaaggggaggcaaggaagc

SEQ ID NO: 156865 - RNA, 70 nt, Homo sapiens
gcagcggagagcgggagaaccaggaaaagagacgacggcccaagaacaccgaagacagaaggaggggcag

SEQ ID NO: 156866 - RNA, 66 nt, Homo sapiens
gggaagaggaacagccaggggcccacggagagcacgaacccaggagccgggcagccgcgacacagc

SEQ ID NO: 156867 - RNA, 63 nt, Homo sapiens
cggaacgggcacagcaaagccagcgcaggccaagcagaaggcagccgcggagcgcgcagaacc

SEQ ID NO: 156868 - RNA, 73 nt, Homo sapiens
aggagaaagccacaacagggcggcaacaggggcgagaaaggcgccagaggaagaaaaaagcccaccgcccaga

SEQ ID NO: 156869 - RNA, 80 nt, Homo sapiens
gaacagcggacaagaacgaggaaggaggcaaaaccggaagaccaggacaaaacagaggggaagccagcagagaagaaaac

SEQ ID NO: 156870 - RNA, 70 nt, Homo sapiens
ccggcggcggccggccgcccagcgggacccgccagccaacgccaagaaccaagaaagacgacgcggaacg

SEQ ID NO: 156871 - RNA, 35 nt, Homo sapiens
agccccacccaacgggaaagaagaagggccaccag

SEQ ID NO: 156872 - RNA, 81 nt, Homo sapiens
ggccacccgcccagcaggaccggaccggggcgccgggcgaagccaggagggcccgagggcgcacccacgacgcgcacacca

SEQ ID NO: 156873 - RNA, 63 nt, Homo sapiens
cagaacaccggaaggcgggccacagagcggagcacccgggggcagcaggggaccacgaccaca

SEQ ID NO: 156874 - RNA, 69 nt, Homo sapiens
cggaggaaagcgccaagccggacaaaggagcacacaacaaaccggagggaggaccagccgcaagccgcc

SEQ ID NO: 156875 - RNA, 67 nt, Homo sapiens
ggaaagcgacacaagaagggaaggaacaaggacccaacaaaccacacaaggcccgacaccgaaaagg

SEQ ID NO: 156876 - RNA, 63 nt, Homo sapiens
ccacgggaaagcccccgcagccggcagacaaagacagcgcccaaagcacccggacacgaccaa

SEQ ID NO: 156877 - RNA, 70 nt, Homo sapiens
cagcagcggagaaacagagggaggaagaggcgcggcaagggcgcggcaagaaaaccggggccgccccacc

SEQ ID NO: 156878 - RNA, 62 nt, Homo sapiens
ccgacccgcccagcacgaccagccagcagaaccaagagccacgagagaggaagaccgacacc

SEQ ID NO: 156879 - RNA, 73 nt, Homo sapiens
gcacacccgcccgcagaagagagcgaccggagcggggaacacgccagaaaacaaggagacaagaaacccacca

SEQ ID NO: 156880 - RNA, 81 nt, Homo sapiens
ccgggcgcccaagcgacagcgcagaggggcaggagccgggagccaccgcgaaggccgggcgggggaggcgagacacgggag

SEQ ID NO: 156881 - RNA, 82 nt, Homo sapiens
ggaaccaggaagagagacgacgggcaacagacagacagaagagggacaagccaagaaacccggaacgaggaaaacacggagg

SEQ ID NO: 156882 - RNA, 77 nt, Homo sapiens
gccccccgggaaagaccgaggaagaaaggggaccacaggccaaggaacgaagcggccacggagcccaaaaggaaaaa

SEQ ID NO: 156883 - RNA, 74 nt, Homo sapiens
cacagaaaaagacgaagaagagaggcacgagaggcgaccaagaagggggccacaagaaaagcaagggaaagcag

SEQ ID NO: 156884 - RNA, 73 nt, Homo sapiens
cagggagaagagccaccacgccaccgcagaccagcggagcacggaaaggacccagaagaaccacgcgcaggcc

SEQ ID NO: 156885 - RNA, 72 nt, Homo sapiens
ccacaccccccggcgagccaagaacacggccacccaacagaaggagggagggggggaacggaacccaggcgc

SEQ ID NO: 156886 - RNA, 75 nt, Homo sapiens
aaaacagcagaaggcagagccagcaaaaaggcgaagaagaagaagggcgcgaccagccacagaagccagccaaca

SEQ ID NO: 156887 - RNA, 81 nt, Homo sapiens
gcgcagaaggaccgggagcacagccgccgaagggaacaggcacgccccacccgccagccgagcccccgacgcagcacaaag

SEQ ID NO: 156888 - RNA, 115 nt, Homo sapiens
acaagagggcccgcaggcgagaaacggaccaccaccgaaggaacggacaacaagaggccagaaaagggcggggcaccggcgacagcggccgccaaacgcggggggacggggccaa

SEQ ID NO: 156889 - RNA, 75 nt, Homo sapiens
gaacaagccagaacagccccagcagacaaaccagacggaaaggccgagggggacggcaagagcacacaccccgga

SEQ ID NO: 156890 - RNA, 71 nt, Homo sapiens
aaacaagcaagcgccacagagcagggggagaccagaagagagaagaagcaaaccgggaccggaagcaccaa

SEQ ID NO: 156891 - RNA, 56 nt, Homo sapiens
accagcagcccgaggccgcaaccaggaaccgaacacagggagggccaagaaccccc

SEQ ID NO: 156892 - RNA, 57 nt, Homo sapiens
gaaaccgcagaaagcaagaacgcgcaagaaggcgggaaggcaaagaagaagcgccca

SEQ ID NO: 156893 - RNA, 63 nt, Homo sapiens
ggcccgcgcgcgcaccccgcggacgccacagcgcgaagggccgggccggggcacgggcccacg

SEQ ID NO: 156894 - RNA, 86 nt, Homo sapiens
ccaacgggacgggcaagacgagagggcccgacggaggggaggaaggcagaagacgcggcaagcaggagaggccggacagagccggc

SEQ ID NO: 156895 - RNA, 84 nt, Homo sapiens
cgggaaagcgcggaacagaggcagagacccaaccagggcagaaccgcacgcagcacccgaaagcaccagaccagccagcaaaga

SEQ ID NO: 156896 - RNA, 69 nt, Homo sapiens
agaaaaacgagaacgccaccagccaaggcgacgcaacacacgagagcgaaaccaaggagaaaacccaac

SEQ ID NO: 156897 - RNA, 79 nt, Homo sapiens
agggacagacaggggccacaaaacccaggcgcggaagcaagggccaaggaaagaccacccaagaaaggagacagaacca

SEQ ID NO: 156898 - RNA, 75 nt, Homo sapiens
acagagcgagggaggagagagggagagccaaagaagacacggccaaaagaagacccagacaagaaagaggaagac

SEQ ID NO: 156899 - RNA, 73 nt, Homo sapiens
agaaggaccaagaaccaggacccccgcagcaaacacaagaagaccacacgacccagccccacgggaccacggg

SEQ ID NO: 156900 - RNA, 78 nt, Homo sapiens
gcacccaccgagaaggccagcaggcccaccaagccgagaacaccaggaaacagcccaggggaaggccacggagaagcg

SEQ ID NO: 156901 - RNA, 81 nt, Homo sapiens
cggggcggaccaccgcccccgcgccccgcaccgcggcaaagagaggacgcagcgagaaaggaaaagaaggaggccagcggg

SEQ ID NO: 156902 - RNA, 75 nt, Homo sapiens
accacagcagaaagagaaggagagacacaaaagagaccacacaaggaaggcagggcgacccaccaacaggcaacc

SEQ ID NO: 156903 - RNA, 59 nt, Homo sapiens
gagcgggaaaaccgagcgcgggagaagacaaaacagaggagaccagaccagaagccccg

SEQ ID NO: 156904 - RNA, 53 nt, Homo sapiens
gaagacaaggagggagggagaaaagcaacgggcacggcggaggcaaggcggac

SEQ ID NO: 156905 - RNA, 60 nt, Homo sapiens
acggaggacaaagggaaaagcgcgaggcaaagaacagccacaggaagagggaacaaagaa

SEQ ID NO: 156906 - RNA, 77 nt, Homo sapiens
gacagacccccgcacacagccaaaggcgaccccgaggcgccaaccggaacaagacgcccgcgccaggcaaagcagga

SEQ ID NO: 156907 - RNA, 79 nt, Homo sapiens
cggcagagcccccccgagcaccacaccccaccagcccccacaccagccacccgacacagagcgaagccgacggggccga

SEQ ID NO: 156908 - RNA, 81 nt, Homo sapiens
cgacgcaggccccggaccccggccggggggcccacaccgcgcacaggaacacggacagaaagaaggaaaaaacgcaagaag

SEQ ID NO: 156909 - RNA, 59 nt, Homo sapiens
cacagaccaggaggagaaaaggaaccaaagaagggcgaagaagaaccgcgaaggacgcg

SEQ ID NO: 156910 - RNA, 66 nt, Homo sapiens
aacaaggcgacaacacaggggaacaggaaaaacgagaggagagagaacgcccggaaagagcccagg

SEQ ID NO: 156911 - RNA, 41 nt, Homo sapiens
ggacggacgacacccagagccaaaccgagaagcccaggagc

SEQ ID NO: 156912 - RNA, 81 nt, Homo sapiens
gaaaagccccaagaaagcccaggacgggccaagagagcccgggcccggaaagccccacacaaggagagcaagcagggaggg

SEQ ID NO: 156913 - RNA, 71 nt, Homo sapiens
ggaggagaggagcgagcccaggagagacgagcacggcagccaccgacagaaggaaggcaccggggccgggc

SEQ ID NO: 156914 - RNA, 75 nt, Homo sapiens
aaaagcgccaaggaaaaggacgagaacgccgcgacagaaagacgaaagagggccccacgcccaaaccaaacgaac

SEQ ID NO: 156915 - RNA, 71 nt, Homo sapiens
gagaagggcaggcccaccagggaacggccccggaagacaaacccgaggcgagaaccaagacaacaggcgaa

SEQ ID NO: 156916 - RNA, 65 nt, Homo sapiens
ccagccgcgcccgggagagcaaggaggaggcgccccaccacgaacgcgaacgacaccaccgagaa

SEQ ID NO: 156917 - RNA, 82 nt, Homo sapiens
gaaaaaacagagcggcgcccagagaaacagcccggaaaggaaaaacagaggcaaagcagagaagagcgaaaagcgaggagcc

SEQ ID NO: 156918 - RNA, 52 nt, Homo sapiens
gcgggccgcacgcccgggccgcgccacgagcgaaaaacccaaggaaaaggac

SEQ ID NO: 156919 - RNA, 85 nt, Homo sapiens
caaacagcagagagaacggaggcgagacgacagcccaaacaggagcggagcagccaaagagacggaacagcaggaacagcggcac

SEQ ID NO: 156920 - RNA, 36 nt, Homo sapiens
gccggcccccagacagggagcaggaagaagagagcc

SEQ ID NO: 156921 - RNA, 75 nt, Homo sapiens
agacgggcaaagccccggagcggaaggacggccaggagaccaggaagacacccaccagggacgcacgcaaacaac

SEQ ID NO: 156922 - RNA, 77 nt, Homo sapiens
gcagccaggccacaggcagcgaacgggaaaggccccaacagacgcccgagggcagagcggcaacaggccaaggaggg

SEQ ID NO: 156923 - RNA, 75 nt, Homo sapiens
aagcgccaccaaggaagcccggcaaacgagacgccaccaacaaggcgccgcacccagccagcggggcggcggacg

SEQ ID NO: 156924 - RNA, 74 nt, Homo sapiens
cagcccacaaaggcaccgggagcaggaaaccaggagaccagggcgacacccacgggccagacccgaagcagaca

SEQ ID NO: 156925 - RNA, 80 nt, Homo sapiens
agggggaccacacacgggcagccgcagaccggcccaggaccgaaggagaagcaccggccacccggagaaaggccacggcc

SEQ ID NO: 156926 - RNA, 74 nt, Homo sapiens
agagcgggggacgggggcgggaggccacgggagggccgcgcgccggagaccgaaggccacagacagggaggcca

SEQ ID NO: 156927 - RNA, 75 nt, Homo sapiens
ccggcaggcgcagccgggcccggccccagccgacggaaagcagaacaccagagaggaccaaaacaaccacaccga

SEQ ID NO: 156928 - RNA, 73 nt, Homo sapiens
caaaacagacccacggaccacaaagcaggcagaaacacagggacaccggagaccgaagaacggaagcgcacga

SEQ ID NO: 156929 - RNA, 77 nt, Homo sapiens
agagccgccagcggagaccgcggacccagagaaaagagaaaagcgcggaagacccaaaaagccacaaaagaagcaca

SEQ ID NO: 156930 - RNA, 75 nt, Homo sapiens
agacaaaggcaccaggccaccacagaaacaaaagcaacaaagaggggagcacggcccaggcagccaagaaggcag

SEQ ID NO: 156931 - RNA, 77 nt, Homo sapiens
gagaaagcgaaagggagaaccccgggaccagccggaaaaaacggacccgagacagccagcccggacacgagaaacag

SEQ ID NO: 156932 - RNA, 79 nt, Homo sapiens
acacgcaagcaggcaaccgaaacaggaaggagggccccggagcagccacaccaccgaggccccacccagcacgagcaca

SEQ ID NO: 156933 - RNA, 37 nt, Homo sapiens
ccgcaggaccggcacagaccagaccggaagaagcagg

SEQ ID NO: 156934 - RNA, 62 nt, Homo sapiens
gagagccaaagaagacagggcgacagaaggagaggaggaaacaaccgaaaacagcgacccca

SEQ ID NO: 156935 - RNA, 36 nt, Homo sapiens
cggacggagaaaccacgcagggcagaaaagaacaga

SEQ ID NO: 156936 - RNA, 75 nt, Homo sapiens
agccaggccgcgaaaaccacaacgcaccagagggcaagagcccagcgagacaccggaggaaagcaggaaaacggc

SEQ ID NO: 156937 - RNA, 69 nt, Homo sapiens
cccggaaaacaagaggcgccaggaggccagcccgcagcgggcccaggcggaggcgccaacagaagaacc

SEQ ID NO: 156938 - RNA, 102 nt, Homo sapiens
acccagcgccaccacaacagcagcaacccgggcagcgccaagccaggggcacaccaagaaaaccacaaagggaaaaacaaacaggagaaggaagagaccaag

SEQ ID NO: 156939 - RNA, 67 nt, Homo sapiens
gcccagcaaggaaacaaagggaggcggaaccagacaacaaagcacacggagagagagaagaaccgag

SEQ ID NO: 156940 - RNA, 75 nt, Homo sapiens
cacacaaacagagacgacagggaaagagagcgccagaaaacccccagaggagcaaaaaggacagagcacagagcc

SEQ ID NO: 156941 - RNA, 58 nt, Homo sapiens
accgcccgaaagaccccccagaaaagcaaaccccacgagaacaaagcacggcagaaac

SEQ ID NO: 156942 - RNA, 76 nt, Homo sapiens
gccaacaggaccagcagggcgggcaggcccacacagcggcggaggcggaccggggggcccgggcccgccagacccg

SEQ ID NO: 156943 - RNA, 65 nt, Homo sapiens
ggcgaccgcagcagagaaagccaccgacccagcacaagagggggaaggaccgcaggacgaaaacg

SEQ ID NO: 156944 - RNA, 77 nt, Homo sapiens
gaggggagcaccaggaccgggccggaacgagacgcacgagcggacggccaaggaggaggagcgcagcacccagggaa

SEQ ID NO: 156945 - RNA, 76 nt, Homo sapiens
ggaggcggcacccgggggcggcgccgccaccaaaacgaagggccggcagagacgcaacggcggggaccgagccaca

SEQ ID NO: 156946 - RNA, 71 nt, Homo sapiens
caaccacccgggcccaaccagcccagcgcgcggccccaccggacaacggcaagagagcaccgcccccccgg

SEQ ID NO: 156947 - RNA, 67 nt, Homo sapiens
gaggcagggcggaaaagggaccgggaaagccccaacggacacccccccacccgggagacacgggacg

SEQ ID NO: 156948 - RNA, 82 nt, Homo sapiens
gcagaagaagcaacacgcaaacgagagcgaggcaagaaaaacagggcaaggccagagaaggcgggagaaagacacgaaccac

SEQ ID NO: 156949 - RNA, 72 nt, Homo sapiens
gaaagggaagccgagaaacagccagacgcaaagacgcaaagacaggcgcacgaaaaagaaacacaagcgaga

SEQ ID NO: 156950 - RNA, 74 nt, Homo sapiens
ggaggccagccccggcacagaggcaccgaccgcaccggaggagggaaagaaaacaagccacccagacaagagga

SEQ ID NO: 156951 - RNA, 69 nt, Homo sapiens
ggccaaccacacagcacgacacagaccccagccacccccagggccaggcaagaaagagcgcgacgagga

SEQ ID NO: 156952 - RNA, 55 nt, Homo sapiens
ggcacgaggccggaaccgcccagccccggggaaaagaaacaaacaacaagaagaa

SEQ ID NO: 156953 - RNA, 57 nt, Homo sapiens
ccccaaccccggcagccccagagagaacggacgagaccaacgcggaaaccagcaaga

SEQ ID NO: 156954 - RNA, 68 nt, Homo sapiens
cggagggcagggggcagggcggcagagcgccacggccggggacccagacagaggggcggccccaagag

SEQ ID NO: 156955 - RNA, 72 nt, Homo sapiens
aaaaagagaagaacgaaaaaagagaggggaaagaggaggacaagggcaaaaagcacaagagccaggacccca

SEQ ID NO: 156956 - RNA, 78 nt, Homo sapiens
gcggcccacggaccaggccaggccaccgcagaggcgaaagagggccagagacaagacaaaagacaagagcgcaccggc

SEQ ID NO: 156957 - RNA, 65 nt, Homo sapiens
gggaagcagcaccacggggagacaagcaagcagagggcagaccgacggaacccaggccagccaaa

SEQ ID NO: 156958 - RNA, 69 nt, Homo sapiens
ccacccccaaccccacgccaccgaagagccaagcccaggaaagcgagagcaacgccccagggccacagg

SEQ ID NO: 156959 - RNA, 72 nt, Homo sapiens
gccagcgcagcaccaccggcagccggggagccacgacaacagacgcaacacagcaaccaaccccaggcaaaa

SEQ ID NO: 156960 - RNA, 78 nt, Homo sapiens
ccgccgccgccgaggaggcgagcagccgggagacaccgccaccgccagggaaacacaaagaagacaccagaagggcca

SEQ ID NO: 156961 - RNA, 58 nt, Homo sapiens
gaccaggaaaccacccgagccggaagccaccaggcagaccgaccaaacagggagcagc

SEQ ID NO: 156962 - RNA, 60 nt, Homo sapiens
ccggcccggaccaaccagaaaagggccagggacgaagccccgggcccggaccggagccca

SEQ ID NO: 156963 - RNA, 82 nt, Homo sapiens
cacgcgaccccggccgcggggccaggaagcggaggagccccggaggcagagcggcgccagcccagcaagcaaccacgagagc

SEQ ID NO: 156964 - RNA, 73 nt, Homo sapiens
aagccggcgcgcggaaagccaacacccggaagacccaccaaaaggggagcgggagcacagacccaggagaaga

SEQ ID NO: 156965 - RNA, 76 nt, Homo sapiens
cgagacggagaaggagcggacaggcagaacagaggccaaaagaagaagaggcggccagagggacaacagagaagga

SEQ ID NO: 156966 - RNA, 88 nt, Homo sapiens
aacgcccgagcagaagaaaagggcgcggaagacacgcgggcgggggcgggggccggagagaagcggaaaggcaagacgaacagcaagg

SEQ ID NO: 156967 - RNA, 79 nt, Homo sapiens
gagcccggaccccgcccccgcggcccagcgcccccaggaacgcgaagagacccccaggccaaagcacccaaaaaccagc

SEQ ID NO: 156968 - RNA, 77 nt, Homo sapiens
ggccggagacccggagcagggcccgaggaccagaccgggacagaccggagcggggaggagcgccggccgaaacgagc

SEQ ID NO: 156969 - RNA, 79 nt, Homo sapiens
agaaacccagacagacgccggggaggcagcgcgggacccagcccaggcggcgcggacggggcggagcagagaaaggggg

SEQ ID NO: 156970 - RNA, 88 nt, Homo sapiens
gaggggagccgcccccagacggccagccgagcggccggacacagccagccaccgccccaccaacggggccaaccaaaaggagcaggcc

SEQ ID NO: 156971 - RNA, 71 nt, Homo sapiens
ggagaaaaagcacaagaaggcaggccacgaagaaagcagggcagagccgaggaacagaaacaggagaagcc

SEQ ID NO: 156972 - RNA, 75 nt, Homo sapiens
gccagaaaacagaaacgaaacagaacagagagaagcccagggaccagagacacaaccgaagagcagggaaagcca

SEQ ID NO: 156973 - RNA, 81 nt, Homo sapiens
cgaccgggcgggggccccgcgccgagggacgccaccgcacacggaaggagcaagacgagaacaacgacaaaagaaggggcg

SEQ ID NO: 156974 - RNA, 79 nt, Homo sapiens
acaccgacggagaaaacaggagcgcggcgacacagaggcccaacccaagcaaacgacagcagccgacacggccagacag

SEQ ID NO: 156975 - RNA, 80 nt, Homo sapiens
ggagaaggacggacccccaggcgccacccggcccagccgcgaaaggaagagggggagcggaccccgaggccccgcaaccg

SEQ ID NO: 156976 - RNA, 77 nt, Homo sapiens
cgcaaaccacaagcagggacagacgaaaagaccccgcacacccccgagcagaggcagaggggcccgcacgacacccg

SEQ ID NO: 156977 - RNA, 75 nt, Homo sapiens
cccaggcgggacagagggagccaggcagagggaagggcgagcacgggccagcccggccacagcagcacgagcggc

SEQ ID NO: 156978 - RNA, 71 nt, Homo sapiens
ccccaagccacacagcaacaggaccacggacaagaggggcccagacagacgagagcggcacgaggaccaag

SEQ ID NO: 156979 - RNA, 74 nt, Homo sapiens
cagaaggagccaaagggccccgcgaacagaagaaacaggccgaccgggccgaggcgaaccagaagagagaagag

SEQ ID NO: 156980 - RNA, 55 nt, Homo sapiens
gccacagcccaccgaggcaccacagcacccgagggacccgaggagcccaccaagc

SEQ ID NO: 156981 - RNA, 72 nt, Homo sapiens
gccgcggcccccgccgcggcacgaccccacagacaacaggcacaaagagagaaggaacacccacagggcaga

SEQ ID NO: 156982 - RNA, 56 nt, Homo sapiens
aaagccggaagcaagccgccgggagaaggaagaacggcgaggcggaacggcgaagc

SEQ ID NO: 156983 - RNA, 72 nt, Homo sapiens
aacgaggcaccacaccgcacagcaagcgggcaggaaacaagagacgccagagcacggagacgaaaggagaac

SEQ ID NO: 156984 - RNA, 41 nt, Homo sapiens
gaagaggaggaagccagcgaggcgcggacaccgaagcccga

SEQ ID NO: 156985 - RNA, 80 nt, Homo sapiens
gcgggggaacggaagaggcggggagcggccccagcgcagaacggagggaaagggagcagcaccggccacacccacagcac

SEQ ID NO: 156986 - RNA, 89 nt, Homo sapiens
ccgccgccgaccgccgcccgccacacccgccgccaggcacacaggaccccgcgagccagcggcgacgggaacaagccccaaagagcgcc

SEQ ID NO: 156987 - RNA, 121 nt, Homo sapiens
agacaagaagcggaggcaacgaggccgagcgcgcggcgccgcaacaaagcagacaccaggaggcccaaggaacagcacagcagcgacacacggaccggagcagcccacagccacaggacag

SEQ ID NO: 156988 - RNA, 61 nt, Homo sapiens
cggaccccgcggcgggaggagccgccccgaggaagagaagaccgccaaagggacagagcga

SEQ ID NO: 156989 - RNA, 75 nt, Homo sapiens
agcccacgagcacagagggccccagagggcagagcagaagagggcgaaagacgacgagaacggcagaagagcccc

SEQ ID NO: 156990 - RNA, 69 nt, Homo sapiens
caaccaaagcacaaaaaacaccgaagccagaagacggaaaaaacagggccacccacccaggaccccccc

SEQ ID NO: 156991 - RNA, 77 nt, Homo sapiens
cgccagaaagggggccgggcacgccagggcaagcgcagaacaaggagcaggagaggcccgcgcagggccaagcaagc

SEQ ID NO: 156992 - RNA, 61 nt, Homo sapiens
caaaaaaaggcggcacaacacaagggaagaaggagaaagggccaaccccgaagaagcaaac

SEQ ID NO: 156993 - RNA, 90 nt, Homo sapiens
caagacagaaagggagaagacaccccgcccggccagacagaccaaaaaccagaggcacaaggaaagccaaaaagccagggggacaggaga

SEQ ID NO: 156994 - RNA, 81 nt, Homo sapiens
gccagacacccgcaaaagagagacgcagaaggagaaagacagcaaagaaaaggagaagaaaggaaaaaaacaaccccgggc

SEQ ID NO: 156995 - RNA, 58 nt, Homo sapiens
gggaaaagcaacgcggagccgggaggccaggagaaggaaggagcaggaggccaagcca

SEQ ID NO: 156996 - RNA, 80 nt, Homo sapiens
gccggaacgagccggccggagcccccgcccaaggagaagcgcccaagcggacggggacagcccaccacaagcaggcccca

SEQ ID NO: 156997 - RNA, 82 nt, Homo sapiens
gccggggcccccagcaagaacgggaacaaaaccgccccgacaagggaccgggcgggccccgcaggaaacccccaccggccca

SEQ ID NO: 156998 - RNA, 83 nt, Homo sapiens
cgcggaggagcgaggcagcgacaggacgggaacggagccacgcgcccaggcgcaggcaggggccacacgcgcacgcaacccgc

SEQ ID NO: 156999 - RNA, 76 nt, Homo sapiens
gccgagagccgcccgggccagcggccgcgcacccccggccggaggcaccagcggagaaaccccggcacacagcggc

SEQ ID NO: 157000 - RNA, 72 nt, Homo sapiens
ggagaacgggaggcgcagaaagagggaagaaagaagccacagagggcgcagaaggggaaaccagaaagccgg

SEQ ID NO: 157001 - RNA, 75 nt, Homo sapiens
gggaaagaaccacaagcccacgggacacgcggcaggaacggagaggagcccaggggaagagaggggccgaggggg

SEQ ID NO: 157002 - RNA, 82 nt, Homo sapiens
gacgggccagcccacggcagaaagacggcggaagaggaggggacgacaccggagaaggcagcgacgacagcgacagcgagaa

SEQ ID NO: 157003 - RNA, 75 nt, Homo sapiens
cagagacgaaccaggcaaagacgagaaaacagcgagcccggacagaagcgaaaaacagaagcggacgagcaaggg

SEQ ID NO: 157004 - RNA, 76 nt, Homo sapiens
caggcgggagacgcacagcaagagccaggacaccggaagcgggaaaaggcccagggcagaggagggcggaaccacc

SEQ ID NO: 157005 - RNA, 82 nt, Homo sapiens
ggccccccgccgcgccccgggaaggagggaaagggagcagcaccggccacacccacagcacgaccggaacccagcgaccgac

SEQ ID NO: 157006 - RNA, 61 nt, Homo sapiens
aagaaaaggccaaaacgaaaaaccaaacagagggagcagcgccagccgcccggccgaaggc

SEQ ID NO: 157007 - RNA, 83 nt, Homo sapiens
gagcacgagaaaacggcggggcgccgcgcccggggagacagaaacgaggcgcccccagcagcaggaggacgacgacaaggcag

SEQ ID NO: 157008 - RNA, 86 nt, Homo sapiens
cgacacgagaaaaccaaaggagaaaggaagacagcagaaaccaaagagccaggcgacccccgcgcccgaggcccagaaggggacaa

SEQ ID NO: 157009 - RNA, 70 nt, Homo sapiens
gaaaaacggagagccacaaaaaaggaagcgaaagcgggagcaccagacagcgacagacgcaaacacgagc

SEQ ID NO: 157010 - RNA, 88 nt, Homo sapiens
aggggggagcccccgagggacaaaaagaggcgaccgcacggcaggagaccaaggaaaggcccggggaaagggcaaagaaaacaagaac

SEQ ID NO: 157011 - RNA, 73 nt, Homo sapiens
ggaccagcgacaaggagcgcagcagcagaaagcaggacagccccaaaagggagcgggaaagaacaaggaagag

SEQ ID NO: 157012 - RNA, 41 nt, Homo sapiens
ggcccggaggaagaaagccaaggaggacagggccagcgcca

SEQ ID NO: 157013 - RNA, 40 nt, Homo sapiens
ggaaccagcgccgagggcaccagccggggaaaggagcgca

SEQ ID NO: 157014 - RNA, 78 nt, Homo sapiens
ccgggagaagcagaaaacccggccagggacaggaaagaaggaggaagcccacccagccgaccgaacccaacagacacg

SEQ ID NO: 157015 - RNA, 81 nt, Homo sapiens
aaacaaggcagccacaaagcaaaggcagaccaggggaccccacgggaaagcccaggagagagccagccgagcagaagcgag

SEQ ID NO: 157016 - RNA, 67 nt, Homo sapiens
gacccacaggaagaaacgacaagaaggagaggagcagagagaaaagacacagacggcaaaacccaaa

SEQ ID NO: 157017 - RNA, 74 nt, Homo sapiens
acgccccgagggcggcgcgacacaggcaaacagacaaagaagagcgcgaagcaggccccggagaccaaaggaca

SEQ ID NO: 157018 - RNA, 67 nt, Homo sapiens
aacaagccgggaaagcacaaaggagagaacgacggagagaaaacaagccgacagaagaaagcagaca

SEQ ID NO: 157019 - RNA, 81 nt, Homo sapiens
gaagaagggaaggcgcgaggaggaaaggaggacgagggccaaaaagcagaaaaacaaaccagcccaagaagcgacaaagcc

SEQ ID NO: 157020 - RNA, 73 nt, Homo sapiens
agcgggaagcaggcggcaaccacccgcacggaggacaaaaacgcggaggggaccagagaccaaaaaaaaaacg

SEQ ID NO: 157021 - RNA, 87 nt, Homo sapiens
ggaggcgcgggcggagcggaaagaggaggagaggggaggaggcgaaggaggaacccggaagaaaaaaaaaacaagagggcgaaaacg

SEQ ID NO: 157022 - RNA, 111 nt, Homo sapiens
cggcggacagaacacgcagaagcccccaggacagaccgagcccccggaaaccccagcccccgagcacaacaaggagagggagaggggcagcgggacccaaaacagcccaga

SEQ ID NO: 157023 - RNA, 64 nt, Homo sapiens
gaacgcccaacgagaccagcgagacggcccagacgagccggggaaaaccccagggcaaaacgcc

SEQ ID NO: 157024 - RNA, 36 nt, Homo sapiens
gcgccacgacgggcacggccagcgacgacagagacc

SEQ ID NO: 157025 - RNA, 67 nt, Homo sapiens
gccaaggcaggcggacacaagagagcgacgccacggaggaggcccccgcagaacagaagcgaaggcg

SEQ ID NO: 157026 - RNA, 73 nt, Homo sapiens
aagccagagccgggccccaacaacccgggcgccacaggagccgcagaagcaaaggcaccgccaaaccgaaaac

SEQ ID NO: 157027 - RNA, 82 nt, Homo sapiens
cacgaaaccagagccgaaaaggccggccaagcaacacaaagacaagcaggcgcggcaggaccgaccacaagacacagagaac

SEQ ID NO: 157028 - RNA, 77 nt, Homo sapiens
cgggaagccccggcccggcgaacaacggagcacggagcgcagccgggggccgggaccccgcgcaaccccaccggaac

SEQ ID NO: 157029 - RNA, 77 nt, Homo sapiens
ggcaaagccagaccagcggccgggggcagaccccagcccacaacccacgcgcaccgggaccggcccagccccccgca

SEQ ID NO: 157030 - RNA, 76 nt, Homo sapiens
gcgcaggaccggggaaccgccaaagcccgggcgcggaagaagccaagacacaaaagccaggaagacaagagcagaa

SEQ ID NO: 157031 - RNA, 40 nt, Homo sapiens
gcgccaagcaggagcgaaggaccagcggaagccgcagaag

SEQ ID NO: 157032 - RNA, 70 nt, Homo sapiens
aacgcagccagacaggcaggcaaaaacaggagaccgcggccgaccagagaacagacaacgaagagaggaa

SEQ ID NO: 157033 - RNA, 73 nt, Homo sapiens
gggagggccacaggaggcggcgggccccgcccgccgaaggagcccaaaaggcagagcgaggagagaagaagga

SEQ ID NO: 157034 - RNA, 76 nt, Homo sapiens
agcccaggcagcgggacaaccgcaccaggccaggcgaaccagccgaaaaaggagaaaccaaaaggaaaagcgaacc

SEQ ID NO: 157035 - RNA, 82 nt, Homo sapiens
cgcaaccagacgccagcgggacgaggaccgagaccgcggccgggaccgaggccccacggacccagaacccagcgccgaccgc

SEQ ID NO: 157036 - RNA, 63 nt, Homo sapiens
ggccgaggggcggcggccccagagagcgggacgggcagaagaaaacccaccaaggggcaacaa

SEQ ID NO: 157037 - RNA, 55 nt, Homo sapiens
cccagaaccacgcaaccacgcaccccggacaccccaggaccaccaggacaacccc

SEQ ID NO: 157038 - RNA, 71 nt, Homo sapiens
gcccgcccgccagagggaggccccccagccacaggaacaggcccacgcggaccggcagcgccaccggacca

SEQ ID NO: 157039 - RNA, 80 nt, Homo sapiens
ccagcaccacccggaggagaccggcagcaggaagccaggagggaagcccagaagacgcacaagagagaccgaccaaaccc

SEQ ID NO: 157040 - RNA, 79 nt, Homo sapiens
cagacgcagggcgcccccgacaggacacagaacagagaagaagcagacgagacagaaaaagaaccagacagagaaaaca

SEQ ID NO: 157041 - RNA, 75 nt, Homo sapiens
ccggcaacgcaaggagcacacaccagaaaccaggagagaccaacgcacaaaaaaaaccggagaaaaagcagacag

SEQ ID NO: 157042 - RNA, 80 nt, Homo sapiens
cgcagaaaccccggacaaggcacgccagacggcccggcgggagaagcgaaggaagaagacgcagaagcaggacgacccga

SEQ ID NO: 157043 - RNA, 91 nt, Homo sapiens
cggagccaggggcccgagggcggggaccggcggcgcggaggagcgaggcagcgacaggacgggaacgggcgcacaagagcagggaccccag

SEQ ID NO: 157044 - RNA, 79 nt, Homo sapiens
cggcagcaggcgccggacgcgagcgaggcggagaagggacacggcaggcgccagcaaggcgccaccggaagaaacggga

SEQ ID NO: 157045 - RNA, 76 nt, Homo sapiens
gcgcgccacgaccaccggccgcgggcccggaacacgagaccgaccgcccccaggaggggaggaaaaccgccgccgg

SEQ ID NO: 157046 - RNA, 81 nt, Homo sapiens
ggaggagaccccagcccaggcggggcccaaagaggagacggacagaagggcacaggacccgagccccaaagacagaaaagc

SEQ ID NO: 157047 - RNA, 76 nt, Homo sapiens
gaacgggccagagagggcaaacacaaacagagcccagcaaggagggacggaggccccagcgcggagggaaaacagc

SEQ ID NO: 157048 - RNA, 57 nt, Homo sapiens
cgcccacccggaccgagggacaagacaggaccagcaaccaaggcgccagcccacgga

SEQ ID NO: 157049 - RNA, 72 nt, Homo sapiens
cagaaggggagaaggcaggcaccacaaaaaggacagacaacggcaaggcaagacaaaacgagcaaacaaggg

SEQ ID NO: 157050 - RNA, 76 nt, Homo sapiens
ggccgggcgaggaggcccaaagcaccgagcgcccaggcaaggcacccacccccagaaaccaccagggccacggaga

SEQ ID NO: 157051 - RNA, 78 nt, Homo sapiens
ccaccccgcgccagggagcgccgcggcggagcggcggagagaaaagacccccgaagacaaggaggacagaaagcaacc

SEQ ID NO: 157052 - RNA, 66 nt, Homo sapiens
ccccccccaaaccgagccaaaagcggcaaggcaacaggagggacgccagaggggaagccgcacgag

SEQ ID NO: 157053 - RNA, 72 nt, Homo sapiens
cacagccccggggaccagaggagaccgccacacaagagaagacccaccgaggaggaggacggaggggggagg

SEQ ID NO: 157054 - RNA, 82 nt, Homo sapiens
gccgcgccgcaccccgagcgaccgaagccaccgggccaagcacaacaccagagggcagcaggagcgcagggaggacagccca

SEQ ID NO: 157055 - RNA, 71 nt, Homo sapiens
gcccccaccgaggcgcccaggacagacaacgaaccggacagaggagccaagccgggccggggcacaagccc

SEQ ID NO: 157056 - RNA, 77 nt, Homo sapiens
accgacaaccaagggccccgcggaccaaggaagaacccgaagcaccgaaaagaaacgaagccgggcacggacaggac

SEQ ID NO: 157057 - RNA, 76 nt, Homo sapiens
acaaggagcagagacaaaaccaagccaaacacaagcagaaggagcgaagaagagagccggaggagccaccaacaga

SEQ ID NO: 157058 - RNA, 76 nt, Homo sapiens
aacgacaggagaaccaggagcgcgacggagaccagccagacggacagcaggaaaaagcggggaaaacaaaaaaaag

SEQ ID NO: 157059 - RNA, 71 nt, Homo sapiens
agcacacagcaaaagagacagacggacaacagcccaacaacacccagccgcggcccgccaccgagaccaga

SEQ ID NO: 157060 - RNA, 69 nt, Homo sapiens
ggaacgggcggaccagggcgagcacgagcacccgccccaacgagccaagaccccagccaccccccaagg

SEQ ID NO: 157061 - RNA, 48 nt, Homo sapiens
cacccccacgccggggagggcagggaacccgcccgcaaaaggccacaa

SEQ ID NO: 157062 - RNA, 57 nt, Homo sapiens
cgggagagcccgggccacccccccaggcaagaagacgaccccgacgcaggccaggag

SEQ ID NO: 157063 - RNA, 43 nt, Homo sapiens
gaacggccgcgagcgggcggccagacggaaggcacgagggccg

SEQ ID NO: 157064 - RNA, 94 nt, Homo sapiens
caccccccgccgggagggccacaggaggcggcgggccccgcccgccgaaggggcgagaggagcccaaggacaccgggaacacgccgccgaaagc

SEQ ID NO: 157065 - RNA, 69 nt, Homo sapiens
acgccggccgcgaccaaggaagcagaggaggaaaagaaggaagcaagaaacacggaggaaagcagacga

SEQ ID NO: 157066 - RNA, 70 nt, Homo sapiens
ggccaaggcaaagaaaccgccacagagcgcgaaggggagggcacgagacaaagaagggacccaggacagc

SEQ ID NO: 157067 - RNA, 79 nt, Homo sapiens
ggccccccaggacacgaagggaggaggaggaaggagcagagagaaaggagagacggaagaaagcggaagccagcaaccc

SEQ ID NO: 157068 - RNA, 81 nt, Homo sapiens
ccccgagccccccggcgggagccccgcgacgcgcccggcccggagcccccagcgcagcggccgcggccgaggaaggcgggg

SEQ ID NO: 157069 - RNA, 79 nt, Homo sapiens
gaagccggagccgccgcaagccacacgggagcgcccaaaacaaaccaaagaagaacaccagagggccaccagagagcca

SEQ ID NO: 157070 - RNA, 58 nt, Homo sapiens
gccccgagccgaccgcgccgcacgggagccagcggggaacggacaaacaacgaccagg

SEQ ID NO: 157071 - RNA, 61 nt, Homo sapiens
ccgccaccccgcccacccggggcgcggcccccagccgcaagacaccaggggggaaaaacca

SEQ ID NO: 157072 - RNA, 36 nt, Homo sapiens
caccgagggcaccacgcgcggggaagcaggggcgaa

SEQ ID NO: 157073 - RNA, 72 nt, Homo sapiens
aagcagggggaagcaagcccccaacaagcaaaggaacgaaaacccgaggagagagcccaaaagagccaaagc

SEQ ID NO: 157074 - RNA, 70 nt, Homo sapiens
aggagccacgcggggacgcgccagggggcaccccccgggaagaagccccccagcaaagccaaccgcggac

SEQ ID NO: 157075 - RNA, 60 nt, Homo sapiens
aacgcaagaggccacaacgcaggcagagcagaaggcaaaggaaagcacaccgaaagaaaa

SEQ ID NO: 157076 - RNA, 76 nt, Homo sapiens
cgcacccccggcgcgggggaccgaggggacaggaccgcagggggggccgaagaagccagggggaggaaagcagaca

SEQ ID NO: 157077 - RNA, 51 nt, Homo sapiens
cggcaaagaggggccggaccacaaggcaagagcagacagaaagcacccaac

SEQ ID NO: 157078 - RNA, 70 nt, Homo sapiens
aaaagaaggccaagaggaagaaccagcaaagcgcaaacccagcaggaacgcagcccagagggaaaaccca

SEQ ID NO: 157079 - RNA, 73 nt, Homo sapiens
accccagaaacacaggaacaaggccaagcgaaggcgaaaggacacggaacaagagggaggcaggcccaccgcg

SEQ ID NO: 157080 - RNA, 81 nt, Homo sapiens
cgcggacagcgcgggcgggccggcgcccggcaggacaacaccacgacccggagacgggcagccgaaccggcgaggggcacc

SEQ ID NO: 157081 - RNA, 75 nt, Homo sapiens
cccacccacgaagggaggaaaagggcagggacagcgcaggcagcagggacaggcacccaccgcaggcaagaacag

SEQ ID NO: 157082 - RNA, 71 nt, Homo sapiens
ccgaaggagcgaaaagcacagaccccggaaacacccaccaccgaaccagcccggaacggcagcaacacagc

SEQ ID NO: 157083 - RNA, 73 nt, Homo sapiens
caaaaaaaagaagaacagaaaacagcgggagagaacgccccaacagaccagcccacgccaaaaagggaaaaaa

SEQ ID NO: 157084 - RNA, 86 nt, Homo sapiens
cgccccgcgagcacagagcccgccgccgaccgccgcccgccacacccgccgccaggaacaggacacccaaccgcgagaccagcaag

SEQ ID NO: 157085 - RNA, 81 nt, Homo sapiens
ccgcgcgcgggagcgaggcccgcggagcgccgccgcgcggcccccgacagcgcccgggagccgcccccgacacccgagccc

SEQ ID NO: 157086 - RNA, 81 nt, Homo sapiens
agacggcgagaccccgcacaggggcaggaacggagaaaaacgagcccccgaccggaacagcagaccgagccgcgcaagaca

SEQ ID NO: 157087 - RNA, 126 nt, Homo sapiens
aagagcccaggcggcggcggccaagcccaacaacccccgggggcacggaccgggggacgcgccgaggagcaggaggaagagcaccaggagagagcgcgagacaagacggaggcgacaagacccgga

SEQ ID NO: 157088 - RNA, 35 nt, Homo sapiens
gccccgagagcggaacagaccagagggggacacca

SEQ ID NO: 157089 - RNA, 74 nt, Homo sapiens
gcgccagccacacacaggagcacaacaaagaacggacacggcacgccacacccggcgaccggacagaagacaga

SEQ ID NO: 157090 - RNA, 75 nt, Homo sapiens
cggaacaggcacaccccacacaagcacgccaaggagcacaggcacgaacgcagcggaaccgggccagcagaccca

SEQ ID NO: 157091 - RNA, 59 nt, Homo sapiens
aagcaagaaggcccggacacagcaaaccgggccacagaaaccccacacaaggacaacac

SEQ ID NO: 157092 - RNA, 71 nt, Homo sapiens
gaagaaagccccaccgagcacagggccagcggccagcgcaacggaaacagaaaagagcgggaaccagccaa

SEQ ID NO: 157093 - RNA, 80 nt, Homo sapiens
aggaggagcgggcgagaagcgccgccgaacgacaggacgggggcggccggcccccagaccacccaagaagaccaaggccc

SEQ ID NO: 157094 - RNA, 37 nt, Homo sapiens
ccggacacacaaggccaacagaggcagaagacaagcc

SEQ ID NO: 157095 - RNA, 52 nt, Homo sapiens
agaaggaccaagaaccagaacagagaagcagaccaaaggagccagggaaccc

SEQ ID NO: 157096 - RNA, 77 nt, Homo sapiens
cgggggaggccggcgacgagaagacaacaggcacaaagagagaaggaacacccacagggcagacagagaaagaacac

SEQ ID NO: 157097 - RNA, 74 nt, Homo sapiens
gcgacagccccaccggcaaaggggagagaagaggcaccccagaaccggccagcaccaggaaccaagaagaagag

SEQ ID NO: 157098 - RNA, 72 nt, Homo sapiens
cggaaaagcaaagacaagccgggaagagaaagcgcaccaggacaaaagaagggcagcacaaaggaaagcccc

SEQ ID NO: 157099 - RNA, 76 nt, Homo sapiens
ccggcgcagcgagcgcggacggagaggaaagcggggcagaaagcaccagggaaaagaagccaaaccaacaaaggac

SEQ ID NO: 157100 - RNA, 75 nt, Homo sapiens
ggaaggacaaagcgagcccggagcagaaaaaagaccgacagggacacaagaagaaacggagaccaaggcgacgga

SEQ ID NO: 157101 - RNA, 56 nt, Homo sapiens
cgacccagccagcgacgaggaaggaggcaggccccagcccaccacacagccaacac

SEQ ID NO: 157102 - RNA, 87 nt, Homo sapiens
ggcaagagccggagggccagaggacagacaggccagggggggaggccagagaagcgaaaaagcagggacagggggggcgccaccggg

SEQ ID NO: 157103 - RNA, 88 nt, Homo sapiens
cgcgaggcgggcagccggggcgccaggagacgcggcaggcaagaacgcaccgcaggggccgcacaccaccacgagaagaagaaggaca

SEQ ID NO: 157104 - RNA, 91 nt, Homo sapiens
cacaagcagcgccagagagcgagcagagaaccacccgaaggaagccgggagaggccgcccgccccccaagaaaggccagccgaagaaaagc

SEQ ID NO: 157105 - RNA, 35 nt, Homo sapiens
cccgagaagcgggaacagaaacacagccggggcaa

SEQ ID NO: 157106 - RNA, 84 nt, Homo sapiens
agggcggcggaggaggcagcgggggccgcgcgacaaagaggccaggagacacgccaccgccggcggcccccggccaggccaccc

SEQ ID NO: 157107 - RNA, 74 nt, Homo sapiens
gccacgagaggccaccgcacccgagggcagaggaagaaaggggacacaaccaggagccgcaaaaaacgagagaa

SEQ ID NO: 157108 - RNA, 47 nt, Homo sapiens
gcccccccccccgcgacgccaccagaaggacccgggaacggacgcgg

SEQ ID NO: 157109 - RNA, 76 nt, Homo sapiens
cagcccccggacaccagaagagcccagcagaacaaagcggcaagcagaccgaaaagggcggaaaaggaccaaggcc

SEQ ID NO: 157110 - RNA, 85 nt, Homo sapiens
ccagccacagcccccgcgcccgccagcccaacagacacacggcagggaaccccaccccggaaggcggggacacagacgagaacac

SEQ ID NO: 157111 - RNA, 79 nt, Homo sapiens
cggccccgaggaagcaaggccgcggggggagaccccaccaccggaccgaccaaaccagacaaggacaggggcacgagaa

SEQ ID NO: 157112 - RNA, 86 nt, Homo sapiens
aagggagccgcgcaaaggccccggcaagaagccggaaccaaaaagaagccccagagccggggccaggagccccaagcgccccagca

SEQ ID NO: 157113 - RNA, 54 nt, Homo sapiens
cgcagggcgcccccggggcacacccgaccaggccaaccgaccgcaagcgccaga

SEQ ID NO: 157114 - RNA, 87 nt, Homo sapiens
aagcaagaacagaggacaggaaggcgagagagcaccgccgggcacagggagcccaaccggaacgcagacgggcagaaggccgagggc

SEQ ID NO: 157115 - RNA, 81 nt, Homo sapiens
gaaccggggagaggagcaagcaggccaggaacaggcgcaagaaagcgaagagccacgaaaagcccaggggaaaaagggagg

SEQ ID NO: 157116 - RNA, 73 nt, Homo sapiens
gccgggaccggcacccgaaccggccgccggacaggaagggaaggggcggagacgggcggaacgcaggaggcca

SEQ ID NO: 157117 - RNA, 81 nt, Homo sapiens
gccgggagcggaaacagcggcagccagagaggacaagaagggcagagaagccagaacggagaaacaacgaagaccaacacg

SEQ ID NO: 157118 - RNA, 68 nt, Homo sapiens
cacacggccacgaggccagacaaccagaaacacaccaaaagccacaaagaaagacaagagcagcaccc

SEQ ID NO: 157119 - RNA, 84 nt, Homo sapiens
gcagagcacgcgcgcagcgaagcccagggaggccaccaggaccggggcggccgagccgggagaggccgcccagcgccaggccga

SEQ ID NO: 157120 - RNA, 77 nt, Homo sapiens
cggacaggaaagccggagcgaagccaacccccgagcagcgccacgccaggaggcccgaaccggaaggagacgcagaa

SEQ ID NO: 157121 - RNA, 60 nt, Homo sapiens
caacacaacaggaggcggaggcgaaagcggaacgagaaagaccacacagggaaacgacca

SEQ ID NO: 157122 - RNA, 118 nt, Homo sapiens
gcaccgccacagcccgccggggcccgggcacgaaccaccggggacaaggagcagacaggacccgcggggcccagccccaccagggcccagaagaccggcaggcaccagggcaaaccca

SEQ ID NO: 157123 - RNA, 80 nt, Homo sapiens
ggccaagcacccccaaggcagcagccagcaccggcaacccccggcaccacaggcacccagagaagacgggaggaacgcag

SEQ ID NO: 157124 - RNA, 70 nt, Homo sapiens
cgcggcccagccccaccacggccaaaacacaaacaagaccgcagacgacgcagccagagcagcaagaggc

SEQ ID NO: 157125 - RNA, 73 nt, Homo sapiens
agaccaggagcgcaagaggccgcacccggaggaaagcaggacggaaaagaaccaacaggaggaagccacaaac

SEQ ID NO: 157126 - RNA, 80 nt, Homo sapiens
aacaaaaagaaaacccaagggaacgcggaagggaaaggacacgcaaaggcacaacgcacagcacagaagcggggcagcaa

SEQ ID NO: 157127 - RNA, 68 nt, Homo sapiens
aaagaaagacgaaggaacaacaagccaccgcacaagaggcacgggacaggaacaagcacaaggaagag

SEQ ID NO: 157128 - RNA, 65 nt, Homo sapiens
cagcccaccggggccaagcaaccccaccagcccgagagcggaccacaggcaccacccgcaacggg

SEQ ID NO: 157129 - RNA, 40 nt, Homo sapiens
gcgggaccagacaccgcggaagcggagggagagcacggcg

SEQ ID NO: 157130 - RNA, 72 nt, Homo sapiens
agagaacaccaaggccaaaaacacagcaacccagcacgaacaagggcggggcacaaagcgaaggcacgaagc

SEQ ID NO: 157131 - RNA, 76 nt, Homo sapiens
ggccccgcggaccaaggaagaacccgaagcaccgggcagacgccgagaaggccgcgcggacccaccaccccacacg

SEQ ID NO: 157132 - RNA, 69 nt, Homo sapiens
agaaaccgaaggcacaaagccaaaaagaaggcgggggaggcagggagcccagaaagaagagaaaaagag

SEQ ID NO: 157133 - RNA, 57 nt, Homo sapiens
cgaggaggaaaggaggacgaggacgcccccgggccaaacggcagcaaaaacagacag

SEQ ID NO: 157134 - RNA, 79 nt, Homo sapiens
ggacaggcccccaaaacaaccaacaagcacccgaaggcgggacaaacaaagaagcaaagccgggagaacgaacagaaaa

SEQ ID NO: 157135 - RNA, 91 nt, Homo sapiens
ggcgaggggggagcccagcaggagcgggaaaaccgagcgcgggagaagggcggagaacggaaaagcaccaggaagcagagaggaccgcaga

SEQ ID NO: 157136 - RNA, 77 nt, Homo sapiens
gccggaagggcggggggcgggccggaggggagacgggaggcagccaggcgccccacaccgccgggccgggggcgagg

SEQ ID NO: 157137 - RNA, 76 nt, Homo sapiens
gcgcggagaggggcacccggacagcccaggaccggggggaaccggaggcccccccccccccagccagaccacagag

SEQ ID NO: 157138 - RNA, 64 nt, Homo sapiens
acaggccggcaaggcaaggaaaggacaaggagcggcccgcccccaccgggaccaccgacccggg

SEQ ID NO: 157139 - RNA, 58 nt, Homo sapiens
ggaagagggcgggaaggcagggacaaaacccaaacagagagagaaagcaggagcccga

SEQ ID NO: 157140 - RNA, 75 nt, Homo sapiens
aaaagaaaaagagaggaagagacgagaagacgaaagcaaaaagccgccgcccagagagccaccagaaaagaaaaa

SEQ ID NO: 157141 - RNA, 83 nt, Homo sapiens
cgccagcgagcagacacccgccccacggacagcagcggacagccgggcccagagcgcgaaagaaggaacgagggggcaaccag

SEQ ID NO: 157142 - RNA, 91 nt, Homo sapiens
ggaggacgaggagagacagaagaagcggaggccggcaaagccaagcaaccacgacggcagagacaggagaggagagccacgcccacagacc

SEQ ID NO: 157143 - RNA, 84 nt, Homo sapiens
ggaccgagcacgggagacccgcacacgacagccacagccagccaggcacgaccaggaaagaccacagcaagaccacgcccccag

SEQ ID NO: 157144 - RNA, 68 nt, Homo sapiens
acagaaagcgcaaaggacagaaggaagggagcgcgccaaaggaccaagaagagccagcacaacgcaag

SEQ ID NO: 157145 - RNA, 54 nt, Homo sapiens
caaggcagaggcgaggcggaagggcaccccacccggaccccagaagggccccga

SEQ ID NO: 157146 - RNA, 75 nt, Homo sapiens
aaaaagcagagacgagcaacaggcccgaaaaaggaaaaaaaaaagaagcaagagggaggggcggcaaaaaacagc

SEQ ID NO: 157147 - RNA, 73 nt, Homo sapiens
agccggacacgcacagcagaaaaagggaggagagagaacacagacaccggcccgaggagccgccggcccaggc

SEQ ID NO: 157148 - RNA, 77 nt, Homo sapiens
gggcgcggcgggaagaggcggagcgcgcggccgagcgcaagagggcacgacacgccggaaggaccgagggcccccga

SEQ ID NO: 157149 - RNA, 72 nt, Homo sapiens
caagccggagcaacagaaacacaaggagcaccaggagacaaagccacaaaaacaccagaaaaaccaagcaga

SEQ ID NO: 157150 - RNA, 41 nt, Homo sapiens
gaggaaccaaaccagagcacccaagaagcaaagcacccaag

SEQ ID NO: 157151 - RNA, 71 nt, Homo sapiens
cgcgagcacacaggagaagcaagaggcgcaaagaagggcgacggcgaggggacccccgagcccgcccgcca

SEQ ID NO: 157152 - RNA, 79 nt, Homo sapiens
cgaaaagaaacccaagaaggccaacgccccgcgcagcggagcccccacgcgcaagacggccaaacagaacccgcccaga

SEQ ID NO: 157153 - RNA, 75 nt, Homo sapiens
gaacagcagcagcccacgaacagaaaggggggcacagagcggagagccagagaagaggaaccaagagaaggaaaa

SEQ ID NO: 157154 - RNA, 81 nt, Homo sapiens
cagcagcaggggacagcagcccacacagcacagcagagagccaggcaagaaaccccggacagaaggcacggcgaacaaagg

SEQ ID NO: 157155 - RNA, 69 nt, Homo sapiens
gaagagaggaaaaccacacagcaagaagaggaaccccaaacgaacaacaggagaaggcgggaggaaacc

SEQ ID NO: 157156 - RNA, 82 nt, Homo sapiens
cgcggcgcgcgcccagcgccgccccgcgcgcgcccgccacggcgccgagccgcggccgaaagacgaccccgacgcaggccag

SEQ ID NO: 157157 - RNA, 93 nt, Homo sapiens
acaaccaacgcagggccgggccagccccacaaagacaacagcccggagacgcgggcaaaggaaggccaggacaccaagaggacaagccgagac

SEQ ID NO: 157158 - RNA, 85 nt, Homo sapiens
cgcaaccggagaacgccaagcgccgccacgacaagcggagaagaagcaggcgccccccaccagccacagacacagacgacacggc

SEQ ID NO: 157159 - RNA, 79 nt, Homo sapiens
ggaagaccgggaccgggccaccggggcccccggggccaccaggaccccagcaccgggagcaggaaagggccgagaaaga

SEQ ID NO: 157160 - RNA, 55 nt, Homo sapiens
caacgggacagaacgacagacgccaccccccaaggcagagacacccagaccaacc

SEQ ID NO: 157161 - RNA, 83 nt, Homo sapiens
gagcgcgggcagcaggagacggaggaccagaacacggcagcagcggccggccagcaaccaaccagagcagcgacgggccacaa

SEQ ID NO: 157162 - RNA, 70 nt, Homo sapiens
aggacccccgcgggcgacgcgagcccagaaagcaagccagcaccaggggcagggcgcgggcaggagagcc

SEQ ID NO: 157163 - RNA, 83 nt, Homo sapiens
ggcggccgaggagaggcagggcgcgagggcgggggcagcggcaggcaccaaccagcggacacacggaaaagggacgggaaaag

SEQ ID NO: 157164 - RNA, 76 nt, Homo sapiens
cggaaccacagcccagcacggacgaaaaggccagagagaggaaaaaacaaaagaccagcagaacgaaggaacaacg

SEQ ID NO: 157165 - RNA, 62 nt, Homo sapiens
ccagccccggagcccaaaccagacccaccaccacaggaggagagaaagaacccacgcaggac

SEQ ID NO: 157166 - RNA, 73 nt, Homo sapiens
ccccaaaggcggaaacagggaaaaagacacagcaaagcccccagcacaaaaggaagaaagcacaaaaaggaag

SEQ ID NO: 157167 - RNA, 55 nt, Homo sapiens
gaacgggccacaagggcgagccggggaaaaaccgggcaggaggacggacaacaga

SEQ ID NO: 157168 - RNA, 83 nt, Homo sapiens
gaagacgaggagaggagaagagcgaaagaggccagcagagaagaaccggccaggagcgaggcgagggccggacgggagggaca

SEQ ID NO: 157169 - RNA, 76 nt, Homo sapiens
ccgcccgacccaaagggaaaacagaaacagagggccacccggggaccacaacagcgcccgacaaccagaagcggcc

SEQ ID NO: 157170 - RNA, 71 nt, Homo sapiens
accaagaaacaccggcccgaggcgaagccagcccacaggggcaaggggccgcaaggccaggcgcgcagagg

SEQ ID NO: 157171 - RNA, 124 nt, Homo sapiens
gacgagcggccccgggacgggcagcagcgcgacccgagccggcgcccgggccggccaggacgacccgaaccccacggacaacgaggacaggggagccccgccagggcggcggcccagcgccccg

SEQ ID NO: 157172 - RNA, 61 nt, Homo sapiens
gagagccgcggaaccgcgcggcacacaaccagagcgaggccggcacaaacgcagaaaggga

SEQ ID NO: 157173 - RNA, 78 nt, Homo sapiens
cgggacaggaggaagaggcagcgccaacccacgccgaaagggaaagggagcagcaccggccacacccacagcacgacc

SEQ ID NO: 157174 - RNA, 79 nt, Homo sapiens
acaccacagccgggagcggaggagggagagcacagccgacccaaccacagggcagagagcccagcgggggggggggggc

SEQ ID NO: 157175 - RNA, 57 nt, Homo sapiens
ggcgacgaccgcacaacagaacccaccggcgggaggcacgcgggccggggagaccca

SEQ ID NO: 157176 - RNA, 71 nt, Homo sapiens
aaaagagcagggccgacaaggccgcaaaggaaaaaccagaagagaaaaaacaaaggggagaggcaccccgc

SEQ ID NO: 157177 - RNA, 54 nt, Homo sapiens
cccagcccaccccaaccaagggagaagccaaaggccagggagggaggagggcgg

SEQ ID NO: 157178 - RNA, 77 nt, Homo sapiens
cgcccccgagcccggaggggggagaaaagagcacagagaccgaagggagagcgcgacccccggccaagaagaggaga

SEQ ID NO: 157179 - RNA, 82 nt, Homo sapiens
cgggggaggaaggagagaaaagcccgggggcgccgaaagccagcccagccgcgggaacgaagcccaaaaggcagagacggac

SEQ ID NO: 157180 - RNA, 82 nt, Homo sapiens
agagcggaggacagccgagaggagccacccaggcccaggaccgagcccgacgcccacagacaggcgaacgccggcggccgga

SEQ ID NO: 157181 - RNA, 39 nt, Homo sapiens
cacagcgcggcagaacggagggaagcggacacacaggac

SEQ ID NO: 157182 - RNA, 52 nt, Homo sapiens
gcacgaaacaggaagcagacggcaaacaaaggaacagaggcacgcggacacg

SEQ ID NO: 157183 - RNA, 74 nt, Homo sapiens
ggccgacacagcgagccccagagccccaagggaaaacgcccaggggcacaaacaccgcagcagcagcaacagca

SEQ ID NO: 157184 - RNA, 73 nt, Homo sapiens
caaaaacaaaacgaaccaggacggcaaggacaggacacagggagggccagaccccaggaggaggggaggccgc

SEQ ID NO: 157185 - RNA, 74 nt, Homo sapiens
aacccagaaaacagccaccccaagagcaagaggaggaacacacacaagcccggaggcagaggacgcaccagcag

SEQ ID NO: 157186 - RNA, 77 nt, Homo sapiens
gagacggaaccaaggggcacaaccagggaaccccgccagacagccagacaggaggaacaggaggaccgcagccagca

SEQ ID NO: 157187 - RNA, 127 nt, Homo sapiens
ggaggaccacaacccagccacgagacaagacacaaggagggggcagagcgagggcaaacagggagcgccccggacgacaccaccccgaccgggcaagcccagagccgccggaaggcccccggcgcga

SEQ ID NO: 157188 - RNA, 42 nt, Homo sapiens
agcaacgccaccagaggaaggcgcacacagagaaagcgagaa

SEQ ID NO: 157189 - RNA, 81 nt, Homo sapiens
cgaggccgcggcccaaaggccaggagagggcaaaccaccgaaaggcagcggaagcggaacggcccagagaccaaaagcaac

SEQ ID NO: 157190 - RNA, 80 nt, Homo sapiens
gaccgcggcgcccagccccaggaaggacccaggacacccggaagccggaaagaaagcagccgaagccacggagaagccgc

SEQ ID NO: 157191 - RNA, 39 nt, Homo sapiens
acagaagacaccacagaggcagagaccgggcacaaccag

SEQ ID NO: 157192 - RNA, 74 nt, Homo sapiens
gaagaccaggcacagcagagagccaggaggcaggaggaaggaaggggaaaagcaccagaacaaaggcaaaccag

SEQ ID NO: 157193 - RNA, 68 nt, Homo sapiens
gcagaagacagcacaaaccccaacggaaagcaagcccgagaagcaagaccgccccaaaaagcaagaaa

SEQ ID NO: 157194 - RNA, 76 nt, Homo sapiens
gcagcccgggcagagaccaggacaagacgcggcgccgacgggccccgaggccgcgggcgggaacacacaacggagc

SEQ ID NO: 157195 - RNA, 76 nt, Homo sapiens
ccgagagcgggaacagaccccgccccggacccgacagccgcagaggggcaggccagccggggaccggcccagggaa

SEQ ID NO: 157196 - RNA, 71 nt, Homo sapiens
aggggccagggagccccgaggcgcaccgggaggcaagcaggggggcaaaggaaagaaggcagaaagggagg

SEQ ID NO: 157197 - RNA, 68 nt, Homo sapiens
acacaggcccgaagaagagaggggaaacgaccaccggagccaagacagagggagccgacaccaccccc

SEQ ID NO: 157198 - RNA, 81 nt, Homo sapiens
aggcaggcgcggcgccggcggcgggacgaagagggacgggcccgcggcgagcgagcccgaggaaagaagcgaagccaggag

SEQ ID NO: 157199 - RNA, 69 nt, Homo sapiens
cgcagggcgcccccggacgaagaagaccggaaagcaggaagggggaacggagaaccagaaacaccaaag

SEQ ID NO: 157200 - RNA, 70 nt, Homo sapiens
caaggaggcgggaagcccagcacacacccccagcagagcaagcagagccgaacaaagaacgaaggcgaag

SEQ ID NO: 157201 - RNA, 84 nt, Homo sapiens
acgggccgaaccgggagcgaggaaccagaacgaaaagcgccagaaagaaccaggaagacaacaggcccagacccagagcccgga

SEQ ID NO: 157202 - RNA, 76 nt, Homo sapiens
cgccccggccgcgcaagggcacccgcgacgacgagacgacacccaaagaccaaaccgaggcgcggagcacacagaa

SEQ ID NO: 157203 - RNA, 78 nt, Homo sapiens
aacgggcgcaaccagcgacacaggaagaacagggcgaggacgaggacaagacgacagaaaccgccgaaagagagaagg

SEQ ID NO: 157204 - RNA, 75 nt, Homo sapiens
gggaccggcgcacacaaaaaccaggaccaccagcgggagcggcgccaggggagggaggccgagcccgaaacaacc

SEQ ID NO: 157205 - RNA, 78 nt, Homo sapiens
gagcgcgggggcggcccgccccggacccgagcagagggcggagaacggaaaagcaccaggaagcagagaggaccgcag

SEQ ID NO: 157206 - RNA, 53 nt, Homo sapiens
ggcagacacaccgacgaaaagaaggggcaacaggaaaacaacccagagaaccc

SEQ ID NO: 157207 - RNA, 89 nt, Homo sapiens
cgccgggaaccacgcgggggcgaggcgaggcgaggcggccgccggcgcccgggacgcggaccgccaggacccagaagaccccagacggg

SEQ ID NO: 157208 - RNA, 65 nt, Homo sapiens
ggcccagggggccacgcgggggcagaaacgggacgggagcgccacggggggaagagagggcgaga

SEQ ID NO: 157209 - RNA, 73 nt, Homo sapiens
ggagccacccacaggacccgccaccaaagcagaccagagccagagccacccgacccgcccccgggcccagcag

SEQ ID NO: 157210 - RNA, 66 nt, Homo sapiens
cagcaacaaacaagacggacacgagccaaaccacagggaagggagcccagcacacccgacagcgcg

SEQ ID NO: 157211 - RNA, 72 nt, Homo sapiens
accaccaaacagaaccaaagccaaggaagaccacagagaagcaggcgaccaggcgcgcgggcaagaaagcag

SEQ ID NO: 157212 - RNA, 75 nt, Homo sapiens
gaacccccacgcggccagcgaaaacgcccaggagaccaggccaagggaagaaagagggagagaacagggaagagg

SEQ ID NO: 157213 - RNA, 86 nt, Homo sapiens
aaggccaggagacccgaccccaagagccaggacaaaaccaggcagaaccaacacgaacccaagcacaaacaagaaaacgagcaggc

SEQ ID NO: 157214 - RNA, 55 nt, Homo sapiens
cgccggcgcgggaaacgggcgaagcgacgagccgcgaggaggcgggcaacacaac

SEQ ID NO: 157215 - RNA, 55 nt, Homo sapiens
cgaaaaagaagacggaggacaagaaggacgacccagggccggcacgaggcacaca

SEQ ID NO: 157216 - RNA, 73 nt, Homo sapiens
aaggcaaagcaacagaaagcaacacagccgccgggacccgcccggggggagcgaaaagcaccaaggcgcaggc

SEQ ID NO: 157217 - RNA, 76 nt, Homo sapiens
ccggcagacgcgaaggagaaaaagcaggggaagcagcgcacgccaggggcgggaaccgacgaggaccccagagaca

SEQ ID NO: 157218 - RNA, 45 nt, Homo sapiens
ggcaggcagccccgaccccagagcggcaaaggaaggagaacggag

SEQ ID NO: 157219 - RNA, 78 nt, Homo sapiens
gcaggcaccacaaaaaggacagaccaaaacgcaacgagaaagcaccacgagaaacgaaaagaacagaagggcagcaaa

SEQ ID NO: 157220 - RNA, 86 nt, Homo sapiens
agaacgcggaggcccggcaagcccgccgcacagcacacggagcgcgccggccccacgggaaacaaagggcccaccgaggagcgcag

SEQ ID NO: 157221 - RNA, 80 nt, Homo sapiens
gcacacccgagaagcaaaaagagaagagcacagggggcgacaagacaggaagaaagaagaggaacaaaaggaccagcaga

SEQ ID NO: 157222 - RNA, 66 nt, Homo sapiens
aaaggaggaacaaaccgacgacgcaaggggagccaggacaggagaggaaaaccaagcggaaacagc

SEQ ID NO: 157223 - RNA, 69 nt, Homo sapiens
cccagccccaggcacagaccccagcgagacagaagcgaaggggacagggggagaaccgccagggaaacc

SEQ ID NO: 157224 - RNA, 81 nt, Homo sapiens
gcgccccgcgccgcgccccccgcccgcccgggccgccaggagcgccggggcacacaccgacgccggccggccagagcgggc

SEQ ID NO: 157225 - RNA, 61 nt, Homo sapiens
ccggaaggacaccaagagcggaccgggccccggcacggagcgcggacgcccaggagcgggc

SEQ ID NO: 157226 - RNA, 54 nt, Homo sapiens
gcccggccgacaaccacgggcggagaacggaaaagcaccaggaagcagagagga

SEQ ID NO: 157227 - RNA, 74 nt, Homo sapiens
cccagccccgagagcgggaacagcgccccccccaacccaacggcaccaaggaagagagaagggaaaccaaagga

SEQ ID NO: 157228 - RNA, 41 nt, Homo sapiens
cacaaagaacgaaccaagggggaccagcggagcagccagga

SEQ ID NO: 157229 - RNA, 82 nt, Homo sapiens
cacaggaagaccgcaccacgcgcccacacaggcagcagaagaggccgcggccggggccaaggggccacccacagcccgacgg

SEQ ID NO: 157230 - RNA, 77 nt, Homo sapiens
gacaaggaagagaccagaaaacacaagagaggcagaaacgaagcgaaaggaaaccaaaaggaaaaaacagaagaacc

SEQ ID NO: 157231 - RNA, 75 nt, Homo sapiens
ggaggcgaggcaggaggacacaggaccaaagagccgggcccagccgggcgacagaagagaacacagaccaccgaa

SEQ ID NO: 157232 - RNA, 75 nt, Homo sapiens
agcacaagaagaagacgagacaagggaggcgaggacggacaaaaggaaacggacgggaggccagccagcagaagg

SEQ ID NO: 157233 - RNA, 91 nt, Homo sapiens
cgacggagcggcacagccggagaagcggagaagacaagagcccgcgggcacgacccggaccggggcggccgagccgggagaggccgcccag

SEQ ID NO: 157234 - RNA, 80 nt, Homo sapiens
caacaagaggccggcggggcgacagggacccgaggaagcccccagagggaccgcaccacgcaccaggcaggcggcggcag

SEQ ID NO: 157235 - RNA, 68 nt, Homo sapiens
caccgccgggaggaggaggaggagccgagaggagcgagcgagcgcggaaggaaggaagaaggaaaagc

SEQ ID NO: 157236 - RNA, 66 nt, Homo sapiens
cccacgcccggcaggagagggacgcagagcgcaacccagcaccccccacagaggagacacaacacc

SEQ ID NO: 157237 - RNA, 104 nt, Homo sapiens
aggccaaagaagggagacagaaggaaaaaggggagaaggaaccagacagcccaacacggggaggagagcgaggacgccgcccgcagcagcacaggaacaccccc

SEQ ID NO: 157238 - RNA, 74 nt, Homo sapiens
cccaaaaagacggacagcccacgggaacaagaggggacagaaagacacgaagacgagagaagaagaagggaaaa

SEQ ID NO: 157239 - RNA, 107 nt, Homo sapiens
gcggaggcgacgccggggacgcccgcgcgacgagcaggggcggcggcgcaggcggccagagcagcagaaaagcccagagaccaagggagcccccaagagcagaaaga

SEQ ID NO: 157240 - RNA, 60 nt, Homo sapiens
acaccaggggacacccagaagcggcgccgccggcagaggcggcacagagccgaaaacagc

SEQ ID NO: 157241 - RNA, 71 nt, Homo sapiens
acccaagaaccaccgacaggaacagacccacaaggaccaaagcacgccaggaaagagagaagaaaaccgaa

SEQ ID NO: 157242 - RNA, 35 nt, Homo sapiens
accagccccaggacagggagcacaggagggccacg

SEQ ID NO: 157243 - RNA, 61 nt, Homo sapiens
cgggaccccagggcagcgaagcaggagggaaaaccccgaccaaaagaagcaggacacagga

SEQ ID NO: 157244 - RNA, 71 nt, Homo sapiens
gaaggcgccggggccagcgcagccgcggcggagacgcacaggcccgaaaaggggaagaaggccaaccgggg

SEQ ID NO: 157245 - RNA, 81 nt, Homo sapiens
cgggcgaccccccaaggccgaggccgcggccagggcggcgccgcgccccccacggagggcgggaacggaaaagacaaggaa

SEQ ID NO: 157246 - RNA, 80 nt, Homo sapiens
ggggcggaaacgccccgaggagcaggaaggagaccaggcccaggaaggaacgaggaagggccagaacggagacggggcgc

SEQ ID NO: 157247 - RNA, 73 nt, Homo sapiens
aagccaaagaggaacccgaaaacagggaccaggaaaagaaacgggcagcaaccccaagccaaaggccaaccag

SEQ ID NO: 157248 - RNA, 74 nt, Homo sapiens
agccccggccgggccggccagcgccggaaaccaacaaaccaccccagggaccaggaaacagcgaagcgaaggag

SEQ ID NO: 157249 - RNA, 77 nt, Homo sapiens
ggcaagacccaaggcgacgaccgacaggggggaaagcccagggcccagacacaggaacgggcaccccaagagcaaag

SEQ ID NO: 157250 - RNA, 83 nt, Homo sapiens
cggggaggcgcccccgggggcccgacgcacacgggggcggacaccacaagaagggcgccagcccccgggaccgggccgccgcc

SEQ ID NO: 157251 - RNA, 81 nt, Homo sapiens
ccgccaacaccgccgaccaacgccggaaaggcgcggaagacaacaggcacaaagagagaaggaacacccacagggcagaca

SEQ ID NO: 157252 - RNA, 81 nt, Homo sapiens
cgggcagccgccgccaccccgcggccgcacccccgccccaggcccgaaccgccaggcagcggccccgccagcccagccccg

SEQ ID NO: 157253 - RNA, 78 nt, Homo sapiens
gccaggaaaaacacacagcaaggcaccggcaccggaccaacacgaaggagaaccgcaggccccgcggagaacaaccgc

SEQ ID NO: 157254 - RNA, 69 nt, Homo sapiens
cgggaacaagaggcagcccccaacccaagggccgacgagggggcggggcggcaggaaggaaagcgacag

SEQ ID NO: 157255 - RNA, 79 nt, Homo sapiens
cgcagagggcccgccggcggccgcggcccgcccagcacggacagccgaacagagagaagggggaggacgcagccagaaa

SEQ ID NO: 157256 - RNA, 81 nt, Homo sapiens
ccgcgggggcaacggagaaaacccggaaccgcgacggcggcaggaaaaccagagacccagacacgcgaaggaacgaaaggc

SEQ ID NO: 157257 - RNA, 71 nt, Homo sapiens
ccgcggccgggggaggcgcggcaaggccacgcgcaaccgggcccgcccgccgggcccgccgacacagccac

SEQ ID NO: 157258 - RNA, 73 nt, Homo sapiens
gcgaccagcgcggccccaccacgaacagacggcggccccgggaccccgcccggcagccgcagcccaacacacc

SEQ ID NO: 157259 - RNA, 71 nt, Homo sapiens
caggaaggggaagcgagccccccaccaagaaccagaggcaagcagccggagggccagacagccaccgaagg

SEQ ID NO: 157260 - RNA, 75 nt, Homo sapiens
ggggcccagcccgggcggcgcggccagcggaagccgcagaaggaccggccagaagcaagccggagaacagaaaga

SEQ ID NO: 157261 - RNA, 72 nt, Homo sapiens
cgcgggaaaagccccgagagaccgagaagaggcaagccccaggaaggcaacagacaacaagaaagcccagac

SEQ ID NO: 157262 - RNA, 29 nt, Homo sapiens
ccggggagacaaagacacgaccagcccaa

SEQ ID NO: 157263 - RNA, 85 nt, Homo sapiens
aaaggggcggaagaaaaacaaacacacgcaaaggagaaaggaaccgacaggaggaaacacaaacgggaccacggagggcccccca

SEQ ID NO: 157264 - RNA, 85 nt, Homo sapiens
cggagcgcgcagggggcgcgccgccgcccgccccagaccgcggcgaaagggagggggagcccaggcgggacggggcggaaaggca

SEQ ID NO: 157265 - RNA, 79 nt, Homo sapiens
ccccccgacgcgggcccggacgcaccccgcggacgcgcacgcgaggaaaacgcaaccaagagccaccgaaaggcaacga

SEQ ID NO: 157266 - RNA, 76 nt, Homo sapiens
agaaaaggcaggaaacccagagacgggcgccaaaggaccgaacggagccaaggggaaaggagaaaacacagaggaa

SEQ ID NO: 157267 - RNA, 66 nt, Homo sapiens
cccgcaccgagcagcagccaccccgagagccccagcccccagcagccgacaggaggcccgcaagag

SEQ ID NO: 157268 - RNA, 81 nt, Homo sapiens
gcagaccagagaagagcacagaagaccagagaggacgaaaagagacagaaagaagagaagagcaagagaaaaaccagcgga

SEQ ID NO: 157269 - RNA, 82 nt, Homo sapiens
ccggaagcggcagcgaggagacccggcgccgccaggccgacgaaaagcccaagcccgccgacacagccaccaagaaggcaca

SEQ ID NO: 157270 - RNA, 80 nt, Homo sapiens
aaacaaggcaacagaaagagcaacagcagggcaacagaaagccgacaagagacaacccccaaaagcaccgagaccgggca

SEQ ID NO: 157271 - RNA, 74 nt, Homo sapiens
agcccacacacgccagcagaccaccccgggagggaaaggagcgagggacaaaacaaagaggaaaaaaagaagag

SEQ ID NO: 157272 - RNA, 72 nt, Homo sapiens
gcccagggccgcgccccccaggcccacaaccagcccagcagcagcaagcagaaaacacaggcgaaaaagcca

SEQ ID NO: 157273 - RNA, 75 nt, Homo sapiens
gcgaggcgaggaacgaaacgccacaaaaagaaagcacccgggcacggccggaggaaaaaaggggcagacagccaa

SEQ ID NO: 157274 - RNA, 81 nt, Homo sapiens
gcgacgcccagagccgcggccggggcgcgggagagcgcgacagagggagagcacccgccacaggccacaaaggaggcaggc

SEQ ID NO: 157275 - RNA, 69 nt, Homo sapiens
caaggaaaaacacggcagcaagcaccgggacggaaaacggaggggcaaggcgagagagacagccggcca

SEQ ID NO: 157276 - RNA, 46 nt, Homo sapiens
gaggaagaacccggaaaagaggaggccggcccggagcggccagccc

SEQ ID NO: 157277 - RNA, 56 nt, Homo sapiens
acacagccgacagacgccaccaaaagcaccagacaacggcaagcggagaagagcaa

SEQ ID NO: 157278 - RNA, 87 nt, Homo sapiens
gcggcagcccgagaccgcagcagagccagcagccacccccgcccagccaacaccccccaggcccaagggggacgcggcccgaagagc

SEQ ID NO: 157279 - RNA, 72 nt, Homo sapiens
gaacaaggcaaaaggggacccaggaagccacccgcagaggggcaaggagaaagggcaaacgcagcacacaag

SEQ ID NO: 157280 - RNA, 39 nt, Homo sapiens
accgcgcacaggaacacggagagaagagacagggagacc

SEQ ID NO: 157281 - RNA, 78 nt, Homo sapiens
cgaggggcagaaagagaccgcagagacagccaacacggcacccacaggcagggaaaaaccaggacaaaaagcaaagga

SEQ ID NO: 157282 - RNA, 82 nt, Homo sapiens
agcgcacaacgccagcgacagcacaagggcgccgacggcaacgcaccgacggcaggggagaaccaaggagggccccaggagg

SEQ ID NO: 157283 - RNA, 76 nt, Homo sapiens
ggaaaaacgagcagaaagaagccagcccgggcaaacgaaaagccaaaaacacaaagagggacagcagagacgaaac

SEQ ID NO: 157284 - RNA, 86 nt, Homo sapiens
cggggaccccagcgggacgaagagcccagaagagaagaaggcgagacgagcaggaaggccaaggcccagcggcaaccaagccggga

SEQ ID NO: 157285 - RNA, 75 nt, Homo sapiens
gagagccaggcggaaggacaggagcagcccaaaccacagacaacaacaggacgaagcccgggagcgagacgcaac

SEQ ID NO: 157286 - RNA, 58 nt, Homo sapiens
ccaaagaagcaaaacacgagggaaccgaacaccacaagcgcgcccccacgacacaacc

SEQ ID NO: 157287 - RNA, 86 nt, Homo sapiens
ccagagcggggagcggggacgcacggagagggcagcgggcccggaggccggggacgcccagaagggagacaagccaagggagcaga

SEQ ID NO: 157288 - RNA, 67 nt, Homo sapiens
caaggccacaacccaagaagaaaggccaaaaaaagcaaggggagaagcagaccgcaccaggcgggac

SEQ ID NO: 157289 - RNA, 38 nt, Homo sapiens
cccccaccacaccgggagaggcgggagccgagcacccg

SEQ ID NO: 157290 - RNA, 76 nt, Homo sapiens
gagcggcagacgccaagagaagaacaacaaacggcaaagaacacgacgagacgggagagcacacggacgcagagca

SEQ ID NO: 157291 - RNA, 71 nt, Homo sapiens
ccacaacacggaacggagccacccgggcggcgggcccaggcagaaagaagggcaccacaagccgaacagcc

SEQ ID NO: 157292 - RNA, 83 nt, Homo sapiens
cggcggccgaggcggcggggggcgcgcaggccgcgacgagggcgcgaggcacaggcgaccgaagccaccgacaaggaaaggaa

SEQ ID NO: 157293 - RNA, 75 nt, Homo sapiens
gccaccggcacgcccgggccaacgcaaccagaaacccaggacgacaaacggaggacccacgaggaagcggccgcg

SEQ ID NO: 157294 - RNA, 57 nt, Homo sapiens
aacccagaggaccccagagcaccaagaggcccgcacggcaaagcaaagaagagccgc

SEQ ID NO: 157295 - RNA, 64 nt, Homo sapiens
ccgccccgcaggaggaggcacgccccgggcggcacgggggagccacggaccagggggacggcga

SEQ ID NO: 157296 - RNA, 72 nt, Homo sapiens
cggaagacgcgcccgcgccgggagagcggcagaggacagaagaggagggaaggaggcgagcaagcccgcacc

SEQ ID NO: 157297 - RNA, 85 nt, Homo sapiens
gcaagaccacgggaagagacagagggccacaacgagaaagaccgacgaaaagaagaaagaaccgcaaacacgcagaacagcccga

SEQ ID NO: 157298 - RNA, 76 nt, Homo sapiens
gccaaggcagcgcggacaagacccccagcacaacacaccggaccccgccccccgaggcgcagcccgaacccagcag

SEQ ID NO: 157299 - RNA, 74 nt, Homo sapiens
cgagcggagccacccccagaggagccaggaagagacaagcaacgaggaaaagaaacaaaacacggccaggggag

SEQ ID NO: 157300 - RNA, 76 nt, Homo sapiens
caccggcccaggggccgcacgaaggcaaaccgagacccaggcaaaggccgggacccaggcccagagcagagcccac

SEQ ID NO: 157301 - RNA, 74 nt, Homo sapiens
ggaaacaaccgaaggcagcaagagcagacgacaaaacagcagaccgagcaaaagccagaaggcggaccccggca

SEQ ID NO: 157302 - RNA, 79 nt, Homo sapiens
agcgaccagaaggcacagggggagcgggccggagagaagagaggggcgcgaggagaaggaaacaggcccggaggcccca

SEQ ID NO: 157303 - RNA, 74 nt, Homo sapiens
caggacgccagagacagaacaacgaaaccgaaacgaaccagcggaagaaacagaaacaccaacagccagcccca

SEQ ID NO: 157304 - RNA, 81 nt, Homo sapiens
gcaagaaagccggagacgggcggggacccaaacagcacgagacacgagacaggagagaaaggagagacaaaggaccagaca

SEQ ID NO: 157305 - RNA, 69 nt, Homo sapiens
agacaaggggcacacaagggcaccaggccaccggaacccaaagaccgcacaagcagccagacagcgcac

SEQ ID NO: 157306 - RNA, 85 nt, Homo sapiens
caacgaaaccaggccacagggaccgcaggcccgagaacacgcagacagccgaagaacacagaccaccgaagcagaggaaagagaa

SEQ ID NO: 157307 - RNA, 75 nt, Homo sapiens
aaagaaacaagcggcaagagaggcaccccgaagaggcgaggagcaacccagaacagagaaagaccagacaagagg

SEQ ID NO: 157308 - RNA, 73 nt, Homo sapiens
cgaggacgaaccaccccgcgccagcagcacagcacgggaccaccacacgaaaccaaggaaaaaccgggaacag

SEQ ID NO: 157309 - RNA, 76 nt, Homo sapiens
gccaggagccacgaggacgccaaccagccgcggacgacaacacaaaacagaggagaccagaccagaagccccgaaa

SEQ ID NO: 157310 - RNA, 54 nt, Homo sapiens
cccggccgcaacgcccagaacaaaccaaggagaaacgaaagacggacagagcgg

SEQ ID NO: 157311 - RNA, 67 nt, Homo sapiens
gggggagacacacgccagcgcccagaccagaccgcaccgcgcgcgacccagcagcgagggggagggg

SEQ ID NO: 157312 - RNA, 77 nt, Homo sapiens
gacgggaacaaaggagcaacggggccgggcggccaaagggccaggaaaccgacggcgcacaggacgaaaaaagcaca

SEQ ID NO: 157313 - RNA, 77 nt, Homo sapiens
cacgcggcgcacaacgcaggaacaccgcacgcgcggaggagagccagcgggccggcaccggcacgaggagcgcacac

SEQ ID NO: 157314 - RNA, 83 nt, Homo sapiens
cacgcacgggaccagagcgccgcgcaccgcagccgcgcccggaggccccgggggccgcggcccggccccaccaggagccagcg

SEQ ID NO: 157315 - RNA, 76 nt, Homo sapiens
caccccgaagcaaaggcagcgagccccacccagaccgaaaaccccagagaccagcggagcaaggaggggccggaag

SEQ ID NO: 157316 - RNA, 75 nt, Homo sapiens
ggcggacagcggggcccgcggaaaacaggccggacacccaacagcacgcagacaaggcaccaacagaacggcccc

SEQ ID NO: 157317 - RNA, 76 nt, Homo sapiens
cgcagcagcagaacaaagcagccggaaaggagccaagaggagagaggcgcccaaagagcaacggggagccaagaca

SEQ ID NO: 157318 - RNA, 122 nt, Homo sapiens
ggagagaccgccaacaccggagggaacagagaaaagacaagccccaccaagccagaggggagcggaagagcccagaggaagcgaccaggcccggcagaaggcagaggagcaggaaggacaac

SEQ ID NO: 157319 - RNA, 54 nt, Homo sapiens
ccagccaggcagaccccgggcagcagggacaggagagacaacggaggcaagaaa

SEQ ID NO: 157320 - RNA, 78 nt, Homo sapiens
gccagccgccgcgcccgcccgacccgccaccgccaggccagggccacccaggcccgcagaagacgcaggaacacccga

SEQ ID NO: 157321 - RNA, 82 nt, Homo sapiens
agaccagccggcaccggacgaggaagggcaggcggcgaacaccccaccagaccacccagcaagcccacaaaaaaggcacaag

SEQ ID NO: 157322 - RNA, 72 nt, Homo sapiens
aggcgcccaaagcgacccaaagaaacagcaccgagaggcacggcggcaaaggggacagggacccgggaaaac

SEQ ID NO: 157323 - RNA, 73 nt, Homo sapiens
ggccagaggagaagccaaagggcggagaacggaaaagcaccaggaagcagagaggaccgcagaagggaaggag

SEQ ID NO: 157324 - RNA, 36 nt, Homo sapiens
ggccaccggcggagcgagaccggagggaagacaagg

SEQ ID NO: 157325 - RNA, 79 nt, Homo sapiens
accgacaaaccagcgaaggagcacccacccaggaacccgccaccagaacacaggcccgggccccccggcagcgcggagc

SEQ ID NO: 157326 - RNA, 72 nt, Homo sapiens
gaaaacacgggaaacagccaggagagccagagagccaacaggacgacgaacagaacaacccacgagggagcc

SEQ ID NO: 157327 - RNA, 94 nt, Homo sapiens
cgcagccaggcccgggccagcggcgccccgccaccgccagccggaaaaaagcccagaaaaaagaaagagagcaagaaggaaggcagggggaagc

SEQ ID NO: 157328 - RNA, 81 nt, Homo sapiens
acgcgaaagcgaagcagacaggacagaaaggcagcacaagcacacacacagaccggaaacagaacgccaagagaggaaggg

SEQ ID NO: 157329 - RNA, 77 nt, Homo sapiens
agcagcggcccaggcgccagcagcccaagagcccaaagccgagaccgggaggaagcggagaaaagagccccgaacgg

SEQ ID NO: 157330 - RNA, 85 nt, Homo sapiens
acaggaaaggcgcaccggaacgaacagcgacgcgcagagaggaccaagaaaggcccagggaccaaagcccggacaaggcccgagc

SEQ ID NO: 157331 - RNA, 55 nt, Homo sapiens
gaccaagagacagacaccgccccgagacgagggaaagcaggcaggagggagagcg

SEQ ID NO: 157332 - RNA, 73 nt, Homo sapiens
cagcccaccgacccggcccagggacgagaggggcgccgacagcgcgcacaaagcgacagaacaacaggcagag

SEQ ID NO: 157333 - RNA, 73 nt, Homo sapiens
gaaagggaccgaaaggagagcaaaggcacccaagagccgagcaaaacaacaccaaagcagaacaagcaaaaac

SEQ ID NO: 157334 - RNA, 78 nt, Homo sapiens
cgcccagcccgggccccgcgcacagccccagcgcagaaaagggacgcggaagcaacaggagcaagaagagagggccgc

SEQ ID NO: 157335 - RNA, 82 nt, Homo sapiens
ccacccgaacgacgcgggcgagcggggcggacgccggggagacgcaggcgagggaggggacaccaaacgggaaaacaccaga

SEQ ID NO: 157336 - RNA, 74 nt, Homo sapiens
gcaaccaacggcgcggaagcaaaagaacagaagggagaagccacaaccaaggccaagcccaaaaacagaaaaag

SEQ ID NO: 157337 - RNA, 70 nt, Homo sapiens
caccgcgcggagccgcagagcgggcaccagcacaaaaacaaccaaaccagcacccaaagcaaaaagcagg

SEQ ID NO: 157338 - RNA, 81 nt, Homo sapiens
accacgccgaggcccacgcaccccgggcagcggaaaagagaagaagaagcggaaaggcagagaaggagaaagagaagagaa

SEQ ID NO: 157339 - RNA, 70 nt, Homo sapiens
gggggacagacgccgccaaccacagcagcaaaggggacagagacgaacgggaaaagaaacacgaccccgc

SEQ ID NO: 157340 - RNA, 77 nt, Homo sapiens
gagaccgagcgaagggcagagacgagcaagacacaaagcacgggaagcccaacaggcaaaaaccgggcaaaggagga

SEQ ID NO: 157341 - RNA, 87 nt, Homo sapiens
ccaacggggcggccgcgacccccggcaacccggagaaggcacagagcggccgcgccagcgaaccaggcagaggagaagcgcagcaag

SEQ ID NO: 157342 - RNA, 81 nt, Homo sapiens
ggcggcggagcgcaggcccggccgacggccacacggcggccgcagggcgccggagccccccagggccggccgcgcacccag

SEQ ID NO: 157343 - RNA, 71 nt, Homo sapiens
aagacggaccgacggaccccaggacagggaccccgacggagagacaaagaagacggagggggggccagcca

SEQ ID NO: 157344 - RNA, 83 nt, Homo sapiens
gaacagcagcgccgcccgccgacagccaggcccgggagaacccgccagccagagaaggcgcgagaaggagaaacgaacgcgcg

SEQ ID NO: 157345 - RNA, 75 nt, Homo sapiens
ggccgcgcaccgccaaagacaagaacagaggggccgagaagccaacaagaccccagcaacaagcgcgacgccaag

SEQ ID NO: 157346 - RNA, 73 nt, Homo sapiens
ccaagcccacccaccagggaagcccgcacgcggaagcgccaggagaccgaaagcacgggaaaacccggacaaa

SEQ ID NO: 157347 - RNA, 77 nt, Homo sapiens
ggggcccgcgcagcagcgaccacgagaggacggggacgggccccaggacgaggaagacaaggccagccacggaagga

SEQ ID NO: 157348 - RNA, 77 nt, Homo sapiens
ggaaagaagaacgagaacggcgagagaggaagagagaagacggcgaagccccagaaaggggaaagaccacggcaaag

SEQ ID NO: 157349 - RNA, 58 nt, Homo sapiens
cgcgccccccccaggcccgccgcccccgccaaggagcggcggcagcaggaacaagaca

SEQ ID NO: 157350 - RNA, 78 nt, Homo sapiens
gcaggagggagaccacagcaagacgccaggaccccggaagccagaaagaacgcaaggagggacaggacggaaggagcg

SEQ ID NO: 157351 - RNA, 83 nt, Homo sapiens
cagccgacacgacgccgccggcaggcccgcgcaccagggcgggacgaccccacaacccgagcgcccaagccccccgcgcagag

SEQ ID NO: 157352 - RNA, 82 nt, Homo sapiens
ccgagacccagcacacgccgaccagcgaccggcagcaccagggaaccggagcccaggcggcgcagggggacccccgcggccc

SEQ ID NO: 157353 - RNA, 40 nt, Homo sapiens
ggacaaacccacccacaaagggccacgcgcccaggcggag

SEQ ID NO: 157354 - RNA, 57 nt, Homo sapiens
ccaggcgggacagagggagccaggcagagagccaagaaagggagggggaaacagcca

SEQ ID NO: 157355 - RNA, 71 nt, Homo sapiens
cgaccccgcgcgccagggggacgaaaacaagggaggcaaagccaaacaacaacagagcaaaagcaaaggac

SEQ ID NO: 157356 - RNA, 79 nt, Homo sapiens
ggcgccagggccgccgccccgcccgggacagcccagagcaagcacacggaggcccgggagccagaccgggagcccgccc

SEQ ID NO: 157357 - RNA, 81 nt, Homo sapiens
gaccaagaaccagaagagccacgaacccccgaacaaggagccgacgggccagcacaacggccgcgagcagccaacgaggac

SEQ ID NO: 157358 - RNA, 74 nt, Homo sapiens
aagaccaagcgcgaaagcgccaaaaggacagcagacgaaaaccggggaagaagggagggccagaggggaagaaa

SEQ ID NO: 157359 - RNA, 76 nt, Homo sapiens
ggaaggcacaaggacaaacccacccacaaagggcgcaccacgacaaagaagagaaaacgcggcagagcaacaaaca

SEQ ID NO: 157360 - RNA, 52 nt, Homo sapiens
gaaaagcggccccaaggcgaacaaaagcgaccagaaagaaacacggcgcaaa

SEQ ID NO: 157361 - RNA, 84 nt, Homo sapiens
gcacgggagccacggcggggccgcaccaggaggcaaccccggaggaagcggcccaggcaggggccacaccagccccaagaaacg

SEQ ID NO: 157362 - RNA, 80 nt, Homo sapiens
ggggaacaggagaccaggcccaaccacgaagaagaagcgagcggcgcagaagacagaaacgcacggcacacggcagcgag

SEQ ID NO: 157363 - RNA, 42 nt, Homo sapiens
acagaagacggacgaagaaggaagaagccaagccaagagaca

SEQ ID NO: 157364 - RNA, 69 nt, Homo sapiens
cagccgcgcggccacgggcagacccacgagcaggagcagacaggaaaaaagggagggcacaccagagcc

SEQ ID NO: 157365 - RNA, 61 nt, Homo sapiens
cgagcgcagagcccggggacggcgaggccccagaccacacgagaaggacggagaagcgaaa

SEQ ID NO: 157366 - RNA, 53 nt, Homo sapiens
cccaaggaaagacagaggaacggccgcggagcaacaacggaggaagggacgcc

SEQ ID NO: 157367 - RNA, 67 nt, Homo sapiens
aagggacagaacagggaacggaaacgccggccaaaccgaacacaccaaggggaaaagagacgcaaac

SEQ ID NO: 157368 - RNA, 76 nt, Homo sapiens
cccggagaaagccacccagagaagagagaaccacagcccgggcacccaggacccagaggcgacagcggcaaccgcc

SEQ ID NO: 157369 - RNA, 55 nt, Homo sapiens
gggggggaccgaccgcaacagaacggacccgacagcgagcagaagaaaacagaaa

SEQ ID NO: 157370 - RNA, 64 nt, Homo sapiens
gcccacgcagggccaacaggccacagcacaccagagaagcaagggacagaaagaggaggggcac

SEQ ID NO: 157371 - RNA, 75 nt, Homo sapiens
ggccgagacaaaggcaccaggccaccacagaaacaaaagcaacaaagagggcagacaaccaacagggcaaaaccg

SEQ ID NO: 157372 - RNA, 81 nt, Homo sapiens
agacccaaggacaacgcaagggggaagagagagaaacaaaagcgccagagccaagaacggccgcgcgagaagcggaccaaa

SEQ ID NO: 157373 - RNA, 69 nt, Homo sapiens
cccagacaacccaaaacaacggaaaagcaaggacaaggccagggaacggaagcaaccagaccccgcaag

SEQ ID NO: 157374 - RNA, 38 nt, Homo sapiens
cccccaccgggccggacccgagcaccgggccacagaaa

SEQ ID NO: 157375 - RNA, 76 nt, Homo sapiens
gcgccggacccgaggcagcgagaacggagccgcacgaagcccggagaagaccagcgccggagcacgggccacggga

SEQ ID NO: 157376 - RNA, 37 nt, Homo sapiens
agcaaagcgagacggaggaccgacgaaaacggaagga

SEQ ID NO: 157377 - RNA, 80 nt, Homo sapiens
cacagagcaagagaaggagcccggagggaagcgagagcgacaggaagccgccagacaacaggcacaaagagagaaggaac

SEQ ID NO: 157378 - RNA, 77 nt, Homo sapiens
gaacgccccccagccccggcccccaggcgcagcagcggcgccccggggggcgagcaagcaaaccagaagagacgggc

SEQ ID NO: 157379 - RNA, 64 nt, Homo sapiens
cccccacagcccacaccagcacacagaaaaccgagcgagcagccgacgcggcgggcacgggcgg

SEQ ID NO: 157380 - RNA, 71 nt, Homo sapiens
acacaaaagcagagcgcgaacggagaaagggagacaagcaaaacgggcgggggcaaagaaccacaagaaca

SEQ ID NO: 157381 - RNA, 64 nt, Homo sapiens
ccaggcccgggggcggcggccacgccaaggacggggaccagaccccacaagaaaacacacaacc

SEQ ID NO: 157382 - RNA, 61 nt, Homo sapiens
cgaggaagcacaccaccaaggaacgggcgcagcgagagaaggcaggcccacgggagccgag

SEQ ID NO: 157383 - RNA, 69 nt, Homo sapiens
aagagggcagaaacgccacaaggagcccgcgccgaccaagagccgacggcgagcgacggcagaagacgc

SEQ ID NO: 157384 - RNA, 75 nt, Homo sapiens
gccgagccaaacgccggggaccccggcagccacccaccgccgccgcccccagaggaaacaaagagaaacggggac

SEQ ID NO: 157385 - RNA, 71 nt, Homo sapiens
agggagcagagccgcaagggccaaagcccaagaacgaggggccaggccgggaaggaccgcgccgcccacca

SEQ ID NO: 157386 - RNA, 78 nt, Homo sapiens
cgcggccggagacaacgaggcaacgcacccggaccgggccagggggcgaggaagagacaggcgggggagaagaagcag

SEQ ID NO: 157387 - RNA, 64 nt, Homo sapiens
cgccggcagaggaccaggcaccaccggccccggaagaggaagcccaaaaggaaagaaccagaga

SEQ ID NO: 157388 - RNA, 75 nt, Homo sapiens
gcaggaccaaccccagacgcgcaggccagccccggcaggccaagcagaaccacaggagggacacacgaagagaag

SEQ ID NO: 157389 - RNA, 83 nt, Homo sapiens
acagggcacgcaagaccagccgaagccgcggggccgaagaagccggaggaggagaagagccgagggagacgacgagagccaac

SEQ ID NO: 157390 - RNA, 73 nt, Homo sapiens
agggggcgcgagcgggggaggcagcacggcaggagacgaggagaggacagcaggacacccggaccccaccgcg

SEQ ID NO: 157391 - RNA, 74 nt, Homo sapiens
aggaagagagaagacggcgaagccccagaaagagccagccaacaccccagaaagacacgagcccgcacgaacag

SEQ ID NO: 157392 - RNA, 49 nt, Homo sapiens
ccaaggcggaaaagcccaagaaacaaacaccccagagaggcacaccgaa

SEQ ID NO: 157393 - RNA, 82 nt, Homo sapiens
agcgaagacccagagcaacgacacaaggaggcacaccagcgaccggaaggcaggacaagaacgcagacagcgaggacagcaa

SEQ ID NO: 157394 - RNA, 82 nt, Homo sapiens
ggcggcggcgagccgcgcgcgcagccgacgcgggaagaagcgggcgcgggcagaagccgggcggaagcccacgcacaggcgc

SEQ ID NO: 157395 - RNA, 76 nt, Homo sapiens
gcgggaggaaggcagagaggcagcagacacacggccgggcacccgaaacaaaccagaaagaggcaacgggaagacc

SEQ ID NO: 157396 - RNA, 71 nt, Homo sapiens
ccgacccgcccgggcagagccagacaagggaacaacgagagcgccccaagggagccagcgcagccacacaa

SEQ ID NO: 157397 - RNA, 82 nt, Homo sapiens
cagaccgcacaccagcggaagcaaaccaagaggagagagggaaaccgacgagcaagggccagcaaaccgcagcggaaggagc

SEQ ID NO: 157398 - RNA, 68 nt, Homo sapiens
cgggaaaaaaccgcaaaaagaagcacaaggaccgaggaaccacgccagggccccaaaaaggcagaggg

SEQ ID NO: 157399 - RNA, 73 nt, Homo sapiens
ggaaaccagggccacagcacgcagccccaggcagggaggagcgcacagcacagccaaaaacagaaaccacgcc

SEQ ID NO: 157400 - RNA, 75 nt, Homo sapiens
gccccggcgcgaagaggcggaccggacggccgaggcacccaaaagagaaaccacgagccccgaggccgagccccg

SEQ ID NO: 157401 - RNA, 74 nt, Homo sapiens
gccacagcccaaacaacggcaaacaacgaccaggagccaggggcgccaggccaccagcgccacgggccggcggg

SEQ ID NO: 157402 - RNA, 50 nt, Homo sapiens
cccccaagagcggggacaggccccagaaaggagaaccaacccgcaagaca

SEQ ID NO: 157403 - RNA, 74 nt, Homo sapiens
aaaagcccccaaacgcccggaacacgagagggccgggaggcacggacacacaaaaaggaaaaccaagcaccgac

SEQ ID NO: 157404 - RNA, 82 nt, Homo sapiens
gccggacgagcagaaacagccaagcggcagaacacaccagaagaaaacccagcaaggcccagagggaggcacaacagcgagg

SEQ ID NO: 157405 - RNA, 63 nt, Homo sapiens
cagaaggggagacacaagggcacgaaggcaaacaaaggcacaccaacggcaacggagaaggaa

SEQ ID NO: 157406 - RNA, 60 nt, Homo sapiens
cgagcaccccgacggcgacgagcagcaccggcacagaggagccagcccccacagagcggg

SEQ ID NO: 157407 - RNA, 50 nt, Homo sapiens
accgccaccgcaaggacaaagaaggcgaccagacaagccagcgaaaccag

SEQ ID NO: 157408 - RNA, 79 nt, Homo sapiens
caacaacgggcaccggggccacccgccgcggggcacgcaagacggcaaaagccgaccccaagaggcacaggcggaagag

SEQ ID NO: 157409 - RNA, 74 nt, Homo sapiens
cgggcagaggagcagggaggccacaggggccgaaacacagagcaaggccgcaggaagccggggcaggcccaaga

SEQ ID NO: 157410 - RNA, 73 nt, Homo sapiens
ggggagaggggacccgcagaaaggggccggaacgcccgacacacaggaagaccgcaggaaagcaggaaggcaa

SEQ ID NO: 157411 - RNA, 82 nt, Homo sapiens
aggaacagaggacaggagcgcccgcccccaggcagcccaaggccaaccccacgcaccgcccgccccccgaggagcccaagcc

SEQ ID NO: 157412 - RNA, 77 nt, Homo sapiens
ccgaacggccagacccggagacgacccgacgaagcccacgccgggacccagcgcagggagcgggaaacgcacaacag

SEQ ID NO: 157413 - RNA, 78 nt, Homo sapiens
agccgccccgagcccgccgccacacccgagagggaaggagagaaggagagagacccagcccaccaaaggaagcagcaa

SEQ ID NO: 157414 - RNA, 59 nt, Homo sapiens
gaacaacaagagcccaaagggaagacaaaggcgcggcaagcggggaagcacaggaccaa

SEQ ID NO: 157415 - RNA, 76 nt, Homo sapiens
gccgcaaggagcggacccaccggccaccggcggagcgaggaacacccaacgccccccaggcaacagccagccgcca

SEQ ID NO: 157416 - RNA, 62 nt, Homo sapiens
gaagaggcgccacggacaaggcccagcccacagacagcgggccccaggacgaggaaccggac

SEQ ID NO: 157417 - RNA, 75 nt, Homo sapiens
cgcgccgccgaccccccggcgccgcgccggcggcgcggagaggagcgaagagcgaagccagccagccgccgaaca

SEQ ID NO: 157418 - RNA, 78 nt, Homo sapiens
agaccaccgcaacgggagccacgagaaggagacccaacaccccggccagacgggccaccaggccggcgccccacgccc

SEQ ID NO: 157419 - RNA, 73 nt, Homo sapiens
agaaacagccaccagaacaacgaagaggagaagcaggaccaagacacgcagacaccgcgacagcccagagacc

SEQ ID NO: 157420 - RNA, 63 nt, Homo sapiens
gcaggggcggcacacagcacgggcgggggacgggcagaaaaacagcgccaggagccgggacag

SEQ ID NO: 157421 - RNA, 72 nt, Homo sapiens
aagaaaaaaaaaaggcagaacccgagacaaccaccgggggccaccaccgaggagacagcagaccacagcccg

SEQ ID NO: 157422 - RNA, 58 nt, Homo sapiens
gacgccgaggaacgagagcgcgaagcaaggcccgagagaagaaaagcccacgacaaca

SEQ ID NO: 157423 - RNA, 83 nt, Homo sapiens
gcagaccagagaagagcacagaagaccagagaggaacacagcacccacccacacccacacccgcgacgggagggaggagccgg

SEQ ID NO: 157424 - RNA, 77 nt, Homo sapiens
gacgaaaacgcgcgccaagggaacagggcaacaacacggcaccacacaagcgaagaagccgagaaaccagccacgca

SEQ ID NO: 157425 - RNA, 58 nt, Homo sapiens
caggggacgggcggaagcacagcacggacggagaacacggaggaacgcacgaccagca

SEQ ID NO: 157426 - RNA, 76 nt, Homo sapiens
gaacagagacagacggagagagacaacagagaagggaggaagaaggcacacaggccccgagaaccaagagaacccc

SEQ ID NO: 157427 - RNA, 72 nt, Homo sapiens
cccagaagccacgcgcagaccgacccacaagcccaaagggagaacgcccgcagcacccaagaccgaagaagg

SEQ ID NO: 157428 - RNA, 51 nt, Homo sapiens
ccgccgccccagcgggagacacgggccggagacgaccgggagagggagagc

SEQ ID NO: 157429 - RNA, 77 nt, Homo sapiens
ggaaagcggcgcgagacaacgccgcaagcgccgacaaccccggaacgcgggcaaaaggccccaggggaccgggggag

SEQ ID NO: 157430 - RNA, 79 nt, Homo sapiens
caacccggagccagggacccacccccgacagggacacagggagccccagacccacaggcccggaacacggccgcaacgg

SEQ ID NO: 157431 - RNA, 41 nt, Homo sapiens
ggaaaggcacgaaagccagccccaccaaagccaccaagcca

SEQ ID NO: 157432 - RNA, 78 nt, Homo sapiens
cgacaagagcgccgcgccagcccacccccccaacccccacgggggggccccagcccggccgaacgggcgcacgacaca

SEQ ID NO: 157433 - RNA, 82 nt, Homo sapiens
cgcagggagagcacagaccaccccggaccacacccacacgcgccaacgcgggggaggcagggagcccagaaagaagagaaaa

SEQ ID NO: 157434 - RNA, 78 nt, Homo sapiens
gccgacgagcgcgcacaacgcaggaccggcgccgaaggcccgccagggaagcaaggaccagaagcgccaacgcaagca

SEQ ID NO: 157435 - RNA, 64 nt, Homo sapiens
caccgcgcggaccacaaaccgcgccagaaaacccaggaccgacagcagaggagcgcaagaacgg

SEQ ID NO: 157436 - RNA, 80 nt, Homo sapiens
cggccgcccgcggcgcagcgcggcgagagccccccaagagaacccagggggagccacgccggagcgggcaccggcgcgga

SEQ ID NO: 157437 - RNA, 79 nt, Homo sapiens
gagagcccacagaagcaagaaagcaggccaccagaaggggaggagacgggaacaggaggagagaaagaacccacgcagg

SEQ ID NO: 157438 - RNA, 79 nt, Homo sapiens
aaaaagacacaagcaaccggagggagcaaaagcaaccaccgaaacgggcgaaaaagaagaacagcaaaacacgaaaggc

SEQ ID NO: 157439 - RNA, 78 nt, Homo sapiens
gcggcggagagcggccgcgggcgacgggccgaggacagggggacagcagcaccagaaccaaaaagccacaacagggag

SEQ ID NO: 157440 - RNA, 73 nt, Homo sapiens
ccgcccaaggaggcccagcgcggagaggagaaaaagaaacccaaaggggcacaagaggagacgccagaggaac

SEQ ID NO: 157441 - RNA, 85 nt, Homo sapiens
cgcgccacccacggagccaaccagaccaaggcagaagcagccccgcaaagggaacaggaagcagccacggaggggacgcccagac

SEQ ID NO: 157442 - RNA, 71 nt, Homo sapiens
aggcgggcccacagcacagagaagcaaagaccaaacccagggagcgcccacaagccacggaaaaaggacag

SEQ ID NO: 157443 - RNA, 91 nt, Homo sapiens
aggcacagggcgcagcccaggagcccaaggcggcccggcgggcgacggacggccggacagaggccaccaaaaagaggaagcagcgaaacac

SEQ ID NO: 157444 - RNA, 72 nt, Homo sapiens
aaacaaaagcagcggccggacagcgccacggcgggccgcgggaggacaccacccacagagagacaacacaga

SEQ ID NO: 157445 - RNA, 72 nt, Homo sapiens
cggagccagggacccacccccgacagggacacagggagccccagacccacagaggagcaacacccaaggaga

SEQ ID NO: 157446 - RNA, 121 nt, Homo sapiens
caaaccgggcgccgaaaacagacagaacagaacccaaaagccgacaaccccagaaacagggacacgacacagggacgggccaagaacccaggaggagggaaagccggacccggcagaaggc

SEQ ID NO: 157447 - RNA, 79 nt, Homo sapiens
gcagcgcgggcgcgcggccggccggagccagcagcagcccaggacacgcccgccggagaagaacagagccagccagacc

SEQ ID NO: 157448 - RNA, 73 nt, Homo sapiens
gagaaccggagagcacccaacaacacgagagggcgaagggcgccaacgcggaaaaacaagggcaacaccccgg

SEQ ID NO: 157449 - RNA, 70 nt, Homo sapiens
gcagcccgcacccaccgggccgggaaaccgaggaaagacggcggaaaacccgaagcagaagcccgacaca

SEQ ID NO: 157450 - RNA, 77 nt, Homo sapiens
aggcgcgggaccccaggagggggacaggaggcgcggggcccagcgaggcaagccggcaggggaagcaaccagggcgg

SEQ ID NO: 157451 - RNA, 77 nt, Homo sapiens
agcaggcaccgagaaaccggcaggccagaggagggaagaaccccacagacgaaaccggagggcagagagcgaggccc

SEQ ID NO: 157452 - RNA, 78 nt, Homo sapiens
gcgaagcgaacaaaaagcagcaaaccggaccaccccgaagaaagcacaggaaagcggcagaaggaaaggagaaggaaa

SEQ ID NO: 157453 - RNA, 73 nt, Homo sapiens
caagacggggcgccccacagaggggcgacgcacaagggacccaggcaggccaaacccaccggaaaaagaaaaa

SEQ ID NO: 157454 - RNA, 58 nt, Homo sapiens
aaggacaaggacagaacaccagcacggcgaaggggcacccacagaaagcgacggcgag

SEQ ID NO: 157455 - RNA, 73 nt, Homo sapiens
gggccagcagcccccccgcccccagcggcggagccacgaaaccaggacagaccaacagggaacggagaacgga

SEQ ID NO: 157456 - RNA, 76 nt, Homo sapiens
gaggaaggaccagaagaacaacagcaaaagcacacaagcaccgggacccaggacggcgaggaaaaccaccacacag

SEQ ID NO: 157457 - RNA, 83 nt, Homo sapiens
gaaggccgggacccggccccggcccacaggggggggcaaacccgagagaacgggaacacgacaaagacagaccccggacggga

SEQ ID NO: 157458 - RNA, 69 nt, Homo sapiens
gacaagggggcaaagacgcccaaggggcaagaaggacacccagaaaagaacacagaaacagaaacccaa

SEQ ID NO: 157459 - RNA, 75 nt, Homo sapiens
caacggggccggggcgccccacgccagcaaacgggccaaggaacaggacggacgagaagccaggacaggccaaca

SEQ ID NO: 157460 - RNA, 68 nt, Homo sapiens
cagacaaaagggccaaagaagggagagaggaaaaaaagaaggggagcgcgagaaggaaagcgccgccc

SEQ ID NO: 157461 - RNA, 73 nt, Homo sapiens
acagcaagggcagacgacccgaacggagaaacgagcagaacaccggggacccacagcagccaggaagaaaggg

SEQ ID NO: 157462 - RNA, 67 nt, Homo sapiens
agcgaccaggggcgagagcgggcaccccccaaacgacgcagccacggagaggacaccagggacagcc

SEQ ID NO: 157463 - RNA, 55 nt, Homo sapiens
gcaacggagaaaacccggaaccgcgacggcggcaggacggggggccggagaacgg

SEQ ID NO: 157464 - RNA, 83 nt, Homo sapiens
agcccgggcgcgggggcggcggcagggggcggagcggggacacacccagaagggcagaaaagaaaaggccaaacccacccaca

SEQ ID NO: 157465 - RNA, 75 nt, Homo sapiens
agagacacaaacaacccggggaccgaacccagcagaagccagccgccacgccgagccagccagcaccaaccaacg

SEQ ID NO: 157466 - RNA, 74 nt, Homo sapiens
cccgaacgaggaaaaacagccaagacggcaaagccccccagaagaccaggcgcgaccgcccagggagacggaac

SEQ ID NO: 157467 - RNA, 84 nt, Homo sapiens
acaccccgcagagcccgaagcggaccgcagcccaagggacggaggccaccaacggcggggggcgaggagcgagcaggagccggg

SEQ ID NO: 157468 - RNA, 83 nt, Homo sapiens
ccgggcccagagcggaagacaagacggagccccgcccggcccgaaagccgcagcgacagcgaaaagggcaagacggccagagc

SEQ ID NO: 157469 - RNA, 68 nt, Homo sapiens
ccgccaggccccggacacccagaccgcaacagagaccaaggaaggggaagccaaggaggcccaccaag

SEQ ID NO: 157470 - RNA, 82 nt, Homo sapiens
ccggccacccgagaagggagacgacgcgcgggccgcgagcggggcgacccgagaaaagacccgcaaccgcgcccgggccgcc

SEQ ID NO: 157471 - RNA, 80 nt, Homo sapiens
caccgacgcaaccggcagcagcgcgccgccgcgcccagccaccgccccccccacgggacaaaggccagaagcaggagagc

SEQ ID NO: 157472 - RNA, 74 nt, Homo sapiens
aacagacagggccgcaggccaaggaagcacgggaagaacagaaaagagaagcaccacggaaaccaccgcgacaa

SEQ ID NO: 157473 - RNA, 76 nt, Homo sapiens
acagaacaacagaagaggagagaggaacccgaagaagaaaggacgacagccagagagaccgaagcgccggccagac

SEQ ID NO: 157474 - RNA, 89 nt, Homo sapiens
cgaggcgaaggaagaggcggacggcgggaccacaagacaacgcggagcggcgaagagcaaccaggaaaaagaacagaggccaacccgac

SEQ ID NO: 157475 - RNA, 89 nt, Homo sapiens
gagagaaccaccagcagccaccaccaccaccaccaccacagagcgggaagaggggcgagcccagcgcagcccagcaggggcgcgcagca

SEQ ID NO: 157476 - RNA, 78 nt, Homo sapiens
aaacgaggaaaccgggaaagccaccgaaaaggaggggcagcagcaggacagggaacccgggagacagcaacagacgga

SEQ ID NO: 157477 - RNA, 84 nt, Homo sapiens
cccccaccgccccagaaagccccagacggaaagagcacgcgagagacacaccagagccagcccagcaccacaggggaccccggg

SEQ ID NO: 157478 - RNA, 59 nt, Homo sapiens
ggaaacgacaggcaaaaccccgaagaaggcaagaggcaggaccgacagcacccgaaaga

SEQ ID NO: 157479 - RNA, 87 nt, Homo sapiens
acaccgacaagaagaagagaacaaagagccgggagacggagcacggcgccgcggcaagagccaggacaggcaaccacagagagagca

SEQ ID NO: 157480 - RNA, 81 nt, Homo sapiens
ggacagagcaacgggacacaaagacacgaggcgcagcaagaggagccaggagcacggggggaacaagaccgccgggacgga

SEQ ID NO: 157481 - RNA, 79 nt, Homo sapiens
cccgagccccagaagggagacgcacacaccaagaagcgccgcaggaggagaaagacgaagagcgcacaaaaggagcgga

SEQ ID NO: 157482 - RNA, 78 nt, Homo sapiens
ccagagccgcccaaccccggacaacgcagaccagacccggacgccacggggaagagacggacacacagaaagggagaa

SEQ ID NO: 157483 - RNA, 84 nt, Homo sapiens
aggacgggccacgggcccgcgacgcgcagccacgcaggagaccagagaagaccaagaggaacccggcgcgcagagaacagaagc

SEQ ID NO: 157484 - RNA, 75 nt, Homo sapiens
gaagaccccaccaggagaccacgcccagaacgaaaacaaacggaagagagggcagcaagaaagaacaagaaagcg

SEQ ID NO: 157485 - RNA, 77 nt, Homo sapiens
cgaacaggagaaagaaggcggaacaccacaaggcaccgcaagaaaccaccaaaccaaaaccagccagcggagcgagg

SEQ ID NO: 157486 - RNA, 78 nt, Homo sapiens
gcagggcgcgagcgcccggggcacgcccgcggccgccggacggccgggcgcggaggaaagagcggccccccggaaaac

SEQ ID NO: 157487 - RNA, 67 nt, Homo sapiens
acacaccgggaacgaagaagaaacccgaagagagcccacgggacaaaaaaaccagacaaggaaagga

SEQ ID NO: 157488 - RNA, 74 nt, Homo sapiens
gccgggccccgggccccgaggccccgaccgcggcggagcccgacccacccaagagggaggaaccgaaaggaaac

SEQ ID NO: 157489 - RNA, 77 nt, Homo sapiens
caccgcacccccagcggagccaagaggggaaggaacgaggaagaaaacgccaaggggacaaagaaacaagcgacgga

SEQ ID NO: 157490 - RNA, 69 nt, Homo sapiens
cagcagccagggggcaggacagggaggacggaggggggaggagcaggcccccaccgcgacccacaaccc

SEQ ID NO: 157491 - RNA, 71 nt, Homo sapiens
gaagaaagaacagaacagcgaaacaagaggggccacacgcaaacccgggagagaaggggacgaggccgaac

SEQ ID NO: 157492 - RNA, 74 nt, Homo sapiens
aacccgccaggcaggccccccggagcggccccgccgcggcgacgcggggaagggggacagcaagggaggaggag

SEQ ID NO: 157493 - RNA, 75 nt, Homo sapiens
gaagccgcgaaaaagaaggcgcccaccacacaggcggcagccgggagccaccaccacaacaccgagggacgagac

SEQ ID NO: 157494 - RNA, 74 nt, Homo sapiens
gccgcgaacacccacagagggagcgcaggggaagcacaagcccaccgacgggggacgacaccgacggggagagg

SEQ ID NO: 157495 - RNA, 103 nt, Homo sapiens
ggaccccaaccagccccgcaacccggaccagcagaaaccagaggcacaagcagcgcgcccggcggaggaccagggggacgggagccaggagcgacgagaccga

SEQ ID NO: 157496 - RNA, 60 nt, Homo sapiens
accgagccgacgccgcggggcagcgggccggcgccggcgcggcgagaacgcggacaagca

SEQ ID NO: 157497 - RNA, 78 nt, Homo sapiens
ggacgcaagaaacccaggacgagaacagcaacagccagaggagaccgaagaagacggagaccaaacaggacagaagcc

SEQ ID NO: 157498 - RNA, 57 nt, Homo sapiens
agagccacacaacccacccacagcaccaagcagcaagagccgcgaagcagccacgga

SEQ ID NO: 157499 - RNA, 110 nt, Homo sapiens
cccccccgcccgcgagcggcgggcgggcgggagcgcccaagggggcggagagcggggggggccggaaccaaaaagaagccccagagccggggccaggagccccaagcgcc

SEQ ID NO: 157500 - RNA, 36 nt, Homo sapiens
agggacgagggggcggaagaaccggaacggcagccc

SEQ ID NO: 157501 - RNA, 72 nt, Homo sapiens
caaccgaggcggcggccggcagggacgaccgaggggacccaaggagggcggaccacccgggaggagggagac

SEQ ID NO: 157502 - RNA, 81 nt, Homo sapiens
acacggggagacgaagaaggcagaaggagccacggaggcagcacaccccccgggacaagagcagcgcggagaacacgaccg

SEQ ID NO: 157503 - RNA, 92 nt, Homo sapiens
cggccgcggaggcggaagcaccaggcggagggcggcagcccagacgggcgggcagggccgggcccgcagagggagcccaggcggcaggagag

SEQ ID NO: 157504 - RNA, 84 nt, Homo sapiens
gggcgagcagcaggagcgagcccgaggacaggagaggaagcccccagaaacccacaaagccccgaggggcagggagcccagagg

SEQ ID NO: 157505 - RNA, 69 nt, Homo sapiens
ggcgccaccacagagacaaggggaggagagaaaaaccacaagaggaaaaccgccgccggggccagcaag

SEQ ID NO: 157506 - RNA, 61 nt, Homo sapiens
cagcagagaaccacaagcggcgagccagaggccaacgcagaggaacggaacagaggaacag

SEQ ID NO: 157507 - RNA, 84 nt, Homo sapiens
ggcaacaccgaacgaacacccaacaagccgcaacgaaaaccggaaaaggcgcgggccaggcacgacaccgcaacgacacagcag

SEQ ID NO: 157508 - RNA, 60 nt, Homo sapiens
gacccgcagccccaaaggaaggccaagaccagaccaagggccaagcagaaacgaaacaca

SEQ ID NO: 157509 - RNA, 75 nt, Homo sapiens
gcaacccacgaagcgaacgaaagcaaaaccaaacacccgacacaggggcaacaagcaaacagagaccgagcacgc

SEQ ID NO: 157510 - RNA, 76 nt, Homo sapiens
cagaagcacaggcccgggcgaaggggccacgcgagccaagcgagcagggcacaacccagcagaccgcgaaccgaag

SEQ ID NO: 157511 - RNA, 75 nt, Homo sapiens
agcgaggcccacagaaaagccacaacccagggccgcggggcggacagcagaacgacggcgccgggcccgggaccc

SEQ ID NO: 157512 - RNA, 73 nt, Homo sapiens
gcacggccggcgcggccgacggcgcgcgcccgcgcgcgcggcgaagacgaccccgacgcaggccaggagccgc

SEQ ID NO: 157513 - RNA, 73 nt, Homo sapiens
gaggagccaacagcaggaaggcagggagcaagaccccagaaaacaaggggcccgaacggaagagggaacgaga

SEQ ID NO: 157514 - RNA, 77 nt, Homo sapiens
aagggcccgggacaacgcgacgagcaacccagcgccgaaacgcaaaacaaaaggggccaaggacgcacacaccagag

SEQ ID NO: 157515 - RNA, 67 nt, Homo sapiens
ggaaagaacgacgccagggagcagcaggaggccaggcacgacagcgcaagcaggcaaacggaaagac

SEQ ID NO: 157516 - RNA, 82 nt, Homo sapiens
gaagaagggccggagcccagagagcgccccggcgggcggcgacggcggcaaacaagaaagccaaggagaaggccaagacaag

SEQ ID NO: 157517 - RNA, 62 nt, Homo sapiens
agaacagaaagacggcggcgacggcggcgcgaggaccgaccgggcccgcggacgaagaaggc

SEQ ID NO: 157518 - RNA, 73 nt, Homo sapiens
accccccggcgccgcgccggcggcgaaaacagggccagacgggaagaaacgagaagggaccaggggcggaagc

SEQ ID NO: 157519 - RNA, 75 nt, Homo sapiens
agagaggcaaaacgggcgggacggacgaccaaccaaaaaaacggcgaggaaagagaggagccccggaaagaaaag

SEQ ID NO: 157520 - RNA, 31 nt, Homo sapiens
agccaagcaccacagaaaagaacgcgggagg

SEQ ID NO: 157521 - RNA, 70 nt, Homo sapiens
gaggaaccagaacgaaaagcgccagaaagggaaaaacccgcagaaaacagggcacgagaccaggagcaga

SEQ ID NO: 157522 - RNA, 69 nt, Homo sapiens
ccgagcgaacgcgcaacagggccgcacgcaagccaaacaaccggaaacagaaaaggccgccggcgcaga

SEQ ID NO: 157523 - RNA, 76 nt, Homo sapiens
gagcagaaacgaaccagaagaagaacggaacacaggccaggaacaacacagcgacccaagagaagcaagacaaagg

SEQ ID NO: 157524 - RNA, 35 nt, Homo sapiens
acggccgccccagggcaagacggaagacaggaggg

SEQ ID NO: 157525 - RNA, 78 nt, Homo sapiens
ggaacccaaccaaccacagagaaacggcgaggaaagagaggagccccggaaagaaaaggacagacccggccagaaagg

SEQ ID NO: 157526 - RNA, 78 nt, Homo sapiens
aggagcagcaggcacagcacgggcagagccaggcaggcgggaggaacaaaaaccacgaaaaacagcagaagaagagca

SEQ ID NO: 157527 - RNA, 78 nt, Homo sapiens
gcgcaggaagggggcagcgcgggcgcgcggccggccggagccagcagcagggaaacacaaagaagacaccagaagggc

SEQ ID NO: 157528 - RNA, 79 nt, Homo sapiens
agccgcccaccagaagaagccgcgaccgaaaacacagaaggagacagccccaacggacaaaacagaagaccaggagacc

SEQ ID NO: 157529 - RNA, 90 nt, Homo sapiens
cgaggacagcgcggcccgcgaggagccgccgcgcgcccgcgcccccgcgcgacgccagagcgccacagcagccaaacggggacgcccaga

SEQ ID NO: 157530 - RNA, 70 nt, Homo sapiens
ggaagggaggaacacgacgcggacgacggcacaacaaaaccaaccaaccaacgccgaagaagaacgaccg

SEQ ID NO: 157531 - RNA, 39 nt, Homo sapiens
ggcaccgcccggggacgaaagcaggggaaaaaagcagcg

SEQ ID NO: 157532 - RNA, 72 nt, Homo sapiens
agagcaggcacagcgccggaacaaacagacggaccccagcagccaccccgaacagaaacaaccaggggggac

SEQ ID NO: 157533 - RNA, 82 nt, Homo sapiens
ggagaccgcagccacgagagacacagccagaaggggcagaccaacaccacccagcaaaaaccccgacgaacgcgccagggag

SEQ ID NO: 157534 - RNA, 82 nt, Homo sapiens
agcagcccgcgaggaccgcaccacccgccaccacaccagcggacagccaccaagaggccagaaggcagaacagcgacacgaa

SEQ ID NO: 157535 - RNA, 74 nt, Homo sapiens
gagagcaacccaagggcccggccagagggcagccaaagacagaaaagccaagcaccacaagggaccccagcccg

SEQ ID NO: 157536 - RNA, 72 nt, Homo sapiens
cagcccccgcccagaacagcaagcacaccgaaaacccccccagggagagcagacaacaagcgcggacgagcc

SEQ ID NO: 157537 - RNA, 79 nt, Homo sapiens
gcacccggcggccccacgcagccacccaaaaacaggacccgcaagaggagacaagggcagcagcggcagagaccgccac

SEQ ID NO: 157538 - RNA, 71 nt, Homo sapiens
cgaagggaggaaaagggcagggacagcgcaggcagcagcaaaccaggcgagacagcaggagcaccaaaccc

SEQ ID NO: 157539 - RNA, 75 nt, Homo sapiens
gggcgaccgcaagaaaaggaggagcccaggggccagagcgagggaccgggaacaagggggccccgcggaggagcg

SEQ ID NO: 157540 - RNA, 73 nt, Homo sapiens
cggggaccccagagacccacagagaagaccagaaaggggacagcgacagaggcacacaaggagacacgccaac

SEQ ID NO: 157541 - RNA, 82 nt, Homo sapiens
gaaagaaccggaagacagaggcggagggggccccaggacccggacagacccaaaagggaaaaaggaaaaccagaagccagcc

SEQ ID NO: 157542 - RNA, 55 nt, Homo sapiens
gccgccaggcccgcaggaccgccggagacagggcaagaagggcggaaaaggcaaa

SEQ ID NO: 157543 - RNA, 74 nt, Homo sapiens
cgcgccaccaccgggcgccgaggggcgacgaaacaacaggggaaaagaaacaaacaacaagaagaaggacaagg

SEQ ID NO: 157544 - RNA, 97 nt, Homo sapiens
ggaaacccggcgcggcgcgcccgccccaagccgcagacgcggacccaaaggacggagagcacagcacggacaggagagggaagagagaggcacaccc

SEQ ID NO: 157545 - RNA, 64 nt, Homo sapiens
gcgcaacccgccgggccaggcagccgcacggacccagacaggagcgcgggaagaagccggcccg

SEQ ID NO: 157546 - RNA, 73 nt, Homo sapiens
gacacagagaccagagacccggacaggcccaaaaagcgggccgccgcccggcgaaaagggggcccacgcaaca

SEQ ID NO: 157547 - RNA, 79 nt, Homo sapiens
acagacacggaaggcggacagacagccaaccaccggccagcacccgacagcacaaaggcaagaaagaaaaagccccagc

SEQ ID NO: 157548 - RNA, 76 nt, Homo sapiens
acaaaacccaccaagaccagagaagcaccggccacaagggaagagacaggggacacgccagcccccaccacacaca

SEQ ID NO: 157549 - RNA, 89 nt, Homo sapiens
ccgccacccaccggaaggaggaaggaccagaagaagccgagcagacagggagcaaagaagcagaagaaacacgcaagaagaaacaacag

SEQ ID NO: 157550 - RNA, 80 nt, Homo sapiens
cacagccggcgcacgccgcgagaggcgcccagcgaccagaagcaaaaggaccggacccacaggcaaccccacgcccagga

SEQ ID NO: 157551 - RNA, 79 nt, Homo sapiens
gcgggaaagggcgagccacgggcccagcgggacagcacgcccgagcaacgggggggcccaccgacagaccgcggaccac

SEQ ID NO: 157552 - RNA, 74 nt, Homo sapiens
aagaggaggagggggcgagcccccccagcagggagacaaccaaagaggaacgacgcccaggaagacagagaaga

SEQ ID NO: 157553 - RNA, 56 nt, Homo sapiens
cgcaaccagacaagacacggccagaccaagaagaacagccccagaaaggaagaagc

SEQ ID NO: 157554 - RNA, 54 nt, Homo sapiens
ggaccccagccaacagagcggggagaacccaggcgcggacgcgcccgcacggcg

SEQ ID NO: 157555 - RNA, 79 nt, Homo sapiens
acgcagaaggacggccgacgcaggcggacaaggacgcgcggaggccccccagcagaggggaacccgcccaaaaaaccgg

SEQ ID NO: 157556 - RNA, 70 nt, Homo sapiens
gggcccgcggggcgagcccggaaaaccagaccagaaacggaggagcccgccgaagcagaaagccacagga

SEQ ID NO: 157557 - RNA, 62 nt, Homo sapiens
gcgcacgcgcgcccgaagggcaacgccgcccaaccaccacacccccaaggcaagggcgcaaa

SEQ ID NO: 157558 - RNA, 72 nt, Homo sapiens
agcgcgcaggaaccccccaaacgcaaaagccgccccaaggaagaagagagggcgaaggaggccacacagaag

SEQ ID NO: 157559 - RNA, 77 nt, Homo sapiens
aagaaaggaacagccgcaagcagacaaggaaaccaaggcaccccggagcccggaaagggccacaccagaggcagcaa

SEQ ID NO: 157560 - RNA, 76 nt, Homo sapiens
caaagcaaccaacgccagacggaccgaaaaggaacgcccaagcaggagaaggagaggaggaagaagaggaaaagaa

SEQ ID NO: 157561 - RNA, 63 nt, Homo sapiens
cacaaggaggaaccagccgcaaaagcgagacgacgggaccgaaggaccccgccagagacaacc

SEQ ID NO: 157562 - RNA, 79 nt, Homo sapiens
gcagagaaccacaagagagacccaaaagacacgcaagacagaaagacagacgagacaagagcccacaaaaaaacgccaa

SEQ ID NO: 157563 - RNA, 84 nt, Homo sapiens
acgggacaaagcagaccgaaacagaagaggcaggccaagaccgaggaagggggccaggcgaccagaccggacccagcacacaag

SEQ ID NO: 157564 - RNA, 54 nt, Homo sapiens
ggcaggaggagcgccagaagcaaggaagaaagaagcaccacagagagacaggaa

SEQ ID NO: 157565 - RNA, 63 nt, Homo sapiens
gacaacacggcgggcccagagacgccgagcggcggaagacaagcagcccaacagcccacagca

SEQ ID NO: 157566 - RNA, 53 nt, Homo sapiens
gagaggaagaagaacgacccgcccggggcagcaggaaagccgcagcggggaga

SEQ ID NO: 157567 - RNA, 71 nt, Homo sapiens
cggggggccccgaggagccaggccacaccccagcccccgcaaccagcgacaaacccgaaggcgagacgaga

SEQ ID NO: 157568 - RNA, 75 nt, Homo sapiens
gcggggaagaacggcaacaaaagggaaaaccaggagcaagacaaaagcagagacagaccgcgcaggcgcggcaag

SEQ ID NO: 157569 - RNA, 79 nt, Homo sapiens
ccgcagcgacacaccaagcggaggggacgccacgcaacgccgagaggacggggacgggccccaggacgaggaagacaag

SEQ ID NO: 157570 - RNA, 68 nt, Homo sapiens
agccaagcgccgccggaaaacgcagaacaaagcgggacagacccgcaaggaagagccggacagaagga

SEQ ID NO: 157571 - RNA, 115 nt, Homo sapiens
ggcaggccagcggaaaggacgcaccccaaaagacacccccgaacccagaacacaaggccaccgcgcggcgccacccaggggaacgaggccaggagccacagccacgccgccgcgc

SEQ ID NO: 157572 - RNA, 31 nt, Homo sapiens
agaagcgggacaccggccgaacaccaaccac

SEQ ID NO: 157573 - RNA, 79 nt, Homo sapiens
ggcagacagcaagggagagagcccgcagagcgcgcacccagcagcaacagcccgccagcagcgccccgccacgggagcc

SEQ ID NO: 157574 - RNA, 61 nt, Homo sapiens
caggggggggcaaacccgagagaacggggcagccaagcaggaccacccaccagccaccagg

SEQ ID NO: 157575 - RNA, 81 nt, Homo sapiens
cgcgacggacgggggcgccgcccgcgcccgggaccgacccccgccgcggccgcgccgagcgagcaacagcagaaaagagaa

SEQ ID NO: 157576 - RNA, 90 nt, Homo sapiens
ggcccgccgcaccagcgaccgccagccaagggacccaccgccagacagggcagccccgagaaccacagggacacccgcccccacccggga

SEQ ID NO: 157577 - RNA, 35 nt, Homo sapiens
agaaccaaacaccaagcagaaaggacacgcacggc

SEQ ID NO: 157578 - RNA, 81 nt, Homo sapiens
gccaaagaaacaagccgggaaagggacaagaagggcaaagccgaaagaggagcacgaaggcagcagacaccaggcacccag

SEQ ID NO: 157579 - RNA, 66 nt, Homo sapiens
gacgcgaacagagcacggaaaacccagaaggcaccggaagccaggaagaggcgcccccgcccgcca

SEQ ID NO: 157580 - RNA, 80 nt, Homo sapiens
acagccaggccagcgcggcgccagcaacaacaccaggcacacagacacaaagggaagaagccaaagaagaagcaagaacc

SEQ ID NO: 157581 - RNA, 52 nt, Homo sapiens
gcagcgcccagcagcgcagcacccagccaaacccaggcccgagaagaagagg

SEQ ID NO: 157582 - RNA, 61 nt, Homo sapiens
ggaccaagcgggccacagcacccccgagagcacaccggcagcaccacaaaccgacacgcgg

SEQ ID NO: 157583 - RNA, 80 nt, Homo sapiens
gaggacgaaccaacggaacgcggaccaggagcagggaacaggaccaggagaagaacccagggagcccgcaaacaaaggag

SEQ ID NO: 157584 - RNA, 55 nt, Homo sapiens
ccccgagagcgaaacacagggagcggaagcgccacaggagcgaaagcaggccaaa

SEQ ID NO: 157585 - RNA, 74 nt, Homo sapiens
cgaaagcacaccacgagcgacccggaagaaaagaagagccccaggccaagggcgggagcaccccggcgaaagca

SEQ ID NO: 157586 - RNA, 75 nt, Homo sapiens
agcaaaccggaccaccccgaagaaagcacagaaggagcaaagcaaggcagagaagaccacagaaaggccgacgcg

SEQ ID NO: 157587 - RNA, 71 nt, Homo sapiens
caaggcacaggacccaggaagcgcccccggcagaaagcgggcggaggaccagaaacagaaggagaagggag

SEQ ID NO: 157588 - RNA, 77 nt, Homo sapiens
ggacggaacaggcaaaagaggaaagggagcagcaccggccacacccacagcacgaccggaacccagcgaccgacgcc

SEQ ID NO: 157589 - RNA, 78 nt, Homo sapiens
ggcaagacaacagagaaggaaagagagcagcaaggggacaggagagagggcaagagacgacaagcagagagaacacca

SEQ ID NO: 157590 - RNA, 77 nt, Homo sapiens
cccggcgcggcggcggcccggcggcccgggcgccgcgaggcggcccgaacaggagcccgaaggagagcgcccggaca

SEQ ID NO: 157591 - RNA, 69 nt, Homo sapiens
cggagagagcacgcccaccgcgccggagccaaagggcgggaaaccaacccgcaaggcagaaccagcaag

SEQ ID NO: 157592 - RNA, 80 nt, Homo sapiens
aggagagagaaaaggagacgaagagcaccagaacccaccggcacaaccgcacgcaagcgacagcgggccagaagagggaa

SEQ ID NO: 157593 - RNA, 74 nt, Homo sapiens
cacggcgcgccgggcccgccggcccccccaggaaacgggggcgcacaggaaacagaaaaaacagcaaagggagc

SEQ ID NO: 157594 - RNA, 66 nt, Homo sapiens
ccacagacaaaagccaagagaacccagcaccaacgagaaaagaaaaaggaagagaagagaacaaca

SEQ ID NO: 157595 - RNA, 84 nt, Homo sapiens
cccaggcgccgggaccccaggccagacagggccgaggccccagagggacaagcaaggggccaaggagccaaggaggaaacccac

SEQ ID NO: 157596 - RNA, 76 nt, Homo sapiens
acggaagcagggaaaacaaggggacaccgacagaggagacccacccaacagcgaacaaaggcccaacaccaaagga

SEQ ID NO: 157597 - RNA, 55 nt, Homo sapiens
ccgggggaaccaggggcagcaccggaaaaggagagacaaggcccagagggacaac

SEQ ID NO: 157598 - RNA, 127 nt, Homo sapiens
ggagcagggccccacccggccgcccgcccagcgccgcccccggagggcccacgcagcgccggacaaaaggagaccagaaggagcccaccggacccccccgcccggccccgacgaggaagggaaaacg

SEQ ID NO: 157599 - RNA, 74 nt, Homo sapiens
ggcggccacgcaccgcgcgaagacggaagacgcgcccgcgccggacaccccccaggcacagccacaccccagcg

SEQ ID NO: 157600 - RNA, 36 nt, Homo sapiens
aaaagcaacaaagaggggccaccagaggaccaagcc

SEQ ID NO: 157601 - RNA, 80 nt, Homo sapiens
gcagcggcggaaaccgaaggggagccaggcggcgacagcgggaggagaaagggcaaagacagaggccaagcgaaagcaac

SEQ ID NO: 157602 - RNA, 73 nt, Homo sapiens
aacaagaaaccaaggaaaaagaacgaccaggacacagagcggcccaagagacaaaaagcgggggagcaggaga

SEQ ID NO: 157603 - RNA, 42 nt, Homo sapiens
caggagggaaagaaacgggagcaccaccgcccggcagcccag

SEQ ID NO: 157604 - RNA, 71 nt, Homo sapiens
acaacgcacacgcccccgccaaggcgggccgcccacgaacgggacccgaaaagggggagcacggcaaaaag

SEQ ID NO: 157605 - RNA, 81 nt, Homo sapiens
ccgcaacgaaacagcagcgggagaagaggacaagagaaagccgggcgacggccaccaccggccgcagaaggaacggcagcc

SEQ ID NO: 157606 - RNA, 75 nt, Homo sapiens
ccgggaggaggagaggacaggaccagggagcccacagcgcccaaaaaggacgagagaccacagccacccccgggg

SEQ ID NO: 157607 - RNA, 69 nt, Homo sapiens
caggacgggaaaccaggaagacagaggaaacagcccgggagagaggcaggaagacaaaggaggcccaag

SEQ ID NO: 157608 - RNA, 83 nt, Homo sapiens
cccgcagcacaggcacggagcagccgccggcacaagcacccccgcacaggacagggccaaagcggcaggagaaggaagggacc

SEQ ID NO: 157609 - RNA, 84 nt, Homo sapiens
caggcaccggcagagcccaagcccccagggcccaaagcgaggaaacgccgaacaagaaccaccgggaccccccagaagccacca

SEQ ID NO: 157610 - RNA, 71 nt, Homo sapiens
cagcagaggacccgaaaagcgaaaagaaacagagaacccacaggagggccagaggacaaagcacggcggaa

SEQ ID NO: 157611 - RNA, 92 nt, Homo sapiens
gaacagagaaacaacaggccgagcaaggagagaacgcgagggaagggcggagaacggaaaagcaccaggaagcagagaggaccgcagaaggg

SEQ ID NO: 157612 - RNA, 71 nt, Homo sapiens
ccgcagcacccggaggaggcaaggaggccacggggccgaagacaccaaccgggcaccagccaaacggaaca

SEQ ID NO: 157613 - RNA, 77 nt, Homo sapiens
agcccaccagacaccgagccaagaggaccagacgggaacccggccccccaccccaccaagcgagacggcacgccagc

SEQ ID NO: 157614 - RNA, 74 nt, Homo sapiens
agacgcagggcgcccccgaaacccacagacaaagggaagaacaaacccagaacccacacgaacgcagacgaagg

SEQ ID NO: 157615 - RNA, 80 nt, Homo sapiens
gccccagaacaagcggagccaccggcaccacgagagaaacccgaaaaccgaggcaacaaaagaccacaaaaacgaaagcg

SEQ ID NO: 157616 - RNA, 39 nt, Homo sapiens
gggaggcaagagccagcacacgcccagacccagccggac

SEQ ID NO: 157617 - RNA, 73 nt, Homo sapiens
cagagcagccccggaaggaggccgccacagaagcggaaagccgaacaacaaaaaccgagacaaagcaaagagg

SEQ ID NO: 157618 - RNA, 76 nt, Homo sapiens
aagcaccggcgggggcccgccaggcgggccgcggcggcccggacaggggccccagaggaaaagccaaggcggagga

SEQ ID NO: 157619 - RNA, 81 nt, Homo sapiens
accaagaagaagccgcggaccccacgggagggagcaacgcgagccaagcagcaggccccaaaaaggagaaagggcaacaaa

SEQ ID NO: 157620 - RNA, 81 nt, Homo sapiens
cgccggccggagcagcagcccgagagccggagacacaggccccacccccaaggggacaccagggagcggcccaggcccgag

SEQ ID NO: 157621 - RNA, 65 nt, Homo sapiens
accagcagacgcagccgagacaccagcccgaaacaccaccaaggcacccggaacgaacccacccg

SEQ ID NO: 157622 - RNA, 62 nt, Homo sapiens
gggcgggaagaaagccccaccgagcacagggccagcggagcacccacgggagaccggggggc

SEQ ID NO: 157623 - RNA, 102 nt, Homo sapiens
gaaggcccggagaaccaagaacccaccacccagcagcagggcacaagagccaccgcaagcggcaggaggaccgagcggagaagccagcgcccacaagcggaa

SEQ ID NO: 157624 - RNA, 67 nt, Homo sapiens
ccgacgcccccagccaccagggccggacccgaaaacacaagaacacagcaacacacggcgcacggaa

SEQ ID NO: 157625 - RNA, 74 nt, Homo sapiens
cggcgaagaaggaggcaggcacgggagccgaagaccacgaagaggccgcaaaaaccaaggaaaaaaaacagccg

SEQ ID NO: 157626 - RNA, 73 nt, Homo sapiens
ggacggcgcggaccaaagcggaaacgagaagaacgaaagagaaacccaaaaaaaggagcaaaagagcgaaagc

SEQ ID NO: 157627 - RNA, 96 nt, Homo sapiens
gcggccggcaggcggccgagggaaagggaggcagcgagccgaaacgagcaagaagagaccggaaacgagagaaacgaagacgaagaaacagccgca

SEQ ID NO: 157628 - RNA, 79 nt, Homo sapiens
agcccaccgcgacccaccaagaacgggaggggacgggcggcccagcgggcgagacggaggaggcgggacaagggcgcac

SEQ ID NO: 157629 - RNA, 83 nt, Homo sapiens
acaccaacagccggagaagcgcggcgcacacggcaacccaggcacgaggccagccgaaggacaaggccaagaacccaaagcaa

SEQ ID NO: 157630 - RNA, 76 nt, Homo sapiens
gccagagaaggcccgaggagagaacagggagcgggaaacgcacaacagagaacagaaaagacccgcagacaacggg

SEQ ID NO: 157631 - RNA, 80 nt, Homo sapiens
gcgacgaaggaggaaacagcccaccggagaaggacaagggcaggacacgaaggagagcagagacgcagggaggacaccag

SEQ ID NO: 157632 - RNA, 75 nt, Homo sapiens
ccacaccagacgacagcggccggaggcagcccagggaccgaagaagccccaaaaagcaggaaaaggaagcccacc

SEQ ID NO: 157633 - RNA, 78 nt, Homo sapiens
gaaggcggacccaggcaacgccagcaacgcgggcagaggagcggagcggagaagccaagcgagcaacagcagaaaaga

SEQ ID NO: 157634 - RNA, 78 nt, Homo sapiens
gagagccagcaaaccccgaagagccgccccagggaacgcgcaacacaaagcaaacacagagcagcccaagcgagagag

SEQ ID NO: 157635 - RNA, 82 nt, Homo sapiens
ccggcccggccccggcggcacggcgccgaccagcaccaggggaagcgggacaacggggaaaccaaagagccaggcgaccccc

SEQ ID NO: 157636 - RNA, 69 nt, Homo sapiens
aaaacgaggagaccagcacaagccaaagggcccacaggaaaaaagcgcgcggaggcaggccagcagcaa

SEQ ID NO: 157637 - RNA, 69 nt, Homo sapiens
ggagaaacagcagaaacgcaccaggccaaagaaagagaagaaacaaaaagccaacggaaaaagaaacgg

SEQ ID NO: 157638 - RNA, 79 nt, Homo sapiens
gaaaggcccaaggcagaagggccggccccagcgagaccgcaggggaaaaagggaacaacgggcccagggcggcaggcaa

SEQ ID NO: 157639 - RNA, 73 nt, Homo sapiens
cggcgaagagaccgaagacagaaagacaacaggcaaacacacagagagggcggggcgccagcagccccgaagc

SEQ ID NO: 157640 - RNA, 74 nt, Homo sapiens
gggccgggcggacaccccgagcaggaaagcaaacccggaccggcggggggaaaaaaggagccgcccccggacgc

SEQ ID NO: 157641 - RNA, 69 nt, Homo sapiens
aacagccagcaaaagaagagcagcgggcagcaaccagcgggccaaccagaagacggagcaggcaaagga

SEQ ID NO: 157642 - RNA, 78 nt, Homo sapiens
gaaaaaccgccaaacgcaggcacaaggcgcagggggaaacaccaagccaggagaagggagacgggcaagaccacgccc

SEQ ID NO: 157643 - RNA, 62 nt, Homo sapiens
gaaagagaccgcagagacagccaacacggcacccacagcccagaagcgaggcgaagcagcgg

SEQ ID NO: 157644 - RNA, 77 nt, Homo sapiens
ggacaggagacgaggaggagaaccagcagaccagcgaagcgcggcaaacagggaaaaaaagggcgacaggggacaaa

SEQ ID NO: 157645 - RNA, 74 nt, Homo sapiens
cagaagccacagaggaagacggaccagaacccgcggagccacccaaggcggacagcaaaaggagaaaaaccgca

SEQ ID NO: 157646 - RNA, 49 nt, Homo sapiens
cgagggcggacagcggggcccgcggaaaacagaagggaagaacccaaga

SEQ ID NO: 157647 - RNA, 75 nt, Homo sapiens
cagccccggaaggaggcaacaccaccaccagacccagagcaggacggacaccgaaccggcggcgaggcccagacc

SEQ ID NO: 157648 - RNA, 83 nt, Homo sapiens
cggcccgcgggggagccccgggagccgcacggcgagcagcgcgcaaagagagaaggcgggaccaagaagaaagaaagaaggga

SEQ ID NO: 157649 - RNA, 77 nt, Homo sapiens
acggagccagccacccacagagaaccgcccaaagcgcacagagcggggcaacaacccagacgggacacacaggaaga

SEQ ID NO: 157650 - RNA, 58 nt, Homo sapiens
ccgacccaggcgcgaagaggacagaaagcggaaaccccacaagcggccaccaccaacc

SEQ ID NO: 157651 - RNA, 73 nt, Homo sapiens
ggaaagccaaggaaaaacggagagccacaaaaaaggaagcgaaagagcccacgggagcgggaggagacacaag

SEQ ID NO: 157652 - RNA, 83 nt, Homo sapiens
gagaggcaggcggagccgaccgggccaggagacgcaaaacacgggaggaaggaggcaggcccaggccacccagcccacccacg

SEQ ID NO: 157653 - RNA, 77 nt, Homo sapiens
ggcgaggcagaccgccccgggccgcggccgccgaggagaagacagaggagccagaccaagagacagcacaggcgagc

SEQ ID NO: 157654 - RNA, 83 nt, Homo sapiens
gggaagggagcgccaggcggccgcaggcgggcggagagccagccaagaaaagggccaagagcccaaaaagcacacagcacccg

SEQ ID NO: 157655 - RNA, 65 nt, Homo sapiens
ccgcccagccgcccagcgccgccgcgcccggccaagcggagaagcggaggagaccaaggaggcca

SEQ ID NO: 157656 - RNA, 69 nt, Homo sapiens
gcgcgcggaacagggccgccaggggcccccccagggcacagccggggaggagaggggaagcaaggggac

SEQ ID NO: 157657 - RNA, 76 nt, Homo sapiens
ggagcggccgcgagccaccgaggcccagaacagccagcaaagacaagagcagaccagcagccgcagcgcgacagcc

SEQ ID NO: 157658 - RNA, 74 nt, Homo sapiens
ggaaagaaagagacaaagaagagggacagagaaagacgacaggcaagggcgaaaagcggcgcacaaagcagcga

SEQ ID NO: 157659 - RNA, 86 nt, Homo sapiens
ggacaacggcgagccagcccagaacggccccagggacccaacagacagggggacagaaagagcaaacaccggaaagggcgcaccgc

SEQ ID NO: 157660 - RNA, 75 nt, Homo sapiens
cgccacccaccccaggacggacagcaggggccgacggccgagaagcccagaaagcacggaccgccaggacgaagg

SEQ ID NO: 157661 - RNA, 72 nt, Homo sapiens
gagccggcccaggcacacacagagacaccgaaaccgggagagggccaggaaaagacaggcagggaggcagcg

SEQ ID NO: 157662 - RNA, 56 nt, Homo sapiens
cgaccgcacaaaaggccacggggaagaaaggagcccggcggaggcaaggcgcgacc

SEQ ID NO: 157663 - RNA, 80 nt, Homo sapiens
agaaaacaacgaccccaaagagcaaacccagagaaaccaaccggccacaggcgccaagaagccgagacaagccagaaaag

SEQ ID NO: 157664 - RNA, 83 nt, Homo sapiens
aggaccagggcccggacacccaaagacccacccgaccaaccccagagaacaagagaacgggcaacccagaccacacaccggac

SEQ ID NO: 157665 - RNA, 59 nt, Homo sapiens
cgagcgagggggggcgcgccggaaaccggagcgcgcagcagcgcaaacgccaaggcgcc

SEQ ID NO: 157666 - RNA, 79 nt, Homo sapiens
ggaaaagagaacaaaaaaaagaaagagaagcacacaaacaagcagcgaggacggaccaaacgagacgggcacaaagagg

SEQ ID NO: 157667 - RNA, 85 nt, Homo sapiens
ccggccgcgcccgggagcggcgccaggccggagcgcgacacggagacaggggcagagcggaccgcgaagagagacacgcaggaaa

SEQ ID NO: 157668 - RNA, 76 nt, Homo sapiens
gggcgcggcgggcgcgcccgccagcgcccggagaacgggaccaggaggcggggccccccggagcgggcgcagacag

SEQ ID NO: 157669 - RNA, 55 nt, Homo sapiens
gcccggagcccagccagagggggccgacacacggcgcccggggcaagacggcagc

SEQ ID NO: 157670 - RNA, 72 nt, Homo sapiens
acggcgcgagagcggggacccgcgggacccgcagccccgcgcgggcaccagcgcgccgcgcgccgggagagg

SEQ ID NO: 157671 - RNA, 67 nt, Homo sapiens
gcagggagaaggaagaggggaaaaggcacagcaagcagaagcacggcagccagggaaggcccccaac

SEQ ID NO: 157672 - RNA, 62 nt, Homo sapiens
cccgaaagagccgcacgcggggagggggaaccacacaagacccggcgacacagcaggacgaa

SEQ ID NO: 157673 - RNA, 80 nt, Homo sapiens
cgcagaccagaccgccgaccggcgcccgccggcaaaagcagaccggaaaacccaccggcaagaccacacccgaggggagc

SEQ ID NO: 157674 - RNA, 77 nt, Homo sapiens
caccgacgccgccgcccggccaccggcgggcccgaggagagcgcggagccgcgcccccgggaccacggccgagccgg

SEQ ID NO: 157675 - RNA, 77 nt, Homo sapiens
gcagcagcagcgccgggccgcgcgcaggcacccgccggcccaccaccccagaggacaacgagccagcccgcaccaca

SEQ ID NO: 157676 - RNA, 69 nt, Homo sapiens
cacgacaccggaggaagccagcgcccagcccggaccagcacccggggcgaccgaaaaggagcagaccag

SEQ ID NO: 157677 - RNA, 82 nt, Homo sapiens
cccggagccccccgggacccacagcaccccgaggcccgacccagaggccgcgacagccaccaaagcagcgcggacaagaaaa

SEQ ID NO: 157678 - RNA, 74 nt, Homo sapiens
agcacccaaaggaaaaaaccccaggcaggcagaaacacagagacccaacagcaaaccacccaaccgaaagaaag

SEQ ID NO: 157679 - RNA, 70 nt, Homo sapiens
aaccacggacaagaaagcgccaaaaacaacaccaaaaagccgcagggaccaaaccaggcaagaacgcaga

SEQ ID NO: 157680 - RNA, 75 nt, Homo sapiens
cccaaagcaccagagggggaaccaacacccaaacccggaaaagcagcgaagaagaaaccacacgaaaagaacgac

SEQ ID NO: 157681 - RNA, 85 nt, Homo sapiens
cgcccccgccggccggcccaacagagaacacgagacccgcacaaaaccccgccccccaggccacacaggggccgagacggggggg

SEQ ID NO: 157682 - RNA, 55 nt, Homo sapiens
aggcagcggaccgagcgcggcgcggggggaggggcaacggcaggccaccccaggg

SEQ ID NO: 157683 - RNA, 65 nt, Homo sapiens
ggagaaacacgcggcaccggaaaagcacgggagaaaacgggccggaggaaaagggcggcagggga

SEQ ID NO: 157684 - RNA, 93 nt, Homo sapiens
aacaggagcccacagaaggcagaggcagaaccacaggcaccgcggaaccgagcagcaggagcggacggacggaagaagccagccaagggaccg

SEQ ID NO: 157685 - RNA, 78 nt, Homo sapiens
aaagcagagaagaagaacaaaaggagcccagaagggaagcagagccccgggccgggaaggggaaacggccacgcagga

SEQ ID NO: 157686 - RNA, 71 nt, Homo sapiens
cacgccgccgagcagccgccagccccacggacggacgccagccccacaacaagggccgaacccaccgagcc

SEQ ID NO: 157687 - RNA, 65 nt, Homo sapiens
caacacgcacaagacggacgaaagccagagaaaaagcggagaaaaggcacgcacgagacgacgga

SEQ ID NO: 157688 - RNA, 74 nt, Homo sapiens
cgggacagccgcggccggccacagaacccccagaaagcagcaaggacgaaaaagggcagcagcaggaacaggaa

SEQ ID NO: 157689 - RNA, 56 nt, Homo sapiens
cgccgcgggccgccgcggcgcagacaaaacagaggagaccagaccagaagccccga

SEQ ID NO: 157690 - RNA, 54 nt, Homo sapiens
cgcccgaagaccaagaggacagggagagaaacaccgaaacgggcggcaaagaag

SEQ ID NO: 157691 - RNA, 79 nt, Homo sapiens
aagcgccgcagacgcaggaccgggagaagacggaagccaggacaaagggccaagagacagacaccaaacagacgagaaa

SEQ ID NO: 157692 - RNA, 81 nt, Homo sapiens
ccaagaaggggaggcccgcggcagggaccaagccgagacaccagacccgagccaagaagaccaagagcaaagcaggaaagg

SEQ ID NO: 157693 - RNA, 80 nt, Homo sapiens
cgcccccggcccgcagcccccgccggccgcccaacaccgaacaccgagcacggaagcccgcacgcaggcccgccaaaccc

SEQ ID NO: 157694 - RNA, 53 nt, Homo sapiens
gggagaaaggacggaaccagccagggacaccggagaccgaagaacggaagcgc

SEQ ID NO: 157695 - RNA, 58 nt, Homo sapiens
ccgccgggaacccgccagcaccaccgcccaaccccaggcaccaagccacaaaacaggc

SEQ ID NO: 157696 - RNA, 73 nt, Homo sapiens
accaaaaagccgcaggggcccccgaggagggaacaagccagaccaggaggagaaaacaaaaaccaaagaacaa

SEQ ID NO: 157697 - RNA, 74 nt, Homo sapiens
ccaggcgagccacgccaccgggcacggagcgaggcagaaggagccaaaaaggggagaggaagaaagaagagagg

SEQ ID NO: 157698 - RNA, 80 nt, Homo sapiens
aggagcaagcaagaaggaaggccaccaccgggcagaaacgggggagaagagcaaccggacacagaaggggaaggaaaccc

SEQ ID NO: 157699 - RNA, 63 nt, Homo sapiens
agaaggagggaccacacaaagggaggccacagaaggaacacagggaaagaccaaaccccaaag

SEQ ID NO: 157700 - RNA, 103 nt, Homo sapiens
acgggaaggaagggacaagacccacagcaaagccagcgacagaagccagaggagaaggcagagcccccccaggcagaagcccgagcgggaaccagcgaagcca

SEQ ID NO: 157701 - RNA, 76 nt, Homo sapiens
gcgcggacccaggcacggaaacaacgcaccacgcaggagcccagcaagccggagggagaagggaaaacaaagaaac

SEQ ID NO: 157702 - RNA, 50 nt, Homo sapiens
ggcgaagcaagcacacaacaaacagaacgcaaagcggcccgggagggaac

SEQ ID NO: 157703 - RNA, 49 nt, Homo sapiens
gcgacccgggcacccagagcagggaggaccccagccgcgcacacacggc

SEQ ID NO: 157704 - RNA, 80 nt, Homo sapiens
aaacgagccagcgcaggaggggaagacagaggaagaggaagacaaaccggcacgaaagaccagagaaacaaaaagcaaag

SEQ ID NO: 157705 - RNA, 70 nt, Homo sapiens
gaagagccagggaacacacagcacaaggccaagcaccagaaggccaacacaaccaaggggaaacagcaaa

SEQ ID NO: 157706 - RNA, 80 nt, Homo sapiens
ccgaacgagccgcaggaagacggcagccgccgcagcacacgggccagccaagacgccagaagcagcgaaaaagaacacaa

SEQ ID NO: 157707 - RNA, 71 nt, Homo sapiens
gggcccgaccagaagccccccaagccaggccaccccccccacgcaacgccgaacgacgaccacagcggacc

SEQ ID NO: 157708 - RNA, 78 nt, Homo sapiens
cggaccgagagcggaccgagagcgcgaaacgcacgagaaggcacgagaagagaagcccagagcaaaacaccccaaacc

SEQ ID NO: 157709 - RNA, 80 nt, Homo sapiens
aagaaggcgagcaggggcgggagagccccgcagaagacgccgacgaggggagcccagcagcgacagcggcggggagacgg

SEQ ID NO: 157710 - RNA, 75 nt, Homo sapiens
cacaggggaaggaccaacaacaaccgaggcaaagccggccaaggcggagggcggcgcgcggccggccggggaggc

SEQ ID NO: 157711 - RNA, 66 nt, Homo sapiens
aggaacaaaagaaaaaacacaaaccgcggaaggacaagcaggggcgcagcggcgagccagggagcg

SEQ ID NO: 157712 - RNA, 81 nt, Homo sapiens
gcggcggcgcgagaccacgcacgggccaccgcgacgaccgccgccaacaacaaccggacaaacaccagaccagacgaccga

SEQ ID NO: 157713 - RNA, 51 nt, Homo sapiens
acccgcagcggaagcacccgagggagagcgcaccaccccacgcgccaggcg

SEQ ID NO: 157714 - RNA, 56 nt, Homo sapiens
gcgaccacccacacaaacccgggacgggccgagaggagacaagggcgggcccccgg

SEQ ID NO: 157715 - RNA, 80 nt, Homo sapiens
gcagcgccgaagcagccgggagccggagcgggcgcggacgccgaggcaccgaggcaccagaggagggacgaggcacacgg

SEQ ID NO: 157716 - RNA, 79 nt, Homo sapiens
ccaggagggcggagccagcggggccaaccggggccagaaaggacccaggagcgaaacagaaacaaaaagaagcggggaa

SEQ ID NO: 157717 - RNA, 55 nt, Homo sapiens
agaaacaaccaccacaaacacaccagaaacccccaacaaacagaagaaaaggcga

SEQ ID NO: 157718 - RNA, 89 nt, Homo sapiens
ccgcagggacggcagacccgagcaagacgccaggaccggaagcagagaaaggagagaccggagcagcgaggagaagagcgacccacagg

SEQ ID NO: 157719 - RNA, 76 nt, Homo sapiens
aggccaccacagaaacaaaagcaacaaagaggggagccgcccaacccggcccccgaggccacgagggagacccacc

SEQ ID NO: 157720 - RNA, 61 nt, Homo sapiens
gggcaggccgggaagggccacacccagacaggaggagacggggcggaggcaaggggaccag

SEQ ID NO: 157721 - RNA, 73 nt, Homo sapiens
aaaagagcaaagcagcagaagggccagcagggaacgcccgcggacggcagggcgcgacaagaagcgcccgccc

SEQ ID NO: 157722 - RNA, 86 nt, Homo sapiens
cggccgagggaagcccacacaacccgaccaccggagaaccggggcgcaccgccaagagcggggagagagagagaggccagggagag

SEQ ID NO: 157723 - RNA, 65 nt, Homo sapiens
acaacaggcagacagacaacgaagccaacagagaaaaaggaccaacaaaaagaacaagaaaagac

SEQ ID NO: 157724 - RNA, 85 nt, Homo sapiens
cagcaaacaaagaggccgcggaggagaagccggaggaggacaacgacaccaccgcagcgacgagcaggacccaaagacaggacca

SEQ ID NO: 157725 - RNA, 53 nt, Homo sapiens
acgaaaaacgcagaaggggccaaggccaagagcagacgagacggagagaagac

SEQ ID NO: 157726 - RNA, 89 nt, Homo sapiens
cagaagaccgcccggacgggaagcgggaaaggagagcaagcccacccgcgagaagcggaagagaagaacagccgagacccagcgggcag

SEQ ID NO: 157727 - RNA, 75 nt, Homo sapiens
acaagaagaaaaacgaaccacgagcggaagcacaacgggaagaaagaaggaggggccccaccacacgcacacgca

SEQ ID NO: 157728 - RNA, 76 nt, Homo sapiens
gcgcgccacagccaggagcccaacaaacgcagaaccgaggacagaggaagcacagaagaccgagacgagcagaaga

SEQ ID NO: 157729 - RNA, 74 nt, Homo sapiens
acgccaggacgagcagagccccccccaccagaggacgggaggagcagcaacaggagcagccgcaacagcgcacc

SEQ ID NO: 157730 - RNA, 78 nt, Homo sapiens
gggggccagcacccggaggcgggcggcagggaaggggacggagcagaggccggaagagcgggagcgggagccaggcag

SEQ ID NO: 157731 - RNA, 53 nt, Homo sapiens
agcggggcggggcacgccagcccggccccgggcccgcacggcccaccaccgag

SEQ ID NO: 157732 - RNA, 76 nt, Homo sapiens
cggcagcagcaccagcccaagagaagggccgagaggacgaaaaaagggccggcccgaaaggggaccagaccgaggc

SEQ ID NO: 157733 - RNA, 60 nt, Homo sapiens
gaaaaaaaaaccaaagcccgaagcgcaggagccgcaggccgacccaccgggcacacaaca

SEQ ID NO: 157734 - RNA, 86 nt, Homo sapiens
agggccagcccgcgaaccggccggaggagaaccaacagaggcaaaagcagagacaacaacagcgaagccccacggagaaaaggcaa

SEQ ID NO: 157735 - RNA, 63 nt, Homo sapiens
gcagaaccccagcccaaaggaggccaacacgccaccacccggggccaggaacggacaggcaaa

SEQ ID NO: 157736 - RNA, 53 nt, Homo sapiens
gccccggcccggcccccgggaaccggcccggcagccggcccccggggcccggg

SEQ ID NO: 157737 - RNA, 79 nt, Homo sapiens
gcagaggaaggagcagcgcaaggacgagagggccacaaggaagggacagaacaagacaccaagcaaaacagaaaaaaag

SEQ ID NO: 157738 - RNA, 64 nt, Homo sapiens
gaccaagacgagcccagcgcaaccccaagcgcccaaaggacacgagaccccagcaggcaccacc

SEQ ID NO: 157739 - RNA, 93 nt, Homo sapiens
cggcggaaccggcgagggagcggaagccggcgcagcagccccggcagccaagaggccacaagaggaagcgaagaagaggacgccgccagcgag

SEQ ID NO: 157740 - RNA, 75 nt, Homo sapiens
caaaggaaaaaccagaaagaagggccccaaacggcaaagcaaacgccagaaggacaaggccgccagaggcggcac

SEQ ID NO: 157741 - RNA, 74 nt, Homo sapiens
aaggaagcggcgccgaaaaaaaggggaaagacagaggagacgaaagaaaaaacagaaacagccaaccaagaaca

SEQ ID NO: 157742 - RNA, 63 nt, Homo sapiens
caccccgcagcccggacagacccccgccccgagaaaacaggggcacagacgacagaagccaag

SEQ ID NO: 157743 - RNA, 81 nt, Homo sapiens
caggcgccgcgcaaggggcccgaggaagcgcgggcggacgacagaggagccgaaccacccaacaacggcaagcggagaaga

SEQ ID NO: 157744 - RNA, 80 nt, Homo sapiens
cacgacaaggagggcggaacggcggaaggaagcaggagcggccaacagccggagcgaccccccagaccggccgccccccc

SEQ ID NO: 157745 - RNA, 75 nt, Homo sapiens
cgcgcggcgccggcggcgcgcgacccccgcgcagggccggcaccaagggcagaagcgccaaacggccaccgagga

SEQ ID NO: 157746 - RNA, 67 nt, Homo sapiens
ggaggcgcccgcgccgacgcggggcccaggccaggaccaccagccagcgcgaagagagagaaacgaa

SEQ ID NO: 157747 - RNA, 75 nt, Homo sapiens
gggcgcgggagaaccagaaccagcacaggccgggcaaaacagcaagaggaacagagaaacaccgagcagggcacg

SEQ ID NO: 157748 - RNA, 90 nt, Homo sapiens
ccgcggacaagcacgagggcgcgccgagacgcccgaggagaccaggcaccggagagagaagcggccagcggaaaggccacaaccgcgaag

SEQ ID NO: 157749 - RNA, 81 nt, Homo sapiens
gaagccgacgcccaccagcgaacccggcccccgacggccgcagaacgggaccagccgcggaacaacggcaagcggagaaga

SEQ ID NO: 157750 - RNA, 63 nt, Homo sapiens
cacgcagccccaggcaggaggaaacgaagagacacccacaagagcgccgaagaggacaggggg

SEQ ID NO: 157751 - RNA, 78 nt, Homo sapiens
aaaaagcagcaaaccggaccaccccgaagaaagcacagccaaaggagcggagcccgaaagagccaggaagacggaaga

SEQ ID NO: 157752 - RNA, 80 nt, Homo sapiens
gggagccgcacgcggcgaaggaagaggagggcaagaagggcaagaagaacaaggcaaagacaagggaagagcaggggggg

SEQ ID NO: 157753 - RNA, 88 nt, Homo sapiens
cgaacaggcagggccagacccagggagcaccgcggacgccccagggcacaccgcgcaccagcgagaggaggagaaccggccaaccgca

SEQ ID NO: 157754 - RNA, 80 nt, Homo sapiens
gagcggaagccaaaggcaacgacgcggcaaagcacacaggcgagcgcgaggagagggaccagcgcgccaaaccgagggcg

SEQ ID NO: 157755 - RNA, 68 nt, Homo sapiens
gaaacgcaccaggccaaagaaagagaagcacgcacacacagcaccgaagaaggagagccccgggggaa

SEQ ID NO: 157756 - RNA, 58 nt, Homo sapiens
gagacggaaagagacccagggcgccaaaaacagggcagccaagcaggaccacccacca

SEQ ID NO: 157757 - RNA, 73 nt, Homo sapiens
cagccgaccgagcccaggagcgccacgcgcggaaggcagcgcccagcagcgcagcgagaagaacgaacagaac

SEQ ID NO: 157758 - RNA, 72 nt, Homo sapiens
aaagaaaggaccacaagaagaaaagggaaagcagcagggccaggaaaggcaaaccggcagacgccgaaaaca

SEQ ID NO: 157759 - RNA, 67 nt, Homo sapiens
ggcggccaaaaaaaaaaaaggaagcacaccaagcccgcggaaacgccagagaaagcggcgcgagcgg

SEQ ID NO: 157760 - RNA, 75 nt, Homo sapiens
ggacaaggaaagggcggggagcgccggcggcgcccggaaggcgcgcccaaaacagaggaagaaccgagcggaacg

SEQ ID NO: 157761 - RNA, 69 nt, Homo sapiens
agaaggccaaccaaaccacccagacaagccacccaccgagcagccgaaccgcccggaaccgggaggcga

SEQ ID NO: 157762 - RNA, 75 nt, Homo sapiens
gccagaggacagaggccaaaggaccccagcaggccacagcagcaagcaaggaaggaaccagaaaaaagaggaagc

SEQ ID NO: 157763 - RNA, 116 nt, Homo sapiens
aaacggagacagcacaaagcaagggacgcaccaacacggaccagcaagacaccccgagggccacagagcaaccaaaaaccggccgcaggcacaaaagaagacgggaaaagggccaa

SEQ ID NO: 157764 - RNA, 61 nt, Homo sapiens
ggcggcgcgggcacgccgaggacagagacgccaggcggccagaagaccggggaaggccgaa

SEQ ID NO: 157765 - RNA, 60 nt, Homo sapiens
gccagaagcgggcggcgcgggggagaggcccagcaggcgcagcagcaagagggaaaaagg

SEQ ID NO: 157766 - RNA, 66 nt, Homo sapiens
caaacagggaaaaaagggagacaggaagccgcccgaacacgaagaagagggacggaagggccaagg

SEQ ID NO: 157767 - RNA, 78 nt, Homo sapiens
ggcagcgggcgggcggcggaggccgagcagggcagagacggaccagagaagccgaggagccccagccaagaagcagga

SEQ ID NO: 157768 - RNA, 71 nt, Homo sapiens
caccaacccccacacgcccggggaaccagacgcagaaaacagacacacagcggagacaagcagggccggca

SEQ ID NO: 157769 - RNA, 73 nt, Homo sapiens
caaccgaaaacgaacccaaaggagagcccggcggcagagaggccccgagacccagaacgcaaaaccaaggccc

SEQ ID NO: 157770 - RNA, 76 nt, Homo sapiens
cagcacacagcaaaagagacagacggacaacagcccaacaacacccagaaaaagcagcaaagggagaaaagaaggc

SEQ ID NO: 157771 - RNA, 71 nt, Homo sapiens
gagaaggagcacgaacagggagagcaggacaccagcacaccgcggaggcgcccagcggggcgggagaccga

SEQ ID NO: 157772 - RNA, 71 nt, Homo sapiens
aagaaacagccccccgacagcccgggaagaagcagacacaaggaaaaaggcccgcggagccaacgggccga

SEQ ID NO: 157773 - RNA, 80 nt, Homo sapiens
gaagacacgcgacccggagacagcccaaaacccggaagagcgccccaggagaaacaaaggaaaggcaagggcagaaaaga

SEQ ID NO: 157774 - RNA, 54 nt, Homo sapiens
gccacaaggaggcggcccagcacacaggcgcgggccgagagccccaagggcggg

SEQ ID NO: 157775 - RNA, 73 nt, Homo sapiens
ccgcccaaccgggacaaagaaaggaaaagagaagaaccggagccggagaggggcaacaggaaaacaacccaga

SEQ ID NO: 157776 - RNA, 71 nt, Homo sapiens
cagaccaacaagaccaggacaccagacgaaacaacgacccagggaaaacagcagcagcagcgcaacacaac

SEQ ID NO: 157777 - RNA, 75 nt, Homo sapiens
caaaacgaagcacggagaggcgccagcggagcccaggcccgggaaacccagacgacaaggaaggccaagggaccc

SEQ ID NO: 157778 - RNA, 85 nt, Homo sapiens
cggcggcggcgcggaggcgcaggcagcaacgaggcagcggcaggccagggcagccgcggcccagccagcaccgcgcacccagcag

SEQ ID NO: 157779 - RNA, 73 nt, Homo sapiens
cggcagccacaggagccagccacgaggacaagcagaaaccaagcggaccgagacacagccgcccggcccccgc

SEQ ID NO: 157780 - RNA, 49 nt, Homo sapiens
aagcaacccagaccaaggaagaggcgaacaaggagcaccagacgaacgg

SEQ ID NO: 157781 - RNA, 70 nt, Homo sapiens
caagaggggacagaaaggggagaagaaccaaacaaggaaaacgaacaaaaacagggggagaaaaggcaaa

SEQ ID NO: 157782 - RNA, 79 nt, Homo sapiens
ggaggccaacgacgagccccgggcgggcccagaccagagcggcccaaagcgaacacccggcaccagcagccagacccgc

SEQ ID NO: 157783 - RNA, 73 nt, Homo sapiens
aggccccccaaagcaccgcgcagaaaaggggaagaaggccaaccgggggccaagggggaagggaggcagcagg

SEQ ID NO: 157784 - RNA, 78 nt, Homo sapiens
gaaagccaagcggcggccaccgcaggggcccccacacggccgcaacccccagccacaacgcgaaccgggcggacgaag

SEQ ID NO: 157785 - RNA, 89 nt, Homo sapiens
cacaaagcagaagaagaccgaagggaagacccagagcccaaggaggaaggagaaagacagcaaagaaaaggagaagaaaggaaaaaaac

SEQ ID NO: 157786 - RNA, 76 nt, Homo sapiens
aggaaaccccaacacagagccaagcgccaacagcagcaggcaagccagcacccaggccacggacccccagccccac

SEQ ID NO: 157787 - RNA, 78 nt, Homo sapiens
aaacaaaaacacacccagggaggcaagcagagcgcggccaagaacagaggaaggggaagccaccaccagagggcaaga

SEQ ID NO: 157788 - RNA, 39 nt, Homo sapiens
agccaaggacgcagaagcagaggagagcagaagaccggc

SEQ ID NO: 157789 - RNA, 82 nt, Homo sapiens
agcgaacgcaggaaagcaggcaaaaggcgcgcgcgccgccccccacccgccccgggagaggaggagggacagacgagagaca

SEQ ID NO: 157790 - RNA, 65 nt, Homo sapiens
acgaggagcgacccaagaacaaaggagagaaccaggagaccgaagcaaccaacaagcgaggagga

SEQ ID NO: 157791 - RNA, 78 nt, Homo sapiens
agacagggagcggaggagaaggcaggaagagccaaggagacaacaggcccgcagccggccggggcccagcagcccacc

SEQ ID NO: 157792 - RNA, 56 nt, Homo sapiens
cgaagcccagcgggccggacggggcggggggaacgggacgggacacaaaaggcagc

SEQ ID NO: 157793 - RNA, 72 nt, Homo sapiens
gaagacacgcccagcagggagcggaggagccagacagcggggccaccaccggagccaccccaccgagggcgc

SEQ ID NO: 157794 - RNA, 73 nt, Homo sapiens
cgcccccacgaacaccgagaagcgagagaaagagccccgcaccacaaagacggggcgacggggagaggcaggc

SEQ ID NO: 157795 - RNA, 75 nt, Homo sapiens
aagacccagagaacacaccaagaagcggaggggcgccaaccaaacaaccaaagcgcaaacagcaaggagaacagc

SEQ ID NO: 157796 - RNA, 103 nt, Homo sapiens
accgacaccaccagaagcgcagggcaagccacagagccagagcggggggcccgggccgacgcggcaagccgcaccggccagagagcagccaagacacaacacc

SEQ ID NO: 157797 - RNA, 77 nt, Homo sapiens
gcgcggggccgcccgcccacccagggccggaaaagccaacgccggcgaagaggccggaagagcgggagcgggagcca

SEQ ID NO: 157798 - RNA, 78 nt, Homo sapiens
aaccaccagaaagaagagaggaaagcagaggcgcgcggggagccgccaccaaccacaacggccggaacgaacccgcag

SEQ ID NO: 157799 - RNA, 70 nt, Homo sapiens
cgaaccaggcgaacacccagacaggaggagggagacaggacacaggaacgccacaagaaacaacagcaag

SEQ ID NO: 157800 - RNA, 83 nt, Homo sapiens
caggacgcagcccggcggacgccggcacagaacgccagccgagaggaagaggcaagcgaggagcacccaacccggccgaggag

SEQ ID NO: 157801 - RNA, 54 nt, Homo sapiens
aggccccggaccccagccaaagccggggggggcacagagccccggaagacagcc

SEQ ID NO: 157802 - RNA, 55 nt, Homo sapiens
cggacaccaggaacccgagcccggaaaggacccccggccaaaacgccaccgggga

SEQ ID NO: 157803 - RNA, 79 nt, Homo sapiens
ggggccccggccggccaagcagccaagcgaaagacagaggcccagccgaaagaggggaggcacgacgacagaagggagc

SEQ ID NO: 157804 - RNA, 74 nt, Homo sapiens
cgggaaaggagaaacgaaaagaagcaaggagccagggggacacggaaaacgacagaacgaagcagaagaacgcc

SEQ ID NO: 157805 - RNA, 73 nt, Homo sapiens
cccgcccagaagccagaccccaggaccaggcccggagacgcgacgggcaccacagacgccaccccgccagcga

SEQ ID NO: 157806 - RNA, 78 nt, Homo sapiens
aggaagaggcggacggaggagcaggcgagaagagaagaaaaccagaaggcaccgacaggaaaggaaaaggagaaccag

SEQ ID NO: 157807 - RNA, 43 nt, Homo sapiens
ccccaccccgccagcccagagccacggccaggccacggaagaa

SEQ ID NO: 157808 - RNA, 78 nt, Homo sapiens
aaaagggaagggacccaggcgacaggccgaaacacaagcaaggaacacaaagaagaaagaaaggaacggaaggaagaa

SEQ ID NO: 157809 - RNA, 79 nt, Homo sapiens
cggaagcagccgcccggagaaacagacggaagagagaaggccacgcccgaccccaagcaacaacggggcagggacaggc

SEQ ID NO: 157810 - RNA, 79 nt, Homo sapiens
ccgaagcccccgcaggaaccacaacccaaccaggaccgacaagacggaaaccgggagggggaaaagcgagaaaaagacc

SEQ ID NO: 157811 - RNA, 74 nt, Homo sapiens
caccagggcggaaaggaccaaaagagcagccaaaaggaggcgagcgccacgacaggaaaacagcacccgagggg

SEQ ID NO: 157812 - RNA, 72 nt, Homo sapiens
aaccggcgcgccggcgcgcggcgcggacaggcccaaacgggacggaaaaggcgcacacgacccggagaaccc

SEQ ID NO: 157813 - RNA, 57 nt, Homo sapiens
cgaaaacaccagccccaccgggaggagggaggagagccgcagcccccgggacaggag

SEQ ID NO: 157814 - RNA, 71 nt, Homo sapiens
gaacacccccagggaacgacaccacacagaaaacccgcccaaaggggagagagccagcccgagaagcagga

SEQ ID NO: 157815 - RNA, 89 nt, Homo sapiens
aacaccacgacaaccagccgcaagcagcccccagccacccacacagaaagccagggccggagggagaacagagcggccccccccacccc

SEQ ID NO: 157816 - RNA, 75 nt, Homo sapiens
cacggcaccccgggcggggccgcgcccccccagggaccagcaccggcaggcacagagagcggcggacccgacgcc

SEQ ID NO: 157817 - RNA, 83 nt, Homo sapiens
ccaggacgggcggaggcggggggaccggcgggcggagacaccaggcgccgagaaggccagcagagaaacaggcaggagaggcc

SEQ ID NO: 157818 - RNA, 87 nt, Homo sapiens
gaggaacggcccggaaacaggaggaccgccgcgccaggacggcagccagacgagcagggccgcagcaggccgcagcgccaaagacca

SEQ ID NO: 157819 - RNA, 86 nt, Homo sapiens
gccgcgagcgcggccgcaggaggcacgggcgagagcgggaagagcacgcacaagcagagcgcacaccacggcgccggcaccggagg

SEQ ID NO: 157820 - RNA, 75 nt, Homo sapiens
acaaccacagccacccaggacccaggggggccgcacagagccagagagcacgaccagcaaacgggcaacgaaacc

SEQ ID NO: 157821 - RNA, 77 nt, Homo sapiens
ggcaaaaccgcccaagacagaggaaaacaggcaccaacagagaaggaagaaaggccgaaaacagaacacgagcacca

SEQ ID NO: 157822 - RNA, 42 nt, Homo sapiens
gaaaagaaaacagccccaagggacaaagcccccagaggaacc

SEQ ID NO: 157823 - RNA, 80 nt, Homo sapiens
ggaggggcggagggcaagagcgccgaccgggcggcgaggaaggcgccccggaggaccacacaccccgaccacagcgcaac

SEQ ID NO: 157824 - RNA, 55 nt, Homo sapiens
gagaaaaggaaccggccccggagcggcgaaaagggacgcccccgaacagacaacc

SEQ ID NO: 157825 - RNA, 78 nt, Homo sapiens
cggaacggggcacagggagaaggacaggaccgcgaggcaacgagagggaggaggcagagccagccaggaggaggcggg

SEQ ID NO: 157826 - RNA, 79 nt, Homo sapiens
cgaccccacccagcaggggacaccagaagcacgaagaccaggacacaaccggaaccgcaggaggaagagaaacaccaag

SEQ ID NO: 157827 - RNA, 83 nt, Homo sapiens
caacggccaaagaagagacgccacgagaagcagcggggcacccggcgcgaggagcagaaggagccagcgggcggcccgcagga

SEQ ID NO: 157828 - RNA, 79 nt, Homo sapiens
agcacaacaggcagacagacaagggaccaaggcccagagaacccaaggaaaggaaaaagcgagcaaaaccagacaacag

SEQ ID NO: 157829 - RNA, 66 nt, Homo sapiens
cacaccgagggacgagggagagcgggggggcccgcagagccgggcggagagggagcggcagaaaag

SEQ ID NO: 157830 - RNA, 57 nt, Homo sapiens
caaagagcaacaacgagcgacaccaaagggaacggagggaaagcgacaaacaaccaa

SEQ ID NO: 157831 - RNA, 70 nt, Homo sapiens
aagccaacccgcaccggccagcgaccaggcaggacacggcaaagagaccccccaggggacagaaggagcc

SEQ ID NO: 157832 - RNA, 59 nt, Homo sapiens
cccacccgggccggcgggggagcgaccaggagcgccgaagggcccggccaggccccacc

SEQ ID NO: 157833 - RNA, 113 nt, Homo sapiens
cccaccccggcacccccccggagacacccgacacgacccacggccgcccagcgccagcgaggaagggagaggcggcggcgagcgcgacccccgcccaggcacccacaccccac

SEQ ID NO: 157834 - RNA, 73 nt, Homo sapiens
aaagcaaagacaaacccagacaagagaaccaggcggccaggaccacaaggcccgcagcccccggaagccaaag

SEQ ID NO: 157835 - RNA, 59 nt, Homo sapiens
cagcgcagcccggagggggagcagacgaaccggaacccgcgggacagggcccaggacag

SEQ ID NO: 157836 - RNA, 73 nt, Homo sapiens
agccgcggcggagacgcacaggcccgggcggagaacggaaaagcaccaggaagcagagaggaccgcagaaggg

SEQ ID NO: 157837 - RNA, 80 nt, Homo sapiens
ccagccacagggagccaagcaggaagacggagagcaggcggaagcagcaaggaggaagcagcacaacccgggagaaacaa

SEQ ID NO: 157838 - RNA, 81 nt, Homo sapiens
ggcgaccggagcggaggagcagcaaaccgggcagccccaaacggaaagaagagcaaaaaggaagcggcagccgaaggcaga

SEQ ID NO: 157839 - RNA, 39 nt, Homo sapiens
gccacacaccggccacagagccaggacaaaaccaggcag

SEQ ID NO: 157840 - RNA, 34 nt, Homo sapiens
gagggggccacggaaaccgaggaacgccgcaccc

SEQ ID NO: 157841 - RNA, 98 nt, Homo sapiens
ccagagcaaggccgcgagaacagcaagcagggaagaggagcgcaagcgccggggagggaaaggaagacaggacgcgccaacgagacagcaagacaaac

SEQ ID NO: 157842 - RNA, 60 nt, Homo sapiens
gaagcacagaaccagcacggacaacaaaaacacggacccaacccacaaccggcgaaagca

SEQ ID NO: 157843 - RNA, 77 nt, Homo sapiens
gagcggggaagagagaggcccggccacggaccagccgaggagggcgggagagagaagaaaaaacaacccagaacgga

SEQ ID NO: 157844 - RNA, 84 nt, Homo sapiens
cgaaggagccgacgagaaaaacaaggagcggacacgagccgagggaggggaaaggcgcagggccccccaaagaggcggacaagg

SEQ ID NO: 157845 - RNA, 78 nt, Homo sapiens
ggggggcaaacccgagagaacggagcacgagggccagccgcacggacaggacgagaaaggagaagcaccaagaaagac

SEQ ID NO: 157846 - RNA, 75 nt, Homo sapiens
caggcgagccacccacaagaagcagaggacaggaggccccgagcagagaccgggaggcagcaacccagaggccac

SEQ ID NO: 157847 - RNA, 82 nt, Homo sapiens
cggagcaggaggcgcacaacacccaggacaaacaacagaccaaggggcggaaaacccgaagccaggaacagcggcaagcccc

SEQ ID NO: 157848 - RNA, 72 nt, Homo sapiens
caacacagcagggcaagcgaacacgagaagaagacaagagagaagccagagcagagagggcgaccgggagag

SEQ ID NO: 157849 - RNA, 83 nt, Homo sapiens
cggagaggggcaaaaaaaggaaggaagaagccacgaagccagggaaccagccaaacgagacagccacggcagaggaaggcaca

SEQ ID NO: 157850 - RNA, 71 nt, Homo sapiens
aggcccccgagccccccgagaagacccaggcacagggcgcagaacccacgaagagagacgcgccgcggcgc

SEQ ID NO: 157851 - RNA, 60 nt, Homo sapiens
gcaagaaaaggagccggaaacggacaaacaggaaagcgaacgcgaaaagaaaagccgaga

SEQ ID NO: 157852 - RNA, 65 nt, Homo sapiens
cgggaaggaccaaggaggagcacagaggccagaagcaagccagacccaacagaggaagccgcaag

SEQ ID NO: 157853 - RNA, 74 nt, Homo sapiens
cggggacaaccccaaaagcaacaggcagaacaaaggcgggagggagagacaggcagagaggagggcaaaaagac

SEQ ID NO: 157854 - RNA, 80 nt, Homo sapiens
ccggaagaacaccgcggcccccaaaggcaccccaagggacccggacaccaaagcgcaaacgagaacagcacgcacccaag

SEQ ID NO: 157855 - RNA, 75 nt, Homo sapiens
agaaaggcggaccacaaggaaaagaaaaacagaagcacagaaaacaggagaaggaagcgccggccaaacgagcac

SEQ ID NO: 157856 - RNA, 79 nt, Homo sapiens
gagagcggaccgagagcgcgaaacgcacgagaagagcgaccgccggacgcagcaaacaacgaagcgcgcaggagagaag

SEQ ID NO: 157857 - RNA, 59 nt, Homo sapiens
gcggcagcagcccagagcgcaaagacagcagggacgcaccaaaacggacagccgaagac

SEQ ID NO: 157858 - RNA, 90 nt, Homo sapiens
gcgggagcgccggcggccgagcaagccgccgcccgacccagggcccgcgggccaggagagcgccggcggcgagcgacgcgcccacggagg

SEQ ID NO: 157859 - RNA, 82 nt, Homo sapiens
ggagggggcccggcaggacgaggacgaaggccgaggagggagaagaccaaagaagagagagcaggaccaccaccgcccacag

SEQ ID NO: 157860 - RNA, 83 nt, Homo sapiens
cccccgagagcggggcacagacgacaggacagaaaccgcgacaacaacccaaccccgcccccaagaagcggcgacaccaccga

SEQ ID NO: 157861 - RNA, 80 nt, Homo sapiens
acaccgaccccgggccaaaagggcaaccaagagagccccaaagccacggagcaccacacacgaaaaagagccacgccccc

SEQ ID NO: 157862 - RNA, 82 nt, Homo sapiens
gggccgaaaaaaacgacgcggccaaggggacgccgaccgcgcaaacggcgcagaggcgggccggcagaggccgcccagacag

SEQ ID NO: 157863 - RNA, 75 nt, Homo sapiens
gaagcaacagggacggcaaaggcgcaacggccccaacggacacagacggaagggagggccacccacggcaggccc

SEQ ID NO: 157864 - RNA, 71 nt, Homo sapiens
gcgaggacaccggacgagagacgaggggacaacgaaggaggcaagcaacaaagggacaaaaacgacaagca

SEQ ID NO: 157865 - RNA, 80 nt, Homo sapiens
aagcacgccaggacggaggacaggaagggaacgggaaagcgcaacaggacccaaacaggagcaggaggagaagaaacccc

SEQ ID NO: 157866 - RNA, 81 nt, Homo sapiens
aggcaccgcggccacaagaaaagccagcccccagaaagaaccgcccacgggccgcgccaggggaacacaagccgagaacag

SEQ ID NO: 157867 - RNA, 77 nt, Homo sapiens
ggcaacgacaagagaaagaaaaacaagaacgaggaacacgaacaggaacccgcaggcccaggccgaaaaggaagcac

SEQ ID NO: 157868 - RNA, 80 nt, Homo sapiens
aaacagaaccgccaggagcggcagacggcaggccagcgcggcccaggacagaaggcgggcaaggagcgccccccgagcac

SEQ ID NO: 157869 - RNA, 80 nt, Homo sapiens
acaagagccccaaagcagccaaaagaaagggcaaagacaccagcagagagaggagaaggcagcacagagaagagcaaaag

SEQ ID NO: 157870 - RNA, 46 nt, Homo sapiens
caggaggggacaaaaccccgaaaaaggcacgacccggagacgcgga

SEQ ID NO: 157871 - RNA, 76 nt, Homo sapiens
gccgcccgcgccgaggacgcggagcccagcaaggcaacggcagggcgagccccgggcggccacagccgagcaccag

SEQ ID NO: 157872 - RNA, 69 nt, Homo sapiens
gaacaagagagaaagagggacagccgcacggaggcgaaacacaaaggggcaaccaaaaaggacccaaga

SEQ ID NO: 157873 - RNA, 31 nt, Homo sapiens
ggccgcgaccggccgacgacgcaccaaaccc

SEQ ID NO: 157874 - RNA, 53 nt, Homo sapiens
agccaccacaccaagacaccaggggagaccgcagcgcaggcaccccccgacag

SEQ ID NO: 157875 - RNA, 78 nt, Homo sapiens
cagagacaagagacccagcaacggaaccagcagcccaggacccccccaagccacacacccggagagaggacgaagaaa

SEQ ID NO: 157876 - RNA, 80 nt, Homo sapiens
aaaacgggagcgaagcagagaaaaaagcaaccagccacgaaggaagcacaggaggcaccccgagaagggaacaagcgaaa

SEQ ID NO: 157877 - RNA, 69 nt, Homo sapiens
accagaaaaaagaggacagggaaacggcagcaagggacacacggagacacaggaaagacgcgccgggag

SEQ ID NO: 157878 - RNA, 79 nt, Homo sapiens
cggccgccgcagaaccagagcggcagagccggcgcaaggggaccacgaggccgggacggaccaacacaagaagacacca

SEQ ID NO: 157879 - RNA, 47 nt, Homo sapiens
cccgcaggaggaggcacgccccgggcggcacggggacccacagcccg

SEQ ID NO: 157880 - RNA, 37 nt, Homo sapiens
gcggcgcgaagccacaagaaaggaggacacggaaaag

SEQ ID NO: 157881 - RNA, 72 nt, Homo sapiens
gcacagagggaccgggagccgcaccaacggcaagccaacgaaaaagggaaaaccaggaacagcaaaaaaaca

SEQ ID NO: 157882 - RNA, 51 nt, Homo sapiens
aacgagccaggggaacacaccagaaggagacccagagaaacagagggcaaa

SEQ ID NO: 157883 - RNA, 66 nt, Homo sapiens
agcagacagacccaccaagagggcgggagaaccacgaggagaggggaaccgcccaaaagcccgcca

SEQ ID NO: 157884 - RNA, 75 nt, Homo sapiens
ccggggggggcggcccgcagcgaaggaccgaaaggacccaggagcgaaacagaaacaaaaagaagcggggaaccc

SEQ ID NO: 157885 - RNA, 73 nt, Homo sapiens
gaaccgggagaaacaccacacacgaagagagggcacagaccaggaggcagcgagcgccaacagcaggcagcca

SEQ ID NO: 157886 - RNA, 77 nt, Homo sapiens
gaacgggaaacacacacacaaaaaacccacacaggacgcggacaagggcggcagcaacccccagccacaacgcgaac

SEQ ID NO: 157887 - RNA, 73 nt, Homo sapiens
accagggccacgggggaagaggacagaggcagccccggccaccacaaagaagaagacaagagcagacgaggga

SEQ ID NO: 157888 - RNA, 68 nt, Homo sapiens
gaccgccaaaccagagaaagaaacacccgaacagcgaacaccgaaaacgagaaacgaaagagacacgg

SEQ ID NO: 157889 - RNA, 50 nt, Homo sapiens
ggcgacacacgacggcaagcaacccaaaagcaggaggcagagcaacccaa

SEQ ID NO: 157890 - RNA, 67 nt, Homo sapiens
accaacacacaaaacggaaacgaggcacaaagaagcccgaggggaccccacggacgccaacgaggag

SEQ ID NO: 157891 - RNA, 59 nt, Homo sapiens
acaaacaacggaaacgacacaaccaggcaaagcacaaaaacgaaggaaggaggacccga

SEQ ID NO: 157892 - RNA, 79 nt, Homo sapiens
aacagacccggaaggacggcgaggaggaacgagccagaacacacagacaggagagggacagaagaagaaaagccaaaga

SEQ ID NO: 157893 - RNA, 108 nt, Homo sapiens
cccagggccaggagcagccccaccgaggagccccccagggcgcccccagccacagcgggaccccacaccagccagggaacaacggcccccagcagacagagcgggagg

SEQ ID NO: 157894 - RNA, 60 nt, Homo sapiens
gaagagggaaaaaaaggaggcaaaagcagcgcggagggagagacaccacgaggagcacag

SEQ ID NO: 157895 - RNA, 70 nt, Homo sapiens
gggcgagaccccgcccggaccgcagcaccgaccacgacaccccgggcgaggaagaccgagacccagagcc

SEQ ID NO: 157896 - RNA, 77 nt, Homo sapiens
gagggcacaccggcacgggggaacgcacaacagccaccgcagcgaacagacccagagccgagacaacccaacggaga

SEQ ID NO: 157897 - RNA, 72 nt, Homo sapiens
cggagaaaaaaaggaaaaaaagggcaaaccccgcagaaaacaccccagagggacaaaggccacagaaagagg

SEQ ID NO: 157898 - RNA, 84 nt, Homo sapiens
gacacaggcgaggcggaggccgaggacccggggccgaggagcgggaagaggcgggacaaaacagaggagaccagaccagaagcc

SEQ ID NO: 157899 - RNA, 80 nt, Homo sapiens
gaagcgccaggacaaggggacccgggacgacgagacgacaccacaaagaaaacccccaccagcgcagaaggaaccgagga

SEQ ID NO: 157900 - RNA, 72 nt, Homo sapiens
cggagagcccaaacaccaccaccaaggcagcgcccagccacggacgaggagagcagggaggcaagcagcggg

SEQ ID NO: 157901 - RNA, 72 nt, Homo sapiens
agccggcccggcacggcgagagccacagaaggaggaggggacagcagcaggagcccagcaaagccacagcgc

SEQ ID NO: 157902 - RNA, 80 nt, Homo sapiens
gagaagcgacccgggcacacgcgcaccagcaccggaagcagaccagaacaagcaaccaagcgcaggaaacaccaaacgga

SEQ ID NO: 157903 - RNA, 113 nt, Homo sapiens
aggggaaccgcaccgccggacgaaggacgcagcgaaggaacagcgaggaaagacagggaaacaggccagccacgcagcagcagaagccaggccgggcgggggagaccagcaag

SEQ ID NO: 157904 - RNA, 59 nt, Homo sapiens
ccgacagagaccaaagagcaagcggaagccccaggaggggcccaccgaggagcgcagac

SEQ ID NO: 157905 - RNA, 69 nt, Homo sapiens
cagaccagagggagaaaaaaaaaacccagaggcaaggacacagaagcagagagagccaccggccagcag

SEQ ID NO: 157906 - RNA, 84 nt, Homo sapiens
gaaaaggaagcaacaagagcgcaacaagagcgccaaaggcaaagaggcacgagcacaaccgaagaaacccgcacacaggcccaa

SEQ ID NO: 157907 - RNA, 71 nt, Homo sapiens
ggccgccgacaacgaaacaagacggcagagaaagcaagagacgcaaccgaacgcagagcggagaacggcgg

SEQ ID NO: 157908 - RNA, 76 nt, Homo sapiens
gagaaaccagccacgcagaagagacaaggaccacagccgagcgagagcaggaagacggagacggggcacagggcca

SEQ ID NO: 157909 - RNA, 57 nt, Homo sapiens
agggaaaggaccaaaagagaagcaccaaggaccagccgacccacgaccaagcagaca

SEQ ID NO: 157910 - RNA, 82 nt, Homo sapiens
gaaggaacagcaccgacacgaaaacccggacccgcaccgcagcgcacccaccaggagccggcggggaggggaccgaacggaa

SEQ ID NO: 157911 - RNA, 71 nt, Homo sapiens
agacagacaacacccacagcaaaacaaacggagagaggagggagaaacaaaggccaaagacgcaggaggga

SEQ ID NO: 157912 - RNA, 87 nt, Homo sapiens
cacgcggccgcccggccgggaaccaagaggaagacgcgggaaagagccgcgaaggcagcacccaagaaacgacaagcggacagcgac

SEQ ID NO: 157913 - RNA, 79 nt, Homo sapiens
accgcgcgacggccggccgacccgggccggccgcgggagcaggcgaagaaagggaggcaccaggcacggggaggccaac

SEQ ID NO: 157914 - RNA, 57 nt, Homo sapiens
cgaaaaaagagaaagggccaacggcagggcaagaacccgccacacaaggcgaacaga

SEQ ID NO: 157915 - RNA, 77 nt, Homo sapiens
gaaccgcaggacgcagggccccagggcgaaaccagcgaagacacagccacccaaaccgcccccaggaagggagaacg

SEQ ID NO: 157916 - RNA, 83 nt, Homo sapiens
acaaccggcagagaccgcccccagcccgcaggacaaaagggcggcgacggcggcgcgaggaccgaccgggcccgcggacgaag

SEQ ID NO: 157917 - RNA, 74 nt, Homo sapiens
gccggccagccgcgccccgccgcaccgccgaaagcacaccacgagcgacccgggcggacccaaaggagacaaca

SEQ ID NO: 157918 - RNA, 69 nt, Homo sapiens
cgcgggagagaggacccccccccccccccaaggccgcaggagggaagcgcacggaaaccgccccgggag

SEQ ID NO: 157919 - RNA, 58 nt, Homo sapiens
cccgagacgggcccgccgaaagggagcaaccggaacacgaccgacggggaaaccacga

SEQ ID NO: 157920 - RNA, 71 nt, Homo sapiens
acgccggagcggcaccgacgggggacaccgggaacacggagcaaagacaaaggcagaaccaaaggcaagaa

SEQ ID NO: 157921 - RNA, 79 nt, Homo sapiens
ccacacgaccaaggagcacgaggccaacaaagcccaagcaggggaaggcgaagcacgacagcacggccagaggaaccca

SEQ ID NO: 157922 - RNA, 87 nt, Homo sapiens
caagaagcagcggacccgcgggagaggcgcagcggaggcggaagcaggaccggggcacggacaaccgagcacaaaaaaggcacccgg

SEQ ID NO: 157923 - RNA, 82 nt, Homo sapiens
gccccgccaagccaccggaaaggggaagcaagccaacagcgacggggcggcgcaccagaggccccacacgaacgcagaggaa

SEQ ID NO: 157924 - RNA, 78 nt, Homo sapiens
gccgaagcacccggaagggaaggccagaagcacaaagcgcccgagacaaaagcgaagaggagaaaaccaaaagaagag

SEQ ID NO: 157925 - RNA, 73 nt, Homo sapiens
aaccgaaaaagcagaagcacaagccaaacggaggaggagcgcgaagaagaccacagcccaggagcggagacca

SEQ ID NO: 157926 - RNA, 74 nt, Homo sapiens
cccccggaggaaaccggcagaccccagacccaaacaacggcagaagcagggcgacgcgccacagagcgggcggg

SEQ ID NO: 157927 - RNA, 70 nt, Homo sapiens
aaggcaacccagacccacaggcagacgccgcaggaaagagaggcagaaacgaagcgaaaggaaaccaaaa

SEQ ID NO: 157928 - RNA, 82 nt, Homo sapiens
gcccgaggagcggccacgcgaggcagccccagagcaggaggaggaaaaccagcccaggaagcagcagggcaccaagggccag

SEQ ID NO: 157929 - RNA, 73 nt, Homo sapiens
gcaaggcaaagcgggagaaaacagaagacagacagccacacggaggcaccgacacgcaaagaagagcccccga

SEQ ID NO: 157930 - RNA, 79 nt, Homo sapiens
agcccgcgaccacagccagagcccagcaggagccgccacaccaggcaacaggccccgggaccaaggacacgcagacccg

SEQ ID NO: 157931 - RNA, 70 nt, Homo sapiens
cacaaccagagccggccccgcgagagaacaccacagaaccggacagaacaacaggcaccgccgaccggag

SEQ ID NO: 157932 - RNA, 59 nt, Homo sapiens
gggggcacccggacaggccgccgccggaaaccgacaggggcaagaagggagggagcggc

SEQ ID NO: 157933 - RNA, 80 nt, Homo sapiens
aggggaaacagcagagaccccagacgccaccacaacccccagacgcaagccaagcccgaacgaggcgcaagaaagcacaa

SEQ ID NO: 157934 - RNA, 81 nt, Homo sapiens
gcagaagaaccacgcagagcgagcggaaacccccacgggcgcaaaggaaagcgagaggcaagacaaacaaggacagagacg

SEQ ID NO: 157935 - RNA, 76 nt, Homo sapiens
ggcccgagacacccagcccgcgcacgagaggagagaaagggaaaagggcaggcagaggcacaaaaacggaaagcag

SEQ ID NO: 157936 - RNA, 75 nt, Homo sapiens
caccaagcaggccagggaaggaagcagcagcaagggacccagcaggaaacagcccaaaaggagaaccgacgggag

SEQ ID NO: 157937 - RNA, 54 nt, Homo sapiens
ccagaacgagaagcgcaccacaggaaggaagggaacacggacgacgagacacga

SEQ ID NO: 157938 - RNA, 55 nt, Homo sapiens
gaagacacgcagccgcagaggaacggagagaggcggaccagcaagggcagagaag

SEQ ID NO: 157939 - RNA, 72 nt, Homo sapiens
acacagaacccgaaaacacaaggacaccaggcacggcgagaaaacacacggcaggaccagaagcaaacgagc

SEQ ID NO: 157940 - RNA, 74 nt, Homo sapiens
gaagcacaagaaacagagcaggacgggccgcacggcagcagcacagggagaggaacagcagcccgggaggagag

SEQ ID NO: 157941 - RNA, 96 nt, Homo sapiens
cgcggcgccgcggcccgccggccgcagcgccccacccccggcggcggcacgagcccgaccaggagagcccaaaaggcagagcgaggagagaagaag

SEQ ID NO: 157942 - RNA, 70 nt, Homo sapiens
aaaacgaagagcagagaccaacccaagcgaagaagagcggaaaacaaggggcgaccaacgacgaagagca

SEQ ID NO: 157943 - RNA, 76 nt, Homo sapiens
gaacccccgacaagccccaccggcagcaacgggagcgagacccacagaggaccaggacgagcagcaggcgcgagcg

SEQ ID NO: 157944 - RNA, 69 nt, Homo sapiens
caacggggaccccggagcccagaagacagagggcgagccggaagagaaaggccccagcacacccccagc

SEQ ID NO: 157945 - RNA, 32 nt, Homo sapiens
cagcgcccagagagcccggacggagccccccc

SEQ ID NO: 157946 - RNA, 80 nt, Homo sapiens
gaccccgccaggcagcaaaaacaagcagcccagaagaacaggcggcgggcagagcgaggcagaaagaggagaagagccgg

SEQ ID NO: 157947 - RNA, 78 nt, Homo sapiens
aagacgaagaacagaaggcgacaaggccaagaccgccagcaaaggaagacgagcaggacccaaggggccggcagagaa

SEQ ID NO: 157948 - RNA, 73 nt, Homo sapiens
aggagaagccaccagccccagaacgggcgcagaagcaggaacagcaggccgggagagagcgcgaaccggaaaa

SEQ ID NO: 157949 - RNA, 82 nt, Homo sapiens
agaaagaccacacagcagccaaaacgagaagaagaagaaggagaccaggccaaaaagccacccaagcaggcacagaacagga

SEQ ID NO: 157950 - RNA, 74 nt, Homo sapiens
ggaaaaccagaccagaaacggaggagcccgccgaagcagggaaaaaagacgacaagaaggagcgaacgagaaga

SEQ ID NO: 157951 - RNA, 79 nt, Homo sapiens
acagggcagaggaaaagcaagaagacgaggagcaggcgcaaaaaagaagagaccgagaccaggaaccaggcaggggaac

SEQ ID NO: 157952 - RNA, 72 nt, Homo sapiens
cagaaaaagaaaagacagccgccagaaccacaacccacagaggacaaagggaggaaaaaggccgggacagaa

SEQ ID NO: 157953 - RNA, 56 nt, Homo sapiens
ggcagggcggagagcagcccaaggacaagagacacgcaaaccaaggcgacggaagg

SEQ ID NO: 157954 - RNA, 74 nt, Homo sapiens
agagcccgcccccaccccgcccagaaacggagggggcccggaccggggcgcaggcacacccaccagaagggagc

SEQ ID NO: 157955 - RNA, 83 nt, Homo sapiens
gagaagcaaaacacacgacacagaacaagagcgacgaccaccaaccgcggagcaggagcgggagaggcacacaaggccaacag

SEQ ID NO: 157956 - RNA, 51 nt, Homo sapiens
aaagggaaagagagcaacggaaaagcgcagaaaacacaaggaccgaccaaa

SEQ ID NO: 157957 - RNA, 51 nt, Homo sapiens
gcccaccagacagagaccaggacgagagcacagcccccaggagaggcaggc

SEQ ID NO: 157958 - RNA, 82 nt, Homo sapiens
aaagcaggacagcccagcgagaccgaggaagaaaggcagacccggcaccacagggaaaacggggcaagcccagaaacacccc

SEQ ID NO: 157959 - RNA, 92 nt, Homo sapiens
ccgggacacccggaagccaggaaagggggcaaacgcagaggcgggaacaaacagccccaagacgggaaagagccaagaagcagaagacggag

SEQ ID NO: 157960 - RNA, 107 nt, Homo sapiens
accagccccagccgaaacaccagagaccacccgaacacccaagcaacaacagcccagagcggagacgccaccaccccccagagggaccagaggagcgggcagggcga

SEQ ID NO: 157961 - RNA, 61 nt, Homo sapiens
caacaccaccgggaagcagcagaccaggcagcagacgacaggacggcagagccccaagaaa

SEQ ID NO: 157962 - RNA, 84 nt, Homo sapiens
ggaaaggacgaaaaggggcggaagaaaaacaaacacacgcaaaggagaaaggaaccgacagccaagcacaagaagaaacacccc

SEQ ID NO: 157963 - RNA, 78 nt, Homo sapiens
ggcaaagaggcgaccagcgggccgggagaaaaacaacaggaccgggggccacagcgccaggaaggccggccaaacaga

SEQ ID NO: 157964 - RNA, 71 nt, Homo sapiens
cggacaacagcccaacaacacccagaaaagcagacaagagaacagggggacgccaggagcgcgaagcaccg

SEQ ID NO: 157965 - RNA, 76 nt, Homo sapiens
gaacagcggcgaggaaacgccagcgcgcccaccgcagggaagaaaacaccccgacggcaggcaggagccaacaagg

SEQ ID NO: 157966 - RNA, 79 nt, Homo sapiens
cggagagaagaggaccggcgggaaccgaccggcgccaccgcccagcacggagacccccaggcaaaccgccccgcagcac

SEQ ID NO: 157967 - RNA, 78 nt, Homo sapiens
aaagaccggcccgggaagaaaaccagggcaccaggcaggggaaccagggaaccggggggccgcccgagacgacaaccc

SEQ ID NO: 157968 - RNA, 74 nt, Homo sapiens
aggaagaggagggggaaaggaaacacaggggacaaaacccaaaacaaacaaaaaggagaggaacccagccacga

SEQ ID NO: 157969 - RNA, 64 nt, Homo sapiens
ccgagaggcgggcaaagggagaaaaccacgagaccagaagagacccgcgaacacaaaaggaaac

SEQ ID NO: 157970 - RNA, 37 nt, Homo sapiens
ggccacgggcgggcaggcaaggacaggccgccgcgac

SEQ ID NO: 157971 - RNA, 76 nt, Homo sapiens
gcggaccagggcgagcacgagcacccgccccaacgaggaacggaaggaagccgaggagacagcccaaccgccggag

SEQ ID NO: 157972 - RNA, 122 nt, Homo sapiens
gcgggcgcaaacgcacacgacggccccgcccccggccagccaacggacagcggagcacgagagaagggccaccggaaaacccggacccaacccaacagggcgcggaggaccacagacacagc

SEQ ID NO: 157973 - RNA, 75 nt, Homo sapiens
gcccagaagggagaccagcagaacccaccaggcggcgcccagcggccacacgccccaagcgccacgcccgggcgc

SEQ ID NO: 157974 - RNA, 75 nt, Homo sapiens
cacgcccacgcccccgcgccggagccccgggccaggcgagaacgcggacaagcaaacaaagaggaaaaagagggc

SEQ ID NO: 157975 - RNA, 79 nt, Homo sapiens
ggcaccaggccaccacagaaacaaaagcaacaaagagggacacgcccaccaagaaagaaccggaaaggggaccgggcca

SEQ ID NO: 157976 - RNA, 82 nt, Homo sapiens
gccgccacgaccgggagccccgcacccgcccggccccacgggccgagacagcaaacaggaggaagaaaaaaacagggcacgg

SEQ ID NO: 157977 - RNA, 68 nt, Homo sapiens
ggcccaaccagcccagcgcgcggccccaccggccagggcgaccgggcaaggaacgggagacgcaggaa

SEQ ID NO: 157978 - RNA, 72 nt, Homo sapiens
aaccacacaggaaaggacccagaaaaaggaaagacccagaggccaacaacgaagagaggaaagaagcggaaa

SEQ ID NO: 157979 - RNA, 74 nt, Homo sapiens
gggaaaaggagcagaaccgggagaagcaacagacacgaagaagaaaggaagccagagcaccccccgcagcaccc

SEQ ID NO: 157980 - RNA, 43 nt, Homo sapiens
acccccacgggcgcaaagagcaagggccagagaaggaggagaa

SEQ ID NO: 157981 - RNA, 54 nt, Homo sapiens
cacacggagccaagagcaaggcgggcacaaaccgaagaggacaaggagagaagc

SEQ ID NO: 157982 - RNA, 86 nt, Homo sapiens
cagaggccaccgccccagaaagcagcgaccgaccccccccggaccccaggagccggcgcccccgcccgagaacccaggagaaacga

SEQ ID NO: 157983 - RNA, 75 nt, Homo sapiens
cagaagaaagcccaaagaagcccagcagcgggcagagccacaaaggggcagccaccaacaacaccagggacacaa

SEQ ID NO: 157984 - RNA, 76 nt, Homo sapiens
ggcggccggcgggagagccgccagggccacaaggggcgggacccagcaacccaggcccgagggaggacggaacagc

SEQ ID NO: 157985 - RNA, 80 nt, Homo sapiens
ccagccgccccagaacgcagacagaggagcggacccccgcggcgcgcagcccagcaggggggcccagacccaagaaagga

SEQ ID NO: 157986 - RNA, 82 nt, Homo sapiens
aaaccaggcaacaggcagaaaaagaaccaggacacgaggaaagcacccaaacgccacacaaccagccacccaccaccaaagc

SEQ ID NO: 157987 - RNA, 66 nt, Homo sapiens
cagaacgggacagccggcggcaccacccgaacagggccggcagaggcgaaggcgaaaacccgaggg

SEQ ID NO: 157988 - RNA, 76 nt, Homo sapiens
caaccacaccccccccaaaccgagccaaaagcggcaaggcaacaggagagcacagagagaggccaagcgccggaga

SEQ ID NO: 157989 - RNA, 78 nt, Homo sapiens
ggcagcgacagccacacaacggacaggggccaggcacaaagagggcgggacacccaggaggagggcggcaacggaccc

SEQ ID NO: 157990 - RNA, 55 nt, Homo sapiens
caagaaggggcgcccgccccagcgacggaaggaccccaaaagcaccccagacgcg

SEQ ID NO: 157991 - RNA, 80 nt, Homo sapiens
aaaaagggaggagcagggggcccaaagcccgcaggaacgcagggaaagaagccgggaagccagcgcaggagggccagggg

SEQ ID NO: 157992 - RNA, 79 nt, Homo sapiens
cggagggagccagccaggggcagccggccgggccccagaagaggcagaagcccccggggagagacagacagagggacac

SEQ ID NO: 157993 - RNA, 82 nt, Homo sapiens
cccggacaccaggccacagccgggaagcagagggagaaagaagcgcagaggaccaggggccaccaagggaagacagacgaga

SEQ ID NO: 157994 - RNA, 79 nt, Homo sapiens
acaccagggaagagacacacccagaaggccaagagaggccaacagaggaacaaggcccgcagaacccaagagcaaaagc

SEQ ID NO: 157995 - RNA, 80 nt, Homo sapiens
cgaaaacaccaggaaagacaggagaccaaaaaggcaagaacagaagaccggggaccagaagggagaagaagcaaaaggaa

SEQ ID NO: 157996 - RNA, 77 nt, Homo sapiens
cccgcccgccccaaagcgcgggaaacaggcggagccgcgcccgggccaccccgaggaagcacaggcccaaagcccag

SEQ ID NO: 157997 - RNA, 38 nt, Homo sapiens
acggaaaaccccaacccggacaggacaacaacacccca

SEQ ID NO: 157998 - RNA, 77 nt, Homo sapiens
acgcaggagggagagcacagcaagagccaggaccaccggaagccagaaagaagcacaccagcccgaaacccgacagg

SEQ ID NO: 157999 - RNA, 42 nt, Homo sapiens
ggaaaaaggaggggaccgaggaacaacggccgcagagaaaac

SEQ ID NO: 158000 - RNA, 78 nt, Homo sapiens
aacagaggcgagagcggcagcagcaccagcccaagagaagaaaaaagcgaacgcaaggggccaagaagagcagagccc

SEQ ID NO: 158001 - RNA, 80 nt, Homo sapiens
acagcaggaggagcgacagcgggccaagacaagcagaccggaagaccgacggaagaccacaccccgagggagcccaggac

SEQ ID NO: 158002 - RNA, 62 nt, Homo sapiens
gagagagggggaaggagagccaagaaggcagagggggcgagggaggaaagggggcaaaacga

SEQ ID NO: 158003 - RNA, 113 nt, Homo sapiens
ggcgaaggggaggcgccgcggacgcccgggccacccccccgcgccgccggcacgcggcaagaacgccccggcaaggacggaggcaggcaccaccaacagcggggaaaacccag

SEQ ID NO: 158004 - RNA, 48 nt, Homo sapiens
cgccgcggccggccacgcgaaggaagagccagacagaagacacagaag

SEQ ID NO: 158005 - RNA, 77 nt, Homo sapiens
cgagaggaggccgccagcagaggcggagcccgcagaccgcagaaggccggagacaccagcagagaagcccagcgacg

SEQ ID NO: 158006 - RNA, 84 nt, Homo sapiens
cgcagcgccaccgacccacaggccggcgggagcgcgaccccggcccaggggagccccaacccggccaggaggaggccccaaaag

SEQ ID NO: 158007 - RNA, 78 nt, Homo sapiens
ccaagaagaggggccgaaccagacaacagggaaaggcacagagaaacacaggggaagccaagaagagaaggcagaaca

SEQ ID NO: 158008 - RNA, 80 nt, Homo sapiens
gcaaagccacccgagaccgaagccggagcgggcagggcacacaaccgggcagcggacacggagcagggccgcccggggag

SEQ ID NO: 158009 - RNA, 57 nt, Homo sapiens
gaagcagagccagacaccgccaggagagaagacagaaccgggcagacccccaacccc

SEQ ID NO: 158010 - RNA, 80 nt, Homo sapiens
agcgcacagaaacaaaagggggaaaaagaagcgagacagagaggaaaaaggcagaagacagcccgggcccgaccccaaac

SEQ ID NO: 158011 - RNA, 82 nt, Homo sapiens
cccccagccgggacccggccgcacgcgcgccagagggccacgccaggccggccaaggcagggcagcaccagagcaaaccaag

SEQ ID NO: 158012 - RNA, 78 nt, Homo sapiens
aaaaacaaccgaaggcgccgaaaagacaaacaacccagaaccccgaccgggggacacccccaagcccaggccaccgga

SEQ ID NO: 158013 - RNA, 83 nt, Homo sapiens
gccggagcgcgaaggccgggacccggccccggcccacaggggggggcaaacccgagagaacggcgccacgggacagccaacac

SEQ ID NO: 158014 - RNA, 74 nt, Homo sapiens
ccggcccagcaaccgacaacgcggcccgaggggaaagaaaaagagcccaccaaaaggaacagacggccccaggc

SEQ ID NO: 158015 - RNA, 71 nt, Homo sapiens
cagaaaccgcccggagcacgaccgaggcggccaagacaacgacaagagaacaaaggaggggaccccggcaa

SEQ ID NO: 158016 - RNA, 74 nt, Homo sapiens
acaaaagaagccggaagacaaagcagagacaggccaggcagcaagacaagaaacgccccgaaaagaggcagccg

SEQ ID NO: 158017 - RNA, 100 nt, Homo sapiens
gcggcagcgccgagcgaacagagaacagcgccggaaaaccaccaccccaggaagcgaaaacaaagcgaaaaccagggaaacgccccgagccaagcccccg

SEQ ID NO: 158018 - RNA, 78 nt, Homo sapiens
aacaccccccaacgagggagccgggaggccccacccgccaggccagaggcagcgagaagaaaaagaagagagagacac

SEQ ID NO: 158019 - RNA, 67 nt, Homo sapiens
cccgaaggcgaacacagaggaaaccgcaccgcccggagccaagggacaccaccccggcacgagaccg

SEQ ID NO: 158020 - RNA, 65 nt, Homo sapiens
cggagccgggcgcggcgcacgccgcccgcccagggcccaggcgcacccaggcagaaggaggaggg

SEQ ID NO: 158021 - RNA, 71 nt, Homo sapiens
ggcggaggacagagaagccccggccgggccggccagcgccggaaaccaacaagcgggaggaaggcgggcga

SEQ ID NO: 158022 - RNA, 64 nt, Homo sapiens
gggaggaccgcaaaaacagaccgggagagcggagaggcacacccagaagccacaggagaagcaa

SEQ ID NO: 158023 - RNA, 76 nt, Homo sapiens
agcaaacacacggagcgaacgccgcagcagaaagccaagaaccagcggaccaggggccggaccccggcccggccag

SEQ ID NO: 158024 - RNA, 75 nt, Homo sapiens
gacggacaccaaacacaaggggaagccggggccgcccagacgcgccaggacccacaaccccagcccggccgaccg

SEQ ID NO: 158025 - RNA, 80 nt, Homo sapiens
ccgcgcgaggcgcaaaaggccacgccaggagacgcccgagagaagggcgcgcgcggcacaggacagaaagggaaagcgag

SEQ ID NO: 158026 - RNA, 77 nt, Homo sapiens
aggaccggcgcgccggaccccgccccccccgcgcggcgcgggcgccgggggcaccgagggccagaacacagcagaaa

SEQ ID NO: 158027 - RNA, 81 nt, Homo sapiens
gaaaacaggcgccaggacgaaagaaaaacaaccaccagcgagcaaaaaggcaaagaccaagaccaccaagaagcgccccag

SEQ ID NO: 158028 - RNA, 56 nt, Homo sapiens
aaacagcacggacaggaagaggacaccagcccgggagaagaggcaacacccgagcg

SEQ ID NO: 158029 - RNA, 57 nt, Homo sapiens
aaccagcccggaagggaaagggagaaacaggcacacgagcggccacgagcaaccaag

SEQ ID NO: 158030 - RNA, 64 nt, Homo sapiens
gcccccacccccccgccaggccccagagacaccaggaccgccggcccgggcaccagcagcaacg

SEQ ID NO: 158031 - RNA, 74 nt, Homo sapiens
cgcagggacgccggagacggcagacaagcagcggcacaacgccaggaagccggacgcgcagggaaaacgagagg

SEQ ID NO: 158032 - RNA, 78 nt, Homo sapiens
cgccggcacgcacccgggcgcagcacccccgccccccaggcgacgagacccagggcagaccgccagagcggaacgacc

SEQ ID NO: 158033 - RNA, 89 nt, Homo sapiens
ccaggacaagagcgcaggcagggccacaagagcgaggagaagcgagaaaagagaaacggacccacacaggaaagcgagcccacagggcc

SEQ ID NO: 158034 - RNA, 77 nt, Homo sapiens
cacccaaacgacaacagggcaaaaaaagggcggaaaccgcacaggagacgcaggccaaaccagccgaaggggcagac

SEQ ID NO: 158035 - RNA, 79 nt, Homo sapiens
ccagagccaagaggaacccagaagcagggccaggacaaccgacccccaaaaagagaaaagaagaccccaagagagcccc

SEQ ID NO: 158036 - RNA, 83 nt, Homo sapiens
agcggcggcggcggcagcgggcgggccccgagagcagcagcggaccgggccccagagcgaccagccaccccaggccggcccca

SEQ ID NO: 158037 - RNA, 40 nt, Homo sapiens
caccaacggcggcgcacaaggggcgcggggcagggcgcgg

SEQ ID NO: 158038 - RNA, 73 nt, Homo sapiens
ggaaagacgagaagcaaaagaaaaacgagaccgccaagagggccgcgggagggaggggcaagaaaagacggca

SEQ ID NO: 158039 - RNA, 39 nt, Homo sapiens
cgcacacagcaagcacgaggaagaagaagcacggcaggc

SEQ ID NO: 158040 - RNA, 84 nt, Homo sapiens
cgcgaacggagccggaggaggaccggaggcccccgcacccccgcgcccaggagcggaggacaccccggagaggacgggaggacg

SEQ ID NO: 158041 - RNA, 71 nt, Homo sapiens
gaccccggacgcgggaaagcagaaagagaaggcagaacagaggaagaccagaaacccagagacccacacga

SEQ ID NO: 158042 - RNA, 38 nt, Homo sapiens
ccaccaagagccacagagagaaggcccccagacggcgc

SEQ ID NO: 158043 - RNA, 66 nt, Homo sapiens
gggacccacaggcaaagcagggaagaaggagaaagggccaaccccgaagaagcaaacagaaacgaa

SEQ ID NO: 158044 - RNA, 82 nt, Homo sapiens
ccgagagcgggagcaggacgacaagacagccaaacccagccagggacaacccgcagccagaggaaggaaagcgggaaaggaa

SEQ ID NO: 158045 - RNA, 73 nt, Homo sapiens
gccggcgggagacgcccccgccgggaccggcacccgaaccggccgccggggaagaaggaccgggaaagcgccg

SEQ ID NO: 158046 - RNA, 100 nt, Homo sapiens
cagcgacggagagggcagaagaggaggagcaccgggagaggcgggaagaagaagggagccaggccagaaggaggggccagacggaaccaagaggaaggca

SEQ ID NO: 158047 - RNA, 69 nt, Homo sapiens
accccgaagcaaggaaccagagagagagaacggagaaaacagaccgagaagaaaacaaaagggacaggc

SEQ ID NO: 158048 - RNA, 49 nt, Homo sapiens
gcaggggaaagcccgggccaagcgggaggcgccggcagagaaagagcga

SEQ ID NO: 158049 - RNA, 74 nt, Homo sapiens
cccgcccagccccccagagcgggaacagggacaaggagaagacggaaggaaaggagaccacagcgcacagggac

SEQ ID NO: 158050 - RNA, 78 nt, Homo sapiens
gggcacccgcacgagcaacagacgagcgcgccaggccgacagccgcggccgggcccgagccaggcaggacagggggga

SEQ ID NO: 158051 - RNA, 57 nt, Homo sapiens
gggaggagcgaccaggaagaccacagagcgaaaaccccagcggaaacccagccaaga

SEQ ID NO: 158052 - RNA, 37 nt, Homo sapiens
aacagcggaagaaagcgaaaagagcgccggcccaggc

SEQ ID NO: 158053 - RNA, 69 nt, Homo sapiens
cgcaggcagacaaaagggccaaagaagggagagaggggcgcggagaaacaagaaccccccaggaacagc

SEQ ID NO: 158054 - RNA, 70 nt, Homo sapiens
gaaaccggaccaggcagacacaccgacgaaaagaagaacggacacccaaacgacaacaaaaagcaagacc

SEQ ID NO: 158055 - RNA, 79 nt, Homo sapiens
ccagcaccgcaaccaccgccaccagccacggagggcagagggagacccgaccaccggaagccacggcccggacccccgc

SEQ ID NO: 158056 - RNA, 70 nt, Homo sapiens
ccccacccgcagggcagcacacaggcgccagaaggaaaccggacaccaagcaaagccaggacccgaaaag

SEQ ID NO: 158057 - RNA, 80 nt, Homo sapiens
caggaaagcaggcgagaaaggagcagcccgacggccaggaggcgaagagacgaggaagcccaggagcccgaacacaaaaa

SEQ ID NO: 158058 - RNA, 71 nt, Homo sapiens
cgaccggccaggagacgacaagcaggaaaaaccagaagagaaaaaacaaaggggagaggcaccccgcggga

SEQ ID NO: 158059 - RNA, 59 nt, Homo sapiens
cggcagagaaaaaggccaccgaccaggacccgaaaagccagcaagcgagaccaacacca

SEQ ID NO: 158060 - RNA, 78 nt, Homo sapiens
cacgcgacgggggagccgcgggcccccgggcggggcgagcaagccccggaggaccgggggacagcggcccagggaccg

SEQ ID NO: 158061 - RNA, 83 nt, Homo sapiens
agaaacagaagcgagaggaaccagaaaaagggagcacaaggaagaggaggggggaagacagggcccagcaccacaggacgggc

SEQ ID NO: 158062 - RNA, 84 nt, Homo sapiens
aaacagacaggggaagcgccagcaggagagggcgagaaccacgccgacaacggcggaagaggaacgggaacggggaagaagagc

SEQ ID NO: 158063 - RNA, 54 nt, Homo sapiens
gccgggagcgaccaacacaagggggccgcaagggcagaagacccgagcggcccg

SEQ ID NO: 158064 - RNA, 69 nt, Homo sapiens
ccaacaagagaccacaacacaacaggcgcaagcaaacgcgagaggaggcagcacgaaaccagcaggcaa

SEQ ID NO: 158065 - RNA, 60 nt, Homo sapiens
cagccaggagaacgcaagaaaacaaagagcacggcacaaaaaaggggcaggacggcgaac

SEQ ID NO: 158066 - RNA, 55 nt, Homo sapiens
ccgccccgagaggaaacacccccagaagaggccagcggcagcaaggcgcaggcgc

SEQ ID NO: 158067 - RNA, 77 nt, Homo sapiens
ccgggcgcgacacagagaagaaagggagggcagagagggccagggagaagagcgccagcaggaccagaggcgaggcg

SEQ ID NO: 158068 - RNA, 78 nt, Homo sapiens
ggaccgcacacggagaaggaagcgcccaacagcgcccggaaccgccccgcccgccacagcgcgcagacgcgacaaggc

SEQ ID NO: 158069 - RNA, 71 nt, Homo sapiens
aaagggacggacacagggcccgcgaaaaagccagaaaacagggcaggccggggagcccgcggacagagaag

SEQ ID NO: 158070 - RNA, 81 nt, Homo sapiens
ggacggggagcgaacgggacagcccacacccggcgcggagggaaagcacaccggcccccaaaaacaagaggcaagaacgcc

SEQ ID NO: 158071 - RNA, 42 nt, Homo sapiens
aaagaaaaacccagccccaaaagagccagcagaggccaaggc

SEQ ID NO: 158072 - RNA, 70 nt, Homo sapiens
aaccgccaagcgggggagcaaggacaaaccggcgaccacacacggggacgacggggaagccggacagcaa

SEQ ID NO: 158073 - RNA, 69 nt, Homo sapiens
caaaaagacacaacacgcgacacaaaggagacggagccggggcgacgggagagacacgccagcgaggaa

SEQ ID NO: 158074 - RNA, 79 nt, Homo sapiens
aaggaacaggcggcgcgcgcggcgcgggacgcgcgcgggcacccacggagccccggggcgaccaagaacggaggaccgg

SEQ ID NO: 158075 - RNA, 68 nt, Homo sapiens
cgggaagcaacacgaaggaggccacgcagcaaaccacaggagaggagggaccacagagaagcgcccca

SEQ ID NO: 158076 - RNA, 122 nt, Homo sapiens
gaccacaccacaaagaaaccgagcacccagagaaagcaaaccaggaggaggacacccggaagagcggacggccaaggaggaggagcgcagcacccagggaaggcagagacgggcagaccagg

SEQ ID NO: 158077 - RNA, 57 nt, Homo sapiens
ccagggggagcccaaacgaaaagagaagacacgcaggcagaacaagaagggcaacca

SEQ ID NO: 158078 - RNA, 73 nt, Homo sapiens
gaaggggacgaccccaaaggaaaaggaagccccaagcagcacccagccacaccccaccgcccagagaagggaa

SEQ ID NO: 158079 - RNA, 72 nt, Homo sapiens
cacaggcagaaacaagggagacagccgcccggccaagcacccgcagcagcaacggggcggcacacaaggagc

SEQ ID NO: 158080 - RNA, 84 nt, Homo sapiens
ccccccaccgaccagggcagcaggcacgagcaaaggaacacaacgggccaagaccccagacgacacccccaagaggggccgaag

SEQ ID NO: 158081 - RNA, 77 nt, Homo sapiens
ccgaccggaaaacaagaccgcaaaaggaaccagaaggcccagacaggggccagcaaggaagagacgcgagaagagca

SEQ ID NO: 158082 - RNA, 79 nt, Homo sapiens
ccggagcagccacaagagggagaacaggccgcgggaaagaagagagccccacacaagaccacccaaggcagcgcaaaag

SEQ ID NO: 158083 - RNA, 66 nt, Homo sapiens
gcgcgcccagacccgcacaggccggcgaccacgcaaacaaccagagggagaaaccccaacacagaa

SEQ ID NO: 158084 - RNA, 59 nt, Homo sapiens
caagagagccaggagcgcacacacgacaggagaaaggaggcaagaagcaagcaaccagg

SEQ ID NO: 158085 - RNA, 79 nt, Homo sapiens
cggggaccaggacagcgcgaggcgagggcagagccgcggggcaagacggaagaaaacgccagagaagcagagcagcccg

SEQ ID NO: 158086 - RNA, 84 nt, Homo sapiens
cagcagggcgcacagagaccagcacagaagcggcgagcggaaaaagggcggaagaaacgaaggaagaagaggcgggggggccga

SEQ ID NO: 158087 - RNA, 58 nt, Homo sapiens
ccagagcggccgcagcagggaacccaggaaaccagccagggaaaaggaacccacgaaa

SEQ ID NO: 158088 - RNA, 76 nt, Homo sapiens
aagggccgaaagcagaagaaaagggacgcaagaaacccaggacgagaacagcaacagaccgcaaaacgggacaagc

SEQ ID NO: 158089 - RNA, 60 nt, Homo sapiens
gaaagcgcccacgcacgaaagcccaggccaaaaagagaggaaacaaggcaagagggaagg

SEQ ID NO: 158090 - RNA, 78 nt, Homo sapiens
gggaccgggggcgccagggaagcgggaggcaggcagccagaaaccgggagaagccggccaggcaggcacaccccacca

SEQ ID NO: 158091 - RNA, 98 nt, Homo sapiens
gcgcccgaggcggagggacggaggaaacagcgagggggaggagacgggggggcacaagaaggccaaccccaaaagagagaacacaggcaagacgaaaa

SEQ ID NO: 158092 - RNA, 70 nt, Homo sapiens
ggagagacacggaccaccacgcccggaagggaaagaaggacagggcgaaccccgcgccccgcagcggaga

SEQ ID NO: 158093 - RNA, 61 nt, Homo sapiens
gggcacgagcgccacaaccccagcgccagaggaagaaaaaagcccaccgcccagaggcccc

SEQ ID NO: 158094 - RNA, 76 nt, Homo sapiens
agaagaacagagcaaacagacggaagaggagaaggccggaacaacgaaggggaggcaccaaggagaaccgcggaca

SEQ ID NO: 158095 - RNA, 70 nt, Homo sapiens
ccacgccggggacaagccggcaacacacggaaggggcgacagcaagaaggagccagcacagaggcaaaag

SEQ ID NO: 158096 - RNA, 85 nt, Homo sapiens
caggaggcagaaaccagcgccggacagagaagcccccaaggagcgcagggaaaccggcaagcagcccagccgagcagccccagac

SEQ ID NO: 158097 - RNA, 60 nt, Homo sapiens
cggcccccacaccacacagagagcgaggaaacacgagcgaggggaggccaacggcgagcg

SEQ ID NO: 158098 - RNA, 91 nt, Homo sapiens
cgaagccagccagaccaggaacccaccagaaggaaccaaccggacacaaacaagcagcaggaggacaccaaagggacaaggagggcaagac

SEQ ID NO: 158099 - RNA, 72 nt, Homo sapiens
gcccaccacgcgggaagagaccagcgaagaaggcccgaggaaaggggaagggggccagacaaccagggaagc

SEQ ID NO: 158100 - RNA, 78 nt, Homo sapiens
aagaaaggccaagaccaggaaaggaaggaaaccagggccgggaagcacacaggaggcgccacgggagcagcggaaggg

SEQ ID NO: 158101 - RNA, 80 nt, Homo sapiens
aaagccccggccacccggcccccggcaccaggccgaaaacgaagcagaggaacaacaaggaaaagccccaagaagccaag

SEQ ID NO: 158102 - RNA, 70 nt, Homo sapiens
ggcacacgcagcagaagcccggagacgcacagccaagagacaaggaaacaagcaccaaaacgagaccggg

SEQ ID NO: 158103 - RNA, 83 nt, Homo sapiens
ggggccagggcacgcacgcaggccagggcccaccggccccgggccagcgccaggccgggccgccccaggaggagagcagcagc

SEQ ID NO: 158104 - RNA, 72 nt, Homo sapiens
caggcacaagcacaaccccaaaaaaggccagaggaggacagcacgagaggaccagccaccggggccaggacc

SEQ ID NO: 158105 - RNA, 73 nt, Homo sapiens
cagaacacaacagcaaccagcacagaaagcaaagagacacaggacggacaaggacaaacaggcggaaaaggaa

SEQ ID NO: 158106 - RNA, 68 nt, Homo sapiens
acagccgcgacacacaggacgaaggacagagagggacgggcagacgccccgacacgcagcgaaagaca

SEQ ID NO: 158107 - RNA, 71 nt, Homo sapiens
aagaggcgaagcgcacagcaaaaacgcagagagaagcgaacaaggcagcccaaggccaaccccacgcaccg

SEQ ID NO: 158108 - RNA, 61 nt, Homo sapiens
gcacagaaggccaaaaaggcaaccacagagagagagagggagggacagagacgccaaagga

SEQ ID NO: 158109 - RNA, 83 nt, Homo sapiens
cgacgccgcgcagcacccagacagcaccacgcccggggggacgcccccaccacaccgggaggaccccggaggaaaagcggaag

SEQ ID NO: 158110 - RNA, 72 nt, Homo sapiens
agaagcaacacgagaaccaccccgacacaacaccaccaggacacaaggacgagcaaaggaggacgaaaagac

SEQ ID NO: 158111 - RNA, 80 nt, Homo sapiens
cgcgcggcgagccacccagcaggcgcgcagcggaccgaagacccgggagaagggcaaaggcaggcacaacgcacaggggg

SEQ ID NO: 158112 - RNA, 68 nt, Homo sapiens
acggaccgcgggccagccgccaaagaccccgccggaggaaggggaggagcacagaacgccaggaccaa

SEQ ID NO: 158113 - RNA, 58 nt, Homo sapiens
cagagccgcgcaggagacggagcgcgcgcgggaagaggcccgagagcccgggaagcgc

SEQ ID NO: 158114 - RNA, 75 nt, Homo sapiens
accagccacaaaaaaagagggaaaacacgcggaacaagacccagcaagaagaagccaaagggacgggagaaagaa

SEQ ID NO: 158115 - RNA, 52 nt, Homo sapiens
ccggaccgagcccaggcgccccgagaacaggggagaggagggaccaaggagc

SEQ ID NO: 158116 - RNA, 72 nt, Homo sapiens
aaagcgacggagcccccccccggggcagcgcaagaccccgcacggaagcagcaagcacaggcagcgcagagc

SEQ ID NO: 158117 - RNA, 76 nt, Homo sapiens
gccagaggagaaggcagcgcccgcaggggagaccgaaggaccaccggcagcgggaaaaaacgaccaagacaaacaa

SEQ ID NO: 158118 - RNA, 59 nt, Homo sapiens
cacacagaggaaagaggcagcagaccccagcacaaacaacaagacgaaaagaaggagac

SEQ ID NO: 158119 - RNA, 63 nt, Homo sapiens
gacacagcaagcccgaaaaaggaggcaccaggagacaaagccacaaaaacaccagaaaaacca

SEQ ID NO: 158120 - RNA, 73 nt, Homo sapiens
ccagaggaggcccccagccacgggaacggagccaccaacagagagcagcaagaaggcccaccagaggggcaca

SEQ ID NO: 158121 - RNA, 63 nt, Homo sapiens
gagccggggaagacagggaagccagacaggaaggaaaacacaggaggaggccgaggggacgcg

SEQ ID NO: 158122 - RNA, 79 nt, Homo sapiens
cagggaagaccacacaccccacaggaaggcacacagcagcaagagcccaaacgcgcagaaaaaaccagcaggccaggaa

SEQ ID NO: 158123 - RNA, 78 nt, Homo sapiens
acaagcaaaacaggcgacagcagaaggaaaaccacagaacggcagagcgaaacaaacaagagggcgaaccagcacagc

SEQ ID NO: 158124 - RNA, 83 nt, Homo sapiens
cgagacccgccacacgagggaagagcagaaaccaggggagcagggacagaggagcaacacggagagcagggcaacagcaccaa

SEQ ID NO: 158125 - RNA, 42 nt, Homo sapiens
gagcggacacccccggaccgcggcaggaccccggagcgagcg

SEQ ID NO: 158126 - RNA, 76 nt, Homo sapiens
ccccgagcgggggaccggcgggagaccggagcagcgcccagccagagcgggccagagaggcggcgacaaacaacag

SEQ ID NO: 158127 - RNA, 72 nt, Homo sapiens
aagggaagaacacaccagggcagacacgaaaaaaaacgaaaccagaacagaaagggacgggacagcaaaagg

SEQ ID NO: 158128 - RNA, 82 nt, Homo sapiens
acacaacaagcaccagccacagccacccggggaaccccagcaagaccggcggagagacggagacccggacgacacggggacc

SEQ ID NO: 158129 - RNA, 73 nt, Homo sapiens
ggccacgcaacccgccccgggcgagaacccgcccagcccccaagcagcgggcacagacgggccaccagagaac

SEQ ID NO: 158130 - RNA, 56 nt, Homo sapiens
ggccgagagcccaggagacggcgaacccccgaagcaacagcccccacgccacgggc

SEQ ID NO: 158131 - RNA, 70 nt, Homo sapiens
ccaaccaagccggacagaccggaggaggacgcagcaacacaagcgagggaaagcgaaggaaaaagaaaag

SEQ ID NO: 158132 - RNA, 79 nt, Homo sapiens
gacaccaaaaaacacagagagcaacacgagcgcaaagagaaagacgaccgccaaccagggagaacacagagaaaaaccg

SEQ ID NO: 158133 - RNA, 73 nt, Homo sapiens
caacaagggaaacacaaaccacccaaacaagggaaggacagaacaggcggccagcccggaaaaacagacaagg

SEQ ID NO: 158134 - RNA, 77 nt, Homo sapiens
gcacaacacggaggaaccacccaacaagcacacgagagcccaaacaggcgccgcgcccggggagacagaaacgaggc

SEQ ID NO: 158135 - RNA, 81 nt, Homo sapiens
gcgcgcggaggccgcgacggacgcaagaggcgacggcgaccaagcccggccccagggcagccaaccccgcggcaggcacgg

SEQ ID NO: 158136 - RNA, 62 nt, Homo sapiens
cccaaacaacggcagaagcagcccccacccaggaaggaacaaccccacaccaccacacagca

SEQ ID NO: 158137 - RNA, 65 nt, Homo sapiens
gggccccacagcaagcccaggcacggcccggcaagggcggggcgcaggaggaccggccccgcacc

SEQ ID NO: 158138 - RNA, 78 nt, Homo sapiens
ccggaccaagcccacagcagagcggacagggcggagaacggaaaagcaccaggaagcagagaggaccgcagaagggaa

SEQ ID NO: 158139 - RNA, 85 nt, Homo sapiens
cgggggcgggcggagggggcggcggcagcgacggcagcggcggcggcggacaaacaggcaccgcagacggagccaccgcgcccag

SEQ ID NO: 158140 - RNA, 79 nt, Homo sapiens
caccgcgaagggggcagagacaggcccgcacaaccaccgaagcaggccgccacagccccgcgccgcgcagacaaggaca

SEQ ID NO: 158141 - RNA, 90 nt, Homo sapiens
cgcgccgccccgcgagcacagagcccgccgccgaccgccgcccgccacacccgccgccagggcgaccagacgaggggagacggacggggg

SEQ ID NO: 158142 - RNA, 92 nt, Homo sapiens
gcggagcagcgaccagagagcgcggccggaggacagccaaaccagaaaggggacagcggcgggcagggagcacggaaggaaccacaagggca

SEQ ID NO: 158143 - RNA, 88 nt, Homo sapiens
gcgacgacagcggcgcgggcggcggcacggccacgccggccggggaggcggggccagacccaacagaggaagccgcaagaaacgggac

SEQ ID NO: 158144 - RNA, 73 nt, Homo sapiens
ggccagcccgccgcagaaaccgccccaggaggacaccaggagaacgaagcaaaagcgggccgggaccggcaca

SEQ ID NO: 158145 - RNA, 61 nt, Homo sapiens
ccacgacgccgggaccggccaagggcccacacaccaagaccaaggaaacgcagagggaagc

SEQ ID NO: 158146 - RNA, 68 nt, Homo sapiens
caccaggagccaggcccggcccgagggcaccgagcaccgagaaaaagaaggagacaaagaaaccaccg

SEQ ID NO: 158147 - RNA, 72 nt, Homo sapiens
cagaagcaggcccccagccgcagccacaacaccggcaggaaccaccaggacagagggcaaggacaaagaagc

SEQ ID NO: 158148 - RNA, 75 nt, Homo sapiens
cccaggcccacaaccagcccagcagcagcaagcagcaaggcgccaccggaagaaacgggaggggaggagccggga

SEQ ID NO: 158149 - RNA, 52 nt, Homo sapiens
cccaaggagagcaaaagcgacagaagggggacaaggagaagaaaccgccgac

SEQ ID NO: 158150 - RNA, 70 nt, Homo sapiens
ccacgggcaggaaggcagcgcacgacagcaaaagaggaggaaggaccgagcgcaggaaccaggccagcgc

SEQ ID NO: 158151 - RNA, 78 nt, Homo sapiens
ccacgcacgcaggggcgcgcggggcggcgcgccgccgcgcggggcagacaagcagaccggaagaccgacggaagacca

SEQ ID NO: 158152 - RNA, 72 nt, Homo sapiens
cccgggaccagcaggagagacaaaggcaacggaggacaccagaccgacaaggcagagccagggaaaccacag

SEQ ID NO: 158153 - RNA, 76 nt, Homo sapiens
accacgccacacaccaaacggcaagaaaccccggacagaaggcacggcgaacaaagggcaacaacacaagaacgca

SEQ ID NO: 158154 - RNA, 77 nt, Homo sapiens
aaaaacacaaacgagggagcaaggacaccaccagggagccaggagagaaagaaccaagagggagacaagggaaaagg

SEQ ID NO: 158155 - RNA, 67 nt, Homo sapiens
agccagccccacagcaaacagcaaagaaggccgagggacgaggaccggaggagccgccacgcccgac

SEQ ID NO: 158156 - RNA, 74 nt, Homo sapiens
aggccgccccaacaccagggaagagacacacccaggagccagcaggccaagggaaaagcagcggaaaaccagcc

SEQ ID NO: 158157 - RNA, 55 nt, Homo sapiens
aacgcagggaagagcaccagggaggagagaagagaaggaccccccgccaacacca

SEQ ID NO: 158158 - RNA, 62 nt, Homo sapiens
ggccgccgcacagacagcgagacacccaccagaagagggagcagcgcagagacggccgaaaa

SEQ ID NO: 158159 - RNA, 75 nt, Homo sapiens
aacagcaacagacggcggggccccccgggcaggaagggggagcaacagacaagcccgaaaggaacagcagcagga

SEQ ID NO: 158160 - RNA, 61 nt, Homo sapiens
ggaggcgcccccggagccgccccggaggagaagagggacgaggccacagcagaaaaaaccg

SEQ ID NO: 158161 - RNA, 71 nt, Homo sapiens
ggggcccgaaagcggacccgggggcccccccgcacccagagcccaaaaggcagagcgaggagagaagaagg

SEQ ID NO: 158162 - RNA, 72 nt, Homo sapiens
gaaggaccaacacaccacaccgaaagcaggcagacggagaacaggacacaaggacgacacccacacggagac

SEQ ID NO: 158163 - RNA, 71 nt, Homo sapiens
acgaggcacagcaaagcagcagaacggacagggcaaggaagagaggccaggcaacaggaagaagaacccac

SEQ ID NO: 158164 - RNA, 84 nt, Homo sapiens
agaaggaccaagaaccagagcaccggccagaacaagccaaggagccaagacgagagggacacacggacaaacaacagacagaag

SEQ ID NO: 158165 - RNA, 76 nt, Homo sapiens
gacaagcaggcaagacgcgcaccgcaagcgggacgacccgggacagcccacggggcagaccagcgaccaccggcac

SEQ ID NO: 158166 - RNA, 53 nt, Homo sapiens
ggggagcacagagaacaagccagaaaaacagagacacaagcagcgaggaccag

SEQ ID NO: 158167 - RNA, 66 nt, Homo sapiens
gaaccaggcgccccaggagaaggaccgaaggagcacccacgggagaccggggggcaagaaaaggaa

SEQ ID NO: 158168 - RNA, 69 nt, Homo sapiens
cccaggagaccagcggccaacggccaccggaaaacccggacccaacccaacagggcgcggaggaccaca

SEQ ID NO: 158169 - RNA, 80 nt, Homo sapiens
gccgcagcgacccgagaaccagagcaggccagagacggggcagcagcaggggcaggacagagcacccagccgcccccacc

SEQ ID NO: 158170 - RNA, 70 nt, Homo sapiens
ccgccgcgcgggagacgacaccaccagcacccaccgcgagggaagcaaaaaaagaaagaagagcgaaaag

SEQ ID NO: 158171 - RNA, 43 nt, Homo sapiens
gacacacccgccgagaagcccggccagcggggaagcgcaggag

SEQ ID NO: 158172 - RNA, 74 nt, Homo sapiens
cgggggagaggcagagcgccccaggggggcgcccgccgcgcaggagagcacacagaaccgacccagaccagcaa

SEQ ID NO: 158173 - RNA, 62 nt, Homo sapiens
cacgagccgggcagcgcgagggacggcccgccgggaggcccccagccgagccagcggccggg

SEQ ID NO: 158174 - RNA, 87 nt, Homo sapiens
agccagaccgccaaaccagagaaagaaacacccgaacagcgaaggagaaacgaggcccagaaagagccagaagcgccagccacgaca

SEQ ID NO: 158175 - RNA, 79 nt, Homo sapiens
ccgaccaggccaggggagggggcacggccccggccagcccaggacaagaacaaagggcgccaagggaaaaaagagaacg

SEQ ID NO: 158176 - RNA, 78 nt, Homo sapiens
aaagaccaggagcgcaggcagcagcccacggaaaaaaagacgggaaccaagaccaggacaaagaagacccggagagac

SEQ ID NO: 158177 - RNA, 76 nt, Homo sapiens
aagccggacccaggagaagaggggagagggaccacacagaaacggccggagcgcgaagacgcagggaaagcggcac

SEQ ID NO: 158178 - RNA, 86 nt, Homo sapiens
caaggacaccagcacgccccgaaacgccgccccaggaagccaagaccgacaagcgggcacggcggccaaggccgcaggagggaagc

SEQ ID NO: 158179 - RNA, 58 nt, Homo sapiens
ccgcagaagacagggcggcgggccggacgacaagcgaggaaaaccaccacacagggga

SEQ ID NO: 158180 - RNA, 94 nt, Homo sapiens
gggacagaccgggaggcacgccagccacccaccacaggcccaaggaaaaaggccagggccagaggcgccggaaggacggggacccgagaaaagg

SEQ ID NO: 158181 - RNA, 79 nt, Homo sapiens
cgggagcacaccacaggcaaggccgccgaaggagcgagaagaggcgcgcagagaaggagggacacggcacagccggcca

SEQ ID NO: 158182 - RNA, 70 nt, Homo sapiens
gaagaccggccagagacccacagcagaccgccaggcccggccaaggaagacgcggaccagggaggcagac

SEQ ID NO: 158183 - RNA, 87 nt, Homo sapiens
ccacgggccgagacacgcagcggcggccagggaccagcagaagcccccggggagagacagacagagggacacagagaggaagaaagg

SEQ ID NO: 158184 - RNA, 78 nt, Homo sapiens
gggccccgccgaaccaccaggaaagggcacgcggggcacaaggagacaagggcgggcccccggcagggacaaaggcga

SEQ ID NO: 158185 - RNA, 73 nt, Homo sapiens
ggagaggcaaagacaccggcagagaaccaaaacacgcaacaggccggaaagagcgaagccaggcgaaaacggc

SEQ ID NO: 158186 - RNA, 76 nt, Homo sapiens
aggcaggggcaggaagaacccacgggcagcacacacgaaagagaagccccggaggaccccaacaacaggagagagc

SEQ ID NO: 158187 - RNA, 85 nt, Homo sapiens
cagcggcagagcacgagcggaccgcgagagacgagagcacgacacggccgcacgggcccacgccaggggagcaaacgggaaagca

SEQ ID NO: 158188 - RNA, 73 nt, Homo sapiens
ccgggacggaccgagaccggaccgagagcggaccgagagcgcgaaacgcacgagaagaacaagggacaagcca

SEQ ID NO: 158189 - RNA, 86 nt, Homo sapiens
accaagaagccccggacgcaggccggaggagaacgagaggaaagaagcccacacgagcccccgaacagcagcgcagcagccaggcc

SEQ ID NO: 158190 - RNA, 62 nt, Homo sapiens
gcaaaaggcggaccgcccccgccaacgaagaccgagaccagggaaaaccagcaagaccgcaa

SEQ ID NO: 158191 - RNA, 80 nt, Homo sapiens
cgacaggcggcagcggggcggcgcgcggcgcggcggcggcccgccccgcggcccaggccccagcgggacgcccaggcggc

SEQ ID NO: 158192 - RNA, 43 nt, Homo sapiens
gccggcgccggagacgagccgcgacaccgaacagcgagcacac

SEQ ID NO: 158193 - RNA, 70 nt, Homo sapiens
aggcaagaaaccagaaagagaacgggacaacaaaagagccacccaaggcaacagcagcgcaggagaagga

SEQ ID NO: 158194 - RNA, 80 nt, Homo sapiens
acacggccgaaggcgaacgccgcggccaaggagccgccaaagccagacggaagaggacaccagcccgggagaagaggcaa

SEQ ID NO: 158195 - RNA, 75 nt, Homo sapiens
cccgcgagcgccagaccagcgaagcgacaagcgagaaagaaccccagaagacaccaaccacagaaccgccgagaa

SEQ ID NO: 158196 - RNA, 74 nt, Homo sapiens
cccagcgcccaggccccaacccggaaaccccgaacccagaaccgccagaacaggaccaggcacaggggacaaga

SEQ ID NO: 158197 - RNA, 72 nt, Homo sapiens
acccgaaggaaaggaggagaaaaaacacaaagaacaaagaccaccccggaaagggacacaccaaaagaacac

SEQ ID NO: 158198 - RNA, 73 nt, Homo sapiens
ccggagcggaggagacgggccgcacccgccccccgcgcccgccaccggccgccgcccggaagaacgaagcaca

SEQ ID NO: 158199 - RNA, 34 nt, Homo sapiens
aacagcggcagaggacacaagagagggggaccgg

SEQ ID NO: 158200 - RNA, 69 nt, Homo sapiens
ggcacaccccgggcccgcggcggcgggcacccggaggcgcccgagcgagcaaaccccggccacacgaga

SEQ ID NO: 158201 - RNA, 61 nt, Homo sapiens
ggccacggaggccagccccaacacccgaaagggacgcggcacagaacgaagaagaaagcag

SEQ ID NO: 158202 - RNA, 86 nt, Homo sapiens
ccgcggacgaggaccagcagaggccagcacgagaacccagagcgggacaaggagaaccggcacggaagcgcagccacagccgcccg

SEQ ID NO: 158203 - RNA, 75 nt, Homo sapiens
aaagacaaaaagacccacgaaacaggagggaagaacaagagacagagaaaacaaaaccaccaccccccccaaggc

SEQ ID NO: 158204 - RNA, 77 nt, Homo sapiens
aagaccgagcccccgaaccgcaaagccccagaggacaaccaccccaggacaggagcagaggggaacaaaccagagcg

SEQ ID NO: 158205 - RNA, 72 nt, Homo sapiens
ggcggccacgagcagcgaagcgagaacgggaaagcgcacaagccaccgcggcccgggcgcaggcgggcccag

SEQ ID NO: 158206 - RNA, 84 nt, Homo sapiens
cccaccggaccgaggaaagcgagggccccaggaccccccgggccccggaccaccggaccgaggccaaaacagaagaggcaaagc

SEQ ID NO: 158207 - RNA, 76 nt, Homo sapiens
ccagacccacccccagcggaaaggcagaaaacacagagaaaacacggagaaacagcaacaggagaaaaggggagag

SEQ ID NO: 158208 - RNA, 67 nt, Homo sapiens
ccacaaagcggccgaaacagaaaacaagagaccacagaagcgcaagccccggggcagagacacagga

SEQ ID NO: 158209 - RNA, 73 nt, Homo sapiens
gcaagaggcgcaaagaaggccacggggcgccggccacgaggggcggaagaccaggcaggacagccacccggag

SEQ ID NO: 158210 - RNA, 75 nt, Homo sapiens
cgaggccgcgcgcggcgcccgcgggggcggcaccccaccgcccagccacagccccccccacaggagcaccggccg

SEQ ID NO: 158211 - RNA, 67 nt, Homo sapiens
cgccgaccaagagcgaagcgacgcaaaccagccagcacgggggcccagccagccagcagcgaggggg

SEQ ID NO: 158212 - RNA, 73 nt, Homo sapiens
agaaccaccccaaacaggaggaaaagcagcaaccgaccaggcacggggcacgacccccagagcccacagcacc

SEQ ID NO: 158213 - RNA, 79 nt, Homo sapiens
cccccccgccccaaacccaggaccaagggaaccacaccccgaggcggagaaccgccacaccgcggaggaggacaaggcg

SEQ ID NO: 158214 - RNA, 80 nt, Homo sapiens
agaaaggaaaacagaagaaaaaaagcgaagcgacaagcagggccccagccccaccccagccccaaaggaggcgcgagagg

SEQ ID NO: 158215 - RNA, 75 nt, Homo sapiens
acaggggcagggggaaggagaccgaaaagaccgaagaaacggacgaaaggagcagcaacaaaaacaaccaagaca

SEQ ID NO: 158216 - RNA, 40 nt, Homo sapiens
gaacacccggaagccgagaaaggccacacccagcaaggga

SEQ ID NO: 158217 - RNA, 104 nt, Homo sapiens
cggaggcccccgggcaagaggcgcaaacaagccaacccaggaggaaaaacggaagggaaaaggccgaggcacagcgggaagaccgcaaagacgacccgagacag

SEQ ID NO: 158218 - RNA, 65 nt, Homo sapiens
caccgcccggcaagccccgccagagcaaagaaccacgaccaaggcagaaaaacggaccagagaca

SEQ ID NO: 158219 - RNA, 81 nt, Homo sapiens
gcgcaccgacccgacgcgccggcccacgcgcggccaagggcggagaacggaaaagcaccaggaagcagagaggaccgcaga

SEQ ID NO: 158220 - RNA, 83 nt, Homo sapiens
ccaggacaaggaaagaagaacgcaggggaggcggcaacggacacaaaggacggagcagccagaaacggcgaggaaagagagga

SEQ ID NO: 158221 - RNA, 76 nt, Homo sapiens
cgacaccagccccccagcaccacgaagaggagggagcgggaccgagaaggcgaagcgcagagcggcaaaagcggag

SEQ ID NO: 158222 - RNA, 65 nt, Homo sapiens
aaggggaccaacagagggaaaaaaaaggagggcaaggagaaacgaagccccaggggcaggacagg

SEQ ID NO: 158223 - RNA, 68 nt, Homo sapiens
agggcgaagcaccagaaggcagaacaagaagggcaaccaggggggaaggagggagcggagaacgcgaa

SEQ ID NO: 158224 - RNA, 83 nt, Homo sapiens
ccccacagagcacaggggcccaggccaggcgcaacaggcccaggggagagaccccagaggggagaaaacccccaacaccggga

SEQ ID NO: 158225 - RNA, 84 nt, Homo sapiens
cggagcagagggagccgcccccgcggggcgcccggagccggccagcgcaccaaccaggacaacaggcccaacccaagccagggg

SEQ ID NO: 158226 - RNA, 79 nt, Homo sapiens
cagaagcgcggcggcgcggcggagccgggggggcgagcccgccgagagcgccaaggaggagacaacgggggaagaagaa

SEQ ID NO: 158227 - RNA, 80 nt, Homo sapiens
gggcagccgcggacccgccaagaagcgcccacgcagcagccggagagccaggcacaaaaaggggaagacaaaagcagacc

SEQ ID NO: 158228 - RNA, 85 nt, Homo sapiens
cagccccgaggagcgggaacaggaaacgagaggaagcaaagagaaaacaagaagaagaagagagaaagaaaagggaagagagaaa

SEQ ID NO: 158229 - RNA, 115 nt, Homo sapiens
ccaagaaagacccgccaaaaccggcgcacagagaagaaggggggggggacaaagaagcagcagccgcagcaccgagccgcacgccgccaccaggacaacgcaggcgagccgggca

SEQ ID NO: 158230 - RNA, 54 nt, Homo sapiens
gagagcgccaaggaccggcaaggggaccagagccaccgccggccagcagcagcc

SEQ ID NO: 158231 - RNA, 83 nt, Homo sapiens
gacgcaggggcccggaagggaaacgcgaggcgaagggaccggggaccgagacccagagaaaggccacgcgagccaggcaggga

SEQ ID NO: 158232 - RNA, 82 nt, Homo sapiens
ccggcccagcgacccgaccccgcgcgacgacccgccgccgccgggcggagcaccgaacgaccggagcgagcacagaggacac

SEQ ID NO: 158233 - RNA, 81 nt, Homo sapiens
cgggcgggcgggagcgcccaagggggcggagagcggggggggacgaaagcaagaagacacaccggaaagccaggcacccgc

SEQ ID NO: 158234 - RNA, 53 nt, Homo sapiens
cagacgcagggcgcccccgacacaacagcaggcagcccgcccagcggcacgcc

SEQ ID NO: 158235 - RNA, 73 nt, Homo sapiens
ccccgagaggggaacagacgccaagaaggccagaggcacacacaagcaaggacccaagaacaacccaaaaccg

SEQ ID NO: 158236 - RNA, 85 nt, Homo sapiens
agaggcggccagaagaaaacgaggggcggaacacccgccaaagcagagaaaagccgaaaagcccgggccagccagagcagggcag

SEQ ID NO: 158237 - RNA, 83 nt, Homo sapiens
cagccggaaaggagagcccagaaggcgggccaccacaagggcccacacaccagagcaagaacagccacggagaaagacacacg

SEQ ID NO: 158238 - RNA, 59 nt, Homo sapiens
ccacaaaggcagacacaaccccagcgaaaggccagagaaggacaagaagccaagccgaa

SEQ ID NO: 158239 - RNA, 70 nt, Homo sapiens
agggcaggcgggccagagaaaaaagaggggaccgagagccccgaaacagagcaggccagccacgaaaaga

SEQ ID NO: 158240 - RNA, 64 nt, Homo sapiens
gagccagcccggaagcgaaaaggggagaagcagaccgcaccaggcgggaccccgaaaaagccca

SEQ ID NO: 158241 - RNA, 70 nt, Homo sapiens
ccagcggcgcgaagcgaaaccggggccaaacggaacagccccaagccggaaacccaggaacggaaacaga

SEQ ID NO: 158242 - RNA, 58 nt, Homo sapiens
gcccccccccccgcgacgcgccagaacacaaacaaaaccggaagaggccgaagaacgc

SEQ ID NO: 158243 - RNA, 71 nt, Homo sapiens
acacgagccagagaagagggcaaccagggagaggagccgcaagccgaacaaggacccgagacaaggaaaac

SEQ ID NO: 158244 - RNA, 89 nt, Homo sapiens
ggagcaggagcaggagcgggagcgggaccccagcaggagcaggagcgggagcggggcacacgggccacagaggaccagcaaggagaaga

SEQ ID NO: 158245 - RNA, 62 nt, Homo sapiens
aacgggacacaccagacgcccaggcccaccaccaagcaaaccaggcgagacagcaggagcac

SEQ ID NO: 158246 - RNA, 74 nt, Homo sapiens
gagagaagaggagagagaagaccagcggacaagcggaggccgaggcaagcaagaccaagagagccaccgaagcg

SEQ ID NO: 158247 - RNA, 63 nt, Homo sapiens
cgaaacacgcgaccaggcagcaaggagagacaggggccaggccaggggcaggggaagcaccca

SEQ ID NO: 158248 - RNA, 67 nt, Homo sapiens
ggggagagccacggaagccgacagacaaccaggaccgaaggaaaaaagacgcacgaagagaagaagg

SEQ ID NO: 158249 - RNA, 71 nt, Homo sapiens
gaaccagggaaaagaccgaaaaaggccgaaggacacaacacagccggacggcaaacaaggccagcagagcc

SEQ ID NO: 158250 - RNA, 83 nt, Homo sapiens
acaaccgcagcagggggcagaacccagaggcgggaggggccgggaggcagaggggcaggggaggagagaaagaacccacgcag

SEQ ID NO: 158251 - RNA, 75 nt, Homo sapiens
gggcagacaacaagcccaccggacccgggcgagcggggcccggcgcacccaccaccgccgcccacggcagcccag

SEQ ID NO: 158252 - RNA, 74 nt, Homo sapiens
ggcccccacaccacacagagagcgaaagcacaccagcccgaaacccgacaggaaggaaggaaccaagcacccag

SEQ ID NO: 158253 - RNA, 78 nt, Homo sapiens
agaaacaacgccagaaggaaaaagggacccagagggcaacccacagacagagcagcccgacggccaggaggcgaagag

SEQ ID NO: 158254 - RNA, 77 nt, Homo sapiens
agggggccgggcagccgcggacccgccaagaagcgcccacgcagcagccggggacaaagccgcgaaaaggaacccac

SEQ ID NO: 158255 - RNA, 86 nt, Homo sapiens
cagagaccaggcccgaggcaggacgaggagcggaggcggcagcagcagagaagagagcgcaagcgggaagcggaagaccgagcgag

SEQ ID NO: 158256 - RNA, 76 nt, Homo sapiens
ccacgggaaaacacacaccagaggagcggagcaggggacgggggagcgagacggggccaaaccacgagggacccag

SEQ ID NO: 158257 - RNA, 73 nt, Homo sapiens
cggcaagcgcgcaggcgacccccggcagccaggcgcaccaggagggagaggcgcacacaggaaagacaaccag

SEQ ID NO: 158258 - RNA, 77 nt, Homo sapiens
cgagcgagggggggcgcgccggaaaccggagcgcgcagcagcacacaaacgaaggacaaaacaggcaagcacgggca

SEQ ID NO: 158259 - RNA, 74 nt, Homo sapiens
acaaaggacaccacgcagagccagaagaaggccagggaggggcaagcggaaccagagcagagcgaaagcaacgc

SEQ ID NO: 158260 - RNA, 98 nt, Homo sapiens
cagacaaggcaaagcgaaaggcaccgcaacaacgcccagcgagggcgcacccccgagagagccacggaagggcgccaaggagccaccgccaccacggc

SEQ ID NO: 158261 - RNA, 76 nt, Homo sapiens
gcagccaccagcagcccccagagcgggaccacagaaaacaaccgcaacgcccgacaccggcgggccggggcacaga

SEQ ID NO: 158262 - RNA, 77 nt, Homo sapiens
accaaaaaacgagagacagaagccaaagaaaggaaccgacccacaaccagaggaggaaacaggcccagggggaccag

SEQ ID NO: 158263 - RNA, 78 nt, Homo sapiens
ggggcaaagccagaccagcggccgggggcagaccccagcccacaacccacgcgcaccggcagcaggcgagaggcagaa

SEQ ID NO: 158264 - RNA, 78 nt, Homo sapiens
gcacgcccggaacagcaggggcaccggacaagcagcgcaaccagcggcaacaggagcagggagacgggcaaggacgcg

SEQ ID NO: 158265 - RNA, 37 nt, Homo sapiens
gcgaagcaaggagaaaaggggaagaacaggcagcaca

SEQ ID NO: 158266 - RNA, 74 nt, Homo sapiens
acggagccagcccaacccgagggccggaacacggcgccagcgggacgccgcccgagcaaaggcagaggccaagc

SEQ ID NO: 158267 - RNA, 59 nt, Homo sapiens
gccagggcgcggggccgcggccgcgcgagcagcgccgcgggacccgacagcccacgcgc

SEQ ID NO: 158268 - RNA, 60 nt, Homo sapiens
caaaggcgaagagcaaagcccagggcacgggcccagaaaacgcaaacccggcggagggca

SEQ ID NO: 158269 - RNA, 82 nt, Homo sapiens
aaaaggaaagcaaggagaaccaggggggagcaggcggagccaggggccgggggcaagaggagagagagcggagacaaggcca

SEQ ID NO: 158270 - RNA, 75 nt, Homo sapiens
aggccagacccgaaggccaggagacccgaccccaagcgcgccgcgcgccgggagaggcccggggcccgccggcgc

SEQ ID NO: 158271 - RNA, 76 nt, Homo sapiens
agaagaggaccgaaggaccacaagcccaagcagccacaaagacaccaaagcaaaacagagagccgggcggggcaga

SEQ ID NO: 158272 - RNA, 75 nt, Homo sapiens
acgggacagcgaagagacaggaagcaccaaccccgcgaaacccaggacacacagggccacagcagccaccacaga

SEQ ID NO: 158273 - RNA, 81 nt, Homo sapiens
gcgccgcaagggaccaccaccgcgcgggcggaccaccccacaaccaccccagacaggagcgaggagcagcggaggaggagg

SEQ ID NO: 158274 - RNA, 77 nt, Homo sapiens
agaagcaggcggcggaaacccggagaaacaggcgccaaacgacagagaccccaccacgggccggcgaacaccgagac

SEQ ID NO: 158275 - RNA, 68 nt, Homo sapiens
ggcggaggacggaaccaggggagagcgacccaaacaaaggggaaaacgacccccaggaaaaagaaaag

SEQ ID NO: 158276 - RNA, 53 nt, Homo sapiens
caggaccgagggccccgccagagaggaagaagacacggaccgacggacgggaa

SEQ ID NO: 158277 - RNA, 70 nt, Homo sapiens
ggcaaagcgagaaccggaaaacgacgccccaacggccaaacaaacccgaccggagagcggaagaaggggc

SEQ ID NO: 158278 - RNA, 73 nt, Homo sapiens
cgcagagcacaccggccaacagacgagccacccaaggccgggaccccaccagcgccggcagggccaaggggca

SEQ ID NO: 158279 - RNA, 71 nt, Homo sapiens
aaaggggaccaggcaaagagggggggcgggcagggcccagcgcccaaccccgccggacagcacagcacacg

SEQ ID NO: 158280 - RNA, 84 nt, Homo sapiens
gcgaggcacgcaaccggggaaggaggagacgcgaaggaaagacccgcaggagcggaggaggcagaagaccggaggcgagaccag

SEQ ID NO: 158281 - RNA, 81 nt, Homo sapiens
cccgagcacccccgcggcggagccgagccgaggcccggcggcgcaccgggcggcaggaccgaaggagaagaaggagaaggg

SEQ ID NO: 158282 - RNA, 56 nt, Homo sapiens
caacgcaaagaaaaagaccaagaagaccagggacgcgagacagaggcgaaaacgaa

SEQ ID NO: 158283 - RNA, 79 nt, Homo sapiens
ccgggacagccacacccacgaagcaggccagaagccccccagaccgaggccagaaaagggcggggcaccggcgacagcg

SEQ ID NO: 158284 - RNA, 68 nt, Homo sapiens
caacagacaccaaaaacaggcgccagggaagacaggcgaccaggcaccggccagggccggccacagcg

SEQ ID NO: 158285 - RNA, 75 nt, Homo sapiens
gccggggcacgaccacacgccggagcgcgcggaaacgaaaagagacagcagggcaaaacgggccacacacagggc

SEQ ID NO: 158286 - RNA, 95 nt, Homo sapiens
gagcggcggcgcaccaaccgcgcgcaccgccgacccggaagaccgccgccgagagggcgcaggcccaagcggcaaaccggcacaaggaccccgcc

SEQ ID NO: 158287 - RNA, 35 nt, Homo sapiens
ggggacccaccgggcaggggggaagaaaagaaggc

SEQ ID NO: 158288 - RNA, 56 nt, Homo sapiens
aggagggacgcgcaggcccggcacccaaaggccccacgggacagcccaccggcgcc

SEQ ID NO: 158289 - RNA, 67 nt, Homo sapiens
gggcacacaagaggaggcgcagggagcaggagaagcggagcgaaggggcgggcaggcagaggcggcg

SEQ ID NO: 158290 - RNA, 66 nt, Homo sapiens
caccccccaggcaggaaagagcggacgggagaaagacacagcccacacccagggaggagcacaaac

SEQ ID NO: 158291 - RNA, 59 nt, Homo sapiens
cgggaggagcgggagcgcgcgggcagccgggggaccggaaagggaagccccacgggccc

SEQ ID NO: 158292 - RNA, 108 nt, Homo sapiens
ggccccggccccagacgaggaccaggccgggaggaggacaacacccaacaacacaagggaagccgcccggacaggacggagcagcagaaagaaggacgcccgacgcca

SEQ ID NO: 158293 - RNA, 58 nt, Homo sapiens
gaccaagaaccagagaaagagcggcgagggagaccgaggaacacagcgaaaacaaaga

SEQ ID NO: 158294 - RNA, 70 nt, Homo sapiens
gaccggcaaagcgccagagaacaacaaaggagccccaggaagccccaacagaagagggaaaagcacaccg

SEQ ID NO: 158295 - RNA, 78 nt, Homo sapiens
gcccagccccaggcacagaccccagcgaggagaacggcagcagccaccaccaacagccacaagggcaccggcacaccc

SEQ ID NO: 158296 - RNA, 74 nt, Homo sapiens
gcgcaaaaacaagacggggcgccccacagaggggcgacgccgagaaccgggagaagggaaggccgcgccaaaca

SEQ ID NO: 158297 - RNA, 74 nt, Homo sapiens
ccgcccgacacaccggcacgaaaaacccgcaggcaaaaggaagaaacagaagagaagaagacgccgcaaagaac

SEQ ID NO: 158298 - RNA, 82 nt, Homo sapiens
gggcccaccaagaccccccccacaaaagagaccagcccccggccccggcccaccacaaggagggacgagaacccccgcgaac

SEQ ID NO: 158299 - RNA, 87 nt, Homo sapiens
gagagccacgacgccgggaccgggaccgccgccgccgccgccaccaggaccgcaccagcaggggcccgaccaggaggcccggaggac

SEQ ID NO: 158300 - RNA, 85 nt, Homo sapiens
cagagaaaccaaaaaaaggcaaaggaaaggcaaaacaggaaaggaaccagaggccgcagagaaaaagcggagcaaggaaacaaag

SEQ ID NO: 158301 - RNA, 69 nt, Homo sapiens
caggcacgccccaaaacagacgccgaaaggagcgaaggcaaaccagaggaagagggagagaagacaagg

SEQ ID NO: 158302 - RNA, 84 nt, Homo sapiens
gccgcaggccacccgggaacggaggaggggaaaaagcaaaagggcccaaggcccgaccaggaacaaagagagaaagacagccaa

SEQ ID NO: 158303 - RNA, 56 nt, Homo sapiens
ggcagcaggaagcacggcgggcgaaacagaaacccgagaggagcaggagcaaccga

SEQ ID NO: 158304 - RNA, 71 nt, Homo sapiens
acgagggaagccaccaacaggaggaaacaaccaggacacgcaggaaaagacaccgaagccagcggccgcag

SEQ ID NO: 158305 - RNA, 70 nt, Homo sapiens
cgggcgaagagcccccccccaaggccgcaggaagcacaagaaaaaaaagaggaaggaaggggcagggaca

SEQ ID NO: 158306 - RNA, 66 nt, Homo sapiens
gcaacgccgccacacccggagaccccaaggagcggcggcagaaagccgaaaaagaagaaaccacga

SEQ ID NO: 158307 - RNA, 55 nt, Homo sapiens
gcccgacaccgcgggccgccagacgggaaggggggaaaagcaagcgaaacgccgc

SEQ ID NO: 158308 - RNA, 72 nt, Homo sapiens
agacagaacaggaaaaagggacgaacgacaccgggccccccccggcgaggacccacgcgcagcccaagaaga

SEQ ID NO: 158309 - RNA, 61 nt, Homo sapiens
cgccacaaagcccagcggccaaacaaccacaagcggagccagacagacacagcacagcagc

SEQ ID NO: 158310 - RNA, 75 nt, Homo sapiens
gcccagccccgcagccagggcgaacccccgcaggaaaagagaaggggcagaaggaaggggaccaagccaacccac

SEQ ID NO: 158311 - RNA, 72 nt, Homo sapiens
ggacaacacaggaaggggggacggcggaccaccggcgcgcagcaacaggggaaccagaagaggccaaccagc

SEQ ID NO: 158312 - RNA, 52 nt, Homo sapiens
aaagggccaaagaagggagagaggaagccaaaggcagagaagcgacccggcg

SEQ ID NO: 158313 - RNA, 76 nt, Homo sapiens
aacagacagaagggaggcaaagaaaaggagaaaagaagccaaagggacacggaagaccgcaggaaagcaggaaggc

SEQ ID NO: 158314 - RNA, 73 nt, Homo sapiens
cccagaggcagggggcgacccgaacccaaaggaggaaacagcggcaagccacagacggacaagagaaaggagc

SEQ ID NO: 158315 - RNA, 69 nt, Homo sapiens
cacgcgcggaaggcagcgcccagcagcgcaggaaggccaccccaaaaagcggggacgaagcaccgcaac

SEQ ID NO: 158316 - RNA, 67 nt, Homo sapiens
ccagaaaggcaagaaggaaaccgagaacaacgaagagaaaaaagaccccaggacaacaaggccccag

SEQ ID NO: 158317 - RNA, 75 nt, Homo sapiens
ggacccaaggcgcaacaagggaaacacaaaccacccaaacaagggaaggacaggagagaaaagagggagggaagg

SEQ ID NO: 158318 - RNA, 70 nt, Homo sapiens
ggacaccaaacaccgccgccggacccagcgggcccgaaagccacagcgccaccacaccgggcgacacgcc

SEQ ID NO: 158319 - RNA, 78 nt, Homo sapiens
acggcggagcagggagcccaaagaccccggagacagacaagcagaccggaagaccgacggaagaccacaccccgaggg

SEQ ID NO: 158320 - RNA, 66 nt, Homo sapiens
agaaaccggaaccacacacaccacaggaagccagcgccggcgaaagcaacgaagggacgccagaac

SEQ ID NO: 158321 - RNA, 109 nt, Homo sapiens
aaggaacccaagcagggcgaagggaacgcaaggcccccgaccacacgcccgcgcgagaaccccaggaccccagcgaacccggggccagacgacagcgaggaccaaaaac

SEQ ID NO: 158322 - RNA, 67 nt, Homo sapiens
gccaacggaccccgaggacaggaaaaacaggaggaagcggagggcaccacggggaggaaccaagcgg

SEQ ID NO: 158323 - RNA, 61 nt, Homo sapiens
aagaaacagggaagacaaaggcacaggaccagaggaaggcggggaggcggaagaccaggag

SEQ ID NO: 158324 - RNA, 82 nt, Homo sapiens
caaaggaccggacccagagaagaggaaaaccaccgggcagcacaacaaagagagcagggagagaagggggagaaaaggaaca

SEQ ID NO: 158325 - RNA, 66 nt, Homo sapiens
agggaacccggcaccgccccaggccagaagcggacccagaagaggggagcagcaaggaggaagaca

SEQ ID NO: 158326 - RNA, 55 nt, Homo sapiens
cccagagggagcggcacccggcccgcaacccacgggcgggcccgacccgaaaagc

SEQ ID NO: 158327 - RNA, 72 nt, Homo sapiens
gcagggccaagaaagccaaaacagggagaccaagacaccccacgaaagaaaccgacgggaagaaacagagag

SEQ ID NO: 158328 - RNA, 66 nt, Homo sapiens
gcacggagagaagagaggagccagggccagcacgcgcggccccccagcagagcacaccggaaccac

SEQ ID NO: 158329 - RNA, 75 nt, Homo sapiens
agaggagaagacaccaaaaagcaaacggaccagaccgaccaccaaaaaggagacacaccgaagaaacaacagaga

SEQ ID NO: 158330 - RNA, 87 nt, Homo sapiens
gaaaaccagcagccaaccagaaaggcgcaccgcagaacgagacgggcacgggaaggccaaagagcacagggacagaaaaacagcgca

SEQ ID NO: 158331 - RNA, 69 nt, Homo sapiens
cggaacaaggaaccgacgcaggaggcagaaaacaccagagaccagacccccacggccccaaccgaaagg

SEQ ID NO: 158332 - RNA, 73 nt, Homo sapiens
aacaagcagcaaaaccagaaacaccccagaaggagcgaacgaagaggcacacaaggaaagaaccccggagaag

SEQ ID NO: 158333 - RNA, 73 nt, Homo sapiens
gcccaccagcagggcacacaggaaggaacaggaggaaaccacagaggaagcaaaggaagggcaacaaccccag

SEQ ID NO: 158334 - RNA, 39 nt, Homo sapiens
gaacggccagggccgccgggccccgggaccaaggacacg

SEQ ID NO: 158335 - RNA, 62 nt, Homo sapiens
cgaaacgccgcacaaaaacaaggcgcggcggcggagcggcgcccggaccgacaggaaagaag

SEQ ID NO: 158336 - RNA, 85 nt, Homo sapiens
cacaaaagagcagaggaggaacaccaggcacaaggggaggaacgcaagcggggagaacagaaaccagagaggacagggggggacg

SEQ ID NO: 158337 - RNA, 72 nt, Homo sapiens
acaacaacaaggcaacaacgaccacccaagcaggcaaaacaagggagagaggggcagaggcccaaccacaaa

SEQ ID NO: 158338 - RNA, 77 nt, Homo sapiens
cagcggagcgaacccgagagcgggagcgggcgggccaggcccaagccaggaccacgcaccgggaggggaagcgcagg

SEQ ID NO: 158339 - RNA, 65 nt, Homo sapiens
cacgggggaccaggaggagcggcaggacaacaaccggagagaggcggaaacagcagaagagcgcg

SEQ ID NO: 158340 - RNA, 69 nt, Homo sapiens
gcggcaaacggcagagcaggccgcggcgacccagcgaggacggcacaagcaggaaggggagacaaaccg

SEQ ID NO: 158341 - RNA, 75 nt, Homo sapiens
ccggcccggggcggcgccgaggggaggaggcggaagcccgggcccgccggccacaccacacgcccccgccgccca

SEQ ID NO: 158342 - RNA, 82 nt, Homo sapiens
ccggccccacacgaccggcccagcgcaaccaagagaaagaaaggagaagcgcagggagacaagaaagacagagcagagagca

SEQ ID NO: 158343 - RNA, 74 nt, Homo sapiens
accaccacaagacaaaggaacgggggacccacggggcagggacgacgcaccaggccgagccgcaacgcaagcgg

SEQ ID NO: 158344 - RNA, 71 nt, Homo sapiens
gaagccacacgcaaagaaaacaaacacggcccaaaagaacgaccaaaccaagcacaacccacgacgagggg

SEQ ID NO: 158345 - RNA, 59 nt, Homo sapiens
ggcgagccgaaaagcgagcgcgaggaaaaggcggcgggagacggggagcaggccgggga

SEQ ID NO: 158346 - RNA, 91 nt, Homo sapiens
ggagagaagaaaccgagggagggagagagacagcgacgagagagaccggagaggggagagcaaaagggagaccacaacagccaccaaacag

SEQ ID NO: 158347 - RNA, 52 nt, Homo sapiens
gcagggcgcccccgaaaggcaccggcaggccggcggaaaagacccagacagg

SEQ ID NO: 158348 - RNA, 76 nt, Homo sapiens
agggaaaccggaaagcaaaccgcaaagaagagacccagacgaagagcgcacagaaagagggaaaacaaagaaccaa

SEQ ID NO: 158349 - RNA, 80 nt, Homo sapiens
gagcgaacgaccaagaggggcgacgcagagccgagcgaagcacggagcgcgccccaccgcggccgccggggacacagagc

SEQ ID NO: 158350 - RNA, 87 nt, Homo sapiens
gagcgcgcggccgggagcacgggcgccggcaagacaagaggcagccagcggacgggccacccagaggagaaggccaccccgccggag

SEQ ID NO: 158351 - RNA, 77 nt, Homo sapiens
acggacacggacggcgcgccgcgaccccagccggcgccgagggcggaaccgagcgggaaaagagagacaagcaccgg

SEQ ID NO: 158352 - RNA, 52 nt, Homo sapiens
agaaacaaaagcaggcaaaggagcggggaacaggggagaccggaaccaccgg

SEQ ID NO: 158353 - RNA, 70 nt, Homo sapiens
ggcgccgcccggccgcccgcgcggaccacccccacgaacgaggggagacgagggacaagagaaaaaaagg

SEQ ID NO: 158354 - RNA, 77 nt, Homo sapiens
gggaggacagagaagaggacgggaaaagagagaaggacaaggacggagagaagagacagagcccacagaggaacaca

SEQ ID NO: 158355 - RNA, 71 nt, Homo sapiens
gaaaaagccaaaagaggaaacgagccgccaaacaggaggcgaggagcccgagcaggcgcagaggaccggaa

SEQ ID NO: 158356 - RNA, 67 nt, Homo sapiens
cgcggacgaccgcacgggcagagaaaaagggaggcaaggaagcggagacgacaaagcggacggggaa

SEQ ID NO: 158357 - RNA, 66 nt, Homo sapiens
gggcggaggcgcggggccacgcccagggaggggaacagaccgaggacagcggccaggcgcagaaga

SEQ ID NO: 158358 - RNA, 71 nt, Homo sapiens
gcgaagcgggacagaacagccaccaaaacagaaggagcaaccaccagacggcaggaagcaaaagccagacc

SEQ ID NO: 158359 - RNA, 76 nt, Homo sapiens
cagacggccgaggaaagacacgacgccacagcaacaagcagggcgagcggagaaacggccgacggcacaagaccgc

SEQ ID NO: 158360 - RNA, 77 nt, Homo sapiens
aaggccacggagccaagagaacaaggaagcagccaaggccgaaccggggcagcgcgcaaggaggagcagcgagagcg

SEQ ID NO: 158361 - RNA, 94 nt, Homo sapiens
ggaaggcaagaaaccagaaagagaacgggacaacaaaagagccacccaagacaagccaggagcccggaagacagccgcagggcagacaccacac

SEQ ID NO: 158362 - RNA, 75 nt, Homo sapiens
gaaagcgcccacgaaaacggcaggacacggggaaagaagaacccaccaaaagcacacagcgaaccgaagaaacac

SEQ ID NO: 158363 - RNA, 70 nt, Homo sapiens
acaggccaggccacacaagccccagccaaaaccaggcccaagcgggggcgagaggaaaaaagagagccaa

SEQ ID NO: 158364 - RNA, 77 nt, Homo sapiens
ggaggagccccggccgcggccccgccccgggcccgcgggcccgccggcgggcagcggacaagcccaaccagggacca

SEQ ID NO: 158365 - RNA, 67 nt, Homo sapiens
ggagaacgagcccaacagcaaagggaggcagcaaggccaagaaaaccagaggacaccaccgggcacg

SEQ ID NO: 158366 - RNA, 77 nt, Homo sapiens
gacgaaaggagaccgcgccgaggagggaaaaccagacaaggaaaacagaaggagaaaacagccagcgcaagggaagc

SEQ ID NO: 158367 - RNA, 73 nt, Homo sapiens
acaggaggaagacagcggcggaccacagacaaaggaaccggcgaacccgaacccaaaaaacagccacaacgga

SEQ ID NO: 158368 - RNA, 83 nt, Homo sapiens
gaaacgggccgcgaaccgcagacagcggccaagaagacacaaaggacggaggcacggggcggggagcggaccccgggccgggg

SEQ ID NO: 158369 - RNA, 76 nt, Homo sapiens
cccccgcgcccgcagcgccaggcggcggcgcccaggcccaggaggcaagagcgagaagagcgcaagacagaaagcg

SEQ ID NO: 158370 - RNA, 65 nt, Homo sapiens
caaaagacccaaaccacacggagcaaagagcccccgcaccaccagcccgcaaaacgagaaaggcc

SEQ ID NO: 158371 - RNA, 71 nt, Homo sapiens
gaagccaggggcacgaaaccggcaaaccggaagggaagcgcgaacaagggcccggagagcaaacgaccgcc

SEQ ID NO: 158372 - RNA, 85 nt, Homo sapiens
aggcggcaaaaggcggaccgcccccgccaacgaagaccgagaccaggggaggggcgaccccggggcccggccagcacgaccgagg

SEQ ID NO: 158373 - RNA, 83 nt, Homo sapiens
caggccagacccgaaggccaggagacccgaccccaagaacacaggcagcaccccaacgcagccccgcccgccgcccccacggc

SEQ ID NO: 158374 - RNA, 111 nt, Homo sapiens
ggccggaggaccacaggcccagacgagcggaggaggcacagggcgcggaccgcacgagcgcgcacgagccagggagccgccgggaccggcccgggagacgacaacccaaac

SEQ ID NO: 158375 - RNA, 82 nt, Homo sapiens
cacggcaccgcgccggaacgaggagcgccggagacaaggccgccccaaccgccacacagagccacgacgccacgaccaccgg

SEQ ID NO: 158376 - RNA, 71 nt, Homo sapiens
aggaaacagacaaccaccccaaggggcccaagagagcggaacaaaaggaaggacgcagcagaccagcgcgg

SEQ ID NO: 158377 - RNA, 63 nt, Homo sapiens
cccgaacccgcaggcccccacacagcgaaggcaccagccgggagggcaggcagcaggcaagac

SEQ ID NO: 158378 - RNA, 81 nt, Homo sapiens
aggacagccgagcagcggccaaaccgcagacccagagacagggaaggagccccacgaggaccggagcccccacccgagcaa

SEQ ID NO: 158379 - RNA, 74 nt, Homo sapiens
gagacgcaaggagccaccagcacggaccaggaggcgagcaacaggcagccaaacgggccggcaggacaggagac

SEQ ID NO: 158380 - RNA, 73 nt, Homo sapiens
aaacaaacagccaacagaccaaggaagagcaacccacagagagagaggaaacgaagggagcgacacacaccca

SEQ ID NO: 158381 - RNA, 97 nt, Homo sapiens
cgaccccggacccagcgcggagcccggccagggccgagccgaggcacccccgcccccgagagccgggaggaggagcgaccgagggcccggggggcgg

SEQ ID NO: 158382 - RNA, 79 nt, Homo sapiens
ccgcgccagcgcccagggggggaaaccaccggaggccagcaagcgcacccagccacacccgacaccagccagcccagac

SEQ ID NO: 158383 - RNA, 36 nt, Homo sapiens
ccacggccaaccacagaggccagagaacccaaaagc

SEQ ID NO: 158384 - RNA, 113 nt, Homo sapiens
gcacaccaggcacccgggcccagccgggaacccccacgcggccagcgaaaacgcccaggccccagggaaaggaccgaggcaggaaagaggccagacgcagggaccggcaccga

SEQ ID NO: 158385 - RNA, 78 nt, Homo sapiens
accccgcccgagcccgccggaccccccgacccaggaaccgacaaaagccacgaaaaagccagacaagcacagccagag

SEQ ID NO: 158386 - RNA, 83 nt, Homo sapiens
gaaccacggacaacccagaggacaacgaaggcgcggagcacacagaagccgcgcagacacaccacggcccgagcccagggccg

SEQ ID NO: 158387 - RNA, 34 nt, Homo sapiens
gaacccccacaacgaagcaggaaaagcgagaacg

SEQ ID NO: 158388 - RNA, 41 nt, Homo sapiens
gagggaaaagaagcccaaagaaaggcgacacaccaaagaaa

SEQ ID NO: 158389 - RNA, 77 nt, Homo sapiens
cacggacacccgccccgacccgggcgaagaggcagagcccgacggcccagagggacggccaaagaacgagagaacaa

SEQ ID NO: 158390 - RNA, 74 nt, Homo sapiens
gacgggccccaacacccagagacgaaaggccaaagagcacagggacagaaaaacagcgcagacgagccgcaagg

SEQ ID NO: 158391 - RNA, 73 nt, Homo sapiens
gaccaaaaccgcgaccaagacagccccaaacaacccaacccaaacacaacagggagaaagcgacgagaggacc

SEQ ID NO: 158392 - RNA, 50 nt, Homo sapiens
cgcccgcccccacccgcggcagcgggcccagacccacaaccagcaacccc

SEQ ID NO: 158393 - RNA, 73 nt, Homo sapiens
aggccaacacggaggaaaaaggaggggaccgaggaacggcgaaggcacaagagaggcagaaagaaacgaaaaa

SEQ ID NO: 158394 - RNA, 73 nt, Homo sapiens
ccaccccacgaacccaccgcgacccggccacgccgccccaaggaggggccacggggccggggagccaccagga

SEQ ID NO: 158395 - RNA, 78 nt, Homo sapiens
ccaagggcgcgccccccaccagacggagccccgaggagcaggaaaccacaaccagaggaagagacagccgaggacaga

SEQ ID NO: 158396 - RNA, 76 nt, Homo sapiens
ggaaaaccagagaaacaagaggaggagggccgcggagaaccgaaccaacagccagccaaagccaggcagcacagca

SEQ ID NO: 158397 - RNA, 78 nt, Homo sapiens
agcagccgccaggccggccggagccgagcggagagggcgagcccccgggcccagggcgcacggcaggacgagcccggg

SEQ ID NO: 158398 - RNA, 74 nt, Homo sapiens
cgcgcaggcacaaagaccagggaacaaaaccggaccagcacgacaagcgcgggcgagacacccaaaccagcgca

SEQ ID NO: 158399 - RNA, 71 nt, Homo sapiens
aaccagagcgccacccaggaggcggagcggcaaaaaccggcgggaaaccaacccgcaaggcagaaccagca

SEQ ID NO: 158400 - RNA, 78 nt, Homo sapiens
acccagcgagaccgggccggaacgaaagcaggacggaggagcgaccaccgaaacgggggagaaggaggaacacaaaga

SEQ ID NO: 158401 - RNA, 72 nt, Homo sapiens
gggggagcgacagaccagaagccgacgcgagaggaagacacccgaccgacaaaaggcagaccggagaaagac

SEQ ID NO: 158402 - RNA, 68 nt, Homo sapiens
cccaggcagacagagggggacggaggggcaacacagaggagggaagcggacacacaggacgagaaacc

SEQ ID NO: 158403 - RNA, 61 nt, Homo sapiens
aagaaggcaaggagagaagagaagaacagcacaggacaggaccagaagaacccaggagaag

SEQ ID NO: 158404 - RNA, 71 nt, Homo sapiens
aggggaacccggaaagagaggccacgcacccaaggcagagagaacacaagcagcgcgaagagaacgccaag

SEQ ID NO: 158405 - RNA, 39 nt, Homo sapiens
aggcgcaacagagcgccggcgaggacagcagcggacggc

SEQ ID NO: 158406 - RNA, 82 nt, Homo sapiens
gggccaccaagcagggcaacgcggacccgggagaacaccagggccggaggaaccacaccggaaagggccacaaaccaaaggg

SEQ ID NO: 158407 - RNA, 87 nt, Homo sapiens
gggagcgccgcgggaagggcggggagcggagccaggccccgccaaggcaggaaaggaaagagacaaagaaaggccgacagagcaaac

SEQ ID NO: 158408 - RNA, 50 nt, Homo sapiens
gggcacggggggcgacggccaagcgaggcccagaaacaaagacgcaaacg

SEQ ID NO: 158409 - RNA, 61 nt, Homo sapiens
gggagcccgcgcccgccgcgggagagagggccaagccgcccgccaaccggcagcgccgacg

SEQ ID NO: 158410 - RNA, 62 nt, Homo sapiens
gaaccgaaccgaggcaaaagaaaggacagggacaagcgcacagcggagaaagcagcgcggcc

SEQ ID NO: 158411 - RNA, 69 nt, Homo sapiens
gaagggagagagaccaaagacgagagccggacacaagagggcaagaaaggcgcgacgggccgaaaaggg

SEQ ID NO: 158412 - RNA, 49 nt, Homo sapiens
accggcgcccggacaacccggagaagcgcccgggaccacccgagaccca

SEQ ID NO: 158413 - RNA, 38 nt, Homo sapiens
aggcagcaaaagagcccagaagaggcaccggacgaaga

SEQ ID NO: 158414 - RNA, 98 nt, Homo sapiens
gccccgccacgccgcccgcgccgaggacgcggagcccagcaaggaagagcaacgcaaggaaaaagaaaagacaaagagagcaggagccgcagaaaggg

SEQ ID NO: 158415 - RNA, 79 nt, Homo sapiens
accagcagcccccagagcggaacacagacagccgacgccagacaggagggccaacgacgagcggaagcccaaggagcgg

SEQ ID NO: 158416 - RNA, 71 nt, Homo sapiens
gaacaagcaacggcagaaaagcggccgcaaaacggagcgaacacaggcgagagcgaaaacgaacagaaaac

SEQ ID NO: 158417 - RNA, 52 nt, Homo sapiens
agaaacaacagacagcgggcagccggccagggcgggaagcggcaggcagaga

SEQ ID NO: 158418 - RNA, 64 nt, Homo sapiens
ccgccccggagagcggcgaggcggcagccacaggacggcccagaccggcgccacaagaccacca

SEQ ID NO: 158419 - RNA, 107 nt, Homo sapiens
gccgggcccggaggacaggaccgcgcgacggccggccgacccgggccggccgcgggagcaggcgaagacgaagagcaacagacacaggagcacgggcacaaggcacc

SEQ ID NO: 158420 - RNA, 82 nt, Homo sapiens
accggacacagcggaggagaagcgcaggagaaagggggacacgccagcggcgcagccgacggaagaccgggagacaaaacaa

SEQ ID NO: 158421 - RNA, 73 nt, Homo sapiens
gaggaccccgggcaaggcccgaggcaccaagcccgccggaaaaagacaggccagagcagccaacaagaacaca

SEQ ID NO: 158422 - RNA, 88 nt, Homo sapiens
cagacagacgcgcaggaagaagagggaagccaaggcacaggggcccgacccagcaggacagaaagagaagcgccccagcagcaagccg

SEQ ID NO: 158423 - RNA, 74 nt, Homo sapiens
cggaaaacccgcgaaaccaagggccagagacacaccccaccagagggggagcgagccgaggaggagacaacagc

SEQ ID NO: 158424 - RNA, 78 nt, Homo sapiens
cgcaggaggacacaggcacagcggggaaaaccaaaacgccaggaaggcgaaaccacagaacacgaacccaagacgcga

SEQ ID NO: 158425 - RNA, 71 nt, Homo sapiens
ggcggccgggacggaggacgcgcagaaagaaagccaagcacacacgaagacgcccgccacagcaagacacg

SEQ ID NO: 158426 - RNA, 64 nt, Homo sapiens
gggccgagaaggacaggacaggcgaaaccaaccaaacgccccaccagccacagcggcagaacaa

SEQ ID NO: 158427 - RNA, 80 nt, Homo sapiens
gaggccagaaaaggaaacgaccccggccgagcgaggagcaaggagaaacagaggggggggcaaggagccccaaaggagac

SEQ ID NO: 158428 - RNA, 70 nt, Homo sapiens
gaaggcgcaaaagaacgagcaaaggaaaggccacacacaaaaaggcagcacagcaggcgacaagaaccaa

SEQ ID NO: 158429 - RNA, 56 nt, Homo sapiens
ccccggaacggcaccacaagacccgaaggaagagggaacgaaaaagaagagaaaac

SEQ ID NO: 158430 - RNA, 78 nt, Homo sapiens
gcccacggacaacccccagccaaagcaaggcggcgggcagacaaccgcgcagcgccgggcggacgacgaggcaggcgg

SEQ ID NO: 158431 - RNA, 73 nt, Homo sapiens
gggaccggcgccacagcagggacgaggagcgccgccgccccgagcccgccagagcaagacccacgaagggcac

SEQ ID NO: 158432 - RNA, 116 nt, Homo sapiens
ggagcaaagcagagcgggcaggacaaccaggggaccagagaggacggcaccagccaggagacccggccgaaccacgcgcgcaccgcggaacggggagaagaaccacgagggccaga

SEQ ID NO: 158433 - RNA, 52 nt, Homo sapiens
acgagagcgccacacacaagaacaaaccaggggagggaaacgagaaaaacga

SEQ ID NO: 158434 - RNA, 71 nt, Homo sapiens
gaggaagaggagaacacgcacggcaaaggaacgagaaagagacgaagaacggaagcgccccagaggagagg

SEQ ID NO: 158435 - RNA, 66 nt, Homo sapiens
caacagccccaacccagaaagcagaggccagagcggagacagacggacgcaacgccaaccacacaa

SEQ ID NO: 158436 - RNA, 111 nt, Homo sapiens
caacgcaagcgggcgggggacgaggacgacaccgaccccgccgagcggcgggcacaccccaacacccgccaccccgaggcaggaacagcacccggacggacacgagaccag

SEQ ID NO: 158437 - RNA, 73 nt, Homo sapiens
agaggaagcgcgaagacagcagaggaggaggaaaagaaggaagcaagaaacacggaggaaagcagacgaggaa

SEQ ID NO: 158438 - RNA, 57 nt, Homo sapiens
accagaaagcccccaaccaggacccaggaagcagccgacacgagcggcaaaaacagc

SEQ ID NO: 158439 - RNA, 104 nt, Homo sapiens
caaccgcaccccagccacaaccgcggaggcaaccgcgcccccagagcccagagaaggagggggcagagcacggcaggcagaaggggccaacccgggggaacgca

SEQ ID NO: 158440 - RNA, 75 nt, Homo sapiens
ccaaggggcggaagagagaaacaagccccggaagccacccaggggacccacccgcgcgcgggagcggggaacacg

SEQ ID NO: 158441 - RNA, 66 nt, Homo sapiens
cacggcgacgccccaggggaaaacccccgggaccagacccagaggagcccaagccaggaacacaca

SEQ ID NO: 158442 - RNA, 54 nt, Homo sapiens
ccacgagcggaagcacaacgggaagaaagagccaacacagacaagaccgaaccg

SEQ ID NO: 158443 - RNA, 73 nt, Homo sapiens
acgcacagcgaccaccaacagaccgaaggggcgggaagaagcccgccgccaccaccccaccaccagcgcagca

SEQ ID NO: 158444 - RNA, 66 nt, Homo sapiens
ggggggcggcggggcgggaggaacgggggagcccacaggagccagagccaacacccgaagcgaagg

SEQ ID NO: 158445 - RNA, 71 nt, Homo sapiens
gcacacgaaaacggcgcacaaaggggcccgagaaaaagaagcaggcacgaggaacagcagaagagagaaaa

SEQ ID NO: 158446 - RNA, 84 nt, Homo sapiens
aaggggagcagaaggaccggacacaggggccaaggggaaacgcaggaagaagccaaaaaaaagaagccagggaggagaggagca

SEQ ID NO: 158447 - RNA, 79 nt, Homo sapiens
aggaccagaagcccgcggagaaaaggcgacagcccgccaagacaggccgcgagcccacacaagacccggggccggaagc

SEQ ID NO: 158448 - RNA, 77 nt, Homo sapiens
cgcgcgaggggcgccgaagcgaggggggccaccacagagcccgcagggacacagcagaacaagcaacccccggcacg

SEQ ID NO: 158449 - RNA, 78 nt, Homo sapiens
agggagacagccgcccggccaagcacccgcagcagaccggccgaggacgccgggggacgagagggaagaacggccccc

SEQ ID NO: 158450 - RNA, 79 nt, Homo sapiens
cggagacagcggcacagagggccgccagaacaagcaaagagcggcaggggcccggaggcacgggcagccaccaccccga

SEQ ID NO: 158451 - RNA, 75 nt, Homo sapiens
cgggcagcgccagaccgcgacaggcccgaaaaaaacccaggcggcccaggacagagcacccgacccaggcggagg

SEQ ID NO: 158452 - RNA, 80 nt, Homo sapiens
ggaaaccaaaagcccaaggcccccggggcgcgcccggaggccagaaggagagaggcacggcagacacaccgaccagagga

SEQ ID NO: 158453 - RNA, 79 nt, Homo sapiens
gccaccacaggaagcgcggaaggcgaggagagcaggcaacgggaggggaagagcgagggcgcgcgcggcacacgagcaa

SEQ ID NO: 158454 - RNA, 91 nt, Homo sapiens
cgaccgaggccccccgaaccccaaggccaaccgcgagaagagacccaggcagagagaagggaagaggcagaacgcaagcaaagaacgccaa

SEQ ID NO: 158455 - RNA, 75 nt, Homo sapiens
gacaaggaccacagccgagcgagagcaggaagacgggggggggacaacagcaacaagaagaccagagaaaagaag

SEQ ID NO: 158456 - RNA, 80 nt, Homo sapiens
ggaggaagcacacccgccagggacgggcacgggaagggaaagcacaaggcagggaggagaaccccaagagcaccaaaagg

SEQ ID NO: 158457 - RNA, 78 nt, Homo sapiens
cggacggagcgaaaggcggaaggaggacccgggagcgacgccgacagcgaagcgagcgaaagggacagagaagaggac

SEQ ID NO: 158458 - RNA, 73 nt, Homo sapiens
cagagcccagggacacgaagagagaacacagagaacccagaggaaagggcgcccccaagcccacagcgaagaa

SEQ ID NO: 158459 - RNA, 76 nt, Homo sapiens
ggcgggcgcccccggcgagagcccggaccgaggggccgcccgaccgacccaccaaaagagcggagcaagaacccaa

SEQ ID NO: 158460 - RNA, 80 nt, Homo sapiens
ccaccgaggaagagcgggagaaagggagagcgagaaaacggcgccaagaaaagagaggcaccacacggcccgccgacgac

SEQ ID NO: 158461 - RNA, 75 nt, Homo sapiens
caaaacggcgcgagagcggggacccgcgggacccgcagccccgcgcgggcaccagacgcaccacgacggggaaga

SEQ ID NO: 158462 - RNA, 90 nt, Homo sapiens
gccaccagccggcagcccggagcgcccgcgccagccgcgcacaacggggcaccgagccggcgaggggaagccagagccagggccaacgac

SEQ ID NO: 158463 - RNA, 71 nt, Homo sapiens
cgcacaagacggacgaaagccagagaaaaagcggagaaaaggcacggcacaccggcagcaccacaaaccga

SEQ ID NO: 158464 - RNA, 65 nt, Homo sapiens
agagcaggcgcgccaacacaagagaaacaccaaacaaggaaaggcgccgaaaaggggggaaggga

SEQ ID NO: 158465 - RNA, 86 nt, Homo sapiens
cggcagccacccaccgccgccgcccccagacaagcagaccggaagaccgacggaagaccacaccccgagggagcccaggacaccac

SEQ ID NO: 158466 - RNA, 36 nt, Homo sapiens
gggccgccccaggacaaaagagacggggaccggagc

SEQ ID NO: 158467 - RNA, 73 nt, Homo sapiens
aaagagaaggcaacaaggcacacaagcggggaggaccccagaccacggagaccggaaaccgagagaaacgaag

SEQ ID NO: 158468 - RNA, 72 nt, Homo sapiens
ggacaagcgcacggcgagaaacagccaacacaaaaagcggcaggaggaaagggccagcccccggcccaggag

SEQ ID NO: 158469 - RNA, 76 nt, Homo sapiens
cggacaagcccccagccagccacaagaccccgcccgaggcaccaccgggcagcgcagaacccggagaggaggaaca

SEQ ID NO: 158470 - RNA, 56 nt, Homo sapiens
caaacaggcgggaggaaggaaacacagccagcaccaaccaagcaccacgccacaca

SEQ ID NO: 158471 - RNA, 72 nt, Homo sapiens
cacccaggaccaacaaacagccaagagcccgggaaaaaaaaggagaaacaaccaaaacgaagaaaagcaaaa

SEQ ID NO: 158472 - RNA, 82 nt, Homo sapiens
gggccacagcacgcagccccaggcaggaaacccagcggcggcagaaccagccggcacaaagccgaaccagagagagcaacgc

SEQ ID NO: 158473 - RNA, 58 nt, Homo sapiens
agggaaaacccgaccgcagaaaaccagaagacagcaagcagaaaaaacagcaaaccaa

SEQ ID NO: 158474 - RNA, 70 nt, Homo sapiens
ggagggacacacccaagcacggaccaaaaaagagaccaagagcaaagaggacgagcaaagcacaagaccg

SEQ ID NO: 158475 - RNA, 84 nt, Homo sapiens
gacccaagggaaccaacagcaggggcccgaggcagccgggagacagccccccaggaaccgcgccgcgagaaacaggcagcaagc

SEQ ID NO: 158476 - RNA, 74 nt, Homo sapiens
acaacccggcgccagagccggaccggcagaaaggaggacggaaagacaaacgaagggaacaggcgggaaggccc

SEQ ID NO: 158477 - RNA, 81 nt, Homo sapiens
ggagccgcagggagccggcccggcccgcggacgccaccaagccgacgagaagcaggaaggaaccggagacgcgccccgccc

SEQ ID NO: 158478 - RNA, 82 nt, Homo sapiens
gccggaggggcaacaccgaacgaacacccaacaagccgcaacgaaaaccggaaaaggggccgaggaggaagcccacaggcac

SEQ ID NO: 158479 - RNA, 58 nt, Homo sapiens
caggagcaccacacagaaaggacaccagaggaccagaacccacgagaaacagacgagc

SEQ ID NO: 158480 - RNA, 84 nt, Homo sapiens
gcgaaggccgggacccggccccggcccacaggggggggcaaacccgagagaacggggccgccgggcagaagcacgaggacgagg

SEQ ID NO: 158481 - RNA, 86 nt, Homo sapiens
caaggcgggaccccacacggggcagcgaggccggccagagaacccggagagaccaagccaggcagacacggggccccccaggaggc

SEQ ID NO: 158482 - RNA, 73 nt, Homo sapiens
cgcgaacacagagggaagagaaagcaaacgagcagggcaaggcgagcggccggaagaagaagaacacaggcca

SEQ ID NO: 158483 - RNA, 70 nt, Homo sapiens
accgaagcccgcgcccacagcgcgacaagccagaaaagaggccaaacggagcgagcaacgagacacacag

SEQ ID NO: 158484 - RNA, 67 nt, Homo sapiens
agaaggaaagggaagaccaacagggagcgaacgaagaaaggccaagagggagagacaaggagaaccc

SEQ ID NO: 158485 - RNA, 77 nt, Homo sapiens
gagcccagcgcgcagcccggaccagccaagccccaacggcccccgcgccgggcgcagcgacagcccaccgaggaaga

SEQ ID NO: 158486 - RNA, 68 nt, Homo sapiens
acgcagggcgcccccggacccaaagacaggaccacgcaccagcagagaaggaaagcaaaccgaagcag

SEQ ID NO: 158487 - RNA, 72 nt, Homo sapiens
ccgggccagggacacggccaccggcagggcaagacggacgagacgcgcgggcagaggcagaacggcgggagg

SEQ ID NO: 158488 - RNA, 77 nt, Homo sapiens
gcggccgcaccggcgccccacccgcccccgcgggcgccgggccaggacggagaccgcggccaggagccaagaagacc

SEQ ID NO: 158489 - RNA, 70 nt, Homo sapiens
accagcacaacagggaaagggccagcccgcaacccccggcgaccacgggcccggcaacagcgcagcgggg

SEQ ID NO: 158490 - RNA, 73 nt, Homo sapiens
aaccacacacaccacaggaagccagaagaagaccaaaggacaaaaaagacggagagagaacaggccaacggga

SEQ ID NO: 158491 - RNA, 83 nt, Homo sapiens
gcggcggcgccggccccggggagaaacgggggaccacacaacgagggaagagcgcaccacgcgaaccgcccccccaccgggaa

SEQ ID NO: 158492 - RNA, 71 nt, Homo sapiens
acggaaggggcacacccgccgaggacggcacccccggaggaaacaaccacagaccacgcgggcgcggagac

SEQ ID NO: 158493 - RNA, 78 nt, Homo sapiens
ccaagagggaaggagacagggaagcaaagcgcaacagaaacagagagacagcaaagcccgcgacacccgacgaggcgg

SEQ ID NO: 158494 - RNA, 72 nt, Homo sapiens
caacgagaacaaagggccgggagcgagaaaagccccaagcacaccaaagcgaagcacagccccacgagccac

SEQ ID NO: 158495 - RNA, 70 nt, Homo sapiens
gaccgcgacacgagcagcgcagggaagcaagagcaaggaccacaggcaaacaaagaaccacggcaagcag

SEQ ID NO: 158496 - RNA, 63 nt, Homo sapiens
aggccgcgggcaccgcaacacagggggcggcagcgcgggcagcgacaggagacgagacaagag

SEQ ID NO: 158497 - RNA, 82 nt, Homo sapiens
gcagaacgcaacaccaaggcacaccaccccagagaaccgcagccagaagcaaagcagacagacgcgaaaagacagcccaagc

SEQ ID NO: 158498 - RNA, 74 nt, Homo sapiens
aacagaggcgacgggaccagggcgagagagaagagccccgaacacgacacagaccccggccggaacccagggag

SEQ ID NO: 158499 - RNA, 66 nt, Homo sapiens
ccgggaagcccccagcggaggagaaggaaaagacaggacacagaacagagaagaagcagacgagac

SEQ ID NO: 158500 - RNA, 73 nt, Homo sapiens
gccagacaaccggagccacgccccacgaccgccaggcgaagccgacgagcccgaacagacgcaccagcgggag

SEQ ID NO: 158501 - RNA, 74 nt, Homo sapiens
acccacacgaccagcgccggagggcaccgggcgaccaggggcacccagccccaggacgcagaacaagccaaaaa

SEQ ID NO: 158502 - RNA, 115 nt, Homo sapiens
ggagaagcgccccggagcccccgagaagccccacagggcggcccccgaaccggcacggagcaacccccagccacaacgcgaaccgggcggacgaaggaggcggcaacaggacgaa

SEQ ID NO: 158503 - RNA, 80 nt, Homo sapiens
cgaggcggcgagagaggcaggcggagccgaccgggccagcaggaaaaccgaaagcgccaggccagcgaaggagagaagga

SEQ ID NO: 158504 - RNA, 127 nt, Homo sapiens
cagccgccgcaaggacaccgagaccacagcagccaccgggagcccacacaacagcccagcgaccaggcacaacgagacccggaggagacagaccccaggcccggacgagccccggggggcgaaggga

SEQ ID NO: 158505 - RNA, 60 nt, Homo sapiens
ccgggccacacgggcggagagcgcgccgcccagcacaggggaggggcgaccccggggccc

SEQ ID NO: 158506 - RNA, 67 nt, Homo sapiens
aacaggaacagacggaccgccacgaccaggagccaggccaaggggagcaagcggggagacagagccg

SEQ ID NO: 158507 - RNA, 85 nt, Homo sapiens
caaaaagaggcgaaaggaagcaagcagcagaagagccaaggaaaaacagcaagaacccaaaaggacagcacacagaaaggaaggg

SEQ ID NO: 158508 - RNA, 75 nt, Homo sapiens
gggagcaagaagcaggaaaggccggacaccagggcggagaacggaaaagcaccaggaagcagagaggaccgcaga

SEQ ID NO: 158509 - RNA, 39 nt, Homo sapiens
gacgagaccaccggcaacacgaccgccccgagccagagc

SEQ ID NO: 158510 - RNA, 77 nt, Homo sapiens
gccgccggcgaaggaggaggcggccggcggaaaaagggcggaagaaacgaaggaagaagaggcgggggggccgagca

SEQ ID NO: 158511 - RNA, 79 nt, Homo sapiens
ggaagccacacaggccagaacgagggagaaaaccggaagagaaaggccgggaagcaggaaagaaaaaaacaacagagga

SEQ ID NO: 158512 - RNA, 88 nt, Homo sapiens
ccgagcggccccaacaggcccgccgcgccgggccagcggcgccgccgaagaacgaagcgcgcggcaggcgcgcgccgccccaggccgc

SEQ ID NO: 158513 - RNA, 83 nt, Homo sapiens
gcggcggcagcggagagcgagagaggggagcagagagcggaagccggcagaagaagacccaccaaggggcaacccaccgcccg

SEQ ID NO: 158514 - RNA, 89 nt, Homo sapiens
ggggagcgaaggcgaggggcagcggcaggagagccggccgcgacaggacgggaaagggagcagcaccggccacacccacagcacgaccg

SEQ ID NO: 158515 - RNA, 84 nt, Homo sapiens
cgcgcggcaccccggccaccggcaggcagcagagcgggagcgacagggagaagaagcgaaggaggggggacaaacaacgcgacg

SEQ ID NO: 158516 - RNA, 75 nt, Homo sapiens
acggacccaggggaaagaaggacggacacggagccaaggcgcaaaaggcagagaagcagaagcggcccaccagag

SEQ ID NO: 158517 - RNA, 72 nt, Homo sapiens
acgaacgcaaggcggacaagagagggccagcggagagagagcacagaccacagagaccgggaggcagcaacc

SEQ ID NO: 158518 - RNA, 80 nt, Homo sapiens
ggccgagggcaggggaagacggaagaaggagacgcgcccgccggaaagcacagacaagcagcagggaaaacgacacagcc

SEQ ID NO: 158519 - RNA, 82 nt, Homo sapiens
aagaaaaacggagaaaaacaacaaaaggaagaaaaccgcaggacagggaggaaggcagagggggcgagggaggaaagggggc

SEQ ID NO: 158520 - RNA, 54 nt, Homo sapiens
cggcccagccccgacacaggcacacagagaaaaaaagggaacaaaacacagcaa

SEQ ID NO: 158521 - RNA, 73 nt, Homo sapiens
agcgaccaggggcgagagcgggcaccccccaaacgacgcagccacggagagcccccaaaacacaagaggacgg

SEQ ID NO: 158522 - RNA, 71 nt, Homo sapiens
gagaccaccagaaggcccgcaaccggggccgccccgcagggagaggagcacggcagccaggaggccgaccc

SEQ ID NO: 158523 - RNA, 84 nt, Homo sapiens
gacggaccacaagacgcacccacacacccaccccgaagaacagaaaaagcagggcacaagacacgggaccaccacccaaggaac

SEQ ID NO: 158524 - RNA, 54 nt, Homo sapiens
ggaccagaacggaacaggccggcggccccaccccccaggaaagcccaggaaaga

SEQ ID NO: 158525 - RNA, 77 nt, Homo sapiens
aaaacaggcaagagagaacaacaaaggcacaaaccgcaccacaagaagggcgggggcaggcaaaccaggcgagacag

SEQ ID NO: 158526 - RNA, 75 nt, Homo sapiens
ccccggcccgcgacaaccaccacagacaaacgggagcacggcccaggcagccaagaaggcagagagacacacaag

SEQ ID NO: 158527 - RNA, 71 nt, Homo sapiens
ccgggcacagccggaaagcaggaccgcgacggcagcagagcagccaacagacccacacccagaaaaaaccc

SEQ ID NO: 158528 - RNA, 41 nt, Homo sapiens
acagacaaccccggggcgaacggacgagggcgaggccgcga

SEQ ID NO: 158529 - RNA, 76 nt, Homo sapiens
ggaagcacggccaccccccaacagccgagggaagggccaggaacaacacgagaaagagagacgagcgcacagccga

SEQ ID NO: 158530 - RNA, 88 nt, Homo sapiens
gacgacgcaccgcaggcagacaaaagggccaaagaagggagagaggaaagggagaagaggacagaaaaagaccagacgcggaaaaaga

SEQ ID NO: 158531 - RNA, 77 nt, Homo sapiens
aggagacccgccggagaagaacaaaccaacaaagaaacagccggaaaagcacgagcacaagacgaaaacgacacgcc

SEQ ID NO: 158532 - RNA, 79 nt, Homo sapiens
cgaggaggaagaagcagcgcggcggccacacccggagaggggaaaagagacgcaaaccacgaggacagagaagagagaa

SEQ ID NO: 158533 - RNA, 62 nt, Homo sapiens
cgccggaccccgccacggaaagagaaagcgagacacgcagcagcccgcaaaaccaaaaaaac

SEQ ID NO: 158534 - RNA, 80 nt, Homo sapiens
gggcagcaggagacggaggaccagaacacggcaccgacgcgagaagcggaccggaggcggggcgcacagggcacccccgc

SEQ ID NO: 158535 - RNA, 77 nt, Homo sapiens
cgggcgcccgggccgcgcggcgccgcgccggcggccgccagcagggaaaagccaccgaccacacgccacaaacccac

SEQ ID NO: 158536 - RNA, 79 nt, Homo sapiens
cgaccaggggagggaagcccagaacaggagccgaaagacgagaagaagaaaaaagaacaggacagccaaaaagaaaacg

SEQ ID NO: 158537 - RNA, 85 nt, Homo sapiens
cggccagaggaccaggcgaccagcaccagcccgaccagagaacggacgaggcagagaacagaaagaaaagagccccagaccagcc

SEQ ID NO: 158538 - RNA, 64 nt, Homo sapiens
gcaaagccagcgacagaagccaggagaacggaagccagagaaaaggaagagagagcaagagagg

SEQ ID NO: 158539 - RNA, 70 nt, Homo sapiens
gaaacaaggcgcacaaaaagaccagaaaagggaccaaccggccacccaggaaagagacagggccaccagg

SEQ ID NO: 158540 - RNA, 70 nt, Homo sapiens
cacagcacagcagcaccacagagcaaaaaagcagacccgcagaccaacgaaaaccacggcgccacgaaga

SEQ ID NO: 158541 - RNA, 84 nt, Homo sapiens
cgaagcgaggacacacccaggaaaagaccaggacggacaagcacagccggaagaaaggaggcaaacgaccaaacacggcccccc

SEQ ID NO: 158542 - RNA, 55 nt, Homo sapiens
cggagcagggcaacaaggagcgcgcaggggccgacgcccggaaacacaggggggc

SEQ ID NO: 158543 - RNA, 78 nt, Homo sapiens
gcacccgccagccgacgaaggggagccacaggagagcgcccagccaagaaggacaagaaggggagaagaaaagaaacg

SEQ ID NO: 158544 - RNA, 59 nt, Homo sapiens
ccagaaaaagacgacgcccggaagaggcgaaacgggagcccgggagaaagacaggcaac

SEQ ID NO: 158545 - RNA, 81 nt, Homo sapiens
gagggcgagcgaggaggaggcggagcggggcccgacgagaccagaagcgagaagggagcacgagcggaggaacaaggacag

SEQ ID NO: 158546 - RNA, 84 nt, Homo sapiens
ggagggggcgaggcagccacgcaggcggggcccggagaccgaaggagcagacgaggcacgagcgccagcgcgagacagacgggg

SEQ ID NO: 158547 - RNA, 84 nt, Homo sapiens
accaaggaacaggggggaggagaggggaccaagaacacccagaacccagaagccaccaagagcagccgagggaacggcagaaga

SEQ ID NO: 158548 - RNA, 70 nt, Homo sapiens
cgaaggaacaaagccacgaaaaccaaagggggagaggcaccagcaacagaccaaccgcagcaagcacaga

SEQ ID NO: 158549 - RNA, 77 nt, Homo sapiens
ccacacccagcacaccggggggccaggcacacggggagacgcacgaccagaaaagaagcaagacaagaaacaagcca

SEQ ID NO: 158550 - RNA, 82 nt, Homo sapiens
caccgcgacccgggacccgcccgcccgcgggaggaaacagaggagagcagagggcggagcgcagaagcgagagaaaggacgg

SEQ ID NO: 158551 - RNA, 65 nt, Homo sapiens
gcaagaaaaggagccggaaacggacaaacaggaagagacccagacgaagagcgcacagaaagagg

SEQ ID NO: 158552 - RNA, 74 nt, Homo sapiens
gggcccaggagaaagccacaaaaagcaaagcggaggaccaaaggaagaggaaaaggcgaacggcgggggaagag

SEQ ID NO: 158553 - RNA, 79 nt, Homo sapiens
ccacccagggcaaaccccgccagaggcacacacggaggaggaagccaagaacgggagcgaagccacgcagcggcaccaa

SEQ ID NO: 158554 - RNA, 75 nt, Homo sapiens
aacgagcccaggccacagacccacacgccggcggccaagggcccagcggcggaaaccggcaggaaccacaagccg

SEQ ID NO: 158555 - RNA, 69 nt, Homo sapiens
acgcagacggagcgcacgacaacaccggcaccgaagggagagcagaaaaaccacagaccaggacccaag

SEQ ID NO: 158556 - RNA, 72 nt, Homo sapiens
gcagggccagggcgcagacgccggagcagaagacagagggaggagggccacggacaaacacgggcccggccc

SEQ ID NO: 158557 - RNA, 74 nt, Homo sapiens
gcaacggagaaaacccggaaccgcgacggcggcagaaacagacagcaaaggagcgagcagcgccaagaggcaca

SEQ ID NO: 158558 - RNA, 79 nt, Homo sapiens
ccggaccaagagcggaacgccagccccggcacgcacccgacccaaagcaggaagacaggagcgcacccgagaccagaag

SEQ ID NO: 158559 - RNA, 57 nt, Homo sapiens
gcgcccggaacaggaggagaagagagggccaaaacaccagaccagacccaaccagcg

SEQ ID NO: 158560 - RNA, 72 nt, Homo sapiens
gacaagaagacgaagaagaggacgcgggagaaggagaagaagaaaaagaacaccaaacacaacaagacacaa

SEQ ID NO: 158561 - RNA, 86 nt, Homo sapiens
ccgccgccgccgcccccagcgccgccagacgaccgcgccacccgcagggcgcgggaacaggacgacacgagccgaccacaccgcaa

SEQ ID NO: 158562 - RNA, 57 nt, Homo sapiens
gaccagagggggacagcaaaacaacacagggcgccggaagagggaacgcgaagggaa

SEQ ID NO: 158563 - RNA, 75 nt, Homo sapiens
caaggggaaaccaggaagaccgggagcccacgcgcagagagcccggagaggacgacaggccaccgaaagacacag

SEQ ID NO: 158564 - RNA, 57 nt, Homo sapiens
cagccgccgccaccccgcggccgcacccccgccccagagaggaacgggccggcacca

SEQ ID NO: 158565 - RNA, 79 nt, Homo sapiens
gagggcggccggcgcagcccgaccagccaagagccggcggcagacgacaaggccaagacaggggacagccggccgaacg

SEQ ID NO: 158566 - RNA, 81 nt, Homo sapiens
gagggggggaaagaggcggcgggagacagcgccacagccgccagcaccggacacacaccaaacgaggaaagaaccaaggaa

SEQ ID NO: 158567 - RNA, 56 nt, Homo sapiens
ggaaaggacaaaaccagaagcaggggcaccacagacagaccgaaaaaacgagaaga

SEQ ID NO: 158568 - RNA, 74 nt, Homo sapiens
gcgccagaggggaggaaacacaagaagcaaaagcagaccggaaaacccaccggcaagaccacacccgaggggag

SEQ ID NO: 158569 - RNA, 63 nt, Homo sapiens
ccagacgagaacgagggcacaggcaggagcaagaccggaaagcccagcagaagccaccaagag

SEQ ID NO: 158570 - RNA, 67 nt, Homo sapiens
gaaacggagggacgcaaacaaaggcgcaggggggaagaagaaaacaaaccacacaccaagcacaaaa

SEQ ID NO: 158571 - RNA, 77 nt, Homo sapiens
cgccgcgcaccacagaggcaagacaagggccaacgcggcaccggccccgcccgccagcgaaccaacagagccggacg

SEQ ID NO: 158572 - RNA, 55 nt, Homo sapiens
acaagcagagccggcaccacaggaagccgagcaggaaccaaaggcgagacaccac

SEQ ID NO: 158573 - RNA, 77 nt, Homo sapiens
gaggacggggagggccggagccaaaaaaacaaacagaagaacaccaaagagaacagggggagaaacaaggcgaaggc

SEQ ID NO: 158574 - RNA, 64 nt, Homo sapiens
cccggagcgccggaggcggccgcaccggggggcaccagccgaagccaggcaagcaagaaccaac

SEQ ID NO: 158575 - RNA, 67 nt, Homo sapiens
acgcacacgaaacccacgacccaagaacggggaggggcaaccagaaggaacgaacagacccggccga

SEQ ID NO: 158576 - RNA, 83 nt, Homo sapiens
ccaaagccgcacccacggcacgaaaggagcagggacggggggaaaagcgcacccgggcccgggcgagaaagaagacaccaaag

SEQ ID NO: 158577 - RNA, 82 nt, Homo sapiens
aagggcaccacgacccgaaggcggagcagccgagaacgagccaaccagaaccaagccgccacagggagaaaagagcagaggc

SEQ ID NO: 158578 - RNA, 82 nt, Homo sapiens
acgggccccacgccggagagggaaaccagaccgggaccaagcagccacacgcaacaccccccaccacaaccaggccaacagg

SEQ ID NO: 158579 - RNA, 91 nt, Homo sapiens
ccaggcgggggggagagggcacaccagagacggcccgcggccggcgcgcaggaccagggccacagggcgccaagagcccagggcaccgccc

SEQ ID NO: 158580 - RNA, 75 nt, Homo sapiens
aaacaagggagacagccgcccggccaagcacccgcagcagaaaaggcccacggccagagaagccgaaacacagaa

SEQ ID NO: 158581 - RNA, 54 nt, Homo sapiens
gcagaaacgcagaagagaagaagggcacaggggcaggcggcgaaagagaacgcg

SEQ ID NO: 158582 - RNA, 88 nt, Homo sapiens
cggaacagaccgccggagagaggagggggccggccgggacgcggcccggagccgggaccgacacccacaggacagcacagagagggaa

SEQ ID NO: 158583 - RNA, 75 nt, Homo sapiens
aaaagacccaagaaagcacggacagcggaaaagcggccccaaggcgaacaaagaagcgccacgcagagagcaagg

SEQ ID NO: 158584 - RNA, 73 nt, Homo sapiens
agggagcagccgaccgagccaggacaaacaggaaagagaaaggagaccacaagaccccgcgccaccaaaggga

SEQ ID NO: 158585 - RNA, 65 nt, Homo sapiens
cggaagggaggcgggagaaggcgcaacgcggcgcaccccaagaagaagcggaagaggagccgcgg

SEQ ID NO: 158586 - RNA, 100 nt, Homo sapiens
gccagacccaaacggcagagacagcagaccaaagccaacccacaagaaaggcgggaagcggggaaaggaaaacaccagcacaccaaagaccggggccacc

SEQ ID NO: 158587 - RNA, 62 nt, Homo sapiens
acccgagcacacacccagaacagaagggaacaaaggcaacgaggaaccaggaggagaaggcc

SEQ ID NO: 158588 - RNA, 98 nt, Homo sapiens
cgaggacaagcaaggaccgcaggacccaggccagaccggagcagcggggacaggaaccccggccgggcgaagcggggaccaagcaagcaggaggggcc

SEQ ID NO: 158589 - RNA, 69 nt, Homo sapiens
gagagcgagacaccacccaccaccgagaagagcgaagaagggcacccgaggcgaggggaagccagagcc

SEQ ID NO: 158590 - RNA, 75 nt, Homo sapiens
aaccgccaaagccggccccggcaaggaggaaggggcgaaccggggccgggcagaagaagaagaccaaccgcccaa

SEQ ID NO: 158591 - RNA, 75 nt, Homo sapiens
gccaagaaccaaaaaggaccacgaagagccggcccaacagagaacggcaaacagcgagaaaccacagacacaacc

SEQ ID NO: 158592 - RNA, 87 nt, Homo sapiens
cgcaggcagcaccggaggcccaggcccggcagcccaacccagcaggacaagcccggcagagcccgaggcgcgccaggaacccgagca

SEQ ID NO: 158593 - RNA, 81 nt, Homo sapiens
agaaggacgacgccggcgcgaacaaaaacggcggaggcggaccggggggcccgggcccgccagacccgcagaccaccaacc

SEQ ID NO: 158594 - RNA, 46 nt, Homo sapiens
gaacgccaccccagagcgcagcaccgggcccaaccaagcaacaccg

SEQ ID NO: 158595 - RNA, 55 nt, Homo sapiens
accgagagcgcgaaacgcacgagaagacggaaggacagaacggaaaagagaaaac

SEQ ID NO: 158596 - RNA, 77 nt, Homo sapiens
cccccaaaggggaacagcaccgggcaggaacagcagccgccagccgggcccggccggaagcccagagagcagcccag

SEQ ID NO: 158597 - RNA, 68 nt, Homo sapiens
aacaggcaaagcgccggaagaggaggaggcagcggcagagaaggaggaccgcgccaccaggacggcac

SEQ ID NO: 158598 - RNA, 83 nt, Homo sapiens
aggccccgccaccccccaccggggacagagccaggacaaaaccaggcagaaccaacacgaacccaagcacaaacaagaaaacg

SEQ ID NO: 158599 - RNA, 77 nt, Homo sapiens
aagcagccgaccagccgcggagccgggggcaggcgagagggaagaacaggacgcaggagaagcgaaaccgaccgaac

SEQ ID NO: 158600 - RNA, 77 nt, Homo sapiens
ccagggaggagcggaggacggcagacccgcaaagggaaaggaagaggaagggaaggcagacaaagaacaggcaaaca

SEQ ID NO: 158601 - RNA, 74 nt, Homo sapiens
aggagccgaagaaggaagaaccacgaagaaacaccacaaaccggaccaaacgacccggagacgaaagcaaggaa

SEQ ID NO: 158602 - RNA, 68 nt, Homo sapiens
gaagagacagacaaggcaaagcgaaaggcaccgcaacaacgcccagcgagggacagaacacaggaaaa

SEQ ID NO: 158603 - RNA, 97 nt, Homo sapiens
aaaccagccacgcagaagagacaaggaccacagccgagcgagagcaggaagacgggaaagcgaacgcgaaaagaaaagccgagagcagccagaccgg

SEQ ID NO: 158604 - RNA, 76 nt, Homo sapiens
cacccaccacacaacaaagaaagcagggcgcaggcgaaaccgggccccaacagaggagagccagcaacggccccgc

SEQ ID NO: 158605 - RNA, 74 nt, Homo sapiens
gaagacaccggggacagacagggaacccgcgcccagaagggaaggccacggacggggaaacgcaaggcaacccc

SEQ ID NO: 158606 - RNA, 80 nt, Homo sapiens
aaccgaaggcggaacggacagcaaaaacacagggcagaccccgcaaaacgcaggggagcggagcaagaaaccaagacaaa

SEQ ID NO: 158607 - RNA, 73 nt, Homo sapiens
ggaggcggccgcggccccaaggagcggccgcgggcgcggccccgggccaccgggcgcggacccggcgcaagga

SEQ ID NO: 158608 - RNA, 67 nt, Homo sapiens
cacaaaagcccgagacagcgaaacgggcaagaacagccagcaggacaggcacacccgggcagcccca

SEQ ID NO: 158609 - RNA, 43 nt, Homo sapiens
cccaagaaaacccgagggcacagccagagaacaacacacacac

SEQ ID NO: 158610 - RNA, 45 nt, Homo sapiens
cggaacagcggaaccggagacaggcagaacagcgcaaaagagaac

SEQ ID NO: 158611 - RNA, 71 nt, Homo sapiens
aaggagaaccgcggcggcccggagccagagggaaaccgcaagaagcaagcgaacagaagcgcccgggggca

SEQ ID NO: 158612 - RNA, 60 nt, Homo sapiens
gaacaaagggagaagaggaagcccgacaacgaagaaaaggcgacggcggagacagaagag

SEQ ID NO: 158613 - RNA, 95 nt, Homo sapiens
caaacacaagagacagaaaaccaagcaaaaccaagcaaaaagggcccccacagacaacgaacgaggaagggagcgggccagagacaaacaccgcc

SEQ ID NO: 158614 - RNA, 98 nt, Homo sapiens
gacaaggagccgccgcaaacgaagcaaaggagaaaaaaaaaccaacacaagagaccacagagaacggggcgaaaacaaaacccgggcaggaagccaga

SEQ ID NO: 158615 - RNA, 76 nt, Homo sapiens
aaggaccaagaaccagccccacacagggagagaggaggggaccaagccggaggaggacacggcccgggggacccgc

SEQ ID NO: 158616 - RNA, 77 nt, Homo sapiens
ccggcaccggacaggcagcccaggacgggcacaacaccccgacccccaaggaggcagaggagccaccaggcacgcaa

SEQ ID NO: 158617 - RNA, 89 nt, Homo sapiens
gacaggagcacccaggaaggggcccagaagcagaaccaagagggcggcgacggcggcgcgaggaccgaccgggcccgcggacgaagaag

SEQ ID NO: 158618 - RNA, 75 nt, Homo sapiens
agggcagggagggccagcgccggggggcggacacgggagccagaagggccggggaggaaacaccaggccccccgg

SEQ ID NO: 158619 - RNA, 72 nt, Homo sapiens
gaggcacacacacaagcaggccaggaaacgggagaaaaacacaaagaaggaacagaacagacaccaccgaaa

SEQ ID NO: 158620 - RNA, 116 nt, Homo sapiens
gggcgcacggccaccagcaacggcgagggaccacagcgagaccgcgccggcgaccagcggaagcgaggccgaagacccaggagcgcaggagcagcaggcacgggccaccacccggc

SEQ ID NO: 158621 - RNA, 38 nt, Homo sapiens
ccagggcccccgacccaaaagccaggacacagccagca

SEQ ID NO: 158622 - RNA, 86 nt, Homo sapiens
gcggagaagcgcacccagaggagcgcgccaggagcggacccgacaaggcgaccagccagcccgggagacagagggagccagcagac

SEQ ID NO: 158623 - RNA, 68 nt, Homo sapiens
cagaacaggagaaaacacaaccgagacaccaaaaaggaacagaacccccacagcagcacgcaggcgcc

SEQ ID NO: 158624 - RNA, 76 nt, Homo sapiens
gagcagccaggagccgggccaaagggacgcgccaacaggcacaggagcgcccagcagccccaaggaggacgcagca

SEQ ID NO: 158625 - RNA, 70 nt, Homo sapiens
cccgccccggaacagaaggcgcggccgaaaaagaagaaacaggacagaggcaaaaaagcccaacaacacg

SEQ ID NO: 158626 - RNA, 57 nt, Homo sapiens
agaggggacagaaaggacggacagaaaggcccagaagagcgcgagccaaggaaagga

SEQ ID NO: 158627 - RNA, 70 nt, Homo sapiens
agaagggaacccaggaggaacaggaggagacaaccaccaccccaaagaaaaagaccaaaaagaccacagg

SEQ ID NO: 158628 - RNA, 79 nt, Homo sapiens
caccgaggcagaacaacaacggaaaaggagaagccaggcaagacaggccaacaccgccaccagagaaccacacaaagga

SEQ ID NO: 158629 - RNA, 37 nt, Homo sapiens
cggggaggcgcacacacaccaaagagagccaccaaag

SEQ ID NO: 158630 - RNA, 104 nt, Homo sapiens
gagcggggagccaaggaaacaggagcgaagcccagcgggccggacggggcggggggaacggagaaaaggacgacggaaccaccacgaaaaaaagcacacccaag

SEQ ID NO: 158631 - RNA, 60 nt, Homo sapiens
cgcaaccccaagcgcccaaaggccaggggcagccaaaggaagcccccccccagcacccgg

SEQ ID NO: 158632 - RNA, 84 nt, Homo sapiens
ggaaaacgcagggaagagaggacagcaggagggcggagacaacagaaacagaaacgagggaaacagcccacagaggaacacaaa

SEQ ID NO: 158633 - RNA, 78 nt, Homo sapiens
acaaacagcgacagacccgggccaccccaaaaaacacaaggggacaggcagagaacaagcaggaaagagagagacggg

SEQ ID NO: 158634 - RNA, 49 nt, Homo sapiens
aacaggcccaagcgaggaccacacgaaggggacgggacaagaaccacac

SEQ ID NO: 158635 - RNA, 80 nt, Homo sapiens
ggacgagcaaggaaacaggaaaagcaaccacgccaaccagccgaaggcacagaggcagcaggaagccagagccagccaga

SEQ ID NO: 158636 - RNA, 79 nt, Homo sapiens
ccgaagcccggagaaccgcgcagcaggaaaccccggggaaagggaagggagccgaagggacaggcgcaggaagaagaag

SEQ ID NO: 158637 - RNA, 67 nt, Homo sapiens
ccaggcacgacacagaacagaagaccaggacccaaaaagccccgaaggacgcgaaagggagccaccc

SEQ ID NO: 158638 - RNA, 69 nt, Homo sapiens
agccgcagacgggggaagccaggcaccccccacagaaagggcgcagaagaggaaccacccagaaagaaa

SEQ ID NO: 158639 - RNA, 36 nt, Homo sapiens
gcagggcacaccagagaacaaacgaggaccaccggc

SEQ ID NO: 158640 - RNA, 74 nt, Homo sapiens
gcaccagagcgggaagacacaaaagaggcacggcggcagacacaacagcaggcagcccgcccagcggcacgcca

SEQ ID NO: 158641 - RNA, 82 nt, Homo sapiens
gcagcccgcgcacagcgcccccgcccgcccccacccgcggcagcgccacgaggcggccccagcgcgggcgacaggccgacac

SEQ ID NO: 158642 - RNA, 71 nt, Homo sapiens
cccaggaggaggggaaaaaggacaaaggaaaaagaggaggaaaacagcagggacgaacaaaagcgagaggc

SEQ ID NO: 158643 - RNA, 69 nt, Homo sapiens
cagccggggccccccggagcgccggacacaagagggcaagaaaggcgcgacgggccgaaaagggacgaa

SEQ ID NO: 158644 - RNA, 74 nt, Homo sapiens
gaagaagaaagcaccgagagggggcggagacccaaaacaggagcccaccccggccccagacacagaaggcggga

SEQ ID NO: 158645 - RNA, 79 nt, Homo sapiens
cggcaccgccaccccacaggcccccaccaggccgcggcaggaaaggcagcaacaggggaagcggagggaggcaaagaag

SEQ ID NO: 158646 - RNA, 69 nt, Homo sapiens
gcccagggcccagaggaccccagccgcgcccgggagagcaagcccgacgaagagcccccaaaagcaccc

SEQ ID NO: 158647 - RNA, 74 nt, Homo sapiens
gaggacggcgccggcagccgggcggagaacggaaaagcaccaggaagcagagaggaccgcagaagggaaggaga

SEQ ID NO: 158648 - RNA, 82 nt, Homo sapiens
cgacaggacacaggagccaggcgagaagacgcaaacagcagacggaagaccccacggcaaaaccacacccgaggcgagccca

SEQ ID NO: 158649 - RNA, 77 nt, Homo sapiens
gcaggacggaaaaagagcagaccgaaaagcggcacgacaacaaaaccacagagaggggagaagcccgacagagaaag

SEQ ID NO: 158650 - RNA, 77 nt, Homo sapiens
caaagaggaagacaaaagcaaaacgcagcacagggaagaacagacacagcaccgacacgcgcaaaagcacgacagga

SEQ ID NO: 158651 - RNA, 34 nt, Homo sapiens
accgaaggaccaccccgagagagagggcgccagg

SEQ ID NO: 158652 - RNA, 113 nt, Homo sapiens
gcgagggagacccgaaaagcggggcccgggccccggcgcggccgcggcgggcggcccagccaaaccagaaaggggacagcggcgggcagggagcacggaaggaaccacaaggg

SEQ ID NO: 158653 - RNA, 81 nt, Homo sapiens
cgagaccgcggccgggaccgaggggaaggaagagaaccgaagaagaaaaccaaaaacgaaaaagcaagggagagcacaaac

SEQ ID NO: 158654 - RNA, 69 nt, Homo sapiens
gaggggagccggcccccgaaagagggaaaccaccccacccaacccccgacacagaagaggagaaaacgg

SEQ ID NO: 158655 - RNA, 64 nt, Homo sapiens
aaaaacaaggcaaacagacaacagaaaagaaggccccacaagaggcccaggacgagaagaggag

SEQ ID NO: 158656 - RNA, 57 nt, Homo sapiens
cccgccgggggagacgacccccgccagagggccgcgggggaagagcccggcccgggg

SEQ ID NO: 158657 - RNA, 74 nt, Homo sapiens
cgagaccaaggacgccaaagagaaacgcggaggagggggacgggcagaggggcccggggcagcggggaggaaga

SEQ ID NO: 158658 - RNA, 77 nt, Homo sapiens
gaggacccggccacaaaagccaccgggccgaacaggcacaaggaaaaaacacggcaggaacaagggcagaaaagaag

SEQ ID NO: 158659 - RNA, 74 nt, Homo sapiens
aaggagccagaagggaacggacaccgcaacgaaagcacgaaggacgacaaaagagcccccgaggaaagcacgca

SEQ ID NO: 158660 - RNA, 82 nt, Homo sapiens
aagaggccgcacacgcccggagcccgcaagggggagcgcgccggcggaccgcccgcgacaccagagaggacaaccaaaagca

SEQ ID NO: 158661 - RNA, 35 nt, Homo sapiens
ccccacacccacacgaccagaagcggacccaaaaa

SEQ ID NO: 158662 - RNA, 84 nt, Homo sapiens
caagcagggcaacgcggacccgggagaacaccagggccggaggaaccacaccggaaaccggagagcaaggggacccgcacacgc

SEQ ID NO: 158663 - RNA, 43 nt, Homo sapiens
ggcgccagcaacgcgagggcgacccagaagagcacgaccggag

SEQ ID NO: 158664 - RNA, 74 nt, Homo sapiens
acgggagagccgggccggcggacgcggcgccacgcagcagaccggagagaacagaaaaaaagcggcccgggacc

SEQ ID NO: 158665 - RNA, 56 nt, Homo sapiens
ccacgacagcccaccaggccaccacgcggcgggccggaggggaaagaaaaagagcc

SEQ ID NO: 158666 - RNA, 91 nt, Homo sapiens
ccagcgccggccgcgcgccgcgcccgcgccacagaaggacagaaaacgggccccagacacaagccccaccaagaggacaccccaggaacgc

SEQ ID NO: 158667 - RNA, 79 nt, Homo sapiens
ggccgagcgcgcgcagcccgcccgacagcgcacgccaggcggaggcagggcacaacacagccacgcagccgacccccag

SEQ ID NO: 158668 - RNA, 82 nt, Homo sapiens
caaccccacagaggaaaccagacccggaggaacggaccagagagaccccggagccggaggacggaggagagaagagagagga

SEQ ID NO: 158669 - RNA, 71 nt, Homo sapiens
aaacagcaagaacccaaaaggggagagaagaccggggaaaggagacgcgccgagaaccacgcacggcgacc

SEQ ID NO: 158670 - RNA, 56 nt, Homo sapiens
gcaacaccgcgagccgcgcggcgcggggccccgcggcggagacagagcgcggcacg

SEQ ID NO: 158671 - RNA, 71 nt, Homo sapiens
ccccacagcccacaggaggaccaaagggggcagaacgaggcaccggacacagggcaccgggagcaacacag

SEQ ID NO: 158672 - RNA, 70 nt, Homo sapiens
aaaaggaaaaacacgacggagaaaaacggagggagaaaaagcaagaggaaagcaggggacccgaagcccg

SEQ ID NO: 158673 - RNA, 75 nt, Homo sapiens
cccagcaggccgcggacagagaagaggacgcggagacaagagggggcaaaggacaaggcgggaggggcagaccgg

SEQ ID NO: 158674 - RNA, 88 nt, Homo sapiens
ccgccgccgccgccgccgggcgccccggcccggcgcgcccgccccggcagcgacaagagacccacccagccaacaaacacccgaagga

SEQ ID NO: 158675 - RNA, 79 nt, Homo sapiens
ggaggacaagaaggaggacggggcacggggcggcacgaccggggaccaccacccgggcccgggacgagcggcccagcga

SEQ ID NO: 158676 - RNA, 78 nt, Homo sapiens
ggacaacccagaggcaacaaaggcgagggcggagaacggaaaagcaccaggaagcagagaggaccgcagaagggaagg

SEQ ID NO: 158677 - RNA, 77 nt, Homo sapiens
aaaacacaacaagagggagccaggccagaaaacgggccacccacacagaaagccagggccggagggagaacagagcg

SEQ ID NO: 158678 - RNA, 83 nt, Homo sapiens
gggccgccgggccgaacccggcaccccggacaaagaccacgccacccagagggccgagagccggaagcagccgggcggccaag

SEQ ID NO: 158679 - RNA, 76 nt, Homo sapiens
caagacccgccagaacagcagagaaacagaaaacagccaaaaggacagggacagcaaaaaggagaaacgggcagaa

SEQ ID NO: 158680 - RNA, 82 nt, Homo sapiens
caaggagcgcgcccgccgcagcggagcgagcaaaggcggaggagaaggagcgaaagcgcggcgggcggccgagccgggaagc

SEQ ID NO: 158681 - RNA, 63 nt, Homo sapiens
gaaaagcgcagcgagcggagccgccggagagcccaggaaaccgcccgcagcagacggcaaacc

SEQ ID NO: 158682 - RNA, 81 nt, Homo sapiens
agcgacgggagagccccacacgcgacgacggcaagaaggaacagacaaaaacggccggaaggaaacacaggacaccaggga

SEQ ID NO: 158683 - RNA, 75 nt, Homo sapiens
ccgcagagccggaagacagacaaaacgcagcaggaagcagccgacacgagcggcaaaaacagcgaaaggagagca

SEQ ID NO: 158684 - RNA, 84 nt, Homo sapiens
agccccgcagcgcagccgccgaccacggcgacggacacgaggagcagaagcagagggcaccaacaaagcgccagccagcgggca

SEQ ID NO: 158685 - RNA, 75 nt, Homo sapiens
gaaaaacaaacacacgcaaaggagaaaggaaccgacaggcaggaaggaacggcaccgaggcacgggggcccggca

SEQ ID NO: 158686 - RNA, 76 nt, Homo sapiens
aaaacagcgaaaaacgaggaaagacagacccaccaaaccagccgaaaggggggaaaggaccggacgccagcccccc

SEQ ID NO: 158687 - RNA, 78 nt, Homo sapiens
ggggaagacccggagagcggaccaacgaggaacaggggaagacgggagcgccccagaaacccgcgccagagagccaag

SEQ ID NO: 158688 - RNA, 66 nt, Homo sapiens
gggagaaggcgcaacgcggcgcggcgaagcggccaggcccgggcggacgcagagccagagcgcccc

SEQ ID NO: 158689 - RNA, 84 nt, Homo sapiens
gcagcgacaagaacgcaggacggccgcggcaccgaaccacaaggaggacgagggaaccacggagaccagaccgcgccacaggac

SEQ ID NO: 158690 - RNA, 77 nt, Homo sapiens
aaaacccagaacacgggagaaaaaggaaaacgcggaaaaccgacacaacaggcaaagaagaggacccagccaggaag

SEQ ID NO: 158691 - RNA, 72 nt, Homo sapiens
cgacacgggggccagaaggaaagcaaggacacggcgcagcaacaaacagcggcgacaaaccgagacagcaca

SEQ ID NO: 158692 - RNA, 68 nt, Homo sapiens
gcaaacaagagaacgggcccacacaacccaggcaaccaacagacccacaggaaagagacagccccccc

SEQ ID NO: 158693 - RNA, 69 nt, Homo sapiens
ggaaacggcaccgacaacggcgggcacgagagcagacaacgaagagaggaaagaagcggaaaggaggga

SEQ ID NO: 158694 - RNA, 69 nt, Homo sapiens
accaagggccagacccgacgggagaggggcgacaggacgcaacacagcaaccaaccccaggcaaaagac

SEQ ID NO: 158695 - RNA, 78 nt, Homo sapiens
cgggcgcgaacaaaggcaaggagacaagcgagcggcaccggccaaaagggggcacggcaaaaggaagaacagcaccgg

SEQ ID NO: 158696 - RNA, 69 nt, Homo sapiens
aaaaccacgccggcagacaggccacgccgaccgcagccagggcgccaacggggagaaggaggcacaaga

SEQ ID NO: 158697 - RNA, 76 nt, Homo sapiens
gagagggcaccgcggacggggccgcccagggcaaagcaagcaagccggacaaagcacacccgcagcgccaagaggg

SEQ ID NO: 158698 - RNA, 76 nt, Homo sapiens
gaccagggccacccgcaggcccacaaccgggcgagaacgcggacaagcaaacaaagaggaaaaagagggcaacagc

SEQ ID NO: 158699 - RNA, 73 nt, Homo sapiens
gccgccacggggcgcgggaaaagccccgagaggaccacacaggcacaaaggagcaccaacggaccacgagcag

SEQ ID NO: 158700 - RNA, 88 nt, Homo sapiens
acgacggcgccacaccgagcgcgaggcgcggagagcaacgccgggacagcgcaagggcggcgcggcgggaggacacccggaggaggga

SEQ ID NO: 158701 - RNA, 72 nt, Homo sapiens
gacacaaacagaaaaggaagaaagggacaaagagaggagcagacgaaacgccaagagagaaacgaggcacaa

SEQ ID NO: 158702 - RNA, 62 nt, Homo sapiens
ggggcggaaacgcggggacgccacaaggacggacgcgccagggggacgcaacaacgcaagaa

SEQ ID NO: 158703 - RNA, 67 nt, Homo sapiens
ccagcagcaacgcacagagcaaggcgccacgcgaggcgggacagacaccaccgcgccaagaaaaacg

SEQ ID NO: 158704 - RNA, 82 nt, Homo sapiens
agccagcccagcgagccggcggcaggcagccggaacccacgcgggcgcgcccgaggacaggcagagccaccggcccaggcgg

SEQ ID NO: 158705 - RNA, 81 nt, Homo sapiens
cagaccacagggaccaaaaccgcagaaccaaggaaggcaccgcagagccaagaagaccacaaaacaaaccacccaacacaa

SEQ ID NO: 158706 - RNA, 62 nt, Homo sapiens
cccccaacaggaggaccaaggcgcacacccggcgcggaaccccggaaagccccggcgaagcc

SEQ ID NO: 158707 - RNA, 78 nt, Homo sapiens
gcacgagaagaccccacagcggggccacagcaagcccaggcagacaggggcaaggccgaggggaacagcacacagaga

SEQ ID NO: 158708 - RNA, 114 nt, Homo sapiens
cggaacagagaagcaacccaacagacaggcaaaagaaacagggaagacaaaggcacaggaggagacagcaaggaagaagaaaagagagccaaggcggcaaaacccaaaaccagg

SEQ ID NO: 158709 - RNA, 55 nt, Homo sapiens
gagcgccacgcgcggaaggcagcgcccagcagcgcaggaaacccaaaggagaccc

SEQ ID NO: 158710 - RNA, 70 nt, Homo sapiens
accgggaccccaagccaaagaacccacacaaggacaaggagcccaaaaggcagagcgaggagagaagaag

SEQ ID NO: 158711 - RNA, 79 nt, Homo sapiens
ggagggaaccgggcgcggcggccgaggccgggcaccaggacaaaagaagggcagcacaaaggaaagccccaaaccccgg

SEQ ID NO: 158712 - RNA, 56 nt, Homo sapiens
aaaggagcccacagaagccagaaaaggaaggcaggccggggggggcacagagcccc

SEQ ID NO: 158713 - RNA, 51 nt, Homo sapiens
caacccaacggacacggaacaccagaacaccagaagcagccgaaacgaacc

SEQ ID NO: 158714 - RNA, 50 nt, Homo sapiens
caagaaacaaagccggaagaacaaaaaggcaaggcccggcgaccacgccg

SEQ ID NO: 158715 - RNA, 81 nt, Homo sapiens
ggaggggaccgacgccggcagaacacgcgcgggaccccgggcacggcgcgcgggagagcccgggaccaaggcagcaaggga

SEQ ID NO: 158716 - RNA, 75 nt, Homo sapiens
ccaaaaaaacggcggaaaaaagcggagaagaggccagcgccccagcccgcccaaaggggaaacccacacccagca

SEQ ID NO: 158717 - RNA, 70 nt, Homo sapiens
acgcagagaacagagagaccagaaacagcaagcaccccagcccaaaggaaaggccagcgccggagcgggg

SEQ ID NO: 158718 - RNA, 68 nt, Homo sapiens
aaagacaccagccagcccgccaagcccgaagcggcggagaaaccaccacaaacacgaggccagcaacg

SEQ ID NO: 158719 - RNA, 73 nt, Homo sapiens
cgcgggccccagacacacaagcccagaacgaagaaaagacgagaagccccccgaggaaggcacacaggggggg

SEQ ID NO: 158720 - RNA, 65 nt, Homo sapiens
cccaaaaccagacaggaaaaaacagcaaaaaaccccaaacaagggagacaagcacaccagcaacc

SEQ ID NO: 158721 - RNA, 70 nt, Homo sapiens
caccgcaaaggaccacaaggaaggaggcgggaggaagggaagggaacggagacggacaggccgaaggacc

SEQ ID NO: 158722 - RNA, 81 nt, Homo sapiens
gcaggccccagacgccaccgcaggcaaggggcgggaccacccgcagagggagagaggacagcggccgggaagagcaccccg

SEQ ID NO: 158723 - RNA, 78 nt, Homo sapiens
cggacggaggagcaggcgagaagagaagcaaccagccgaaaaagcagggaagcagccacacacgggcaacccgagcac

SEQ ID NO: 158724 - RNA, 80 nt, Homo sapiens
ggcgaggacccaaaggggacaaacccgggagaacacccccccaggaggcgaggaaagagaaaggagaccacaagaccccg

SEQ ID NO: 158725 - RNA, 72 nt, Homo sapiens
cacaggcaacagcaagaaacggaaagacccgccaagagagaaaccaacaagcggaccgacagaacaagcgca

SEQ ID NO: 158726 - RNA, 62 nt, Homo sapiens
gcacaccaccggacaaccgacaaaaggcgcggagcccgccggccgccagggagcgcagcggc

SEQ ID NO: 158727 - RNA, 62 nt, Homo sapiens
ggaggaggacagggaaaggagcggggagccccgcgccacaggcagacggcagaaaacagacg

SEQ ID NO: 158728 - RNA, 70 nt, Homo sapiens
aagaacagacacaggcagcagggaggggcggcggcgaaaagaccaggaagacgcaaacacaaggaaggaa

SEQ ID NO: 158729 - RNA, 79 nt, Homo sapiens
ggaaccggggcagaggagccagcggaccgcggccggggacccccgggagaaaagccaaccgacgggccagagaggcaca

SEQ ID NO: 158730 - RNA, 71 nt, Homo sapiens
cccaagggccccagcccgggcccccaacgagccacccacgaagaggacagcccacccagaaaaggaaagca

SEQ ID NO: 158731 - RNA, 112 nt, Homo sapiens
gccaccagacgaggaagacccggaaacaggggccacggagccacggccacggccgcaagaaaaccgaggaggagcaccagcccagcccgacccccccccacgagaaggacga

SEQ ID NO: 158732 - RNA, 86 nt, Homo sapiens
gagccgcgaggacacgggcgcaaccgcagcacacagcgaccgggagaacaagacggaaaccaccggcacggcagcgggaaacaaga

SEQ ID NO: 158733 - RNA, 79 nt, Homo sapiens
aaggcagacgggagcgcaaggcgccccaaggccagacaaaacagcccgcggccccaaaaagcggcgcaagacggagggc

SEQ ID NO: 158734 - RNA, 77 nt, Homo sapiens
cgaggagccagacaagggacaaggcccggagggacaggaaagccagaaaggaccggagaccgccgacgcgccagggc

SEQ ID NO: 158735 - RNA, 80 nt, Homo sapiens
cgaccgagggcacggccgaggaccgccgaccagcgcaagccccggggcagagacacaggacacccacccgccggggacag

SEQ ID NO: 158736 - RNA, 86 nt, Homo sapiens
ggaggggcaaagccaagaggcggacaaaacgccaggcggaccagaaggccagcaaagaccaccccacacagaccgcgccccaggcg

SEQ ID NO: 158737 - RNA, 88 nt, Homo sapiens
caggcccaggaggacgacgggaccgggaccgcgcggacccggccgggagaagcagcagcgcaagcgccccagagcacacagcaggccc

SEQ ID NO: 158738 - RNA, 58 nt, Homo sapiens
aggaggggaaagaagggacaggacagccccggaacagagacagagacacggcacaccg

SEQ ID NO: 158739 - RNA, 78 nt, Homo sapiens
cacccgcgcgccgccgccgaggagaaagccacgacggaccaaccccagcaaaaccgggagaagggagaggaccaggag

SEQ ID NO: 158740 - RNA, 78 nt, Homo sapiens
aaagaccaacagcagaaaaggaggccgaagcgacaaaaggacacgcgcgcaaaggaagggggagcaacagacaagccc

SEQ ID NO: 158741 - RNA, 72 nt, Homo sapiens
gggaaaggacggacgcccacgagacaaagagccgcagacgcacagcaaccaccggacccgaaggccaccacc

SEQ ID NO: 158742 - RNA, 66 nt, Homo sapiens
gcgggagccagggagcgcggcgcaggagcggaagcggccccacgcccccaggcaggagaggggcac

SEQ ID NO: 158743 - RNA, 65 nt, Homo sapiens
ggcaaaggacacacagacagccagggagaggacccaaaggagagcgcgcagagaggcagcccggc

SEQ ID NO: 158744 - RNA, 35 nt, Homo sapiens
gggaagaaacgcacggaccgccgcaccaggcggag

SEQ ID NO: 158745 - RNA, 74 nt, Homo sapiens
ccgcgagcagaaacaccggccaccaccggacccacaccggcaacgagccacgcgcccaggcgcaggcaggggcc

SEQ ID NO: 158746 - RNA, 72 nt, Homo sapiens
gggagaaggggggagcagcaaagaggacacacacacaggagagccaggaacacgcccaggggacaaaggaac

SEQ ID NO: 158747 - RNA, 75 nt, Homo sapiens
agggagggagacaaggagggcgacccagcaacgcggccggccaggggcaagcgagcacggagggagccgggagag

SEQ ID NO: 158748 - RNA, 72 nt, Homo sapiens
ccagggcaccagacgggcgggaaagagaggcccgaacccaagcccagggccaacggcgccgccggaggcaac

SEQ ID NO: 158749 - RNA, 80 nt, Homo sapiens
cgggccgcggcgcccggggaaagccgggccccgagggcggaccgagcaaagggggagcgccaggagagaagagacccggc

SEQ ID NO: 158750 - RNA, 70 nt, Homo sapiens
agcaaccacaggcagggccagaggcggacagggcagaccgccagcagcacagcaagccacagagagggcc

SEQ ID NO: 158751 - RNA, 78 nt, Homo sapiens
cgccgcggagaccccaccgccggcgcgggaaacgggcgaagcgacgagccgcgaggaggcccgcgcccgggggccgcc

SEQ ID NO: 158752 - RNA, 77 nt, Homo sapiens
ggcggcggcgcgggcgagcggcgagccgaaaagcgagcgcgaggaaaaggcggcgggagacacaaccaaagcccacc

SEQ ID NO: 158753 - RNA, 76 nt, Homo sapiens
gccccaacgcacagccagggagccaagcgccgcccggccccccggcgcaggaacacaggacggccgaacacgacgc

SEQ ID NO: 158754 - RNA, 55 nt, Homo sapiens
gaagacccaccaacaccagaaaggaaggggaggcaggcagcaagaagggaaaaca

SEQ ID NO: 158755 - RNA, 76 nt, Homo sapiens
gaaaggaacgggacggagaacagcaggccacggggccaagaagcagaccacaacagagcgcacaaggcacgcagaa

SEQ ID NO: 158756 - RNA, 65 nt, Homo sapiens
acaaaggcaacacgcacccccacaccagggcggaaggcacccaagcaacgagaaaagcacgaagc

SEQ ID NO: 158757 - RNA, 69 nt, Homo sapiens
cagccgcggggcgcacgagccggggagcggaggcaccacccccaggaccgaaccaaaccacggaaacag

SEQ ID NO: 158758 - RNA, 76 nt, Homo sapiens
gcagcagcaagaagaaacgaaagaaacaggcaaggagcgcccagcaagcaaacgcgaacagagcaaggcccccccg

SEQ ID NO: 158759 - RNA, 78 nt, Homo sapiens
caggcacaacaccacaagaacaaagaaaggccaacacgcgcacaaagggcacacaggccccgagaaccaagagaaccc

SEQ ID NO: 158760 - RNA, 87 nt, Homo sapiens
cccacccgcgccgcgacccggcccgggccagcggccaggagcgcccccccagcccccgcccgcggcccccagccgcccccaacccgc

SEQ ID NO: 158761 - RNA, 78 nt, Homo sapiens
cccgaacggcacagagcaggagcagacgcgcagggagcaacagccaagccaaacacaggagggagcaggaaaaaggcg

SEQ ID NO: 158762 - RNA, 52 nt, Homo sapiens
gacgcccagaaggaacgcaggaagcggcgcgggcccccccacccccaagaac

SEQ ID NO: 158763 - RNA, 75 nt, Homo sapiens
ggagggacagggaggagggcagccaaccaccagcccgggggcagcaggaagaccgcaggaaagcaggaaggcaag

SEQ ID NO: 158764 - RNA, 78 nt, Homo sapiens
aggcggcggcagccgagggcgacggcgacccggaggagagcccgcccgagcccacagacaaggcgggcaaaaccagga

SEQ ID NO: 158765 - RNA, 40 nt, Homo sapiens
agcgcgcgcccaacgggcacaggccgcaggggaggaggcc

SEQ ID NO: 158766 - RNA, 68 nt, Homo sapiens
ggaggcgggaccggaacaggcacaccccacacaagcacgccaagacaacggcaagcggagaagagcaa

SEQ ID NO: 158767 - RNA, 66 nt, Homo sapiens
cgggcacgcgcggaaacggagggggaagaagaaaagggggcaaacaccagggccaaggggacagga

SEQ ID NO: 158768 - RNA, 86 nt, Homo sapiens
gaggacgacggacggcagcggccaagcaagaagaaagacgggcagcaagcgggagcggggaaggcacggcgaccagccagcagcaa

SEQ ID NO: 158769 - RNA, 81 nt, Homo sapiens
ccgcggaccggcgccccggcgcgaagaggcggaccggacggccgagacaagcagaccggaagaccgacggaagaccacacc

SEQ ID NO: 158770 - RNA, 75 nt, Homo sapiens
accaccgacgaagcccgagacagaccagaaaaggaaagagaagagccggcgaggaagaaaacgaagcagaaaagg

SEQ ID NO: 158771 - RNA, 79 nt, Homo sapiens
ggcccagccccccgcccgccacacgaggccgccagcagcgacaaacgcccacaaagcggcgaagggagagacgccgagc

SEQ ID NO: 158772 - RNA, 62 nt, Homo sapiens
gaaagccaccgggggagaaggggccaggaagaccaccgagaccagcggaggcaaggcaccac

SEQ ID NO: 158773 - RNA, 85 nt, Homo sapiens
gaagaggaagacccccgccaaaaggaaagcacagcagaaacacaaagcagcccaaccaaagggcaacagcgaacagagcgccgcc

SEQ ID NO: 158774 - RNA, 57 nt, Homo sapiens
acgccagaacagaacacacacaaagagccgcagaggcagaggggaggagacacgaag

SEQ ID NO: 158775 - RNA, 64 nt, Homo sapiens
ccgcgggagacaggacgcggcggaaaagcaaagccccgccaccgcgcccggcacggggggcccg

SEQ ID NO: 158776 - RNA, 70 nt, Homo sapiens
gagccagggaagggccccgaaaggaaggagcacaagccaaggacgcaaggaaaggcaagggcagaaaaga

SEQ ID NO: 158777 - RNA, 81 nt, Homo sapiens
cgggcgcggagagggccccggagcggcgcggcgggccggcggcgcggcgaagcgcgaaagaggcagaagaagggggagagc

SEQ ID NO: 158778 - RNA, 60 nt, Homo sapiens
agaaggagaacgcaaccacaaaccgccgccgccacccggcgcgagggggcgcaggaccgg

SEQ ID NO: 158779 - RNA, 82 nt, Homo sapiens
cgcggcagggggggaagcgaagccaagcgccgagggacgggcgcggagcggcggcgagcagggcaaggccaagcaagaaggg

SEQ ID NO: 158780 - RNA, 72 nt, Homo sapiens
gacgcaccaacgagagagaagagagacccccaacccaggccccagaacaaggcgaacaggacaaccaagcag

SEQ ID NO: 158781 - RNA, 52 nt, Homo sapiens
gagaaagcaaacgagccacacggaaaagcggaacggcagacaaccggaaaag

SEQ ID NO: 158782 - RNA, 85 nt, Homo sapiens
cccgcgcggcgcggggaccgcggcccgggcacggccgagcagagaggacggggacgaccgggccagacaccgggaggaacggcgc

SEQ ID NO: 158783 - RNA, 41 nt, Homo sapiens
cccgaccgcgaacaaacccagggcgaaagccgcgcgaccca

SEQ ID NO: 158784 - RNA, 66 nt, Homo sapiens
gaacgaacccacgcacaaagacggacaggacagcaggggacaaaacggaagaaccgaggggcgaag

SEQ ID NO: 158785 - RNA, 81 nt, Homo sapiens
ccagcggacaggacgccacgcggaggagcgcgggcagcaggagacggaggaccagaacacggcaacccacaggaccgcgaa

SEQ ID NO: 158786 - RNA, 74 nt, Homo sapiens
ccgggggcaaggccaaaaagaaggaccgggaaccccggacaaaacgcgcaaaaggagccagagaccgccaaacg

SEQ ID NO: 158787 - RNA, 86 nt, Homo sapiens
cgaagaggggagaaggaagcgagaccaacgcaacccaagcccgggcgcgccaggcacagccaagagcggaccggcagcggccagcg

SEQ ID NO: 158788 - RNA, 89 nt, Homo sapiens
gcagcgaccggaagacgaggcggcgggggacaagcggcgccccagagcggacgagacagccagcaggggcagaagcagcagacggaacg

SEQ ID NO: 158789 - RNA, 40 nt, Homo sapiens
gcaaagcgaaagggagaaagccagcccgaggagggccgag

SEQ ID NO: 158790 - RNA, 80 nt, Homo sapiens
cggccccgaccccgcggccggacgacccaagcccgcgagcaggagagggaagcaagccagaaagccagggacgcagaacg

SEQ ID NO: 158791 - RNA, 75 nt, Homo sapiens
caaccccaggggacgcggacgaaaaccagaggaacgcccaagaaaggacacggcaagaaaacaggcagacacagc

SEQ ID NO: 158792 - RNA, 53 nt, Homo sapiens
ccacccaaaggaagaaaggaaagggccgagacagggcgacgccgggagacccc

SEQ ID NO: 158793 - RNA, 64 nt, Homo sapiens
gcaccgagaaaggaaaggcgcacccaaccgaggacggaaccgagggggagaggcaccagcaaca

SEQ ID NO: 158794 - RNA, 84 nt, Homo sapiens
gcacccgcacccggagggaaacgggcaagaggccccagcccggaaaaggagcccaggaccgggggccgggcgaggaggccggga

SEQ ID NO: 158795 - RNA, 79 nt, Homo sapiens
caagaccagaaccagcccgggaaaggcccagcaggcgcagcagcaagagggaaaaaggcaacgggaccgcggcaaaggc

SEQ ID NO: 158796 - RNA, 76 nt, Homo sapiens
gacagagagcggacgggccaacccaaaaccagggcggcaaaacgagcgggccagggcgccagggaaggaccgcaca

SEQ ID NO: 158797 - RNA, 55 nt, Homo sapiens
gggacgccaaagacagcaagcgggcaggcaggagagcccgagcagcaccaaaggc

SEQ ID NO: 158798 - RNA, 73 nt, Homo sapiens
gagaggccacacccccaggggcagccagaaacagccggcagaccaagcaaccaggcagaaaaaaccagcaggc

SEQ ID NO: 158799 - RNA, 73 nt, Homo sapiens
acccagaacacgcgacacccaccggcccaagaaggcaccccccgcccacaggccaccgcaccaggagcggcgc

SEQ ID NO: 158800 - RNA, 81 nt, Homo sapiens
gggcgaacccgagaggaggggaccagaacggaacaggccggcggccccaccccccagccaggaaggacagaagaaacagaa

SEQ ID NO: 158801 - RNA, 74 nt, Homo sapiens
gaagaagacggcacgggacccccagcacaggcagcaggccgggagagaaaagcagcccccccacaaccacagcc

SEQ ID NO: 158802 - RNA, 81 nt, Homo sapiens
gcccgacggggcggccgggggccagagaccaaggcgcgcccggcgggccggaccaagaaacgagcaagcagaaccgcaaag

SEQ ID NO: 158803 - RNA, 54 nt, Homo sapiens
cgccaggacaacaaaggaggagcccagcagaaaagacagggccacccagcccag

SEQ ID NO: 158804 - RNA, 131 nt, Homo sapiens
cccaggagggagcaaaaggggaaacacccagcaggcccggcagcacacaaggaggccccaagaaacgaggaaggcacaaccacgaggaagcggcaaccagagcgacccccggccaagccccgcacccagag

SEQ ID NO: 158805 - RNA, 101 nt, Homo sapiens
aagcagaggcacacgcgccaccagaaaacaaaacagagaagagaagaagaggacaaaaccacaaggcaagaagccagcaacagccagcggagagccagaaa

SEQ ID NO: 158806 - RNA, 75 nt, Homo sapiens
gaccgccaggcgcccaaacccggaccaggaccgacggacgaggcggcaccgcagaggaagagcaaagcaaacacc

SEQ ID NO: 158807 - RNA, 82 nt, Homo sapiens
cacgcggaggggggcccacgccaggccggagcggacgccagaccaggccaagacaaggggcgcagagcggggggacaggcgc

SEQ ID NO: 158808 - RNA, 75 nt, Homo sapiens
gagccagccgaggggagaagagcccagagagaagcgcaggcgcagcaacgccaaaaagaaaccgaagaagagaag

SEQ ID NO: 158809 - RNA, 71 nt, Homo sapiens
ccaggccacggggggacccaggacaagccaaagagaggaaacaggaacaacacccggaaagcaggcacacc

SEQ ID NO: 158810 - RNA, 118 nt, Homo sapiens
cgggcgacaacggcccgaaaccccggacgggggcgcacgagaccccgagccggagcggaaaaacccgggcacaggcacaaggacggacaagaacacccaggaggagggcagcaaaggc

SEQ ID NO: 158811 - RNA, 73 nt, Homo sapiens
accaggaacaacaagaaccaagccacagaaaacgaaggaaggaggacccgaggagagagaagacggaaaggaa

SEQ ID NO: 158812 - RNA, 80 nt, Homo sapiens
caagggcgcggagccgcgggccggcgagcgcgcgccaccagcccccaggggacccccccagccaccccccgggagcacag

SEQ ID NO: 158813 - RNA, 60 nt, Homo sapiens
gcgccgacggaccgcaggggggaccaggagacgccacacgaggaggacccgaaaaccccg

SEQ ID NO: 158814 - RNA, 75 nt, Homo sapiens
gcgcggggcaaaaccaaccggagcagccgagggaaccagaggggcccggccaacgcaacagggagcccacgcaag

SEQ ID NO: 158815 - RNA, 40 nt, Homo sapiens
ggaaacacaagagaccagaggcaccgaaggacagaagagg

SEQ ID NO: 158816 - RNA, 81 nt, Homo sapiens
cgcgccgggcacagccggaaagcaggaccgcgacggcagcagagcaacccggccgaaccacgcgcgcaccgcggaacgggg

SEQ ID NO: 158817 - RNA, 68 nt, Homo sapiens
ggagaaggaccaagaaccaggacaaaaggcaacccagaaacagaaggcaagaacgcccccacaggagc

SEQ ID NO: 158818 - RNA, 74 nt, Homo sapiens
gaccgacgcgggacaccgaccacccgacccaagaaaacgagagaagcgagaggggccccacggcccaggagccg

SEQ ID NO: 158819 - RNA, 59 nt, Homo sapiens
aaggccgccgaaccgccggcagccggcgacgaggacgaacgggagagaagcgccggccg

SEQ ID NO: 158820 - RNA, 78 nt, Homo sapiens
ggaacaaggaaacccaccgagacacacggcgcagcccggcacggggccgcacgaggaacccgccccccccaccgcccg

SEQ ID NO: 158821 - RNA, 82 nt, Homo sapiens
cgcccggcggccgcagccagcccgggggcccgaggagggaaccggccacggagagcaccaccggggaagcgaagggccgaag

SEQ ID NO: 158822 - RNA, 82 nt, Homo sapiens
gaagcccaccagccacgcgaggccgcccagcaacccgagaagacaacaaccccccccgcgaaacgcgaggaagagggcaaga

SEQ ID NO: 158823 - RNA, 79 nt, Homo sapiens
gccgaacgggaccaggacgcggaagcaggaagacaggagccagagcagcgcacaccaggccccaggcaggacaccccac

SEQ ID NO: 158824 - RNA, 70 nt, Homo sapiens
gggcgcagaagcgcaagggaggggcggagacagaagacccaggagccaaaaacccaaaagcgacgaaaag

SEQ ID NO: 158825 - RNA, 73 nt, Homo sapiens
acccccccccccccccaaggagcagaacggagcccgcagaggaccggagaaggaggacaaaagagggggggga

SEQ ID NO: 158826 - RNA, 73 nt, Homo sapiens
aagcagaacagaccagcgacaccgaaagaaccgagggaaggagagcccacaaggacaggacggcccagacaaa

SEQ ID NO: 158827 - RNA, 50 nt, Homo sapiens
acagaaccacagacacccccggggcgagccaccccagacgagacgccaag

SEQ ID NO: 158828 - RNA, 83 nt, Homo sapiens
aagagaacacagagaaagcagccaacagcaaagccaggaaagccagacaacacagggacacaacaaacacaaccgccacagaa

SEQ ID NO: 158829 - RNA, 64 nt, Homo sapiens
gacacgaccaagaaagcaccaccgcccgggacccgaggccaaaccaggaacccagacaagacac

SEQ ID NO: 158830 - RNA, 82 nt, Homo sapiens
cggcagccccgggccccccgcgcgaccgccgccaccaggccgcccggaagccgacagggacccggcaaagagagaggcacac

SEQ ID NO: 158831 - RNA, 75 nt, Homo sapiens
ccgcagggacagaaacagggggccagaaggggaacccagagacgaagccacagagggacccccccccaagacgga

SEQ ID NO: 158832 - RNA, 71 nt, Homo sapiens
agacccgcccgccccgccggcccaccccggggagcaacaggagaccacacacaaaaccacccgggaaccac

SEQ ID NO: 158833 - RNA, 71 nt, Homo sapiens
gacagcaggcccaaagagcaagagaagagcccgcgacacacacagggcgaagcgggaagcggcaccaaccc

SEQ ID NO: 158834 - RNA, 70 nt, Homo sapiens
ccgcggccgcacggccgaccgccagcccgggggcgccagaccccggaccgccgcgccccccaacgaccag

SEQ ID NO: 158835 - RNA, 75 nt, Homo sapiens
ggccgagggccgggagcccgcaccgggccggcaggacaggacaacagaaaaacacacacagggggaagaacgaga

SEQ ID NO: 158836 - RNA, 99 nt, Homo sapiens
ggcggcggccggcgggcaaaggacgccaggaggaagggacaaaagggggaagaaggaggccggggaggaagagagcaggggggcgccaggcacccgaga

SEQ ID NO: 158837 - RNA, 74 nt, Homo sapiens
ggaacggaccgagacgaacgggcagcaggaggggggaagcaggaggcacggaggggaccccagaaccccagccg

SEQ ID NO: 158838 - RNA, 78 nt, Homo sapiens
cggcgcccgggccaagcaacccccggcaaccggacaaaggcaagggagagaacgcgggaggagacggaggcagagaga

SEQ ID NO: 158839 - RNA, 102 nt, Homo sapiens
ggcaaggagcagcaaacagccagaacagcagcccggcagcaggccggcgagggggcagggacagccacagacgcggaagggcccaggcccccccaccggggc

SEQ ID NO: 158840 - RNA, 76 nt, Homo sapiens
cgcagccgcaccggccaaggaaccagcaggcgaagacgcaggagagcacagacggacccgcacgacccggagggac

SEQ ID NO: 158841 - RNA, 57 nt, Homo sapiens
cgccacgagagcaaccgacacagaagcacggagcccaaggcgcaaggcaagcacaaa

SEQ ID NO: 158842 - RNA, 73 nt, Homo sapiens
cagcgggacccgccaggagagaagaacaagggaaacccacggaaagaaaacccgcaggccaacaccccacggc

SEQ ID NO: 158843 - RNA, 77 nt, Homo sapiens
cagcgcaggcagcagcgggagagacccagagcaaaacgagcaccaagggcaaacacaagcccaggcggcccgaaacc

SEQ ID NO: 158844 - RNA, 68 nt, Homo sapiens
agcaaaccgccaccacagcgggaagagcgagcaaaggaaaacacagaacagagacaaagaagcagagg

SEQ ID NO: 158845 - RNA, 67 nt, Homo sapiens
aagggccaaagaagggagagagggcgcaagagcagagaagaccaagcacgggcgccgccaagaaacc

SEQ ID NO: 158846 - RNA, 75 nt, Homo sapiens
accgccggccgggcggccccgccacccacagaggaaagcagcagcagagcaacacccaccaggggacacacgaac

SEQ ID NO: 158847 - RNA, 85 nt, Homo sapiens
ggcggcgcggcggaggagggagcagcggaggacaggcgggcagcggccgagccaggggcaaaaggaaaaaggaaaccgggcgggg

SEQ ID NO: 158848 - RNA, 74 nt, Homo sapiens
cagaagacagccacgaggggcaggggcagcgcgaacaaaccggaccaaagggaggggaaacaagaaccagacag

SEQ ID NO: 158849 - RNA, 80 nt, Homo sapiens
ggagcgcaagcggccaggagccaggcgaggaagcaccacccgagaagcagcagaaaaagaaaagcacaagaaccggaaca

SEQ ID NO: 158850 - RNA, 54 nt, Homo sapiens
aaccccagcggggaaaacaaagcagcaggcgagaggcagaacccggaaagaagg

SEQ ID NO: 158851 - RNA, 80 nt, Homo sapiens
ccggcccacggccggccgcgcgcgaacccggccgcagggacccgcaggggacccaggaggaaaccagcagccgcaccgcc

SEQ ID NO: 158852 - RNA, 84 nt, Homo sapiens
gggggacgagccggagcagcagccaggacccaaggccagccagccccaggcaccagcggacaggacagggaggacgaaggcccc

SEQ ID NO: 158853 - RNA, 80 nt, Homo sapiens
ggaccacggcgccggcacccaacacgggggaggagccccagccccgcgacgaggaggaagcggagcggagcgcgaggcag

SEQ ID NO: 158854 - RNA, 75 nt, Homo sapiens
gcgagcccagaccggaaaccagagcaggaaccacccgccgaggagcgaagaaaccagcacagcacccacacgccc

SEQ ID NO: 158855 - RNA, 79 nt, Homo sapiens
aagccgccgcgaggagcggcgcgggccccccccaccgcgggcggagaacggaaaagcaccaggaagcagagaggaccgc

SEQ ID NO: 158856 - RNA, 52 nt, Homo sapiens
gcaccagagcacagacaggcaaacagcagggacgcaccaaaacggacagccg

SEQ ID NO: 158857 - RNA, 72 nt, Homo sapiens
aaagaaggcccgagcaaagaagagcccgaacaaacaaacacccagaaacaagagcgagaaaaaagcaaagaa

SEQ ID NO: 158858 - RNA, 68 nt, Homo sapiens
ccgccacgggggcgacccgcgccgccaggacacggacaaaacccgcgcagcgcgccacccaaaacccg

SEQ ID NO: 158859 - RNA, 76 nt, Homo sapiens
ggaagcaaggaacaaaccgaagaacagcgggaaagaaggcaaaacacggaaaacacgagccacgaagaccgcacac

SEQ ID NO: 158860 - RNA, 67 nt, Homo sapiens
acgcacagaacacccggacaaggagcaggaggaacccagaacagggccgggcggcccaagggaaaag

SEQ ID NO: 158861 - RNA, 63 nt, Homo sapiens
ggcagaaggccccccgaacagcaggcgccaccagcccggagggggcagacccaaaggaaacgc

SEQ ID NO: 158862 - RNA, 78 nt, Homo sapiens
ccggcccccgccccagcccgccggcggcggcggggaaccaagaccaggacaaagaagacccggagagacaagccggag

SEQ ID NO: 158863 - RNA, 80 nt, Homo sapiens
caaacggcaagagccagaagcccggcggaaggggaaaagagacgcaaaccacgaggacagagaagagagaagccaccagc

SEQ ID NO: 158864 - RNA, 80 nt, Homo sapiens
cgcggccgcacccccgccccagaggcacagggccaggcacacaacgagaccacggcccaaacaacagggcaaagagccag

SEQ ID NO: 158865 - RNA, 74 nt, Homo sapiens
gagccgagacggccgaagaaaaccagacgagagacagaagacgaaagggcaagaaagagagcacggacaagagg

SEQ ID NO: 158866 - RNA, 60 nt, Homo sapiens
gaggaagcgggggccgagaccacacagcacggccagggcccggcgccagacgccgccgcc

SEQ ID NO: 158867 - RNA, 81 nt, Homo sapiens
ggagcccggccggagcgggcggagacgccgggcagccgaacggagggcgacggagggaggcacgccgggcgcccgcgaaga

SEQ ID NO: 158868 - RNA, 76 nt, Homo sapiens
gggaagaccacacaccccacaggaaggcacacagcagcaaggagcgggagccaaaaagcccgaccaccggaacaaa

SEQ ID NO: 158869 - RNA, 62 nt, Homo sapiens
cacgccccccaccggacggccacagacgggacgggccgagggagcccacaggaccaccccca

SEQ ID NO: 158870 - RNA, 73 nt, Homo sapiens
acagccaagaaagaacagacccacccgcaagaacccagggcagaaaggaggcccaaaggacgccaggcaaaag

SEQ ID NO: 158871 - RNA, 88 nt, Homo sapiens
accgagaccgcggccgggaccgaggggcgggccgaggagaacgggacccgcaccacgggagaaccagacgcgggccgggacgaggagc

SEQ ID NO: 158872 - RNA, 83 nt, Homo sapiens
gccgcgggagcacaccacggccgcgaccgcacgccaggcccaccaccaccccaggcaccgccacgaccaccgcggccggagga

SEQ ID NO: 158873 - RNA, 80 nt, Homo sapiens
cccccggagcggccccgccgcggagccaaaaaccgaacacccggaaggggacaagggacggcgaacagaccccgcgcggg

SEQ ID NO: 158874 - RNA, 81 nt, Homo sapiens
gcgggaggaacgccacgcagcgccggaaacgccaccgggaggccaccgccccaccagcaggcaacgccacagaccgccagc

SEQ ID NO: 158875 - RNA, 76 nt, Homo sapiens
gcaaagcgggagagacggaccagaccagggccgagcacagaaggcagaacgccaaccaggaaccgaacccccagag

SEQ ID NO: 158876 - RNA, 77 nt, Homo sapiens
cggggcggcgggccggccgaagccccgaaacagccccggagcaaccacagagcagggcggggcacggaagagccggg

SEQ ID NO: 158877 - RNA, 80 nt, Homo sapiens
cgccacaagcacgcccaagacaccgcgcgccggccagaggcacgacggcccgccacgggccccgcagccgcgcccgagcg

SEQ ID NO: 158878 - RNA, 78 nt, Homo sapiens
cagacaggacaccaaacaccgccgccgagacggcccagcccgaaaccgcagagcccaaaaagaggcaaggccgagcac

SEQ ID NO: 158879 - RNA, 62 nt, Homo sapiens
aaaaccaaacaggcccccagaagagcggagagacgaaagaggcaaagcgcaaaacggccaga

SEQ ID NO: 158880 - RNA, 80 nt, Homo sapiens
gagaaacacacggacaacaaacggaaggaagagaacccaaaaagaaacagcaaagaagaagaccaaagaaacccaaaaca

SEQ ID NO: 158881 - RNA, 80 nt, Homo sapiens
ccggcgcggcggccagcggaaggcccgcgccaagccaagaagacacacccacaggcacaaaaagaggaaagcaaaaggaa

SEQ ID NO: 158882 - RNA, 79 nt, Homo sapiens
agacaagccgcccggaagcggacaccccggcacagcccacccagaaggccccgagccccggccccaaagacccaaaaca

SEQ ID NO: 158883 - RNA, 68 nt, Homo sapiens
aaccaccgaagcccaggcagcgggacaaccgcaccaggcacgggaccccaaccaggacgcaggcgaca

SEQ ID NO: 158884 - RNA, 84 nt, Homo sapiens
ccccaagaagagcagaaggcccaccaagccccccgccaccggccaggacacagggcacaccagagagccgccgcccgggagccg

SEQ ID NO: 158885 - RNA, 74 nt, Homo sapiens
cagaagggaaaaaaagaccgaacagaaaccccccccccagccaccaagagaaggagcaccacgccgacgccagc

SEQ ID NO: 158886 - RNA, 66 nt, Homo sapiens
acagacaccagaaacaacagacagcgggcagcggacaggacaaaacgaagaaagaaacaaccaaac

SEQ ID NO: 158887 - RNA, 75 nt, Homo sapiens
caagcaccccaccaccaaaccacgcagcgcgcagacaggacaaccagcggaggcacgacgccaaaccaaaaagca

SEQ ID NO: 158888 - RNA, 48 nt, Homo sapiens
gggggcccaagcaaggccggaagaagagcgcagaggacaagacccgcc

SEQ ID NO: 158889 - RNA, 67 nt, Homo sapiens
ggacgcggcgcgcgaccgacacgaaggaaagagaggcgacgagcgacagaagaaaaagagagggaga

SEQ ID NO: 158890 - RNA, 120 nt, Homo sapiens
cgcagcccacgcagcaagacccgcgccgccgggacccccaggacgacggaccggacacaccggacagaacgacacaaaagggaagggagccggcagaagggaccaagaccccagagcagg

SEQ ID NO: 158891 - RNA, 68 nt, Homo sapiens
agccggaggagccgagaggaagcggaggcgcgagcggaggcccgaggaggcagaggaggaggagggac

SEQ ID NO: 158892 - RNA, 74 nt, Homo sapiens
ccccaccacccaccgccccccggccaagccgcgacaagggggacggacgggacgacgagaacggcaggagccca

SEQ ID NO: 158893 - RNA, 75 nt, Homo sapiens
cccagccacaagcccaagacgaacaaggcccagaggcaggcgaaccgcagaagcgcccagagaaggacgcccaag

SEQ ID NO: 158894 - RNA, 74 nt, Homo sapiens
gcagagagggagagagggagaggacagcagcgccgaaagccacaggacagggagaaaagaagggaagggaccac

SEQ ID NO: 158895 - RNA, 87 nt, Homo sapiens
cgcagccgccgccggcgccgaacgggccgggaagccggcggaccgcgccgcgccggagcaggcagaagcacaggcagaaccggcgac

SEQ ID NO: 158896 - RNA, 78 nt, Homo sapiens
cggcaagaccagacgggaacgggagacaagcgcagcgaggacccaaagacaggaccacgcaccagcagagaaggaaag

SEQ ID NO: 158897 - RNA, 57 nt, Homo sapiens
cccggacagaccaaccgcaggcgcaagaagagagaaggccacgcccgaccccaagca

SEQ ID NO: 158898 - RNA, 55 nt, Homo sapiens
ccagaaaggagccacacgaccccgccagcgcaggacagaaagaaggaaaaaacgc

SEQ ID NO: 158899 - RNA, 50 nt, Homo sapiens
cgagacggaaccaagaccaaaaggaacggcacggagacaagggagccacg

SEQ ID NO: 158900 - RNA, 83 nt, Homo sapiens
ccagagccgggaagcccccacacagaagcacgagagagcggccccccgcagggggacagaccagagcaggaccaaaggcgcac

SEQ ID NO: 158901 - RNA, 56 nt, Homo sapiens
gggaccccggagcccagaagacagagggcgagggggagagagggagcaggccaccg

SEQ ID NO: 158902 - RNA, 53 nt, Homo sapiens
ccaccagccccccccaagaggcgcccgcagacgcagaagaccgcagagccgcg

SEQ ID NO: 158903 - RNA, 73 nt, Homo sapiens
aaagaaggcccgcagaccgaagggcaaagccccacaagggacggcccccgaggcagcccgacgggaggcacaa

SEQ ID NO: 158904 - RNA, 84 nt, Homo sapiens
ggggccgcgcaggcaaggacaaggccacagagcggggccacgggagcaccgcggacgccccagggcacaccgcgcaccagcgag

SEQ ID NO: 158905 - RNA, 60 nt, Homo sapiens
aagacccgccacaagcaacgcgggaagagaagccagagacgcgcacgaaacgacgaagag

SEQ ID NO: 158906 - RNA, 74 nt, Homo sapiens
gcaaagccagaggccccccaaaccaggggaagggaaaggaaccggggcaagaaggcaaccacgacgggacgcca

SEQ ID NO: 158907 - RNA, 86 nt, Homo sapiens
caagaccaccaaaaagccaccgcgcgcgcccgaccgcgcggagaccggaccgcgccacaaggagagaaccgcacacagggcacagg

SEQ ID NO: 158908 - RNA, 90 nt, Homo sapiens
ggaagaaagcacacccgaaaagcgccaaggaaaaggacgagaacgccgcgacagaaaaggccagaacaaggagacaacgcacacaaagaa

SEQ ID NO: 158909 - RNA, 59 nt, Homo sapiens
ccacgagcgcacccggcaggagggaaagaacaaggaggaacaggacacccaaccgcgag

SEQ ID NO: 158910 - RNA, 78 nt, Homo sapiens
aagcagcggcagaaaacagaagccagccgccagcaggaagggccaaagccccaagaacccagccacgcaaagcgggga

SEQ ID NO: 158911 - RNA, 83 nt, Homo sapiens
caccgcgaggagggggaagcccacggcggacgcaaggagacaagcgcaagcagccagagcccgggcgcaaagaaccaggcccg

SEQ ID NO: 158912 - RNA, 88 nt, Homo sapiens
gggaaaacggagagcagcagccgcccgccaaccccaggggaccagaggaaccagcccgagcgggagcgcagggagaaagcgaaacagg

SEQ ID NO: 158913 - RNA, 73 nt, Homo sapiens
cacgcagaagagacaaggaccacagccgagcgagagcaggaagacgggcaagaagcccggcgccaaggaaaaa

SEQ ID NO: 158914 - RNA, 75 nt, Homo sapiens
ccaagccgacgagacggagaggaggcacacaccaacggcacggggcaggacaagaagcagacaaccagaagaaca

SEQ ID NO: 158915 - RNA, 73 nt, Homo sapiens
ccagcagcccaggccgagacgaaaggcagacgacgcagccagagcagcaagaggccaaggggacgacggccac

SEQ ID NO: 158916 - RNA, 58 nt, Homo sapiens
gcgcccccgaaccgccgcccgcggcggccggcacgaggggaccccagcggaacacacc

SEQ ID NO: 158917 - RNA, 62 nt, Homo sapiens
acgcagggcgcccccggacacgagcgaagacagagcccggaacgggagagacacaaagggga

SEQ ID NO: 158918 - RNA, 93 nt, Homo sapiens
caccgagaccggagcaggaagcccgcacacggcgagagggaccagccaccagagcggggcggggccaggacgaaccagcacagagaggagccg

SEQ ID NO: 158919 - RNA, 68 nt, Homo sapiens
gagccgccccgaccggaaagaccgcgagaaaaggccagggcccacgcaagggccgggggcaagacgga

SEQ ID NO: 158920 - RNA, 78 nt, Homo sapiens
gacagagcgcacccggcaggcgcaacagagcgccggcggcgagaacaggggacccaaaccaacagggccccagaacca

SEQ ID NO: 158921 - RNA, 57 nt, Homo sapiens
ccacgcgcggaaggcagcgcccagcagcgcaggaaggccgaggagagaagacacaag

SEQ ID NO: 158922 - RNA, 103 nt, Homo sapiens
ggaaaggggcaaaaaccccggagcccgaccaggacccgagaacaagacacaggaacgagaaaggaaaaccagaaacgccgcgggggacaaagagaccggaagc

SEQ ID NO: 158923 - RNA, 71 nt, Homo sapiens
gcccccggcccgcgcccccaaccgcgaagcacccagcggcggcgccggagcgcggggagccagaggcgaac

SEQ ID NO: 158924 - RNA, 76 nt, Homo sapiens
accacccccaggaccaacgaaacccgaccgccccaggggcacagcaggaccagcagggccccacacagcaaagaaa

SEQ ID NO: 158925 - RNA, 81 nt, Homo sapiens
aaagacagcgggacagccggccaaggagaagcccaccagggcaacccaacagagcaggccaggccgaagggaggggaacgg

SEQ ID NO: 158926 - RNA, 74 nt, Homo sapiens
gaagaggcggagcgcgcggccgagcgcaagagggcacgacacgccggaagcaccgaccacgacaccccgggcga

SEQ ID NO: 158927 - RNA, 43 nt, Homo sapiens
cggaagccaccacccgcagcccagagaaggcaccggccaaagg

SEQ ID NO: 158928 - RNA, 74 nt, Homo sapiens
cgccccagcgaaaggacgcccaccacgagacaagcaaaacgggcgggggcaaagaaccacaagaacaaaaggca

SEQ ID NO: 158929 - RNA, 85 nt, Homo sapiens
gcccagcaggccgagggaggaagagcgggagccgggccgagccggggcgaagcggaccccagccagaagaggaccacagcaaaaa

SEQ ID NO: 158930 - RNA, 76 nt, Homo sapiens
cggccgcaccggcgccccacccgcccccgcgggcgccgggccaggacgggaagcccggggcggcgacggagcacga

SEQ ID NO: 158931 - RNA, 58 nt, Homo sapiens
ccgcccgccgccacacgcgcaaagcccggccgagaaacagacaacccacagaacaaag

SEQ ID NO: 158932 - RNA, 71 nt, Homo sapiens
agaccggccgccccgcccccaccgccgcagacccccaagcagcaggcccggccaacgcaacagggagccca

SEQ ID NO: 158933 - RNA, 71 nt, Homo sapiens
aaggcgaaggaaaaccccagcgaaacaccaagagggcgggacccagagagccagcgacagggagacaacgc

SEQ ID NO: 158934 - RNA, 99 nt, Homo sapiens
cccgccggcggggggaggccacaggcgcaagcagagagaagaagaaggaggccgcggccagaaacccaagaaaaagcgaaggaacgcagagcgaagaca

SEQ ID NO: 158935 - RNA, 68 nt, Homo sapiens
ccccgggccggaggggcgaccgccaaacgggagccccgaaccaaggaaaggggcaaggcgggggaggc

SEQ ID NO: 158936 - RNA, 92 nt, Homo sapiens
ggaaagacaaaagaagaaggcgagacgcgaaaagagcggggaagcaaaggaaaagccaagaaagacccaaaagaccccagaccagaaagagg

SEQ ID NO: 158937 - RNA, 77 nt, Homo sapiens
cgccagcccggcgggaaggaaaaccgcgcagagagggcaacggagacagaaaccaggaggccaagcaagggaaaaag

SEQ ID NO: 158938 - RNA, 85 nt, Homo sapiens
gcagacaagaggcgacgccgggggcaccgagcgggaacgcacggggcgcgccgggcggagcaggaggacccgagcagccagcaaa

SEQ ID NO: 158939 - RNA, 59 nt, Homo sapiens
gcgaagcgcgcgccgcgcccggaccccaggagacagcaaaggggaaggcaaggccccgg

SEQ ID NO: 158940 - RNA, 80 nt, Homo sapiens
ggcagccgcggacccgccaagaagcgcccacgcagcagccgagagccacgacagagcacacgccgcgcggaggcgcacac

SEQ ID NO: 158941 - RNA, 67 nt, Homo sapiens
ggccacggacacagaaccacaggggaagaaccacagggaagacggcaggaggacgggcggcagcccg

SEQ ID NO: 158942 - RNA, 80 nt, Homo sapiens
cggagaaagggagacaaggaaggggcccggccaggaccggggaagggggccgagagcagcgagacccggggcacgcccag

SEQ ID NO: 158943 - RNA, 80 nt, Homo sapiens
cagaccacacccacagaaggagagcaaaggagacaggggcggaaagaggaaaacagacacgaccaagagaagaaagaaga

SEQ ID NO: 158944 - RNA, 73 nt, Homo sapiens
ccgggagcccgcaccgggccggcagacccccgcacggcacaaaacgggccacgagaaccaggccaggaaacag

SEQ ID NO: 158945 - RNA, 76 nt, Homo sapiens
acggaaacacaaagcggaagaacacggcacaggagggcagaccaaaagcacaaaaagaacggcccgaagaccccaa

SEQ ID NO: 158946 - RNA, 54 nt, Homo sapiens
cgcagaccaccccagagagccggagcccacccagcaacaccagagaaagggcca

SEQ ID NO: 158947 - RNA, 82 nt, Homo sapiens
cgacagccagggcggaagcccgccccagagcagagacaaagcaggaggacacaagaagggaggaaaggcggacccaggaacc

SEQ ID NO: 158948 - RNA, 40 nt, Homo sapiens
gggcaagaagagccgcgacccgacgccagaaagagggcaa

SEQ ID NO: 158949 - RNA, 75 nt, Homo sapiens
aagggggggagagaaggcaggagaggggaagaaccgagaccacccacagggcgagcacgaagagggaagacaacc

SEQ ID NO: 158950 - RNA, 77 nt, Homo sapiens
gaagcaagccggacccacgacggcaggaaaggaggccaggacggagagggagaaggcgggaccgcgccagaacaagc

SEQ ID NO: 158951 - RNA, 82 nt, Homo sapiens
agcacaaacacagcccacaggcagaggggaggagacacgaagcgacgcagagccagaagggaggcagggaacacgcggaaca

SEQ ID NO: 158952 - RNA, 87 nt, Homo sapiens
cgcagccgggccggcccgaccccaccggccaacgaaaccgggagaagccggccaggcaggcacaccccaccacaacgccacacgacc

SEQ ID NO: 158953 - RNA, 71 nt, Homo sapiens
ccccacagcaagccgaagggaaagcacaaggaagaagcggacggggaagagagaaagcagaagggaaccga

SEQ ID NO: 158954 - RNA, 63 nt, Homo sapiens
gaaacgcgcgccaagaaaagccaagccaggacagaacagcgcagggacaggacaggaaaggcc

SEQ ID NO: 158955 - RNA, 67 nt, Homo sapiens
aggaacaggagaacccggaacaaaagacaacggaccggagaggaaagccacaagggcccgagacccg

SEQ ID NO: 158956 - RNA, 56 nt, Homo sapiens
gcccgcggaaccgcagccagcccaaagaaacaccgggccagcagcccacgaggacc

SEQ ID NO: 158957 - RNA, 79 nt, Homo sapiens
gcggcagagccgagaggggagagcgagaaagagcgcgagcgagcgaggccgggccgccgaggccgcaggagggaagcgc

SEQ ID NO: 158958 - RNA, 83 nt, Homo sapiens
caacgacacggggagagaaagaaaaggaacgggagcgagaggggcgggcacaagggaagacagcgcccgggacccaacggaag

SEQ ID NO: 158959 - RNA, 59 nt, Homo sapiens
ccacagcacacgaaaacggcgcacaaagaacgacccggccccaaggggagcgaaaccag

SEQ ID NO: 158960 - RNA, 80 nt, Homo sapiens
gcgcccggggagacagaaacgaggcgcccccagcagcaggaggacgacgacaaggcagcgaagccgacgagcccgaacag

SEQ ID NO: 158961 - RNA, 85 nt, Homo sapiens
ccggggagggggggaccacgaaaggagcaagagcaagacaccggacaccgagggcccccaaaaggaccgaaggagaagaaggaga

SEQ ID NO: 158962 - RNA, 79 nt, Homo sapiens
gccaggaaaaccaccaaaacaaccagcgccccaggcaacagcaagacaaaacgccaggacccacagggcgacagcgccc

SEQ ID NO: 158963 - RNA, 78 nt, Homo sapiens
agagccggggcaggaggggaccgaggggggggggagccaccacgccccccggagacgcagggcccgcgcgcggaggcc

SEQ ID NO: 158964 - RNA, 68 nt, Homo sapiens
aagacagcggaaaaaaaaaaacacgggcggacggaacgcacgcggcagggccgaagcaacaagaagcg

SEQ ID NO: 158965 - RNA, 83 nt, Homo sapiens
gcaggcaggcccgagcacgcgcgggagcagcagggaacacaagccgagaacagccgagcccagccccacagagcccagcccaa

SEQ ID NO: 158966 - RNA, 73 nt, Homo sapiens
gggggcggcggcggccagcgccagaaaggaagcacgcgcgcggacaagaccagaaagaaaagaaccaaggagc

SEQ ID NO: 158967 - RNA, 73 nt, Homo sapiens
agaaaaagggaaacggcaccaccagaaagcgggggggaaagccaagggaaagcaccacaagccaacaaaccga

SEQ ID NO: 158968 - RNA, 65 nt, Homo sapiens
ccggacacgaggagaaacagcagaaacgcaccaggccaaagaaagagaaaaccaagccgccacag

SEQ ID NO: 158969 - RNA, 78 nt, Homo sapiens
gggaaagacgccaggacaacgggaccagcccgcagcacaggaggaaagaacaaagcacagcagcagaaaacaaagaag

SEQ ID NO: 158970 - RNA, 62 nt, Homo sapiens
ccgggacccggagcaagcaaagcgccaaaccaagcggagaagcggaggagaccaaggaggcc

SEQ ID NO: 158971 - RNA, 83 nt, Homo sapiens
gcggccgccgcagcgagggcgccgagcaaccggcggcccaaaggcgaaacacagaaggagacaaccacagggccccaggaccg

SEQ ID NO: 158972 - RNA, 62 nt, Homo sapiens
ccgaggcaacacccgcgaggacagcagaccacagcccggcaggcccaaaaacccaaagggac

SEQ ID NO: 158973 - RNA, 80 nt, Homo sapiens
ccggaggaccagaaacgaggaggaagaggggccaaccggaccgcccccaacaaccaaaaaggggagcggacgggcccagg

SEQ ID NO: 158974 - RNA, 83 nt, Homo sapiens
caacacgacccagcagccagagagccaagcccgcggccccaaaaagcggcgcaagacggagggcgggagaaggagcggccacg

SEQ ID NO: 158975 - RNA, 82 nt, Homo sapiens
gccagaagacaccgccagagacgccgagcaaaagcccagaaggggcggaggcccaggaagggccaaaagcagacagaccccg

SEQ ID NO: 158976 - RNA, 67 nt, Homo sapiens
ccaccggagcgaggaaccggaccccggcagcggacaagaacccaagaaacaggaaaaaacccaaaac

SEQ ID NO: 158977 - RNA, 80 nt, Homo sapiens
gcggaacggggagcgccggagcagcggacccaggcagccaagagagaacacgaaggaccaaccaaggggagcagcaagca

SEQ ID NO: 158978 - RNA, 81 nt, Homo sapiens
agaaaccccggacaaggcacgccagacgacaaaaggacagcgacagacagcaaacacagccagaacagaggaccggggaga

SEQ ID NO: 158979 - RNA, 68 nt, Homo sapiens
ccccaaaaccagcagaccacagacccacagcgaaagcaacaggggaccgcccaccccaccagggacag

SEQ ID NO: 158980 - RNA, 77 nt, Homo sapiens
ggagcccggagcaaaagaggccaagaggaacccgcacaacagaaagcaggaagaacaacagcccggacacaggaaga

SEQ ID NO: 158981 - RNA, 72 nt, Homo sapiens
ggggcccccggccaccaccggcacggagccaccaacaccgggagagacagcgagcggaagcccgaaagggaa

SEQ ID NO: 158982 - RNA, 77 nt, Homo sapiens
ccgcaaggaccggcacaaggacgccaagggggcgagagcaaccagcagcaaaacgaaagcggacaggaaagaaacag

SEQ ID NO: 158983 - RNA, 80 nt, Homo sapiens
ggaggaccacagcaccgcccggggcaggcagcccagggaacgaaagaaagggaacgcaacaagcaaacgcaacaagcagc

SEQ ID NO: 158984 - RNA, 69 nt, Homo sapiens
gacgaacgggagaacagcagcagcccacgaacagaaaggaaaacaccgggaaaggcccaaaccggcgaa

SEQ ID NO: 158985 - RNA, 78 nt, Homo sapiens
aggacagccggcggcggagcggccggccacggaggagaaccgacaggcacagggccagaaggaagaaaaccaggacac

SEQ ID NO: 158986 - RNA, 83 nt, Homo sapiens
aaggggagggccagcccgcgaaccggccggaggggaaaggccagacagcgcagcagccgccagcacgcaacaccaagcagagc

SEQ ID NO: 158987 - RNA, 83 nt, Homo sapiens
cggggacagcaaccccggaggccggaggaacgggcccgcaagcgcgccgacagagccgagcccggaagccggcaagacaagcg

SEQ ID NO: 158988 - RNA, 74 nt, Homo sapiens
gaggcacacgacgccaagacagaaacagacgagaccggaaaggcacgcccgccacaaggagcaccacaaggacc

SEQ ID NO: 158989 - RNA, 79 nt, Homo sapiens
caggaggaagcgaggccagacagcaagagcacccgacccacaggccagagagaacggccgagcgaccaggagaggagcc

SEQ ID NO: 158990 - RNA, 71 nt, Homo sapiens
gacgagccgccgcagcaggaccgcaacccgaagcacccagggcggagccagcgggcgcccgcacacacccg

SEQ ID NO: 158991 - RNA, 83 nt, Homo sapiens
aacagagggaggacgaaccaccaaccagcagaaggaagccaagacaaagccagacccagcggaagaaaccaagacgcagagag

SEQ ID NO: 158992 - RNA, 57 nt, Homo sapiens
ccgcccgggagcgagcggaggagcaggcgccggagaccccagaccaagggagaaaga

SEQ ID NO: 158993 - RNA, 69 nt, Homo sapiens
acaaggcaaaaaagcaaaacgaagagcccaaggaacaggaagaaaagggaaccagcggagcgggacaac

SEQ ID NO: 158994 - RNA, 57 nt, Homo sapiens
cacggaggccagccccaacacccgggaaagggagcagcaccggccacacccacagca

SEQ ID NO: 158995 - RNA, 70 nt, Homo sapiens
cacggaccagcagaacagaaacaaggggcggcagggggaccagccagcaacccgcccccggaccaagcaa

SEQ ID NO: 158996 - RNA, 107 nt, Homo sapiens
cccggaggagcagggcagagcacgcgcgcagcgaagcccagggaggccaccaggacaaagaggccaggagacacgccaccgccggcggcccccggccaggccacccc

SEQ ID NO: 158997 - RNA, 73 nt, Homo sapiens
ggccacccagcggggagcacggcgagcagccaggccaggagagaagaccggagacccgaaagaggaagagcgc

SEQ ID NO: 158998 - RNA, 60 nt, Homo sapiens
gaaagccacaacagggcggcaacaggggcgagaaaggcaccacgccggaacgggccacac

SEQ ID NO: 158999 - RNA, 72 nt, Homo sapiens
cccaggccaaccgggagaggagcggaggcacccaccgacagaaagagaaccggccaacagagcccccgcacc

SEQ ID NO: 159000 - RNA, 58 nt, Homo sapiens
cgggggaccagggaaaaagggaagcaaggcgcagccgcgagggcaaagaagggccacg

SEQ ID NO: 159001 - RNA, 71 nt, Homo sapiens
cggcgcgaaagccagggaaggaagcaagccagaaagccagggacgcagaacgcagggcagacagaagaaaa

SEQ ID NO: 159002 - RNA, 76 nt, Homo sapiens
gcacaggccaacaccagcaaaagggaggcggaaaggaaggcccaggagcacgccagaaggcgggaaaagcgggcgc

SEQ ID NO: 159003 - RNA, 60 nt, Homo sapiens
gcacgcagccggaacaccagaaagaccaggagaagcacaagaagacaagggcccagaaac

SEQ ID NO: 159004 - RNA, 73 nt, Homo sapiens
agaagagagaccacggccagcgagaggagaagacgccgcaacagagcgaggaaagaagcggaaaggggccccc

SEQ ID NO: 159005 - RNA, 75 nt, Homo sapiens
ccacacggcagcggggacagccacaggggggaccacacgccaaaggcacggggcaagccacaggggagaaagaag

SEQ ID NO: 159006 - RNA, 74 nt, Homo sapiens
cggccaacgaagcccaaacagaagaagaaggcgcaacacagcagggcaagaaaccaaagcggggacgagaagac

SEQ ID NO: 159007 - RNA, 69 nt, Homo sapiens
gaaaaaaagaggacacgggcaggaaagcaaagaagaaacccgggggcagaaacgggacgggagcgccac

SEQ ID NO: 159008 - RNA, 75 nt, Homo sapiens
ggaagcgaacaggcacgaaagagacaagaagacccaagaacggaacgaagaggagcgcaagacggaagaacaacg

SEQ ID NO: 159009 - RNA, 78 nt, Homo sapiens
caacaacgagacccaacccgagcgcggagaacccgcccagaagccagaccccagggaaagcaacggcgcaagcggcgg

SEQ ID NO: 159010 - RNA, 55 nt, Homo sapiens
ggcggagaacgcgagacgccaaggccgacaaaaccggccgggaagcaagaaaccg

SEQ ID NO: 159011 - RNA, 87 nt, Homo sapiens
cggacagccgcgcgcgagggccggggcgggcgccgcgggacccccgggccaggaacaccagcaggaaaaaagagcggcagaaggcca

SEQ ID NO: 159012 - RNA, 82 nt, Homo sapiens
cccagaacagggccgggcggcccaagggaaaagcagcggccgcaagaacccaccggggcgaaagcaagaagcacgacgcccc

SEQ ID NO: 159013 - RNA, 68 nt, Homo sapiens
caacagccggcgccgccacgacaggaagggaaggggcggagacgggcggaacgcaggaggccagagga

SEQ ID NO: 159014 - RNA, 80 nt, Homo sapiens
gaagggcggcgccggcagcggacagccggacagcgcccagggccggagcccgagcccggagagaacagcgagcccccacg

SEQ ID NO: 159015 - RNA, 79 nt, Homo sapiens
aaagccaggccccgaggacaaggcagagcaggaaccgggagaacccaaggaggagaaggaaaaaggaaggcagccccag

SEQ ID NO: 159016 - RNA, 80 nt, Homo sapiens
cgagagaaacaagcgggaaaggcaacgaccggggcagcacccggacccagcagccaggaaaagcagcagcaacgggaacg

SEQ ID NO: 159017 - RNA, 64 nt, Homo sapiens
cagcaccggaacagggacacagcaggggccagacaaccagacccgggaggcaagagacgaggac

SEQ ID NO: 159018 - RNA, 69 nt, Homo sapiens
agcaaaggaacccccccgcggagcccagagcaaagaacgcagaggggcagaaaagaagaacgaaaagac

SEQ ID NO: 159019 - RNA, 56 nt, Homo sapiens
gacgccagggagcaaaccgagccgagccacgcgaccccgggggcagcacgccacac

SEQ ID NO: 159020 - RNA, 59 nt, Homo sapiens
gcagccagagagcagacagaaccgcccacagaacaccggcacagaccgacccccaaacc

SEQ ID NO: 159021 - RNA, 50 nt, Homo sapiens
gaagaaggcgagacacccacacgcaaaggagcggaagcacaaagccgagc

SEQ ID NO: 159022 - RNA, 54 nt, Homo sapiens
gcaaagccccccagaagaccagggcccggccacaggaggggcgccaggccgggc

SEQ ID NO: 159023 - RNA, 74 nt, Homo sapiens
aaccaagccagaaagaccccacccaaacagcggaagagaggagcccgaggggaaggggccacaggcagcaggac

SEQ ID NO: 159024 - RNA, 54 nt, Homo sapiens
aaagaacccccaaaaggccccgggcaaggggagcagacaacaaaacgagcaagc

SEQ ID NO: 159025 - RNA, 43 nt, Homo sapiens
gccaggaacacaacccaccgacagaggacgacgaaggacagaa

SEQ ID NO: 159026 - RNA, 73 nt, Homo sapiens
aagacccaccgaaacaacggagagacaacaagggccacggacgggaaccggggacccaggaaggggaaaaaga

SEQ ID NO: 159027 - RNA, 80 nt, Homo sapiens
cggcaaggggaagcaaaagaaaaggcaagacaaccacaggcagagagcaaaccaacacagcgggaaagaaagcagccacg

SEQ ID NO: 159028 - RNA, 79 nt, Homo sapiens
ggaaggccaaaagacacagggaaccaccaggagacacgaaacgaacgaccaacccggaaggccccagccaggacagccc

SEQ ID NO: 159029 - RNA, 91 nt, Homo sapiens
acaaacacccccaagaagaaggagagaaagcagcagagcaaaaacccaaaccccccaccagcgccaagaggagggcaaaaaaggagaaagc

SEQ ID NO: 159030 - RNA, 43 nt, Homo sapiens
cgcccgggcacgcccccacacgggacccagcagccagcgaagc

SEQ ID NO: 159031 - RNA, 62 nt, Homo sapiens
ccagaaacagaccagccccgggccccagcgcccacccaagacaaaaggacagcgacagacag

SEQ ID NO: 159032 - RNA, 81 nt, Homo sapiens
cccagagcggagacaacagcaggagcaagaaccaacgaaacgagcccccaagggagcgagggcacacgagaaacaggcagg

SEQ ID NO: 159033 - RNA, 70 nt, Homo sapiens
gaagcccacacacgccagcagaccaccccgggagggacgcagaaccggccgaaaagcacaaacagcaaga

SEQ ID NO: 159034 - RNA, 85 nt, Homo sapiens
aaaagaaaacagagcgacgagcaagaagcagcccaaagcgaagacagacgcaaggaagaggacaccagcccgggagaagaggcaa

SEQ ID NO: 159035 - RNA, 61 nt, Homo sapiens
ccaaaaccagccgacaaagagggggcccaagaaggaccaaggagcagcaagcgggaggcag

SEQ ID NO: 159036 - RNA, 66 nt, Homo sapiens
aggaccaacgacccccagacgagaacgccagaaacacaagcacgaggaagaggagccaccagaagc

SEQ ID NO: 159037 - RNA, 54 nt, Homo sapiens
gcgcaccgcggagacccgccagccgccggccgcgagccagcgggccggcaccgg

SEQ ID NO: 159038 - RNA, 75 nt, Homo sapiens
cagccccgacgcaaaacagaccaggaggagaagaagggaggcagagaaggccaaagagcacagggacagaaaaac

SEQ ID NO: 159039 - RNA, 78 nt, Homo sapiens
gaagacgggaacaaacgaaccaaggccgggaaagcaggagcaggaggcaaagggaccccaagaaaccaaagggcaaga

SEQ ID NO: 159040 - RNA, 55 nt, Homo sapiens
aagaccaaagggcacacaagggaggcacccaccaggggccaggccggaggcagag

SEQ ID NO: 159041 - RNA, 69 nt, Homo sapiens
gggaccggaagcaacgaagaaaaggaagcaacaagagcgcaacaagagcagcgccgcaaggcacagcca

SEQ ID NO: 159042 - RNA, 38 nt, Homo sapiens
gaaagagagggacaagcacgggagcaacaaaggcaaca

SEQ ID NO: 159043 - RNA, 61 nt, Homo sapiens
gggggaggacccccgcccggagagcagagcaacacggagcgcaaacgccaaggcgccgggg

SEQ ID NO: 159044 - RNA, 51 nt, Homo sapiens
cggccaagaagaccgggacagaaggcagccgggacaggcaaaaggccaaaa

SEQ ID NO: 159045 - RNA, 68 nt, Homo sapiens
aggcgcacaaaaagaccagaaaagggaccaaccggccacccaggaaagcccaaaggcaggcccggcac

SEQ ID NO: 159046 - RNA, 79 nt, Homo sapiens
aaggagagagcccgcaggagcagaagaagccaaaaacacggccaggccaaacgcaagggccgagcggacggggagcgga

SEQ ID NO: 159047 - RNA, 77 nt, Homo sapiens
cagcgccccaggggaacgcgagcgaacacagaacacaagaaacaagcaacgacaggacagcagaggcacacaaacgg

SEQ ID NO: 159048 - RNA, 65 nt, Homo sapiens
ggcggaacacgaccaaaaagaacacaccaaaagagcagagaagcaaaagagccaggacaaaacca

SEQ ID NO: 159049 - RNA, 71 nt, Homo sapiens
gggcccgggccccgggcggggagccggagcaacgggcccgggaagcggcggagaccacacccacgggcaaa

SEQ ID NO: 159050 - RNA, 82 nt, Homo sapiens
agccccacgcaggggcccggaacgcccgaccgcacacggccacccgagccacccgaagggccccccaagcccagggaccgca

SEQ ID NO: 159051 - RNA, 70 nt, Homo sapiens
ccggccgccggcccccaacagcgccgcgagcacgaaagcaccgcaggaagcacacaccagcgagacccag

SEQ ID NO: 159052 - RNA, 66 nt, Homo sapiens
cccgcccagccagggaacacacggaagaagaagggcgacagaacgggaggagaagaagccaaacca

SEQ ID NO: 159053 - RNA, 103 nt, Homo sapiens
gccccacacggagaggcccggcggcgcgcccaaccggcgacggaaccaagaaaggggagcaagaagaaagagcagggaggagggagcgacaggaagaaagaaa

SEQ ID NO: 159054 - RNA, 74 nt, Homo sapiens
gaagcaacgggccagcagacaggaggaagacaaggcagcaccagagaaaaccggaagagaaaggccgggaagca

SEQ ID NO: 159055 - RNA, 78 nt, Homo sapiens
gaaagaaacgaagcccgaagagaagcaagagagccaaacgaaggcagccaggcggagcaggagcaaaggagcaagaaa

SEQ ID NO: 159056 - RNA, 59 nt, Homo sapiens
cgacaccagcaccccggccccggcccgcccggggaaagcaacggcgcaagcggcggcgg

SEQ ID NO: 159057 - RNA, 75 nt, Homo sapiens
cggcagacacacaacccgacccgacgagagccgcaaacacaccaaccgcaaacaagacacccaccagaaaaacgc

SEQ ID NO: 159058 - RNA, 83 nt, Homo sapiens
aaccacgacgaagcggaaggcagaaggaaagggccgagaaagaagagaggaagaagaggaggaggaggaagaggaggaagacg

SEQ ID NO: 159059 - RNA, 78 nt, Homo sapiens
cccaagaaaacggaagggagcaaaacacaagaaggcagaaggaaagaaaggcagccggccaagcagagacccccagga

SEQ ID NO: 159060 - RNA, 66 nt, Homo sapiens
cgggcgcacggcgcggcaaggccaggggagaagacaccgaggggaacggcgagggaacccaggaag

SEQ ID NO: 159061 - RNA, 73 nt, Homo sapiens
cgaagacaagagacgaaacacgcaccaaaaacaaaagagagcgcacgacccacaaaaagaccggggaggagag

SEQ ID NO: 159062 - RNA, 56 nt, Homo sapiens
cggagaaaccgccaccccccgcagccggccaggcgccgcacccacaggaacgccgc

SEQ ID NO: 159063 - RNA, 79 nt, Homo sapiens
gcccccgggcaagcaacccgcccagccccaagagcgggacacaggccggaacacccagaagagaaggggaccagagcag

SEQ ID NO: 159064 - RNA, 71 nt, Homo sapiens
gaaaaagccaggagggcccaggcaacaagggagaacccaaagacaagcgaagggagaaacagaaacgggaa

SEQ ID NO: 159065 - RNA, 54 nt, Homo sapiens
gagcagaaacaccaaaaaccaggccggaaacagaaagagcacccacgggagacc

SEQ ID NO: 159066 - RNA, 86 nt, Homo sapiens
cgccagcccgccggcgccccggagcggagcgcaggcgccgagacgacaacgcggcccacaggccgcgagagaacggaaccggagaa

SEQ ID NO: 159067 - RNA, 43 nt, Homo sapiens
gccagagcacacaccaggcacgaaagcaccgggaggaaagaga

SEQ ID NO: 159068 - RNA, 82 nt, Homo sapiens
agacggacaacgaccacgcccaaaagagcgcaccaacccccacgagcgaagcagaagcggagaggaaggcagcaaggcagca

SEQ ID NO: 159069 - RNA, 82 nt, Homo sapiens
gcaacggcgggacagcaaaaagacccaccaaggaagcagcggccacgccagaaacacagacgggaagacggggagaaggggc

SEQ ID NO: 159070 - RNA, 60 nt, Homo sapiens
gagaagacggaagccaggacaaagggacaagagaaaggagcaagaaccaacgaaccagag

SEQ ID NO: 159071 - RNA, 88 nt, Homo sapiens
ccagcagcgccccggggccccgcgggaccgcggccacggacggaacccggagggcggaccacaagaaaccgaagcgaaagacggcacc

SEQ ID NO: 159072 - RNA, 74 nt, Homo sapiens
cgggcaaggaccccgccgagcccccaagagcaggacaaggcgggggagcgggaggagccagagcacaccgcacc

SEQ ID NO: 159073 - RNA, 79 nt, Homo sapiens
gcacgccaccggcggcgggcacacagacacgcacggagggcccaacccacagcgccccaggggcccccgcacaccggca

SEQ ID NO: 159074 - RNA, 77 nt, Homo sapiens
gcgcgcgggacggccgaggaaggaacggcccccccccagcccgccccaaaagagcagacgcagaaacaggaggagag

SEQ ID NO: 159075 - RNA, 57 nt, Homo sapiens
cccacaggaaagaaccccagaaaggcaccgaaggcaccaggcgaccagcgccgaaca

SEQ ID NO: 159076 - RNA, 82 nt, Homo sapiens
cggccgcagaggcgcacggagaagcccgggacgagaaggggaaaaaacaggccagggcgagcgacaggaaggacaacccggg

SEQ ID NO: 159077 - RNA, 71 nt, Homo sapiens
agcgaaaaaacaggaggacacaaggaaagaccacagcaagaccacgcccccagccgggggaccaggccgaa

SEQ ID NO: 159078 - RNA, 53 nt, Homo sapiens
ggacccaccgccagccacccacgccagcagaggaggcacaggaggaagaccac

SEQ ID NO: 159079 - RNA, 51 nt, Homo sapiens
aaagccccacccgccgcagcaagcagagggagggccgaacaggggggaacg

SEQ ID NO: 159080 - RNA, 73 nt, Homo sapiens
caaaccagccaaaggaaacgccacacccgcgcagagagcacagggagagcgagggagcaggacggaagagggg

SEQ ID NO: 159081 - RNA, 59 nt, Homo sapiens
aaaagaagaacaaacgacgcagagaaggggaagagacagcagcgggaagccacggccaa

SEQ ID NO: 159082 - RNA, 43 nt, Homo sapiens
accacgaggacggaagagccagcagaggaagagaccagaacca

SEQ ID NO: 159083 - RNA, 70 nt, Homo sapiens
aaacacgaagcccaaaaagaaagaaccagccaggagagccgggggccccacccgccaagggccccgccga

SEQ ID NO: 159084 - RNA, 78 nt, Homo sapiens
ggacaccacaaaccgcaaagcaccaaccccagaccaacccccacaagggacagggggaccagccgaggcaagaccaac

SEQ ID NO: 159085 - RNA, 70 nt, Homo sapiens
ggcaagcggggccaggggaccaggccagggcgcacccacggcagacgcaccaggacgcggcccccgggga

SEQ ID NO: 159086 - RNA, 71 nt, Homo sapiens
cgagaccccccagacaccacagcagagccccgcgcccccgggcagggaggccaccagggcggaggcacccg

SEQ ID NO: 159087 - RNA, 60 nt, Homo sapiens
agaaacgcaccggaaaggccaccaggagaggagcgcccccgagacacacgccagcggccc

SEQ ID NO: 159088 - RNA, 86 nt, Homo sapiens
gacggcgccccgaacgagggggcgcgaggagccggaccagaccgccggagcacgccgagaccaccgaggacacaaccgcccaccac

SEQ ID NO: 159089 - RNA, 77 nt, Homo sapiens
gaggaaggggaaacgggcggagccagcagaacggccgagcgaccaggagaggagcccccgcccgaagaccggggagg

SEQ ID NO: 159090 - RNA, 81 nt, Homo sapiens
acggggaaacgaccgccccaaaacggagccagagaccaagagcccagagaacagagcgccccaccgaagagccccagaccc

SEQ ID NO: 159091 - RNA, 70 nt, Homo sapiens
cacaacgcaaggacagagaaacaccccccgccggaccgagcgaccgaacccccgcgcagcgggacggcca

SEQ ID NO: 159092 - RNA, 84 nt, Homo sapiens
accggaccgagagcggaccgagagcgcgaaacgcacgagaagcaggacaaggacagcccggaggccaccaggaccgaacgcccc

SEQ ID NO: 159093 - RNA, 72 nt, Homo sapiens
ccacagccagccaggcggagaccggcgacggccggcgacacccccaccgccacgggcaaccgcgcgcggccg

SEQ ID NO: 159094 - RNA, 60 nt, Homo sapiens
ggccccccgaacagcaggcgccaccagcccggaggacggacagcgcaggagaagagggcc

SEQ ID NO: 159095 - RNA, 51 nt, Homo sapiens
agccaagccagaagcaggagggcggggcacaaagcgaaggcacgaagcggc

SEQ ID NO: 159096 - RNA, 75 nt, Homo sapiens
cggggccggaccagccccgaaacacgggaagaacaggacaccaggccgagcacgaaccgaccaacaggcgagagg

SEQ ID NO: 159097 - RNA, 76 nt, Homo sapiens
ggcgccgcgccggcggcggcgaccccgcacacacacccaccagccacggcagcccagcggggacccagccgccccg

SEQ ID NO: 159098 - RNA, 76 nt, Homo sapiens
acaacaccacagccggaccgcacccgcaccgccaaccacgggcgaggaggcgccgcgcagaaagccacacacgagg

SEQ ID NO: 159099 - RNA, 92 nt, Homo sapiens
ccagaaggacacacacccccaggcaacgaggagacggaagacaacccaggaaaggggcggaaggccggaacggacagacccagggacacaga

SEQ ID NO: 159100 - RNA, 75 nt, Homo sapiens
cggcgaggaaaaaggcggggagcgcagcagcccggaagcgcgaggcagacagaaccaggagcagcccgagggccg

SEQ ID NO: 159101 - RNA, 75 nt, Homo sapiens
agacacagaagcagcagcggaccaaagccaccagaaaacgaacaggagaaggaacaaaggaaacggacagaaaag

SEQ ID NO: 159102 - RNA, 74 nt, Homo sapiens
ggcccaaccgcccaccagagcgcccgcaagaaacgcaacaaccagacaggcccagggaaacacccggagaaccc

SEQ ID NO: 159103 - RNA, 112 nt, Homo sapiens
ccacggccgcaaaagccaagggaaaagacgggcaggcgagcccgacggacaacagacagacagagagagcaaaacgacgaaggagccaagaggaccgggacccaaacagggc

SEQ ID NO: 159104 - RNA, 87 nt, Homo sapiens
gcggcgccgcgccgagccacccgcccgcccaaggcccgcgggcgggagaacggaaaaccccaacccgaaagcaccgcagacaccggg

SEQ ID NO: 159105 - RNA, 56 nt, Homo sapiens
gacaagaaggaggaaaggcgggggagggccgaacaggggggaacgacaaacaaggc

SEQ ID NO: 159106 - RNA, 76 nt, Homo sapiens
aagaaggaccacgaacaaagagagagcagcacccggaaagagaaaccccaagccaaaggaggcaggcagcaccggg

SEQ ID NO: 159107 - RNA, 81 nt, Homo sapiens
gaccaggcgacaccgcgacaccccaacaaacaccagcgcggccggccacgacaagcggcaggggagaaggggccacaagaa

SEQ ID NO: 159108 - RNA, 74 nt, Homo sapiens
agcaggagaaacgcaagccagacacgcgagaaaagaagcgggcaggcacccggcgcgcacacaaagaaccgcag

SEQ ID NO: 159109 - RNA, 53 nt, Homo sapiens
gccccccccaagacaaaccaagggcgggggggcacaagaagaagagccgcccc

SEQ ID NO: 159110 - RNA, 52 nt, Homo sapiens
cgccgcgggcagcgcgcggcccgggcagcagccgcgcagagacaagagaaca

SEQ ID NO: 159111 - RNA, 57 nt, Homo sapiens
agcgcccacgcaccccaccggcgcgcgcggcggcccgcgcacagagcccaaaagcaa

SEQ ID NO: 159112 - RNA, 77 nt, Homo sapiens
ccggccggacaagcccaggagccgaccagagagcaggagggagaaaacgcaggacacaaggaagaagaaggaccaga

SEQ ID NO: 159113 - RNA, 74 nt, Homo sapiens
ggccaccaacagaaagggggcagcaaaaggcggcacagcaaacacacaagagccagcaaagggagcagcacaga

SEQ ID NO: 159114 - RNA, 80 nt, Homo sapiens
gcgagggcaaggaccgcggcacccacgccgcaccggccacccggcccgacaccagccgcggaacccagaaccgcggacca

SEQ ID NO: 159115 - RNA, 57 nt, Homo sapiens
ggggagggggaggagccgaacgagccccagccaggggccagagcagaggcggagagg

SEQ ID NO: 159116 - RNA, 75 nt, Homo sapiens
aacgaagaaaagaaaggccaagaccaggaaaggaagggcgacacaggaaagagacggacggggccacaggacccc

SEQ ID NO: 159117 - RNA, 60 nt, Homo sapiens
acaaaccgaagaacagcgggaaagaaggcaaaacacggagcaacggaaaacacgaacccg

SEQ ID NO: 159118 - RNA, 75 nt, Homo sapiens
ggccggccaggaaccacccgaaggcacgcagaagccagcggacgcccgcaacggggaccggccagagaccgccgg

SEQ ID NO: 159119 - RNA, 65 nt, Homo sapiens
aagaagcagggaagcacagaaagaccaaaagacaaagaagaaccaccagccgagaccagcaccac

SEQ ID NO: 159120 - RNA, 76 nt, Homo sapiens
accgggcccgccggagaacccaaccccacaagaggacgaccggcacagggaaaaggccagggagaccgccacgacg

SEQ ID NO: 159121 - RNA, 63 nt, Homo sapiens
ggaggcgacagcaaagcaccacaggggaaaacaagcagaaccggggaccagccaacagaacaa

SEQ ID NO: 159122 - RNA, 83 nt, Homo sapiens
ccgcaacaagcaaccaggggagaggaaagccgaaggacagagccacccgacacccggcagaccaggggggccgcccgcccaag

SEQ ID NO: 159123 - RNA, 52 nt, Homo sapiens
ggaaagcaggaccgcgacggcagcagagcacgaagaagcacgagggaaccag

SEQ ID NO: 159124 - RNA, 74 nt, Homo sapiens
caaaaacggggaaagagagggagaaagccagccagacggaaggagaccccgaccgacggaaagccagacacaag

SEQ ID NO: 159125 - RNA, 72 nt, Homo sapiens
ggccggcaaacaaggaaggcgcgggacagcaagggccaaaccacgaaacagagccaaagaaaaacacgaaag

SEQ ID NO: 159126 - RNA, 74 nt, Homo sapiens
ggagaaggaccaagaaccagggagggacgggacacccggagcgggaagacacaacgacaagccacaacgccgcg

SEQ ID NO: 159127 - RNA, 56 nt, Homo sapiens
gggaggccagccggagaagcgagcagcgggggacgaacccaacagaggaggaagaa

SEQ ID NO: 159128 - RNA, 86 nt, Homo sapiens
acagacggacaacacccgcgcagccgggcgccagaagaagcggaggacagcaggccccgcgccgggcaacagcaagagaaaagccc

SEQ ID NO: 159129 - RNA, 65 nt, Homo sapiens
gaaaacggccagggccgccgcaccaacaagagcagacagcagaggaaaaccgggacgacaggcaa

SEQ ID NO: 159130 - RNA, 78 nt, Homo sapiens
ccgcacccgccccgccgaggcgacccagaaggcgggagccgaacacaccggcgacgagagccgagaaggaccaggacc

SEQ ID NO: 159131 - RNA, 82 nt, Homo sapiens
acacagcggagcgcccagaggcgagcccggggaggaagagaagacggacagcacgaaaagccgcggccaggaggaagaggca

SEQ ID NO: 159132 - RNA, 120 nt, Homo sapiens
aaagggagcagccaacaggccagcagcggcggaaacaccagacacaacacacagccccaacagaaaggcgagaagagccaaacagccaggaccaggggaggagcccacaggcgccacacg

SEQ ID NO: 159133 - RNA, 70 nt, Homo sapiens
aggcccccgcacccaaccagaaggggcagggcaagcagaggaaaaagccaggaccacgggccggcacacg

SEQ ID NO: 159134 - RNA, 82 nt, Homo sapiens
gggaagagacagagccagccgccgaggaacccggaggaggcacagccacagacgcggacgagaggaacaccacaagccgcca

SEQ ID NO: 159135 - RNA, 87 nt, Homo sapiens
gcccgcgggccagaacgagggcgcccggcagacgacagagagcgaaggccgagcagagcagccggagaccaccgcggcccagcgacc

SEQ ID NO: 159136 - RNA, 55 nt, Homo sapiens
ccgacccgggcgaagagacccagagcaggacggacaccgaaccggcggcgaggcc

SEQ ID NO: 159137 - RNA, 77 nt, Homo sapiens
cagggcaaaggccccgacagcaccagagcagagcggggaaccgaacagaaagacagcgacacccagcaaccaacaga

SEQ ID NO: 159138 - RNA, 77 nt, Homo sapiens
gacagaggaggcgcagacaacaagccaggcaagacccgcccgccaagcgagcaggaaaggccagcacagaagaacgc

SEQ ID NO: 159139 - RNA, 60 nt, Homo sapiens
ggaaggggcccccggggaggccgacccaccaggaaccaaccgggagccccccaagagacc

SEQ ID NO: 159140 - RNA, 78 nt, Homo sapiens
gacccaacaccacaggcagggacagcagggacagccgggagagcaggagagacccgcgagggaagccggggagaaagg

SEQ ID NO: 159141 - RNA, 71 nt, Homo sapiens
ggagagaagaaggcaagcgacggcccgaacgagcggaggccaacaaagagcgcgccccccagaaccgccca

SEQ ID NO: 159142 - RNA, 78 nt, Homo sapiens
gcaaggcaagaccgaacagaaggaacgacgcggaccagaagccagagcgaggacgccggcaggcagagaaggcagggg

SEQ ID NO: 159143 - RNA, 76 nt, Homo sapiens
cggggccacaacacggccgcacggcccgccccggcgggcagagaccagcaccggagaaggccaggaccccacacca

SEQ ID NO: 159144 - RNA, 73 nt, Homo sapiens
ccccgcggcggcagccacaggagaaaagaaagccagaaggaaggaagcaacgaaccaagaaaaaacggaacag

SEQ ID NO: 159145 - RNA, 52 nt, Homo sapiens
aaaagccgcacaggggcagggaaccgaaagacaagccgacaaagccagaccc

SEQ ID NO: 159146 - RNA, 69 nt, Homo sapiens
caaagccgggaagacaaagcaggcccgaccacgaagaagaggacaggggacgcgcggaaaacgccacac

SEQ ID NO: 159147 - RNA, 84 nt, Homo sapiens
ccgcgcccggccggacccgggcccgagccagggccccccacgcgagaacccgggccggggcccgggggcccgagcccccaccca

SEQ ID NO: 159148 - RNA, 69 nt, Homo sapiens
ccaaccgcagaggccgacgggaaggggccacagacacaccccacagggaagccagccaggccagaaaga

SEQ ID NO: 159149 - RNA, 77 nt, Homo sapiens
aagaggaggcccgcaacggaccaggggagcaccacgccgccgaggaccacaagagcaaacaaaaaacagaccaacca

SEQ ID NO: 159150 - RNA, 66 nt, Homo sapiens
agcccaacaccacccgagagccccaaggggggacacaggacaacgagagaagccgaagcgggggac

SEQ ID NO: 159151 - RNA, 62 nt, Homo sapiens
cgggaagcagcacagaacacagccaagggaagcaacaggccacccgccacccgggcacccag

SEQ ID NO: 159152 - RNA, 66 nt, Homo sapiens
cgcgggggagccccgggagccgcacggcgacccaaagaacaacaagaggcaccaggcaggaccgac

SEQ ID NO: 159153 - RNA, 73 nt, Homo sapiens
agaagcaagagaaggaaaagacagggagagaagaaggccaccaggcgagaaagggggaaaaaagcagccagcg

SEQ ID NO: 159154 - RNA, 69 nt, Homo sapiens
caccacaaccacacacagggacaaggacgagagagaaacagaagcggggggacggaaagccagccaacc

SEQ ID NO: 159155 - RNA, 82 nt, Homo sapiens
cgacaagaagccagagcagccgcccaaccgcgggaccaaccacccgagcggcgcggacgaaggcgacgccggaccgcgaaga

SEQ ID NO: 159156 - RNA, 46 nt, Homo sapiens
accgacaggccacagcccgcagaacaagacgaagagagaaaggcag

SEQ ID NO: 159157 - RNA, 56 nt, Homo sapiens
aaccagaggcagccagcagggggaggaccaggcccggagacgcgacgggcaccaca

SEQ ID NO: 159158 - RNA, 70 nt, Homo sapiens
gcgaagaagaggagcagagaccgcggagaaccacccgagaaagcagggaaagcacaaggaagaagcggac

SEQ ID NO: 159159 - RNA, 81 nt, Homo sapiens
agcggaaggaagccagaagaagggcgcgcaaacgaaggaaaaggaaaaccaacagcgccacaaagaccggacacagacaga

SEQ ID NO: 159160 - RNA, 67 nt, Homo sapiens
gcgggcgcacaccacgccgggaaccaagaccaggacaaagaagacccggagagacaagccggaggac

SEQ ID NO: 159161 - RNA, 81 nt, Homo sapiens
cgcgacacgacccaagaacgccgcgggggaccgccccgcccggagcgaggacccgcggacggcggacgaacccaaccccag

SEQ ID NO: 159162 - RNA, 79 nt, Homo sapiens
agagcacccgggcgggggggccggccccggccggccggccccggagcggcggaccccggcagggggccggcaagcagcc

SEQ ID NO: 159163 - RNA, 72 nt, Homo sapiens
cggacccggcagaaagcgacgggaggagggagaacacaggaaccggcccgggaccaaagaccagacggagga

SEQ ID NO: 159164 - RNA, 74 nt, Homo sapiens
cggcccacaccgccaccgacacagcggcggaccccacaccaagcgcagacgggacacggccggccaggagcggc

SEQ ID NO: 159165 - RNA, 69 nt, Homo sapiens
ccagcacaccccgcgagcaaggggagccacgaagcccccacccacaggcgacagaggcaccgcaccaga

SEQ ID NO: 159166 - RNA, 76 nt, Homo sapiens
aaaggaggaaacgcaggaaggaacccgaagaaagcaaaggaaaaagagagccacacccggcacacagggagaagcc

SEQ ID NO: 159167 - RNA, 83 nt, Homo sapiens
cagcccccgcccaggagaaagccagggggaaaccgagggagccccaggcaccgcccagccccacccagcccacgacaaaacaa

SEQ ID NO: 159168 - RNA, 65 nt, Homo sapiens
gcggcaggaaggccaccacagggccaacaagcagcgagcccaccgggacaccgacccaagcccag

SEQ ID NO: 159169 - RNA, 84 nt, Homo sapiens
ggagcccacgcccccggcaggggaggcccgcccggccccacggcagaacagccagggcgagggcacgccagaccacccacagaa

SEQ ID NO: 159170 - RNA, 83 nt, Homo sapiens
ccccccggagacgcaaccaaggggccccgcacagcgcagccaggggcgaggaccacggcgcccagaaccccagcgaaaacaga

SEQ ID NO: 159171 - RNA, 75 nt, Homo sapiens
agaccgggagaagagggcacaggcgcccacccgagaacacaaggcggcgagggagaggagagaaagaacccacgc

SEQ ID NO: 159172 - RNA, 77 nt, Homo sapiens
aagggaagaaaagggggaggggacaacaagccaaagagaagggaaggaaccaaccaagcggaacagcccaggcaaac

SEQ ID NO: 159173 - RNA, 87 nt, Homo sapiens
cgaagagcaagaggaggacaggagagaagaagaagaaaccggagaaggaacagaccccggaggagccgccaacaccacaacccccga

SEQ ID NO: 159174 - RNA, 80 nt, Homo sapiens
ggaaaccgcagcagccgcggagcacacggagccaagagcaaggccgagcaggcacgggcagcaggagaggaaggaggagc

SEQ ID NO: 159175 - RNA, 72 nt, Homo sapiens
ccgccggggaggaaggagaggcggcaggcagcgccgcagcacacacccacgaccccgcacacgcagcaaaac

SEQ ID NO: 159176 - RNA, 100 nt, Homo sapiens
aaaacaacagccaccagaagaacgcgaaggcccgccacagagaaaaaggagcacacagcaggggcgaggaagagacaggcgggggagaagaagcagggcc

SEQ ID NO: 159177 - RNA, 71 nt, Homo sapiens
cgccacgcgggagcgagaccggagcgccacggccacggccccccccaaccccgccgggccaaggaacaacc

SEQ ID NO: 159178 - RNA, 69 nt, Homo sapiens
cggggcggccaggcagccaccgccggccgcacggagaaccacggggaccaagaagcgagcagcccaaac

SEQ ID NO: 159179 - RNA, 82 nt, Homo sapiens
gaagcccagggaaccaccaaccccagagcagcccgacggccaggaggcgaagagacgaggaagcccaggagcccgaacacaa

SEQ ID NO: 159180 - RNA, 59 nt, Homo sapiens
caagcaagccaaaacgcaccgggacccacagcgcagaaccggccgaaaagcacaaacag

SEQ ID NO: 159181 - RNA, 53 nt, Homo sapiens
cagaacaagacacaagaggacagccggaacaaagaccaaggccgacaaaaccg

SEQ ID NO: 159182 - RNA, 47 nt, Homo sapiens
acaccacacgacgggaaccccggaggcgcagcccccaagacgggccc

SEQ ID NO: 159183 - RNA, 73 nt, Homo sapiens
aaggggaaaccgacggaaagcagccaaagggagaccgagcagccaaaaagccggcgaacaagacgaagcggaa

SEQ ID NO: 159184 - RNA, 73 nt, Homo sapiens
accagaggaccacaggcaaagggcgaggggaaaggaggagaggagcgaaaccgaagagcagagaaggacacag

SEQ ID NO: 159185 - RNA, 80 nt, Homo sapiens
accacccggaggagaccggcagcagaggaggccaccagaaacggccagcgagacccggaggagcggacgggcggaccagc

SEQ ID NO: 159186 - RNA, 88 nt, Homo sapiens
ccagggcccgcgggccaggagagcgccggcgggcagccgcgcaacggcccgcggcgcgggaggagacggccgaccgacgcggccacac

SEQ ID NO: 159187 - RNA, 46 nt, Homo sapiens
cccccaccccgcccaaggaggcccagcgacacaagcgggacggaag

SEQ ID NO: 159188 - RNA, 44 nt, Homo sapiens
acccccccccccggggccccggcgcggagcggcgcccaagacag

SEQ ID NO: 159189 - RNA, 58 nt, Homo sapiens
acgcaccacacgacggcgcagggcagagagcgcggcagcgagcgagcagcgcgcgccg

SEQ ID NO: 159190 - RNA, 76 nt, Homo sapiens
ggggacacccggacacggcaaggagacaggcagccagcaccccgcgcgggaggggcggcaagaacccggccaggga

SEQ ID NO: 159191 - RNA, 57 nt, Homo sapiens
ggacccagcccgcagccaggccaggaacagaagccgcagcggccaagaaggacagcg

SEQ ID NO: 159192 - RNA, 77 nt, Homo sapiens
ccaaaacgaaacaaaggaccaaccaagcaccggggggaagaagaagggaacaagcggagggacgcacgagaacgagg

SEQ ID NO: 159193 - RNA, 66 nt, Homo sapiens
gcggccaccagagcggaaaaaaaagacagccccagaagggccggaccgcggaggaggggcgccaca

SEQ ID NO: 159194 - RNA, 69 nt, Homo sapiens
ggagaaaaaggaacagggaggggagaaaacgcagaacaaagcgggacagacccgcaaggaagagccgga

SEQ ID NO: 159195 - RNA, 75 nt, Homo sapiens
cagcgccacccgaccgcccccgaggcccaggcgccagcgccccacacaggggcgggcaaaaacaagacgggaacc

SEQ ID NO: 159196 - RNA, 80 nt, Homo sapiens
gccacggaggagggcgccagcaccacgacaccaaggagaaacagagacgagcaaggcgagaggcaacgaacgagaccggg

SEQ ID NO: 159197 - RNA, 60 nt, Homo sapiens
gagagccgacagaagagccccaggagcgagcacaaacgacacacgcaaaccacaaagccc

SEQ ID NO: 159198 - RNA, 68 nt, Homo sapiens
ccccgggagcgcgcgaggcacagccaagacccgccagacagccgaaaggggagacaggacgaccccac

SEQ ID NO: 159199 - RNA, 78 nt, Homo sapiens
ccggccagccccggaggcgaagaccgccgagaacccaagggggagacaggcgcccagacgagcccaccacggaccacc

SEQ ID NO: 159200 - RNA, 66 nt, Homo sapiens
ggagagaaccgaaggcaccaaaagcaagaaacacaacgaaaggaaaagggcacgcggaccacccac

SEQ ID NO: 159201 - RNA, 77 nt, Homo sapiens
aacaaccaacccaagacaccgccaagagcaacacgggggcagggaaacagacgagccggaggagcacacaagcgggg

SEQ ID NO: 159202 - RNA, 61 nt, Homo sapiens
gcagcagccgggcaggccacgagaggaccagaagacgaccccgacgcaggccaggagccgc

SEQ ID NO: 159203 - RNA, 52 nt, Homo sapiens
gacggaaccggagaaaagaaaacagcaagagagcagacgccaaagagacggc

SEQ ID NO: 159204 - RNA, 70 nt, Homo sapiens
aacgcgcacgggaaccgaagagagccgggcagaaggaggggacagagcagaaacagccaagagagggcag

SEQ ID NO: 159205 - RNA, 84 nt, Homo sapiens
gaagacgggccgaggacacaccgcccccgcccaagagcccacggagcccagaaaggcacccgaaaggggaaggaaaagaaggaa

SEQ ID NO: 159206 - RNA, 73 nt, Homo sapiens
cgcgcagggcggccccggcgggggcgcggacaagcagaccggaagaccgacggaagaccacaccccgagggag

SEQ ID NO: 159207 - RNA, 80 nt, Homo sapiens
acgacaccccgaggggcaggaggggccgcagccaggagaacgcagacagaaaccaagccgccccgaacaacgccgagggg

SEQ ID NO: 159208 - RNA, 104 nt, Homo sapiens
aaagaacaaaagggaaaaaaggacggcagcacacaacaaaacacaggagggggaaaggaaaggcaagggcagaaaagaggggaaaaggccagccgcacgcaggc

SEQ ID NO: 159209 - RNA, 74 nt, Homo sapiens
acacggggcgcggccacagccaggcgagcagaggcccccgagccgcagagagcacagcaaggaggaaacagcaa

SEQ ID NO: 159210 - RNA, 76 nt, Homo sapiens
gggaggagacccccagcgcgcgccccgcccccccccagagcaagggaaggaaggaacagagaagacccgcccccag

SEQ ID NO: 159211 - RNA, 51 nt, Homo sapiens
aggagaaaagaggcggcccacccccccggccgcgaggaacagagacagacc

SEQ ID NO: 159212 - RNA, 88 nt, Homo sapiens
agacagagcccccggccagcggggagaggcaccccacagcaacagcccccaggcacaacacagcaacacaaggccccgcaggcaggac

SEQ ID NO: 159213 - RNA, 72 nt, Homo sapiens
gccacgcaacccgccccgggcgagaacccgcccagcccccaagcagcgggcacagcacgagaagaggccggc

SEQ ID NO: 159214 - RNA, 77 nt, Homo sapiens
gcggaaacgcccgggacacccacaaacagcaaacacccaccgaggcaaaaggagcggaagcgcggggcggcgcccgg

SEQ ID NO: 159215 - RNA, 78 nt, Homo sapiens
aaggcgagggacgagaacgagcaccaggacaaaagaagggcagcacaaaggaaagccccaaaccccggaacgggaagc

SEQ ID NO: 159216 - RNA, 72 nt, Homo sapiens
aagaaaaggccccaacagagccccagcaagggagcaggcgaagcgagccagggaagcgaaccaggcgaacaa

SEQ ID NO: 159217 - RNA, 87 nt, Homo sapiens
ccggccccgccagcagcacgggaggccgcccgggacgaacagcggggacgccccagcagaccgcccaggagaggaaagcaggaggaa

SEQ ID NO: 159218 - RNA, 79 nt, Homo sapiens
ggaccagcgggaccagccccgccccacaccggaacgggcaccccgggcggaaaagagggaaggcgacaccccagaacca

SEQ ID NO: 159219 - RNA, 77 nt, Homo sapiens
cagagacaaaaaacaaagagcggagcccaaagccacggccccagaagaagggacacgagaaacgaagcaggagagaa

SEQ ID NO: 159220 - RNA, 65 nt, Homo sapiens
aaaggggcggaggacacggggaaccaacagaagaaggcacccacaacacagaacagggcagcaga

SEQ ID NO: 159221 - RNA, 87 nt, Homo sapiens
gggcggacacggccaccgcccagcgggagaggagcccaccaggacgaccgcgccgcccagcacgccaggaacaaaacaggaagcgga

SEQ ID NO: 159222 - RNA, 85 nt, Homo sapiens
caaagagaagggacaacggagagcgacccagcgacagagaaacagcagcccccacccaggaaggaacaaccccacaccaccacac

SEQ ID NO: 159223 - RNA, 78 nt, Homo sapiens
agaaccagcgacacaccgggccaacagacgggaaagggaaccccggaacgaagaaaagaaaggccaagaccaggaaag

SEQ ID NO: 159224 - RNA, 80 nt, Homo sapiens
ggcccccgagagccgccgacagaagaaagacggcggaccgcgggggagaacgacacaccaaagagaccggagcccaccag

SEQ ID NO: 159225 - RNA, 35 nt, Homo sapiens
ggagaagcgcagaaggacccagagagggaccaggg

SEQ ID NO: 159226 - RNA, 66 nt, Homo sapiens
cggcgggaacggaacagaaccagaacaggaacccgaaggcgagacccgacagcagacagcgggccc

SEQ ID NO: 159227 - RNA, 77 nt, Homo sapiens
cacggcaaaacaggacggcgaacacaaccagaggcgaggaggaggccgagaccagccaggggagacccaggggggag

SEQ ID NO: 159228 - RNA, 104 nt, Homo sapiens
aaacgggaaggaaaagacagaaaaagaaagaagccaaagagaaaggaccgggcaacaaagcgccagcaagacggcgcccgaccaagagacaggagacagaaccg

SEQ ID NO: 159229 - RNA, 72 nt, Homo sapiens
ccaggacaagggaaggaacacgaaaagagacaaaaggcaaaaggacccagaagaaggcaaccaagcaacacc

SEQ ID NO: 159230 - RNA, 58 nt, Homo sapiens
gcaaaagggaaaaaacaggagcacagagcaggaagacacccacgaggacaaccccaca

SEQ ID NO: 159231 - RNA, 68 nt, Homo sapiens
gaaggaccaagaaccaggaaggaaaacacccggcagggaaggaaggaacgcaaccgaagacgcagagg

SEQ ID NO: 159232 - RNA, 78 nt, Homo sapiens
agccgccaaccagcgcaggcccggggcgaagcgcgggagggccgggggacggcacaccgacagagaacccaggccaac

SEQ ID NO: 159233 - RNA, 39 nt, Homo sapiens
accgggccggaacgagacgcacggcgagggcggcccagg

SEQ ID NO: 159234 - RNA, 77 nt, Homo sapiens
caccaaccaagaagagccagggcccgagaaacagccagagcaaccagccagagagggcggggcagaaaaacgggacg

SEQ ID NO: 159235 - RNA, 85 nt, Homo sapiens
gcgacgcaggccccacgaggggagggcgagccgccagagaaccagagagcacagagaaagcgggaaacggccaaacagaacacca

SEQ ID NO: 159236 - RNA, 64 nt, Homo sapiens
ggagcgacaggggccgggaccgccgcacacagcaagaaggaggccacagcaaacgggaagagga

SEQ ID NO: 159237 - RNA, 84 nt, Homo sapiens
cgcagccagaccgggagcgaggaggcgcaaggacccccgcgccaggccagaagccaaggagcccaggacgggggaccacaacac

SEQ ID NO: 159238 - RNA, 98 nt, Homo sapiens
ccgagaggaagacgagccgggaggaacggcccggaaacaggaggacggccaaccgccccccagcagcaggcacgggcgaaccccgagccccgccccac

SEQ ID NO: 159239 - RNA, 74 nt, Homo sapiens
cagggcgggggcgggccgccgaccggggagaaggcacgcacacggccagaaggaaaaccgcaccgaagcagcca

SEQ ID NO: 159240 - RNA, 76 nt, Homo sapiens
ccgagagccgcccgggccagcggccgcgcacccccggccggaggcaccagcggaaggagcaaaagccccgccaccc

SEQ ID NO: 159241 - RNA, 84 nt, Homo sapiens
gaggagacacgcgccagaccgcgcccgcagcaggaccgggagccaacaccccgcgaggccaggagcccccgccggaggagcggc

SEQ ID NO: 159242 - RNA, 78 nt, Homo sapiens
ccgggccgaggcgaccagcaggaggaaaaaaaagaaggagccaagagggggccggccgccaagacacccccggcccgg

SEQ ID NO: 159243 - RNA, 78 nt, Homo sapiens
cgaaccaaaagcgcaaagcaaacggagagcaggagccacaggaaagagcagaaccagaccagcaaacaacagagacac

SEQ ID NO: 159244 - RNA, 68 nt, Homo sapiens
ggcagggcgacgacaccaacccgccccgggccaagcaaccccacccagccggaagcacaaacaccagc

SEQ ID NO: 159245 - RNA, 66 nt, Homo sapiens
gagcacccgcaccaagagaagacccggccaagcaaggggcggacacaaggcggggcccaaaaagag

SEQ ID NO: 159246 - RNA, 40 nt, Homo sapiens
cagagaagcaaagaagcagggagcaaggaccacagaaacg

SEQ ID NO: 159247 - RNA, 71 nt, Homo sapiens
gaccagccggcgggccggaccccccgcagccggggacgcagacgaagggaaacccagacgacaaggaaggc

SEQ ID NO: 159248 - RNA, 61 nt, Homo sapiens
gagaaggacaccgaagcagaggagcagcaggaccagcgaaaagggcgacagcaagccaggg

SEQ ID NO: 159249 - RNA, 79 nt, Homo sapiens
ggaccggcccacgcccacaaggaccagcaaacccacaaggggcaccggggaagcaaaaaaagccaacggaccccacaaa

SEQ ID NO: 159250 - RNA, 99 nt, Homo sapiens
agggagcgcacagagaacggcacccaggccaggcaccggccgccaccagggcacgggcaggaaccacagagaacagcccggacacgcgcaccccgagga

SEQ ID NO: 159251 - RNA, 80 nt, Homo sapiens
cccagagggccagcccccacccaggccgagcgaagcccacaaccccgccgggcacaggaaaggccaacacccagagacgc

SEQ ID NO: 159252 - RNA, 82 nt, Homo sapiens
ccgggcagccgaacggagggcgacggagggagggcacgaaggcgggaacaccgagccagaagggagcaaagcgacgccacgg

SEQ ID NO: 159253 - RNA, 60 nt, Homo sapiens
gaggaggaggccagcggaaagcgacaggaaaggccccagggcaggggcccggagagcgcg

SEQ ID NO: 159254 - RNA, 81 nt, Homo sapiens
ccgagggacgcgccgcccggacggccgcagagcgcgccacagagacaaagggagacacaggcaaggaagcggagcaagaga

SEQ ID NO: 159255 - RNA, 70 nt, Homo sapiens
caagaggcggccaaggggacgagcaaaggaagcgcgaacagcagcgcagggcaagacggacgagacgcgc

SEQ ID NO: 159256 - RNA, 80 nt, Homo sapiens
aggaagcgcgcccggcgcacgacaagccgagaccaccaggagcagagcggaggcaaccagccaaaacaacggaaaacagc

SEQ ID NO: 159257 - RNA, 61 nt, Homo sapiens
aagaaggggaagggccagccaccggaccggggccaagcaggaccagaacagagaagaaagc

SEQ ID NO: 159258 - RNA, 81 nt, Homo sapiens
caaaacggcgagcaagagaggcagcgcccggaccacaggccaagcgacacaagggcaccccacggcgacgcgcaacagacc

SEQ ID NO: 159259 - RNA, 78 nt, Homo sapiens
ccggcaagaacggacgggcgccacaagccacacggagagaggagccagccacacggaaagaagaaaagaaaagagaga

SEQ ID NO: 159260 - RNA, 77 nt, Homo sapiens
ggacccgccaggaaagccagagacaaggccccgaacccaggcggaggcagggaaccgagccaagagccacaccagcc

SEQ ID NO: 159261 - RNA, 81 nt, Homo sapiens
agaaaacaaggacacaggacaccgggaggggagagaggacgggagaccagcaggggacagcccagaccaaaccccagacaa

SEQ ID NO: 159262 - RNA, 92 nt, Homo sapiens
cgccccgccgccgcacccgcacacccgcccccccggccaggggcagagggcgcagcaacccagcaaggcccacaaacagcgcagaaaagcca

SEQ ID NO: 159263 - RNA, 81 nt, Homo sapiens
caaagcccagaagagcacagaggccaaccggaccagccacaaagccggaggcagcagaacagagaagcgaccggacaacca

SEQ ID NO: 159264 - RNA, 82 nt, Homo sapiens
gacgggggccgggcacagcagcgggcggcaagggcccacacccaaagggggacgacgagagccagagggacccggcccgcgg

SEQ ID NO: 159265 - RNA, 68 nt, Homo sapiens
agccaaaacacgacagagggagaagaaacagacgacaggaaagaaagcacgcagaagacggaaccgac

SEQ ID NO: 159266 - RNA, 65 nt, Homo sapiens
cgccgcgccgcacgagcaccagccagagccagggaaccgccgcgccacccgagccagccccgcgg

SEQ ID NO: 159267 - RNA, 82 nt, Homo sapiens
cccggacaagccagacaacgccgacagcggcagcagaagaagccgaaagacagacgagcgccccaggcacgaggggaacggg

SEQ ID NO: 159268 - RNA, 83 nt, Homo sapiens
acgcaccccagagccgacccccaccgcaaggcacaaacagcagacaaaaggaaaaaggcgagggaacgaagaagcagcgacgg

SEQ ID NO: 159269 - RNA, 73 nt, Homo sapiens
gggagcggaggaaaagggccagagagcccgacaaaggagaggaagaagaggaggcaaccggagaaccaaacgg

SEQ ID NO: 159270 - RNA, 77 nt, Homo sapiens
cgagagccgcccgggccagcggccgcgcacccccggccggaggcaccagcagacggagcgcaagaggacggcagcgc

SEQ ID NO: 159271 - RNA, 71 nt, Homo sapiens
gcaaacacggcaacgggcaaacaagaccaggggagccggcgccggaacccagggaacccggacaaaggcgg

SEQ ID NO: 159272 - RNA, 76 nt, Homo sapiens
gggacaggcggcggccgccgcgcagcgccagggggacccaaaaggaaaaggacaggcagcagagagacaagggagg

SEQ ID NO: 159273 - RNA, 79 nt, Homo sapiens
gccacggaggggcagccacccccgaaagggcaagcagaaaccgggaagggggcgccggcggacgcacccggacgcaaag

SEQ ID NO: 159274 - RNA, 77 nt, Homo sapiens
gcggcagggcagcagaagcgcaccccgacgccgaggaacgagagcgcgaagcaagagaggagccacacaggccggaa

SEQ ID NO: 159275 - RNA, 87 nt, Homo sapiens
accggccacacagcaggaggcagcgagaaggcccagcagagacgcgccaccaagggccccgcgaccaaagcccggccacagccccag

SEQ ID NO: 159276 - RNA, 82 nt, Homo sapiens
aagccccgggagaagcagcgccgcccggggcagaccaggcagaacccaggagaaacgagagggacagcaaggaagacgccag

SEQ ID NO: 159277 - RNA, 79 nt, Homo sapiens
caacccaaacagggaccaaccaaagacgccaaggagaaggcagaccgggggaccccgaagcaggaggcccaaggaacag

SEQ ID NO: 159278 - RNA, 84 nt, Homo sapiens
cggaaacccagcggcccagccggcccgggcgcgccaggcacagccaagagcggaccggcagcggccagcgcagcggccggagca

SEQ ID NO: 159279 - RNA, 35 nt, Homo sapiens
cccgagaagccgacgggggcgaaacacaaccacgc

SEQ ID NO: 159280 - RNA, 50 nt, Homo sapiens
gcagagcggacgcagaccgaacggcaaggggaaaccagaagcgggggggc

SEQ ID NO: 159281 - RNA, 34 nt, Homo sapiens
agggaccaagcacgccagaaagagccaccgcaag

SEQ ID NO: 159282 - RNA, 72 nt, Homo sapiens
cccaaaaggaccacggaagagaggccaacagaccacagaaggggcggggaacagaccagggaaggggaggag

SEQ ID NO: 159283 - RNA, 72 nt, Homo sapiens
agaccaccgggagaccccccaaaaccaagacagccgggaagccaccaagccaggaaccaacgcagagcccca

SEQ ID NO: 159284 - RNA, 76 nt, Homo sapiens
gcaaggagaaaaggggagaaaccaacaagaaaaagaccgggcaaagaaggggagcgaacgaagaaaggccaagagg

SEQ ID NO: 159285 - RNA, 75 nt, Homo sapiens
aggagagcgaaggccaacagaagagcacagaccagccaagaaaacgaaaagagcagccgacggaaacggccccca

SEQ ID NO: 159286 - RNA, 53 nt, Homo sapiens
gaaggcagcccgacgcagcggggaagacccgacaagccaccagggcaccccca

SEQ ID NO: 159287 - RNA, 76 nt, Homo sapiens
gcgggcgcgcacccgagccgcaaggaggcaccacaaccagagcgccaccccccccacgggagagacccgagaccag

SEQ ID NO: 159288 - RNA, 69 nt, Homo sapiens
gcaggcccaacacgcaaaagacaggcacacagcaacagaagaccggccgcgacagagcgccggcccagg

SEQ ID NO: 159289 - RNA, 78 nt, Homo sapiens
agaggaggcggggcggagagggcggcgccgaccacgcacacgggcagcacaagaggaaaggccaggaagaaaagaaaa

SEQ ID NO: 159290 - RNA, 83 nt, Homo sapiens
aagagcagagcagaccagaagagccaccagggagcgaaaccaagcacaccgggcccaccccaccccacaagccaaacaaacag

SEQ ID NO: 159291 - RNA, 82 nt, Homo sapiens
aaaagagcccggaaagaagagacagagaggagcaaacaagaaggcccccgcgaggccggcggccggaggaccaccccgcaga

SEQ ID NO: 159292 - RNA, 70 nt, Homo sapiens
cgcgcaccaaagggaaaggcaacaaagaagagaaaacacaacccaagaacagccacacggccagcgaaac

SEQ ID NO: 159293 - RNA, 73 nt, Homo sapiens
caagaagagagaacccaacagagcccaagagacacaggcagaagaagaccgcaaggaagaagagggacaggca

SEQ ID NO: 159294 - RNA, 81 nt, Homo sapiens
aggacaacaagcagacgccaaacaagcaaacggcaccccaccaggagagcaggggaacaggaaccgaaaagaacaggagcc

SEQ ID NO: 159295 - RNA, 73 nt, Homo sapiens
gggagagcagcggggcacaggcggccacaggcagccgggaccagcacccaccgaggaacacaccgggacagga

SEQ ID NO: 159296 - RNA, 90 nt, Homo sapiens
gcggccacggccggaaggcagcaagccaggagacaaggacggcagcaagggacaacagggggcaacccgggcagggccagacaggccaca

SEQ ID NO: 159297 - RNA, 82 nt, Homo sapiens
gagcaggggcgggagcaggggcgggggcagggccagggcgcaggggagaaacaaggcgccggagcagcgccgcgccaggacg

SEQ ID NO: 159298 - RNA, 90 nt, Homo sapiens
ggcgaggagcgagcgcgcgaggggcggccgagaggaaggaacagagccacagagaaaaagacgccacaacagaagagccagagaaaacac

SEQ ID NO: 159299 - RNA, 36 nt, Homo sapiens
ggccgcgcccgcacagacccaaagacaggaccacgc

SEQ ID NO: 159300 - RNA, 79 nt, Homo sapiens
ggggaccggcggcggcgcccaggcacccggcccgggggccaccgagacaaacacgggaaaaaagaaaaacaaagaaaaa

SEQ ID NO: 159301 - RNA, 77 nt, Homo sapiens
cggaacagcacgaggggcaggcccaccagccccgccaaacaggacgagacaagggcaacgagacacccagcggcccg

SEQ ID NO: 159302 - RNA, 70 nt, Homo sapiens
ccacaccgccccaggaaccccaaacgcccccgccacggccgccgccccggcccagacggagcggacagac

SEQ ID NO: 159303 - RNA, 35 nt, Homo sapiens
ccggaacccagaggcgaaccacgggaacaaaggcg

SEQ ID NO: 159304 - RNA, 66 nt, Homo sapiens
cagcagagacgacgcggcaagcagcggaagaggacgacgcgacacaaacaaaagcccacacccagg

SEQ ID NO: 159305 - RNA, 66 nt, Homo sapiens
cggggccgcgcagggcggccccggcgggggcgcggggcgcaagcagccccagacaagccaaaaaca

SEQ ID NO: 159306 - RNA, 80 nt, Homo sapiens
gaggggccgagggcagggacggggacacgcgacgaggcccgccaagaggcgccgcaggaggaccgcccccagacagaacg

SEQ ID NO: 159307 - RNA, 98 nt, Homo sapiens
gccaagagcagaaccagagccacccgggagaggaagagcgaggaggaacgcgcaaggcaaagcaccgaagaagagcgagcagaagaaaagcggcagaa

SEQ ID NO: 159308 - RNA, 71 nt, Homo sapiens
cggcggcgcgcgacccccgcgcaggcccaccgacccagcgaaagaagggaggcagcgcagaagaaaaaaca

SEQ ID NO: 159309 - RNA, 83 nt, Homo sapiens
accgagcagcccccaggaacagggcaaaggagagcacaaccacgcagggaagcccaggggcagagaaaagccagcgacacagg

SEQ ID NO: 159310 - RNA, 76 nt, Homo sapiens
gaaaaaaggaagaacaacaagagcccaaagcagagcaccaaacaggggggaaggaagacaaacagagccaagcaga

SEQ ID NO: 159311 - RNA, 66 nt, Homo sapiens
cgaacgccagaaaaaacgcggcaagcagaggaacgaggacgccgaaggaagagcggaagaggccgg

SEQ ID NO: 159312 - RNA, 72 nt, Homo sapiens
cgcgcggggacgcccccagccgcggggacgagccggaaaggcggagcagaaccaagccagcgaaggaaagag

SEQ ID NO: 159313 - RNA, 76 nt, Homo sapiens
aagagccggcacgggcgacagcaggcacagggacgagggggcggaaggaaagaaggacagcgggaagccaaaggga

SEQ ID NO: 159314 - RNA, 78 nt, Homo sapiens
ggggccaggaagcggaggagccccggaggcagagcggcgccaggaacagagacagacccgggggcccccaaggagagg

SEQ ID NO: 159315 - RNA, 55 nt, Homo sapiens
cgagagcccggagccgagcccgggaaggcgggggggaggggcacgacaggcagaa

SEQ ID NO: 159316 - RNA, 81 nt, Homo sapiens
gcgaaggccgggacccggccccggcccacaggggggggcaaacccgagagaacggggaaccgagagacacaggggcacaag

SEQ ID NO: 159317 - RNA, 78 nt, Homo sapiens
agccgaccgagcccaggagcgccacgcgcggaaggcagcgcccagcagcgcagaacaggagggccaaccggggaaggg

SEQ ID NO: 159318 - RNA, 78 nt, Homo sapiens
acaaaaaaggaagcgaaaaaaaggcggccacagagaaccgcaaacaggaaaagccgccaagggggcagaagaagaacc

SEQ ID NO: 159319 - RNA, 71 nt, Homo sapiens
acccagggcacgaaccaggaggagaccccacgccggacccaaggcgacagacgaaacaaggaagcgcaaga

SEQ ID NO: 159320 - RNA, 73 nt, Homo sapiens
gaaggaaaaaccgagggaaccaccgggcagcaaaggaggcaccgaacaggcacaaagaagccccacaaagaca

SEQ ID NO: 159321 - RNA, 68 nt, Homo sapiens
cccgcggagagcgcaagccgggcagcagcccagcggcagcagaaagagcaagacacagaccggaaacc

SEQ ID NO: 159322 - RNA, 73 nt, Homo sapiens
acagccacaaaggagaaagagcacaccagggagggggaccccaaggagcacccgggagaccacgagacaaaga

SEQ ID NO: 159323 - RNA, 74 nt, Homo sapiens
ggccgggccagccacagcaccccgaagagcagcgaacaaagcaagccgaggacaccgagagaagaccagaaacc

SEQ ID NO: 159324 - RNA, 87 nt, Homo sapiens
ggggcaaaccgccgccgcccccaccagacagacgcgcaaaacccagagccgccccgaggccccggcgcggcgcgagggcgcggggcg

SEQ ID NO: 159325 - RNA, 85 nt, Homo sapiens
ggcaagcagaccccaggaccagacacggccggacaggcagcaggaggagccagagcagggcagaagacaagcaacgcagaacaaa

SEQ ID NO: 159326 - RNA, 58 nt, Homo sapiens
cgccggcgcgcccgcgcggcgcggggaccgcggcccgagcgcaagcaagggagaggag

SEQ ID NO: 159327 - RNA, 75 nt, Homo sapiens
gacacaaaaaaaaccacagaagacaccccagggccgaaaaagaggaaccaccagaaaagcgaaccagacggacga

SEQ ID NO: 159328 - RNA, 64 nt, Homo sapiens
cacgcgcggaaggcagcgcccagcagcgcaggagggagggaacgcaaagaccggaaaggaagac

SEQ ID NO: 159329 - RNA, 86 nt, Homo sapiens
agaagaccggccccgcaaccacgaaaagagaacaggaaacccaggcccaacggcaggggagcaagaagaaagccccaaaacgaccc

SEQ ID NO: 159330 - RNA, 84 nt, Homo sapiens
gggggaagcccaaggccggcagcagcggaccggcccagaaaaaccccggggcacccagaaaaccccacaccagcgcacgcgcgg

SEQ ID NO: 159331 - RNA, 73 nt, Homo sapiens
agccagaaccgagccgaaagaagaaaaaccgccgagccagaagagcagaagggccggaccaccggcccaccac

SEQ ID NO: 159332 - RNA, 89 nt, Homo sapiens
gggggaggaggccaagccggaggcgaggcgagcccgccaagcaccgaggccccagcccaagaaaaaggcacaaacccagcacagagaag

SEQ ID NO: 159333 - RNA, 70 nt, Homo sapiens
aaaccgagagggaagccccggaaccagcgagagacaccaagaggcaccaaggagggacagggccaagccc

SEQ ID NO: 159334 - RNA, 40 nt, Homo sapiens
cgggccgaccgagcaccaggcggagcacacgcagacacag

SEQ ID NO: 159335 - RNA, 82 nt, Homo sapiens
agccacaggagaccggaggccaacggcagaagccaccacaaaagcgaaagggcacaccacaggaaagcgcaggcaggagaag

SEQ ID NO: 159336 - RNA, 79 nt, Homo sapiens
ccaacaagcacaagcagaggcaggaagaagaacaggaagagccagaaggcgacgacgaagggcaagaggcacccgacgc

SEQ ID NO: 159337 - RNA, 54 nt, Homo sapiens
gcacaggcccgggcgaaggggccacgcgacggcaacgggagaggagcccggcac

SEQ ID NO: 159338 - RNA, 84 nt, Homo sapiens
cagcaacgcgggacgcggcggcgccggccccggggagaaacgcgaaaaggacgaacaaagcgccaaacccgcggaaccagcaga

SEQ ID NO: 159339 - RNA, 62 nt, Homo sapiens
gggacagacgagagaacgagcaggccccccggaggccagccccccgcccccagggcaacgcc

SEQ ID NO: 159340 - RNA, 77 nt, Homo sapiens
cgaggaagcacgaaagcaccaacgagacccgccacacgaagaagcgccggccccaccccccccgaggcccgcgccag

SEQ ID NO: 159341 - RNA, 49 nt, Homo sapiens
gcacgcaccccacaaaaaaagagcagcagaacggagagaaacagcagca

SEQ ID NO: 159342 - RNA, 89 nt, Homo sapiens
ggcggaggcccccgggcaagaggcgcaaacaagccaacccaggaggaaaaacgggcggagaacggaaaagcaccaggaagcagagagga

SEQ ID NO: 159343 - RNA, 76 nt, Homo sapiens
cgaggccgcccccgaacacccaaccagggccgggaaacgagagcacaccagaagcacaagggcagcagccggcaac

SEQ ID NO: 159344 - RNA, 64 nt, Homo sapiens
gcccccaggagcgggaacagacccacaggcaaaacggacgggggcaggacccgcggcaccagca

SEQ ID NO: 159345 - RNA, 79 nt, Homo sapiens
agccaccacacagcaccggaaggagcagggaggggcgagcgacgcggaaagaagacccccagaaaacagaacccgggga

SEQ ID NO: 159346 - RNA, 70 nt, Homo sapiens
gggcggccccggcgggggcgcgggccccccagagaagcccgagaccaggacaggaaaaacgggaagagag

SEQ ID NO: 159347 - RNA, 65 nt, Homo sapiens
ccaacgcgacggaaaggcacgaaagccaggcgcgggacaaccaacacaaccaaagagaagaaaac

SEQ ID NO: 159348 - RNA, 79 nt, Homo sapiens
gcgagggccagcaccaccccacggccagggccaccaaccccaacccggagagcggcgagaccggacaaaggaaggcccc

SEQ ID NO: 159349 - RNA, 83 nt, Homo sapiens
caccaaggagcagcggaggagcagcgcgcccgcgccagcacacgacaccgagccgccgccgaccgagaacccaaaggcggcgg

SEQ ID NO: 159350 - RNA, 67 nt, Homo sapiens
aagagaggagagccgggggaagggggccagacaaccagggaagcacagacacgcgcaccgggaagaa

SEQ ID NO: 159351 - RNA, 87 nt, Homo sapiens
cacgacgccgggaccgggaccgccgccgccgccgccaccagcgagagccgcggcagcccaagcgaacaccgaagggagagcaagccg

SEQ ID NO: 159352 - RNA, 79 nt, Homo sapiens
gccgcgagcagagccgcccagcccgccagcgcgccgggacgcccgggaagcaggcgcaaaaacaggaaaacgacacgac

SEQ ID NO: 159353 - RNA, 69 nt, Homo sapiens
accgagggccggagccacgaccggagcaggcaacccagcaggaagcccggaaagcaaggcaacggggcc

SEQ ID NO: 159354 - RNA, 57 nt, Homo sapiens
cagcggggccccaagaagccgagacacgcggaagaagagagggcgaaggaggccaca

SEQ ID NO: 159355 - RNA, 63 nt, Homo sapiens
gcgcccacgcggccgaccaccggggacagagggagcagggacggagaggcaggcgacacagac

SEQ ID NO: 159356 - RNA, 78 nt, Homo sapiens
aggggcccggcggcggggaggccagccccgagagcgcagacaggggggccaagccagagccagaccgcagcaccgcag

SEQ ID NO: 159357 - RNA, 86 nt, Homo sapiens
cggggagcgcaggaaccagacgggggcgagcgagcaccgagcaacacacgcaggacggggaggacgcacgacgcgcggcacgggaa

SEQ ID NO: 159358 - RNA, 73 nt, Homo sapiens
aacaaaggagagaccagaggaggaagagcaagcgggggaccgaacaaggcaaaaggggcgccacaggagccgc

SEQ ID NO: 159359 - RNA, 70 nt, Homo sapiens
cccgggcggggcagagcagcccccagccagccgcgagcagaagaggcggccacccacgagccgacggcaa

SEQ ID NO: 159360 - RNA, 88 nt, Homo sapiens
gcgggaagggaagcggccaaggcacggaggccgcggcaccgaaggagaccggagcgcagagccagcagaagcaggagacgaagccgac

SEQ ID NO: 159361 - RNA, 75 nt, Homo sapiens
gcccgggccagggccaccccggcgagagacgccggcccaccagccagcggggagccgcccaccccacaagggagg

SEQ ID NO: 159362 - RNA, 74 nt, Homo sapiens
gccccagacagggacggaaaccaccgacgacccgggcggcggaccacacccgaccagcacgcacagaaaaccgg

SEQ ID NO: 159363 - RNA, 58 nt, Homo sapiens
gacacagagaacaagaagcaacagacccagagggagccagcacacaaacaaaaccaac

SEQ ID NO: 159364 - RNA, 75 nt, Homo sapiens
caacccccgaaggccgcgcccaaggacggaggcaggacgcagagacagaggaagaggcagagccggggaaggcgc

SEQ ID NO: 159365 - RNA, 77 nt, Homo sapiens
ccaggcgaaaaggcaagccaccgcccgagccaggcgccacaccaagaaggacagaagagacgggcccagcacgccgc

SEQ ID NO: 159366 - RNA, 81 nt, Homo sapiens
agcacagagaaagagaagagaagagaaaggcccggagaccgcaagccccggggcagagacacaggacacccacccgccggg

SEQ ID NO: 159367 - RNA, 99 nt, Homo sapiens
gggggccacaaagccccccggagacgcaaccaagcaccgggccgccgaagaacggaaaaagagaagcaagggaacagagagccccaacccaagcagcgg

SEQ ID NO: 159368 - RNA, 81 nt, Homo sapiens
aggccacacaagccccagccaaaaccaggggcagaaagagaagacagaaaggagggaggagcgcgacagagaagaaagcag

SEQ ID NO: 159369 - RNA, 63 nt, Homo sapiens
cgcgccgagggcgaggcggacgcgcggcgcgcagggcccccggccaccaggacccaggaccaa

SEQ ID NO: 159370 - RNA, 69 nt, Homo sapiens
agccccgagcaagaaaaaaacacggaagaagagaagaggaacaaaagaaaagcacacgccggacggaaa

SEQ ID NO: 159371 - RNA, 76 nt, Homo sapiens
cggggcggcggcggagccggcaggagcggagaggcccaccaggccagcagcaggaggaccaggacacaccccagaa

SEQ ID NO: 159372 - RNA, 71 nt, Homo sapiens
ggagaccggccgccccgcccccaccgccgcagacccccaagcagcaggaacgagaacccggaccgcggaag

SEQ ID NO: 159373 - RNA, 78 nt, Homo sapiens
aagcagggcagcagcccagaagaaagaccggaaggaaacaagagaaacgagaccagaaggaagcagaaacgcgcggag

SEQ ID NO: 159374 - RNA, 73 nt, Homo sapiens
caaaggacagacagagagaggcacaccacaagaaaccacaagccagaaccacaacgcacacggccccaggccc

SEQ ID NO: 159375 - RNA, 85 nt, Homo sapiens
cagacgccagcgggacgaggaccgagaccgcggccgggaccgagggaccagcgacggcgcacgagaccacacgaggcacaggacc

SEQ ID NO: 159376 - RNA, 74 nt, Homo sapiens
gaggcagaagcgccggacaagccgcaggagcccaagaggggaaggcgcgcacaaggcaggaacccgaggaggcc

SEQ ID NO: 159377 - RNA, 71 nt, Homo sapiens
caagaaaggagagcagacccaggaaacaagagaggcgcagagggagcagaagaagggcagaaaggacccga

SEQ ID NO: 159378 - RNA, 69 nt, Homo sapiens
caacacgcacaagacggacgaaagccagagaaaaagcggagaaaaggcacggcaggaaacgcaaccgga

SEQ ID NO: 159379 - RNA, 80 nt, Homo sapiens
acgggggaaaaaccaggagacacaaacagaaaaggaagaaagggacaaagagaggagcaggaaacggaacgccaagcgaa

SEQ ID NO: 159380 - RNA, 69 nt, Homo sapiens
caggccacgggaacaaaccaaaagcaaccggcaaacacggaagccaaggacagggacggaaaaggcgca

SEQ ID NO: 159381 - RNA, 75 nt, Homo sapiens
aaggggaaggaggcgaacaggaagcaaccaaaagcccaaaggaggcacagaaagaaaggcacagagaagggccag

SEQ ID NO: 159382 - RNA, 80 nt, Homo sapiens
agaagggaaggcgcgaggaggaaaggaggacgaggagggaggaacagaggacaccaacgggcggggagggaaggccaaac

SEQ ID NO: 159383 - RNA, 77 nt, Homo sapiens
gaccggcgcgccggaccccgccccccccgcgcggcgcgggcgccgggggcaccgaggggaggcaccgccccaacccc

SEQ ID NO: 159384 - RNA, 76 nt, Homo sapiens
cacgcccaccgcggggcagcgccacgaacaccagaccaccacccagcagcgcaaaggaaaagccaaggagacgggc

SEQ ID NO: 159385 - RNA, 79 nt, Homo sapiens
gacaacggcccaaggcaaagggagcaggaacaagcaggaacacagaaccgccaccacagaaaagggaaagaaacgccga

SEQ ID NO: 159386 - RNA, 74 nt, Homo sapiens
ggggggcgcccgccgggacgccgaccgccgggacgaggaccgggcaaaccagaacaagaccgaaccgggccagc

SEQ ID NO: 159387 - RNA, 80 nt, Homo sapiens
gcgcaggaccccggacaaacaacagggcgagcggcagagcgggacaagacaccccggacacgggaggcgcacgccaggac

SEQ ID NO: 159388 - RNA, 68 nt, Homo sapiens
gaagacagaggaaggggcgagaacagcccagagcacgcgccaagggcacacgcagagggaggaaccgg

SEQ ID NO: 159389 - RNA, 74 nt, Homo sapiens
cccaagagcgggaacaaaggagaaaaggaagaaaaagaagaaaaaaaagaaaaaaagaccagcacacagaaaaa

SEQ ID NO: 159390 - RNA, 80 nt, Homo sapiens
cgggaccgggcgcagacggcgagaccccgcacagaaaaccagacgagagacagaagacgaaagggcaagaaagagagcac

SEQ ID NO: 159391 - RNA, 74 nt, Homo sapiens
ggcgccgccacccccccccagcaggagaagacagaggagccagaccaagagacagcacaggcgagcgagcagag

SEQ ID NO: 159392 - RNA, 58 nt, Homo sapiens
gcaccggagcgagcgagagccgagaaacccccccccacccacaaaaaccacaagcgca

SEQ ID NO: 159393 - RNA, 70 nt, Homo sapiens
cacgggaaggagagcagccagcaggggccaaggagaccgcacgccggacggagcccaccaccaggagaaa

SEQ ID NO: 159394 - RNA, 84 nt, Homo sapiens
cggggggcagcaggggaagggagacgaaaacggaaacagagcccagcccagaaaaggacaagaaaaccccaggacacagagcgg

SEQ ID NO: 159395 - RNA, 111 nt, Homo sapiens
cccccacgacaagaacaggccagaaacaggaccagagagcccagcccacaaaaaggaaaaggaccggagagcaaggaaaccccagaagcacgaaacacgccaccgccacgc

SEQ ID NO: 159396 - RNA, 53 nt, Homo sapiens
gcgggcggggagacgaggcgggaaaaaggaaaggggaggcagacgcagcggaa

SEQ ID NO: 159397 - RNA, 83 nt, Homo sapiens
ggaaccaggggccacccgggcgcaccgacagaaaggcacggccgacacagccaagggggaagacacagacacagcaacagagg

SEQ ID NO: 159398 - RNA, 69 nt, Homo sapiens
acgcaaggcaaagaagcgcagaaacgagaagaagcgcagaggccgaaacagacaaggaagaacgccgaa

SEQ ID NO: 159399 - RNA, 65 nt, Homo sapiens
cggaagaggcccgcggaggcggcgggcagcgcccggggccaaccaaagcacagcaccagcggggc

SEQ ID NO: 159400 - RNA, 73 nt, Homo sapiens
cacagagaaaccaaaaaccaccgggggaagggcaaaaggaccaggcacagacaccacgaacagggaggaaagc

SEQ ID NO: 159401 - RNA, 68 nt, Homo sapiens
aggaagcagaaagaaggaagaccacggggcacaacagagaacggacaaaggggagaggaggagaggaa

SEQ ID NO: 159402 - RNA, 74 nt, Homo sapiens
acaagcgaaaaagggcagaccaaggacccccccagcggagccacgaacccagccgaaagcgacagcacccaaca

SEQ ID NO: 159403 - RNA, 75 nt, Homo sapiens
gcacccagccgcagcgccagcagcggacaggcacagacaaccaggaccaaacacggaacagggcacgcggaacag

SEQ ID NO: 159404 - RNA, 75 nt, Homo sapiens
cacggagggaaagaccaggcaggagaaagccaggaaggcgaagggaggggaccaacagaggagaaaggaggaaga

SEQ ID NO: 159405 - RNA, 72 nt, Homo sapiens
gcacaaggacagagcacccaccacaggaggccaccagagaaacaaacggcagagaggcggacgccgaaacca

SEQ ID NO: 159406 - RNA, 73 nt, Homo sapiens
ggaagaagcaggaggcaagaaaggggaaccccggagaaaaggccaagaaggcaggcagacaaagacagagaag

SEQ ID NO: 159407 - RNA, 64 nt, Homo sapiens
cggcccacaggggggggcaaacccgagagaacggaaacaaaaccagggcaggagcgggcgaggg

SEQ ID NO: 159408 - RNA, 74 nt, Homo sapiens
ccacgcaacgaagggaacacccacccaaagggacgaaggagaagaaggaggagggcgggaaaccaacccgcaag

SEQ ID NO: 159409 - RNA, 82 nt, Homo sapiens
gccacgccaagcaaaccgggaaaggagaggacccggagccgacaccaagggaacccaaggggaagcgagcgggcccacccgg

SEQ ID NO: 159410 - RNA, 43 nt, Homo sapiens
gagcgaggccaacccaggaggaggagaggaaaacacgcaaaag

SEQ ID NO: 159411 - RNA, 57 nt, Homo sapiens
caaagccagagcagcgggaacagagcaggacaagcggcagagaggcgagacacggaa

SEQ ID NO: 159412 - RNA, 86 nt, Homo sapiens
cgccgagcggacccggaccgggggggggcgaaagcacgagccaagacgaccacaagcacagaaggcagcccgaccggggccaagaa

SEQ ID NO: 159413 - RNA, 85 nt, Homo sapiens
ggcgccgccagggaaccgcggccgcaagaagcagagccgcgcacggagcaggacaaggccaccggaaggagcaagacgagaacaa

SEQ ID NO: 159414 - RNA, 67 nt, Homo sapiens
cggagccgccagcgcggccagaaaaaagacccacaggcgaagaacaaaagcgaagcccaggagcaag

SEQ ID NO: 159415 - RNA, 67 nt, Homo sapiens
gaacccggaaagcaccagccgaagaaagggcaagcaccaagcggaagggcaaaaaagcgacacgcca

SEQ ID NO: 159416 - RNA, 77 nt, Homo sapiens
acgaagaaaaaccggaggacggccggagcagcagaacaagagcggagaccaagggagccccgcagcagcagaagacg

SEQ ID NO: 159417 - RNA, 63 nt, Homo sapiens
gaccgcaggggggaccaggagacgccacacgagggcaagggcaaagagacagaaaagggacgg

SEQ ID NO: 159418 - RNA, 69 nt, Homo sapiens
gaccaggacacgagcgggaacgcaaacgaagaagggagagagacagaagaaggcgccagacgcgggccc

SEQ ID NO: 159419 - RNA, 105 nt, Homo sapiens
ggaccaccagggccacgcccccccgagcgaccacggagccagaagcgagagccccgggccgacggaccagcaggcgaggccaggccacccagcgaagagagacgc

SEQ ID NO: 159420 - RNA, 80 nt, Homo sapiens
ccgggcccccagccgacagccagggcggaagcccgccccagagcaggaaaagcccggaaaagcagccaagcggaagacag

SEQ ID NO: 159421 - RNA, 95 nt, Homo sapiens
cacgcaaaacacaagaagaagagcgccacagcggcaaacaggcagacagcgcgccgccgcaacaggggcaagagaggccgaccgagccgaacccg

SEQ ID NO: 159422 - RNA, 70 nt, Homo sapiens
gaacagcagcagcgcgagcgacaacgggacgggaaacgggggcgcacacgcagaaagaacagcgaaaaag

SEQ ID NO: 159423 - RNA, 74 nt, Homo sapiens
cgggcgcgggggcggcggcagggggcggagcgcggaggcacccaccacgggccaggcgggccagaggcaagccg

SEQ ID NO: 159424 - RNA, 73 nt, Homo sapiens
cggagaagaaacacagacagcgccaacgagcacagacaaagagccgggaaaaacccagcagggggcgaaagaa

SEQ ID NO: 159425 - RNA, 74 nt, Homo sapiens
acccaagcacggggaagggaaagcaggcccgagagcacccagccccagcgagcgaccaccagcaggggaaaaac

SEQ ID NO: 159426 - RNA, 73 nt, Homo sapiens
gccaagggcgaagaagaacaaggaaaaggaagagaagcccggaccaagccacaagcggacacagacgcaccag

SEQ ID NO: 159427 - RNA, 75 nt, Homo sapiens
agcccgaacgccccagaagccccgggagcaccgagaagcggagaaggggggggcggaggacgccaccccgggcac

SEQ ID NO: 159428 - RNA, 79 nt, Homo sapiens
gggcgcagccggagccgggccgcagcgcgaggccgggccgggggagaccgcgccccgggacaaaggcaagaaaggacga

SEQ ID NO: 159429 - RNA, 64 nt, Homo sapiens
agccgcggaagacgggacaggaaccgccaggaccggcaagcagccgggagcggcagccagacac

SEQ ID NO: 159430 - RNA, 71 nt, Homo sapiens
cgccaaaaaagacaagaaaccgcacaagaccgggaggggagcggaaagaagcggagcgggccgcggagacg

SEQ ID NO: 159431 - RNA, 70 nt, Homo sapiens
aacagaggcagcaacgggacgaggaggggagccacgcccaaggaagaagaagcaccgaacggcagaccaa

SEQ ID NO: 159432 - RNA, 73 nt, Homo sapiens
ccgccccggacagaagagacgggggaacaccaagggagagaagaagggcaggaccacggcacgaagagaccca

SEQ ID NO: 159433 - RNA, 86 nt, Homo sapiens
aagacgcaggagcaaagagagggcaccagccggggaaaggagcgcagcgcccgggcggaggagcagaaaacccaacacgacccggg

SEQ ID NO: 159434 - RNA, 59 nt, Homo sapiens
aagacaagccgcagcgggcagcgcaagccagcagagcaccagcaaggaaacgaagaccg

SEQ ID NO: 159435 - RNA, 78 nt, Homo sapiens
gggaacacagcccaacacagcgcacaggcagggcgaaaaaacgagaaagaaagcaggagaccaagaaggaaaaaggca

SEQ ID NO: 159436 - RNA, 73 nt, Homo sapiens
agacgaggggagcgcagccccgccaccagacccgccggacgggagcccaggaccagagagagaagagggaccc

SEQ ID NO: 159437 - RNA, 86 nt, Homo sapiens
ggcaagacgggcagcgcaggggcgggaaagacccaggagaagccgcccaaagaacgcgcgagggcgaggcccccagcaggagacgg

SEQ ID NO: 159438 - RNA, 84 nt, Homo sapiens
ccgcggccgacgagcggagcccaggagccggcggggacgccagcgagccaggaaggggcaggaccagcgcccggcaggcgccac

SEQ ID NO: 159439 - RNA, 58 nt, Homo sapiens
cgaaaaacgcagaaggacccacagcggggccgggccccgaccacccagagaaaggaaa

SEQ ID NO: 159440 - RNA, 75 nt, Homo sapiens
accagccccgacgggacgggggagggggcggccgggcggagagaaccagcgaggacgaggacaggaggacaaccc

SEQ ID NO: 159441 - RNA, 82 nt, Homo sapiens
cggcgcaggggcgcgcggcacgcagccgggaggccgaggaccggagcaccgcagggcaccaagcccgccggaaaaagacagg

SEQ ID NO: 159442 - RNA, 77 nt, Homo sapiens
ccccagaacacaacagggcaaaggccccgacagggggccgacgacgagccccgcgaggagcgcagcggagaggccag

SEQ ID NO: 159443 - RNA, 90 nt, Homo sapiens
aggcacgaaaaccgggccagaaggagaggagaagaggaacgcaggagagcagcgaaggaggccaagcacacccaggagaacggagaccgg

SEQ ID NO: 159444 - RNA, 73 nt, Homo sapiens
agaggaaagaacggaaaaaagaaaccccacagcggagaaaaaggagaaacccccaagacaaaccacggacgga

SEQ ID NO: 159445 - RNA, 73 nt, Homo sapiens
gcgggcgcgcgaaggagccgcgagccgaggaggggcgcgaggagggacggaaggacagcccaggccaagacag

SEQ ID NO: 159446 - RNA, 59 nt, Homo sapiens
aacccagagcgccaaacccccaaggaaggaagcgaaccccaagcccgacggggacccac

SEQ ID NO: 159447 - RNA, 69 nt, Homo sapiens
aggaaggacaagggaacccccgagcggcaaaggaaaggaacagaaaccacgagaaacaaggaagacaag

SEQ ID NO: 159448 - RNA, 52 nt, Homo sapiens
ccgacagccgcagaacgggcaagacgccaagagaaaaggcgagagcacaaag

SEQ ID NO: 159449 - RNA, 78 nt, Homo sapiens
ccaacccgaagccgcgccacgacagcgcagggccgcggccggaaggacaagcaggagacgccagggggaggaagcagg

SEQ ID NO: 159450 - RNA, 79 nt, Homo sapiens
aagagagcagagggagacacaagccaaccccaggaccgagaagggaggcaagcaggggggcaaaggaaagaaggcagaa

SEQ ID NO: 159451 - RNA, 77 nt, Homo sapiens
gacaagccaacaacaggacggaagccccaacaacaaagggagacacaggcaaggaagcggagcaagagagcacacag

SEQ ID NO: 159452 - RNA, 74 nt, Homo sapiens
ggagcaggagcgaaagacgggaccaaaccggaaaacagaaagaagaagcacaccagacacagaggaacagcaaa

SEQ ID NO: 159453 - RNA, 78 nt, Homo sapiens
ggggaaaggggggccggcgcagacggccaaaggacgggacaaagggagacccgaccaccggaagccacggcccggacc

SEQ ID NO: 159454 - RNA, 76 nt, Homo sapiens
gcacaagagaccacagacacagccaaacccaagcgaaaccacggcaggccacccggcacggccaggagacgaccaa

SEQ ID NO: 159455 - RNA, 80 nt, Homo sapiens
gaccacgagccccccccagccaacccaagaccaacaccgcacaacggccacaacacagccaccagcagaaaggagagaga

SEQ ID NO: 159456 - RNA, 77 nt, Homo sapiens
gaagaaggaacacgaggcagggggccacacgcaaggggaacagaaggagaagaagcaccagccgacgcgaacggaac

SEQ ID NO: 159457 - RNA, 79 nt, Homo sapiens
cagggcaacacgcgggaccgcgggcaccagaccgcagcagacggcccacccgggcaggagaggccgaccacccgggggg

SEQ ID NO: 159458 - RNA, 79 nt, Homo sapiens
accgccccgcccggagcgagggggcgcccgccacgacagaccgacacgacgcagcacgacgccaggaaagcaggcagag

SEQ ID NO: 159459 - RNA, 75 nt, Homo sapiens
cccaacagcaccggggcgcgcagacaggacccaaagcggacacaccaaaagaacacgaagccaacccgggaggag

SEQ ID NO: 159460 - RNA, 75 nt, Homo sapiens
gggaggaggaaaacacagcagcagcagcaaacagagcacagcaagcgggagcaggcagaccaaaggaacagaagc

SEQ ID NO: 159461 - RNA, 49 nt, Homo sapiens
gaaggaccaagaaccagggaagcagagccccgggccgggaaggggaaac

SEQ ID NO: 159462 - RNA, 77 nt, Homo sapiens
ccgcgggaagagcccagggcgagccccacagcggaacacacaacacacaggggcacggcaacgcaaccaccaccgag

SEQ ID NO: 159463 - RNA, 81 nt, Homo sapiens
gagagaagaggaaaagaagagacacagcacgagaagccaaaagagagagagagaaggagggggcagagcacggcaggcaga

SEQ ID NO: 159464 - RNA, 70 nt, Homo sapiens
cgagaaggcagaggcgaggcagaggacagaaggaacagagaccgccaggggaaagccccgcgaaggcccc

SEQ ID NO: 159465 - RNA, 58 nt, Homo sapiens
aacaagcgggagcaaggagggcgaagagcgaggagggaccacaacagacaaagaacag

SEQ ID NO: 159466 - RNA, 83 nt, Homo sapiens
cgggcgccgaggaggaccgggcccgccccgagcggccggcgggacgcaggccccgcccagcggcccgccccaggacggggcga

SEQ ID NO: 159467 - RNA, 51 nt, Homo sapiens
agagcagggcaaaccgagacccagacaacgaagagaggaaagaagcggaaa

SEQ ID NO: 159468 - RNA, 69 nt, Homo sapiens
acgggagcaaggaccgccagaagcacaggaccagggagacacacaccaggaagaaggagaaagacaaag

SEQ ID NO: 159469 - RNA, 87 nt, Homo sapiens
ccgccgggagccagaagcacaggcccgggcgaaggggccacgcgagaggaggccaagaacagaaccaggccaagaaaggccacccca

SEQ ID NO: 159470 - RNA, 87 nt, Homo sapiens
ccacccagcaggagaacggacccggagggccagaggacaccagagacccagcccacccccgcgcacgaggagacagagcaccacacg

SEQ ID NO: 159471 - RNA, 55 nt, Homo sapiens
cccaaaggagaacgacgccaaaacaaaagcaacaaggcgaaaagggcgacagcaa

SEQ ID NO: 159472 - RNA, 64 nt, Homo sapiens
gagcgcccaagcgggcacccccgggagcccacaggaccacccccaccaggacagaggccccaac

SEQ ID NO: 159473 - RNA, 57 nt, Homo sapiens
gaagacgaaaaggcaccgaagcaggccccgggcgcgggagccagccgaagaaaggaa

SEQ ID NO: 159474 - RNA, 65 nt, Homo sapiens
gagcggaggacacccaacccggacgcaagaggcgccccaaggaaaggggccaacgggcgccagca

SEQ ID NO: 159475 - RNA, 90 nt, Homo sapiens
caaggcgaggccccgggggcgggccggggcaccacgccgccccagggaaccgcacagaaaccaagggagggaaccgggaacggcgcggca

SEQ ID NO: 159476 - RNA, 65 nt, Homo sapiens
caaggaagacagcaccccccacccccagagcaggccgcggcagagccaaccaccggccccccaac

SEQ ID NO: 159477 - RNA, 87 nt, Homo sapiens
gagcaagcagcgacgccagcggcggagaaccgacgaaaggggagccagccaagacacggagccaaaaagaagaaaaagaaacaaaaa

SEQ ID NO: 159478 - RNA, 74 nt, Homo sapiens
cccccaaaggggggaacaggcagagccaccagcccagcccagagacaaagagagaaagcggcaagcacgcaggc

SEQ ID NO: 159479 - RNA, 75 nt, Homo sapiens
aaaggccagcaaaagagccggaagccggaacaagaggagaccaagaaaacgaagaaagaaaagaaaagaacaacc

SEQ ID NO: 159480 - RNA, 37 nt, Homo sapiens
gaggaagcaaagccaagggggcccgcgcagacgcacc

SEQ ID NO: 159481 - RNA, 51 nt, Homo sapiens
aacaaaaccagcggcgcgaacaaagggcaaaggacacaccgcacaaacggc

SEQ ID NO: 159482 - RNA, 73 nt, Homo sapiens
agaaaacagaaacagaagcggccacaacaccaccaagcggagaaagcgccaggaccgcgcagacgcgcaggac

SEQ ID NO: 159483 - RNA, 76 nt, Homo sapiens
acaggggccagccccagcccccacaccggcgagaaggcacaagaccccgaacgacaagaggcaagaaaaagaaaga

SEQ ID NO: 159484 - RNA, 69 nt, Homo sapiens
gggccacaagagggccagaagaccgccggggcggaaagggacccgacacgaaacagggcaggaaaggga

SEQ ID NO: 159485 - RNA, 77 nt, Homo sapiens
cagcgcacgcgcggggcccgggcccagaaggcgagaccagagacgagaaggaaagagcccagacccccccagcaagg

SEQ ID NO: 159486 - RNA, 87 nt, Homo sapiens
cgcgggcagcgggcccagagcgcgcccccgaggcaaccggccaccggggcgccgcggggcggcaagcggcccaggaggccagagcca

SEQ ID NO: 159487 - RNA, 76 nt, Homo sapiens
gcgggaggcgcggggccggggccgcgcgcccacccaacccgaggagcgccaggggaacgaccaggcaccagaccgc

SEQ ID NO: 159488 - RNA, 75 nt, Homo sapiens
aaggagcagcccgggccaggaccgggaaagacaaggagccgggccgagaaaccgaaccagagaccagagaagaaa

SEQ ID NO: 159489 - RNA, 50 nt, Homo sapiens
cacagcaggcccgggcgaagagcccccccccaagccggcgcccccccgcg

SEQ ID NO: 159490 - RNA, 74 nt, Homo sapiens
ccaggcgaccacgagcccccaggccgagaaaaccccaaggcgcagacaccgacggagcgggagccagagagcgc

SEQ ID NO: 159491 - RNA, 70 nt, Homo sapiens
ccgaacagacccggaaggacggcgaggggacgggagaaagaacagacaagccgcaagaaccggggaaggg

SEQ ID NO: 159492 - RNA, 69 nt, Homo sapiens
ccagaagaacgccgcccggggcagaagacgcaaacacaaggaaggaaccaaccgaggcagaaacggagc

SEQ ID NO: 159493 - RNA, 74 nt, Homo sapiens
ggcccaccaggccccaggcccaccggccccagggaggagcgcacagcacagccaaaaacagaaaccacgccaag

SEQ ID NO: 159494 - RNA, 84 nt, Homo sapiens
gcggggcgggcgagcgcaggaggacagcagcggacggccggaccaagaggcgccgccccccagcaaacgagaaaaacccagcga

SEQ ID NO: 159495 - RNA, 61 nt, Homo sapiens
cgcagacccgacaagagagaagaagaaagacaaggcgaccgaaccaaggagcaggccagaa

SEQ ID NO: 159496 - RNA, 78 nt, Homo sapiens
acgagaccagccgcgaacgggaggaacgggaagagggaaggcaagacccagggcagagcagaaaagcagcgaacgagc

SEQ ID NO: 159497 - RNA, 65 nt, Homo sapiens
ccagcacgggcagaaagagaacgacgaacacgagggaccagccaagacgaggggaccggaacaca

SEQ ID NO: 159498 - RNA, 67 nt, Homo sapiens
gcaaagcggacaccgggggcaggccggccccgcaagcggcgcggcggaagagagagccacggggcgg

SEQ ID NO: 159499 - RNA, 75 nt, Homo sapiens
caaagagcgaaaccagagcaagcagggcaaaaggggggacaaccggcagcgggcaaagacacaaaaaccaacccg

SEQ ID NO: 159500 - RNA, 60 nt, Homo sapiens
agaccaggaaaccaggccaggggggaggggaacagcagcggagaacacggcagagacaaa

SEQ ID NO: 159501 - RNA, 76 nt, Homo sapiens
cgccaacgcaccaccacgacaggggcaaggccgaggggaacagcacacagagaggaggcggaagcacgccagcagg

SEQ ID NO: 159502 - RNA, 77 nt, Homo sapiens
aggcacacaccggggcagagggacaggccagaaccgcccaaacgagcagaagcgggaagaaacaggagaccccagca

SEQ ID NO: 159503 - RNA, 71 nt, Homo sapiens
aaaggagggagaggagcagaggaagcaaaagcagcgcgcagaccccgcggggaaggccagggcgcagcgga

SEQ ID NO: 159504 - RNA, 82 nt, Homo sapiens
cggaccaggagaggcccgcgggaccgaggccgggccccggccccaacgaaacccccgaggcccccagccaccagcaccacag

SEQ ID NO: 159505 - RNA, 75 nt, Homo sapiens
acccaggggcggccacgaccaccaggcgccagggcacaacacagaagaaggcggggcaaaggaaaaaacagaagg

SEQ ID NO: 159506 - RNA, 77 nt, Homo sapiens
gcaagggcccaccccaaaggggaaaaagagccggaaggggcgaccggaccgggagaagaaggcgccgaggcaagggg

SEQ ID NO: 159507 - RNA, 75 nt, Homo sapiens
acagagcccagcagaccaaagggaaaccaccgccagcggccaaagaggcccaggagggaacggaaaagagcacag

SEQ ID NO: 159508 - RNA, 76 nt, Homo sapiens
ccccagcagccaaagccccgggaaaccaggaccgcagaaagcccagcacgggaacggagccccccgcacaggacaa

SEQ ID NO: 159509 - RNA, 65 nt, Homo sapiens
acaagcagcagcggagagagaccccaggcaccacaacacacaggaccggaaccgcgggcagccgc

SEQ ID NO: 159510 - RNA, 76 nt, Homo sapiens
gggaaaaagaggaaacaaagcccgccaacggaggacccaagcagggcacaggaacagggacccccgacaggccagc

SEQ ID NO: 159511 - RNA, 75 nt, Homo sapiens
cgggagcagaagggaggcccaagacccacaacaaaaggggggaaggagcaccacgggcacaccacgagggcagac

SEQ ID NO: 159512 - RNA, 82 nt, Homo sapiens
cgccagaaggcccgggcacgaggcacagggccaggcacacaacgagaccacggcccaaacaacagggcaaagagccagcccc

SEQ ID NO: 159513 - RNA, 79 nt, Homo sapiens
ccaaggcagggagggacaggagagacgaggccccagaccaagaggggaaccagggccccacaagcaacgccacagacaa

SEQ ID NO: 159514 - RNA, 70 nt, Homo sapiens
caaaacacaggaggcaaaagcacagagccagagaaaccacccgaacacgaggggaagacaggacacggca

SEQ ID NO: 159515 - RNA, 79 nt, Homo sapiens
aggcgcccggggcaacgggccgacagcacagcaccagcgaggaaagggaaggaccgaggggacggggaaaagacccaaa

SEQ ID NO: 159516 - RNA, 57 nt, Homo sapiens
agaccgccccaccgggccacccacccacacgggacaggagcgcacgcgccccaccgc

SEQ ID NO: 159517 - RNA, 97 nt, Homo sapiens
ccgacaaggccaacacggagcacagaaaagaagaacagagcaaacagacggaagaggacccgggggagaagagacagaaggcaccggagaaaaggac

SEQ ID NO: 159518 - RNA, 82 nt, Homo sapiens
cgccgcgggccgcaggccgcgagcagcggacgccggccgccgcaggaggccagaccagaaggagcacaggcggaggccggca

SEQ ID NO: 159519 - RNA, 85 nt, Homo sapiens
gaccacaacaccaggaggaccagcggacgacccccgggacaggagcaccaggccaagaaccccaaaaacagcagcagaaaccagg

SEQ ID NO: 159520 - RNA, 80 nt, Homo sapiens
ccacaacgaagcacgacaagagaccaaaacaacccgaaagcccggaccgacaggaaagaaggagcccacaaagaaaagaa

SEQ ID NO: 159521 - RNA, 65 nt, Homo sapiens
cccgccccacgcccaggagcaggagaaagaaggggcaagaggaagaagcagaagcagagagagga

SEQ ID NO: 159522 - RNA, 58 nt, Homo sapiens
gaagaggcaggggggagaacaaccaccaaaggacaggagaaaagaaagcaaccagccg

SEQ ID NO: 159523 - RNA, 52 nt, Homo sapiens
gagaggcgcccaccgccagcagaacacgccaaaaagaccagggggaagaaga

SEQ ID NO: 159524 - RNA, 76 nt, Homo sapiens
gggacacccagcgcagcacagcagggagacagaccagccccaagggggaccaaacacgaaaacagcccgcacaaaa

SEQ ID NO: 159525 - RNA, 72 nt, Homo sapiens
gccaaaaggcaccagcggagagaagaccccaggggcgacaggccgcagcacacaaagacggcacaggagagg

SEQ ID NO: 159526 - RNA, 38 nt, Homo sapiens
cccgagaggggacacagaaccaggaggaacacggagga

SEQ ID NO: 159527 - RNA, 52 nt, Homo sapiens
gcgagaacgagagaggcagacaaacccacagccagagacgaccgggacccgg

SEQ ID NO: 159528 - RNA, 82 nt, Homo sapiens
cggaggaggcgaccgcggcgcagcgacccccgccaggcaaaaggaaggaaacgaaagagcccagacacccaagagggccaag

SEQ ID NO: 159529 - RNA, 59 nt, Homo sapiens
cgacagcgaacagcgcggccgcagagacaggggccaggccaggggcaggggaagcaccc

SEQ ID NO: 159530 - RNA, 70 nt, Homo sapiens
gcgagcgggaggagcccgcggagggaaacacaaagaagacaccagaagggccagcaccacgacaacacgg

SEQ ID NO: 159531 - RNA, 61 nt, Homo sapiens
gagggccacaggaggcggcgggccccgcccgccgaaggaagcacccaagccagggagcggc

SEQ ID NO: 159532 - RNA, 74 nt, Homo sapiens
cccgagacagaagaagcgaaggcccgaagaacaagaagacggggaaccccacgcacaccgagagaaaggggccc

SEQ ID NO: 159533 - RNA, 75 nt, Homo sapiens
gagcgcgagacaagagaccagaagaggccgcgagcagcaggaccacacccagggaaccaccagaggacacccaca

SEQ ID NO: 159534 - RNA, 74 nt, Homo sapiens
ggaagaccacggagcggggagagccgccgcaaacccagaccggccgcccccagcccagggccagaggaagcccg

SEQ ID NO: 159535 - RNA, 78 nt, Homo sapiens
caggcgccagagcgagccagcccagggccagggagcaggagccagggccgagcacgggaaacgccaccccgccccacc

SEQ ID NO: 159536 - RNA, 76 nt, Homo sapiens
gcaggggcgagccacaaccggggggaacgcggcccccagggagaggggcgccggccacggccaggaagccgaggcc

SEQ ID NO: 159537 - RNA, 79 nt, Homo sapiens
gaccgcagggaggggagaggaagcagaagggccgaagagggaagagcaagggacaacagacaccaaacagccagaggaa

SEQ ID NO: 159538 - RNA, 82 nt, Homo sapiens
ggagaacgcggcaaaggaccaagcaaagaccccgagaaggaacggagaggacacgaggaggacacgccaggaggaaagcccc

SEQ ID NO: 159539 - RNA, 41 nt, Homo sapiens
ccgcggggcagccgccgcccccgggccagaggcccaaaaca

SEQ ID NO: 159540 - RNA, 79 nt, Homo sapiens
cgaggcgcacaaacgaagaaaacacacagacagacagacaggacacccggcacaccacaaaggccgcccccaccagcgg

SEQ ID NO: 159541 - RNA, 64 nt, Homo sapiens
agggacgaccgcaaccaaacccagccgccaggagaagcccaccaggagaaagacagcaaagaaa

SEQ ID NO: 159542 - RNA, 78 nt, Homo sapiens
gcgggaacaccggagcccgcgggcaggaggcaaggaggccacggggccgaagacaccaaccgggcaccagccaaacgg

SEQ ID NO: 159543 - RNA, 73 nt, Homo sapiens
agagcgggcagacacacgagcagggcccgagagacccggacaagagggaggcacaaagcaccaacaaaaggca

SEQ ID NO: 159544 - RNA, 78 nt, Homo sapiens
acgcagcgcccaaagcaaacgccaccagaaggaaagggggagccagacgaaagcaacccggaccgacgaacggagccg

SEQ ID NO: 159545 - RNA, 81 nt, Homo sapiens
aaaggcacggcggaaggacccgagacggaaaaaaacaggcgacggaacgaggagaaaaagcaagagagcccaacaaagaag

SEQ ID NO: 159546 - RNA, 82 nt, Homo sapiens
gaagaagccacccagaagggcagacaccaagaaggacgcacgaccgcccaagcaccgcgcacgcacgaaagcaaggcaaacc

SEQ ID NO: 159547 - RNA, 74 nt, Homo sapiens
aggaaaaagaagaagaaagaagaaagcaaagagcaggccaccaaaaagaacaggaaacaacgaacgagcaagga

SEQ ID NO: 159548 - RNA, 61 nt, Homo sapiens
gagaacaaagaacggaagccccagaaggagcggaggggacgagaacaagcaggcgcgaccg

SEQ ID NO: 159549 - RNA, 71 nt, Homo sapiens
agccacaggcaaaaggcccagcaggggccgggaggaagaaacccccacgcaagggagcaaaaggccagggc

SEQ ID NO: 159550 - RNA, 70 nt, Homo sapiens
ggacgaagaccagcgccagggaaagaaggacggagaggccgcccacggagcgcagagccaaccccaagcc

SEQ ID NO: 159551 - RNA, 72 nt, Homo sapiens
agggcaacaccaaaaacaaaacgaaccaggacggcaaccaggcccccggcccgcggcgcgccgccgccacgc

SEQ ID NO: 159552 - RNA, 77 nt, Homo sapiens
ggaccagacaggcggcaacagcagccgcccaaaacacaaaccaaagaagaaacccgaaggaccacagagaaccaaaa

SEQ ID NO: 159553 - RNA, 55 nt, Homo sapiens
ggaaaaaaacgacgccccagaaaaggggaaggaacaaaccaaagagcagaccccc

SEQ ID NO: 159554 - RNA, 57 nt, Homo sapiens
acacacacccgcagacaagaacggagagggcagccccgggcaaccagcaagcccaga

SEQ ID NO: 159555 - RNA, 105 nt, Homo sapiens
ggaaaaccaaacgaagaaagcaggccccgcgagaagcgagaccaaaacggggaacaaacgaaagccacaccccagggggaaacagggggccaaagggacaagggg

SEQ ID NO: 159556 - RNA, 54 nt, Homo sapiens
accaggagagagggggaagagggaaagagcgggccacaaaaagaaaaagaccac

SEQ ID NO: 159557 - RNA, 61 nt, Homo sapiens
gggcccacaccaacaccggggccccaaggggccgggaccaggaccggaggcagcaccaaca

SEQ ID NO: 159558 - RNA, 75 nt, Homo sapiens
cgaagcacacgccgccccgacgcgagggcagccccgccagggacacacagcaacgaagcaggggaggagggaaga

SEQ ID NO: 159559 - RNA, 71 nt, Homo sapiens
caagacggggcgccccacagaggggcgacggacaaggcacgaggcgcggcgaccaccacagcagagcccgg

SEQ ID NO: 159560 - RNA, 77 nt, Homo sapiens
acccacacacagacaacaagccacaaggaagaaacggacgaaaacaaaagcaaagcacacacacgacaccaacacca

SEQ ID NO: 159561 - RNA, 43 nt, Homo sapiens
gcccgggcggggcaggagccggaacgggaagggcacaggaaga

SEQ ID NO: 159562 - RNA, 56 nt, Homo sapiens
agaaagcagcccaggcaaggcccagcagcacacaaggagcaagccaggagaaagca

SEQ ID NO: 159563 - RNA, 67 nt, Homo sapiens
gcgacacggcaagagagcccaaggccgcaacaaaaacgcgcagaggaaaaaggcaagagacagcgga

SEQ ID NO: 159564 - RNA, 75 nt, Homo sapiens
gagcagagggggacgcagcggaggggccccagaccagccacagcacacaggaacagacaaagaagaagacaccac

SEQ ID NO: 159565 - RNA, 57 nt, Homo sapiens
cagcccaccagcacggcagcaaagaaaacgaaggaaggaggacccgaggagagagaa

SEQ ID NO: 159566 - RNA, 76 nt, Homo sapiens
aacgcagccccagagcggcggggaaacgggaggcaacaccaaaagggcggaaaacaccccaaaagccaaaagggaa

SEQ ID NO: 159567 - RNA, 55 nt, Homo sapiens
gacacacacagcggcaccgccggccagcgcacaggagacagaacagacagaaaaa

SEQ ID NO: 159568 - RNA, 79 nt, Homo sapiens
gaggaggaggaggggaggcgcccccggagccgccccggaggagaaggccggggggggcacagagccccggaagacagcc

SEQ ID NO: 159569 - RNA, 61 nt, Homo sapiens
aggagcacagagaggcccccgcagagacgaggagcacagaacccacggaggaaggaccccg

SEQ ID NO: 159570 - RNA, 88 nt, Homo sapiens
gccagccccgggcagccccgcccggacagcaggcaaggccagcaaggaggggggccgagccggcggcggcggcggcagggggcagcgg

SEQ ID NO: 159571 - RNA, 61 nt, Homo sapiens
gcacgagcaccgccaccaggggaagggggacccaaggccagccagccccaggcaccagcgg

SEQ ID NO: 159572 - RNA, 75 nt, Homo sapiens
ggaacagggcccaccaccacaccaggagggcaccggcgcacccgggacgaacgccaggacgagccccagaagcgc

SEQ ID NO: 159573 - RNA, 52 nt, Homo sapiens
gcaccacagcacagcagcaccacagagcaaaaaagcagacaggaccgccgcg

SEQ ID NO: 159574 - RNA, 71 nt, Homo sapiens
ccgacgccccgccgggcgacgggacagaagggccgcccgggcgacgaacaccgccccggaacagcagagcc

SEQ ID NO: 159575 - RNA, 83 nt, Homo sapiens
aaaggaagacagggaaccagggcaacaggcggccgggagaggagggacagcagcgggagaacaccccacggagacaggacgcc

SEQ ID NO: 159576 - RNA, 74 nt, Homo sapiens
ggagaacacaaagaagggagcacggcccaaagaagagcaggccaaggaacaagaagagaaacgaagccagaaaa

SEQ ID NO: 159577 - RNA, 71 nt, Homo sapiens
gaaggaccaagaaccagggaccggagggccggaagcgggccgggacaacgggcaggagccggaagggcgac

SEQ ID NO: 159578 - RNA, 52 nt, Homo sapiens
gcggacaaggggaagggaggggcgaggaagagacaggcgggggagaagaagc

SEQ ID NO: 159579 - RNA, 74 nt, Homo sapiens
cacaacaacaaaacaggcacacaagaaacagggagcgcgaaccaccaagggcaaaaaaacagcacagcagagaa

SEQ ID NO: 159580 - RNA, 70 nt, Homo sapiens
aaagaaaagaagaaacagaggcgagacaaaggaaaacccaccccggaggagcagaccccgaaccccacgc

SEQ ID NO: 159581 - RNA, 73 nt, Homo sapiens
aggcacccccggccggcgcgaggccaggcagaaggcggcagcggagcacgcaccaggagcccgcggcccaccc

SEQ ID NO: 159582 - RNA, 77 nt, Homo sapiens
cccgcaggaaccacaacccaaccagggaaacacaaagaagacaccagaagggccagcaccacgacaacacggcgaca

SEQ ID NO: 159583 - RNA, 62 nt, Homo sapiens
caaccccaagcgcccaaagggacgaacagcggggacgccccagcagaccgcccaggagagga

SEQ ID NO: 159584 - RNA, 89 nt, Homo sapiens
ggggacaccggggagggcgggagcaaggcggaaagaaggcggcacaagaaaagagaccagcaggagcagagcggcagggaaggggaaag

SEQ ID NO: 159585 - RNA, 52 nt, Homo sapiens
gacggcaaagccccccagaagaccagggggacaggaccagccggggacacca

SEQ ID NO: 159586 - RNA, 65 nt, Homo sapiens
gcaaggagccaccagcacggaccaggaggcgagcaacagcccggacgaggggcaggaccggggac

SEQ ID NO: 159587 - RNA, 86 nt, Homo sapiens
ggacgcacagcgggacggcaaggggcgggaggccaggcagcacgcagacaagaagcgcaggacaggcgcaggggccaaacacagaa

SEQ ID NO: 159588 - RNA, 71 nt, Homo sapiens
aaggggagccaggccgcccggcggacggcgaccaacaaagccacaaaagacccagcacaggcccagaacac

SEQ ID NO: 159589 - RNA, 72 nt, Homo sapiens
ccggcacaccgcggggccgaaaacaacgacaacgagcacagcggcagcaagcaaaacccagaaccagagggc

SEQ ID NO: 159590 - RNA, 48 nt, Homo sapiens
caggcaccacagcccgaggcccggagcgaccaggggaaaaaacgaagg

SEQ ID NO: 159591 - RNA, 73 nt, Homo sapiens
cccagcggccaaacaaccacaagcggaggcccagaacacagcaggcaccgcaagaacagggcaggccacaacg

SEQ ID NO: 159592 - RNA, 88 nt, Homo sapiens
aaaggcaagagaacagcagcgccgcccgccgacagccaggcccgggagaaccaccaggagagaacgccgcgccgcgcgacaacggccc

SEQ ID NO: 159593 - RNA, 82 nt, Homo sapiens
gggaaaaacggagaacagggagaccagccaccacaagcccaaaggggaaaagcacagggccaggaagcagagggacagccag

SEQ ID NO: 159594 - RNA, 78 nt, Homo sapiens
aggccccagacacagacgagcaggggaagagccggacgagcgggagaggacaccacacaaaaaacaggaaaagagaac

SEQ ID NO: 159595 - RNA, 79 nt, Homo sapiens
gcgagcgagggggggcgcgccggaaaccggagcgcgcagcagagcggggcccgagggaaaggacacagaggcgcgagcc

SEQ ID NO: 159596 - RNA, 76 nt, Homo sapiens
gcaaggcccccgaccacacgcccgcgcgagaccgggaacagccaggagggacgcgagccgcccgaccggagcaaag

SEQ ID NO: 159597 - RNA, 85 nt, Homo sapiens
cgaaaacaagacaccccgggggcgcaggggcggccaagcccccagcgccagggcccccggccacacgagaacagacagccacgca

SEQ ID NO: 159598 - RNA, 58 nt, Homo sapiens
aagggcacacagaggagaaggagggggcagagcacggcaggcagaaggggccaacccg

SEQ ID NO: 159599 - RNA, 69 nt, Homo sapiens
cggagcaccaaaagaaaacgcaccgaaagggagaaaggaagggacagaggcgagaagcaggcggaggga

SEQ ID NO: 159600 - RNA, 80 nt, Homo sapiens
gaaaaggcgcccagaaggcaaagccaggcacgcccaccggacccagaagaaagccaaaaccaaagaggagaaaaaacaaa

SEQ ID NO: 159601 - RNA, 77 nt, Homo sapiens
gagcggccagggccgggccagccggccggcgcggggccggcggcggccggggcagcgccgcgagccagcaacggggg

SEQ ID NO: 159602 - RNA, 54 nt, Homo sapiens
caggaccacccaccagccaccaggagaccgcggaagaagacggcccccagaagc

SEQ ID NO: 159603 - RNA, 71 nt, Homo sapiens
cacgccgagccaaagaggccaggggcagcaccaaaggagcacaccaaccaagaagaagcagagggaaccgg

SEQ ID NO: 159604 - RNA, 82 nt, Homo sapiens
ggcgcagaggggcgagcaccccaacagcaaacggggacagcgccgaccggaacagggaccacggaagcccaggaccagcccc

SEQ ID NO: 159605 - RNA, 78 nt, Homo sapiens
gggaaccacgggggccgcggccggaccgagcgcccgacccggcgaggcccaggaggcaagagcgagaagagcgcaaga

SEQ ID NO: 159606 - RNA, 72 nt, Homo sapiens
cccagagccccaaccggccgaacggacagccgagcgaggcgggaaaaaggaaaggggaggcagacgcagcgg

SEQ ID NO: 159607 - RNA, 64 nt, Homo sapiens
cgccagacacggcaaaacaggacggcgaacacgaccagagagagaaaggcaagagcagacacac

SEQ ID NO: 159608 - RNA, 97 nt, Homo sapiens
gaacccagagcgagggggggaccaccgccggccaggggcggaaacagagcccgggaagcgcagagggaacacggccacgaggggaacgggacagaga

SEQ ID NO: 159609 - RNA, 68 nt, Homo sapiens
aaagagaaccgagacaaaagaagaccaaaacgaggcacaaaaagcagagcacgaaaaacgcgaagaag

SEQ ID NO: 159610 - RNA, 76 nt, Homo sapiens
agagacggaaagacaagaaacggcaaaggcaccccgcaccacaggacggccaaccaagcgcaccagggacaccagg

SEQ ID NO: 159611 - RNA, 73 nt, Homo sapiens
acaacaacagaagaagagcagaacccaggccaagcaccagaaggccaacacaaccaaggggaaacagcaaaac

SEQ ID NO: 159612 - RNA, 75 nt, Homo sapiens
ccgcgcccaacgagacgggcaccgagagggacacggggcaccgcgccgcagcggcggaggcagcggcgcgaccgg

SEQ ID NO: 159613 - RNA, 35 nt, Homo sapiens
gagaaggaccgaaggggggaggcaccacccaggac

SEQ ID NO: 159614 - RNA, 46 nt, Homo sapiens
aaccacccccaacaaccagggcaagaagagccccacaacacgcagg

SEQ ID NO: 159615 - RNA, 54 nt, Homo sapiens
cacaaaagaaagcgacaaggaacaaggacaccccccaggcacagccacacccca

SEQ ID NO: 159616 - RNA, 67 nt, Homo sapiens
ccacagccaaggcgggagccacggcgccaggcgcggagcggacccggccgcgcaaggccggcggccg

SEQ ID NO: 159617 - RNA, 76 nt, Homo sapiens
gaggaaaacagagacaaagacaacgaaagagacagcacaaaaagggaaccaagaccaggacaaagaagacccggag

SEQ ID NO: 159618 - RNA, 78 nt, Homo sapiens
agccaaggaaacaggagcgaagcccagcgggccggacggggcggggggaacggcagaacaacggggaacgcacgcgga

SEQ ID NO: 159619 - RNA, 77 nt, Homo sapiens
acgggccgcagaagacagggcggcgggccggacgacaagggcgacgcgaccgccaagcgcaggcccggaagaacgcc

SEQ ID NO: 159620 - RNA, 73 nt, Homo sapiens
cgcagacaccgggggcgcccggaggagcccgaagacagccccgacggggaggccacccgaagaaaggcgcagc

SEQ ID NO: 159621 - RNA, 99 nt, Homo sapiens
gcgcagcagaccacaaaggcagacacaaccccagcgaaaggccagggcaggggcccggaggacggcggggcgggcccgacccccgccgccccaggaccc

SEQ ID NO: 159622 - RNA, 81 nt, Homo sapiens
gcaaccagcagaagaaaggacggagaccgcccaagccccaaggggcgggaggggaagagcccaccagaaacggccacggcg

SEQ ID NO: 159623 - RNA, 80 nt, Homo sapiens
gcagcccgccgcgcaacgccacgcaggcgcacgaggagcgacccaagaacagaaaggccgccccggggcaccgagaaaca

SEQ ID NO: 159624 - RNA, 36 nt, Homo sapiens
agcagcacgggaggccgcccggacagagcagccagg

SEQ ID NO: 159625 - RNA, 85 nt, Homo sapiens
ccacgagaacacagccgggcccggaaggggaaggaacgggagcagggacccgagcgaccagaaagccaacggcccacggccagaa

SEQ ID NO: 159626 - RNA, 73 nt, Homo sapiens
gacgcccacccgagaaggccgcgcaagggcgcagcaccccaagaagaccgagagagcaccaaggccgcaacgg

SEQ ID NO: 159627 - RNA, 81 nt, Homo sapiens
cggagcgggcagcgccagaccgcgacaggcccgaaaaaaacccaggcggcccagggggacaagagcaaggaccaaggggaa

SEQ ID NO: 159628 - RNA, 86 nt, Homo sapiens
cgacggcacccgaacgcagggagcgccgcggagaggggccggcgcccggcggggacgcaggcaccaagcagccgaagagaaacaag

SEQ ID NO: 159629 - RNA, 82 nt, Homo sapiens
ggagacgggaagaccgacccacaccccaacccggaccgggagggcggcccgaagcggggacccgagcgaccagaaagccaac

SEQ ID NO: 159630 - RNA, 92 nt, Homo sapiens
acggggcacccggaccggagaggaggggaggccaagacaaggggcgcagagcggggggacaggcgcaagaccggagaagcaggagcggaacg

SEQ ID NO: 159631 - RNA, 78 nt, Homo sapiens
aagggggaaagcaaagcaacaggacaaaagacaaagaggccccagcacaagagaaaacagacagcagaacgaaaagcc

SEQ ID NO: 159632 - RNA, 78 nt, Homo sapiens
acaccaacaagaagaggagcaggacaccaacagagcaacgagaaggacacccaaagagaggcggaggcaaggcagacc

SEQ ID NO: 159633 - RNA, 74 nt, Homo sapiens
aggaagcagaacgggccaagcccagcccggcgaagaggaccgggcaaaccagaacaagaccgaaccgggccagc

SEQ ID NO: 159634 - RNA, 79 nt, Homo sapiens
cagccaaaccaggaaaggacaggggcggaggaggaggaaagacggggcacaacacaagaacagagaacgcaggccagcc

SEQ ID NO: 159635 - RNA, 76 nt, Homo sapiens
gccgagaccagccagggccccccccccagcccacgccacaacacagcaaggggcgaacgccacggggggcccgccg

SEQ ID NO: 159636 - RNA, 77 nt, Homo sapiens
cccggcgccccaacagcccggaagaggaccccagacggacgcggcccccacgaaccgcgccccacagagaccaccac

SEQ ID NO: 159637 - RNA, 73 nt, Homo sapiens
agggagagggaggcagccagaaccaagcggagagagcagcccggcagacgcagaaccaccagcagcgcagcgc

SEQ ID NO: 159638 - RNA, 77 nt, Homo sapiens
aggcagaaacagccgaagaagcaacaagccgagggacccaagggcgacaaaccaagaggagccagaggcgaccgaaa

SEQ ID NO: 159639 - RNA, 65 nt, Homo sapiens
ccagcccagagagcgggaacaggaaacacgaggaacacaaaccagagcggacgaacacccagacc

SEQ ID NO: 159640 - RNA, 56 nt, Homo sapiens
gagaaggaccgggaagggcggaacgggggacaggaaaggggaaggcaaagggcaac

SEQ ID NO: 159641 - RNA, 45 nt, Homo sapiens
cagcaaggcggcgcgcccaggagaagaccccccaagcgccagaac

SEQ ID NO: 159642 - RNA, 76 nt, Homo sapiens
cgaacgcgagaacaacacaacaggcccgccaaagaggcacaccgaacccacaccaaacaacaggccccggccggaa

SEQ ID NO: 159643 - RNA, 68 nt, Homo sapiens
aacagagagggcgacaggacaacggacagcaaaaaagggcgacccacgcacccgccacccaagccaca

SEQ ID NO: 159644 - RNA, 79 nt, Homo sapiens
agagaaggggaaggaggggcagcggacggcccccaagacagaacaccgcagaccacaccccagcaaaaaagagccccag

SEQ ID NO: 159645 - RNA, 68 nt, Homo sapiens
aaaaaacagccagagacaagaagagaaaaaggaaccccccacagcaaaaaagcacagggaacaccaga

SEQ ID NO: 159646 - RNA, 49 nt, Homo sapiens
gcggcgccggcggcgcgcgacccccgcgcagaagcaaacaggggcagga

SEQ ID NO: 159647 - RNA, 74 nt, Homo sapiens
gaaccaccccaggcacccccggccggcgcgaggccagggaaggcagcgccgagcggacccaccgccacacgccc

SEQ ID NO: 159648 - RNA, 84 nt, Homo sapiens
gcgaggaggccggcgcagccccaagacagagcgcacccggcaggcgcaacagagcgccggcgaacagagaagcagaccaaagga

SEQ ID NO: 159649 - RNA, 72 nt, Homo sapiens
cccagccgaccgagcccaggagcgccacgcgcggaaggcagcgcccagcagcgcagcaaggggaacaaccgg

SEQ ID NO: 159650 - RNA, 76 nt, Homo sapiens
gaaccaagagacagccgaaggcaacggcagagagagcgacgcgcagcgccgccgcccagcaggccaaggccccaag

SEQ ID NO: 159651 - RNA, 79 nt, Homo sapiens
gagaaaaagcgggacgcacccgagggagagcgcaccaccccacgcgccaggcgagaccccagggcacgagagcagcgcg

SEQ ID NO: 159652 - RNA, 57 nt, Homo sapiens
gcaagggccgaggcccgagaggcagaccgcaccgcagagagggcgccggccaggcgg

SEQ ID NO: 159653 - RNA, 80 nt, Homo sapiens
accccacaggccagcaaggacagcagcaggggagacaacaggaggacacggaagagggaagaaagaagcagcgccaggac

SEQ ID NO: 159654 - RNA, 61 nt, Homo sapiens
cagaccaacaaccccacgaggaaaagagaaccgccagcaagagcgcgcacgcaaacgggag

SEQ ID NO: 159655 - RNA, 76 nt, Homo sapiens
cacagacaagaagggcaaggaccgacgcccagggagagcaacccggagacaaggcacggagggcaaaagagggaac

SEQ ID NO: 159656 - RNA, 81 nt, Homo sapiens
agagccagcgagcgaaccagaccaaaaacgcaacaacagacgccgcagcccaccaagccacgccaccaccccagggagcga

SEQ ID NO: 159657 - RNA, 38 nt, Homo sapiens
cgaaggagagggcggcaagcagaccagaacagagaaga

SEQ ID NO: 159658 - RNA, 66 nt, Homo sapiens
acaccagaaagagaggagaagggaacaaccgaaaaccgagaagaaaccgcaagaaagaaagcgggc

SEQ ID NO: 159659 - RNA, 81 nt, Homo sapiens
ggcggccacacgacccacccaagcccacgaggcggcacgggaggaagccggccgccaggccacgaacccggacaaggaacg

SEQ ID NO: 159660 - RNA, 78 nt, Homo sapiens
gaacaccagcaccggaacaaggagggggcagccaaccacgggaaggacagcggaagcacgggccagacccgcggacac

SEQ ID NO: 159661 - RNA, 56 nt, Homo sapiens
agagccagagacacggagaggcaaggaaacggaggcgggggcagcccgcccgcagg

SEQ ID NO: 159662 - RNA, 74 nt, Homo sapiens
gccaccagagcagcaggaagggagagccacccaagagacaagcagacaacaggcacaaagagagaaggaacacc

SEQ ID NO: 159663 - RNA, 64 nt, Homo sapiens
caaagacggagaagagcagggcagaagacccgagcggcccgagacaaggggacccagagcaagc

SEQ ID NO: 159664 - RNA, 34 nt, Homo sapiens
accaagcaggagaaccgaccggagcccgagcagg

SEQ ID NO: 159665 - RNA, 83 nt, Homo sapiens
gaaaaaaaaagaacggaaaaagaaacggggaagggggaagaggggaaaggaagggcacagcccccagacagaaaccccagaca

SEQ ID NO: 159666 - RNA, 84 nt, Homo sapiens
aaaagcagagcgcagagcccgaggaagagcagaagacgaaagccacccggccacaaaacgaagccacgaagccccccggaagca

SEQ ID NO: 159667 - RNA, 76 nt, Homo sapiens
aaagggccaaagaagggagagagggggacggaagcggcagcgggcagccggcccagcacagggagcagaaccccag

SEQ ID NO: 159668 - RNA, 77 nt, Homo sapiens
acgacccagccccagaggacaccagcgggccgacaaccccggaacgcgggcaaaaggccccaggggaccgggggagg

SEQ ID NO: 159669 - RNA, 75 nt, Homo sapiens
cgaacggggagccgagcggagcgccgcggcgcagccaggacgaagagaggcccgaccagagaaaggcaaacagca

SEQ ID NO: 159670 - RNA, 66 nt, Homo sapiens
gaaaagaaaggaccccaggagaagacagaggagccagaccaagagacagcacaggcgagcgagcag

SEQ ID NO: 159671 - RNA, 73 nt, Homo sapiens
gaaacaaagcaagaacaccagcagccagaagagcgcgcagagcgagaacgagagggggacagcagccgcagcg

SEQ ID NO: 159672 - RNA, 77 nt, Homo sapiens
cagggcacgccgaccgagagacccaggcacccagggaaacgagaggggagaaggccaaggccaggccaggacaagag

SEQ ID NO: 159673 - RNA, 78 nt, Homo sapiens
gcgcgacgcgcgcgcccggcccgggcccagccaaggcccgcgaaggcggagagcggcaggccccggccagcagggcgg

SEQ ID NO: 159674 - RNA, 34 nt, Homo sapiens
cccagaaagccgggacaaaggacccccagaggac

SEQ ID NO: 159675 - RNA, 68 nt, Homo sapiens
ccacgcacccgccagcgaccggaccccaccaaggggacacgagcaaaaacgacaacacaccagcgggc

SEQ ID NO: 159676 - RNA, 52 nt, Homo sapiens
gaaaacacagggcaagccaaaggcagaagcccacaggacaaaaacacaaaag

SEQ ID NO: 159677 - RNA, 59 nt, Homo sapiens
ccacaaaccacgaggaccaccgcgcccaggggcaggcgagaaaaggcggggccagcgcc

SEQ ID NO: 159678 - RNA, 88 nt, Homo sapiens
ccgcgcgggggagcgcgacgcgcaagggcgcggagccgcgggccggcgagcgcgcgccaccaggaaggggacccaggcagccgagacc

SEQ ID NO: 159679 - RNA, 69 nt, Homo sapiens
cccccacacgccagcgcacaccggggccaccccaaaccaggacccgaaaagccagcaagcgagaccaac

SEQ ID NO: 159680 - RNA, 107 nt, Homo sapiens
agaacgccggcccagccccagcggcagacggaaacgacagaagcagaggaaagggccgagaaagaagagaggaagaagaggaggaggaggaagaggaggaagacgag

SEQ ID NO: 159681 - RNA, 75 nt, Homo sapiens
aggcgccgagcggccccaacaggcccgccgcgccgggccagcggcgccgccgaagggggcgaggaagagacaggc

SEQ ID NO: 159682 - RNA, 79 nt, Homo sapiens
ggcagaagggcgcggagggacgcacccccacagggcagaagccccccgggaagacacaaacgcaccaccagaaagccaa

SEQ ID NO: 159683 - RNA, 77 nt, Homo sapiens
ggcaaaccacgcggcggcagcaggccagcggccggcgggagacgcagcgcgacccagcaggaacaaaaaaggggcag

SEQ ID NO: 159684 - RNA, 36 nt, Homo sapiens
ccccccccggaccagaggcgggggagccaagggaga

SEQ ID NO: 159685 - RNA, 73 nt, Homo sapiens
cccagcccgggggacggagagggcgaggccaggggagcggagggggggccccagcccggccgaacgggcgcac

SEQ ID NO: 159686 - RNA, 80 nt, Homo sapiens
caggagcaagcagcaggggggccggagaccacgacagaaacccggagcccaagacggagcaggaaagcacacccgggggc

SEQ ID NO: 159687 - RNA, 75 nt, Homo sapiens
ggcgagaccgggcgaggcggagaggcagaacaaaggagaaaagcagagacagaaggggcaacgaggaacaggcca

SEQ ID NO: 159688 - RNA, 55 nt, Homo sapiens
aaaggaagggccccgagacaggcacagcagaagaagcacacaaccacagcagcgg

SEQ ID NO: 159689 - RNA, 39 nt, Homo sapiens
ccaagaccccacaagcaagaggccacccggacacccaca

SEQ ID NO: 159690 - RNA, 76 nt, Homo sapiens
gcccggggggaagaggaacagccaggggcccacggagggcccgagggcaggacagcaggcaccggcgaagcacaga

SEQ ID NO: 159691 - RNA, 57 nt, Homo sapiens
agagagagaaagaccaaggagcagggacggggggaaaagcgcacccgggcccgggcg

SEQ ID NO: 159692 - RNA, 84 nt, Homo sapiens
gggacgccacgccaagcaaaccgggaaaggagaggacccggagccgggcggagaacggaaaagcaccaggaagcagagaggacc

SEQ ID NO: 159693 - RNA, 77 nt, Homo sapiens
ccgagccgggaccaggcccgggggcggcggccacgccaaggacggaaggccaggcaggacgacgcggagcagggaca

SEQ ID NO: 159694 - RNA, 55 nt, Homo sapiens
gacagacgagagaacgagccaaaaacagacggagaagagcaaagaggagagacac

SEQ ID NO: 159695 - RNA, 61 nt, Homo sapiens
agagacgggaggagggaaggagaaaaggagaggaagaggagagaagcccacccaaagaaac

SEQ ID NO: 159696 - RNA, 76 nt, Homo sapiens
cggaagacaagaagccaaagagcggaggcggcccgcggcagaagaggcggccacccacgagccgacggcaaacgcc

SEQ ID NO: 159697 - RNA, 89 nt, Homo sapiens
acgacaggcggagcgccggcgcaccgccgaccgcggacgccgggaggaccggcggacaggaaccgggccccgaccgaccccgcccccac

SEQ ID NO: 159698 - RNA, 77 nt, Homo sapiens
agagcagaagaagcggcccgccagagaacgcacccagggccccaggaagaagccaagccaaaggcccaccaacgagg

SEQ ID NO: 159699 - RNA, 35 nt, Homo sapiens
agaaccccccgcaggccgacaggaagaacacaaag

SEQ ID NO: 159700 - RNA, 59 nt, Homo sapiens
gcccagcggagacaggccaccaaagaggacagacgcaggcggaggaacagaaggcgaag

SEQ ID NO: 159701 - RNA, 75 nt, Homo sapiens
caagaccggccaacccaagaccagcggagaccacaagaaggcgcacagccacggaaagcgccgaccccacccacc

SEQ ID NO: 159702 - RNA, 35 nt, Homo sapiens
gcacaccgggaggcaagaagccacagggaaaacaa

SEQ ID NO: 159703 - RNA, 76 nt, Homo sapiens
ccggggaccgagggcgagcgaggcggcgcggagacccaccggaacccagaacagacaaagcgcggacaggccacac

SEQ ID NO: 159704 - RNA, 63 nt, Homo sapiens
acaagaagcaacaaggcaagaaaaaggaaccgaagaacaaaggagcaagacccagagaacccc

SEQ ID NO: 159705 - RNA, 75 nt, Homo sapiens
gagaaggcggcgcacaagggcggagcggccgggcccggaacgcccgcagccggacgcgggacccacgcggaaggc

SEQ ID NO: 159706 - RNA, 74 nt, Homo sapiens
caagaagaagcccagcggggggggaccagcccggagcagcagaggcagcgagaagaaaaagaagagagagacac

SEQ ID NO: 159707 - RNA, 94 nt, Homo sapiens
ggccgacccccgcaaggagccgaaggcggcgggagccagagcgccgccggcgcggcgccgggcaaggggaaggccaaggacgagaaagaccccg

SEQ ID NO: 159708 - RNA, 82 nt, Homo sapiens
acaggcgagccagcaccgggcgggcaagaggagcggccagggcggagacaaggagcacagcaaacacaagcccgggggaaag

SEQ ID NO: 159709 - RNA, 86 nt, Homo sapiens
cggggagcgcgccggaccaagcgggcccagaagcggaccgggaaaaccggaggccagcccacccagagaggccgaaaaccggcgac

SEQ ID NO: 159710 - RNA, 78 nt, Homo sapiens
ccaggggaacgaggccaggagccacagccacgccgccgcgccgcggagcggcgccgacaaggggcaaggcggcccggc

SEQ ID NO: 159711 - RNA, 89 nt, Homo sapiens
ccagccgaaaaggaagaaaaagaagaagaggaaagagagggggagcaggagacccggaaggagaagcgggcacagagagaaagagagag

SEQ ID NO: 159712 - RNA, 94 nt, Homo sapiens
gcagcacacaaaaaaacagagcccgcgcagcagaagacggagacaagagcaccagccaacaaccgaagcacgcggagagaggagagaacaaaac

SEQ ID NO: 159713 - RNA, 70 nt, Homo sapiens
cgagaagcaagccagagcagcccagggagcaggagcgaaagacgaagcaggagacaacgagggaggagaa

SEQ ID NO: 159714 - RNA, 80 nt, Homo sapiens
agaacccaagaaaacaaaggcaccggggacgccaccggagaagggaggaaaaccaacaagagcccaagagcaggacgcaa

SEQ ID NO: 159715 - RNA, 76 nt, Homo sapiens
ccacaggacaggagagaaagacggcccgagagagaaagggaaagaaggagcggagcagaacaaggacccccagcaa

SEQ ID NO: 159716 - RNA, 72 nt, Homo sapiens
gccccaccccacagccccagacggggcagagacgcaaggaagacggcgcagaaggcggcacagcaaacacac

SEQ ID NO: 159717 - RNA, 63 nt, Homo sapiens
gaagaagagaggcccggaaagcgcagaacagagagggggagcggcacgccacaggaaacacag

SEQ ID NO: 159718 - RNA, 77 nt, Homo sapiens
agaaagaaaccagagaggaaggaaggagcccagcgagcaaaacggaaaaaaaagaccgcgcccgggaaaagaacccg

SEQ ID NO: 159719 - RNA, 79 nt, Homo sapiens
gacccgcccagcccccagaaggaacaagacaccaccaccgcgcggagggaggacgcccaggagggcacccgggcggaga

SEQ ID NO: 159720 - RNA, 54 nt, Homo sapiens
cgcgcggaggagaagagacccggggaggcaggacagggccaaagcggcaggaga

SEQ ID NO: 159721 - RNA, 80 nt, Homo sapiens
ggaacgacagccgccacgaccacccccggaccggcagagcgcggaggccgaaccccgaaggaaaaaagcagccgaagcca

SEQ ID NO: 159722 - RNA, 79 nt, Homo sapiens
agacccgcccggagcgggcccaggaaggcgcgccgcaggacaaggggcagcaccaggaagcccgcaggaagcaaggcag

SEQ ID NO: 159723 - RNA, 78 nt, Homo sapiens
acaggagagaagaagaagaaaccggagaaggaacagaccccggaggagaccaccgcccacgaagcccgacgaggcccg

SEQ ID NO: 159724 - RNA, 69 nt, Homo sapiens
caagccaagacacacagaaccgacagggaggaacgcggggaggaggaggacagcaaagcgagcgaaccc

SEQ ID NO: 159725 - RNA, 125 nt, Homo sapiens
ccaaacgaggacccagcggagcaagaagaggaccggcagggcagagcaggaggccccccgaggaaccaggaccccgggagggcgggacacccaggaggaagggggcagcggacccacccagagga

SEQ ID NO: 159726 - RNA, 81 nt, Homo sapiens
ccagcaccaccccacggccagggccaccaaccccaacccggagagcggcgagggggccaaagggcgagggcacaaaaaacc

SEQ ID NO: 159727 - RNA, 77 nt, Homo sapiens
gcgccgccgccgccgccgccgccacgagggggggcagccaggacgcacgaccccaggaggaagggagggccggacac

SEQ ID NO: 159728 - RNA, 76 nt, Homo sapiens
gagaaaagcaacggcgaagaaacagaaagaaacccaaagagccaaccgagcacaaggcagcgccaacgcaaacaca

SEQ ID NO: 159729 - RNA, 79 nt, Homo sapiens
gacgcgccggcccacgcgcggccaaggggacgacaccggagaaggcagcgacgacagcgacagcgagaagaggaggccg

SEQ ID NO: 159730 - RNA, 56 nt, Homo sapiens
ggcccggcgggcgacggacggccggacaggaaacagaagacagccgaaccaagggc

SEQ ID NO: 159731 - RNA, 78 nt, Homo sapiens
gggagaacgagaagacaaggccccagggaaagggcggagaaggaacagggagagaaacaacgggaacagaaaggagcg

SEQ ID NO: 159732 - RNA, 57 nt, Homo sapiens
cacacagcgaccgggggggccgcacaggacaggacacggcagaggcccacaagccga

SEQ ID NO: 159733 - RNA, 40 nt, Homo sapiens
ccccaggcgccggcgcagcagagagggcccgccgaaggac

SEQ ID NO: 159734 - RNA, 79 nt, Homo sapiens
ccacccggccaccccccagggagccgaagccaagggacggccaccccagggaccccggcccagcacggccacaagacca

SEQ ID NO: 159735 - RNA, 71 nt, Homo sapiens
ggacagggcggaggcacgcacaggaccacaggagagccggaaaacagcacagaaacgggccggagaaacag

SEQ ID NO: 159736 - RNA, 66 nt, Homo sapiens
caccaaacgcaacgcgacaaagaggaacagaccgccagaccacccaaacaggccggaccgcagaga

SEQ ID NO: 159737 - RNA, 76 nt, Homo sapiens
ggaacggcacccaacagagagcccagaagaggggagccgccaccaaaagcagacggaaaacccacggggaagacca

SEQ ID NO: 159738 - RNA, 60 nt, Homo sapiens
gaagaaaggccagaggcccaagcccaaaggaggacgccaagccacgaacccgcgaccagg

SEQ ID NO: 159739 - RNA, 72 nt, Homo sapiens
ggagagaaaaaggcaggcacagaacgcaggcgccagaagaggccagaaaaccagaaacaaaaacgcaagcac

SEQ ID NO: 159740 - RNA, 72 nt, Homo sapiens
acgaaaaaacaggaaagcaggagagcaggaagcaccaaagaaaacaccccaagaagagaagacccagggccc

SEQ ID NO: 159741 - RNA, 106 nt, Homo sapiens
acagaaagagcgaaagaaggcgcgaaaagaaacagaaaggaaaggggcccagagccaagggagggacggacagggagcagagccggaggagcaaccccggcgcgcg

SEQ ID NO: 159742 - RNA, 72 nt, Homo sapiens
gcgaggcggacgcgcggcgcgcagcgaaccagaaaaggaaaacgggaccaacggggaaagggaaacgccaag

SEQ ID NO: 159743 - RNA, 68 nt, Homo sapiens
caaggagaaacccaagagcagcggcagagagaaaaggaacagccgaagccaggggcaagcgaaaccac

SEQ ID NO: 159744 - RNA, 80 nt, Homo sapiens
aagacagagaagaccacacaaccgaaggggcggggcaggaggcggggcagaagaaagaggcaacaccacagaaacaagaa

SEQ ID NO: 159745 - RNA, 73 nt, Homo sapiens
gggagagcggcaaggcgcgcccgcgaccccggccggaagcacacaacagagcggcagacggcagaaaacagac

SEQ ID NO: 159746 - RNA, 86 nt, Homo sapiens
cggagcaggaggaccagcccaggcccaggccgcggccccccgcgcgcccgggaacgagaccagacgcccaaggggcaagaaggaca

SEQ ID NO: 159747 - RNA, 75 nt, Homo sapiens
ccacgccccggggcaggcggcacgcgcagcgcgccaccgcaccccgaaacggcgaggaaagagaggagccccgga

SEQ ID NO: 159748 - RNA, 64 nt, Homo sapiens
cgcagggcgcccccgcagcagagaagcccccacaaaaaggaagaggaccgacagcaaaaagaac

SEQ ID NO: 159749 - RNA, 66 nt, Homo sapiens
gcagcagagaagaccaggaaagacaggaggccacccccaaagaaaagacgcgacccggggcgccgc

SEQ ID NO: 159750 - RNA, 67 nt, Homo sapiens
cccagcaaagacagccgcaaaaacacagaagcgcaagaaacaacagcgaccagagccgaagagaacg

SEQ ID NO: 159751 - RNA, 47 nt, Homo sapiens
gcggagccaccgcgcccggccgaggagccaagccgccaggccaccac

SEQ ID NO: 159752 - RNA, 63 nt, Homo sapiens
ggagaggcccagcagagacacaccgaggaacgggagagaaaacggaccagacgacgcaagccg

SEQ ID NO: 159753 - RNA, 77 nt, Homo sapiens
cgccggggcggagcgcgcagccagagaagcaaaagaaacaaggcaagacggaagcaagaagaaaagcaacaacccag

SEQ ID NO: 159754 - RNA, 81 nt, Homo sapiens
ggcgagacgcgcggggagcgcgccggaccaagcgggcccagaagcggcccaagaggcccggggggagccacacccagccgc

SEQ ID NO: 159755 - RNA, 80 nt, Homo sapiens
aggggcaggccaggaccgacagcccccacaagggaagggacgcaaaaaggaagccccacaaggaccaggcaaaacggaag

SEQ ID NO: 159756 - RNA, 57 nt, Homo sapiens
gcgcccccaggaccccgcacgggagaaaacccggaaaggcgcggggaaagacgagac

SEQ ID NO: 159757 - RNA, 98 nt, Homo sapiens
accagaccgggaggagcagccgcgcgccgagaagcacccgcgacccagaaggccaccaccgaaagccccgaacaacggcgaggaaggccacggggcag

SEQ ID NO: 159758 - RNA, 64 nt, Homo sapiens
cgccgcaaagcaaagccaccagaggccccgaggccaagcaaccgacaaaggaaacacaggggga

SEQ ID NO: 159759 - RNA, 90 nt, Homo sapiens
caggcccgagggggccggaccgggagggcagcccgggaccgggagcccgggaccgggagccggggggccaccccgaccggaggagcggcg

SEQ ID NO: 159760 - RNA, 57 nt, Homo sapiens
gcgcgaaccagcagcaggcccaggacccaaagacaggaccacgcaccagcagagaag

SEQ ID NO: 159761 - RNA, 73 nt, Homo sapiens
cggcaggccgccgccgagcggcccacccgggcaggagaggccgaccacccggggggcccgcgcgaacacaagc

SEQ ID NO: 159762 - RNA, 78 nt, Homo sapiens
cggacggcgacgggcggccggcgcgaggcgagggcggcaccccaccgcccagccacagccccccccacaggagcaccg

SEQ ID NO: 159763 - RNA, 80 nt, Homo sapiens
aaggaccaagaaccaggggacagaccagagcaggaccaaaggcgcacagagccgaaccccaccaggggccaggcagcgcc

SEQ ID NO: 159764 - RNA, 75 nt, Homo sapiens
acaccaagggaaagcaagccacgggccccgccagcagagcgcacccaacgcacccgcacccacaacccacacccc

SEQ ID NO: 159765 - RNA, 66 nt, Homo sapiens
aaacagaggacaacagacagagcagcgaagcaccgagagccccggcaaccaccacaccgacgaaaa

SEQ ID NO: 159766 - RNA, 70 nt, Homo sapiens
ggcccagaggaccccagccgcgcccgggagagcaagggacgaagcgaccaccggaagcagcaacaaaacg

SEQ ID NO: 159767 - RNA, 78 nt, Homo sapiens
aggagccacagaggaccgacgcgcgcaggcagaggagaaggcagcggacaaagaggcacccccagcaggacagcacac

SEQ ID NO: 159768 - RNA, 68 nt, Homo sapiens
caaaccaccccacaagccgacacccacaggggggccaaaggaaaaggagaacaacagaaacaaacaga

SEQ ID NO: 159769 - RNA, 72 nt, Homo sapiens
aaggagcaaaacccagccaacagacccacacccagaaaaaacccggagaaacagagaaagaagagaagcccc

SEQ ID NO: 159770 - RNA, 61 nt, Homo sapiens
ggagaaggacccaaggcggagcaggccaaaggaagaaggcagagacagaggaagaggcaga

SEQ ID NO: 159771 - RNA, 79 nt, Homo sapiens
aaaccaaagggccaaaccggaaggcgggccccagcccaaccagagcgaccaggcagagacaagagaagaggagacaggc

SEQ ID NO: 159772 - RNA, 71 nt, Homo sapiens
cgccgagaagaacagaaccacagaagcacgaaggagaaggaagcgcacaaacacacccgagcaggagagaa

SEQ ID NO: 159773 - RNA, 79 nt, Homo sapiens
agaggaggggccgccggcgggaccgcagcacggggaaacgaccgccccaaaacgagccggcccccagaagcagccgcgg

SEQ ID NO: 159774 - RNA, 89 nt, Homo sapiens
ggcgagacaccacgcggggcaggggcaaggcggccgacgaagcaggaggagagacgcaggcgccagaacaagcggaaggagccgccgga

SEQ ID NO: 159775 - RNA, 82 nt, Homo sapiens
cggcaacggacacaaaggacggagcagccaggagcagccgccagaccagcccacagcccagagaagacgagcccgagccccg

SEQ ID NO: 159776 - RNA, 77 nt, Homo sapiens
ccaggggacacccagaagcggcgccgccggcagaaacggaggagagaggacaggcaaagaaaaaaagggcgcagaag

SEQ ID NO: 159777 - RNA, 71 nt, Homo sapiens
cacggcgccccgcaagggaccaccacacgaaaccaaggaaaaaccgggaacagcagaggccagaggaaccg

SEQ ID NO: 159778 - RNA, 65 nt, Homo sapiens
gaaggggaggcgccgcaagcgcgaggagccaagccgccaggccaccacagcccggggagcccaca

SEQ ID NO: 159779 - RNA, 60 nt, Homo sapiens
cggcacaaccgcgggggaagcccccaccccgaacccagcccgcgacacacacagagcacg

SEQ ID NO: 159780 - RNA, 84 nt, Homo sapiens
aggccggcggcgcggaggcgggcgggcagcccgagcggggccgcagcgcagggcgaccgcggcccagccagcgggaccggcgac

SEQ ID NO: 159781 - RNA, 62 nt, Homo sapiens
caaagaagagcgaagcagggcacacacacccccggcagcggaggaggagaaagagaggaccc

SEQ ID NO: 159782 - RNA, 34 nt, Homo sapiens
cggcccgacaggagcacaggcgcggaggcggagg

SEQ ID NO: 159783 - RNA, 61 nt, Homo sapiens
gggaagcagccgaccagccgcggagccgggggcaggcggaaggcggccccaaccagcagga

SEQ ID NO: 159784 - RNA, 72 nt, Homo sapiens
agggaaaaaaccgagaacccgaccccgcggagacagcgagacccgccaggagcaaagacggagcggaaccgc

SEQ ID NO: 159785 - RNA, 83 nt, Homo sapiens
cagccgaccagcaggaggacagggccggagcagccggcagcaagcagccaacgcagaaacgcagccaaccgaaaaccagggcg

SEQ ID NO: 159786 - RNA, 72 nt, Homo sapiens
agacaagggacgggacagcccagcgagagagagagcagaagaacgaacgggaccagacacacgcaaggacac

SEQ ID NO: 159787 - RNA, 78 nt, Homo sapiens
gccggcgacccacaggcacaggccacagccagaagagagccacaagcgaaaagagcgaggaagggcgaaagcaggaag

SEQ ID NO: 159788 - RNA, 74 nt, Homo sapiens
gccaggaaaaggggggaaggcacacaacgacccggacagcgaccgcaagaggcaagaaagccagagcccgaacg

SEQ ID NO: 159789 - RNA, 72 nt, Homo sapiens
caacccgcggacaggagcacagcagacaagacgggagagaaccgcgacagacaccaagggcgcgcgacacga

SEQ ID NO: 159790 - RNA, 61 nt, Homo sapiens
cagaaacgaccgcaaaggcacccggggcagaccggaccaaggaagacagaagaaggacgcc

SEQ ID NO: 159791 - RNA, 51 nt, Homo sapiens
cacccccgcacaaggagccgggcgcggagccggccagaacacacagaaaag

SEQ ID NO: 159792 - RNA, 75 nt, Homo sapiens
acccgggcgcggccacacgcgacgggggagccgcggaacggggcagccgaagaggaagcagacccggacaaaagg

SEQ ID NO: 159793 - RNA, 71 nt, Homo sapiens
gaaggcagccaagcccgggcggcccggcccgcagacggccaaagccggccaccaggaaccaccagggcacg

SEQ ID NO: 159794 - RNA, 81 nt, Homo sapiens
gggcagagcaggaggccccccgaggccagaaaccgcagggagaggcccaccagaagaagccaaaaagaagcgagaaaaaaa

SEQ ID NO: 159795 - RNA, 76 nt, Homo sapiens
cccccgcgcccgcaggacaggagaagacacccgggcgggaaaaaggagcaaagaaaggggaaagagaagaaaaaag

SEQ ID NO: 159796 - RNA, 94 nt, Homo sapiens
acgacgaggaggaggcggccgccgcagccggggcccccgccgccgccggagcggaaacacccaaggaaccaaagcaggccagcagaaaaccccg

SEQ ID NO: 159797 - RNA, 77 nt, Homo sapiens
acaggcgcacaggaaaggcacgccggaggagagaagagacccacgcgagaaccaggcgcgaacgaagaaagccaccc

SEQ ID NO: 159798 - RNA, 79 nt, Homo sapiens
gcccagacagccccggggcccagccgacccggagaggaaagcccaccagccgagaaacaagccgggggcgagccaggcg

SEQ ID NO: 159799 - RNA, 78 nt, Homo sapiens
gagaaagaggagcgaagagggcaggggaagaagagcacagaccaggaggaaaaagcagaaaaggaaagagcaagcagc

SEQ ID NO: 159800 - RNA, 91 nt, Homo sapiens
cggaccacccgcaccccacagagagaaagagcccagcgagccagagacacccggaccccccgggcgccagcccgcggcccaacgggccaga

SEQ ID NO: 159801 - RNA, 77 nt, Homo sapiens
gacagccaggaagacccccgagaagacaaaaaaacaggaacgcacagaccccagaggaacggaggagcgaccgaaga

SEQ ID NO: 159802 - RNA, 93 nt, Homo sapiens
cccaaccggaagaaagagcagaggaaagaaaagaaacaccgaaccgccacccaggcccaagaagagagggcacagacccaggccagcagaacg

SEQ ID NO: 159803 - RNA, 77 nt, Homo sapiens
caggaggacgaagggccgcgccaagaagaggacaagagggcagaagaagaacgcggacagcccaggccaagacagca

SEQ ID NO: 159804 - RNA, 79 nt, Homo sapiens
gcaacaccaaggcacaccaccccagggggagccagccaccgagacgccgacagcccgacggggaggcaggaggccaccg

SEQ ID NO: 159805 - RNA, 51 nt, Homo sapiens
cccgcacccacccacgacaggacggacccggcgggaagaacaacgcacccc

SEQ ID NO: 159806 - RNA, 63 nt, Homo sapiens
gcgaggccaaggaaagagagcacaccgcagcccaggagaaaagagcaccggccagcagaacca

SEQ ID NO: 159807 - RNA, 76 nt, Homo sapiens
aacccaacacccgagcagccccacccaagggagggcgacaagagaaaaagaaagaaaccccaaaaacaaaccgcca

SEQ ID NO: 159808 - RNA, 51 nt, Homo sapiens
aacaaagccacgaaaaccaaagacggagccaccaccaccccgagagacgga

SEQ ID NO: 159809 - RNA, 78 nt, Homo sapiens
gagagaccggcaggcacagccacagacagggccagcaaaagacgaccgaaaagacacacaccgaagaaccaaaggaga

SEQ ID NO: 159810 - RNA, 94 nt, Homo sapiens
gcaggagcaagccaagaaagaaccgaagacagaaacgaacccccagaccgacccggaggagcggaggagcggagaacaccggcggcggaagcag

SEQ ID NO: 159811 - RNA, 80 nt, Homo sapiens
gccccacaccacccgcagggccggcacggccaaggagagggccggcccgcggacccgaccgggcccggccggcaggaaag

SEQ ID NO: 159812 - RNA, 71 nt, Homo sapiens
caagacaccagaaagacaggcaagaacggaagcacgggcggaggaaagcacaagcagagcccccgcagagg

SEQ ID NO: 159813 - RNA, 78 nt, Homo sapiens
aggggagcacggaagacgggcaggcaggggagcaaacaacagcgcacaacacagaaagaaaaacagagacgaaaaacg

SEQ ID NO: 159814 - RNA, 96 nt, Homo sapiens
gccgaggccgcccgagcggagcggggcgcaggcgccgccgccggacgcggcaacggagaaggcacaccccggaagcgggccaagggcgcacccccg

SEQ ID NO: 159815 - RNA, 73 nt, Homo sapiens
agagggaccggagcaaaaagcgcacgcaaggaaaccgacaagaggcgcaagaagaaccagacgcggaagaacc

SEQ ID NO: 159816 - RNA, 68 nt, Homo sapiens
gggaagaagcaaacgaagggcaagaacaaaaagggccccgcggggcaagaagaggccagccggacccc

SEQ ID NO: 159817 - RNA, 76 nt, Homo sapiens
gagaaccaaggaaggcccaccgaacagaggagcgagaaagccggccccagcaccaccaagcggcgaggggaaccgg

SEQ ID NO: 159818 - RNA, 62 nt, Homo sapiens
aagcagcccgaaaaagacgcgagaagccacacgggccgacgccaccgccgagcccagaccgg

SEQ ID NO: 159819 - RNA, 69 nt, Homo sapiens
cgaggccaggaggagaccagccgaacaacaacgccagagggagcaacaccgcccacggcgcagcaggac

SEQ ID NO: 159820 - RNA, 78 nt, Homo sapiens
ccacgggcacccgaccggaacagcacacacaccaccaaccacagacagccagcagaagcggggacagaagagaagagg

SEQ ID NO: 159821 - RNA, 75 nt, Homo sapiens
aggccagcgagggggaggagacgcgcggggcgggccgccagcggggacaggcagccacgaaagcaagagaacaaa

SEQ ID NO: 159822 - RNA, 55 nt, Homo sapiens
cagagaacccacaaagaggcgaagaaggggacccaaagcaggcacacagagcaag

SEQ ID NO: 159823 - RNA, 75 nt, Homo sapiens
ggggcccccgaacaggagaaagcgggaccagcagagcgacccgccccagcccgaagcaccccggagagaagcacg

SEQ ID NO: 159824 - RNA, 100 nt, Homo sapiens
gccgaccccggaagcgagcgcggacgccacccgggggcacagcaaggaacaaacggacggcccacacccccccaaaacacgagcaccgccaggccagcgc

SEQ ID NO: 159825 - RNA, 70 nt, Homo sapiens
gccagaagaccgaagcgcgacggaagggaaacccagacgacaaggaaggccaagggacccacgaccaacc

SEQ ID NO: 159826 - RNA, 66 nt, Homo sapiens
cagcaagggcccaaaccgggcgacaagcggacaaaggcgcgcacggccgggcggagagggagcggc

SEQ ID NO: 159827 - RNA, 67 nt, Homo sapiens
ccagcgcccggagaccacagggcagaccccacaagaaagcagagaccgggaggcagcaacccagagg

SEQ ID NO: 159828 - RNA, 80 nt, Homo sapiens
cgccacggaccgcgggacaagaaaacagcggaacaaacaaagccaggcaggaggaacaaagaaacccagagacagcaaca

SEQ ID NO: 159829 - RNA, 76 nt, Homo sapiens
ggaacccaaccgcacaaggaaggccaccaaaccgaagaagccgcagccagagaacgacagcccgccaggagcacaa

SEQ ID NO: 159830 - RNA, 69 nt, Homo sapiens
aggaccaagaaccagacaacccagaaaagaaaaggccaggggcgccgaaaaacccgggaacaaacaggg

SEQ ID NO: 159831 - RNA, 73 nt, Homo sapiens
cggggcggcgggcggggcgagggaaacacaaagaagacaccagaagggccagcaccacgacaacacggcgaca

SEQ ID NO: 159832 - RNA, 81 nt, Homo sapiens
ccgcgcgggggcggggggccgagcaaccagaaccggagcaggaggcgcacaacacccagagggagcgccgagcaacccacg

SEQ ID NO: 159833 - RNA, 70 nt, Homo sapiens
caggacgcggcagcgcgcgagggcccgacaagagaggcggagccacccccacaacggaccaggagaaggg

SEQ ID NO: 159834 - RNA, 72 nt, Homo sapiens
acccgaccggacccagccccagaaggggaacaacggagacggagaagaaccaccaagaaagaaccgacaaca

SEQ ID NO: 159835 - RNA, 86 nt, Homo sapiens
gggcagcacggaccaccgcggggccccggcaaggcaggaggggaagcagaaagcaaacggccccgaaggaggaggaccgggaagag

SEQ ID NO: 159836 - RNA, 42 nt, Homo sapiens
caagcccggccaaaaaagcagaaaccaagaagccaagggaac

SEQ ID NO: 159837 - RNA, 77 nt, Homo sapiens
gccccggaccaccagccagcgcggaccagaccggaacgcccaagccccaccgcgagcccacagacacacccaaagca

SEQ ID NO: 159838 - RNA, 77 nt, Homo sapiens
gaagcggcacccccaggaagcgcgggcaggcagcgaacaagaccgccccaccaaacagggaaaacacacgcagagcc

SEQ ID NO: 159839 - RNA, 79 nt, Homo sapiens
aggcgagaggcggcccgggcgcagcgggcacccgggggacgcggggacaccacaagcacgaggcgacccgcggcgagag

SEQ ID NO: 159840 - RNA, 40 nt, Homo sapiens
cccaacaacaccgcgagacgagaaaaccgaggcgcacaga

SEQ ID NO: 159841 - RNA, 73 nt, Homo sapiens
cagcagcaagagccccaaagccaccagggccagagggggcgaccgggacaaacggcggaggcagaagaggcaa

SEQ ID NO: 159842 - RNA, 72 nt, Homo sapiens
cagaaagagcaggaagcgcaagaccacgcgaaagaaacggaagggaagagccgcaggaggagaaccaaacgc

SEQ ID NO: 159843 - RNA, 81 nt, Homo sapiens
gcacacacggggcccgaggaagagaaaggagacacggcgcgccgcagcagggggaagaagagaaaacgaggacccaagaag

SEQ ID NO: 159844 - RNA, 55 nt, Homo sapiens
agacagaacagaacccaaaagccgacaaccccagaaacagacagggaaagcccca

SEQ ID NO: 159845 - RNA, 78 nt, Homo sapiens
gggaagggacccgaaggggaccccagcccccccagccgaaacgccgccaggcacagagaaggcaaacgggagggcgag

SEQ ID NO: 159846 - RNA, 33 nt, Homo sapiens
gggccaagagcaggaaccccaccagccccgggg

SEQ ID NO: 159847 - RNA, 78 nt, Homo sapiens
aacgcggcacagagaccagccggaccgcccgccagggagacaacagggacaggggaccggagcggcgggcgaggagac

SEQ ID NO: 159848 - RNA, 77 nt, Homo sapiens
ccgcaggccagaccccgggagcccagccaccacagacagcaacaaacaagcgcacgcacaagaccaaggggaaacgg

SEQ ID NO: 159849 - RNA, 75 nt, Homo sapiens
accaacagacaagccaaacggcaaggaacacagagggacagcaggaagccagaggagaaaaaagggccccgagag

SEQ ID NO: 159850 - RNA, 75 nt, Homo sapiens
gggcgccccacagaggggcgacggaagggaaacccaggaaccaaaagaggccacccagcgcgaggggaaacacca

SEQ ID NO: 159851 - RNA, 73 nt, Homo sapiens
acacgcccaagagcggacagggccaccggcccaggcggaggcaagggacagagccacgcagccaaccccgggc

SEQ ID NO: 159852 - RNA, 76 nt, Homo sapiens
aggaaccgcccccaccgggaccgaccgcaaacaaggagagccacgagcagccgagggaacggcaacgaaaagagac

SEQ ID NO: 159853 - RNA, 51 nt, Homo sapiens
ccggaagaaccgcagccgagcggggccggccacaggcccggcgggacagcc

SEQ ID NO: 159854 - RNA, 72 nt, Homo sapiens
caagaaacacagcccagacccagccacaccaaagagccccaccccgccaggacccggaccacccggaaacca

SEQ ID NO: 159855 - RNA, 79 nt, Homo sapiens
cgcccccacccgcggcagcggacagcccagagcaagcacacggaggcccgggagccagaccgggagcccgccccagcca

SEQ ID NO: 159856 - RNA, 78 nt, Homo sapiens
cccgcgacagaggagggaggaaaacaaccgagggcagagcacaggagggcagaccaaaagcacaaaaagaacggcccg

SEQ ID NO: 159857 - RNA, 74 nt, Homo sapiens
ccagcgacccagccacaggaacagagacagcgccgcgggcaaggaaacggcaaaacagagaaggaccaaagcaa

SEQ ID NO: 159858 - RNA, 72 nt, Homo sapiens
agcgggaggcccgggacaggagcaaggaagagaaaaggccagaggaaccaagaaccaacacagacagagacc

SEQ ID NO: 159859 - RNA, 78 nt, Homo sapiens
gggggacacgcgccggaaggggcccgaagcccccgcaggaaccacaacccaaccaggcacaagacacagaagcacaac

SEQ ID NO: 159860 - RNA, 94 nt, Homo sapiens
gacggcaggagcacgggagaggccgagagccacagcggcagcccagcccggcccggcagcgacaggaaggcagaagccccagaggagcccgaaa

SEQ ID NO: 159861 - RNA, 60 nt, Homo sapiens
cgccagagcgacccagccagcgacgaggagacaggaggagcaaggcgggcaagagaaaaa

SEQ ID NO: 159862 - RNA, 70 nt, Homo sapiens
cgcagggcacccgggagacggcgaagagccaagagaagagggccaggagcaacagcgaccagcgcggacc

SEQ ID NO: 159863 - RNA, 75 nt, Homo sapiens
aaaaacacaaaccaggcaacaggcagaaaaagaaccagaaaaccgagaacagggggggcaaaaccaagcacggac

SEQ ID NO: 159864 - RNA, 44 nt, Homo sapiens
cgccgacgcccccagccaccagacagacgggggcggcaagaggc

SEQ ID NO: 159865 - RNA, 69 nt, Homo sapiens
gaaagaaggcaggggcggacaaggcgagacgagcgccgaaaagcgaaaagaaacaagccgcggcaacag

SEQ ID NO: 159866 - RNA, 67 nt, Homo sapiens
gaggcgacgaaggacacgcaacccccagcacagccccagggaacccgagaaggccaacaaaagagcg

SEQ ID NO: 159867 - RNA, 79 nt, Homo sapiens
gaaccaaggccaagaccagaaccagcccgggaaaggcgacagacacagcaccggccccggcagcgggacgcaggacggc

SEQ ID NO: 159868 - RNA, 81 nt, Homo sapiens
ggcagccgggccggccgacgggggccaagagagccccaaggaccggaaacgcgccacaacccagcggaccagacaacccgc

SEQ ID NO: 159869 - RNA, 75 nt, Homo sapiens
gggcgacgcagcaacgggaaccgaagccacgcaacaggggcaaacgcccagcaggcagcgccaacaaaaaaaaac

SEQ ID NO: 159870 - RNA, 70 nt, Homo sapiens
gagcaaggcacagggagccaacagagacaccaagaggcgcgaccccagggacaaccccaaccgggaaacc

SEQ ID NO: 159871 - RNA, 75 nt, Homo sapiens
acagccgggaaggggagccaccagccccccgaccacccaagaagaccaaggcccaaaaggacccaagagagaagc

SEQ ID NO: 159872 - RNA, 79 nt, Homo sapiens
agggcggaagcccgccccagagcagacacaacgcgcagggacgcagaaaaggagccagaaagaagagacgaagaacagc

SEQ ID NO: 159873 - RNA, 70 nt, Homo sapiens
ccgcaaaacagaacgcgaccgaaggaaaagaagccccaggcaggcggggaccaacgcgagagcagaacac

SEQ ID NO: 159874 - RNA, 77 nt, Homo sapiens
gacaaagagccaagaaacccgaaacaaagccagaccgccgaggggggacgaacccaggagggaaaccgaagaaaaca

SEQ ID NO: 159875 - RNA, 79 nt, Homo sapiens
cgcgcgccagacaggacccaccggccagcccccacccggaccggccagaaggcccgccgcaagcgcgcccgcacgggac

SEQ ID NO: 159876 - RNA, 77 nt, Homo sapiens
ccaccgagcccgccaaaggaggcaagaccaaaggagaggagacgcagaacaggaacacagaaggcgcagcacaaacc

SEQ ID NO: 159877 - RNA, 66 nt, Homo sapiens
cgagcagaagcggggagcccggggcgcgaggaccccggggccacgccgggccagaaaaggggaaga

SEQ ID NO: 159878 - RNA, 78 nt, Homo sapiens
cgcgcggcgcggggaccgcggcccgcggcagccaggaggcaggagcagcgggcgacaggcgggcccgggcgggccccg

SEQ ID NO: 159879 - RNA, 66 nt, Homo sapiens
agaacaacagaggaaaaacagagccaagaaaggaagaaaagccagaggaagagggagccaaggagc

SEQ ID NO: 159880 - RNA, 55 nt, Homo sapiens
caccagcagcccccagagcggaacacagacaacaggcggcccgggcggagggaca

SEQ ID NO: 159881 - RNA, 81 nt, Homo sapiens
ggccgaaggggccgaacacagggagacaccccgcagagccgacccgcaagaccagacagagcgcgggcccaggcggaggca

SEQ ID NO: 159882 - RNA, 73 nt, Homo sapiens
cagcagagcaaccagagcacacgagagggccgggacaaggaagacaggggccacacagagaacaaaccaggag

SEQ ID NO: 159883 - RNA, 77 nt, Homo sapiens
aaaagaaccgaaagaagcggaaagcagaagcgcgcagcaacggcggacagaaaccaaccaacagacgagccgagcgg

SEQ ID NO: 159884 - RNA, 76 nt, Homo sapiens
agggccgagggagggccgagccagccgcggccggaggagcccccaggccgaaagcgaagccaacaaagaaaggacc

SEQ ID NO: 159885 - RNA, 77 nt, Homo sapiens
ccgccgcaggccacccgggaacggaggaggggccgaggaaggcgggggaggagacagcgggaagccagcggacccag

SEQ ID NO: 159886 - RNA, 80 nt, Homo sapiens
ccagggaacggaggagcgagccacggcggagacgggacgcgccagcccacaagacaccacgaaacagacacccgcagcca

SEQ ID NO: 159887 - RNA, 77 nt, Homo sapiens
cgaaagcacgcaaaggcggccacgcacaggaaggggaaagcagcagacaaaggaggggggaaagcaaaggaacaaaa

SEQ ID NO: 159888 - RNA, 71 nt, Homo sapiens
aaccaagaaccaacaaccaaagaaaacagaacagaaaagggaagaaaacgccagagaagcagagcagcccg

SEQ ID NO: 159889 - RNA, 46 nt, Homo sapiens
agccgacccacgacagcaacggcgcaaagcaacccccagccacaac

SEQ ID NO: 159890 - RNA, 79 nt, Homo sapiens
cgcagccgccccgaagagggggacacgacccggagcacccgaccccgaaccgggagaagagccagagcccgaggcgagc

SEQ ID NO: 159891 - RNA, 74 nt, Homo sapiens
ggaaccgcgcgcgcaacccccggccggggagaacccagaagaaaggcggggacaggcaaccagggagcaggcac

SEQ ID NO: 159892 - RNA, 77 nt, Homo sapiens
aaggccgccgggcccgggcaggggcggggcaacgcggaagcgaggggcacagaggcaggcacaaaaccacaagcgac

SEQ ID NO: 159893 - RNA, 75 nt, Homo sapiens
gccacccgggagagcccggaaaggcccgcggcgaggagcgagcagaggccgcagggcagaggccagccaggccca

SEQ ID NO: 159894 - RNA, 82 nt, Homo sapiens
cgaaggcgcaaacgacaccacccgaccggcagaaagaggccagaagaaacaccagggaaggagaccaagaaccaggacggag

SEQ ID NO: 159895 - RNA, 77 nt, Homo sapiens
gaaacacgacagaagcagggcgaaccagagaaaacggcaaggaagcgaagaaaggcgaagggaaaaagcaaaaacca

SEQ ID NO: 159896 - RNA, 71 nt, Homo sapiens
gccgaacggaccgggggaaacaaaaacgcacacaacgacccagcaaaccagccccgagagccagcccggaa

SEQ ID NO: 159897 - RNA, 82 nt, Homo sapiens
cccagcgggcccggggaggcaccgacgaggagagccccccccagcgccgaaggcccgacccagcagcccggcccggcaccgc

SEQ ID NO: 159898 - RNA, 75 nt, Homo sapiens
gacaccgagagccaagacaggacgagcgcggagggcagcagagccggcccggaaaacaaagccacacagaggaag

SEQ ID NO: 159899 - RNA, 69 nt, Homo sapiens
gagagccgagccaagaggcaagccccagcgcccacggaacgccggcaagcgcccccaagacaacccccg

SEQ ID NO: 159900 - RNA, 80 nt, Homo sapiens
acaagcccccgaccagcgccaggacgccgagagaagcaggaagcagacgggaccaagaaggaagccagcagggggaagag

SEQ ID NO: 159901 - RNA, 82 nt, Homo sapiens
gcaaaaccggacaagaggccaaccaaccggagacacacccgagggaacaccccaggaccgggacccgaggccccagcagacg

SEQ ID NO: 159902 - RNA, 73 nt, Homo sapiens
gaaaaggccacgacccaccccgaagagcaacggaaccagcgccgaggaacggggacagaacaaacgggaaaca

SEQ ID NO: 159903 - RNA, 81 nt, Homo sapiens
cacagcaggacggaagcgagggcacgggcggcagcccgagaccgcagcaggaaaagcaaggagagccaacagacggcaaaa

SEQ ID NO: 159904 - RNA, 79 nt, Homo sapiens
gccagaagcaaacaaaagcaagcggccgggaaaaaaagaggcgaggggacggcggggagcgcaggacagacgcccccgc

SEQ ID NO: 159905 - RNA, 70 nt, Homo sapiens
cagagcccgcgaacaagacaagagccagcgggccggcaccggcacgaggagcgcacacccgcccagccaa

SEQ ID NO: 159906 - RNA, 70 nt, Homo sapiens
aaaaaggcaggacagacagcagggccgaccaagcaccgcagacccaaccccaggagccgccgcgccagac

SEQ ID NO: 159907 - RNA, 46 nt, Homo sapiens
cgacagagaggagggagaacaagcaacggcgggaaccagggggacg

SEQ ID NO: 159908 - RNA, 41 nt, Homo sapiens
gccacccgcccacaacacaagaagcggccgggggaacggag

SEQ ID NO: 159909 - RNA, 73 nt, Homo sapiens
ggccccggcccacaggggggggcaaacccgagagaacggccccaaaagcacgcacgaaaccggcaagccagcg

SEQ ID NO: 159910 - RNA, 67 nt, Homo sapiens
ccagggagggagagaagagagccacagcaacagcaaaagaagagagaaaacccggacaaccagcggg

SEQ ID NO: 159911 - RNA, 68 nt, Homo sapiens
aaagccaaaagagcgccagcccagcgccgaaaagcgaaaagaaacaagccgcggcaacagcgacccca

SEQ ID NO: 159912 - RNA, 86 nt, Homo sapiens
gccgccccgagcccgccgccacacccgaggcggacgaaagaaagaaggagcaccaacgcaaagaaaaagaccaagaagaccaggga

SEQ ID NO: 159913 - RNA, 81 nt, Homo sapiens
ggcccgaggacaccgacaccagcagcagccagggccccgaaggagcacccaacccacgcaccccccagcgcaggacagcga

SEQ ID NO: 159914 - RNA, 82 nt, Homo sapiens
aacaccccaggaacgaagacagcagcgcacccgggaggagggagccaaggaagccaagagagacggggcacccgagccagga

SEQ ID NO: 159915 - RNA, 82 nt, Homo sapiens
ccccgcgcgcccccaggccggaaggacagaaaacgggccccagacacaagccccaccaagaggacaccccaggaacgcggag

SEQ ID NO: 159916 - RNA, 70 nt, Homo sapiens
aagccaccagaaggcgcgggacggaacagaaaccgggcaaacggaagccgcagaaggaccggccagaagc

SEQ ID NO: 159917 - RNA, 72 nt, Homo sapiens
gccgccccagggaacgcgcaacacaaagaaaggcagacgggcaggcggcggcagccaaggcagagggccacc

SEQ ID NO: 159918 - RNA, 57 nt, Homo sapiens
ccgcgggagagaggacccccccccccccccaagcacggaagacgcaacgcaggagga

SEQ ID NO: 159919 - RNA, 76 nt, Homo sapiens
acgacccaaacggacaggagcaccaaaagggggaacagacaagagggacacaggcgaaacagagaggaagacaagc

SEQ ID NO: 159920 - RNA, 74 nt, Homo sapiens
aacggggaccaccacgcccagggacgcaccaaagaagacagacacgcagaaaaggagccggaccccagggccca

SEQ ID NO: 159921 - RNA, 69 nt, Homo sapiens
agaggcaacaagggacaacccaaagacggagcaaggaccagggcgcggaaacgaaagaaggcggaagca

SEQ ID NO: 159922 - RNA, 76 nt, Homo sapiens
ggcaccaggccgaaaacgaagcagaggaacaacaagagaccccacaggcccgggacagaaccgccaggaagcaaag

SEQ ID NO: 159923 - RNA, 59 nt, Homo sapiens
ggcacacaccaacggggacgggggaggacaggagacaggaagagagaggaggacagagg

SEQ ID NO: 159924 - RNA, 68 nt, Homo sapiens
agccaggagggcgcggggacgcaacccaacagaacaagagagaggacgggaaagccaagacaacccaa

SEQ ID NO: 159925 - RNA, 37 nt, Homo sapiens
cccaaaggcgggaaaagagacgagcacaacacacaaa

SEQ ID NO: 159926 - RNA, 72 nt, Homo sapiens
cgccgccaacgcgcccccgagggcggagaacggaaaagcaccaggaagcagagaggaccgcagaagggaagg

SEQ ID NO: 159927 - RNA, 64 nt, Homo sapiens
aaagaaaagagaaaaccggaagccaacaagaaaacagccaacaaaggaacgagcagcaacggcc

SEQ ID NO: 159928 - RNA, 80 nt, Homo sapiens
gaagagagaaaagagagaaccccaaccggggaggaaaaccgacgaaggaaagccaggccagaagaaggaaggccggggag

SEQ ID NO: 159929 - RNA, 76 nt, Homo sapiens
accccgcacccacgcccggcccggcccggccccgacacgaccacaacgaagcgaaaacgaacaggcccccgcaaaa

SEQ ID NO: 159930 - RNA, 81 nt, Homo sapiens
cgccgacaggccaccaaccgggcacacgcgaacagcccaaggaggaagcggagcccacgaggggaggggccggccacccag

SEQ ID NO: 159931 - RNA, 70 nt, Homo sapiens
gagagagaagagaggagggagaacaagcaacggacacaggacacggcgccccacacccccgcaccgaccc

SEQ ID NO: 159932 - RNA, 76 nt, Homo sapiens
gacacgcccgaggaaaaggggccggacagacagcaaggagaccgacagcaccgacggaacagcggacgccccccgg

SEQ ID NO: 159933 - RNA, 81 nt, Homo sapiens
aggagcgggggaggacggggcgaggccgccagacagagaccccacgcccccgccaccgggaggccgcagggcaccaccgca

SEQ ID NO: 159934 - RNA, 58 nt, Homo sapiens
ccacacagacaccggaaaagggggggaagcagcccccgcagacagaaagcggccagcc

SEQ ID NO: 159935 - RNA, 61 nt, Homo sapiens
gaaacaagccgggaaagggacaagaagggcaaagccgaacgaagagagagaaacgaaaaag

SEQ ID NO: 159936 - RNA, 73 nt, Homo sapiens
gaaaccccagagcgcgaccgcagagggaaacaaaggcacaacccaaagaggaaaggcagcaacagcaacaaca

SEQ ID NO: 159937 - RNA, 75 nt, Homo sapiens
agcacccaccgagaaggccagcagcggacggcgcgccaccggccacgcaacccccgccgacccgaccagccgcga

SEQ ID NO: 159938 - RNA, 56 nt, Homo sapiens
acaaagaaccacggacagggcaggaccagaaaaagcagaaccgggaacccggagaa

SEQ ID NO: 159939 - RNA, 88 nt, Homo sapiens
cgaagaaaaggcggacaggaagggagaacgacgccaacagcagcgaagacaggacgccagacgggacacgcacaggggcgaggccggc

SEQ ID NO: 159940 - RNA, 89 nt, Homo sapiens
caccagaacagcggccacccgacagcaagcaccggagggagaagacagacacaaaagccaggaagacaagagcagaagaaacagaccga

SEQ ID NO: 159941 - RNA, 89 nt, Homo sapiens
gccagcgcggagggaagagaaccggaagagcagagccagcagcagcccacgcgcccagccagacggggggcggggccagagccccgggc

SEQ ID NO: 159942 - RNA, 83 nt, Homo sapiens
cgccgggcccagggcaggacaggccgaaaacccccaggagggagacagagggggcacccagaggccggggaccgccaaccccc

SEQ ID NO: 159943 - RNA, 80 nt, Homo sapiens
caaccaaccgcgcccagccacagcaaaagagcccaagaacccaaaacgaagaaagagcaggcagaaagcaaaagcagaca

SEQ ID NO: 159944 - RNA, 53 nt, Homo sapiens
gacgcgcaaaaaaaggaagcagaccgaccaaacagggagcagcggacaggaga

SEQ ID NO: 159945 - RNA, 74 nt, Homo sapiens
cgcccgggccagcggccgcgcacccccggccggaggcaccagcaacaaccgccagggaacagcaaaaaacgaga

SEQ ID NO: 159946 - RNA, 74 nt, Homo sapiens
cgcgacgagcccggcaaggagccggcacagccacaccgagaagaccggcccaagaaccccaccgcccgaagaca

SEQ ID NO: 159947 - RNA, 80 nt, Homo sapiens
gccccccccggcgcccggcccccgccccaccgcgcgcacggggaccggagaagagagcaggcagccaggccaccgagcgg

SEQ ID NO: 159948 - RNA, 83 nt, Homo sapiens
gccgccgccccggagccgccagaaaccaggcggggaacaagccagcagcccaaggagaagccccacagagcaagcgaaggcca

SEQ ID NO: 159949 - RNA, 78 nt, Homo sapiens
ccagagccaaggaggaaggggccggcccgagagagacgcagcgcaaggccgggggaggccacaaaacaaagcgacagg

SEQ ID NO: 159950 - RNA, 64 nt, Homo sapiens
ggaaaagaaccagaagcgagagaaaagcccccaaaagcagcacagagagcccacgaacggcggg

SEQ ID NO: 159951 - RNA, 73 nt, Homo sapiens
gggagcccgcgcccgccgcgggagagaggacccccccccccccccaagggaagggagagcacaccgcgacggc

SEQ ID NO: 159952 - RNA, 91 nt, Homo sapiens
caggaggcggcaggacggccaagaccagcgcgagggcccgggcaaggcccgacaggacaccagcaggaaaacacgggccccagaaacaagg

SEQ ID NO: 159953 - RNA, 89 nt, Homo sapiens
gcagcccccagcgcaagacaaagcagcggaagaggagacgccccccaggcccgcccccccaagaggaaaacacaggagaggaaggaagg

SEQ ID NO: 159954 - RNA, 73 nt, Homo sapiens
gaaagaaaaacaggagaagaaggccgacacggagggggccagaaaccagaggaaaccgcagacggcagggaag

SEQ ID NO: 159955 - RNA, 71 nt, Homo sapiens
aacccaagaaaaaaaccacaaagcggccgaaacagaaaacaagagaccacagaagacccaacagaggaagc

SEQ ID NO: 159956 - RNA, 41 nt, Homo sapiens
gcacaggcagccggacacagagggggggccccagcccggcc

SEQ ID NO: 159957 - RNA, 77 nt, Homo sapiens
aaaaagggaaaaccaagcgaagaaagcaccggaaacggggaagaaaagaagagcaccaaaccagacggaggaaaccc

SEQ ID NO: 159958 - RNA, 91 nt, Homo sapiens
gaaaaggcggacgggaaggcgggagacgagaagccgaaaagcgcagcgagcggagccgccggaggaaccagggaaaaggagagggcagggg

SEQ ID NO: 159959 - RNA, 55 nt, Homo sapiens
ggaggcaggaaacgcagcaaagccacgggggagaagaagcggagagaaagacaaa

SEQ ID NO: 159960 - RNA, 80 nt, Homo sapiens
gagaacgcacagcccccaccagccaccaggcagcagaaagagaaccggccaggaacaacccgccaccggacgaggagcca

SEQ ID NO: 159961 - RNA, 63 nt, Homo sapiens
gaacgcccgacacacagcagggggagagaagagaggaagaagcagggaggaccggccaggaac

SEQ ID NO: 159962 - RNA, 91 nt, Homo sapiens
ggagagaagcacaccccaacccgaccccacgcccgggaacccccgcaacagggcacggagggggaagacagagaagaccacacaaccgaag

SEQ ID NO: 159963 - RNA, 69 nt, Homo sapiens
aagacgaagggaaaaaagcagagcccaggagaaaccggacgcgacgggcaccaggagacaaagccacaa

SEQ ID NO: 159964 - RNA, 77 nt, Homo sapiens
agagcacaaacaaagacccaaaagaaaagcagcgggaaagaaagaagagaccagaagagcaggaggaaacaaaggaa

SEQ ID NO: 159965 - RNA, 82 nt, Homo sapiens
gcagccagggcaggggagcaaggacagcagccagaaagcagcgggggacgaagaagaccccaacccaaaccagcgaagacgc

SEQ ID NO: 159966 - RNA, 54 nt, Homo sapiens
agagccacaaccaaaagaagcacaccgccacgaaaacgacgcgggcaggacccg

SEQ ID NO: 159967 - RNA, 67 nt, Homo sapiens
accgaaccggcaccgcacaccggaccaggaaacggaggcggagcccaaacgagaaggaagccgcgga

SEQ ID NO: 159968 - RNA, 70 nt, Homo sapiens
accaaggcggacgcggcgagaagacgagaaacccagggagagccgcgaaagacggagcagaaaaaggcag

SEQ ID NO: 159969 - RNA, 42 nt, Homo sapiens
aggcacaccccggagccaggagggcccagaaggggaagaccc

SEQ ID NO: 159970 - RNA, 77 nt, Homo sapiens
gcggcggccaggccagacccgaaggccaggagacccgaccccaaggaaacccaccagagaaggcgcggccacccagg

SEQ ID NO: 159971 - RNA, 71 nt, Homo sapiens
cacccccgccccccaggcgacgagacccagggcaggacagaagacaggagccgacgcagagcagggccggc

SEQ ID NO: 159972 - RNA, 54 nt, Homo sapiens
cgcccagccggcgagggacgccgcaggcagcaggacaggaagcagggagccaag

SEQ ID NO: 159973 - RNA, 59 nt, Homo sapiens
gaagacgaacaaacagcaagaaagaccacaagaccaaaggggccgcccgaaagaagccc

SEQ ID NO: 159974 - RNA, 76 nt, Homo sapiens
agagcggaccagggcgcgccagcaccgccaccagagcgcccgcgcgggaccccagggacacgagccgaacaggcgc

SEQ ID NO: 159975 - RNA, 68 nt, Homo sapiens
ggaggaagaacccaagccagagcccaggacccaagaaacaccgaaagcaccacaagggaaaaaagcaa

SEQ ID NO: 159976 - RNA, 54 nt, Homo sapiens
cccaaccaagaacaggccgagaacacaggaccggagaaagccagaagagcgcag

SEQ ID NO: 159977 - RNA, 74 nt, Homo sapiens
ggaagcgccgcgggcaacccggcacacgcccccggcccgcccgggcccaagggagcagacaggagaaaacgaca

SEQ ID NO: 159978 - RNA, 53 nt, Homo sapiens
accgcagagcgcagcccgacgccggagcagccacccagagacccgcaacgagg

SEQ ID NO: 159979 - RNA, 80 nt, Homo sapiens
accacagaaggacgggagaacaccccacagggaagagggacaccaggggggaaaaaccacacaggcaaagaacgcgcaaa

SEQ ID NO: 159980 - RNA, 71 nt, Homo sapiens
acagcacggcacgccccgcggggcggaacccacgaggagcagcccgggcccaccaccccaaacaggaagac

SEQ ID NO: 159981 - RNA, 75 nt, Homo sapiens
ccaccgacacgcagcagcggccagaaacaagggaagccgggcggaccaggagagggaaagagccggaccagccga

SEQ ID NO: 159982 - RNA, 59 nt, Homo sapiens
gaaggccggagacaccagcagagaggcggaggcgggacgggcagccacccagaaaagga

SEQ ID NO: 159983 - RNA, 118 nt, Homo sapiens
cgcgcccgccccgggccccccgccgccgccggcccggacaggccgccaacagacagggcggaggcaccagacccggaggagcagcaccccggcaggcagaccagccggcccccaccag

SEQ ID NO: 159984 - RNA, 55 nt, Homo sapiens
ggggaaaacccccaaaggagcaaccgacgccgccaagccgggaagacagccgcca

SEQ ID NO: 159985 - RNA, 83 nt, Homo sapiens
gcccaaccccgggccggcggcggcggccaggcccgcgaacacacgccgccaccgggaggcccagggaagagaagcaggagaaa

SEQ ID NO: 159986 - RNA, 85 nt, Homo sapiens
gggccaagcaccggccacaacaacaccccagcccagacacgaaaaagaccgcaaaacgggacaagcccgcacgcgcagagacaag

SEQ ID NO: 159987 - RNA, 87 nt, Homo sapiens
cggggacggcgcgcgggacggccgaggaaggaacggcccccccccagcccgccccaaaagccaagaaggacaagaaggggagaagaa

SEQ ID NO: 159988 - RNA, 72 nt, Homo sapiens
cagacgacgcagggaaaagacagagaagaagaccccgagaccccgagagaaacggcgagaaaaccaaacagg

SEQ ID NO: 159989 - RNA, 36 nt, Homo sapiens
acagcagagagaagccaggcacagccaacacccggg

SEQ ID NO: 159990 - RNA, 73 nt, Homo sapiens
cgaaccgggcgaaggaccagcgggaccagccccgccccacaccgggggcgacaggaggagcgaccacgggaac

SEQ ID NO: 159991 - RNA, 86 nt, Homo sapiens
cggcgccgagaggccggcgggacgcgggcgccaggaccggccgaacgcagaggccagaccgcaccgcgcggccgccccagcggcac

SEQ ID NO: 159992 - RNA, 72 nt, Homo sapiens
agcgcacacaccaccacacacgggccggacccgaaaacacaagaacacagcaacacacggcgcacggaagcg

SEQ ID NO: 159993 - RNA, 83 nt, Homo sapiens
agaccaagagaggcggggaccgcagcagcgagaaaggagccggggaccccccaaagacaagagggaaccccaccggaacggaa

SEQ ID NO: 159994 - RNA, 56 nt, Homo sapiens
gcaccccggccccggcccgcccggaaaaggaaggacagacggggccgcgcgggaag

SEQ ID NO: 159995 - RNA, 57 nt, Homo sapiens
ggaaaagaggacaaaggcccgaagcgcacagagccccccaagagaacccagggggag

SEQ ID NO: 159996 - RNA, 78 nt, Homo sapiens
ggacaccccggagcgccacccgagggaagaacaccaggaggcagccacgaaaagaaggaaagacagaaccaaaagcca

SEQ ID NO: 159997 - RNA, 70 nt, Homo sapiens
agcccagcgggccggacggggcggggggaacggcaaagaggagacggacgcgaagacacaggcagccaaa

SEQ ID NO: 159998 - RNA, 67 nt, Homo sapiens
gcggaaaaagggagggacaagagcagcaccaagcgcagggccggagacaccagaaaccgggggcgcc

SEQ ID NO: 159999 - RNA, 81 nt, Homo sapiens
cagcacgccggacgaggaaggcgagaccagaggggggaccgggccccgaaggagggacaggcacacacccagggggcccga

SEQ ID NO: 160000 - RNA, 109 nt, Homo sapiens
ccgagagccgcccgggccagcggccgcgcacccccggccggaggcaccagcggcggaaaacaccccaaaagccaaaagggaaaggaaaagaccaacaacagcgcaggac

SEQ ID NO: 160001 - RNA, 53 nt, Homo sapiens
ggggagccgccaccgccgcagaggagcgccagcccggcgaggggcaccggagc

SEQ ID NO: 160002 - RNA, 71 nt, Homo sapiens
gcagaccgggcgaagggagaggacagcagggaggcgggacgcgggggggcggaaggggaaacgagggacgc

SEQ ID NO: 160003 - RNA, 71 nt, Homo sapiens
aacccaggagagcagaaaggaaccagcgcccacagggggagccgccaccaaaagcagacggaaaacccacg

SEQ ID NO: 160004 - RNA, 77 nt, Homo sapiens
gcaccgcccgcgcagccgagagccgggggagcggggccccacacccccccgggggggcaagaggagccaggagcacg

SEQ ID NO: 160005 - RNA, 77 nt, Homo sapiens
ccaccccacaccggagcgccacgggacacggaaccaggaggagcggagcgccgcgcgcccaggccaggacggaggca

SEQ ID NO: 160006 - RNA, 76 nt, Homo sapiens
caaagaagggaaaagcagcggaccgccccgggacaaaaaaagccaaaaacaaggcgaaagcaggcgaaagggaaaa

SEQ ID NO: 160007 - RNA, 64 nt, Homo sapiens
caagaaggcggagaaggacccaaggcggagcaggccaaaggaagaagcaagaagcaccaggaga

SEQ ID NO: 160008 - RNA, 56 nt, Homo sapiens
gagacacgcagcggcggccagggaccaccaaagcggacgccggccaccacgaaggc

SEQ ID NO: 160009 - RNA, 75 nt, Homo sapiens
ggcccgcccggggcggcaaggaccgagcagccccgccacccggggcaaacccgaggacagagggagcacaaccag

SEQ ID NO: 160010 - RNA, 72 nt, Homo sapiens
ggagacagggcccgggcacaaaaaccgacgagccagggaagggcgcagcggaagacccacagaaagccccca

SEQ ID NO: 160011 - RNA, 59 nt, Homo sapiens
cacggaagagcaaaagggggaacaggccgcccgccgaagaaacacaagagcaagagaaa

SEQ ID NO: 160012 - RNA, 72 nt, Homo sapiens
ggccaggaaggcagcgagaggcacggcaaccggcagaaagccccagaagaccagcgggagcgacggaagcca

SEQ ID NO: 160013 - RNA, 74 nt, Homo sapiens
gaagacaccagcgcagcccgacacacaggcaagcgcccggccaggagagggaccagagggagcggaagcccgag

SEQ ID NO: 160014 - RNA, 82 nt, Homo sapiens
cacacggcccgggcaaggaagaaaacaccggagcccaagacaccaaaacagacgcaggcaagaggcagaaggacaaaggaaa

SEQ ID NO: 160015 - RNA, 70 nt, Homo sapiens
ccaacaagagcagccccagcgcccacaccgccagccacacaaaaaacaacgaacgagcaaggaagggcca

SEQ ID NO: 160016 - RNA, 85 nt, Homo sapiens
gaccgaggaagaaacccagaagaggaagaggaaagcaaaggagcggggaggccccaggccaggaaacggcccaggcagcaagccc

SEQ ID NO: 160017 - RNA, 73 nt, Homo sapiens
aaaagcaaagagaaccaaaaacaaaagccccaagggagagcccagaggagacgagcgggggcgcgggcgagcc

SEQ ID NO: 160018 - RNA, 81 nt, Homo sapiens
cagcagaaagacaaagcaccagagaagcgccgagaagcgcagaaagaagaaagaaaggaaagccggaaaaccgaggcagcc

SEQ ID NO: 160019 - RNA, 72 nt, Homo sapiens
ggggggggggaagccgcagcggaaagcaggagcacagcgaaacgaagaaagaagcggcagaagaaagaccaa

SEQ ID NO: 160020 - RNA, 64 nt, Homo sapiens
cgacggcggagagaagccgggagcgagcccaggcggcagaaacaagaggagaaccaggaacgag

SEQ ID NO: 160021 - RNA, 61 nt, Homo sapiens
ggccgggagaacacgacccgacccaaggccacagaacaccgccggccacaccggccacagc

SEQ ID NO: 160022 - RNA, 73 nt, Homo sapiens
agccgcggggcccgcccagaacagaaggcaaaccgacaccagcgacacaagcgcgagggaaccacagaggaca

SEQ ID NO: 160023 - RNA, 72 nt, Homo sapiens
acaaaagaagagagacacaaagagcacaaaaaagcggaaaaacgaggcaagaaagcgcaaggggaacgcaca

SEQ ID NO: 160024 - RNA, 41 nt, Homo sapiens
gcacccaacagcgaccgagcggaccccgagcaggcgcccga

SEQ ID NO: 160025 - RNA, 71 nt, Homo sapiens
gccacacggggccggcacagcacgcccggcaccccgaccaggcgaacaagccagaccaagacagaaaaggg

SEQ ID NO: 160026 - RNA, 77 nt, Homo sapiens
cgggcgagcgacaccgggccaacaaaggcgagggccggaggggaggaggccgaaacgcacggaccaggcaacagccg

SEQ ID NO: 160027 - RNA, 78 nt, Homo sapiens
cccgaggcgagaggcgcggcgaccaggcccgcggcaggcggggccaggcccgagccagaaggaggcccacagagcccc

SEQ ID NO: 160028 - RNA, 59 nt, Homo sapiens
gggaggggaggcaaagggaggaggaggaccggagggggcccacgagaagagcaggcgac

SEQ ID NO: 160029 - RNA, 76 nt, Homo sapiens
acaaggaaaaccaagaaccagaacggccacagaacacaaggagcgggggacaggagaccaacggcgagaggaaaag

SEQ ID NO: 160030 - RNA, 67 nt, Homo sapiens
gcacacgagacacagagaaacgccaagaacagaagcaaagagaagggacaagggaaaggcaaacagc

SEQ ID NO: 160031 - RNA, 82 nt, Homo sapiens
cgcggcccccacaccacacagagagcgagccgggcccgggaggagcaggggcagaggggagaacccagccgggaccaagcac

SEQ ID NO: 160032 - RNA, 58 nt, Homo sapiens
gcaggcgcaccgccccccgcccagacaccagcgcaggccaaaaagagagaaaaaccag

SEQ ID NO: 160033 - RNA, 81 nt, Homo sapiens
cgcacagagaaagcgcgacccacgggaccgacccggaccccggagagcaaaaccccggacaagaaagccagagaaacgaca

SEQ ID NO: 160034 - RNA, 83 nt, Homo sapiens
caagcagccaccagcagcccccagagcgggaccacaggcgcaggccaaccaccaccgggaagagccaaccccagccccgacag

SEQ ID NO: 160035 - RNA, 50 nt, Homo sapiens
cgggcaacaggccccagggagacagcagaagaaacggaacaacaccggca

SEQ ID NO: 160036 - RNA, 58 nt, Homo sapiens
cagcacaaaccggcagcgaccaaagacagagacaagcggggaagaacggcggagcaca

SEQ ID NO: 160037 - RNA, 79 nt, Homo sapiens
cggaagccacacaggccagaacgagggagcccccaggacaggcacacccgggaaaaccgaacacccagcccagacacaa

SEQ ID NO: 160038 - RNA, 96 nt, Homo sapiens
agggaggaaagagagcagccaagagagggagacggcaggcagcggaacacacaaaaggaaaaaagaggcaagggacagcaaagcgggagagaagca

SEQ ID NO: 160039 - RNA, 84 nt, Homo sapiens
ccgggccggccaggacgacccgccaccagggaaaaacagagaggaacaacgagcccacaaaggacagaaacccaccaaggaagc

SEQ ID NO: 160040 - RNA, 64 nt, Homo sapiens
cgggaagagagcacaagggcaagaagaccggaaggagagaaagccagaccggaaaagaagaacg

SEQ ID NO: 160041 - RNA, 74 nt, Homo sapiens
ccagcgaacgggacgcaaaaaaacaagaagggaggagaaggggacagaagcgacggaaccccacgggaccagca

SEQ ID NO: 160042 - RNA, 63 nt, Homo sapiens
cccaggccacgccgagccgccaggcagcaggacggagccccagaagaagggacacgagaaacg

SEQ ID NO: 160043 - RNA, 38 nt, Homo sapiens
gcccacagcccggccagggggaaagcaggggagaaaag

SEQ ID NO: 160044 - RNA, 76 nt, Homo sapiens
gcggccccagcaagaaggggcaagcgagaccagacccagcggaccagagaacgcaccagcccgagggcggccccac

SEQ ID NO: 160045 - RNA, 79 nt, Homo sapiens
aggggcagacaagcgaagcggggcccggggccaagagacggcgagcgcagagaacccagaaagcacaccgcggcaggac

SEQ ID NO: 160046 - RNA, 79 nt, Homo sapiens
ccgacaggcgcggcacgggaggcggaggcgccccgccagacaaagaaacagccggaaaagcacgagcacaagacgaaaa

SEQ ID NO: 160047 - RNA, 86 nt, Homo sapiens
cgaggaccagcagaggccagcacgagaacccaggcccaggggacacccagcaggccagggaagaggcagcccaggggacacaggag

SEQ ID NO: 160048 - RNA, 113 nt, Homo sapiens
agcgccgcccggccgccccgcgagaaggaggagaccccgccggcaaccaccccgcgagaagaacaagaagcgggcaggccgcagggccaccaacacaaagcaacgggacccag

SEQ ID NO: 160049 - RNA, 66 nt, Homo sapiens
aggaagaaacggcacgacgcgcgccaagaccgacaagacggaaaccgggagggggaaaagcgagaa

SEQ ID NO: 160050 - RNA, 75 nt, Homo sapiens
gagggaaagaagaggagaagaaaagagaggagaggaaccccaaggaaggcaggagcggcgccagcgagccgcgac

SEQ ID NO: 160051 - RNA, 68 nt, Homo sapiens
acacagcaaagaaccgacacagaaaaccggcaaaaaagcagaagcggaagaaagaagagccaagaagg

SEQ ID NO: 160052 - RNA, 64 nt, Homo sapiens
cgggcgccgaggggcgacgaaacaacaggcgcgagaacagacccagcccgaggaaggagaagag

SEQ ID NO: 160053 - RNA, 61 nt, Homo sapiens
gagcggcaaaggggggcccgaacaaagaaggagcagcaccaacacacagcgagacggcagg

SEQ ID NO: 160054 - RNA, 72 nt, Homo sapiens
gagccggccggggaccagggaggaaccccagccgggaaagggagcagcaccggccacacccacagcacgacc

SEQ ID NO: 160055 - RNA, 61 nt, Homo sapiens
gcagagggaaagacggcagaagcacacagaagaaagaccaggggagcccaaaagcacgaag

SEQ ID NO: 160056 - RNA, 41 nt, Homo sapiens
gaaaagcgaggcaaggcaggcggagaccgcgacgaagccag

SEQ ID NO: 160057 - RNA, 79 nt, Homo sapiens
ggagaggagagaaaggcggaagacgaggacccaccccgcaccagggggcgcaacacgaccaggccacgcagccagaccc

SEQ ID NO: 160058 - RNA, 81 nt, Homo sapiens
gacgggcaccaccaggaggcggcacacaacaacgccaggacagggcagaccgccagcagcacagcaagccacagagagggc

SEQ ID NO: 160059 - RNA, 74 nt, Homo sapiens
cgcccacgggggcccgcggcgcccggcgcgaaggggaacaacagcaccaccaaccggcagacgccaaagagaaa

SEQ ID NO: 160060 - RNA, 80 nt, Homo sapiens
cacgagcacaagaccaaacgaacggcacagccaacaagagaacggagcggacaccagaccaaccagacccagagccaaag

SEQ ID NO: 160061 - RNA, 78 nt, Homo sapiens
aggcgaaacacgaaaacaaggagaagggggaaaggccgagggggacggcaagagcacacaccccggaccacggcccgg

SEQ ID NO: 160062 - RNA, 77 nt, Homo sapiens
aaaacggcacacccaccaagcacccaacagaagaagagaagaagcggagaaaagaagaagacacgcagaagaaggaa

SEQ ID NO: 160063 - RNA, 57 nt, Homo sapiens
gaaagccccacccgccgcagcaagcagagagagaagaagaaggaggccgcggccaga

SEQ ID NO: 160064 - RNA, 67 nt, Homo sapiens
gccggagacaccagcaggaaagccgcagcggggagaagcccacgcgaaaacaacaaggaaaaaaagg

SEQ ID NO: 160065 - RNA, 70 nt, Homo sapiens
cgaaccagggcgaccaacacacggacaaagggagccgggcagcaccgaagacccagcaggcgaagaagca

SEQ ID NO: 160066 - RNA, 76 nt, Homo sapiens
gggaaagggacaagaagggcaaagccgaagaagcaccggcacggggagcacgaggcaagggaaaagaagagcagga

SEQ ID NO: 160067 - RNA, 78 nt, Homo sapiens
gaacagggccaccacaggcagagaagcagggggaaccaggggccccacggggaaaaagcaaaccggccacggaacgag

SEQ ID NO: 160068 - RNA, 73 nt, Homo sapiens
ggcgacaccccggcaggaggcacaagccccaaagggacggcaagcaacagcaacccagcgggcccgcccaccc

SEQ ID NO: 160069 - RNA, 75 nt, Homo sapiens
ccgaaggcggacccgcgcgcccccgcccgcaggggcgaccacgaccgaagagccagagacaagccccacgagacg

SEQ ID NO: 160070 - RNA, 62 nt, Homo sapiens
gaaagagaaagaaagggcaagggaaaacgacgcagacgacccaacgacagaaacccaagaac

SEQ ID NO: 160071 - RNA, 76 nt, Homo sapiens
cgccagaccgcgacaggcccgaaaaaaacccaggcggcccaggaaaagagcagggggaaacagacgggaaagaagg

SEQ ID NO: 160072 - RNA, 80 nt, Homo sapiens
acgacccggagcacccgaccccgacaccaaggagacagacgagccggcgcagaaaagaaggagcgggcgccaaagaacag

SEQ ID NO: 160073 - RNA, 79 nt, Homo sapiens
gcagcccaggacacacaccccgcccaagggcgaccagaaggcacagcagaggcaacaaaccagggacagcgcacaggcg

SEQ ID NO: 160074 - RNA, 73 nt, Homo sapiens
ggcggcccaaggagacggggcgacgccgagcacgccggacaaggagaggagggcggggaccagaaccaccaac

SEQ ID NO: 160075 - RNA, 80 nt, Homo sapiens
gggaggcaaggggggaccagacaggcggcaacagcagcgcgacggcagaccgaagcccggcccaccgcaccgccaaccag

SEQ ID NO: 160076 - RNA, 66 nt, Homo sapiens
cagacacggcccgccccagagaacaccaagagcccgacaaaggcgaccaggcagcgccaacgcaaa

SEQ ID NO: 160077 - RNA, 67 nt, Homo sapiens
caaagacagcagggaagagggccgggggcaagacggagagaacggcccaggaagcccacggccgaac

SEQ ID NO: 160078 - RNA, 72 nt, Homo sapiens
cagacgcgacccagcagacgaaagggagcaaaagagcggagagaaggacaaaacccaaacagagagagaaag

SEQ ID NO: 160079 - RNA, 80 nt, Homo sapiens
ggaaagagcgccaggcgcacacagcacaaggccagagccggaagggggcagaacgcccaaaacccgccggaccgaagaag

SEQ ID NO: 160080 - RNA, 75 nt, Homo sapiens
gagcccaggagcgccacgcgcggaaggcagcgcccagcagcgcagaaaaaggcacaaacccagcacagagaagac

SEQ ID NO: 160081 - RNA, 79 nt, Homo sapiens
gccaaccaggcgcccagggcagacaaaggcaaacaaggacccgaaagggagaagaaaagcaacacagcgaccagaaaaa

SEQ ID NO: 160082 - RNA, 70 nt, Homo sapiens
acgaacccccaacaggcagcacaggcgcggaaagacagacaacaaggcagaaaaaggaagaggagaaacc

SEQ ID NO: 160083 - RNA, 93 nt, Homo sapiens
caggaggcgacaagaggagacgaagaagaggaagaaggggggaggaagaggaggaggaagaagaagggaggccaaagaagcaaacgacaaaag

SEQ ID NO: 160084 - RNA, 78 nt, Homo sapiens
aagaaccgaaagaagcggaaagcagaagcgcgcagcaacggcggcagccaaaggcagggaagaaaaagaagacaccag

SEQ ID NO: 160085 - RNA, 76 nt, Homo sapiens
caaaaccggacaagaggccaaccaaccggaggaaggaccgagggacccgacacacagaaacagagcggaccaaacc

SEQ ID NO: 160086 - RNA, 77 nt, Homo sapiens
aagcagaccaaaaagggaagaaggaggccgaccaggccgacaaagcagacgcccgcaaacgaccggggaaagcaccc

SEQ ID NO: 160087 - RNA, 57 nt, Homo sapiens
cagccaggagcacagagggcggaccgccgggggccgaagggcaacacagcagaccgg

SEQ ID NO: 160088 - RNA, 81 nt, Homo sapiens
gaagagacaagccaggcgcaccacggccaggcaaagaaagacgaaaaggaaggaaggacgaggcagacccgggagaagccc

SEQ ID NO: 160089 - RNA, 80 nt, Homo sapiens
ggagagcggccgcgggcgacgggccgagaacacagaagagaacccgaacacagcaggagcaagcgggggcaggagccaaa

SEQ ID NO: 160090 - RNA, 116 nt, Homo sapiens
gcgcgcagcaggagggagaggggcaccaaccgccggacaggcgcagcggaggcacaaagggcccgggaggaggcggacaaggggacggcacccggcaccaccaaagggagcacgaa

SEQ ID NO: 160091 - RNA, 37 nt, Homo sapiens
agagacaacaagacagaggaagaacggagcaaggccg

SEQ ID NO: 160092 - RNA, 71 nt, Homo sapiens
aacccgaaaaaggccccccgagaagggagcagaagaggggaagaaagagacccgcgggccccagacacaca

SEQ ID NO: 160093 - RNA, 76 nt, Homo sapiens
gcgccgggggggggccacgccgcaccgcgcaacccgccgggccaggcagccgcacgccccgagccccggccccaaa

SEQ ID NO: 160094 - RNA, 76 nt, Homo sapiens
caccgcgcgaagaacgcagggacgaccaacgcagcggacaagacggccgacaacaggccccggcagggcaggacag

SEQ ID NO: 160095 - RNA, 73 nt, Homo sapiens
agggggaaacacagaacgcaggacacaacaccagccagccagccccacccaacccaagcagccacccagcccc

SEQ ID NO: 160096 - RNA, 65 nt, Homo sapiens
cagcaacagaggcacagccaagggggaggaggccagcagagacgaggacgcgcacaggaaaggac

SEQ ID NO: 160097 - RNA, 51 nt, Homo sapiens
gccagcacgaccggcaagcagcaggagaaacgagaagaaacagacgcgcga

SEQ ID NO: 160098 - RNA, 79 nt, Homo sapiens
cagcaggagcgaggccgggaccggagcaccggcagacccggggaccgggaaggagcagaacggagcccgcagaggaccg

SEQ ID NO: 160099 - RNA, 113 nt, Homo sapiens
cccgccgcgcaccacagaggcaagacaagggccaacgcggcaccggccccgcccgccagaccgcaacccaccaaggagcacaggacgaagaggaaggaaaaaacaggcgagca

SEQ ID NO: 160100 - RNA, 126 nt, Homo sapiens
gaaggcgaagcgggagaaagccagggcgaagaaagacacacgcccaggaagcaaccaggcccagaaaaggaacccacaccacggacaagaccaaaaggaccccgcgaggacccaaacgaaccccaa

SEQ ID NO: 160101 - RNA, 83 nt, Homo sapiens
aaggcggcagggcagcagaagcgcaccccgacgccgaggaacgagagcgcgaagcaagaaaaagcggggaaaacaaaaaaaag

SEQ ID NO: 160102 - RNA, 61 nt, Homo sapiens
aggcccgaggcgaggcgaggggcccgacgcaagagacaggggcaaggccgaggggaacagc

SEQ ID NO: 160103 - RNA, 78 nt, Homo sapiens
ccagggccagcaggcaccgagccgagaggagacacggcacccaccgaacaccacgcgcccaacaggccggcaccacgg

SEQ ID NO: 160104 - RNA, 57 nt, Homo sapiens
gcgcacccccggccggaggcaccagcacaacaacagcggccagaccgcaaaccaaga

SEQ ID NO: 160105 - RNA, 39 nt, Homo sapiens
gacaggccccagccgcagggcaaggggacgcgagaaagg

SEQ ID NO: 160106 - RNA, 81 nt, Homo sapiens
aagcagccgcacgacgcacggcccaggaccgcacaagcggacacagacaggcaggagaagaaggagcggcagaaggggcga

SEQ ID NO: 160107 - RNA, 65 nt, Homo sapiens
cgaccggggcggcaaaaccacccaaaggaacagagacagacccgggggcccccaaggagagggaa

SEQ ID NO: 160108 - RNA, 83 nt, Homo sapiens
cagagcccagaaaagagcagagagacgaagagagaagcagggcagaaagagcggaaacgagaagagcaaacacaacagaacac

SEQ ID NO: 160109 - RNA, 56 nt, Homo sapiens
gggaggacagcaaaaaccagggcccacagaggagccggacacaagagggcaagaaa

SEQ ID NO: 160110 - RNA, 76 nt, Homo sapiens
gaggcgacgcacacgagcggaggcgaaggaagaaaacaggcgaaacaaggcacccccagcgccgaacacaggacgc

SEQ ID NO: 160111 - RNA, 72 nt, Homo sapiens
ggggaaacccggagggaaccaagaagccgcagccaagccggaacaggagcggcgagcccaaacgcaaggggg

SEQ ID NO: 160112 - RNA, 68 nt, Homo sapiens
cgggccgccgggacccggacggacagaaagcgggacacaagcaggagcacagaccccgaaaagggaga

SEQ ID NO: 160113 - RNA, 76 nt, Homo sapiens
aaaacggcagagacagcgccagaaccacggcaaagaaacagcccgaacgcacagaagaaaccagcgcccagcgccg

SEQ ID NO: 160114 - RNA, 61 nt, Homo sapiens
cggacacgaggagcagaagcaggacgggcccagggaacacgggagccccggaccaccggac

SEQ ID NO: 160115 - RNA, 72 nt, Homo sapiens
acccacacaggacgcggacaagggcggcaggcccggccgcccaaagaacaaccccccggccccgggcacgca

SEQ ID NO: 160116 - RNA, 83 nt, Homo sapiens
ccggagcgccgcggggcccgggacggccggagcagcagaacaagagcggagaccaagggagccccgcagcagcagaagacggc

SEQ ID NO: 160117 - RNA, 77 nt, Homo sapiens
aaagggagaaccgaacgggaagacccagacgcaacgcagcgcaccgccagcccggaccgacaggaaagaaggagccc

SEQ ID NO: 160118 - RNA, 78 nt, Homo sapiens
cgaggcagcacaacaagaaaaagaagcgaggacacagaccgaacagagagccgacaaggagcgaaccaagaagaagag

SEQ ID NO: 160119 - RNA, 68 nt, Homo sapiens
cggaaacaggaaccaaaacccccacaccgaaacaaaggacaagccacacaagaaggagaaaaaaaaga

SEQ ID NO: 160120 - RNA, 87 nt, Homo sapiens
gaccaggagacacaaaacccagacaccgacgggccgcgaggggaagaggaagcaaagccaagggaagacgccacgcccagaccagcg

SEQ ID NO: 160121 - RNA, 51 nt, Homo sapiens
aaggaaaacgcggaaaaccgacacaacaggcggggaagacccgacaagcca

SEQ ID NO: 160122 - RNA, 88 nt, Homo sapiens
gcggcagggagcagcgggaggaccccagccgcggaggggagcagaggaccaagacaagacgagggagagccgagagggacgaagcaga

SEQ ID NO: 160123 - RNA, 69 nt, Homo sapiens
ggccacaggcgcaagcaggcggggaccaacccaagccaaacaggaaagaccagcgggcccacggcagga

SEQ ID NO: 160124 - RNA, 65 nt, Homo sapiens
ggcccgcgcagaagaccaaaacagggacagggcgaagcacagaaccagcacggggggaaggagac

SEQ ID NO: 160125 - RNA, 80 nt, Homo sapiens
cgcggccagggcggcgccgcgccccccacggagcaaggcagccgcggagcccgacacaggcccaccgggaccgccccgcg

SEQ ID NO: 160126 - RNA, 77 nt, Homo sapiens
cggagagacgaaccgaagcgggcgggcccccccacccagagggaacacgggcggcgagagaaaaggccagcaccaag

SEQ ID NO: 160127 - RNA, 76 nt, Homo sapiens
caagaagaaaggcacaggccagggaaaaggcaggacaacaggaccagaaaccagagagcagagggccagaagccaa

SEQ ID NO: 160128 - RNA, 73 nt, Homo sapiens
cgggagggaaccagcaacaagccggggacaaagccgcgaaaaggaacccacaaacaccacacaagaggaccag

SEQ ID NO: 160129 - RNA, 83 nt, Homo sapiens
agaaaggagacccgacgcaacgcggagcgcaaggcgagggacgagaacgagacagccgaaggaacgcaccacagacggagccc

SEQ ID NO: 160130 - RNA, 67 nt, Homo sapiens
gacagcccccggaaccccaaagcaccgccaccgccgcccgaggcagggcccgggaaagagcaaagac

SEQ ID NO: 160131 - RNA, 79 nt, Homo sapiens
acacaaggcagccgccgggagccagaagcacaggcccgggcgaaggggccacgcgaggcagaggacaacagcaaccaag

SEQ ID NO: 160132 - RNA, 92 nt, Homo sapiens
cacagcgcgcagacaggaggaacgaagcagaagggcgaaagcaccagcgcacagagcagcggaaagagccaggcagaaagccggggggaggg

SEQ ID NO: 160133 - RNA, 82 nt, Homo sapiens
ggaaaaaggcgccgccggacagcagagcccaggacaagaagagcaccccggggaaacaaagcccgagcagcccggaccaccc

SEQ ID NO: 160134 - RNA, 105 nt, Homo sapiens
gcaggacaggacaaccaccagccccaggaccccgcgcacgcagcaacgcggagcaggcacaagaaaagggcagggacacagcgaagaagaagcgccagcaaagga

SEQ ID NO: 160135 - RNA, 73 nt, Homo sapiens
gccccgggcaccagcccacggcacggagcaccagcacagcaggacaaccagagggaaaaaacaaaggcagcac

SEQ ID NO: 160136 - RNA, 76 nt, Homo sapiens
acaggcaacagaccacagagaaccaagagcaggggccaggggaggacgcgacgaacgggagaggccacaaacccag

SEQ ID NO: 160137 - RNA, 59 nt, Homo sapiens
cgcacgcggccccacgcagccagccccggccagcacaaagcgagaaggagggagaaggg

SEQ ID NO: 160138 - RNA, 83 nt, Homo sapiens
ccaagaagggagcacacgacggcagccccaccggcaacaagagcagccacagcagggaccccacgaaagccgcagcacggaaa

SEQ ID NO: 160139 - RNA, 115 nt, Homo sapiens
gagacgaacgccacggggcagccgcaacaggggagaagacgcgcgccgacaggaagagcacccaagcgcaagcaaaagaaggcccccccagcagagccaccccaaaagcaagaag

SEQ ID NO: 160140 - RNA, 86 nt, Homo sapiens
gagagagaaagaggaggggaggaggaggaggacagggaaaggagcggggagccccgcgccacaggcacgcgaaggcggggaaacgc

SEQ ID NO: 160141 - RNA, 80 nt, Homo sapiens
ggaaccacggagcacgagaaaacggcgggacaagccgagaccaccaggagcagagcggaggcaaccagccaaaacaacgg

SEQ ID NO: 160142 - RNA, 60 nt, Homo sapiens
aggaaaacaaccgagggcagacccgagacaacacgaaggcaggaggccgcggcccccacg

SEQ ID NO: 160143 - RNA, 83 nt, Homo sapiens
ggagagaagaagaagaaaccggagaaggaacagaccccggaggaggcgcggggaggcccagcccgccgcagggccaccccgcg

SEQ ID NO: 160144 - RNA, 73 nt, Homo sapiens
gacccggaccgaggagaaaccggaccagcgaacccacaggaaagaaacaggcgacaaaaccagacccccgacg

SEQ ID NO: 160145 - RNA, 80 nt, Homo sapiens
gcgacggccccgggaaggaggaaagaccacagcaagaccacgcccccagccgggggaccaggccgaacgacccggacaca

SEQ ID NO: 160146 - RNA, 41 nt, Homo sapiens
gccagcgagcagcgaggaggacaacaccgggaggccagaac

SEQ ID NO: 160147 - RNA, 118 nt, Homo sapiens
caaaagaagaaagccagcagaggaaaaaagaacacagggagcgagaacgggccaggcaggaagaaggggaggagaggagggaaacacccgaagaaagaagaaacaaaagaaaagaccc

SEQ ID NO: 160148 - RNA, 66 nt, Homo sapiens
ccgagcagagccgccgaggagaaaacacccaggacaggaccacaccaaggagaagaagacccgggc

SEQ ID NO: 160149 - RNA, 72 nt, Homo sapiens
caaagaaacaggaaagcagaagaaaccaaaggacgagagcaaccagccagaagaggccggaagaaggaacaa

SEQ ID NO: 160150 - RNA, 41 nt, Homo sapiens
gaagcacaaagcgcccgagaaacaggaccgcccgcaccagg

SEQ ID NO: 160151 - RNA, 35 nt, Homo sapiens
ccaggcccccaggaggaggcaaggcccggcgacca

SEQ ID NO: 160152 - RNA, 63 nt, Homo sapiens
aacaccaaaaacaaaacgaaccaggacggcaaaggacgccaaggcaacaaacaaagaggccgg

SEQ ID NO: 160153 - RNA, 73 nt, Homo sapiens
gccgagccacgcggaggcagcaccaccgcccgggcaaggcagagcgcgagaacggggaggcacacccgaaagc

SEQ ID NO: 160154 - RNA, 80 nt, Homo sapiens
gccggagcccgagggacggggacggagagagcacgagcccacaggcacgcagaagccagcggacgcccgcaacggggacc

SEQ ID NO: 160155 - RNA, 79 nt, Homo sapiens
cggcgccacaccgagcgcgaggcgcggagagcaacgccgggacagcgcaagaaaagggcacacaacacagccagcggca

SEQ ID NO: 160156 - RNA, 82 nt, Homo sapiens
gagagcggacgggccaacccaaaaccagggcggcaaaacgagcgggccagggacgagcgggggcggcggccggcaagggccg

SEQ ID NO: 160157 - RNA, 70 nt, Homo sapiens
cccgccgaacacccgagaagggggaccccggagaggaccaccgagagggaacagggaggaaaagcacgaa

SEQ ID NO: 160158 - RNA, 80 nt, Homo sapiens
gcccagagaggacgccgcggggaaagggggacccgagcccgacagcccagccaggggggagacacgccacgcggccaaag

SEQ ID NO: 160159 - RNA, 78 nt, Homo sapiens
caagcacgagggcgcgccgagacgcccgaggcaccggcccagagagcagggacacacgagggccggaaccaaacgaaa

SEQ ID NO: 160160 - RNA, 83 nt, Homo sapiens
cccccccgccggggaccgagcgcgccgcccggcgccggcccgcccccgcagcagcgccaggccacgccaggccaggggacccg

SEQ ID NO: 160161 - RNA, 78 nt, Homo sapiens
aggacaagagacgacacgcaagcaggcaaccgaaacaggcccccgggccacgggcaccagggcccacagggcacagag

SEQ ID NO: 160162 - RNA, 69 nt, Homo sapiens
gaaggaggagagagcgagccgggaccaggcagccgccgcaaagggacgacgaagggacagccagaaggg

SEQ ID NO: 160163 - RNA, 86 nt, Homo sapiens
cccagagccgcggccggggcgcgggaggacagcccagagcaagcacacggaggcccgggagccagaccgggagcccgccccagcca

SEQ ID NO: 160164 - RNA, 83 nt, Homo sapiens
gaggaagacgagccgggaggaacggcccggaaacaggaggacgcacccgccggcgccccccggcacaacccgcgggcaccagc

SEQ ID NO: 160165 - RNA, 102 nt, Homo sapiens
aaaaggacaaaagccaagaggaggacagcgcacacagcaagcacgaggaggggcagcagcaggacagggaacccgggagacagcaacagacggaggaacggg

SEQ ID NO: 160166 - RNA, 61 nt, Homo sapiens
cccgcccggcggggaagcacccgagggacccgaggagcccaccaagccgaccgcaggcaag

SEQ ID NO: 160167 - RNA, 58 nt, Homo sapiens
gagccgagcccgacaaccgagggcccgccccaccgggggccaccccagggaggagaag

SEQ ID NO: 160168 - RNA, 70 nt, Homo sapiens
ggggacgggcccagaggcccagggaggcaggggcagaaacagagaaggaacaggacccacgcagagcgaa

SEQ ID NO: 160169 - RNA, 76 nt, Homo sapiens
ccggccgcagcgcagcgccagccagcgccaacccaaacgagcgagacacacagaaaggaaaagggaacagcggcaa

SEQ ID NO: 160170 - RNA, 57 nt, Homo sapiens
cgaccggaagagacagagagagccaaacccccaggcacgagaacagggcggagaaag

SEQ ID NO: 160171 - RNA, 83 nt, Homo sapiens
gcagcagaggggccacgcgggcccgaggcgcaccaagggcgaaggagccggcccaagggccccagaaccagagggcgccagac

SEQ ID NO: 160172 - RNA, 53 nt, Homo sapiens
aggaagggaggagacccgaccccagaagacaacgaagagaggaaagaagcgga

SEQ ID NO: 160173 - RNA, 79 nt, Homo sapiens
cgagggcagcggcgcggagcgccaacgagcccgagcaggccaggaagaagcaaaggaagacagaaaagacgccacccca

SEQ ID NO: 160174 - RNA, 49 nt, Homo sapiens
gaagcgccagccagaaaagagaccccacggaagaaccaaacagcgcaca

SEQ ID NO: 160175 - RNA, 53 nt, Homo sapiens
agacgcagggcgcccccgcggcgccggaaacaacaggaggacacggggagcgc

SEQ ID NO: 160176 - RNA, 51 nt, Homo sapiens
caaggacaccagccaccaaagaccaaccaagagcagccacaaagcacacgc

SEQ ID NO: 160177 - RNA, 71 nt, Homo sapiens
caggaacagaaccaccccgaagagccaggccacagaggggagagccaaggagggaccccaagaaagcaagc

SEQ ID NO: 160178 - RNA, 75 nt, Homo sapiens
cccccgacccagacccccagagaagcagcccacgcgagcccaaggcgggaaagaaaccgacgggaagaaacagag

SEQ ID NO: 160179 - RNA, 76 nt, Homo sapiens
caagagggaaggggacccgccgggaggacgcggcaccgcgacggcgcgcaaccggacagccacggcggaccgggcc

SEQ ID NO: 160180 - RNA, 74 nt, Homo sapiens
gagagaaaacaaaaaggccagaaagaggagcagagacgccggacagaaggaccggggagggcgcccacagggaa

SEQ ID NO: 160181 - RNA, 68 nt, Homo sapiens
agcagagcgcaccaagagacgggaggacacaccaggagcaacgacaaggacagaacaccaggccccga

SEQ ID NO: 160182 - RNA, 76 nt, Homo sapiens
cggaaacagcaaacacaaacccaggaagccacgagcaccaggcaaaagcagcgcggagggagagacaccacgagga

SEQ ID NO: 160183 - RNA, 71 nt, Homo sapiens
gcggacgggcagggcccagagcaaaaccagagagagacacaggggaggacgaaagcccgcagaaccggacg

SEQ ID NO: 160184 - RNA, 83 nt, Homo sapiens
cagaccaagagaggcggggaccgcagcagcgagaaaggagccggggaccccccaaagacaagagccgcccccaggaccggcag

SEQ ID NO: 160185 - RNA, 55 nt, Homo sapiens
cgagggcgccacacgggccagggcagggccacccagcagaaaagagacacacaaa

SEQ ID NO: 160186 - RNA, 77 nt, Homo sapiens
gacaagaacagaggggccgagaagccaacaaagagaggcgcccaaagagcaacggggagccaagacagaccccagaa

SEQ ID NO: 160187 - RNA, 76 nt, Homo sapiens
cacggaagccggcggccccacccccaggggggagaggacagggaacagcagagggggaggcaggaaaaagacacaa

SEQ ID NO: 160188 - RNA, 89 nt, Homo sapiens
gaacaggccacgcaaacaagcagcgaaacgagcagaaagaaaaacgcaacaacgagcgacaaagcaaaaaaagaagcaaacaccgagaa

SEQ ID NO: 160189 - RNA, 85 nt, Homo sapiens
aaggaaaaacagcaagaacccaaaagggacaaagcagccaaccagagaaaagaggaagggcacccgacccccccagaagccgaga

SEQ ID NO: 160190 - RNA, 49 nt, Homo sapiens
agagagacagggaggaagcggggccccgcggggcaagaagaggccagcc

SEQ ID NO: 160191 - RNA, 73 nt, Homo sapiens
agacccaaggacagggaggaaggagcggaaggaagccagaagaagggagggcaacagagagaaaagcgaacac

SEQ ID NO: 160192 - RNA, 81 nt, Homo sapiens
ccagcaccaccccacggccagggccaccaaccccaacccggagagcggcgaggacccaaaaggcgggcgaaaacgccaaaa

SEQ ID NO: 160193 - RNA, 65 nt, Homo sapiens
cacaaggaaccagcccaagaagcagcgcggcacgaagacccgaagaaacacacgggcaggcggaa

SEQ ID NO: 160194 - RNA, 59 nt, Homo sapiens
acccgcggaaccggaggaggggagcggggaaggcaaccagggagaggagccgcaagccg

SEQ ID NO: 160195 - RNA, 78 nt, Homo sapiens
cccccccacaccacggcagcgcgccgcgcaacaccgggaggcaaggagcaccggcggcagggaagaacgaccagagac

SEQ ID NO: 160196 - RNA, 62 nt, Homo sapiens
ggaacccgggaggggaggaccaaagacgagaacggcggacgcagcccccaacccgaccggca

SEQ ID NO: 160197 - RNA, 72 nt, Homo sapiens
aagcacagggaggaaacaggccaaagacgaaaacccagggaggcgaaggggagccaaccaacaagacgcagc

SEQ ID NO: 160198 - RNA, 88 nt, Homo sapiens
gggcccgaggccggaggaacccggacccggcgagcggaagagaggagggagcaccggacaaaagagagaccaccgcacacaagacaca

SEQ ID NO: 160199 - RNA, 87 nt, Homo sapiens
ccagaagaaggaccggaagcacacaacaggaaaacaaaagaggagaaaggggccgggagaggaaggccccaagcagccagcagaaaa

SEQ ID NO: 160200 - RNA, 67 nt, Homo sapiens
ccggccagaggaaagaacccgaggccaagggaggaaaaacgcgccaggaaaccaggaggccaaccga

SEQ ID NO: 160201 - RNA, 79 nt, Homo sapiens
cgaccgcccggcaccgggagaaccaccgccaccgccaccaggagcccacgaaagggccagcagcccccagaagaagcca

SEQ ID NO: 160202 - RNA, 64 nt, Homo sapiens
cggaaaagggacccccgggaagaagacacagaaaacagcggagcggaaggaacacgaaaaggag

SEQ ID NO: 160203 - RNA, 77 nt, Homo sapiens
aaacgcgcagcccagacacgagagccgccacaaggaaacccagcggcggcagaaccagccggcacaaagccgaacca

SEQ ID NO: 160204 - RNA, 66 nt, Homo sapiens
caggacacacgaggacggcacagaaaggacaaagagcgcccacgccaaaaagggaaaaaagagagc

SEQ ID NO: 160205 - RNA, 45 nt, Homo sapiens
aggaaagcaccccagcacgaacagacacaacagcaggcagcccgc

SEQ ID NO: 160206 - RNA, 71 nt, Homo sapiens
cagcggaccggcaaaaaagcaaagaaagaagcaccgaagagagaaccccacccaagagacaaagaccaacg

SEQ ID NO: 160207 - RNA, 77 nt, Homo sapiens
cccgagagcgggaacaggagagcgcgggcgacggggcgagagagccggggggacagcagacgagcgagggaagaaga

SEQ ID NO: 160208 - RNA, 80 nt, Homo sapiens
ccgggcagggaggggcgcgcgccgcccagcgcagcccccgaacgcggcccgcacagggcggaaagaagaggaaagaaaca

SEQ ID NO: 160209 - RNA, 74 nt, Homo sapiens
aaagcgagagggcaaaaccaaaggcggaaaaggggcaagggacaaaagaacagaagggagaagccacaaccaag

SEQ ID NO: 160210 - RNA, 73 nt, Homo sapiens
ggagacaggcgccaaggggagaaggaagggaccaccaacgaaccaagagccacgagagaggaagaccgacacc

SEQ ID NO: 160211 - RNA, 80 nt, Homo sapiens
agaaggggaaggaggggcagcgaccccacagagcccgggagaaacagacggccccacccgcgaaggagccgcaggagaaa

SEQ ID NO: 160212 - RNA, 75 nt, Homo sapiens
gaaacaaaacgacacggaacaacagcgaagaccacaaggaggagcaagaaagggaggagacaagggacaggaaac

SEQ ID NO: 160213 - RNA, 72 nt, Homo sapiens
ccggagggggaagaccgcgcccgcggagagcccaaacaccaccaccaaggcgaggccgcggaaggagcaggg

SEQ ID NO: 160214 - RNA, 63 nt, Homo sapiens
cacaagcgaaggagaagagaagaggcaaaaaccaggcggaaccagacggccagggaaagacag

SEQ ID NO: 160215 - RNA, 64 nt, Homo sapiens
aaaacaggaacagagcgagggaggagagagggagagccaaagaaggaagaccgcccccgacaaa

SEQ ID NO: 160216 - RNA, 85 nt, Homo sapiens
gcagcaacggcgggggaccacgagagcgaggccggcacgaagaccgcccacagaaggccgcgccccccagagaggagaagagaca

SEQ ID NO: 160217 - RNA, 79 nt, Homo sapiens
gaagcaacagagaggggagaacccacagccaacacacgcgcaggaagcgggaggaccggacgaaagccaggagaaaagg

SEQ ID NO: 160218 - RNA, 87 nt, Homo sapiens
ggcccacgggccgcccgcgggccggggccacgccagcgccgagggcgagacggcagcccagcccagaaacccagaccgcaacgggcc

SEQ ID NO: 160219 - RNA, 81 nt, Homo sapiens
gacagacccagcccacccgcgccaggaccaggccggcgccggagggcagacagggggagagcgccaggagcgcgggagaag

SEQ ID NO: 160220 - RNA, 74 nt, Homo sapiens
ggccccgagacagaagccgggggggcacgaagaaaaccaaaggaaagagcgcccaaagaaaaagaggaaaacgg

SEQ ID NO: 160221 - RNA, 58 nt, Homo sapiens
gccagccgggcacggggaagacggccacgccagggcagcggcggccgcgcccaccggc

SEQ ID NO: 160222 - RNA, 76 nt, Homo sapiens
gcacccgcacgagcaacagacgagcgcgccaggccgacagccgcggccgggcccgaggcccaagggccagcgcgcc

SEQ ID NO: 160223 - RNA, 83 nt, Homo sapiens
acaaccgcgggagcacgcccagagcccgagacaggaggaggagcccaggcgaggaagagacaagcaagagagaacacacgcag

SEQ ID NO: 160224 - RNA, 78 nt, Homo sapiens
acagaccgaggaagccgccgacagacccagcagaaggagaaaggacagggacaggaaagaaagaaaaagaaaagaaaa

SEQ ID NO: 160225 - RNA, 73 nt, Homo sapiens
gaagcgacgccaaacagggaaacagcccaggcacaggaagacggaacagaaagaaaaaggcacaaacccagca

SEQ ID NO: 160226 - RNA, 68 nt, Homo sapiens
gaaccaccgcaggcaaaagaacccgcccacacggccaggcagggaccaacgcgggggacgagagaaaa

SEQ ID NO: 160227 - RNA, 69 nt, Homo sapiens
gggcgacgaaaagcgggcgccaacaagacggaaaaggcgaaccagaaacaggccacagaaacgaagaaa

SEQ ID NO: 160228 - RNA, 70 nt, Homo sapiens
agccaaagaagaaagggagcagaaggagacagcaaagggacaaacaccgagaaagggaagggcacgagga

SEQ ID NO: 160229 - RNA, 79 nt, Homo sapiens
cgaggggggcggggccggcagagaaagacaagagcaccacagcaaaacccaaaaagaacgaaggaggagcaaggagaga

SEQ ID NO: 160230 - RNA, 68 nt, Homo sapiens
ggggcgcgccggaaaccggagcgcgcagcaggaccgacagcacgaggaggagagaagaaaagcggccc

SEQ ID NO: 160231 - RNA, 84 nt, Homo sapiens
agggggccgggaaaccaagcaccccaccagcgcaccaccccggccacgggccggaaaggaccaagacagcaggaacgaaccaaa

SEQ ID NO: 160232 - RNA, 78 nt, Homo sapiens
ggcggagaggccggacccgaggagccgaaagagcaccagacacaagcagagcacccagcggcggaccagacgcaggag

SEQ ID NO: 160233 - RNA, 78 nt, Homo sapiens
cagagacacaaaaccggacccggaacaggccaaaagcaagcagccgcgaacccccagaaccgaaacgaccaccgagac

SEQ ID NO: 160234 - RNA, 74 nt, Homo sapiens
gagccgggagccaccgcgaagaacccaacaggacaccaggcccacaaagcacaagccgacacgacaaccccccc

SEQ ID NO: 160235 - RNA, 89 nt, Homo sapiens
ggcgcacaaacgaagaaaacacacagacagacagacagaacccgaaaggaagaggaagagagcgcgcggcgagcgagcgagcgggccgg

SEQ ID NO: 160236 - RNA, 89 nt, Homo sapiens
gcgggcggcgagacaaaggcgacgggaccaagaaaggcccagggaccaaagcccggacaaggcccgagcaccaggaccgcagaaggccc

SEQ ID NO: 160237 - RNA, 67 nt, Homo sapiens
ccggaggaggggagcggggaaggggcaacaggaaaacaacccagagaacccaaacccccagacaaga

SEQ ID NO: 160238 - RNA, 78 nt, Homo sapiens
agcagacaagaaccacgcgaaaaaaggaagagggcgccagcccccaggaggaccgacgaacccccaaggcacggggcg

SEQ ID NO: 160239 - RNA, 49 nt, Homo sapiens
aaaccccggacaaggcacgccagacgagacgccccggcggcgaccggaa

SEQ ID NO: 160240 - RNA, 61 nt, Homo sapiens
ccacgggccaccgaccagcaggacaaagccaggacccaaagacaggaccacgcaccagcag

SEQ ID NO: 160241 - RNA, 73 nt, Homo sapiens
ggaaggccggcaggcgccaaaccccaagaggaaacaacaacagacaggagacccaacaccccagccagacggc

SEQ ID NO: 160242 - RNA, 73 nt, Homo sapiens
cgcgccggccaagggggggcacagcaggagcaggagacggcaaaccaagaaccgcacgaggcaaaaaagcccc

SEQ ID NO: 160243 - RNA, 75 nt, Homo sapiens
gcccaaagggggaaccagcgaccgagcacaccacccagcaacggagagagcccagagaaacagagggcaaagagg

SEQ ID NO: 160244 - RNA, 62 nt, Homo sapiens
gcgcgcgcgcccccgcgcgcccccaggccgggagcagcaccaacacacagcgagacggcagg

SEQ ID NO: 160245 - RNA, 75 nt, Homo sapiens
caccaagccgcccacacgccaaccggccagaggacgagggggggcgggggcccgacggaccggccggccagcacg

SEQ ID NO: 160246 - RNA, 72 nt, Homo sapiens
aggagcaacagacagcccccagaacagcaccagccgccggccgggagagcagcggaacccccagggcgcccc

SEQ ID NO: 160247 - RNA, 77 nt, Homo sapiens
caaccggaaagaccgagaagccccgaagcaccccacggggcagacaaagaggagcaaggcccagaccaaaccaagga

SEQ ID NO: 160248 - RNA, 58 nt, Homo sapiens
gaaagaccaaccgcggcccacgaggccgagaacaccaggcgggggagcaagagacgag

SEQ ID NO: 160249 - RNA, 76 nt, Homo sapiens
gaccaggcgcaacaaggagaagagccaggaaacaggaggaagaacccaagccaaagcccaggagaaaacacccaaa

SEQ ID NO: 160250 - RNA, 83 nt, Homo sapiens
cagcgcgcccagcggcccaggcgccgcggcgaggagcgagcgcgcgaggggcggccgagaagaggccccaggaccggcgaggc

SEQ ID NO: 160251 - RNA, 65 nt, Homo sapiens
gagccacgcgggggcccgaggagaggagaggaacaaggacaggaaggagcggaaagggagaacgg

SEQ ID NO: 160252 - RNA, 53 nt, Homo sapiens
caccaggagaggagggaacgcggagcggcagggaggaaacacccaaaacacgc

SEQ ID NO: 160253 - RNA, 73 nt, Homo sapiens
acagacaaagaaagcgaaaagccccagggccaccagagaaggaagccaacaccggagccagaaagccgaaccc

SEQ ID NO: 160254 - RNA, 59 nt, Homo sapiens
cccgggcccagagcgccccaggcaaagaaaaagccagccgaggacgggaaccagacccc

SEQ ID NO: 160255 - RNA, 86 nt, Homo sapiens
ggggggcgacggcagcccgagggcggcgcaaggccgaggcccagcacagaggcgaggggacggcggggagcgcaggacagacgccc

SEQ ID NO: 160256 - RNA, 79 nt, Homo sapiens
gagagagcgagcgagggggggcgcgccggaaaccggagcgcgcagcagggccagaagcccccaggaggagaacgagcaa

SEQ ID NO: 160257 - RNA, 66 nt, Homo sapiens
cacaccaaagacgggcagacaagcacacaagacagggacagcaaaaacagcaagaaaaaaagaggg

SEQ ID NO: 160258 - RNA, 64 nt, Homo sapiens
cccgggaccggagcagaacccccgcagagaaagacagcacaacgggcaaggggaggagaccaga

SEQ ID NO: 160259 - RNA, 76 nt, Homo sapiens
caaaaagccaaaagcagcaggcaaaggaacccgaggacagaaaaccggagagaggagccgccaggccggccgggag

SEQ ID NO: 160260 - RNA, 88 nt, Homo sapiens
gaaacaaagaaacgaaaaggcaaagaagaaaggagaacagggacagaggcacagacaagggccgaacaccaacagaggaagaaaggag

SEQ ID NO: 160261 - RNA, 80 nt, Homo sapiens
gccccgccaaccgcaaccagacgccagcgggacgaggaccgagaccgcggccgggaccgagggggcgggaggacagccag

SEQ ID NO: 160262 - RNA, 63 nt, Homo sapiens
gggaggcgacgcacacgagcggaggcgaaggaagcccggggcggcgacggagcacgacccaag

SEQ ID NO: 160263 - RNA, 86 nt, Homo sapiens
aggggaagagccggcggcgcccgggccacacaaccccgggccgccccccaccagaagagccagacagacccacgcccgcccaacca

SEQ ID NO: 160264 - RNA, 65 nt, Homo sapiens
gggggagaagggagggaaaacaaccacagccggccagaacacacagaaaagggccaaaggaagaa

SEQ ID NO: 160265 - RNA, 67 nt, Homo sapiens
aggcggggggcccaagcaaggccggaagaagagcgcagaggccacagcacaccagagaagcaaggga

SEQ ID NO: 160266 - RNA, 79 nt, Homo sapiens
cgcgccgcgccgcaccccgagcgaccggcggaggcagggcgagaccgaccacgcaggcccgacccccagcaagcgaccc

SEQ ID NO: 160267 - RNA, 76 nt, Homo sapiens
aaagaggcccccaaaacaagggaaggcacagaagagagagaaagaggagaaccaacagacaggagagacgaagagc

SEQ ID NO: 160268 - RNA, 79 nt, Homo sapiens
accggccagcgccgcgacgggaggagcgccggaacgccgaggcccaggacagccgagcccccacagaagagggaaacag

SEQ ID NO: 160269 - RNA, 79 nt, Homo sapiens
cccaggagaacacacaaccaggaccaagaaaggcccagggaccaaagcccggacaaggcccgagcaccaggaccgcaga

SEQ ID NO: 160270 - RNA, 76 nt, Homo sapiens
ggaccccggaaaccagaaagagaagacggcccagcagagcacccaaccagcgggaacacagcgccgcccccggcca

SEQ ID NO: 160271 - RNA, 83 nt, Homo sapiens
gaaggagaggcgacggcccgcagccggaccccaccggacggcggggccacgggcgccgggagaacaccgaaaacccccagcac

SEQ ID NO: 160272 - RNA, 74 nt, Homo sapiens
cccccgagaggggacacaggagaaaggccaggacaaagacaagccaaacccagggaggaaaggaaaggagagaa

SEQ ID NO: 160273 - RNA, 80 nt, Homo sapiens
caagagagaaagccgcgggggcaggacgcacccagagccgaagcccagaacacacaacaccagggaggaaaagcccccgg

SEQ ID NO: 160274 - RNA, 83 nt, Homo sapiens
ccgggcccggccaacagggcaggggacacaacagaggaggacggccaacccccgacacgaggccgccgaagacaccaccagcc

SEQ ID NO: 160275 - RNA, 78 nt, Homo sapiens
gggagccaacaccgcccccacccccgcagcaaaagggagaccacaacagccaccaaacagaagaaccgcccaacggaa

SEQ ID NO: 160276 - RNA, 72 nt, Homo sapiens
cggggccgcgcgcccacccaacccgagaccacacgaaggggcagaagagcacaagacggaagagaggagcga

SEQ ID NO: 160277 - RNA, 78 nt, Homo sapiens
gcgccccggggcccgagcccggcgggaccagcaccagcaccggcccaggggccccagcagcgcagcgcccgcagccac

SEQ ID NO: 160278 - RNA, 76 nt, Homo sapiens
gaggaacccaaccaccagaccagcccggcaagcaccgacgaagcagaggagacaagaggcaaaggcggcgggcccg

SEQ ID NO: 160279 - RNA, 79 nt, Homo sapiens
cccggaacaaacgggcccaagacaaacaaggccaaggaaaaggaacagagagagcagaaccgaaacggggaaagaccga

SEQ ID NO: 160280 - RNA, 75 nt, Homo sapiens
agacaaaaacgaggacaacacaacacgcagggaaagacagcgggagcaaccccccacgccagccaggagcccccc

SEQ ID NO: 160281 - RNA, 61 nt, Homo sapiens
gccagacgccgacgcgaccagcagagacggcacagcaaggcggggcgggcacagagacaag

SEQ ID NO: 160282 - RNA, 74 nt, Homo sapiens
acaagcgaggagccaccaagcccgggagacagcaaaacaagacagcaaagaaaggcagaagagaggcaaaaaca

SEQ ID NO: 160283 - RNA, 72 nt, Homo sapiens
gggacaaaacaaccaacgaagacaccgagcgaaagagaaagagcaggccacacccaagaccaggccaggcag

SEQ ID NO: 160284 - RNA, 75 nt, Homo sapiens
aaagccaaagacaagaagaaaggggaaagcaagaaaaagagccaaacggagaagagccacagggagaagcagaca

SEQ ID NO: 160285 - RNA, 72 nt, Homo sapiens
aaacggaagacgagacaaagcaaaagccggacagcaggacacaaaccaaaacgagggccgccccccgggcga

SEQ ID NO: 160286 - RNA, 70 nt, Homo sapiens
acaggcgccccaaaggggaccgaggccgcaggcccagaacagccgaggcacgcaagccaaaaagacagac

SEQ ID NO: 160287 - RNA, 82 nt, Homo sapiens
gcgcccccacgggggagcccgcgcccgggacacgacagcggcccccgggagccaagaacacagcggggccacccgagcgcag

SEQ ID NO: 160288 - RNA, 85 nt, Homo sapiens
aggcgccccagggacgagaggaagaccgaaggacaaggcagaaacggaaacagagagcgcaaggagcagccgaacaagcgcacgg

SEQ ID NO: 160289 - RNA, 86 nt, Homo sapiens
gacaacccaaaggacacagcaaacaagagcccacagaacgggagaaagggagcggcagccgaggcgccgggaaacacaccacgcaa

SEQ ID NO: 160290 - RNA, 83 nt, Homo sapiens
ccggcgcgaccgcccggcaccgggagaaccaccgccaccgccaccagagagcagcaccagcagaagagggcccgaccacggca

SEQ ID NO: 160291 - RNA, 76 nt, Homo sapiens
aagaggaaggaaaagacaacagccaagaagcgacccgagaaccacaagaaggagagacgcagagccagacaagacc

SEQ ID NO: 160292 - RNA, 57 nt, Homo sapiens
aaaagaggaagaggcaccaggaagcgggcaccaacagacaaccagggcaagcagagg

SEQ ID NO: 160293 - RNA, 67 nt, Homo sapiens
agagcagagccccccacagaagagccccaaacccacaccgccccagacaacagccccccccccccac

SEQ ID NO: 160294 - RNA, 80 nt, Homo sapiens
ccggagccgcagaaacaagaggccgagccggcgaagaggggaagccaaaacagaaacggaaagaaaaagacagcacgaag

SEQ ID NO: 160295 - RNA, 57 nt, Homo sapiens
gcgagccgcggcaccacacccccagaccggacaaggccgaggagagaagaaggcaag

SEQ ID NO: 160296 - RNA, 78 nt, Homo sapiens
gagacccccagggccgggcaaacacaaacgcgcgaccccccacagagccgcaaaggaccacgcagaaacagcaacaac

SEQ ID NO: 160297 - RNA, 85 nt, Homo sapiens
gccgcccaagccgcacagccgcggcggcagcagcaggagaggcaaaagcagaccggaaaacccaccggcaagaccacacccgagg

SEQ ID NO: 160298 - RNA, 79 nt, Homo sapiens
aacgccacgacaccggcacccagcaccacccggaggagaccggcagcagcgggaggccaccgccccaccagcaggcaac

SEQ ID NO: 160299 - RNA, 78 nt, Homo sapiens
ccgggggagcggggccccacacccccccgggggggaaccccggaaaaggagacagaagcgcaagaacccgacaagaag

SEQ ID NO: 160300 - RNA, 47 nt, Homo sapiens
cggaccaccgcaggcaggccccagaaaacgaaggaaggaggacccga

SEQ ID NO: 160301 - RNA, 93 nt, Homo sapiens
ggggccccccagggggcgcccccgaagagcaccggccagaacaagccaaggagccaagacgagagggacacacggacaaacaacagacagaag

SEQ ID NO: 160302 - RNA, 72 nt, Homo sapiens
aacggaacaacaaaacagacagaccaaaccagaaaacagacgggggcaaacaggcaccagggcaagaagagc

SEQ ID NO: 160303 - RNA, 79 nt, Homo sapiens
gccccaagagaagcaccccgggggccagcccaaggcgggaggccgcagcggagacgagggcggcgggagacccccgacc

SEQ ID NO: 160304 - RNA, 84 nt, Homo sapiens
caagagcaaggaaggggaccaaggaagaccaaaagacggacacccaaaacagagccaaggacaaaagagagaggcccgcagagg

SEQ ID NO: 160305 - RNA, 82 nt, Homo sapiens
gcgcgagccaggacccgccgcacaaacacgcagaggcaagaagagaggcaggagggccgggacgggagaggggccgaaccgg

SEQ ID NO: 160306 - RNA, 71 nt, Homo sapiens
cggaaaacggaccgaaggccgccgaaagcagagaaagaaggagacccaacaccccggccagacgggccacc

SEQ ID NO: 160307 - RNA, 75 nt, Homo sapiens
ccggcgccgcgccggcggcgagagccgcacagccacacgggggagcccgcccccggggacccgcgccggcgcgaa

SEQ ID NO: 160308 - RNA, 70 nt, Homo sapiens
acaagaggaagaggaggaagacccggcgggggcaaggaagcacggaggcccgggaacaaggacaacgcca

SEQ ID NO: 160309 - RNA, 82 nt, Homo sapiens
cgggacagggacccggggcggagcgagccggacggccgcagaacaagagaaccaacggcgaaaacggcggggaaaaaaggaa

SEQ ID NO: 160310 - RNA, 67 nt, Homo sapiens
ggaccgcagagggggaaaaaacagaagaggcgacaacaggcacaaagagagaaggaacacccacagg

SEQ ID NO: 160311 - RNA, 76 nt, Homo sapiens
ggcaggcggcggaaggaaccgcccgccgccacacgcgcaaagcccgagggacggaaacagacgacgacacggacag

SEQ ID NO: 160312 - RNA, 36 nt, Homo sapiens
agagagacagaagccacagaaaccccgagacccagg

SEQ ID NO: 160313 - RNA, 78 nt, Homo sapiens
cgccccgaacccgggccccaggccagccagagagcgggaggcggacccaaacccccgcccgaccaccgcgcgcggaca

SEQ ID NO: 160314 - RNA, 80 nt, Homo sapiens
gagcggccaccggccgcggcacggcccggggccgggagcgcccgaggaacacgccgcagacgcgccccccgcagcaggcg

SEQ ID NO: 160315 - RNA, 71 nt, Homo sapiens
gcggcagcccgagaccgcagcaggaacgagggaaaccgccccacccggagggcccccacacagccaacaaa

SEQ ID NO: 160316 - RNA, 75 nt, Homo sapiens
gaagcccagggcagaacacagggggaggacagcccaagaacaccggcagagacccgcaccgccagaacacaaagc

SEQ ID NO: 160317 - RNA, 63 nt, Homo sapiens
gccaccaacaccaaaaaggaaggaagaaggaaaagcggaagcgcagacaagaaaagagagaag

SEQ ID NO: 160318 - RNA, 58 nt, Homo sapiens
acaaacaaaagggacacgaaaagcacaaaccccacacgcagagccccacaagacacgg

SEQ ID NO: 160319 - RNA, 75 nt, Homo sapiens
gcaacgaggcagcggcaggccagggcagccgcggagaggaccggaaagacagaaagaagccacccgaccacgaca

SEQ ID NO: 160320 - RNA, 54 nt, Homo sapiens
gcccgccacagagccgaaaggcccggccagaccggagggccgggaggaacaccc

SEQ ID NO: 160321 - RNA, 89 nt, Homo sapiens
ccacgacgccgggaccggccaagggcccacacaccaagaccaagccccagaccggggggagggaaggaaaggccagacagacacgaggg

SEQ ID NO: 160322 - RNA, 36 nt, Homo sapiens
cacaggaaccggccccggaccggcaccgcggagcaa

SEQ ID NO: 160323 - RNA, 60 nt, Homo sapiens
cacccaacgcggggcgcaggcaaggcaccagcagaacagacacccccaaagaccagacac

SEQ ID NO: 160324 - RNA, 69 nt, Homo sapiens
caaggaccagcaaaacagaaagaggaggagaagggagaaaggggaaaaagaacgaccaggacacagagc

SEQ ID NO: 160325 - RNA, 82 nt, Homo sapiens
cgagcaaaccccagcaagagcggaggcgcccggcggagcagaggaaccacacgcgacagccaccaggagagaacgccgcgcc

SEQ ID NO: 160326 - RNA, 75 nt, Homo sapiens
cggacaggacgccaaacaagacaggacccaggacgaagacagggaagaagcaccaaaggaagcgggcaccaacag

SEQ ID NO: 160327 - RNA, 62 nt, Homo sapiens
cgaggcgaccaggggggaaagcgccccagggcagacccaccgcgaggcgggggaagcccgca

SEQ ID NO: 160328 - RNA, 72 nt, Homo sapiens
acacaaaggaggcaccagacgccggcaacaaagaacacacggaaggcgcagggagcaggagaagcggagcga

SEQ ID NO: 160329 - RNA, 53 nt, Homo sapiens
gaagaagcccaagaaaagggcggaaggcagaaagcaggaagaggcccaaaggc

SEQ ID NO: 160330 - RNA, 77 nt, Homo sapiens
aagcaccaccaacagcgagcagacccaccgacgcccccaggagacacgaacggagagcagccaacgcaggacggacc

SEQ ID NO: 160331 - RNA, 36 nt, Homo sapiens
gaagacaaaaaccagggcccaaaggagcgcaaaagc

SEQ ID NO: 160332 - RNA, 81 nt, Homo sapiens
ggaaaagagcccagccaaccacgaggaaggaccaggaaggaaagggcgagggcagacaccccaggagcgggggccagcccg

SEQ ID NO: 160333 - RNA, 66 nt, Homo sapiens
gcacagggaggccagccggagaagcgagcagcggggagaagcagaccgcaccaggcgggaccccga

SEQ ID NO: 160334 - RNA, 92 nt, Homo sapiens
cgcgagcgagccgcgaaccgagcgggcggcgggcgcgcgcaccagggggagaaacccgggaccagacgcaccacgacggggaagagaggccc

SEQ ID NO: 160335 - RNA, 69 nt, Homo sapiens
acaacgcgacaaaggagagaaacagccaaaacagcacaacagcggaaaacgcacccaagacgagagaaa

SEQ ID NO: 160336 - RNA, 78 nt, Homo sapiens
cccgggacgcccccgccagccgagcccccgggccgacggaacaagaagggaaacaacacgaggaggacggcacaaaaa

SEQ ID NO: 160337 - RNA, 83 nt, Homo sapiens
cggggagcggcgaagccgcgggcgagaggggaaagaaaaagagcccaccaaaaggaacagacggccccaggcggacaacgcac

SEQ ID NO: 160338 - RNA, 74 nt, Homo sapiens
cccgcgcagcggcccggcggggcccggcaccaggaccaccgcggcagcacgcggcggacagggacaagcgcaca

SEQ ID NO: 160339 - RNA, 82 nt, Homo sapiens
gacgaaagaaaaccccgagggaaacaagaaaacacaaagaggcagcaaagagacgggggccacaggccaagcgaccgaaccc

SEQ ID NO: 160340 - RNA, 94 nt, Homo sapiens
ggcgcgaacagacggacgcaccggcgagcgccgaggggacaggccgagcgcggggcgccggaggcaggacacacacccccacgacggcagcgcc

SEQ ID NO: 160341 - RNA, 38 nt, Homo sapiens
gggggccagcccagccagcccgacccaaagcacgcgca

SEQ ID NO: 160342 - RNA, 79 nt, Homo sapiens
accaacgaaccgcccgcgaacagcccacagcaaggaggcccgggaggagccagccaacgccgaccccaaaccagaacca

SEQ ID NO: 160343 - RNA, 71 nt, Homo sapiens
acggcgacagggcggcggcgccaggcagggcgcagaggcggacacgagcgaaccgaaaagagacacggagg

SEQ ID NO: 160344 - RNA, 75 nt, Homo sapiens
cacaaggaggagaaagccagccgcccgagacccgagaggaaaggaagcgagccaaaaaacagaagagaaaaggag

SEQ ID NO: 160345 - RNA, 66 nt, Homo sapiens
aagcaccaaaaccaacacccaaacggccccagaggggagaagcagaccgcaccaggcgggaccccg

SEQ ID NO: 160346 - RNA, 54 nt, Homo sapiens
ggaggacagagacgcaagggcgcaccaacagaagaagccccaagcagacccacg

SEQ ID NO: 160347 - RNA, 56 nt, Homo sapiens
gaacccagcacgagaggccgagagcacgccagagcccccagggacaaagcaagcgc

SEQ ID NO: 160348 - RNA, 61 nt, Homo sapiens
accgaacgggcgcggaacacgcaccgggacaggcccaggagcggaggagggaagaacaggg

SEQ ID NO: 160349 - RNA, 76 nt, Homo sapiens
ggcggagacgggcggccggccgacccccgcgcgacggcgacgcgggaggccaggcccacagaagggaggcgggacc

SEQ ID NO: 160350 - RNA, 70 nt, Homo sapiens
ccgcccccccacccaaccggagagagacaggaaggggaacgaaaaaccggaaacggaaaacggagaacca

SEQ ID NO: 160351 - RNA, 47 nt, Homo sapiens
cgggacaagacagggcaaaggacagaccagaaaggaccacgaaggag

SEQ ID NO: 160352 - RNA, 71 nt, Homo sapiens
aggcgcaagcagccagggacccaaaaggcgggcgaaaacgccaaaaaccagacgggagcgcagagacaacc

SEQ ID NO: 160353 - RNA, 75 nt, Homo sapiens
aagaacagagagcagaggaggaagagagacacacagaggacagaccccccgggcacacagcacgaccaagaaggc

SEQ ID NO: 160354 - RNA, 69 nt, Homo sapiens
gagcgccaaagcggacccagcgccaccccccaccagaagcgaggacaaaccaccacccaaaacaagaga

SEQ ID NO: 160355 - RNA, 70 nt, Homo sapiens
ccaaagaggacgggacacgggccaagggagcgaaaagaacccccaaaagggcccacacaaccaaagaaga

SEQ ID NO: 160356 - RNA, 80 nt, Homo sapiens
gcgcggggcccggcccacgcgcgcacggcagccagcgcaagaggcgggcagcacgcggacggagccccacgcgagaacaa

SEQ ID NO: 160357 - RNA, 84 nt, Homo sapiens
cggcgacacgaggaggccgggcacaccgaccgccagacgggcaagcccgcggcacggccggaggcaccgccccaaccccccccc

SEQ ID NO: 160358 - RNA, 86 nt, Homo sapiens
cggcccaccaacccaaggacaccccccaaggcaccagccgcgcaaccacggagaccgcccagcaggaagcggagcgccgggggccc

SEQ ID NO: 160359 - RNA, 38 nt, Homo sapiens
ccaacaaccagggcaaggaagagcgagacaagagccaa

SEQ ID NO: 160360 - RNA, 34 nt, Homo sapiens
cagacgggaccgaaagacggcaccaaccagacca

SEQ ID NO: 160361 - RNA, 39 nt, Homo sapiens
aggaagagccggaccccagacccccaggggcgcgcagac

SEQ ID NO: 160362 - RNA, 80 nt, Homo sapiens
ggaccccaagaccaagaagaagaccgcacgacgcaaggacccacagaccggggccagaaacgccggacgccgaaaagcgc

SEQ ID NO: 160363 - RNA, 79 nt, Homo sapiens
ccggagcggagcgcaggcgccgagacgacaacgcggcccacagggacaaaccgccgggcgagccccgcgagcgcagacc

SEQ ID NO: 160364 - RNA, 81 nt, Homo sapiens
ccggagcaggaccacgccacccagaccagcccggagagaggaggccgcagccgggccagcgccccacggcggccaacgggc

SEQ ID NO: 160365 - RNA, 75 nt, Homo sapiens
cgcagggacaggaccgaagggccggaaagaaagcacaccaaaagaaacaacccaagaggaacaagaggcagaaac

SEQ ID NO: 160366 - RNA, 79 nt, Homo sapiens
caaaggcaccggccagaccacccccagcgagcacagccaggaacgaccagaaaagcggaagaagaaagagaaagcgaaa

SEQ ID NO: 160367 - RNA, 71 nt, Homo sapiens
gcaaaagccccagaacgccacagcacgagcgaggccgcccggaagcagcggggagcgaccgcgagcgcgca

SEQ ID NO: 160368 - RNA, 81 nt, Homo sapiens
cgcagaccgacagccaaggagcgacggcaccgggagagcgggggaacgagggcagacccagaccccagagaggggcccgga

SEQ ID NO: 160369 - RNA, 91 nt, Homo sapiens
agaaccaagaagacaacaacgaaaccggaggcgcacgaaaaggccaggccagcgacggccggaagggaagcgggaccaccccccggaccaa

SEQ ID NO: 160370 - RNA, 65 nt, Homo sapiens
aaacaaaagcaacaaagaggggcagcacgagcagcgccgcacgcacgagcaccagcacgacacgg

SEQ ID NO: 160371 - RNA, 84 nt, Homo sapiens
cgcaaggcacccgagaaccaggccacccggagaaaggccacggccccagcccaccggaccggaccgcgggcaggggaaggccac

SEQ ID NO: 160372 - RNA, 77 nt, Homo sapiens
agcgaggccaggaacccggggagaccccgacgggaggccgagagcagaagaaaaggaaagaaggcaacaacgcacag

SEQ ID NO: 160373 - RNA, 39 nt, Homo sapiens
acaaggagcacagccgaagggcgcagcagagaacagagg

SEQ ID NO: 160374 - RNA, 107 nt, Homo sapiens
agggagcggaggagaaggcaggaagagccaaggagacaacaggcacccgggacaacggcacaagcgccgcaaaaccgggggcaagagaaagcccaccacaagaagcg

SEQ ID NO: 160375 - RNA, 60 nt, Homo sapiens
cgggagcgcgcagccagcgccacccgacagagaaaaacaaaagggacagcgcacggagaa

SEQ ID NO: 160376 - RNA, 82 nt, Homo sapiens
cggccagggggacggcgccacgcaccggacgacgcccggcgccagcacacgcaggccgcggggggcagacaaccacgcgcgg

SEQ ID NO: 160377 - RNA, 56 nt, Homo sapiens
cagccgagggccacgccggaccccgccacgggagagcgcaaccaacccacgaccgc

SEQ ID NO: 160378 - RNA, 81 nt, Homo sapiens
aaaaaggcaggcagaccccccgaggcagccaggcccagagcaagagaggcacccacccgaagaccccacgagcacggcacg

SEQ ID NO: 160379 - RNA, 58 nt, Homo sapiens
cgcgccgcacggaggcaagaagaaacccaccgcaaagagacagacgccacgccgcccc

SEQ ID NO: 160380 - RNA, 77 nt, Homo sapiens
cccgagcgcccgaggcgcgggaggggggaccgggagggagccacaccaaagccggacccccccagccggaccggacc

SEQ ID NO: 160381 - RNA, 79 nt, Homo sapiens
acgacaggcgagacaccaaaccgaccagcgggccgacgccaccgccgagcccagaccggaacagacggggggccaacaa

SEQ ID NO: 160382 - RNA, 71 nt, Homo sapiens
acgcccgcaacccgacacgcaccacgacggacgaaggacagcccacggagagagacggccaagaaacccag

SEQ ID NO: 160383 - RNA, 79 nt, Homo sapiens
aagcggaagccggcgcaccacccagccgggcccagcccccgagcaggcagcccccgaggcagaggcagccccgcccgcc

SEQ ID NO: 160384 - RNA, 73 nt, Homo sapiens
gggggcaaacccgagagaacgggaagacccgcggaaggcacacaagacacagccaacaccgaaccgaaaccag

SEQ ID NO: 160385 - RNA, 41 nt, Homo sapiens
agggacaaaccacacaaccagcgaagaaacaggggagaaac

SEQ ID NO: 160386 - RNA, 71 nt, Homo sapiens
cagcaccgaaaacaccaggaaagacaggagaccaaaaagacaggaacggccgaacacagagggagaagagg

SEQ ID NO: 160387 - RNA, 78 nt, Homo sapiens
gaccacacacacgcaggacaaggacaagccagccgcaagacgcacggcaagaccgcggaccaggggcaacaggccggc

SEQ ID NO: 160388 - RNA, 64 nt, Homo sapiens
gagaaacaaaagcgccagagccaagaacggcacaaggaccccgacaggacaagaacaagacaac

SEQ ID NO: 160389 - RNA, 67 nt, Homo sapiens
cggcgaaacacggggaacaaacggcaagagccagaagcccggcggaagccgaacagcaacagggggc

SEQ ID NO: 160390 - RNA, 80 nt, Homo sapiens
ccaagcaccccaggagagaagcagaagaggggaccaacacgaccaggagagacggaaggagaacaagccgcgcacccgga

SEQ ID NO: 160391 - RNA, 74 nt, Homo sapiens
caggaacagacacggggaagcgcaaaaacaagacggggcgccccacagaggggcgacgaacccaggccgagcag

SEQ ID NO: 160392 - RNA, 79 nt, Homo sapiens
ccacggcaggagcacagaaaggagcagacgggagcaaaggccaagaccaaagaaaaaagagaaggaaagcggacaaaac

SEQ ID NO: 160393 - RNA, 74 nt, Homo sapiens
ccagccacaaagagacagagaagagcagaaaggaaagcccagggcacagcaagaagcgacgccccccaagaaac

SEQ ID NO: 160394 - RNA, 53 nt, Homo sapiens
gacggagagaaaccacaaggggcagcggccaccaacgcgagcagagaaaggcc

SEQ ID NO: 160395 - RNA, 38 nt, Homo sapiens
gacaaggggcccaacgcagagaaccggagcaagagacg

SEQ ID NO: 160396 - RNA, 76 nt, Homo sapiens
ccacagcccagaggacggaagacagaagaggacggggacgggccccaggacgaggaagacaaggccagccacggaa

SEQ ID NO: 160397 - RNA, 72 nt, Homo sapiens
aaggacacaaagagaaccaaaccaagcaaagggggacagggcagggccccgaacagacaagggccgaacacc

SEQ ID NO: 160398 - RNA, 63 nt, Homo sapiens
ccgcccagaagccagaccccaggaacagacagccccgggaacacccgaaggacgggaagaaac

SEQ ID NO: 160399 - RNA, 80 nt, Homo sapiens
agccacaccaggcggagaaagggcagaggcccccacgggaagggaccaaagagaggaagcacgccaacgaaaaaacagaa

SEQ ID NO: 160400 - RNA, 72 nt, Homo sapiens
caggagggaagcacaggggaaggccggaaagggcaaaacccaaggcggggcgcccggcccagagggaccgac

SEQ ID NO: 160401 - RNA, 73 nt, Homo sapiens
gcaccagcgcggggcaagaggaggcgcgaggaccaaagaccagggcccacaacggaaaaagaagggggcaaaa

SEQ ID NO: 160402 - RNA, 112 nt, Homo sapiens
ggcagcaaccggagccagcggcagcacggaggaggagaggcaagagaaagaggagcagcccagccccgagacaaggacccccaagggccaccacggagccagggcccgcgac

SEQ ID NO: 160403 - RNA, 87 nt, Homo sapiens
gcgcaggcggggggcgcagaggacacgaggcggcgggcggagacaggaccgcggcgagcaaggagaaaagcagaagcccaggacgcc

SEQ ID NO: 160404 - RNA, 84 nt, Homo sapiens
gaagcccgccgcccccaaagcggaaccggacaccgagggcaacggcagcggcagaaccaagaaagaccaacagcaacagcaagg

SEQ ID NO: 160405 - RNA, 80 nt, Homo sapiens
ccgacgaggaagacccgggggcgcgccccgcccgccccaggcgccggcggcgcagggcagaacaagaaagcaacaaccac

SEQ ID NO: 160406 - RNA, 74 nt, Homo sapiens
aaacccacaagcccacaagaaagaagaacgagacagacacagcccgcgcagaacccagaaaacagaacaccacg

SEQ ID NO: 160407 - RNA, 62 nt, Homo sapiens
ccccggaacggcaccacaagacggggagcaggccccgcaccagcccagcgccccggcacagc

SEQ ID NO: 160408 - RNA, 76 nt, Homo sapiens
agccagccaggcaaaagggaagcgaaaccaaccagaagccgagaagaggccaccaggcaccggacagggaggaacc

SEQ ID NO: 160409 - RNA, 72 nt, Homo sapiens
caagaaccaggaaaaacggagccgagaccaagacaacaggcacaaagagagaaggaacacccacagggcaga

SEQ ID NO: 160410 - RNA, 82 nt, Homo sapiens
cgcgaggccggcgccagggcaccgagacaaggagaccggacgcgggacacaagaaaaaacccggaacaaggaaccggaaggg

SEQ ID NO: 160411 - RNA, 85 nt, Homo sapiens
cgggcagaggaccggaggccgggaagccaacgaccacacgcacccgggaccgggagcccgggaccgggagccggggggccacccc

SEQ ID NO: 160412 - RNA, 68 nt, Homo sapiens
gacgcgacaccgccagcaaaaaacaggcgagcccacaccaaccggcccacccaccgacgcggcaggac

SEQ ID NO: 160413 - RNA, 71 nt, Homo sapiens
gagaggcagcgcgcgccagcaggaaggcacacagagaaaaaaagggaacaaaacacagcaagcagacaaaa

SEQ ID NO: 160414 - RNA, 86 nt, Homo sapiens
ggcgaacagcgcgacacaggagaccccaagaagaagcggaagaggagccgcggaaccaagacacaaggaacagaagacaggaccag

SEQ ID NO: 160415 - RNA, 82 nt, Homo sapiens
gcagaggcgcggagcgggcagccgccgccaccccgcggccgcacccccgccccaggggagggagcagcgcacacaaggacga

SEQ ID NO: 160416 - RNA, 76 nt, Homo sapiens
cgcgcccgccgcccgaggagccccgcgcgacgcccgcggcggacggagcaccacccccacacccaaacggccggcg

SEQ ID NO: 160417 - RNA, 58 nt, Homo sapiens
cgggcaacaagcgacaggaggcagaggggcgggcaaaggagaggcacaggaagcagag

SEQ ID NO: 160418 - RNA, 73 nt, Homo sapiens
gcgaggcggagaaggcgcccgcggccggcgccggagcaggcggacccccagagcgcccgaccgagggggaggc

SEQ ID NO: 160419 - RNA, 70 nt, Homo sapiens
caggccacaaagccacaggaaggggaggagcacagaacgccaggaccaaaacagggagaaacacagccag

SEQ ID NO: 160420 - RNA, 35 nt, Homo sapiens
ggacgacagccagagagaaaaccagaaggcaccga

SEQ ID NO: 160421 - RNA, 65 nt, Homo sapiens
ggggaagaccggcaaaccggaaccaagaaaagggcacgacgaacaaacaccagcgagggacagga

SEQ ID NO: 160422 - RNA, 71 nt, Homo sapiens
gacaaagcagaagggacgagagacagaggaagagaccggacaacagcgcaccacgacaaagaagagaaaac

SEQ ID NO: 160423 - RNA, 111 nt, Homo sapiens
gccagcacagccggcacccgcaggggcgccggcgcgggcccagcacgaagcggagaacagcagcgacccgaaccgcagacggagaacaaaggcagcggccaggcggagagc

SEQ ID NO: 160424 - RNA, 69 nt, Homo sapiens
agaccaaaagcggaacaaaaaaggaaagaaagcagcaacagagagaggacagaaagaccaccgaagagc

SEQ ID NO: 160425 - RNA, 62 nt, Homo sapiens
gcgggaaagaggagagccgcaggcaggagaagggcaccggggaggaccgcgcgacgcgccgg

SEQ ID NO: 160426 - RNA, 68 nt, Homo sapiens
aagcgcgggagcacggaggaacggaagagcagaggaaccggacgcagggcggcgggaacgcccgcgga

SEQ ID NO: 160427 - RNA, 69 nt, Homo sapiens
aaaaccaccacaaacaccaaagaaagagcgcgcacgaaagcacacgaaaaggaaggaaaaacgcagcgg

SEQ ID NO: 160428 - RNA, 62 nt, Homo sapiens
ggccgggccccacacaccgcccagggaggacccacgcagccacccagcccagcaccacgcgc

SEQ ID NO: 160429 - RNA, 61 nt, Homo sapiens
aaaaccgacacaacagggcgcgccagaggacaccagacccaaggcgcaagaaaaggagccg

SEQ ID NO: 160430 - RNA, 74 nt, Homo sapiens
ggaacgaaacagccacccgacacgagcccccaacaacagacaacaacccacagaggccagggcacagaagaccc

SEQ ID NO: 160431 - RNA, 74 nt, Homo sapiens
aaagacccggcaacggaggcaaggcgaaaaacaacgccgcaggagggaaacgccacaaaaggcaccaagagaga

SEQ ID NO: 160432 - RNA, 100 nt, Homo sapiens
gacaggggcccggagcgcggcgccgcccgcccacgcagcgccaggcaggaagaaacagagggaggaccaagccacagggggcccaagcccacgaaaacac

SEQ ID NO: 160433 - RNA, 117 nt, Homo sapiens
cggcgccgcgcagaggcgggcgacgcggagggcgaagccgggagggggcgcggcggcaggaggccacgcgcagccccggaagagccacccagacccaccccgggcggaaccccggcc

SEQ ID NO: 160434 - RNA, 56 nt, Homo sapiens
agacggagcggagcgaccgagagagaccaggcaggacagccaggggaggagaccga

SEQ ID NO: 160435 - RNA, 58 nt, Homo sapiens
gggacagccaggcagacggaagggaccacagaccagcacgccggcgccacgaaccgag

SEQ ID NO: 160436 - RNA, 85 nt, Homo sapiens
agggaagagacccgcaaagaccgggagaccaagcgcaagacgcgagcaaaaagagaaaacaaagaagcaaagcccgacccacgcc

SEQ ID NO: 160437 - RNA, 65 nt, Homo sapiens
cggggacccccgacgccaggcagcgcccccaaacggcacaagaagacgggcgaacagaccgagcg

SEQ ID NO: 160438 - RNA, 69 nt, Homo sapiens
acacgggaccaacgcaccagagccgagaaacgcgaaaaggaagcggaaggaccccggcgcagccacgca

SEQ ID NO: 160439 - RNA, 82 nt, Homo sapiens
acggcagggacgcgaaaaaacaggggcagaagaacaaggaagcggagaggcaagaggggaagaacaggcagcacaggcaccc

SEQ ID NO: 160440 - RNA, 80 nt, Homo sapiens
gcgccagagccgcaggaggagcggacccggaagagggcgaggagggaggcccgcccccccccacccccggagcggaagaa

SEQ ID NO: 160441 - RNA, 105 nt, Homo sapiens
ggggccacagcaaggccagcgggccgaacacagcacaaggcaggaggccggagggccagggggacagagcaaaagcgccagcgacagcagcgggccggaggagcc

SEQ ID NO: 160442 - RNA, 67 nt, Homo sapiens
gaggagcagacgggaaacgaaagcgagcgacgcggggacaggaagcgagccagagaggggcgccagg

SEQ ID NO: 160443 - RNA, 78 nt, Homo sapiens
gcagggaccacgcacgaacgcaccccagggagacccgaggagcggcccaagaaaagcccaaagaacgccaaagagacg

SEQ ID NO: 160444 - RNA, 65 nt, Homo sapiens
gagcggagagcgagcggcaacccggaggaagggaccacagaccagcacgccggcgccacgaaccg

SEQ ID NO: 160445 - RNA, 60 nt, Homo sapiens
ggcccagcaccccgagaaccgcaggagccagagcccccaagacggccccaggacgagcgc

SEQ ID NO: 160446 - RNA, 84 nt, Homo sapiens
cggcgggacagagcgccgcgaccccagcgggcccggggaggcaccgacgaggaggaggccagccggcaagaggaggggcccccg

SEQ ID NO: 160447 - RNA, 77 nt, Homo sapiens
gaaggaccaagaaccaggacaacccaaaaggagacaggagaagaaccaagcgggcaaaggaagcacagagaggcaca

SEQ ID NO: 160448 - RNA, 37 nt, Homo sapiens
gacagagaggagcaaacaagaccccagccccgcaaaa

SEQ ID NO: 160449 - RNA, 70 nt, Homo sapiens
cgacggcggaaggaagggcacaacagccaacagcgaaaacccacgcacccaaaggcaggcccggcaccga

SEQ ID NO: 160450 - RNA, 78 nt, Homo sapiens
gcgacggggacaggccacgcgccgccgcagaccgacgccgcaggccagcccggaacccggacaaacaacaccagccag

SEQ ID NO: 160451 - RNA, 74 nt, Homo sapiens
aagaggaaggaaagcagaagaacaacgaggcagcggggccaagcggagggaaggcgccccggcaaggccaccgc

SEQ ID NO: 160452 - RNA, 78 nt, Homo sapiens
acagcggggagaccaacgaggacggggaaggagagagagagggcccaagagccccaagaaacggagacaccaagaagg

SEQ ID NO: 160453 - RNA, 62 nt, Homo sapiens
gcgcccccgccgcgcccgggcggggaacaccagcggcgagagccggagaacccgccagcccc

SEQ ID NO: 160454 - RNA, 74 nt, Homo sapiens
gcagccgagcggggccggccacagggcggaaaacaccccaaaagccaaaagggaaaggaaaagaccaacaacag

SEQ ID NO: 160455 - RNA, 82 nt, Homo sapiens
ccgcacccgcccgcaccgccgcgggagcaccggagaggggccgcggaaaccggagggaaggggacaggaccccccacaggcc

SEQ ID NO: 160456 - RNA, 74 nt, Homo sapiens
gcggccaaaccccaacccagcgaaggagaggaaaagaggacaaggcaagggaagcacaggacggcaacaaacca

SEQ ID NO: 160457 - RNA, 75 nt, Homo sapiens
gcgggcacagggagaaggaacgacacgggggaacagggcggaaccgaccaaccggaccagacagaagcaggaggg

SEQ ID NO: 160458 - RNA, 61 nt, Homo sapiens
ccaaccccgggcagaaaacagacacccgcagaccggcacaagagccgggaaagggagagga

SEQ ID NO: 160459 - RNA, 77 nt, Homo sapiens
ggacccagccaggcagaccccgggcagcaggaccgcagccagaccacgcgagccggcccgggcccacccacacgagc

SEQ ID NO: 160460 - RNA, 74 nt, Homo sapiens
ccggcgggaagagaaaggagggcaggagaaaggagaaaaagaggcagggagaagaaacggcagagacaaagaac

SEQ ID NO: 160461 - RNA, 69 nt, Homo sapiens
gccacacccccacaggcgcgacaagccaagaccaagcccacacgccgaagaagcaggaaagcacaaaac

SEQ ID NO: 160462 - RNA, 62 nt, Homo sapiens
acgccgcacgacccccggaaggcccgggaggagcggggacacgaggaccccccaaaggcccc

SEQ ID NO: 160463 - RNA, 67 nt, Homo sapiens
caaaaacaagcaacagggccagccgagccggccaggaccagggggaacccgcagcagcacagaccca

SEQ ID NO: 160464 - RNA, 95 nt, Homo sapiens
aaggaagaaagggacaaagagaggagcaggcaaccggaaaagcgaacaggccaacgaacgaggagaaaaccgcagaaaaagagaaaagaagagaa

SEQ ID NO: 160465 - RNA, 76 nt, Homo sapiens
ccagggggccacagccaacaaaggaaggaggggaccgggacacgaaaacccagagagccccggggcccgcgcaaaa

SEQ ID NO: 160466 - RNA, 68 nt, Homo sapiens
agaaccaaaacggccccgccgccccagagcaagggccagagaaggaggagaaggagacaggcggcaag

SEQ ID NO: 160467 - RNA, 59 nt, Homo sapiens
agcggaaagaccaaccgcgacagcgcagaagccgcacagcggcaagcagaccgagaaac

SEQ ID NO: 160468 - RNA, 48 nt, Homo sapiens
ggggacgagagaggcaaaccaaggcccaacacccacgaaagccagaaa

SEQ ID NO: 160469 - RNA, 65 nt, Homo sapiens
ccgggagggccggggccgcgccagggagcagcggaccaggagggacagcacaggaaagaggcgcc

SEQ ID NO: 160470 - RNA, 73 nt, Homo sapiens
gaaagagcacaacacaggcacagggaggggggcacgaagaccgcacacgacagcgacgagcccgggacagaga

SEQ ID NO: 160471 - RNA, 62 nt, Homo sapiens
aaacacacggacaacaaacggaaacggccaagaagcggaaagagaccagagcagcacccgac

SEQ ID NO: 160472 - RNA, 72 nt, Homo sapiens
aaaggggagaagcgcaaaccaaaccagaaaggggacagcggcgggcagggagcacggaaggaaccacaaggg

SEQ ID NO: 160473 - RNA, 78 nt, Homo sapiens
gacaacgacagcgacggcacgccgaagcaccgccggggggaagccccgcgccggccgcccgggcgccaagcagccagc

SEQ ID NO: 160474 - RNA, 74 nt, Homo sapiens
gccgacccgacacaacaccagaaggagcgacccgcaccggccgcgcgagaggggagcgagcacccagagccagg

SEQ ID NO: 160475 - RNA, 77 nt, Homo sapiens
gggcggagacgccgggcagccgaacggagggcgacggagggaggccaccaaccagaggaagacccagaagaaggagg

SEQ ID NO: 160476 - RNA, 78 nt, Homo sapiens
cccccagccacggaaacaagaaggaaccagcaaagcgccacgaagcacaagcaagaggaccagccaaaaccacacagg

SEQ ID NO: 160477 - RNA, 58 nt, Homo sapiens
gagcgaccagggacaaaaggagaaagacgcagaaagaggggcaaaaaagagcacaaag

SEQ ID NO: 160478 - RNA, 75 nt, Homo sapiens
gccgaccggaggacgcggagaaccggcacagcccccggacaacaggcacaaagagagaaggaacacccacagggc

SEQ ID NO: 160479 - RNA, 42 nt, Homo sapiens
acagagacagcagccaaacccccaggaagaaagggcaggcga

SEQ ID NO: 160480 - RNA, 79 nt, Homo sapiens
gaccgcagagacagccaacacggcacccacagaccagcccaccgcacccagggaaaaaacagcagccacacgaagccgg

SEQ ID NO: 160481 - RNA, 67 nt, Homo sapiens
gcgcagcgccgacggacccggaaaaccggcccccaacgacaaaaggaaaagagcccagccaagcccg

SEQ ID NO: 160482 - RNA, 81 nt, Homo sapiens
gaaaacagacgcccagccaaacaaaaaggaaaggagacaagcagagacgaaccaggcaaaggaggaccgcgccaacaggac

SEQ ID NO: 160483 - RNA, 76 nt, Homo sapiens
gggccgccgagcggacccggaccggggaagaaccggaagcccagccagggacaagcacccacagagacgcacaacg

SEQ ID NO: 160484 - RNA, 76 nt, Homo sapiens
agggaacagacacccccgaggaaggaacgggagaggaagacaagaggaaacgagcacaggaccacaaacagcaaca

SEQ ID NO: 160485 - RNA, 81 nt, Homo sapiens
accaagcgcccagccccgagacggcaacgaggccccaccccgccccgcagcaacaagagacccacgggcccaggaggacgg

SEQ ID NO: 160486 - RNA, 79 nt, Homo sapiens
agcccacaaccccgccgggcacaggaaaggaggcccgaggaagacacaaaacacggcggaagaagaagaaacagagcac

SEQ ID NO: 160487 - RNA, 62 nt, Homo sapiens
ggcgcgcccagagccccgcgcagcccagggaagggcaaaaccccaaggcaacagcaaacacc

SEQ ID NO: 160488 - RNA, 75 nt, Homo sapiens
aaagcagccgcgcgccgggcagcgggagcgggaccggccggaggagaagacaccacacccccaccggaaagcccc

SEQ ID NO: 160489 - RNA, 64 nt, Homo sapiens
gaaacgcaccggaaaggccaccagcagcagccagaaagacccagagaagcgagaagcagagaca

SEQ ID NO: 160490 - RNA, 86 nt, Homo sapiens
cgcgcgcggccgagcgcggaggcgccccgcgcagcgcgcgcccaagggccaccgcccacaaggcaccagcgggcccgagagcgccc

SEQ ID NO: 160491 - RNA, 103 nt, Homo sapiens
gggaaagaccgcccaggagagaaaggccggcggaaagccccaagcggcaagaacgcgcaacacagcgaccgacgggaccggcgcaagcagcggaggggaaaga

SEQ ID NO: 160492 - RNA, 74 nt, Homo sapiens
cgcgcgcccacccggcgcccgcgcccgacgcgcgcccgcggcaaggaacgggaaccagggaacaagcagcagcc

SEQ ID NO: 160493 - RNA, 78 nt, Homo sapiens
cgcaaacaagaccccccacggcaaagagcaccaaagaggcggcacccagccccagccgggcagcgcaagaccccgcac

SEQ ID NO: 160494 - RNA, 56 nt, Homo sapiens
acgaacagagaagaaccaaaaagagcgcagagcacgagccccacaagccacaagac

SEQ ID NO: 160495 - RNA, 59 nt, Homo sapiens
ggccgccagccccccgccaggcgcgaccgcggcgccgaggggccccagacacgacgccc

SEQ ID NO: 160496 - RNA, 119 nt, Homo sapiens
cgggccgagagccgcccgggccagcggccgcgcacccccggccggaggcaccagcccggcacagccacaccgagaagaccggcccaagaaccccaccgcccgaagacagcgccacagag

SEQ ID NO: 160497 - RNA, 72 nt, Homo sapiens
cgaccgcaacagaacggacccgggagagaacagcacacagaggcgcaaggggaagagaaaagacagaagcac

SEQ ID NO: 160498 - RNA, 83 nt, Homo sapiens
gagcgcaccgcgcgggacaagcgccggcggcgcccgacggagcaggaaacagagcaaagcagcgacaacaaagacagaggaag

SEQ ID NO: 160499 - RNA, 56 nt, Homo sapiens
gcgggaagaggcggcgggcaagagaccccgagcgcacaagagaaaaaagccaagag

SEQ ID NO: 160500 - RNA, 65 nt, Homo sapiens
gacacggaagccaccgagcggccggacagagaaaaccggcgaggaagagggccacccgaaaacac

SEQ ID NO: 160501 - RNA, 94 nt, Homo sapiens
cacggccacagcggggaaggaaagggagcgggagcgagagagagagaacagacagcgcgagcgcgagcgggagcgggagcgggaccgagagcgg

SEQ ID NO: 160502 - RNA, 75 nt, Homo sapiens
cgggagcggcggcgaacagcgcgacacaggagaccgagccagaggacggagagagggagccagggaagccccagg

SEQ ID NO: 160503 - RNA, 72 nt, Homo sapiens
gaagaaacccacgaaccaaaagggacggacaaaggaacaggaccaggaaaaaccgcaacccaaaagaaaacg

SEQ ID NO: 160504 - RNA, 81 nt, Homo sapiens
caacaagccggaagggaagcagggccgcaacaagcccggagagccgcacaaggaggagcaagcccagggccggagcgagga

SEQ ID NO: 160505 - RNA, 69 nt, Homo sapiens
ggagaacagcaacagacggcggggccccccgggcagagcccaaaaggcagagcgaggagagaagaagga

SEQ ID NO: 160506 - RNA, 77 nt, Homo sapiens
gagcggacagcaagagaggcaaagaaaagagacacaagaggaagcacgcagggggggcccagacccaagaaaggaga

SEQ ID NO: 160507 - RNA, 78 nt, Homo sapiens
cggagaagaaggaggaccaccaaaccacaaaagagcaggcgaccccaagaagggacagcgacggaaaacagagagaaa

SEQ ID NO: 160508 - RNA, 69 nt, Homo sapiens
cagcccccaaagaaggcagggagccccccagaagcacaaaagaccggcaagcagaccaaaccagacggc

SEQ ID NO: 160509 - RNA, 56 nt, Homo sapiens
acgaaaagcccacagaagacgagagaaacgacaccaagaacgagcgcgaaggacaa

SEQ ID NO: 160510 - RNA, 83 nt, Homo sapiens
cgagaagcccagaccgcagggcgggaaaaaaccaagcagcgagcaccagggggcaggagggacagagacgcagaagggccaac

SEQ ID NO: 160511 - RNA, 78 nt, Homo sapiens
gcaagggaaaagcagccagaggccgcgagcaaaaccaccaaccgggaccagggcgccaaaacagacaggaacggccga

SEQ ID NO: 160512 - RNA, 68 nt, Homo sapiens
cacagggagacggaaaacgagaggaacaagccaagcaggccccgcgagaccggcgcggcggcagacag

SEQ ID NO: 160513 - RNA, 75 nt, Homo sapiens
gacggcgcggccacccgcaggccagaagaaggaagggagaggcaagaacgccaccgaaaacaaacacgggaaagg

SEQ ID NO: 160514 - RNA, 69 nt, Homo sapiens
cgcagaaacaacaggggagaagcgcaggaaacggggacagaagaacgaagaacaaggacaaggaaaaca

SEQ ID NO: 160515 - RNA, 60 nt, Homo sapiens
ggcgcccccgccgcccgaagggcccagagggggccaagaggcaggcgcgcacccgacccc

SEQ ID NO: 160516 - RNA, 69 nt, Homo sapiens
gggccagcaagacacaggagccagggagaacaaggaacgaccaagcacaaaagacaaaaaagggcggca

SEQ ID NO: 160517 - RNA, 61 nt, Homo sapiens
gggaggaggaagacggagccaagaccagaggaccgagagaagggaggaagagccccaccga

SEQ ID NO: 160518 - RNA, 63 nt, Homo sapiens
aggaccaagaaccaggaggaaagacagcgggaaacccacccaccacccaaacccgagaggaca

SEQ ID NO: 160519 - RNA, 55 nt, Homo sapiens
agaaagggaagcagcgggagaggaggcaaaccgacaccagcgacacaagcgcgag

SEQ ID NO: 160520 - RNA, 77 nt, Homo sapiens
ggagggaggccaggcgccggcagaacggccccgggggaagcggcgggaggccacgggagccgccgagaccaagacca

SEQ ID NO: 160521 - RNA, 51 nt, Homo sapiens
gcagcgcgagcgacaacgggacgggaaacagccaaagcagacccccaagcg

SEQ ID NO: 160522 - RNA, 70 nt, Homo sapiens
aagcggcgacacacgacggggaaggagaccagggcccgacaggagcacgacgcgcccggcccgccgcgac

SEQ ID NO: 160523 - RNA, 71 nt, Homo sapiens
gcgagggaagcgccggacagggaaaaagcaggggagacggaaagaggaagaaacacagcaaggcagaagag

SEQ ID NO: 160524 - RNA, 67 nt, Homo sapiens
aacccgcagagaccacggcgcgccccggccggaggcccggcgagcgaccgccgggggaacgcccgag

SEQ ID NO: 160525 - RNA, 84 nt, Homo sapiens
ccccgcggagccggagccgcagaggccccgggcggaccaggcccagcccgaaggaggcgccaagggagacaccacaggggcaaa

SEQ ID NO: 160526 - RNA, 56 nt, Homo sapiens
gaaccgcacagcaagcccaggccaacaggcacgaaggcaaaccgagacccaggcaa

SEQ ID NO: 160527 - RNA, 50 nt, Homo sapiens
aaacaaggacgggagcggccagaaaggccgaggaagcgccgacagggaaa

SEQ ID NO: 160528 - RNA, 76 nt, Homo sapiens
ccggcaggagagaagcgaagcaggccggggccgaccgccacacagccaggggggaaccgccaaacccccccgacca

SEQ ID NO: 160529 - RNA, 77 nt, Homo sapiens
cggaccgcagacgggggacgcagggaggagcgggacaccccggaagcgggaaagagacaaggcgccaggcccaggcg

SEQ ID NO: 160530 - RNA, 34 nt, Homo sapiens
gcagccagcgccccccaaggaaaacgcaaaacca

SEQ ID NO: 160531 - RNA, 90 nt, Homo sapiens
ccgggcccggcggacagccgcacccgcgccccagcagccggacgagcgggagaggacaccacacaaaaaacaggaaaagagaacaggcac

SEQ ID NO: 160532 - RNA, 59 nt, Homo sapiens
gccacagcagaagaaaagaagccaacaaaggaacgagcagcaacggccaggaaccaggc

SEQ ID NO: 160533 - RNA, 57 nt, Homo sapiens
ggagcacggcagccagcagagccaacagccaccccagcagacaaaggacgccagccc

SEQ ID NO: 160534 - RNA, 77 nt, Homo sapiens
acagaacaacagaagaggagagaggaacccgaagaagaaaggacgacagccagagaggccggagagacacagggccg

SEQ ID NO: 160535 - RNA, 77 nt, Homo sapiens
ccaaccggggaggaaaaccgacgaagagccaaccggaagcaagaagcagagggaaagaaaaggcaaaaaggagcaga

SEQ ID NO: 160536 - RNA, 84 nt, Homo sapiens
agccgggaggacacacaagcgggaccagcccaaaaccaggcccaaggaacgagagaggaagcaaagaagagccagaaggaaaaa

SEQ ID NO: 160537 - RNA, 75 nt, Homo sapiens
agccaagaggcggccaaggggacgagcaaaggaagcgcgaacagcagcgcagggcagagcagagaccaaggagcc

SEQ ID NO: 160538 - RNA, 82 nt, Homo sapiens
gaagcgaggacacacccaggaaaagaccaggacggacaagcacagccggaagagcagacagacagcgaacacggaagccacg

SEQ ID NO: 160539 - RNA, 78 nt, Homo sapiens
caaacaggccaggggaccaaagcagggcacagcgaaggaaagccagaggacacgaaggggcgaggccgccaaagggag

SEQ ID NO: 160540 - RNA, 92 nt, Homo sapiens
cccagggaagcgcagaaagcaggcgaacccgcggcgcaaaacgggcggaccccaaggagaacagggggggcaggcgagcggggggcagcccg

SEQ ID NO: 160541 - RNA, 71 nt, Homo sapiens
agaaggggccgagggcagcggcaaacgcaggcgggagcgaccccggcaggaaggcgacccaggagaggacg

SEQ ID NO: 160542 - RNA, 101 nt, Homo sapiens
agaagaacagaggagaaacacacccccccggcagaaccgccgccacaagaaccaccaaagacagcgaaggaggccagaaaacagaaaggcgcaagagccca

SEQ ID NO: 160543 - RNA, 90 nt, Homo sapiens
acgggcgccaagccgcggagccccagacggaccccaagaagaagcggaagaggagccgcggaaccaagacacaaggaacagaagacagga

SEQ ID NO: 160544 - RNA, 96 nt, Homo sapiens
cacagaaggccaaaaaggcaaccacagagagagagagggaggggaagaccgcaggaaagcaggaaggcaagaaagccaaggacgaaacccacacgg

SEQ ID NO: 160545 - RNA, 76 nt, Homo sapiens
gcgccagggcacagacagcccacaggaggaagagacacagacagacccagacccagagacccgaaaaaaaccacaa

SEQ ID NO: 160546 - RNA, 86 nt, Homo sapiens
gcgcagcagaggggccacgcgggcccgaggcgcaccaagggcgaaggagccggcccaagcagcacggcagaagagcgacgggaccg

SEQ ID NO: 160547 - RNA, 85 nt, Homo sapiens
gcaagcggcaaccaagcgggcaccacaagcaggaggccggcacgaagaccgcccacagaaggccgcgccccccagagaggagaag

SEQ ID NO: 160548 - RNA, 90 nt, Homo sapiens
cgcgaaggccgggacccggccccggcccacaggggggggcaaacccgagagaacgggacccaacaggagaagaccccaccgccagaccca

SEQ ID NO: 160549 - RNA, 77 nt, Homo sapiens
agcaccgagccagcccaggaaaaggagaggacccaaaaggcgggcgaaaacgccaaaaaccagacgggagcgcagag

SEQ ID NO: 160550 - RNA, 73 nt, Homo sapiens
accaacgggagggggcaacgcaagaaggggaacggggggaggagacagaagagcgggacacagacacaagagg

SEQ ID NO: 160551 - RNA, 75 nt, Homo sapiens
agagagacgagaaagaacacgcggccaaacccggaggaggaggcgcgcggccgcaagaaaaggacagacgcaaca

SEQ ID NO: 160552 - RNA, 73 nt, Homo sapiens
gcaagaggcgcgcagccccgagacacaccgggaaagagagggacgaaaccccagacacaagaaaaccagcaaa

SEQ ID NO: 160553 - RNA, 75 nt, Homo sapiens
gcgagggcgcccgagagacggcgaggccccggccgcgggagaggaggaggagggccggaccgcacaagccgccaa

SEQ ID NO: 160554 - RNA, 52 nt, Homo sapiens
ccagccccggcaagaccgaaggcgccggccaaaagagacagaggccagccca

SEQ ID NO: 160555 - RNA, 76 nt, Homo sapiens
caacaaccggccgcggaggcgccaggagggcggcggcgagagagacacaaggcaacggcccggcacaccagcagag

SEQ ID NO: 160556 - RNA, 72 nt, Homo sapiens
cgaagcacccaaagaacaaaggagccggcagacagcaacacagggcagggcgagcccacagcggccccagga

SEQ ID NO: 160557 - RNA, 75 nt, Homo sapiens
cagaggcgcggagcgggcagccgccgccaccccgcggccgcacccccgccccaggaagacccgcggaaggcacac

SEQ ID NO: 160558 - RNA, 81 nt, Homo sapiens
gcgcccggccgggggcgaggagcggaaccccgccgaagccccagcggccagagcacgacgagcccagggcgaggaagccgc

SEQ ID NO: 160559 - RNA, 78 nt, Homo sapiens
gcagcccgcagacaaggagcaggcgcgaaggacacaaagcgagaagacccagcaaccagcagcaagaccaagagaggc

SEQ ID NO: 160560 - RNA, 72 nt, Homo sapiens
aaaccgccggcacaccaaacggcagaggaggagacacacagccccagacgggaggaaaaaaggaaggaccgc

SEQ ID NO: 160561 - RNA, 71 nt, Homo sapiens
gccacgggggcagcgccgaaccaggaccggacccggacccaaaggccagcaagccaccccgcgagcaacac

SEQ ID NO: 160562 - RNA, 77 nt, Homo sapiens
cacagggcgacaggcccaaccacccaaggccagagcagcgccaagcgagaacaaggggcaccacaaagaagacagca

SEQ ID NO: 160563 - RNA, 82 nt, Homo sapiens
ggaaggaaccacaccaacggccgcgccgggccgcaagacagcccgggacaacaccgagggggagacaagggacggcgaagga

SEQ ID NO: 160564 - RNA, 76 nt, Homo sapiens
ggcaacagagagccacagaaagcagacaacagaagaaccgaaggcaggggagccaaccccaaacaagaacagaaaa

SEQ ID NO: 160565 - RNA, 77 nt, Homo sapiens
cccccgcgccggcgcagggaaagggagcagcaccggccacacccacagcacgaccggaacccagcgaccgacgccgg

SEQ ID NO: 160566 - RNA, 68 nt, Homo sapiens
gagagccaaagaagggagagaaggcgcgcaggagagcgcagagacccgcccggaagcgaggcaacagg

SEQ ID NO: 160567 - RNA, 76 nt, Homo sapiens
aacccaaaaggacagcaacacgcgagagaaacaagacgggaaggaagacgaggacaagaaggccaaacagccacaa

SEQ ID NO: 160568 - RNA, 72 nt, Homo sapiens
gggaagccccgacaccaggggacacccagaagcggcgccgccggcagagcccccgaggaaagcacgcacaac

SEQ ID NO: 160569 - RNA, 75 nt, Homo sapiens
agggcgccggggccccggagacccggagacaggaccaagaaagcgcccccagccgaggccgcaagcgaagcacca

SEQ ID NO: 160570 - RNA, 74 nt, Homo sapiens
ggaaccgagagacggcccacgccaccacccccaacaaggagcacgggcccaaagggagaagaaagaacaaagac

SEQ ID NO: 160571 - RNA, 78 nt, Homo sapiens
ccgaagcccgcagacagacccacaaaccccgaaaaacgggaacaggacggcccaagacgggagacaacgagaagccga

SEQ ID NO: 160572 - RNA, 78 nt, Homo sapiens
cggaggacaggaagggaacgggaaagcgcaacaggacccaaacagaaaccgaccagagggcaaaggggagacaggggg

SEQ ID NO: 160573 - RNA, 76 nt, Homo sapiens
gcagcacaacaagaaaaagaagcgaggacacagaccgaacacccccaaaacacaagaggacggagaagcgacgaaa

SEQ ID NO: 160574 - RNA, 71 nt, Homo sapiens
gaaagaaaacgaaaaaagaagcaggcgaggaagacaaaaaggaccaagagccgaggcaagagaaaaacgca

SEQ ID NO: 160575 - RNA, 42 nt, Homo sapiens
agcgcggaggccccgccgccaggggccagccaagcccccacc

SEQ ID NO: 160576 - RNA, 79 nt, Homo sapiens
cgcgcgcgcccccacgcccccgggccccccaggcccgggaccgaggagagacggggcagcaccacccggcagggggaga

SEQ ID NO: 160577 - RNA, 65 nt, Homo sapiens
agccagagcaaaaccagcccagagaacaagaggcaagcagaagaggaacagaagaagcagagcag

SEQ ID NO: 160578 - RNA, 56 nt, Homo sapiens
accgcagaaggccggagacaccagcaggcgccaagcccacgggcgcaccaacggag

SEQ ID NO: 160579 - RNA, 77 nt, Homo sapiens
gggaaacagccagaacggaaaccacggacaaacaccccaagaccgaaggacacagcccgcagaaaggaagcgggcca

SEQ ID NO: 160580 - RNA, 62 nt, Homo sapiens
cccacagacgacacaaaacaggacagagcgggagccaccagcgccaaagggaagccaggagc

SEQ ID NO: 160581 - RNA, 75 nt, Homo sapiens
ggagaaggaccaagaaccaggcagagaagggggacacacccccaccgggcagcgccaacaaccaggcgcgggcag

SEQ ID NO: 160582 - RNA, 69 nt, Homo sapiens
aacacacaaggacaggacaccaggaaaaacacagagagccgacggcagacaagaaaggggggagcggaa

SEQ ID NO: 160583 - RNA, 80 nt, Homo sapiens
agaggaggcgcaagacgcgaccaaagccgacggggcaagaacccgcagggacgccaccaaagacccacggcagcgacgcc

SEQ ID NO: 160584 - RNA, 74 nt, Homo sapiens
aggcaggacacggccgacgggaaagagggcggagaacggaaaagcaccaggaagcagagaggaccgcagaaggg

SEQ ID NO: 160585 - RNA, 73 nt, Homo sapiens
gggacgggcccagaggcccagggaggcaggggcagaaacagagaaggaacaggggggaggggaacagcagcgg

SEQ ID NO: 160586 - RNA, 82 nt, Homo sapiens
gccggaaggaaaaagacaaagcacccggcggccaaaggccaggacaccaacgggaccagaagcaaagaaggccgagggacga

SEQ ID NO: 160587 - RNA, 76 nt, Homo sapiens
aagaccacaggccacgggcagcacaagaaccagacccaaaagagcaaacaaccgacggagaaggaaaaaagccgag

SEQ ID NO: 160588 - RNA, 77 nt, Homo sapiens
aggggcaaggcccacccccacaaggagggcaaggcccaaggaaaccccccaggcaagaggcgcaggaccgggaagac

SEQ ID NO: 160589 - RNA, 80 nt, Homo sapiens
gagagcacagagaccgccaggcgccgaagaaggcacacgcccccagggacgcggagggggacaaggaaagggagcgggag

SEQ ID NO: 160590 - RNA, 63 nt, Homo sapiens
cacgaggaaggaggacccagcccgcgcacacagagacggcagggaaaaaccaaagcccggaag

SEQ ID NO: 160591 - RNA, 69 nt, Homo sapiens
gaaacggacaaacacagaagaaggcgcaacacgagacaaaagacgggggaagccccgacaaaaaaaaag

SEQ ID NO: 160592 - RNA, 70 nt, Homo sapiens
cgcccccccgaggcgcgccacccccggcaccgaaacagacagcgcccacaggcagccgaagaacccccca

SEQ ID NO: 160593 - RNA, 37 nt, Homo sapiens
cccgagagcgggaacagggggaggggccgggaagaac

SEQ ID NO: 160594 - RNA, 63 nt, Homo sapiens
aaagagaggagcgaacgagacagaacaggaaaaaggcacgcagaggggcgggcacgcacgaca

SEQ ID NO: 160595 - RNA, 68 nt, Homo sapiens
gccagaaagaggaggccagagcggaacgggcgcaggaggaggcaagacgggcagacgagcaggaacgg

SEQ ID NO: 160596 - RNA, 78 nt, Homo sapiens
ccagggcgccccgcgagagccaggaagccaggagcaggacgcagaagacgcagggccaaggacaaagaggacagaaca

SEQ ID NO: 160597 - RNA, 75 nt, Homo sapiens
caccgggagcaacggagaggggccacgagcagggaggcaagaaccacaacaaccagccaaacgcacaaaccggcg

SEQ ID NO: 160598 - RNA, 73 nt, Homo sapiens
aggaacaggggaccgaggaaacaccaggccaaagcggaggacgacaggcagcgcgggagcaccggaagagcca

SEQ ID NO: 160599 - RNA, 64 nt, Homo sapiens
acccaaggggaaagaaccaccaggaaacgaggaacaaggaaaaagcccagaaagaagcaaccag

SEQ ID NO: 160600 - RNA, 82 nt, Homo sapiens
cggaggagagagcaaggcagccaggggaggaacgcaagcacaggaccagaaacgaaaggcagcagaagaggaaagccagaaa

SEQ ID NO: 160601 - RNA, 73 nt, Homo sapiens
agaaaaagccagaaaaaagcagaaggcaagaggacgcaccgcaagacagcgaaagggccacggaaaggggccc

SEQ ID NO: 160602 - RNA, 79 nt, Homo sapiens
acagcaacagccaccaagacaccccgaccagcacacacgcaaggagacaggcaagcggcagccacacccggagaaggag

SEQ ID NO: 160603 - RNA, 65 nt, Homo sapiens
gcaccccgaacgggacaaacgcgccacacagccgccaagacccagggagcagccgcaacagcgca

SEQ ID NO: 160604 - RNA, 78 nt, Homo sapiens
ggggcgagcgaagaaaaccccagagcgagcagggacggggggaaaagcgcacccgggcccgggcgagaaagaagacac

SEQ ID NO: 160605 - RNA, 76 nt, Homo sapiens
ccccccggaggcggacccccgggaacggacggagggccacgcgccccggcccaagggcgcacgaaggggaaccgaa

SEQ ID NO: 160606 - RNA, 75 nt, Homo sapiens
gggggacgccggcggagacgcgggcgaggaaccaacccgccaccaagaaagccccccagaaagccccgcagccgc

SEQ ID NO: 160607 - RNA, 73 nt, Homo sapiens
caaagccgaacaggcagggccagacccagaaaacaccgggaaaggcccaaaccggcgaaaacccccgggacag

SEQ ID NO: 160608 - RNA, 62 nt, Homo sapiens
caaccgagcagcggcggacacgggcgccgaggaggacgcgccagcagggccagacagccacc

SEQ ID NO: 160609 - RNA, 73 nt, Homo sapiens
caggggggaaagagcggcaagcaagcgcccggggagagcccagggagaagaggacggcaccacggaaagagac

SEQ ID NO: 160610 - RNA, 78 nt, Homo sapiens
cacgcccccgacccgagcccggaccgcaggcgaggaggacagacccgccgagaacgaagggcaggaccgacaacgggg

SEQ ID NO: 160611 - RNA, 67 nt, Homo sapiens
ccagagaacgacgcacgacaaggagggcggaacggcggaaggccggcccggccacccccgggcccgc

SEQ ID NO: 160612 - RNA, 69 nt, Homo sapiens
gaggccagccacccgaacccccaggcgcgcggcagcgaggcgccagagcccaggaccgggcgcgccaca

SEQ ID NO: 160613 - RNA, 76 nt, Homo sapiens
caagagaagcacaaaacagcagacccaagagcagcggaaaagaccagcacagacgaaaaagagccacgcccccacg

SEQ ID NO: 160614 - RNA, 71 nt, Homo sapiens
gggcgccgcccagcaaagcgaaggaggagggccccgagggcagaagcaggcgggacagaggcccacagggg

SEQ ID NO: 160615 - RNA, 85 nt, Homo sapiens
gaggaagcgaggccagacagcaagagcacccgacccacaggccagagaggacccaaagacaggaccacgcaccagcagagaagga

SEQ ID NO: 160616 - RNA, 90 nt, Homo sapiens
cgggagggcgggaggcccggagcgcccggagccggagagacacgaacagcgaccccgaggaagaggcgaggagacagaggccgggccaag

SEQ ID NO: 160617 - RNA, 76 nt, Homo sapiens
gccaccaacgcggcccggcggcggaccgccgcgacccgccgcgcgcgcacgcccagcacccgaaagagcgaaagcc

SEQ ID NO: 160618 - RNA, 59 nt, Homo sapiens
gcagagaacagaccacagcgggcagggcaacaaccacaacacagcagcccccaggagag

SEQ ID NO: 160619 - RNA, 92 nt, Homo sapiens
gggccgggaaacaaaaggcgaaccggggagaaacgaaggaggcccaaccacaaaaggagccgacggaacccagacggagaacaaaaggaaga

SEQ ID NO: 160620 - RNA, 56 nt, Homo sapiens
ggcgggaggccaccgccaggacagcaaggcggcaaggcgggagaccagagagaccc

SEQ ID NO: 160621 - RNA, 70 nt, Homo sapiens
gcaaagaacacgggggaaaaacaccggaaaacagccacaagcacggggggagaaaaggccaagggcagga

SEQ ID NO: 160622 - RNA, 73 nt, Homo sapiens
gaaaccagccccagaaacggccagaacggagaaacaggcggaacacgggcaacgggggaagacggccagaaca

SEQ ID NO: 160623 - RNA, 80 nt, Homo sapiens
gcagcaacaagaggagcgcccccccagcggcacgcagccccgcggcacaaccagggacaaccaaagccaagcaacgaagg

SEQ ID NO: 160624 - RNA, 80 nt, Homo sapiens
ggcgaggaagcgggccgggaggagacagagagcccggacaacaggaaaagccagccgggcagaccagaagccacaggccc

SEQ ID NO: 160625 - RNA, 75 nt, Homo sapiens
agccggagaagagggggcccggggggaggaggggcaggcccggcgcggcgcgaccacaagcgagcaggaagcagc

SEQ ID NO: 160626 - RNA, 107 nt, Homo sapiens
gccacccgaggaagacgaggacaggacagagcccccgaggccccagaacaccgggcgggccgaggagaacgggacccgcaccacgggagaaccagacgcgggccggg

SEQ ID NO: 160627 - RNA, 60 nt, Homo sapiens
aaaaagacagaaggccagaaagaaggcgccaccaaccagccaagagaacagggaagagga

SEQ ID NO: 160628 - RNA, 81 nt, Homo sapiens
aggagcgccaagaccaccacaaagagggcccaggccccagaggacgggagccgccccggaaaaggggggagagggggagcc

SEQ ID NO: 160629 - RNA, 46 nt, Homo sapiens
cggcagcaccaagaggaccaaacgggcgccgcacaaacacgcagag

SEQ ID NO: 160630 - RNA, 55 nt, Homo sapiens
agggcaccgcgacgcggaggcccaccgagccaggggaaggacaagagcgggaaga

SEQ ID NO: 160631 - RNA, 70 nt, Homo sapiens
agcacagaaaaaccgacaagggcagcccaaggacacaaggaaagacacagacgaaagcgcgcgcgcaggg

SEQ ID NO: 160632 - RNA, 70 nt, Homo sapiens
agagaccggagaacgcgacagcccagcaaaaccggcggacaagaacacgggccccgagaaacgcagaaaa

SEQ ID NO: 160633 - RNA, 79 nt, Homo sapiens
cgcggcgccggcagcagagaccaccagaaggaaccagagacgagacgggcggagacgaacagcccagccccagggcagc

SEQ ID NO: 160634 - RNA, 47 nt, Homo sapiens
aaggaccaagaaccaggggggagaaaaggccaagggcaggagacacg

SEQ ID NO: 160635 - RNA, 66 nt, Homo sapiens
acgggcaggcagaaccgcccgcccgcccgccaccacgggaaccacaaccacgggcccacacgcccg

SEQ ID NO: 160636 - RNA, 74 nt, Homo sapiens
cccccccagcgaacaagaaaacagggccacgcccagaaaaacgacaaaggaggacaccagcaaaaaggaaaggc

SEQ ID NO: 160637 - RNA, 75 nt, Homo sapiens
cgcaaccccgccagcgcggcccgggcaggggggagaggagccaagcccaacgggacgggaaaacggccacagcca

SEQ ID NO: 160638 - RNA, 74 nt, Homo sapiens
gccgccaacacagggaaagacacacccagggcgaacacacacaaaagggaccccgcaggcagacacccgaacaa

SEQ ID NO: 160639 - RNA, 74 nt, Homo sapiens
aaacaaccgcagccgcgcccaggagggaccggaaagcaccccggccacagcgagcagacagacagcgaacacgg

SEQ ID NO: 160640 - RNA, 78 nt, Homo sapiens
cagcagcgcgccccaagcaggacccaaaaggcgggcgaaaacgccaaaaaccagacgggagcgcagagacaaccccag

SEQ ID NO: 160641 - RNA, 80 nt, Homo sapiens
aggccgccgagcccccgaccccgaccgcggggccggacaagaaccgaccgagagggagcccggggcaagacggcagcccg

SEQ ID NO: 160642 - RNA, 76 nt, Homo sapiens
agcagagaagaccaggaaagacaggaggccacccccaaagaaaaggccggcgcggaagaggccggcggcgggacgg

SEQ ID NO: 160643 - RNA, 81 nt, Homo sapiens
agccgagggccgggagcccggcacgagcgccgacaacccggcgccagagccgggaaaaccagcaagaccgcaagaagaaga

SEQ ID NO: 160644 - RNA, 80 nt, Homo sapiens
gcccggaccgcagaagggagaccacagcaagacgccgggaccccggaaaccagaaagagcgcagaaacggagggcagcag

SEQ ID NO: 160645 - RNA, 82 nt, Homo sapiens
ggaaaaaaccgagaacccgaccccgcggagacagcgagacccgccaggagcaaagcgggacagcaagggaggcagcagacgg

SEQ ID NO: 160646 - RNA, 80 nt, Homo sapiens
gggaccaggcccgggggcggcggccacgccaaggacgggggggagaaggaacaagccgcccaaacagcggaggggaagaa

SEQ ID NO: 160647 - RNA, 51 nt, Homo sapiens
agcgcgaaacgcacgagaagagggccccaggaggagcaacaagaaagaaga

SEQ ID NO: 160648 - RNA, 68 nt, Homo sapiens
aaaaagaagaagaacccggcaagccaccagaagaagcaagggccgccgaaaagaaaggaacggcacaa

SEQ ID NO: 160649 - RNA, 68 nt, Homo sapiens
aagagcggaaaggcaaaaggacagggaaggggaagcaggccaacccagaacacaccccagcggggaag

SEQ ID NO: 160650 - RNA, 73 nt, Homo sapiens
caaaccgccaacccgcgccgccgccaccagcccaaaacgggacaggcacccaccgcaggcaagaacagcagaa

SEQ ID NO: 160651 - RNA, 83 nt, Homo sapiens
agaaaagaaaggccaagaccaggaaaggaagcaccggaacagaggaaaccaccccaacggaagaacaaaacagaggaaagaga

SEQ ID NO: 160652 - RNA, 45 nt, Homo sapiens
agcagagaacacgggcacacagcagcgggaagcccgaaccgggag

SEQ ID NO: 160653 - RNA, 83 nt, Homo sapiens
gaggcccccagccacgcagaacggaacaaggcaaaagccgagaagcacccgagacaacagcggcaaaccgaagaccagaagca

SEQ ID NO: 160654 - RNA, 70 nt, Homo sapiens
ccggaacggggccccgcaaggccggcgcggaggaggggagcagcgcgcaagaaggagaggacagccgcag

SEQ ID NO: 160655 - RNA, 60 nt, Homo sapiens
ggacaaaagggaaccaaacggagagcaaacaccaccaagcccagagagaaacgcgacacc

SEQ ID NO: 160656 - RNA, 81 nt, Homo sapiens
gcggggcggcccaccaacaggaacagggcagacgagcggaggacacccaacccggaaaagccaaaggaagaagagggaaag

SEQ ID NO: 160657 - RNA, 65 nt, Homo sapiens
ccacacccagaagacgacggcacagcgcacaagaaacccaagcgcgagcaaccccaagcgcccac

SEQ ID NO: 160658 - RNA, 81 nt, Homo sapiens
aacggagagcagcagccgcccgccaaccccaggggaccagaggaaccagcccgagcgccagaacggaagaccaaccagaag

SEQ ID NO: 160659 - RNA, 87 nt, Homo sapiens
ggaagggcagcccccccccaacaacggacacgcgagccggggaaaaccccagggcaaaacgccagaaaggaccgcacgaagcacaga

SEQ ID NO: 160660 - RNA, 74 nt, Homo sapiens
cagcacccggccgagacggcggcagcagcggcacaggccgccacagaagaagaaagaaccacaggagaccaaaa

SEQ ID NO: 160661 - RNA, 61 nt, Homo sapiens
cagaaaacaacacgacagccaggcagggaagaccacaacaagcaagcagcagcacgcgaaa

SEQ ID NO: 160662 - RNA, 74 nt, Homo sapiens
gaggaacaggcgcaagccgcgaggaggagcagcggagcagaaggggagagaacaaaccggcgggacaagaaaac

SEQ ID NO: 160663 - RNA, 75 nt, Homo sapiens
gcgcaggagcgcaacccagcaacacaagcacagccacaagacaagcaacagagacagagggaagaaacagacgcg

SEQ ID NO: 160664 - RNA, 54 nt, Homo sapiens
ggcccgcgcacgcccggagagagaccggaccaaaccagagacaaaaggcacagc

SEQ ID NO: 160665 - RNA, 74 nt, Homo sapiens
gggagggcccgccagccgcgcccggccgagacagacagcacaaccccgaggaagagcccaacggagaacgaaag

SEQ ID NO: 160666 - RNA, 77 nt, Homo sapiens
aacgagcggcggcggcggcagcgggcgggccccgagagcagcagcggacagaagcgcggaagaagaacgggacgggc

SEQ ID NO: 160667 - RNA, 66 nt, Homo sapiens
ccgagacgggcggagaggagaagcacgacagccgaaggagaggaggcgacaagcacacagcaggga

SEQ ID NO: 160668 - RNA, 69 nt, Homo sapiens
gagcagggacagccaagaaccaaaaaggaccacgaagaaccaagccgccacagggagaaaagagcagag

SEQ ID NO: 160669 - RNA, 68 nt, Homo sapiens
cagagggggacagcgaaacccgagcgaaaagccaaaggccgggagacccaacccccagccaggaagaa

SEQ ID NO: 160670 - RNA, 64 nt, Homo sapiens
cgccccagcagcaggggcgccagggcgcgccagaggacaccagacccaaggcgcaagaaaagga

SEQ ID NO: 160671 - RNA, 72 nt, Homo sapiens
acccaagaagggggaacacaagaaaccaaacaagccgaaagagcaagggacaggagagacaacggaggcaag

SEQ ID NO: 160672 - RNA, 80 nt, Homo sapiens
ccggcggccgccgcgccacaggagccgggggggcgcagccggcggaagacgagaggccgagacaggaagacaaagcgaag

SEQ ID NO: 160673 - RNA, 73 nt, Homo sapiens
cggacagcgccacggcgggccgcgggaggacaccacccacaggagccgcccggcaaagcgaaagcgcaggacc

SEQ ID NO: 160674 - RNA, 70 nt, Homo sapiens
ggcgcagaaggggacagaacagggggaagaaggagccgggcccaggaaggaccacaccccaaggaaggcg

SEQ ID NO: 160675 - RNA, 76 nt, Homo sapiens
ggaaaaaaacaggcgacggaacgaggaggaacaagcagaaagcacgaacaacgagaacaagacacgagcaaacccc

SEQ ID NO: 160676 - RNA, 95 nt, Homo sapiens
gggggaagagcgcccggcccggaggacaagaacgggagggcagaaccggcgcaaggggagaagaaaagcaacacagcgaccagaaaaaacaggga

SEQ ID NO: 160677 - RNA, 77 nt, Homo sapiens
gcagccgacggcaaagggcgggggcaaagcggagaccggcaggccgccgccaccgcccacccccacgcgggcccggc

SEQ ID NO: 160678 - RNA, 78 nt, Homo sapiens
acagcccgcagccccgccagccacccccaggcccgggcccccagacgaacccacggaaggaagcggacgccaccacgc

SEQ ID NO: 160679 - RNA, 77 nt, Homo sapiens
gacaagaccacgagccaggcagaaggcaaagaacagaggaggaagaaccagagacggccgaaccacaacaacgagaa

SEQ ID NO: 160680 - RNA, 70 nt, Homo sapiens
gaagccgcacccgaaacaaacacacccagcggaaagccagcgcccgcagggaagcggaaggcccacccga

SEQ ID NO: 160681 - RNA, 82 nt, Homo sapiens
caacaccccggggaaagcagaaggaccgagaacgccaagccgccacgagccaaagggaagccggagacacagacgcgaacgc

SEQ ID NO: 160682 - RNA, 56 nt, Homo sapiens
gcggcacccccaggaagcgcgaggcgcggggccgagaggccgccgggacggcgggg

SEQ ID NO: 160683 - RNA, 79 nt, Homo sapiens
cccgaggcaagccacgggcaaagacgccgaaggaacacgaaaaggacggagggaaaagcgccgggcccaagcaaacagc

SEQ ID NO: 160684 - RNA, 70 nt, Homo sapiens
ccgagaccagcccaacaggaccaggagcgggagagggccagcaagccccagccaagacccaccaggcagg

SEQ ID NO: 160685 - RNA, 80 nt, Homo sapiens
ggcacgagcggccgcggccaggcgacgccacccaagacacaaacggcgacacaggggagcccggagcaaccaggagcaaa

SEQ ID NO: 160686 - RNA, 79 nt, Homo sapiens
gaagcagccgggagccggagcgggcgcggacgccgaggcaccgaggcaccagaggaggagagcgaagccgcaccaggca

SEQ ID NO: 160687 - RNA, 75 nt, Homo sapiens
gacccccccccagacacagaggaaaccccccaggcaagaggcgcaggaccgggaagaccaacaaacgcaccgcgg

SEQ ID NO: 160688 - RNA, 76 nt, Homo sapiens
aaaaggagagggggcagcacaccggcagggccacacggcagccccagccccagcaggagcgggacaccccagggag

SEQ ID NO: 160689 - RNA, 70 nt, Homo sapiens
gagaagccaagaaacacaacggaaaaacccagcgaaccacagccaggaggaaacgcccgccagagcgggg

SEQ ID NO: 160690 - RNA, 80 nt, Homo sapiens
gagaccgacgggagaggcggccagaagaaaacgaggggcggaacacccgccaaagcagagaaaagacacccagagcaaca

SEQ ID NO: 160691 - RNA, 85 nt, Homo sapiens
ccgaggccggggaccaggacagcgcgaggcgagggcagagccgcggggcaagaccaccaagaaggcggagaggaaagagagggac

SEQ ID NO: 160692 - RNA, 79 nt, Homo sapiens
gacccccaagagcacagccggaagaggcaagagaccagaagccaaaagacagagccagggaacgcagaggaaggaagaa

SEQ ID NO: 160693 - RNA, 76 nt, Homo sapiens
ggaggagagacggcggcggaaaaccccaaaaggacaaagagaagaccacagaaacagccaaccccaggcagggcag

SEQ ID NO: 160694 - RNA, 69 nt, Homo sapiens
cgaaccccagacccacgcagcaccaagcccagacgggacgaccggggcacagccgggaagcaagacggg

SEQ ID NO: 160695 - RNA, 84 nt, Homo sapiens
aagaggcggccggcaagagcggcggagcgcaggggagaaccggaaggaccgcaagcgcaggaccgagcccaccgcacgggcagc

SEQ ID NO: 160696 - RNA, 77 nt, Homo sapiens
aaggaaccagccaaaaagcaaggaacagggaaagaaggaagacaggcgcaagaaacaggacagcaaagccagaaagc

SEQ ID NO: 160697 - RNA, 71 nt, Homo sapiens
caacgggaaaaccggggaaaagcagcacaaggaaaacgagagaaacgaaggcgagagaaacagcaaggccc

SEQ ID NO: 160698 - RNA, 63 nt, Homo sapiens
agcccgcagagcaccaggcccaccggaaaggaaagcgaacgcgaaaagaaaagccgagagcag

SEQ ID NO: 160699 - RNA, 73 nt, Homo sapiens
acgcagggcgcccccgacagcacccaagaaaacccaggccgcgaaggagaagaccggacaccaaccgacggcc

SEQ ID NO: 160700 - RNA, 94 nt, Homo sapiens
ccgagggagcccgccgcccgccccggcacacgcgcagccccggccccggcccgccggagaaacaggggacggcaaaacagaacagaaaggcgga

SEQ ID NO: 160701 - RNA, 59 nt, Homo sapiens
ggcggacggaggagcaggcgagaagagaagacaccgagaaacacaggcggaagcgcgcc

SEQ ID NO: 160702 - RNA, 82 nt, Homo sapiens
cgcagcgagcgccgaggaacccacccagcgggacgggcggaggagcgcagaaggagcgcggacgacggagccgagcggggag

SEQ ID NO: 160703 - RNA, 75 nt, Homo sapiens
acagcgccgccaagcgccgcggacggccggggcaccgccacacccacgccgacccggcagaaagaaacgagccga

SEQ ID NO: 160704 - RNA, 54 nt, Homo sapiens
cgacgaaacagcagccgcgaaggcccaaaggcgcaaaggacgggcggacacagc

SEQ ID NO: 160705 - RNA, 79 nt, Homo sapiens
ggcccgggcgccccccacagagaaagggacccggcagcaaccccaacaaacgccagaggcagccccccccgggagacac

SEQ ID NO: 160706 - RNA, 69 nt, Homo sapiens
ggaccccggacggagcggacccaaaggaaagcagaccgaccaagacccagagccacagacacaaggacc

SEQ ID NO: 160707 - RNA, 65 nt, Homo sapiens
agacgagccaagaagggacacagacaaaaagacaggacaagaacgagccagcaaacccgaggagc

SEQ ID NO: 160708 - RNA, 75 nt, Homo sapiens
ccggacccgaagacgagggccggaggaaacaggagcacccgaagaagacaagacaggggaaagacagcccagcag

SEQ ID NO: 160709 - RNA, 54 nt, Homo sapiens
aacacgaggcagggggccacacgcaaggggaacagacgagcagagcacggcaga

SEQ ID NO: 160710 - RNA, 58 nt, Homo sapiens
cccgcggcgcgcagcccagcaggggccggaggacgcggggaaccagaccgggccagac

SEQ ID NO: 160711 - RNA, 65 nt, Homo sapiens
gcgaaaaaacaggaggacacaaggaaaggcccgagccaaaagacccagagaaaggagcacgaagg

SEQ ID NO: 160712 - RNA, 33 nt, Homo sapiens
ccaggcgacagcggcaggaagcaggagacacca

SEQ ID NO: 160713 - RNA, 85 nt, Homo sapiens
accaccccaaagccaccaggacccaaaggcgagcggcgcagcgcaggagaggaagacgacagccggcgcacgcaggagccgcacg

SEQ ID NO: 160714 - RNA, 82 nt, Homo sapiens
gcaaccaagcaccgaaacagcagggagggccgaacaggggggaacgacaaacaaggccccagaagcaggggcgacccaggcc

SEQ ID NO: 160715 - RNA, 81 nt, Homo sapiens
gggaaaaaaacgcccaagagaccgccaaggagaccgagccaaaacccaagaaggcagaagccagccccgcaggccgccacc

SEQ ID NO: 160716 - RNA, 116 nt, Homo sapiens
acccaggaaggcagccgcagcaacggaacaaggccccaccgaaagccgggcccaggcgaggcccgggcagcgggccagcgggaggggccccggcccgcccagggagcccaggccac

SEQ ID NO: 160717 - RNA, 77 nt, Homo sapiens
acccccaggacccccccccggagcagaccccgagagacagagagcagagggaaggcaacacgagcggaagaacacac

SEQ ID NO: 160718 - RNA, 71 nt, Homo sapiens
acaccgaagaggcccccccaccacccacgggaaaaggagacccggagacgcccgccaggcacacgcggccg

SEQ ID NO: 160719 - RNA, 84 nt, Homo sapiens
aagcgagcgcacgcgcggagaaggggccgagggcagcggcaaacgcaggccaagcacaaggcagggacaggggggcaccagaag

SEQ ID NO: 160720 - RNA, 64 nt, Homo sapiens
gggaggcagacgccgcccggcccagggcagcgccagagcacaggggccgggcacggaccccaaa

SEQ ID NO: 160721 - RNA, 79 nt, Homo sapiens
cggaccgagcggccggaccagacgagcccgcgaagagaccacagccagcaagagggccgcacgggcccgaccaagcaga

SEQ ID NO: 160722 - RNA, 56 nt, Homo sapiens
gaaaaccagcgagaccaaaacaaagaccgcaccacgacagcgaccacaccgacaac

SEQ ID NO: 160723 - RNA, 72 nt, Homo sapiens
aaaacgaaagaagggagaggcggggagcagcgccgggagaaggaccacgcagagccgcccgacacacaaaca

SEQ ID NO: 160724 - RNA, 56 nt, Homo sapiens
ggccacggaggcaccagaagaagcaccaggggacaccagcagcgccgccggaccac

SEQ ID NO: 160725 - RNA, 84 nt, Homo sapiens
gaagagcaagaggaggacaggagagaagaagaagaaaccggagaaggaacagaccccggaggagagaagacggaacaagaaagg

SEQ ID NO: 160726 - RNA, 72 nt, Homo sapiens
aagaagcaggaaaaagcgacggaccgcgcaagccccagacgagagaggggagaagagcgagacgagaaagaa

SEQ ID NO: 160727 - RNA, 58 nt, Homo sapiens
aagaaagcaagacccaggacaccccgaagccgagaaagcggcggaggcggaccggggg

SEQ ID NO: 160728 - RNA, 57 nt, Homo sapiens
agcgcccagcagcgcagacaccgaagacaggaggaagaaagaggaggaggagcgccc

SEQ ID NO: 160729 - RNA, 80 nt, Homo sapiens
aaaggagaccaagaacgagaccaggaagacagacacagggcagcggaagaagagaagggagggcagaaggaacaaaacga

SEQ ID NO: 160730 - RNA, 80 nt, Homo sapiens
aggaaagcggacaacccgggacacccgggcccaaacggggaagaacgacgccgggagaggagggacggacagaggcggac

SEQ ID NO: 160731 - RNA, 74 nt, Homo sapiens
gacagggggacccggcgcgcgccccaccaagggcgagacaccccgccagggcagccggaggggggaacaaacgg

SEQ ID NO: 160732 - RNA, 86 nt, Homo sapiens
cggcgcgggggaggggagcccgcgcccgccgcgggagagaggcggacgaaagaaagaaggagcaccaacgcaaagaaaaagaccaa

SEQ ID NO: 160733 - RNA, 72 nt, Homo sapiens
caggcgaccacgccacgcccggaggcgacgacgagagggaggaggagaagggcagagacggagaagccgaag

SEQ ID NO: 160734 - RNA, 75 nt, Homo sapiens
ggcagagcgagccggagaagagggggcccggggggaggaggggcaggcccggcggcggacccggacgacaccaaa

SEQ ID NO: 160735 - RNA, 65 nt, Homo sapiens
ggaccccgcggcgcccccggcccggagcaacgagcgcagcgccggaaaaccaagcaccgacggaa

SEQ ID NO: 160736 - RNA, 70 nt, Homo sapiens
gcacaagacgaaaacgcaaaaaacaccacaacggagagggagaaacaggcgggcaggaacgcaggaaaag

SEQ ID NO: 160737 - RNA, 42 nt, Homo sapiens
ggaaacaaggcccaggccaagagaggacggggacgggcccca

SEQ ID NO: 160738 - RNA, 77 nt, Homo sapiens
aggcccgggcgcggggaagcagccgccacggaggcaaagcagccggccacacaagagggcgcggagaagagccggag

SEQ ID NO: 160739 - RNA, 78 nt, Homo sapiens
gcaggacaggacgaagccggaggaggcggcagaggacgccccagagcagcgcggccagcggcggagaaaccaccacaa

SEQ ID NO: 160740 - RNA, 70 nt, Homo sapiens
gggaaggggaaacccaaacaacacccgcaccgggcgccccgcagggccggagacaccagaaaccgggggc

SEQ ID NO: 160741 - RNA, 55 nt, Homo sapiens
caccaagccaggggacagacaaggaggaagggaaccccggaaagagaaaagcaga

SEQ ID NO: 160742 - RNA, 60 nt, Homo sapiens
gcggaccccagggccggcccggaggcgggacccagggcccaggccagaggcacggacgac

SEQ ID NO: 160743 - RNA, 78 nt, Homo sapiens
agagagacacggccgaaggcgaacgccgcggccaaggagccgccaaagccagacggaagaagacggcacgggaccccc

SEQ ID NO: 160744 - RNA, 68 nt, Homo sapiens
ccaaaacaaagagccggcccaagacaaggacagcagaccacagcccggcaggcccaaaaacccaaagg

SEQ ID NO: 160745 - RNA, 77 nt, Homo sapiens
ggcaacaggggacagccaggcaccagggccacccccagaagcgaaaccccaccacgcggcaggggccgccgaggaaa

SEQ ID NO: 160746 - RNA, 74 nt, Homo sapiens
cccgccacacccgacccgccaagaagccgcgagcaccacagggagaaccaggggaaccggaagacgcgaagacg

SEQ ID NO: 160747 - RNA, 79 nt, Homo sapiens
aagggcgccagcccccccgcccgcgcgccccggagcgcgaaggagcgcggacgccagggaccccagaacgaaagaagga

SEQ ID NO: 160748 - RNA, 84 nt, Homo sapiens
cgagaagcagcggcgcagaagaggcagacccggaaggcagggcagaagagcaggcaggggacgcagggagagacacagaggagg

SEQ ID NO: 160749 - RNA, 75 nt, Homo sapiens
gaaaaccaaagagccggggacaagggggagccgccaccaaaagcagacggaaaacccacggggaagaccacaccc

SEQ ID NO: 160750 - RNA, 76 nt, Homo sapiens
gaagggaggaaaagggcagggacagcgcaggcagcagaaagcccaagcgcaaaaaaaaggccccaacaaaacacag

SEQ ID NO: 160751 - RNA, 84 nt, Homo sapiens
gaccgacccaaccgcacgggaaacggggaggacgcgagcggaagagaagcaaaaagacaaggaggaaagcgacaccacgaccgg

SEQ ID NO: 160752 - RNA, 62 nt, Homo sapiens
cacgcgagacgcaaacagggcgccaaccagaggaggcaccaaaacccccacccagcgcgagc

SEQ ID NO: 160753 - RNA, 75 nt, Homo sapiens
ggagaagccccgagcaccccacagaaggagaagcgagccagagcggaggaggggcacaagcgggcaaggggcggg

SEQ ID NO: 160754 - RNA, 73 nt, Homo sapiens
gacgggcaagaagagacacgggacacggaacgaggcacgagaagagaagcccagagcaaaacaccccaaacca

SEQ ID NO: 160755 - RNA, 69 nt, Homo sapiens
gcacagcccgccgaacccgaaaggaggccccacggcagaccgcggccccacacacaccaccacaacgag

SEQ ID NO: 160756 - RNA, 83 nt, Homo sapiens
ggcggaggccgagaccagacgcggagccaggccgaggggcggacgcggccgaacacagaagagaacccgaacacagcaggagc

SEQ ID NO: 160757 - RNA, 83 nt, Homo sapiens
gcaggggaggcagagaggaagaagaccccacggcacaaagacggcgaagaaacaggaagaaaagagggaaacaaagcaaggac

SEQ ID NO: 160758 - RNA, 68 nt, Homo sapiens
agcgcggcaggagcgggcccgcacagggacccccggggacccgccaggcagagcaagcaggagaacaa

SEQ ID NO: 160759 - RNA, 98 nt, Homo sapiens
aggaccaagaaccacggacaagaccgagacacccaccacagcagcagggcaccgaccgaaccaggagggcccaaggagacggaaccgagaccggcacc

SEQ ID NO: 160760 - RNA, 51 nt, Homo sapiens
acagcgagaaccagcccaagaccagggaagaggccaagaaccagaggcagg

SEQ ID NO: 160761 - RNA, 60 nt, Homo sapiens
ccaccacagacgaagaccagaaacaggacaagaacagaagccccaacaacgaccggggac

SEQ ID NO: 160762 - RNA, 75 nt, Homo sapiens
cggcgcgccgggggccggccgcgccggccggccgggaccaggcccgggcccgccggccacaccacacgcccccgc

SEQ ID NO: 160763 - RNA, 80 nt, Homo sapiens
agccgacgcgcagaaagaaggggaggaggacagaggagggcggaaacagcagaagagcgcggcaagcggccacgacgaag

SEQ ID NO: 160764 - RNA, 72 nt, Homo sapiens
gggggcggacaccacaagaagggcgccaggcccagaagggcagagacggcacccgagaaggcaagaccgaac

SEQ ID NO: 160765 - RNA, 71 nt, Homo sapiens
gggacaagggccagcggcccagcaaaaggaaaagcaacgaacaccacagacgaaagccaagggaacgcaaa

SEQ ID NO: 160766 - RNA, 41 nt, Homo sapiens
gccccaggagcaaaaaaaggacagagaagacccagaaggca

SEQ ID NO: 160767 - RNA, 80 nt, Homo sapiens
ccccgagagcgcgacacaggaacaaggggagaagaagcccagcccacgcgacgaaaaggcccccagcgcgaggagaggac

SEQ ID NO: 160768 - RNA, 71 nt, Homo sapiens
agagagcgagcgagggggggcgcgccggaaaccggagcgcgcagcagagcagaaaaccaaggagcaggccc

SEQ ID NO: 160769 - RNA, 53 nt, Homo sapiens
cggcccgacaccagccgcacggagccaccaccaccccgagagacggaccggac

SEQ ID NO: 160770 - RNA, 65 nt, Homo sapiens
gcaaaggaaacaagaaggacccaaaagaaaagaaagccgcaggcagacaccagccgcacccaagc

SEQ ID NO: 160771 - RNA, 82 nt, Homo sapiens
ggcacccagcagccaacgcccagcggaccagggccacccgcaggcccacaaccgggaaacggaacgccaagcgaagaagaac

SEQ ID NO: 160772 - RNA, 73 nt, Homo sapiens
gcgaggcgcccccgccccagcgccccacaaggaaagacgccaaggaagacccagaggagcaagagagccaccc

SEQ ID NO: 160773 - RNA, 81 nt, Homo sapiens
aaagaagaagcaaaaacccccgaaagcgggaggcgggcggcggggcggcacggcggccgccacacaggggagccgccacgc

SEQ ID NO: 160774 - RNA, 80 nt, Homo sapiens
aagcgggcccccgccccagcaggacaaacgcacccggcgaaggaccaagggagcgagccccggagacaccgcaggcccgc

SEQ ID NO: 160775 - RNA, 68 nt, Homo sapiens
gaccaagaaccagaacaacgccagaaagaaagccaccagagagggcagccggggagaagaaacgaaga

SEQ ID NO: 160776 - RNA, 68 nt, Homo sapiens
accagcaaaacagcccagagcaagacgaaagggggagaacaaggagcagcaaggcagacccaggaagc

SEQ ID NO: 160777 - RNA, 80 nt, Homo sapiens
cgaacggggccagcgccgcgcccggggccggcgcccgggccaccggccgcagacggcaaacagaagggcgcaggaaaagg

SEQ ID NO: 160778 - RNA, 64 nt, Homo sapiens
aaagaaaaaagcagaagacacaagaggcgccggcgggaaaacaacagccgccccacagcccgcg

SEQ ID NO: 160779 - RNA, 76 nt, Homo sapiens
aagccagcaagacggagcccgaggaaagcagaaaggcgagagagccaggccggaagccaagcgggccgcccggaga

SEQ ID NO: 160780 - RNA, 38 nt, Homo sapiens
agcccgccgggccagaggaacccgaggagcggcccgag

SEQ ID NO: 160781 - RNA, 65 nt, Homo sapiens
cgcagacaacagcacacccaggacccgcgccagggccgggaccgggacagaggaagggcgccggg

SEQ ID NO: 160782 - RNA, 75 nt, Homo sapiens
aggggaggagcagcagcgcggcagagcagggggccgacagcaggaagcaccagacaccaaccacagcgcagcagg

SEQ ID NO: 160783 - RNA, 82 nt, Homo sapiens
ccaccgaggacggggacccgcaagggccacacggggagcgcgcaagaacggacaggcgcgagcaccgggcgacccgacacca

SEQ ID NO: 160784 - RNA, 51 nt, Homo sapiens
cgccccgacaccaggaaaacccagaaagcaaggcccggcgaccggcaggga

SEQ ID NO: 160785 - RNA, 63 nt, Homo sapiens
aaaaggaaggggcccgagcagcagcgaagggaaggggaggcacagccagagaacaacacacac

SEQ ID NO: 160786 - RNA, 41 nt, Homo sapiens
agccagcagcccaaccgcagaggcccaggcggccgagccgc

SEQ ID NO: 160787 - RNA, 71 nt, Homo sapiens
acggcaggacacacgcggcgcgggaagacggaccgcaggcaggagacagagagaaagcaacagcaggccag

SEQ ID NO: 160788 - RNA, 70 nt, Homo sapiens
caacagacgaaaaagcagaggcaagaaccaggaaaaacggagccgagaccaagcacgggaagcccaacag

SEQ ID NO: 160789 - RNA, 77 nt, Homo sapiens
ccaccaggcggcgcccccgcagcccgcacccacccacgacaggacggacccggggggacaagccaacacgaacggag

SEQ ID NO: 160790 - RNA, 77 nt, Homo sapiens
cacagaacagaaccacagcaacgccgaacagggcaaagagagccagcaagacggcagccacgaaagacgacaacccg

SEQ ID NO: 160791 - RNA, 44 nt, Homo sapiens
cgaacgggcaacacacacgcacggccagaagccaaggagcccag

SEQ ID NO: 160792 - RNA, 81 nt, Homo sapiens
cgaaagggcccagcagacgaccggacggaaaggcaacagcaaggcagagagcagagacggcagccaaagggcggacggaag

SEQ ID NO: 160793 - RNA, 66 nt, Homo sapiens
gggagagaagaaagccaacaagaggaagcaggaaaaacaaagaagacccagggaaacaggccagcc

SEQ ID NO: 160794 - RNA, 89 nt, Homo sapiens
cgcgaggccggagaaacaggcgccgcgggcccgcgcccggccggacccgggcccgagaagacgaccccgacgcaggccaggagccgcgg

SEQ ID NO: 160795 - RNA, 77 nt, Homo sapiens
aagaccagcgaacgaaaaggaaagaaaacgcagcgagacaacaggaaaaggaccagggaaaaacagacagacacggc

SEQ ID NO: 160796 - RNA, 73 nt, Homo sapiens
acccagaggcaacaaaggcgagaaaacgaaggaaggaggacccgaggagagagaagacggaaaggaaacacgg

SEQ ID NO: 160797 - RNA, 61 nt, Homo sapiens
gacaaagcgaaagcacaccaagagaaggcaccggccaaagggggcgaccgggacaggacga

SEQ ID NO: 160798 - RNA, 74 nt, Homo sapiens
gccaagcaggagacagccaaggggagaccacaccaagcgggagacacaccacgccaaggggaaaagcacagggc

SEQ ID NO: 160799 - RNA, 77 nt, Homo sapiens
cacgcgggcagggaacaggcggagcggaaggcccaaaccacccagaccaggaaacaagagagcacagaagccgacaa

SEQ ID NO: 160800 - RNA, 74 nt, Homo sapiens
gcgggccgcgagcggggcgacccgaggggagcccagcagcgacagcggcggggagacggaggaagacacgccag

SEQ ID NO: 160801 - RNA, 81 nt, Homo sapiens
ccaccaagggcaccaggagaccaccagacacgagaggcgagggacgacagagcaagcggcagagggcaagcgggaaaaaga

SEQ ID NO: 160802 - RNA, 56 nt, Homo sapiens
ggccccccagccagggaacgaaagaacagccaaagccaaagaagacaaaaaaggga

SEQ ID NO: 160803 - RNA, 75 nt, Homo sapiens
gccgggccagcgccagcccaggagcaggagcgcccagacaggcgaccggcccgaggaccgccgcacgaccaaacg

SEQ ID NO: 160804 - RNA, 88 nt, Homo sapiens
aaaccccaagaggaagacaaacaaccagcccagagcgcagccgggagaggacgacaaaaggaacagcgcaaaccaagccgaaccaagc

SEQ ID NO: 160805 - RNA, 57 nt, Homo sapiens
gcaaagaaggacacagcacacacacgcagaggccgggagcgcaagaggacagacggg

SEQ ID NO: 160806 - RNA, 68 nt, Homo sapiens
cccaacacgagaaacaaagggcggagaacggaaaagcaccaggaagcagagaggaccgcagaagggaa

SEQ ID NO: 160807 - RNA, 72 nt, Homo sapiens
acccagaccaacaaagcagaaccagaaaaccacgacacccggcggacgagcagacacaacaccagccgaaca

SEQ ID NO: 160808 - RNA, 80 nt, Homo sapiens
gccccagggccggacacacgggcagccacccggcggcggggccgcagcccaaggaagacaaaacagaggagaccagacca

SEQ ID NO: 160809 - RNA, 73 nt, Homo sapiens
gaacaccgagacacggcaagcgggaaacaaagacccgcggaggaagggaaacccagacgacaaggaaggccaa

SEQ ID NO: 160810 - RNA, 86 nt, Homo sapiens
gagcgcgcggggccagaccacgagcgccccccccggcgagcagagccgggcaggccacgcagaacaagacagggaagaggccgccg

SEQ ID NO: 160811 - RNA, 71 nt, Homo sapiens
ggacggacccagcacgaggaggcgcgaggagaggccacaagaccccggagagggggaaacagaaagcgccg

SEQ ID NO: 160812 - RNA, 85 nt, Homo sapiens
aacaaagccaacagacacgccaccccaaggagcacgcagggcgagggaacagagagaaacccggcaagaaaaggaacgccgcgcc

SEQ ID NO: 160813 - RNA, 71 nt, Homo sapiens
ccagcaggccgcggacagagaagaggacgcggagacaagaggcgagcccccgccccgggaaagcggcgcag

SEQ ID NO: 160814 - RNA, 80 nt, Homo sapiens
gcggcacgggcaggggccaccgggggacggccaccaagacgccaccggcaggaccacccaccaccgaggacccacagaag

SEQ ID NO: 160815 - RNA, 60 nt, Homo sapiens
cggacggcacagcccgccgaacccgaaaggaggaaaaccaacacagcgggaggagcgacg

SEQ ID NO: 160816 - RNA, 79 nt, Homo sapiens
cccacaaaccccacccacacgccaaaaaccacaagccgccgggaaccaaaggaagaaggcggcgcacggagaggcccgc

SEQ ID NO: 160817 - RNA, 74 nt, Homo sapiens
gaagacccagggacagggaaagcaacgcacccaggaacggagggccaagggagaacacccagcagaggcgcagg

SEQ ID NO: 160818 - RNA, 77 nt, Homo sapiens
ccaaaaggggaacagagaaacaacaggccgagcaaggagagaacgcgagggaaggaaccagcaccagacagaagacg

SEQ ID NO: 160819 - RNA, 46 nt, Homo sapiens
gggacgcggcggcggggagagcggcggcccgcggccaaggcagcgg

SEQ ID NO: 160820 - RNA, 55 nt, Homo sapiens
aaacaaaaaaaggcggcacaacacaagcaagagggacagggaggacccagaagag

SEQ ID NO: 160821 - RNA, 77 nt, Homo sapiens
agcccaaggccacaccaggcagcccccaaacccggcccagcgccaaggaaagaaaacccagaagacacgagaaaaac

SEQ ID NO: 160822 - RNA, 97 nt, Homo sapiens
cagaaggaagaagacgaaaaaccagcggcccagccccacagcggaggaaagcaggcagaaaaagcaggagcaccagcgcaagcacagaacagacaag

SEQ ID NO: 160823 - RNA, 73 nt, Homo sapiens
cccccggcggacgcggagccccgccgaagaacccgaggcaccagaagcccccagcgggaaaagagcacccaag

SEQ ID NO: 160824 - RNA, 73 nt, Homo sapiens
cgacccaaagggaaaacagaaacagggaggacagagcccaggaccaagagcacaacaacacggaccagaaaaa

SEQ ID NO: 160825 - RNA, 65 nt, Homo sapiens
ccggagaacgcgaggcagagcgggagcgcgcagccaggaccaccgcggaagagaagaacgacgag

SEQ ID NO: 160826 - RNA, 91 nt, Homo sapiens
agccacggagaagaagcgcggcccacacacccagccgggacgcaggagcccagcgacgccacgagcgcccagggaaagacaagacacagac

SEQ ID NO: 160827 - RNA, 81 nt, Homo sapiens
ccgcggcgccgccgcccgcagccccgagaccgcaggccccagggcaggggcccggagagcgcgccccccaggacccagacc

SEQ ID NO: 160828 - RNA, 65 nt, Homo sapiens
agggaaaacgccgaaagaaaaacaccaaaccaaacaccaaaggagcgacaagcaccacgcacaac

SEQ ID NO: 160829 - RNA, 81 nt, Homo sapiens
gagccggaagaggcggcagggggaggggaggggagggggcgcggggaacgggagcggagaggcgcaggaggacgcggcaca

SEQ ID NO: 160830 - RNA, 78 nt, Homo sapiens
cggacccggggacaggcgccccgcacccccagcgacgcaacgaaagcagaaaacagacacagaccccagagaacgcag

SEQ ID NO: 160831 - RNA, 79 nt, Homo sapiens
gaagcggaaacaagcggaaaggacacaggagggaaagaagaagacacgacacccacacgccgcggcccaccggaaccga

SEQ ID NO: 160832 - RNA, 70 nt, Homo sapiens
acaagcggagaagccggccgagaacgcgaacgccaccaaccgaacgggccggaccgcaagaggaacccac

SEQ ID NO: 160833 - RNA, 64 nt, Homo sapiens
ccagcgcagcagagcgccaagacggcaagaacggcaggacccacagaacaagcaccggaagagg

SEQ ID NO: 160834 - RNA, 68 nt, Homo sapiens
gaagcgggacaaaaagccaaagagaccccccggggcggcagcgcaggcacgacaagagcacgagccca

SEQ ID NO: 160835 - RNA, 78 nt, Homo sapiens
aagaaccagcaaagagagaaaaccacacgccaaacgacacacaccccaaaaggccagcaacagaagaaagcaagcacc

SEQ ID NO: 160836 - RNA, 71 nt, Homo sapiens
gaagggcaaagccgaagggggagaaaaggccaagggcaggagacacgagacgcaggaagcagcgaaagagc

SEQ ID NO: 160837 - RNA, 69 nt, Homo sapiens
gcagaaagacgaaggcgaacaggaacaaagagagagaagaaacagccaacccgcaacaacggcagaaga

SEQ ID NO: 160838 - RNA, 74 nt, Homo sapiens
caaccacagacacagaccgaggaaccaaccagaggcggggccaaagcacagaacaaacccaggggcagaaagca

SEQ ID NO: 160839 - RNA, 83 nt, Homo sapiens
gccgacccaccggagccggcgcagccccccaaccagaagccaccgggccaagcacaacaccagagggcagcaggagcgcaggg

SEQ ID NO: 160840 - RNA, 58 nt, Homo sapiens
cgccagcagcgggccgcgccgcgcccagccgagcggggcccggcgcacccaccaccgc

SEQ ID NO: 160841 - RNA, 72 nt, Homo sapiens
aaagccacgaagaaaaggggaaggaggcgaacaggaagaccccgaaagcgaaaacagcaggaacgcagaccc

SEQ ID NO: 160842 - RNA, 65 nt, Homo sapiens
ccccgcggacacaagaacacggcgggccaagacacccaaggaggcccgaggaggcagaggaggag

SEQ ID NO: 160843 - RNA, 80 nt, Homo sapiens
cagggcggaagagggcagccggccacggagcgccgcaggcgaggaaaaccaccacacaggggaaacacccagacaacaca

SEQ ID NO: 160844 - RNA, 55 nt, Homo sapiens
caccgagggaccaggacaggcaaaaagacagccgaaaaagggcggaaaagcagaa

SEQ ID NO: 160845 - RNA, 83 nt, Homo sapiens
gccgcccgggccgggggacccgcccgccaggccaccaagaggagcggaggagccccaggaaggcgccaaaggggcagaagaaa

SEQ ID NO: 160846 - RNA, 68 nt, Homo sapiens
ccaggaacagacaaagcagccggccccgagcgaggcaccggacccgacacccccggcaccacagccac

SEQ ID NO: 160847 - RNA, 74 nt, Homo sapiens
gccagcgccagacggacgaggcggcggagaacaagcggcaggaccacaagaacaggaggagccggccgaggcgg

SEQ ID NO: 160848 - RNA, 81 nt, Homo sapiens
ggcagcgggcgcggcgggcggcgcgcagagagaaagagccgcagacgcacagcaaccaccggacccgaaggccaccaccca

SEQ ID NO: 160849 - RNA, 71 nt, Homo sapiens
acagcaacacggccgaaaccccaagcaccaccaccaccccggaaaccaggagcccaaaagaaacagggcgc

SEQ ID NO: 160850 - RNA, 74 nt, Homo sapiens
cgccccccccgcgggaaccagccgcccggggcaaggaccccaacgcccggccgcggccccgccccagccgagcc

SEQ ID NO: 160851 - RNA, 69 nt, Homo sapiens
cacaagccgggaagggagcaccgagaggcagacaagacacccgcaggcacgggccgaggagggcaggca

SEQ ID NO: 160852 - RNA, 40 nt, Homo sapiens
cagagccagagcacacgcgcggccgcgcgccgaacccgag

SEQ ID NO: 160853 - RNA, 84 nt, Homo sapiens
aggagaaggagaaaagggggaaaagcccaggaggaagcaggagcagcccaagcgccccccaccaagccagcgccagaaaaaaac

SEQ ID NO: 160854 - RNA, 79 nt, Homo sapiens
gcgggccagcgacccgcgccagcgcccagggggggaaaccaccggggaccccaggcagcgcgcagaagaaccggaagac

SEQ ID NO: 160855 - RNA, 76 nt, Homo sapiens
aaaagcagcggccggacagcgccacggcgggccgcgggaggacaccacccacaggcccccacagagagcacacaaa

SEQ ID NO: 160856 - RNA, 37 nt, Homo sapiens
aagaaagccgacagcaaggacaccccccaggcacagc

SEQ ID NO: 160857 - RNA, 68 nt, Homo sapiens
aaccaccacaacccaggaaggaaaccaaggggcagacccaaaaaacggggaacggcagcgggcacgag

SEQ ID NO: 160858 - RNA, 85 nt, Homo sapiens
aggccaagaagggcggggagaccagaacaacccccacgccagcacagcgccccccgagggacaccacccggacacaacaagagga

SEQ ID NO: 160859 - RNA, 67 nt, Homo sapiens
ggccaggggccagggcaaaggcggacagggggagagagagagcacggagcggaagaaaacgccccag

SEQ ID NO: 160860 - RNA, 87 nt, Homo sapiens
ggcggagaggacggagcggcgagcccccgcggcgacagacgcgcacgggaacccacaggccgcgcggaacggccagaggagacggaa

SEQ ID NO: 160861 - RNA, 63 nt, Homo sapiens
ccggacgaacaaaacgaaggggagaagcagaccgcaccaggcgggaccccgaaaaagcccaaa

SEQ ID NO: 160862 - RNA, 70 nt, Homo sapiens
ggcggacgccaagaccgggaccgggcgccacgcgggggcaagacgaagggggaagcgcccgggaccaacg

SEQ ID NO: 160863 - RNA, 76 nt, Homo sapiens
gccccacgagagaacggcacacgcgagcggaaggcccgccccagcgggccaccgcggcacacgaggaggcggccag

SEQ ID NO: 160864 - RNA, 78 nt, Homo sapiens
ggacccccagggcggccagacccgaagccgcgccccgcaggcacccgggcccccgcccgccagaacacaaagcggaac

SEQ ID NO: 160865 - RNA, 67 nt, Homo sapiens
agaccagccacaaaagcaaagaggcccgaagcaaagaggcaaccagcagcaaccagaaccccgaccc

SEQ ID NO: 160866 - RNA, 64 nt, Homo sapiens
accaggagcgaagagcgccgacaagaaggagaggacagccgcagacaggagccgaaagccacca

SEQ ID NO: 160867 - RNA, 77 nt, Homo sapiens
agggccggcccccccaggacaacccagaggcaacaaaggcgagggcaggcgccccaacccaagccagaggaggcacc

SEQ ID NO: 160868 - RNA, 77 nt, Homo sapiens
acagagggggaaagccaaggaaaaacggagagccacaaaaaaggaagcgaaaaaaccgaagcgaaagacggcacccc

SEQ ID NO: 160869 - RNA, 78 nt, Homo sapiens
cccaagaaaaagcgaaggaacgcagagcgaagacaagcgccgagaaagaaggcccaaaagagaaggacaggagaaaca

SEQ ID NO: 160870 - RNA, 80 nt, Homo sapiens
gagcggcggcggcggcagcgggcgggccccgagagcagcagcgggcagacaccgcaaaagcagaaccggagagagcacag

SEQ ID NO: 160871 - RNA, 77 nt, Homo sapiens
gccaaggacccgggacagggaccagcgggaaggcagacagcgagggcgacgaagacgagcacaacacacaaaggcga

SEQ ID NO: 160872 - RNA, 74 nt, Homo sapiens
gagacgaggccggcaacccacagcacccgcagcacgaaggaccacagcgacacagaccagaagcgggcacagcg

SEQ ID NO: 160873 - RNA, 65 nt, Homo sapiens
ccggccacgcaagccgcccccagcacacgacaggaacgggggccccccccgccccccccgccacc

SEQ ID NO: 160874 - RNA, 107 nt, Homo sapiens
gccacccggaccgcgagagggacacccagcgacgccaggacacccgggaagccgaggaaggacgcaaaacgggagagcagagagagagcacgagcaaagaaaaacaa

SEQ ID NO: 160875 - RNA, 73 nt, Homo sapiens
aaccaccgggcgccggccagcagggccacccgcacggcagcaagaggaaagccgccggggccaggggggccgg

SEQ ID NO: 160876 - RNA, 78 nt, Homo sapiens
ggagaccgcggaggccgacaggacgggcgccgccccgcgcggcagggaggagagcaagaagagggcgcccccaaaggc

SEQ ID NO: 160877 - RNA, 76 nt, Homo sapiens
cgaaccaaccaaagaaaaaacacaggaacaaagcccccacacaaggagggggaaccagccaaaccaacgccgacgc

SEQ ID NO: 160878 - RNA, 80 nt, Homo sapiens
gccccaccccgcaccaacagcaggaaggcaacagcccccaggggagcaaccagggagcaaaacacaccggaccagcagaa

SEQ ID NO: 160879 - RNA, 83 nt, Homo sapiens
acggaggccaagaccgcagacacacagccgcgcacccccaccaaaacgcgagcagcgcccaggaaaaggccggcccaggcgga

SEQ ID NO: 160880 - RNA, 81 nt, Homo sapiens
gcggagcgacgggcggcgggccagggggcgcggggccgggcgcgcgagggacagcagaaaggagaggcaggagcaaagagc

SEQ ID NO: 160881 - RNA, 82 nt, Homo sapiens
agcgacccgggccggcaggaaacaaacagaagcgcacgagaacccaggccgcaaggaacgaaacccaacagagcgccagacc

SEQ ID NO: 160882 - RNA, 84 nt, Homo sapiens
gcgcgggcggcgggaccggggaagacgccggccgcagccacaacacagcagcccccaggagagcaggaaaagccggagaagcca

SEQ ID NO: 160883 - RNA, 71 nt, Homo sapiens
caacaacgacagaggcagacaacacaaaaggagcgcccaaaggacgcggaacagcaccacggccaacaccg

SEQ ID NO: 160884 - RNA, 83 nt, Homo sapiens
gcgcaggagcagaccggagccggaggaagagaaggcagcggacgaggcaggcgggcccgcggcaaggccacaaccggggcgag

SEQ ID NO: 160885 - RNA, 79 nt, Homo sapiens
ccccaaaggcgagaacaggcggacgaggagcacaaccagacagggccaccgcaggggagagcaccgcccaccacgccac

SEQ ID NO: 160886 - RNA, 83 nt, Homo sapiens
ggggccaacagaggaaggaacaaagcgccccaaccgagagcaccaccacaggcccaccgcggcagcgggccggcagaagcgag

SEQ ID NO: 160887 - RNA, 51 nt, Homo sapiens
cgcagggcgcccccgggcaagaccaagagcagccaacaaacagacagagaa

SEQ ID NO: 160888 - RNA, 73 nt, Homo sapiens
ggcaaccaaagggcaccaacaaccgcggaagcgcaacaagggcaaaccgacacaaagcgagagggaacaggac

SEQ ID NO: 160889 - RNA, 76 nt, Homo sapiens
ccgcgaaagcagcgggagggcggcgacggcggcgcgaggaccgaccgggcccgcggacgaagaaggcacccccccg

SEQ ID NO: 160890 - RNA, 67 nt, Homo sapiens
acaggaggcgcggaggacgccccaccgccgacgcccccagccaccaggcagaggagcggccgacccc

SEQ ID NO: 160891 - RNA, 56 nt, Homo sapiens
accgcagaaggccggagacaccagcagaaggaccaaaccaccacggagcagagaaa

SEQ ID NO: 160892 - RNA, 80 nt, Homo sapiens
acggacgcgcgagacaagaggagcgcaggccaagcagaaggcagccgcggagcgcgcagaaccacaaccggccaccaagc

SEQ ID NO: 160893 - RNA, 62 nt, Homo sapiens
cagccaccaggagcccgagagagaaggggaagaaggggaggccgaaagccagccaaaagccc

SEQ ID NO: 160894 - RNA, 77 nt, Homo sapiens
caccagacgccaccacgggcacccgcgccgggcaccgaggaccagccaagacagagacccgcggcgcggcggaccag

SEQ ID NO: 160895 - RNA, 60 nt, Homo sapiens
gacggaggaggggcggccaagcgcggaagggcggagaacggaaaagcaccaggaagcaga

SEQ ID NO: 160896 - RNA, 66 nt, Homo sapiens
aacgggagaaagcacgggaggagagggccgaaaaggaagcacagggggcaacagaagaggcgcgag

SEQ ID NO: 160897 - RNA, 74 nt, Homo sapiens
ccagggcggacgggaaagcagaggcacacaggccccgagaaccaagagaacccccaccaaccaggcccggccaa

SEQ ID NO: 160898 - RNA, 93 nt, Homo sapiens
cagaaaggggggccgacaggcgcccacacccaagcaggcccgggcccccgcggaggacagccaccaaggcgggaagagacaagcccccggagg

SEQ ID NO: 160899 - RNA, 54 nt, Homo sapiens
ggcccccaggcccaaagcggcggagagagcaccgcgcgccgcgcccccccacca

SEQ ID NO: 160900 - RNA, 58 nt, Homo sapiens
ccagcggagcgccgaggcccaaggagaggccagagggcaggcgacccaacgagaggcg

SEQ ID NO: 160901 - RNA, 61 nt, Homo sapiens
ggcccagcaccccgagaaccgcaggagccagagaacccgaggaaaggaggccaacagaaag

SEQ ID NO: 160902 - RNA, 78 nt, Homo sapiens
caccgacgaggagaggcggcgagccaagcaggcggagcgggaccagcccgaagcgaccagagccgcgccaaggaaggc

SEQ ID NO: 160903 - RNA, 88 nt, Homo sapiens
gcggcccccgggaaggagcgcccggcggagaagaccgaacggccccacagccgggcggggggaaagacaagggcaaaggaggaagaac

SEQ ID NO: 160904 - RNA, 73 nt, Homo sapiens
cgacgggcagcgacggacagaacacaccggaccaacacacaaagaccacccaacccaacgacccggacaagcc

SEQ ID NO: 160905 - RNA, 92 nt, Homo sapiens
ccccggccggagccacgcagccgcggcccggagccccggggcggcggacggccgcgggcagagagagccggaggaggaggacgaggaggagg

SEQ ID NO: 160906 - RNA, 70 nt, Homo sapiens
acaaaaaagccaggagggagcagagggcaaacgcagggaaaagcacagggccaggaagcagagggacagc

SEQ ID NO: 160907 - RNA, 74 nt, Homo sapiens
caggacaccccgaagccgagaaagggcggagaacggaaaagcaccaggaagcagagaggaccgcagaagggaag

SEQ ID NO: 160908 - RNA, 74 nt, Homo sapiens
ggagacaccggaggacgaagagggggaggaaagaagaccgccaaagagaaaaaacgcgcagagccagagcgaac

SEQ ID NO: 160909 - RNA, 71 nt, Homo sapiens
gcccccgccaagcggcgacccaccccaagaccgagcaccagaccgcagcccaccaaagaaaccgcccgccc

SEQ ID NO: 160910 - RNA, 78 nt, Homo sapiens
gggccgccgcggcgcagaaaacagacgacgaggagacccggggaacggggagaggcggcggcgccacagacgcgggca

SEQ ID NO: 160911 - RNA, 82 nt, Homo sapiens
gcggccgaacgaggcgagaacgcgcagaccggggagggaaagaaacggggagcgcaaggccaagaaagaagcaggagaggca

SEQ ID NO: 160912 - RNA, 72 nt, Homo sapiens
gaacaaacgagcacgcaacaccgaccgccggaggcggcccgcaaaggcggaacgacccccaggggcgggccg

SEQ ID NO: 160913 - RNA, 55 nt, Homo sapiens
gcgcagaagagaaaaaaaaacaggcaaggaaaggagccgcagggaaagggggcgc

SEQ ID NO: 160914 - RNA, 103 nt, Homo sapiens
ggagccagaggagaggcgcccccgccggccgccgcgccgcccggcagcccggcagaacgccaaaagacgaacacaaagggaaagaggagaggcacccgaaagc

SEQ ID NO: 160915 - RNA, 73 nt, Homo sapiens
gaagaccacacccggaaggaacagcccccccagccgaacgaaacagggcgaaaaaccgaaaaagcagacaaga

SEQ ID NO: 160916 - RNA, 41 nt, Homo sapiens
ccccgagagcgggacacaggaggcagagggcaggagcgaga

SEQ ID NO: 160917 - RNA, 74 nt, Homo sapiens
cgagccggcgccaaggagggccccaaggaccgagagccccagagcagagccaggcaagaggcccgcacaaccgc

SEQ ID NO: 160918 - RNA, 80 nt, Homo sapiens
ggagacagaggacgagccacgggccgaagaaggcgcgaaggcggccacgagggaaaccaaaagaagggaaaaaaggaaga

SEQ ID NO: 160919 - RNA, 50 nt, Homo sapiens
cggacccagccccggacgaaaccacaaaacgcccaccagcacagcggcag

SEQ ID NO: 160920 - RNA, 54 nt, Homo sapiens
ggcgaaacacaaagggaaaacgaaggaaggaggacccgaggagagagaagacgg

SEQ ID NO: 160921 - RNA, 74 nt, Homo sapiens
acggcagaccacagaagcgccaagccggccaaggggaaaaggcgaagcacacaagagcggcgaaggagcacgaa

SEQ ID NO: 160922 - RNA, 72 nt, Homo sapiens
gagcgcccgacccgcgggccgggcgcagccgccgccccgccccagaaggggcagagggcaggagcaaaacaa

SEQ ID NO: 160923 - RNA, 80 nt, Homo sapiens
gccccaagagcgcagacggccagccgaaaccacgcgaagaaacacaaacggaaaagcgaccagacaggccagcagccaag

SEQ ID NO: 160924 - RNA, 71 nt, Homo sapiens
acgccccaacccacggagccaaagagaaagaggaagaggaccccaaagcaacaccagagacaggaaagagg

SEQ ID NO: 160925 - RNA, 69 nt, Homo sapiens
agacaagccaggcggcagccgagaccaggaccaaaggcacacccagaagccacaggagaagcaagaggc

SEQ ID NO: 160926 - RNA, 79 nt, Homo sapiens
ccagagagcccagaacggacaaaaaagccaggcacaacaagagaacagagaggcacccagacgccccacagccagccgg

SEQ ID NO: 160927 - RNA, 72 nt, Homo sapiens
gaaagcagaccaaaccagaacaccgcaacgaaccaaacaaaggaccgggagaggaaacgggacaagcaaaca

SEQ ID NO: 160928 - RNA, 50 nt, Homo sapiens
ggaccccagagcaccaagaggacaacggcaagcggagaagagcaaggccg

SEQ ID NO: 160929 - RNA, 60 nt, Homo sapiens
cccgaaaccagaagggggaaagagggacggaaacagacgacgacacggacaggacggcgg

SEQ ID NO: 160930 - RNA, 71 nt, Homo sapiens
ggaaacacaaagccggcacgcgcgcgagcacccagccaaacccaggcccgagaagaagaggaaaacccacc

SEQ ID NO: 160931 - RNA, 65 nt, Homo sapiens
agacgcggcacagagagggccgggagcgcgcagccagggaaagcaggcaggagggagagcgccga

SEQ ID NO: 160932 - RNA, 79 nt, Homo sapiens
ccccggcacaggagaggcgcagcccgccccccggccggcccaggaccgaacccgccgggaggggcgaccaagagcaccg

SEQ ID NO: 160933 - RNA, 72 nt, Homo sapiens
caagacagagcaggggggccgcacacagcaggaaagaggaaggcggccgggaggcgacacggacaagaaccc

SEQ ID NO: 160934 - RNA, 69 nt, Homo sapiens
gggcgacggcgcccggcaaggacaagcaccgacccaaaacacgaagaaaaggacacccgcgccaaagca

SEQ ID NO: 160935 - RNA, 72 nt, Homo sapiens
aacagcaaacagcaaagcgacagagcagaggccaggcaggacagacagcagcagggcacgccagccaaaacg

SEQ ID NO: 160936 - RNA, 54 nt, Homo sapiens
ccgcggcgaggagcgagcagaggcaccccagccgacgccacacaggcacaacgg

SEQ ID NO: 160937 - RNA, 62 nt, Homo sapiens
gaccaaaggaagagagaaccggaacaggacacagaacagggcccacaggccacccgccagac

SEQ ID NO: 160938 - RNA, 59 nt, Homo sapiens
gaacgggggggagcgacggacggggacaagaagcgcccacggcgggccacacagccccg

SEQ ID NO: 160939 - RNA, 92 nt, Homo sapiens
caaggacccaccaggccgaagccagccggagcagcggcacagcaagaggacggaaaccgagagaacaaccaccggagcgcaggagccccaaa

SEQ ID NO: 160940 - RNA, 71 nt, Homo sapiens
agggaccgggggcgccagggaagcgggaggcaggcagccagccaaaccaggcgccagccaaaccaaagcgc

SEQ ID NO: 160941 - RNA, 82 nt, Homo sapiens
gacgcggccgccccggccaggacgcgggagcgccgcgggaagggcggggagcggagccaggccccggcagccaacccaaggg

SEQ ID NO: 160942 - RNA, 71 nt, Homo sapiens
acaggaggcagaaggaaccgaagaagacaggaaaacgcaggcaccagggcagggagccaccgccaagcccg

SEQ ID NO: 160943 - RNA, 81 nt, Homo sapiens
ccggggcgcggagggccgagggagggccgagccagccgcggccggaggagcccccaggcccccgggcgcgccaggcacagc

SEQ ID NO: 160944 - RNA, 57 nt, Homo sapiens
cgccccacagcaaccaaaagcacaaggcggacgggccccgaagcccaaggggagacc

SEQ ID NO: 160945 - RNA, 80 nt, Homo sapiens
cggagccgccggaagggcgcccgcagccccccacgcgcgagcaaggaaccccgggccccgccacccacgcgaccagccca

SEQ ID NO: 160946 - RNA, 74 nt, Homo sapiens
cagccggaaaggggaaagccgccaggaaaaggaaaacacccaggcggccaggcgcgaagaggaggcaaagaaga

SEQ ID NO: 160947 - RNA, 71 nt, Homo sapiens
cgcgacaaaaggaccagacaaacaaaaggggacaacgaagagaggaaagaagcggaaaggagggagcacac

SEQ ID NO: 160948 - RNA, 36 nt, Homo sapiens
agaccggacaccagcaggccccagccccagccaaac

SEQ ID NO: 160949 - RNA, 62 nt, Homo sapiens
gacccgacaccgaaccagcgaggggagaccgcaagacacgggcagggacccggagaagggca

SEQ ID NO: 160950 - RNA, 78 nt, Homo sapiens
gacgaagaacagaaggcgacaaggccaagaccgccagcaaaggaagacgagggaaggaaaggcaagggcagaaaagag

SEQ ID NO: 160951 - RNA, 72 nt, Homo sapiens
ggcgccgcccccccggcccccgggacggcccaaggccagcccgcaggcacggagaaagcgcagaaacagaag

SEQ ID NO: 160952 - RNA, 76 nt, Homo sapiens
caaggaccccccgcacccgcgccaagcaggccagaaaagccgcaaggcccaggcgcggggccccgcccggccgggc

SEQ ID NO: 160953 - RNA, 74 nt, Homo sapiens
cgagagagcgaaaaccacaggcacccagcagccaggagagaaacaccgaggaggacgcagcacacggccaggac

SEQ ID NO: 160954 - RNA, 68 nt, Homo sapiens
aaacgcaaggagcagcccaggaaacaacagaccagggcgaaggaagaacaggcaggacgcacgagacg

SEQ ID NO: 160955 - RNA, 81 nt, Homo sapiens
ccaagcgccgcggaaccacgccgccacgacccccagcccggcgaccacaagaacaccaacaagagaaacggagagaagaaa

SEQ ID NO: 160956 - RNA, 70 nt, Homo sapiens
cgaggaccggaacagggcgccaaaaacaagaaagcagaaaaaggcccggaagacaagaaagcccaaacac

SEQ ID NO: 160957 - RNA, 69 nt, Homo sapiens
accgcgccggcccagcaccccgagaaccgcaggagccagaggcccccggcgaaaaggaagaaggaaaca

SEQ ID NO: 160958 - RNA, 86 nt, Homo sapiens
ccgaagcgcgacggaagaagagccagaagcagcaggaccggcggaggagcgagagcaggacagaggaccagcgacaaaccgagcag

SEQ ID NO: 160959 - RNA, 87 nt, Homo sapiens
gcgcgcggccgcgcgcgcccccgggcggaccagccccgagcgggacagcgcggcggggagcgacgagcgaagagacacaacaaggcc

SEQ ID NO: 160960 - RNA, 57 nt, Homo sapiens
caccccggaaagccgacccgccccaacaccggggaggaaggcagggaggggaaccag

SEQ ID NO: 160961 - RNA, 67 nt, Homo sapiens
gaacagccggccaaagacccaaagccaaacccagcagccagaaagcggacggcgacagaaacccggg

SEQ ID NO: 160962 - RNA, 86 nt, Homo sapiens
cgacaagccgcggcagccgcggaccaccgccgccaggggcgcgcgggggcacagcccaggcgcagcagcggacccccccggccccg

SEQ ID NO: 160963 - RNA, 56 nt, Homo sapiens
caagagcaccgccaagaccgccccccagcgccaggaaaggcaggagagcgaaagag

SEQ ID NO: 160964 - RNA, 76 nt, Homo sapiens
gcacacagccagagagccaggaagcaaggaggcccgagagagaaagggaaagaaggagcggagcagaacaaggacc

SEQ ID NO: 160965 - RNA, 84 nt, Homo sapiens
cgcccccgcccaaccgcccgacaggggaaccccgggcccagggcgccggccgagcccgggaaaacgacagcagcagcagggccg

SEQ ID NO: 160966 - RNA, 38 nt, Homo sapiens
agccgggcgcggaaacgaggcacagaagacgagcacga

SEQ ID NO: 160967 - RNA, 76 nt, Homo sapiens
ggcaaaggggaaacagcagagaccccagacgccaccacaacccccagacgcaagccaaggcgggacaagggcgcac

SEQ ID NO: 160968 - RNA, 45 nt, Homo sapiens
gaaacaccgcagccgccaagacaggagaacggcggccccgagcca

SEQ ID NO: 160969 - RNA, 72 nt, Homo sapiens
cagcaccgacgaaaggaaggacccagaccaggggaggcaagcaggggggcaaaggaaagaaggcagaaaggg

SEQ ID NO: 160970 - RNA, 71 nt, Homo sapiens
ccgggagaggagaccagaacgaacccccccccccgagaaacaacgcagacgaggaggaggcagagagagac

SEQ ID NO: 160971 - RNA, 73 nt, Homo sapiens
gagaggaagacacccgaccgacaaaaggaagaaccccagcccgggccccaggcggacccgcggcgccccacgc

SEQ ID NO: 160972 - RNA, 68 nt, Homo sapiens
aggagccgaacgagccccagccagggggacaaggagcggccaaaaagaacgggcagagcccccccgcc

SEQ ID NO: 160973 - RNA, 73 nt, Homo sapiens
ggacacagaagaggacagaaacagagggaggaccaagccacagggggcccaagcccacgaaaacacagacaga

SEQ ID NO: 160974 - RNA, 83 nt, Homo sapiens
ggagaccccgcgccgacggcgccaaacacaggaggccaccaaaaagaggaagcagcgaaacacgccagagcagcaaacagcaa

SEQ ID NO: 160975 - RNA, 104 nt, Homo sapiens
cgggcgaccgggcaccagcaggacccgaggccaggagccaggggcccagaaggaacaaccaaagaggaggaaaggacgagcacgaggccgcagcgaggcacccc

SEQ ID NO: 160976 - RNA, 70 nt, Homo sapiens
ggcaagccagccaaccaagaaagagcagagccccagcagcccgggcccgccagcgggaggcaggccacca

SEQ ID NO: 160977 - RNA, 87 nt, Homo sapiens
cgccgagggaccaggccgacccgcggagacagacaagacaagaccggcggggaagcggaccacagacacaaggacaagaaagccacc

SEQ ID NO: 160978 - RNA, 74 nt, Homo sapiens
gccaaagagcggaaaggcaaaaggacagcaaaacaccgggaacaaagcccaaggagacaggggaaccgggggaa

SEQ ID NO: 160979 - RNA, 76 nt, Homo sapiens
ggcgcaaaggccgcaggcgcgcaaccgcagcacgagcccagcccgacccacgaacaacaagccacgaaccccacac

SEQ ID NO: 160980 - RNA, 38 nt, Homo sapiens
acaaacagaagacagcccaggaagcggaaggaccgccc

SEQ ID NO: 160981 - RNA, 67 nt, Homo sapiens
gccggaaacaggcggaggcgggaccaaacacaagccacaagaacaagcccccagaccggaaagccga

SEQ ID NO: 160982 - RNA, 92 nt, Homo sapiens
gccggcgaaggaggaggcggccgggagagaagaccaagaggcggagaagaggagaaaagggcagaggccaaaaggagaaaggcaaagaggaa

SEQ ID NO: 160983 - RNA, 83 nt, Homo sapiens
cgccagcagccgccggagccagccaacgagcgggcacaaggccaagacggccaagggagccacagggcccagagcacggaacc

SEQ ID NO: 160984 - RNA, 76 nt, Homo sapiens
cacagacacaagaacagacgaccgggaaaagacgcagcccccaagaccagggggaggaagcgggcccgcacacacc

SEQ ID NO: 160985 - RNA, 79 nt, Homo sapiens
caccggagaagggaggaaaaccaacaaggaggagaagaggagaccaggccgagaccgcgagacacgaagaagccagcgc

SEQ ID NO: 160986 - RNA, 82 nt, Homo sapiens
gggagaggggaagaggggacaaagccgcccacccccagcggcacaggcaagaaaccccggacagaaggcacggcgaacaaag

SEQ ID NO: 160987 - RNA, 81 nt, Homo sapiens
agagagaggcccgcagaggaggagaccagaaggagaaggagaaacggaggacgcccccacacaagccaacacgggcgccgg

SEQ ID NO: 160988 - RNA, 72 nt, Homo sapiens
cggaccaaaaacagaacaccaacagcaacaaggagacgagagggccccaaagggaccagggacgcgcccgcg

SEQ ID NO: 160989 - RNA, 84 nt, Homo sapiens
cggagcgcggacgccgcggggcccgggacagcgcagcagaaggccgggcaggagaccaagggcaagaaggaaaaccccagagga

SEQ ID NO: 160990 - RNA, 108 nt, Homo sapiens
aggagagagaagaaaggaaaacagaggaagaagaacacacagaggagcgccaggagcaagcgggcaagcggagggagggacacacccggccaccacccccccccagca

SEQ ID NO: 160991 - RNA, 79 nt, Homo sapiens
gagcccaggcgacagcaaggaggcggcaaaaaaaaagcgcacacacgacgggggaaagagcccgggagaggcccgcgcc

SEQ ID NO: 160992 - RNA, 73 nt, Homo sapiens
gagaaggccggggagccccgacagccgccgccagcgcgcacgcaaggaggcggcggaacgcccagccgacaag

SEQ ID NO: 160993 - RNA, 76 nt, Homo sapiens
aggccccggaccggcccccccgcgggcgccacgcagcggacacgaggagcccgggcgccccagcccgcgccggaga

SEQ ID NO: 160994 - RNA, 37 nt, Homo sapiens
accacacacacccagacccaggaagaagagcaccggc

SEQ ID NO: 160995 - RNA, 50 nt, Homo sapiens
agagagaggagaaaaggcagcagcacccaagaacggccgacgcacaccgg

SEQ ID NO: 160996 - RNA, 116 nt, Homo sapiens
aaaaaccagccaaagggccgagcccagaaaacccgcagcagaaaccgcggagcgacagaaacccgcacagaaaggcaaccgcgaagcacagagcccaacccgagaaaaggaaggaa

SEQ ID NO: 160997 - RNA, 80 nt, Homo sapiens
cgccaacaggcggcgcccagggcgccaccgccgccgcagagcccccccagcccaccccaaacggagcacccaaggaagcg

SEQ ID NO: 160998 - RNA, 38 nt, Homo sapiens
agcccgcacgcggcgggcaggggacagaaaaaccgaga

SEQ ID NO: 160999 - RNA, 74 nt, Homo sapiens
aggggaaacccaaacaacacccgcaccgggcgccccgcaggacgaaagcaagaccgagcacagaagaggaccgg

SEQ ID NO: 161000 - RNA, 77 nt, Homo sapiens
gagaccgcgcaggcacccagcagagacagcaaccggccacgaggaggggaaagggagcggccccaccaaacgacaca

SEQ ID NO: 161001 - RNA, 73 nt, Homo sapiens
acggagagagacaacagagaagggaggaagaaagcggcaccaaaagaaccacgccgagggaagcagagaaagc

SEQ ID NO: 161002 - RNA, 81 nt, Homo sapiens
acgcaggaaagccccagccacccacaaacagagagaaggaaccacccacgcaggcagagcgggacaaagaaggacaagaac

SEQ ID NO: 161003 - RNA, 58 nt, Homo sapiens
gcagggaggggaaacgaagcgcacgaaacaccaagaggagcgccggccaggcggaggc

SEQ ID NO: 161004 - RNA, 50 nt, Homo sapiens
ggacccaaaaagggcagaaagccacccggccacacggagagccaaaggga

SEQ ID NO: 161005 - RNA, 83 nt, Homo sapiens
cgcgcaagcggcggcgggaagcggagcgcccccacccggaggcccgccggccccgggaagaaaacaggcgaaacaaggcaccc

SEQ ID NO: 161006 - RNA, 81 nt, Homo sapiens
acgcacaaaaaagggcagaagagaagcaggaaggaggcagaggcacaccgaaaggggccgggagaggaaagcggccgagag

SEQ ID NO: 161007 - RNA, 105 nt, Homo sapiens
gggagacagccgccaaccgcagaccggaaaccgaacgaaggaaggacccaaaagccagcgggccggcaccggcacgaggagcgcacacccgcccagccaagaccg

SEQ ID NO: 161008 - RNA, 80 nt, Homo sapiens
cgagccgagccgcgggccggcgcgcggcgcacgacacggggcgcgacagagacgggaggcggcagaagacaagcgcagga

SEQ ID NO: 161009 - RNA, 69 nt, Homo sapiens
agagcaagcaagagcggaagaagccaaagcgcgcacaacacgcaacccaggcacaaggacagcccgaag

SEQ ID NO: 161010 - RNA, 80 nt, Homo sapiens
gaccagcaaagaagcgcgcaccgccgggcccaccccggggaaacagacccggaacgcaggaagaggcagggcccaggcca

SEQ ID NO: 161011 - RNA, 54 nt, Homo sapiens
ccggaccggaccggccggagacagacccagcacggaccccccccccagccgggc

SEQ ID NO: 161012 - RNA, 75 nt, Homo sapiens
caaagacacgggaccacccagggcaaaccccgccagaggcacacacggaacaaaccgaaggcaacggcacaaaac

SEQ ID NO: 161013 - RNA, 58 nt, Homo sapiens
ggcggaacaggcaccaagccggcggggcgggggcaggcagggcccagcaggacgcgga

SEQ ID NO: 161014 - RNA, 69 nt, Homo sapiens
gcacagcacccacaaagcaacgggaagaaacgggagggcacagggacagaaagaacgaggccaaaacac

SEQ ID NO: 161015 - RNA, 76 nt, Homo sapiens
aaaccggagaaggagccaagaaagagaaggggcgacagcaagaaggagccagcacagaggcaaaagaaccaacaaa

SEQ ID NO: 161016 - RNA, 65 nt, Homo sapiens
agccgggccaaaggacgaagaacccacagaggaaagcggggcagcaaggcaaggaaaaaacgaag

SEQ ID NO: 161017 - RNA, 100 nt, Homo sapiens
aaacacaaacggacggcggagaaggccagcaacccacgcagaaaagagagggcggggacacagcgggcaggaagaagacgccgaggcccccccacccaga

SEQ ID NO: 161018 - RNA, 83 nt, Homo sapiens
gcgaacacccacccccggacgccgcacaaaaggaacccacccagcggggacccagaagaggcccgcagccagaacccagaaaa

SEQ ID NO: 161019 - RNA, 79 nt, Homo sapiens
ccgcgccagccagcccgcgaccgcccgcgccggcaccggggcggccggccaaagccagccgcggggacaaaccggaagg

SEQ ID NO: 161020 - RNA, 38 nt, Homo sapiens
ccgcgccgcaccagcgacccgcgcagaacccagaaaac

SEQ ID NO: 161021 - RNA, 102 nt, Homo sapiens
gcaacaacaaacccccggaacacggcaaggaggcaagcagagcggggcgggagccaggacggcgcgcccacgcggaggggggggacacagccacgcaacccg

SEQ ID NO: 161022 - RNA, 76 nt, Homo sapiens
gcggaccggcgccccggcgcgaagaggcggaccggacggccgagcccgccgacacagccaccaagaaggcacaagc

SEQ ID NO: 161023 - RNA, 57 nt, Homo sapiens
aagcacccccaagaaggaggacccggcgggggcaaggaagcacggaggcccgggaac

SEQ ID NO: 161024 - RNA, 88 nt, Homo sapiens
gcgagcccccggccgaggcgcagcagcagcgcccgccccacaagagggcaggaaggacaacggggcggagaacaggaaaaagcaccag

SEQ ID NO: 161025 - RNA, 79 nt, Homo sapiens
ccgcggacgaggagaaagaccccagcccgggaggcgcgccccaccagacaccaaaccaggccacaccacgccccgagcc

SEQ ID NO: 161026 - RNA, 74 nt, Homo sapiens
acggccccccagcaagcaccgcccaccaaaaagaagcagcaccaacgacaaagaaccacggcggcagcccgcaa

SEQ ID NO: 161027 - RNA, 40 nt, Homo sapiens
accaggagcccgagagagaagggagccagaagacgagacg

SEQ ID NO: 161028 - RNA, 75 nt, Homo sapiens
aacaaggcgcaagcggcaacacaggagagcggagggcagaaagaggggaacgaaaaacagagcgacagcaaccca

SEQ ID NO: 161029 - RNA, 75 nt, Homo sapiens
gcaaccacagagggcgagcagagacaacaggcacaaagagagaaggaacacccacagggcagacagagaaagaac

SEQ ID NO: 161030 - RNA, 71 nt, Homo sapiens
aaccagggccacagcacgcagccccaggcaggacacacagcaacgaagcaggggaggagggaagaccggac

SEQ ID NO: 161031 - RNA, 77 nt, Homo sapiens
ggccaaggggcagggacgcggagagaagcaggaagcagggcaaacaaggccggaaaccccccggaaggggaggaggc

SEQ ID NO: 161032 - RNA, 82 nt, Homo sapiens
accgcacgcagcagcacacacgagcgcgaccccaaggcagccccacccaccacagaagggcagcccgaaccagacggcacgc

SEQ ID NO: 161033 - RNA, 70 nt, Homo sapiens
accgaggggccgacccaagcacaccagaaagggaccccgggagggcccagcaaccggccagcgaaccgga

SEQ ID NO: 161034 - RNA, 75 nt, Homo sapiens
caacgggccccagcgccaaccaaaccgaaagccagaagccaccagggaaaaacagagaggaacaacgagcccaca

SEQ ID NO: 161035 - RNA, 68 nt, Homo sapiens
ggggcagccgggggggggaaggggcagggggaggcaaaggaggaagagagaccgacaagggcagggag

SEQ ID NO: 161036 - RNA, 84 nt, Homo sapiens
gcaaaggagcaaccccgcggacgagcagagcaaaggaacaaccaaggacacaggggccagaagccaagccgagccccgcagcga

SEQ ID NO: 161037 - RNA, 73 nt, Homo sapiens
cgcacgaagggaacaaagcgagagacgacaggcgggcaacacaggcaagcagggcaaagggcagagcgcgccc

SEQ ID NO: 161038 - RNA, 73 nt, Homo sapiens
acagggaagggcgcagcagaaagcaaaccagcaggcaccaaggaaagcagaagacaaacacagacgcggccaa

SEQ ID NO: 161039 - RNA, 85 nt, Homo sapiens
caaggccgagagccggaacaaacgagggcccgggaggaccgacgcagccagggacaccgaaaagcaaagggagaggacacacgag

SEQ ID NO: 161040 - RNA, 61 nt, Homo sapiens
cagacacgcgcaccgcagggccagcaagcaacacgaacaggaccgagcacggaggagggca

SEQ ID NO: 161041 - RNA, 68 nt, Homo sapiens
cagcaggacacaccggccgagggcccaccaggaagacaggagggcggcaaagagcgacacaaccaaac

SEQ ID NO: 161042 - RNA, 73 nt, Homo sapiens
ggcagcgacggccaccacgagcacggcccgcgcacgcccggagagagaccgccccgcccagcaagacgccagc

SEQ ID NO: 161043 - RNA, 123 nt, Homo sapiens
agccccccaggaacggggcccgggaggcagcccaccagggaccgcccaggaaaccagcagagcccaggaaagaccacagcaagaccacgcccccagccgggggaccaggccgaacgacccgga

SEQ ID NO: 161044 - RNA, 78 nt, Homo sapiens
caagcagaccccaggaccagacacggccggacagggaaaagaaacggacgacacccagaacaggaaagagggcaggaa

SEQ ID NO: 161045 - RNA, 86 nt, Homo sapiens
acggacggagggcgcccagcgcaaggaggagcgcgggacaggcggacaagagcagggcgaccacaggaaaaaggggggagacacac

SEQ ID NO: 161046 - RNA, 70 nt, Homo sapiens
aggacacccagaaaaccgagagggaagccccggaaccagcgagagacaccaagcaaacagagcacgggac

SEQ ID NO: 161047 - RNA, 69 nt, Homo sapiens
ccggacggccgggccagccacagcaccccgaagaaacagagaagcgagaaagagaagaagaacacacca

SEQ ID NO: 161048 - RNA, 75 nt, Homo sapiens
agaaaacagcgggaagagacagccaagggccagcccgcaacccccggcgaccacgggcccggcaacagcgcagcg

SEQ ID NO: 161049 - RNA, 79 nt, Homo sapiens
cgccacgcagaccgcgcgacccaccccggaccggcaaggcacgaacggccccaacagccgcggcgagagcgcgggccga

SEQ ID NO: 161050 - RNA, 77 nt, Homo sapiens
agaagggaaaacgaaggagaagcaggaagaggcgagaaggagcacgccaagccaagaagaccgcggagagggggagc

SEQ ID NO: 161051 - RNA, 70 nt, Homo sapiens
aagaggccagagcagacgaagaccaacgaaagaaaacacacacacacaagacgcagaagggcagccaacg

SEQ ID NO: 161052 - RNA, 51 nt, Homo sapiens
gaggcgcggagagcaacgccgggacagcgcaagagcacgcacaaggcccac

SEQ ID NO: 161053 - RNA, 81 nt, Homo sapiens
cgaggccgcggcagggcccgcaggcggcgcacaggaagcacggcaaaagcggaccggaaaacccaccggcaagacacaccc

SEQ ID NO: 161054 - RNA, 109 nt, Homo sapiens
aagaagccaagagaggaaagcagcagagcacaaagcagaagcacaaagcccgaagcagagcggacgaaagaagaaagacaagcgcaaaaggggagaagaccgaaaacga

SEQ ID NO: 161055 - RNA, 68 nt, Homo sapiens
gcacacccgaaaagcgccaaggaaaaggacgagaacgccgcgacagaaagcagaaaaccagacaccag

SEQ ID NO: 161056 - RNA, 80 nt, Homo sapiens
acccaggccgccggccccacagggagcagggccgccccgaggagagcgacgcccgggcgcgccccggcagagcgagccaa

SEQ ID NO: 161057 - RNA, 81 nt, Homo sapiens
ccaggcaggcggccaaccacgaagacaaggacgaggcccaaggaaacggcggcgccagcaggacgcgcaacacgcggcaga

SEQ ID NO: 161058 - RNA, 72 nt, Homo sapiens
acccggcgaagccaggcgagccaccacagcacaggacagcagaggcacacaaacggaaccgcacaaagcaga

SEQ ID NO: 161059 - RNA, 81 nt, Homo sapiens
gccccccagccacggaaacggagaagcagacacggccaacacgcgccagcagggggccccaggacccagcccgaaaggcca

SEQ ID NO: 161060 - RNA, 78 nt, Homo sapiens
ggccgacaagcggaccaagccagacccaaggagagaaggacaccgcgcggccaccccagaaggaggcccgaggcagac

SEQ ID NO: 161061 - RNA, 84 nt, Homo sapiens
gcgaaggccgggacccggccccggcccacaggggggggcaaacccgagagaacgggggaacggcgagggaacccaggaaggagg

SEQ ID NO: 161062 - RNA, 79 nt, Homo sapiens
ccgcccagccccaaagagcgagacacagaaggagggaccccaacagaagaaaacaagagagacacggagaagaacgaag

SEQ ID NO: 161063 - RNA, 66 nt, Homo sapiens
caaaggcagaagcaccagaaaaagagcaaaacacaaggcaacggccacccacaaggcacaacaagc

SEQ ID NO: 161064 - RNA, 82 nt, Homo sapiens
aggagccagggcggagagaaaacccgcgaggaaagggaaggagcaagccggggcagagaaacagcccagaagagaaaagaag

SEQ ID NO: 161065 - RNA, 70 nt, Homo sapiens
aaagcgccagagccaagaacgagccagccgaggaaccgccaaggccgcaggaaaggagaacagcagaccg

SEQ ID NO: 161066 - RNA, 79 nt, Homo sapiens
ccgcggggggaggagagccaaccagcaggcccggacaggcccagaaccacggccggaggccccccagacgcaaggcccc

SEQ ID NO: 161067 - RNA, 73 nt, Homo sapiens
cccccccgcagaggaaacaccaggcgcggcggcccagccccgacacagacaacggcaagcggagaagagcaag

SEQ ID NO: 161068 - RNA, 82 nt, Homo sapiens
cagacacagaacaggaaccaagcgaggcgcacaagagcagaagagggggaaccgacacgcagcaacaaggagacgggaagca

SEQ ID NO: 161069 - RNA, 73 nt, Homo sapiens
cgggcccggaccaggcacgcacaaaaagagcacgggcagagacagccacaaaccagaggggaccagcacaccc

SEQ ID NO: 161070 - RNA, 70 nt, Homo sapiens
gccggcgagccgagcggcacagggggcgcagagacccaagagagcagaaaaaagaaagaagcgggaaaaa

SEQ ID NO: 161071 - RNA, 84 nt, Homo sapiens
agcagagcggagcccggggaacagacgggcagccaaaggagcagacgcccgagaagcccagccaaagaacacggcagaagcccc

SEQ ID NO: 161072 - RNA, 68 nt, Homo sapiens
acagaggaagggagacagaagagacaggaagcacgcccagaagaacaggcacagggcaaagacaacaa

SEQ ID NO: 161073 - RNA, 68 nt, Homo sapiens
gcccaaacgggcagcgaaggagccaaggagcaaaacgaacgaagaagccagagcagaaacaacaccaa

SEQ ID NO: 161074 - RNA, 71 nt, Homo sapiens
caacaccaccacagccaagggcagagagggggcccagacaacacccacggacggggaccgcaccccgcgcc

SEQ ID NO: 161075 - RNA, 82 nt, Homo sapiens
cccagcccccaagaagcgggacacaggcagaagaagaagagcggagaaccgaacaggcgcagggagcccccaccacagcagc

SEQ ID NO: 161076 - RNA, 78 nt, Homo sapiens
gagacccgccggaggaaaccaccgcacagacgcgcgcggcagaggcagggccaccgcaccgagcagaggcaggggcga

SEQ ID NO: 161077 - RNA, 54 nt, Homo sapiens
gaccacccagaggagcaacagagcccccaaaacacagaaacaaaacaaaacagg

SEQ ID NO: 161078 - RNA, 86 nt, Homo sapiens
ggcacccgggcccagccgggaacccccacgcggccagcgaaaacgcccagggggaagcagcaggaagcagcggaaaaggacgagga

SEQ ID NO: 161079 - RNA, 63 nt, Homo sapiens
acaacaccgcgcggaccacaaaccgcgccagaaaagagggagaagaccaaagaagagagagca

SEQ ID NO: 161080 - RNA, 77 nt, Homo sapiens
cagccccggacagccaagagaacagaacaccaaggagagaacagaagaccggcaacgggccaagacaaccacgggga

SEQ ID NO: 161081 - RNA, 73 nt, Homo sapiens
agaacaacgcaccggccaaacaacaggaagagccgacaaaaggacaaggggcgaagcccgggggagaggaggg

SEQ ID NO: 161082 - RNA, 77 nt, Homo sapiens
cacagcaacgaaaaagcccggagagcagcaaaaagagcagagaagggaagaggccagcacgccgggcaggaagagcc

SEQ ID NO: 161083 - RNA, 76 nt, Homo sapiens
aaacaaccccagggcgcggcacaggccagaggcacggacgaccccggagagagcgggcgagcagaaacccggaagg

SEQ ID NO: 161084 - RNA, 72 nt, Homo sapiens
cggcagaaagaccacaagaagaaccggaggagaaccacaaagaagaacgagaggaaccagggcaccaggcag

SEQ ID NO: 161085 - RNA, 85 nt, Homo sapiens
gaccgggaggagcagccgcgcgccgagaagcacccgcgacccagaagaaaccccaggccagccagcagagagaggagaagcagcg

SEQ ID NO: 161086 - RNA, 70 nt, Homo sapiens
agacagcaaacggggcacaaggacgagcgacaagaagacgaagaagaggagaaccggagacgggaagccc

SEQ ID NO: 161087 - RNA, 77 nt, Homo sapiens
cgcgaggaggaaaggaggacgagaacccaggagaaacgagagggacagcaaggaagacgccagagagcggcacaccg

SEQ ID NO: 161088 - RNA, 82 nt, Homo sapiens
agacccggaggaacggaccagagagaccccggaggggggagagaagccgggaccgcacggggccccggccgaccacgcaggg

SEQ ID NO: 161089 - RNA, 74 nt, Homo sapiens
agaagcacaagcagcacacaaggccacaccaacaagacaagaaccaaacagaacccacgaagggagaccagaca

SEQ ID NO: 161090 - RNA, 81 nt, Homo sapiens
gcggaccgggcgccgaagcccgaggcagaggaaccggccccaggaccaacaaagaagcggaaaacagaaagagagcaaagc

SEQ ID NO: 161091 - RNA, 84 nt, Homo sapiens
gacgaaccacagggcggccagagcacacaccaggcacgggccacccaggcccgcagaagacgcaggaacacccgacagcagccc

SEQ ID NO: 161092 - RNA, 80 nt, Homo sapiens
gagacgggccggccagccgaagcccccgggcgccagcaacgcgagggcgacaagcagaccggaagaccgacggaagacca

SEQ ID NO: 161093 - RNA, 88 nt, Homo sapiens
gggaaaacggagagcagcagccgcccgccaaccccaggggaccagaggaaccagcccgagcgcccacggcagacacagcaggccaacc

SEQ ID NO: 161094 - RNA, 85 nt, Homo sapiens
acgaaagccgccaggaaaagcgcccccaccggcgggggaagaagcccacgcacaggcacaagaacccccagacaaaacaaccgag

SEQ ID NO: 161095 - RNA, 76 nt, Homo sapiens
aagcggacgccggggaggccaaaaaggaagaagaccgaggaaagcccgcagagccccagggcacccacaagcgccc

SEQ ID NO: 161096 - RNA, 90 nt, Homo sapiens
gcgcagcccccggccgcagcgcaggcagcccagcaggccagcacccgcccgaggacagagaggcgagcgcccggaggggagagagcggag

SEQ ID NO: 161097 - RNA, 79 nt, Homo sapiens
caaggacgccaagggggcgagaggaaagcacgcagaaccggccaccgagccgagagcaacgaagggcccacggaaagga

SEQ ID NO: 161098 - RNA, 42 nt, Homo sapiens
agcggagcggagcgcggaagagaaacagcacccaggacaccc

SEQ ID NO: 161099 - RNA, 73 nt, Homo sapiens
gccagcgcaaaccagaaggcacgaaccaaaaagcaagcgaccgagagcgaagaggcccgagggccggggacaa

SEQ ID NO: 161100 - RNA, 72 nt, Homo sapiens
accgaaccacaagaaaacaagaaaggaaaagagccccgaacccgaagagggggaaaacgcagggaagagagg

SEQ ID NO: 161101 - RNA, 73 nt, Homo sapiens
agcaggccagccagggaccgcggccagcgacagaccgcgccgcgccggcgaggggcggaagcagcagagggag

SEQ ID NO: 161102 - RNA, 81 nt, Homo sapiens
gcgacccccggcagccaggcgcaccaggaaaacgggaccgagagaaaaagcaaaagccagacagcgggaaggcacggccga

SEQ ID NO: 161103 - RNA, 70 nt, Homo sapiens
aaagacaaagcccgaaacagaaggaagcgccgccacagcgcgccgcgcgccgggagaggcccggggcccg

SEQ ID NO: 161104 - RNA, 90 nt, Homo sapiens
gcgcccagcacgcgacccaagcaggaggcaggcgggacggcaaaacagaacagaaaggcggagaaaaaagagggggaaaagaccacgaga

SEQ ID NO: 161105 - RNA, 76 nt, Homo sapiens
ccggcccagccccagcggcagacggaaacgacagaagcagagcaaagccgagaagaagaaacaagccggggacgag

SEQ ID NO: 161106 - RNA, 86 nt, Homo sapiens
cagacgcgcccgcgggcccggccacggcggagccaaggaagggccgggccggggcacgggcccacggccccccaccgggccacccc

SEQ ID NO: 161107 - RNA, 85 nt, Homo sapiens
gcggcggaccgccgcgacccgccgcgcgcgcacgcccagaccagggaaccgggcagcagccgcagccgcccccgggacggccggc

SEQ ID NO: 161108 - RNA, 72 nt, Homo sapiens
cccaacaggcccacagggcagccagggcaaagacgcacaaggcagcagacgacaggacggcagagccccaag

SEQ ID NO: 161109 - RNA, 77 nt, Homo sapiens
gcagccacgggccccaacccagcaacgagaggacggcaaggaacaagagaaaagaacggagcacgaaggacggcgag

SEQ ID NO: 161110 - RNA, 55 nt, Homo sapiens
accaagaaccaggccagcggggaaacagagcacaggagagacaaacagaaagagc

SEQ ID NO: 161111 - RNA, 37 nt, Homo sapiens
cgagaccacaaccacccccagaacacgaccagcgcga

SEQ ID NO: 161112 - RNA, 63 nt, Homo sapiens
aagaaacaacaggacccaaaaagagagaggaccagaaccagaccggaaagcaccaggcaaaga

SEQ ID NO: 161113 - RNA, 64 nt, Homo sapiens
gaaaaagcgggaacgcaggacccaaagcgggaaccagaagaggccaaccagcacgaacgccagc

SEQ ID NO: 161114 - RNA, 80 nt, Homo sapiens
gcaccgaaggggaagagcaagagcagcagggaggaaacaggaacacgaaagaggaaaaacgcacaagaaaccgaagccaa

SEQ ID NO: 161115 - RNA, 94 nt, Homo sapiens
ggacccaccacaccgagcccaagcggaaagcacgcgcacagaggaacgccccacaccacgagcccagccaagggagagacgaaggagcagacgg

SEQ ID NO: 161116 - RNA, 71 nt, Homo sapiens
agaaagccccaagcgacaggggagggacccaggggggaggccaggcgaagagcgccaaggggagaagacag

SEQ ID NO: 161117 - RNA, 63 nt, Homo sapiens
caggcgcaccgacgcaccagacggagacgcgcacagaaggccaagacccaggaaaagccgaag

SEQ ID NO: 161118 - RNA, 86 nt, Homo sapiens
agaccaaagcacgcagacgacgagcgagccaaaaggggggacacccaagccacaacacagcagcccccaggagagcaggaaaagcc

SEQ ID NO: 161119 - RNA, 64 nt, Homo sapiens
ccccgcgcccgagccaggccagcgccgaccggagggaagcgagaaacggggaggcgaccaaaag

SEQ ID NO: 161120 - RNA, 59 nt, Homo sapiens
acaagaaaccaggcaagccaaggccaccgagccacaagaccacagcaccgacccccgac

SEQ ID NO: 161121 - RNA, 73 nt, Homo sapiens
ggaaaacggaagaggaagcagaaaggagagcacaacaaggcaggaaccaaagggacaagggaccagacagcca

SEQ ID NO: 161122 - RNA, 73 nt, Homo sapiens
aggccacccaaggccaaagaaccagcacaggacaaaaggaggagaacgggaagaaaggacccgaaaagagcgg

SEQ ID NO: 161123 - RNA, 79 nt, Homo sapiens
gccacacagagaggccacgacgcacagccacaggaggcccacccccacacagaggagggacagagcgccacacagcccg

SEQ ID NO: 161124 - RNA, 77 nt, Homo sapiens
accccaaggaagccacggcagacacacaacccgacccgacgagccagcccgaggaaagaaccgaaaaacacggaccc

SEQ ID NO: 161125 - RNA, 90 nt, Homo sapiens
ccggcgagccaccggggagccaccgcccagcccaaaccaggagagcgagggagcgagcgggcagcgcgggagaaggccgccggggacgag

SEQ ID NO: 161126 - RNA, 70 nt, Homo sapiens
aacacccggaaggacaaggagcagagcagggaaaacaccgcagaaaagggcaacaacacggcaccacaca

SEQ ID NO: 161127 - RNA, 82 nt, Homo sapiens
agccccggggagcgccgcggggcgccggagccgccggccgcggggccgaggcagcggagggaggggggaagacagggcccag

SEQ ID NO: 161128 - RNA, 39 nt, Homo sapiens
ccacagggaggccgacgcccagggacggagaaagacaaa

SEQ ID NO: 161129 - RNA, 82 nt, Homo sapiens
cggacggcgccccgaacgagggggcgcgagggagacggggacgcaggagccaggacacaccggacaagcaccggaagggcgg

SEQ ID NO: 161130 - RNA, 76 nt, Homo sapiens
caaggaggccccagcggaccgaacagaaacagggaggcaggacagggaagaagggaaggggaacaaacagggagga

SEQ ID NO: 161131 - RNA, 76 nt, Homo sapiens
agaaaccgaagccccacaagccagggaagaccccgaaggaccaagaaagcgggaacccacaacgaaggaaggaaca

SEQ ID NO: 161132 - RNA, 83 nt, Homo sapiens
aacaaaaaggagcgagagacacccggacaacaaggggacaacggagggaaagacccaaggcaggcaacgagaccgaagccccg

SEQ ID NO: 161133 - RNA, 79 nt, Homo sapiens
ggacaccggaagcgggaaagaggggcgggcgcacaggggacaggacaagaggaggagcggggagagacgagaggaggaa

SEQ ID NO: 161134 - RNA, 75 nt, Homo sapiens
aaagaagcacccccgggaccaggggcccgacagcgcaacagggagggcagaacgacgaaagacggacaggacgag

SEQ ID NO: 161135 - RNA, 77 nt, Homo sapiens
ggggaaggaacagaaggaccacaggggccgcaagccagcgccccagagcacacagcaggccccagcccaaacgacac

SEQ ID NO: 161136 - RNA, 84 nt, Homo sapiens
cacggcccgccccggcgggcagagaccagcaccggagaagggagcgagcacaaacgacacacgcaaaccacaaagcccagcaac

SEQ ID NO: 161137 - RNA, 54 nt, Homo sapiens
ccgggcccggaaagcgccgcccagcagccgcagggcagcagcaggaacaggaac

SEQ ID NO: 161138 - RNA, 90 nt, Homo sapiens
ggggggcggagacgcacggagcggccgggggccggccgggccgcccggccgcgcagccgagggcacacaggcccgagcacaaacacaaga

SEQ ID NO: 161139 - RNA, 88 nt, Homo sapiens
gccgcgccccgcccgggcgcccagcagacccccgacgcccacccagagaggcccgaagcaaaaaagaaggggcaccccgggagggagc

SEQ ID NO: 161140 - RNA, 38 nt, Homo sapiens
aagagagaagcaagcccggcacaaagccagcccagaaa

SEQ ID NO: 161141 - RNA, 88 nt, Homo sapiens
aggggcgagcagcgaacgaggaagcagcgaacgagaaccaaggcggacgcggcgagaagggcgagcccgaccaaggagacagaaggac

SEQ ID NO: 161142 - RNA, 71 nt, Homo sapiens
gaagcgaacaaaaagcagcaaaccggaccaccccgaagaaagcacagaacacccggccaaggcagagcgac

SEQ ID NO: 161143 - RNA, 80 nt, Homo sapiens
gccggcagccccgcccgcagcccaacaaggcgcaccgagcaccacgacgggagcgccaagcccaacgcccagggccccca

SEQ ID NO: 161144 - RNA, 80 nt, Homo sapiens
ggggcccccaccacccggaggagcagcccgccccgccgggggagacgacccccgccagggccggccgcgcacccagaccc

SEQ ID NO: 161145 - RNA, 74 nt, Homo sapiens
cgacaccacgggaggcagaccacgagaagccagaaacaggaagcaacaccggagaaagacaccacagggacagc

SEQ ID NO: 161146 - RNA, 67 nt, Homo sapiens
gagccagggacaccgggccccgaaacgcgggccagagagagggcaaacggaccaaacaaaaagaagg

SEQ ID NO: 161147 - RNA, 67 nt, Homo sapiens
cgggccccccagcccgcggaacggcccccaccccagacacacaaaagaagagccacgaacccccgaa

SEQ ID NO: 161148 - RNA, 76 nt, Homo sapiens
cacagaccccacacagacagggaaagccaaaacccagaacccgaagcaacgcgacaccacggacaaaagccgaagc

SEQ ID NO: 161149 - RNA, 89 nt, Homo sapiens
ggcagcggagagcgagagaggggagcagaagcaaccggacaaggggcccgaccagggaccgaacgaggaaggcgccagagcagagaaag

SEQ ID NO: 161150 - RNA, 77 nt, Homo sapiens
aagccgacaagcccgggagacacaggcagaaacaagaggagaccacggagagaaaagagaccagagagcaagccgag

SEQ ID NO: 161151 - RNA, 75 nt, Homo sapiens
ccggccggcagcggacacgcagcacaggcagccgcgacgcagaagagccaacaagaaaggccgccaccgagcagc

SEQ ID NO: 161152 - RNA, 67 nt, Homo sapiens
aggagacccaaggaaaggccaagagcgccagggggccgggccgggaaggcgggcgcgagacagacca

SEQ ID NO: 161153 - RNA, 80 nt, Homo sapiens
cccccacgggcaccaagagcaacccacacggggggcgaagaagagcgccagacccacagacgcagaaaacagacacacag

SEQ ID NO: 161154 - RNA, 59 nt, Homo sapiens
cacaacaagaggccggcggggcgacagcaggcaggagaagggcaccggggaggaccgcg

SEQ ID NO: 161155 - RNA, 78 nt, Homo sapiens
ggggccagagagaggggcaaggacccgggaagagaaaagcgaaggacaccggcaagaggacagcagaccacagcccgg

SEQ ID NO: 161156 - RNA, 78 nt, Homo sapiens
cgcgggaaacaggcgaccgagggaagaccacaaccacgaccacaaaccggcggagccacagccgcagcaccgaacgag

SEQ ID NO: 161157 - RNA, 55 nt, Homo sapiens
agaacacgaggggaaacccgacaagagaagggacaggagagacaacggaggcaag

SEQ ID NO: 161158 - RNA, 78 nt, Homo sapiens
agggagggccgccgcgcccaggagggcgggaagaagcgagagccaaaggaccacccgcacccaggggacgcacggccc

SEQ ID NO: 161159 - RNA, 100 nt, Homo sapiens
gaaaggcgcccccgagaccccgcggaacgcccaccgcggagagcagcacgaccccagcacagcacgagacacgagacaggagagaaaggagagacaaagg

SEQ ID NO: 161160 - RNA, 73 nt, Homo sapiens
ggacaggagaagaagagaccgacacaaggaaagcgaagcgacaccggggaacccgaccgcgacagagaaagaa

SEQ ID NO: 161161 - RNA, 56 nt, Homo sapiens
ggaagcccaaaggcagaaggggggcccaccgcagaacaagaggcgcgaacagggcc

SEQ ID NO: 161162 - RNA, 73 nt, Homo sapiens
gcacccaagcaacccaagaagaacagaagggcccggccagggagaaccccccggagcccaggaggggcaccac

SEQ ID NO: 161163 - RNA, 56 nt, Homo sapiens
acaaagaaacagaaacagagggagaagagacaacgagaagccgagaaaaaaaagga

SEQ ID NO: 161164 - RNA, 67 nt, Homo sapiens
aaaaaggaaaacagcccagacacaaaccccacgcgaagacggcagaaaacaggggcacagacgacag

SEQ ID NO: 161165 - RNA, 69 nt, Homo sapiens
acccgagcagccagagcggaccggggcagaccaaacggcaagaaacacccagagagaagaacggccgga

SEQ ID NO: 161166 - RNA, 75 nt, Homo sapiens
cagaccgagacagccagcgaggcccgcagcccaacgacacaaaacccggaaccgagccgaccccagaagggcccc

SEQ ID NO: 161167 - RNA, 79 nt, Homo sapiens
ccaggccggaggaacggagcaccgcgcaaaaaaacggggcaacagcgcagcccggaaagagggaaaggaacaagaccga

SEQ ID NO: 161168 - RNA, 70 nt, Homo sapiens
agaggaaccccaagccaagcccaagacaaaaacgacagccagacaagaccccaacgaagggccagaaaag

SEQ ID NO: 161169 - RNA, 80 nt, Homo sapiens
ggcggccggggccgccaccacacgaaacagggcaagacagagaccaggggccacaacggaaaccaggaaaccgcagaaga

SEQ ID NO: 161170 - RNA, 78 nt, Homo sapiens
gagacgacagggggccaccccaccccagagagcggaccaacgaggagagccgacaaggagcgaaccaagaagaagagg

SEQ ID NO: 161171 - RNA, 72 nt, Homo sapiens
acggcggagacccccgccccaacgagggggaagcgcccgggaccaacgccacaaggcaaacaaagaacaagc

SEQ ID NO: 161172 - RNA, 74 nt, Homo sapiens
agcgggacacaggcggcaccaccaccccagacacaaggggggcccccggagagacagaaccaacaccagagaag

SEQ ID NO: 161173 - RNA, 67 nt, Homo sapiens
caccagcaagacggcaggcgagagccgacccaggccgccggccccacagggcgggagcagcggaaga

SEQ ID NO: 161174 - RNA, 91 nt, Homo sapiens
ccacaagcgccaccggcccccacaagggagggaagaaaacccagcacgcgcaggcgaacgcccaggaccacaccgcagcgaacgcaggccc

SEQ ID NO: 161175 - RNA, 76 nt, Homo sapiens
gcagcgaaacagccgacagagcccacacccaagaacagagaacccaccgcaagagaccaaaggccaagagcaccgc

SEQ ID NO: 161176 - RNA, 64 nt, Homo sapiens
cgcccaggaggagcaccggaaggggacccgaaagaaacgagggagaagagccaaggagaccaaa

SEQ ID NO: 161177 - RNA, 56 nt, Homo sapiens
gcagcagcagccagaaaaaggggaaggcgcgcagccaagcagaagaaccagcacag

SEQ ID NO: 161178 - RNA, 71 nt, Homo sapiens
cagaaaaaagaaagaagcagcagagggggcgaggaagagacaggcgggggagaagaagcagggccaaacgc

SEQ ID NO: 161179 - RNA, 79 nt, Homo sapiens
ccgggcgacgcgcgccgccgcgcgcgccccggccgccaccgggacagcccagagcaagcacacggaggcccgggagcca

SEQ ID NO: 161180 - RNA, 67 nt, Homo sapiens
ggccgcaacgcagccgcagcaccaggcacggaagaggacagcaccggcggagacaacagggggaaaa

SEQ ID NO: 161181 - RNA, 97 nt, Homo sapiens
gacaccccacgcgcaccagagagcggagaagcccaagcccaccccaaaggcaggcacgccggcggcccaacccagcaggagaagggacagaggggca

SEQ ID NO: 161182 - RNA, 73 nt, Homo sapiens
gcacacggaccagcagaacagaaacaagagagaaccgagccaccgcaacggaggcgaaccggcaggagaaagg

SEQ ID NO: 161183 - RNA, 57 nt, Homo sapiens
cgaaggagagaccgccaagcccaagagaaggggcagccacaggacaaagcaaagaac

SEQ ID NO: 161184 - RNA, 75 nt, Homo sapiens
agccgggccagccccgcgacggcccacgagccaagcccaggagccgagaacaacggaacaacaagccccgcccac

SEQ ID NO: 161185 - RNA, 60 nt, Homo sapiens
ccacacgcgaccgcagcccccccgagaaaggcccagggcgccgccgcagccaggcacagc

SEQ ID NO: 161186 - RNA, 70 nt, Homo sapiens
cggagaccaaaaccaaaccaggaagaggaggacgcagcagagagggcaggcgcaagcaggggagaggaag

SEQ ID NO: 161187 - RNA, 75 nt, Homo sapiens
ggaaagaaagaccaacacaagcaaaagcacagaccaggcccccaccaggaacagagacgaaaccacagaaacaac

SEQ ID NO: 161188 - RNA, 76 nt, Homo sapiens
aaggaagaagccagcgagcggggcgcgcggccggaaaagccaccgaccacacgccacaaacccaccgcaagcgcca

SEQ ID NO: 161189 - RNA, 67 nt, Homo sapiens
acagcaaaggacccccacccacccgagaacaggggcgaggaagagacaggcgggggagaagaagcag

SEQ ID NO: 161190 - RNA, 130 nt, Homo sapiens
caggcacgcccccggccgccgcgccgcccgcccgccggggccccgcgccgccgcccgccgccgcggagcagaggggccaagggcccccagcggccgacagcgccagaagcgccagcgcccacgccagcca

SEQ ID NO: 161191 - RNA, 60 nt, Homo sapiens
cggcggaaaaccccaaaaggacaaagggccccagcgcagccaacggcccgaagagggagg

SEQ ID NO: 161192 - RNA, 74 nt, Homo sapiens
cgaggagaacgcccgcggacgacccgagaaaaccagaacgaggccagcagccagacaacaccaacagcgccgag

SEQ ID NO: 161193 - RNA, 76 nt, Homo sapiens
gagccccggccgcagccgggcccgagagagcccagcaagaccacgacacgagagcgccgccagccggaaggagaca

SEQ ID NO: 161194 - RNA, 80 nt, Homo sapiens
cagccccgagaccgggaacagggcgagcgccgcccaaggaccaccaccgcgaagcacgagggcggagcccgagacgggcc

SEQ ID NO: 161195 - RNA, 84 nt, Homo sapiens
agaagccaaagaggagcggccaagaaagcagcacacaggcacaggaccggagacaaagagagaagacccgacgaacagaaagcc

SEQ ID NO: 161196 - RNA, 69 nt, Homo sapiens
gaaaacacgccaacgccgcccaagagagcaagaccgggcccacgaggcgcagggagcaggagaagcgga

SEQ ID NO: 161197 - RNA, 83 nt, Homo sapiens
agcgcgaacgagcgacggcggaacccggggccgggacgcagcccggcggcagcaggcgggcgcaaagacaccgccagaagacc

SEQ ID NO: 161198 - RNA, 74 nt, Homo sapiens
cagacgcagggcgcccccgcacccacagcaggacccaggagggacccaggacccaagaaaacccgcgagagacc

SEQ ID NO: 161199 - RNA, 43 nt, Homo sapiens
ggggaggaggacgcggggaagggagcagaaaagcgaggcaggc

SEQ ID NO: 161200 - RNA, 71 nt, Homo sapiens
gcgcccgccgcgggagagaggacccccccccccccccaaggagacagacccagcacggaccccccccccag

SEQ ID NO: 161201 - RNA, 81 nt, Homo sapiens
aaaggggccaggccgcccgaccagaaaagaagggggaaagcagcaggggccagaagacaaaaccgaaccacagaaaacaaa

SEQ ID NO: 161202 - RNA, 77 nt, Homo sapiens
ggcgggacgcggcccgggcggcggcgcggggaccgcgcgacaggccggggaagcgaccaaggaacgaccaaagcaga

SEQ ID NO: 161203 - RNA, 70 nt, Homo sapiens
cacagcaaaaggccccgcgcgggcgaacacacaaagccgcaccaggggaccccaagccgaggaacagcgc

SEQ ID NO: 161204 - RNA, 52 nt, Homo sapiens
gacgacgaccgggacccgagcaggacagccagaccccaggaagacaccccaa

SEQ ID NO: 161205 - RNA, 81 nt, Homo sapiens
ccacacccagagcgccccggacgaccaggcaccgcgcgggcagggaacaagagccaacaaggccccaggcaggggggccgc

SEQ ID NO: 161206 - RNA, 73 nt, Homo sapiens
agaaacaagaacaggcaacaccaacaccgcagaagcgcgggcccaggcggaggcggaggcaaggcagaccggc

SEQ ID NO: 161207 - RNA, 74 nt, Homo sapiens
gaccgccccaccgacgccgaagaaaacagccccacagaagcagacgcgagcacaggaacggcagcaagcgacgc

SEQ ID NO: 161208 - RNA, 78 nt, Homo sapiens
caaagcgcgaccgggccagagcccccacgcaaaccaagcccagggcgaaagcggcaccaggacagcccgagagaaaac

SEQ ID NO: 161209 - RNA, 66 nt, Homo sapiens
cagacgcagggcgcccccgagcaccaagcggaaaacgagacgaaggacaagggaccaaaaggcgga

SEQ ID NO: 161210 - RNA, 84 nt, Homo sapiens
cacaccacgggcggccccagaagcggagacggagcggcggcaagcagcgagagacaacaagaagggacgggcacaccccggcac

SEQ ID NO: 161211 - RNA, 47 nt, Homo sapiens
aaagagacagcaagagcgggacaacagagccgacacagccaagaagc

SEQ ID NO: 161212 - RNA, 88 nt, Homo sapiens
cgcccggaggacacgagggccacaaagaacagacccggcgacaggaggcagaggggcccccggccgaaagacaggcggcgccagccgg

SEQ ID NO: 161213 - RNA, 58 nt, Homo sapiens
aaaagacacgccacaaccgacggggagcaggccggggagggagaccaagagcaaaagg

SEQ ID NO: 161214 - RNA, 85 nt, Homo sapiens
gcccacgaaaggcagccgcggacgccgcgccagcgacaaacaagaccagcgaagcaggccccggcagcccacgaacccaaggaca

SEQ ID NO: 161215 - RNA, 58 nt, Homo sapiens
caacccacaggcagcagacacccaggacccggaagaggcaccgagacaaccaagcaag

SEQ ID NO: 161216 - RNA, 72 nt, Homo sapiens
gacaggggcaccccggagccgacggcggagggaaccaagaccaggacaaagaagacccggagagacaagccg

SEQ ID NO: 161217 - RNA, 81 nt, Homo sapiens
cagaggaggccccccagccacggaaacagggagaacaagaccaagaggaaagccagccagaggagggaaacagcaaaaaga

SEQ ID NO: 161218 - RNA, 79 nt, Homo sapiens
ggccccacaccaccgcacgcgcgcccgccgcccgaggagccccgcgcgagggcaggcacgagcaaggaggagccccgaa

SEQ ID NO: 161219 - RNA, 77 nt, Homo sapiens
aacaaagcaacgagagcgcggaacaacagagaagaaacccgggaggacgggccgacgccacggaccgccgccaccag

SEQ ID NO: 161220 - RNA, 61 nt, Homo sapiens
gccagggccgccaaaccagccaaaggaaacgccacacccgcgcagagcaaccgggggaagc

SEQ ID NO: 161221 - RNA, 79 nt, Homo sapiens
gggggaccacgaaaggagcaagagcaagacaccggacaccgagggcccccaaaagcaaccgcggggggaacccgaggaa

SEQ ID NO: 161222 - RNA, 67 nt, Homo sapiens
ggacggggcgaaccgagcaccagcgacacaccccgcccggagagccggaacagccggcccaaagcag

SEQ ID NO: 161223 - RNA, 39 nt, Homo sapiens
ggaaacggaaggaaacgaagacaccgaccggcacagcca

SEQ ID NO: 161224 - RNA, 48 nt, Homo sapiens
acccacaagagcagcacaaaaccagaggaagacggggcccaaagagga

SEQ ID NO: 161225 - RNA, 58 nt, Homo sapiens
ggacacgcccagccccgggcacggaaagagagggggcagagagccaaacgacaaccca

SEQ ID NO: 161226 - RNA, 80 nt, Homo sapiens
ccagaccagagacagaagcagaggacgccaggcgagggcggaggccggcagaaggggcgaggagcacagggggagacgag

SEQ ID NO: 161227 - RNA, 77 nt, Homo sapiens
ggcgagagcggcagcagcaccagcccaagagaaggaggagccaggagaaagccaggaagaaaagacccacagaaaag

SEQ ID NO: 161228 - RNA, 79 nt, Homo sapiens
gaaaccccgcccacagcacgaggcccaggggggcgcagacaagcaaaagaggcggccgaggccagggcagacccggcgg

SEQ ID NO: 161229 - RNA, 80 nt, Homo sapiens
ccgaccaagagcgaagcgacggagaagacagaggagccagaccaagagacagcacaggcgagcgagcagagacaccaggg

SEQ ID NO: 161230 - RNA, 55 nt, Homo sapiens
acggaccccagaccaaggcacagaccccagggaaacgaagaagagaaaaagaaga

SEQ ID NO: 161231 - RNA, 82 nt, Homo sapiens
ccggcgcgcgcgccccgccccaagcaccgcaggggaaggaagacagaaccccacggaagaggaaaccaagcagcccagcagc

SEQ ID NO: 161232 - RNA, 83 nt, Homo sapiens
gacggacgaggagaggaggagggggacgagcagcagcggccccaacacccccgaagagggaaggagagcccgaccggacgacg

SEQ ID NO: 161233 - RNA, 75 nt, Homo sapiens
gaaaagcaccggagccgccgcgcagaccacagccgcgcaacgggcgaccccgagggaacagagccacagccaggc

SEQ ID NO: 161234 - RNA, 66 nt, Homo sapiens
cagaccgaccaccaaaagcacaggcaggacgaccgggaacgcggcaaccaaaagcgcaggccagcc

SEQ ID NO: 161235 - RNA, 69 nt, Homo sapiens
gggaccacacagccagaacagggacgccagccgcagaggaagacccgcaggcaagaaccacagaacaac

SEQ ID NO: 161236 - RNA, 60 nt, Homo sapiens
ccccaaggaagccacggcagacacacaacccgacccgacgagcacaagaccggcagggag

SEQ ID NO: 161237 - RNA, 66 nt, Homo sapiens
agccccccaaacccgggacgcccccgggccaaacggcagcaaaaacagacagaaagggaggaaggc

SEQ ID NO: 161238 - RNA, 78 nt, Homo sapiens
agagccacccaaagccacaccgacccaggccggacagcccgggagacgagccccggagccccaacgaaaggcagacga

SEQ ID NO: 161239 - RNA, 78 nt, Homo sapiens
ggggccaggacagagacaccacgggcagaccacggaggggcaaaggagcagagaacgacaagccacacgaggacagcc

SEQ ID NO: 161240 - RNA, 73 nt, Homo sapiens
gccccagcggaccgaacagagccaacccccagaaaaccgaaaagccgaggcgggcacagaagagagaaaaaaa

SEQ ID NO: 161241 - RNA, 66 nt, Homo sapiens
aaggggcccagaaaccagccaaccgagggaaggagcccgcaccaacaacccacaaggccagaaaga

SEQ ID NO: 161242 - RNA, 76 nt, Homo sapiens
agaagaggaccggaacacagacggacaagagaacaacaaacggcacggcacgaagcaaggcgccaccggaagaaac

SEQ ID NO: 161243 - RNA, 53 nt, Homo sapiens
agggcccaggaagaggcaagccgcggccgcacgagcggaaggacgaacaccac

SEQ ID NO: 161244 - RNA, 59 nt, Homo sapiens
gaaaaacaccgaaaggaggaacgagcggacaggaggggcagcagcaggacagggaaccc

SEQ ID NO: 161245 - RNA, 64 nt, Homo sapiens
cgccccgcacccggcggcacagagaccgagccgggcaggggagcggaccaggccaggacggccc

SEQ ID NO: 161246 - RNA, 59 nt, Homo sapiens
ggaccggggcaggaaaggaaccaggagagagcagccagagggggcacgccgcgaaagac

SEQ ID NO: 161247 - RNA, 80 nt, Homo sapiens
aggacaacagcacccgaacaccacaccagaggacgggaagcaccgggccgcccgccgggccgggagcccgaggccagccc

SEQ ID NO: 161248 - RNA, 70 nt, Homo sapiens
gggagccgaggcgccgaaggaccgacgcccgggaacacagcagaaccaggagaccggaaagaaagggaca

SEQ ID NO: 161249 - RNA, 88 nt, Homo sapiens
cgggcgcggagacgccggaagaagccagcgaagagagggggaaaaccccagacgccagaaagcgccaggcccggagaaaaagcgaacc

SEQ ID NO: 161250 - RNA, 80 nt, Homo sapiens
gcaccggagcgcgcagggggcgcgccgccgcccgccccagaccgcggcgaaagggcagggaacaaacggaagcggagaaa

SEQ ID NO: 161251 - RNA, 81 nt, Homo sapiens
agcgccagcccggcgccccccccagccccagcggaccgccgcgccgaccggagacaacagacgcaccagccggagacacca

SEQ ID NO: 161252 - RNA, 74 nt, Homo sapiens
ggacccccgcccagagaagcgagaagagagaaaagcgaagggagggccgccccaaccgacgcaccagccggagg

SEQ ID NO: 161253 - RNA, 69 nt, Homo sapiens
gaaggcgccgaagaggacgaagggggacaggagccaggccaagagaaagaaacacagaagcgagcacca

SEQ ID NO: 161254 - RNA, 76 nt, Homo sapiens
gcgcggagccacgcaagcggggcccgacaccgcgggggcccgaaggagagcggagaagggaggcagccgggggggg

SEQ ID NO: 161255 - RNA, 82 nt, Homo sapiens
acaagggccccaacaggcaaggcagcagcacaaaggagccaggggggggcgcagccacaaagaagcccgccagccagaaccg

SEQ ID NO: 161256 - RNA, 73 nt, Homo sapiens
caaccgccgggcgcccccggacagaccaacgcagggagagggccaaaggaacgggacagcacggcacacaccc

SEQ ID NO: 161257 - RNA, 65 nt, Homo sapiens
gaccaagaaccagccccggcagccgaacaaaccaggcccgcgaaaaaccacccaacagccgcagc

SEQ ID NO: 161258 - RNA, 82 nt, Homo sapiens
ggggcaagggggggggcaagaccaccgcaggacaacaccccccggaaagagggaggcgggcccccgaacacccccgcgcgac

SEQ ID NO: 161259 - RNA, 72 nt, Homo sapiens
cagaaaggcaaaagaaagaggacagaaggggacccacggaaggaaccgggaacaaagagcagaagaccccac

SEQ ID NO: 161260 - RNA, 75 nt, Homo sapiens
ccccagccgcagccacaacaccggcaggaaccaccaggacagaagaccgaaggagcagacgaggcacgagcgcca

SEQ ID NO: 161261 - RNA, 56 nt, Homo sapiens
aaaacgaggacgaaggcagaagccacaacaccagaacggccgagcgaccaggagag

SEQ ID NO: 161262 - RNA, 82 nt, Homo sapiens
acgcccgccggggagccaagaggcaggcccgagggccccccggggccccccgggcaaggaagcagacagagagcagaccagg

SEQ ID NO: 161263 - RNA, 85 nt, Homo sapiens
ccgagcacgggccgaggcccaccgcgacacaccgccaggccccggagacaggaggccagagaggagggcagggggggccagccac

SEQ ID NO: 161264 - RNA, 49 nt, Homo sapiens
cagccccaccgcccccacagacagcgaacccacccaacacggcaaaaca

SEQ ID NO: 161265 - RNA, 78 nt, Homo sapiens
cggcggccacgcccgccggaccgcgcccaggccccccagggccagcccgcaacccccggcgaccacgggcccggcaac

SEQ ID NO: 161266 - RNA, 62 nt, Homo sapiens
ggccaaaccagagagcccgaaaacccacaacgcgcagacccaggggagcccaccagccagca

SEQ ID NO: 161267 - RNA, 78 nt, Homo sapiens
acgagagggaggcggggccccgcagaccccaacaggaagcacaaaagcaacaggccagggggggagagaacggccaag

SEQ ID NO: 161268 - RNA, 78 nt, Homo sapiens
cccggccgagcgggcacgagcggaccccgcccaggccgggagcgcacaagagcaggggagcagcaagccgggaaacag

SEQ ID NO: 161269 - RNA, 82 nt, Homo sapiens
gcccgcgcccgccgggccaccgcgcccgcccagccccgcccggcggaggggacgacggcccagacagaccagcacacagagg

SEQ ID NO: 161270 - RNA, 55 nt, Homo sapiens
ccagcacccggccgagacggcggcagcagcggcacaggcgccgcgcccggggaga

SEQ ID NO: 161271 - RNA, 77 nt, Homo sapiens
ggcagccgaaagaacgcaggaaggagaaacacaggccggaaaggaaaaacaccagaacggaaacagaaggacacacc

SEQ ID NO: 161272 - RNA, 81 nt, Homo sapiens
cagccagggaaccacggagcacgagaaaacggcggggcaccgaggagaaagcgcccgaaagagaacggagccacgcaagac

SEQ ID NO: 161273 - RNA, 80 nt, Homo sapiens
aaaacagcggaggagaccgggaaaccgccgaagacgaaggcaccaccccaggcaaaagaacaacgccagcagcagagcac

SEQ ID NO: 161274 - RNA, 79 nt, Homo sapiens
gccccgcccccagggcccgcccgcgcgaagagaagcccggccagcaccccagggggcccgccaggccagcagcagcagc

SEQ ID NO: 161275 - RNA, 88 nt, Homo sapiens
gaaacaggcgccgcgggcccgcgcccggccggacccgggcccgagagaaggagggggcagagcacggcaggcagaaggggccaacccg

SEQ ID NO: 161276 - RNA, 80 nt, Homo sapiens
caagaacaggccaaagaaacaccacggaagaagagagaagacagggggccgaccgagaacgccaagccgccacgagccaa

SEQ ID NO: 161277 - RNA, 39 nt, Homo sapiens
aacagggccgccaccagcccaggcggaggagggcgcaac

SEQ ID NO: 161278 - RNA, 80 nt, Homo sapiens
gaagaaaggcacgcagcccagaccccaaaaagacgggacagggagaaaacgaagcggagccaacccggagaacgcgccaa

SEQ ID NO: 161279 - RNA, 80 nt, Homo sapiens
gggagaggagagaaaggcggaagacgaggacaggcaccagcgagaacgcgaccagcaagaagaacgagccccccgaagcc

SEQ ID NO: 161280 - RNA, 71 nt, Homo sapiens
gagacaagagaggagacccaacagacggcgcccggcgcaggccaaagggcccccgaaccagcgaaaacaaa

SEQ ID NO: 161281 - RNA, 42 nt, Homo sapiens
agcagagacgaaccaggcaaaggccaacggaccacaccaaaa

SEQ ID NO: 161282 - RNA, 80 nt, Homo sapiens
ccgccgcgcccgaagggaaggaagcgagggcggaaaacaccccaaaagccaaaagggaaaggaaaagaccaacaacagcg

SEQ ID NO: 161283 - RNA, 79 nt, Homo sapiens
cggacgggcgccacaagccacacggagggaccaggccggcacgacaagacccaggcacagcacacaaggccacgggaca

SEQ ID NO: 161284 - RNA, 75 nt, Homo sapiens
ccgggagcggccccaacgagggggaacccccgcggaacccacggagagacgaaaccaggaaaaggacaaaggacc

SEQ ID NO: 161285 - RNA, 86 nt, Homo sapiens
cggcgagaggcggcgcccgcgccgagcgccagccaggggaaagaagccaaggaaaaagcacccagaccaaaaaaaaaaaacaaccg

SEQ ID NO: 161286 - RNA, 72 nt, Homo sapiens
acacaagcggacagaacagacgggacccccagccaaaggcaaagagagccacaggccgcacaccccagagcc

SEQ ID NO: 161287 - RNA, 85 nt, Homo sapiens
agaggacccaggagaaacgccccaaaggccgcccccaaagccaaccaaggagaggagaggaagagcagcggggcagaggacgcaa

SEQ ID NO: 161288 - RNA, 77 nt, Homo sapiens
cgacgggaccgagagaccgcgacacgggggccagaaggaaagcaaggcaagagaagcacgacccagacccccagcag

SEQ ID NO: 161289 - RNA, 83 nt, Homo sapiens
ggacgacggaccggacacaccggggacaccggggaaggaggccagacggaccgaggccggacccagggacacacaagacggag

SEQ ID NO: 161290 - RNA, 81 nt, Homo sapiens
ggcgagaggaggaggagcgcggaaacggcgggcccaggaccggaaggacaaaggccacacaaaacaccaaagaccaagaca

SEQ ID NO: 161291 - RNA, 42 nt, Homo sapiens
gaccagccgcggagccgggggcaggacacacacccccacgac

SEQ ID NO: 161292 - RNA, 51 nt, Homo sapiens
aaggaccaagaaccagaaggagagagcacgaccaccgccgagagacccaca

SEQ ID NO: 161293 - RNA, 76 nt, Homo sapiens
ggaagagagaccagaaaggacaggacggcggacccgcagcacgagccaccagcacagaagaagacagaagcggaag

SEQ ID NO: 161294 - RNA, 57 nt, Homo sapiens
ccaggcacgcaccacagaaacaggaagaaagagcggcccgcgcagaacagcggggag

SEQ ID NO: 161295 - RNA, 36 nt, Homo sapiens
gcaaacacaccgcccgcccacaccaaacagcaccag

SEQ ID NO: 161296 - RNA, 76 nt, Homo sapiens
gggagacccaggcgggacagagggagccaggcagaggcccacagacaagccgcccccccacccgacggagcggcga

SEQ ID NO: 161297 - RNA, 44 nt, Homo sapiens
ccagcaggcggcaccaaggcaaaacggaagacaacgaggggcac

SEQ ID NO: 161298 - RNA, 55 nt, Homo sapiens
aagaccaagcgcgaaagcgccaaaaggacagcaggagaaccagaggacaaaaagc

SEQ ID NO: 161299 - RNA, 85 nt, Homo sapiens
gagcagccgcgggcgcccgaggggccgagcgaggcagccccggcgggaccgggacgccagcccagaagcacccagacaaccagac

SEQ ID NO: 161300 - RNA, 65 nt, Homo sapiens
gagcggagggcaacggcacagcgggagcagagccccgagccagcagggagaagcgcggaagccac

SEQ ID NO: 161301 - RNA, 77 nt, Homo sapiens
gaacggccaggcggccccgagcggaacggagaaagcgaggagcagagaaagggggaggcggacccggcaacacgaac

SEQ ID NO: 161302 - RNA, 86 nt, Homo sapiens
ccgcggcggcagcagcaggagagccccacgcaggccccaccaggcgccgccgcgcacgcccaacccagagcgggccccgcaggccg

SEQ ID NO: 161303 - RNA, 72 nt, Homo sapiens
cccacagccagcaacaccggaggaagcgagaaggaggccagcgagacaaaagcgcagagaagcaggaagaga

SEQ ID NO: 161304 - RNA, 84 nt, Homo sapiens
acagaaagaccaacagaaacgaggacaaggaccgccgggcaagacccaaggagacagaacagacagaaaaaacaacaagaaacc

SEQ ID NO: 161305 - RNA, 64 nt, Homo sapiens
aggcgagcaggggcgggagagccccgcagaagacgccgacgagggaggccaagggaggacacca

SEQ ID NO: 161306 - RNA, 75 nt, Homo sapiens
ccgccccccgccgcgaagcacacgccgccccgacgcgagggcagccccgccaggacgaagaacggaagcgcccca

SEQ ID NO: 161307 - RNA, 72 nt, Homo sapiens
aggaaacaggccccaggcccgacggccggccggaaaaagaagaccaccggacagcacggagaaaggggagag

SEQ ID NO: 161308 - RNA, 102 nt, Homo sapiens
gagccccacacccgccgcgcccggcacgcggcaaggagcccgggaagagacgccgggagcgacgaagaacggaagcgccccagaggagagggcggagagacg

SEQ ID NO: 161309 - RNA, 54 nt, Homo sapiens
gaaaggcgcccgggcgaagagagggaagcgagaggaacggcaagaaggcagaca

SEQ ID NO: 161310 - RNA, 49 nt, Homo sapiens
agggcgcccccgccccccaagaccggagggccagggagggcgaacgagg

SEQ ID NO: 161311 - RNA, 64 nt, Homo sapiens
caagaccaggaaacccgaacccgaaggacacagacaaaagaccaggagagagcagcaaagcacc

SEQ ID NO: 161312 - RNA, 77 nt, Homo sapiens
gccccgcgcgcggccggcggcccaggcgcacaccgcgggcggagaacggaaaagcaccaggaagcagagaggaccgc

SEQ ID NO: 161313 - RNA, 73 nt, Homo sapiens
cagccggccgaagcgcacccccccccggagaagagagaaaaaaccccacccaaaccagcggggacgagagccc

SEQ ID NO: 161314 - RNA, 55 nt, Homo sapiens
aggacagacacccgcaacccagccagccaccaggggagagagagaccccgcgcac

SEQ ID NO: 161315 - RNA, 78 nt, Homo sapiens
cggagcgaagggcagaggaagcgccgccaggcccgcaggaccgccggagacagggcaagccaaaacggaaaacgccga

SEQ ID NO: 161316 - RNA, 69 nt, Homo sapiens
gcgaggaacgccgggcgcgggcccacgcggcgcaggaccgacagcacgaggaggagagaagaaaagcgg

SEQ ID NO: 161317 - RNA, 56 nt, Homo sapiens
cgcggcacacaacagagcgaggccggcggcgcaaccgaccccagaaggacagccaa

SEQ ID NO: 161318 - RNA, 84 nt, Homo sapiens
cgagagagaaaagccgaggaaaagagaaagacagcaacaacaaccagcagcaacaaggaaacagcaccagcccgaagaagccgg

SEQ ID NO: 161319 - RNA, 77 nt, Homo sapiens
gaggaacaggcggcgggcgagccgccgggcccgggaggagcaggggcagaggggagaacccagccgggaccaagcac

SEQ ID NO: 161320 - RNA, 76 nt, Homo sapiens
accacaagcccgcgccgcgcagggaggcgccgaaggggagaggcggccggaaggaaaagacgggcaacacacggaa

SEQ ID NO: 161321 - RNA, 83 nt, Homo sapiens
caagcaacgcgggaagagaaggcggggaaaacacacacgccgcgggagcccaaggcggccgaggggcccgaggcaacaccccg

SEQ ID NO: 161322 - RNA, 51 nt, Homo sapiens
gggaggaacacccagacgccacacacagaacgacaccacagcgacaaccgg

SEQ ID NO: 161323 - RNA, 88 nt, Homo sapiens
cggacgggggaggaggcaacgccgcgcccgagaccgaggacgagaagaagcgcgaggaaggcaaagggcggaccgcagagaaggcgaa

SEQ ID NO: 161324 - RNA, 76 nt, Homo sapiens
ccaggacgaaaaagacaaagagccacccccagcaggacgaacgaagcggccacggagcccaaaaggaaaaagaaac

SEQ ID NO: 161325 - RNA, 76 nt, Homo sapiens
accccgggcccgcggcggcgggcacccggaggcgcccgagcgggacacaacagcacagcaccccaacaccagcaga

SEQ ID NO: 161326 - RNA, 55 nt, Homo sapiens
agacgacaaaggcgcaaggcaggcagcgacgccgcaccacgggcgcggcgagcca

SEQ ID NO: 161327 - RNA, 47 nt, Homo sapiens
caccaagacagaaggcaccaaacggacagaggccagagaggagccca

SEQ ID NO: 161328 - RNA, 75 nt, Homo sapiens
gcagcccgcaggacagcggagcggcaacgcccacaaagagggaccgcaggaagggccaaagccccaagaacccag

SEQ ID NO: 161329 - RNA, 72 nt, Homo sapiens
aaggggagaaggcaggcaccacaaaaaggacagagcagcagccgcgccccgaccgccacaggccacaacagc

SEQ ID NO: 161330 - RNA, 75 nt, Homo sapiens
gagagacaaccaaaagacacaagggcacgaaagagggccgggaggaagaaacccccacgcaagggagcaaaaggc

SEQ ID NO: 161331 - RNA, 76 nt, Homo sapiens
gcgaagggggccaaaagcgacggaaaaccggcagcaggagaggccacgccagggaaggggccaccagcaaaggaag

SEQ ID NO: 161332 - RNA, 39 nt, Homo sapiens
cagacgcgcgccggacaacgggcggagaacggaaaagca

SEQ ID NO: 161333 - RNA, 79 nt, Homo sapiens
aaagcccagcggccaaacaaccacaagcggaggaaaaacaagaaggggggcacagcagaaggaaggagcagacaaaacc

SEQ ID NO: 161334 - RNA, 75 nt, Homo sapiens
ggcggagcgacggggaggcgcggccaacggggccacaagggagagcagaaagacgagccgccggggaaaaagcgc

SEQ ID NO: 161335 - RNA, 85 nt, Homo sapiens
cgaggacggcggcggaccggggcagccccgcgcccggccaggacccaaagacaggaccacgcaccagcagagaaggaaagcaaac

SEQ ID NO: 161336 - RNA, 42 nt, Homo sapiens
gcacccgcaccaaggccaaggaagaaaacaggcagaggcgcg

SEQ ID NO: 161337 - RNA, 59 nt, Homo sapiens
cggcaaccaaagggcaccaacaaccgcggaagcgcaacaaggacaaaccggcgaccaca

SEQ ID NO: 161338 - RNA, 77 nt, Homo sapiens
ccagaccgggcgacccgccggacagagcgaagaaccccccaagaagacgaaacccccgggccacaagaaggggggcc

SEQ ID NO: 161339 - RNA, 111 nt, Homo sapiens
agcgcaggagggggggcacaagaagagaggcccaccaaaagacacgggaaacacccggacgcagaaaaggcgcggaacaaggacccaacggaacagaggcaagggacacaa

SEQ ID NO: 161340 - RNA, 61 nt, Homo sapiens
aaccgcacggcgggcgccacaggccccagcacaagacgggccacccggagaaaggccacgg

SEQ ID NO: 161341 - RNA, 79 nt, Homo sapiens
ccaaaccgcggcaagcagaacggaaccagaaccccaccgcggaggccgcgccagaagggaagaaaggcggaacggcggg

SEQ ID NO: 161342 - RNA, 54 nt, Homo sapiens
cgaaacgcacgagaaggccggaacgggcggacccagagccagcggaccacacac

SEQ ID NO: 161343 - RNA, 69 nt, Homo sapiens
aagaagagggagaggagcagagaagagacaagcaggcaacggaaaggaacacggagaacggccacagaa

SEQ ID NO: 161344 - RNA, 83 nt, Homo sapiens
cgcccccgccgccggggacagcaaccccggaggccggaggaacgggcccgcaagcgcgccgacagaccgaaaccgagcagcaa

SEQ ID NO: 161345 - RNA, 54 nt, Homo sapiens
caacccgccaagcaccaaaggagagaaagaagagcccgaaggagaagagcaagc

SEQ ID NO: 161346 - RNA, 51 nt, Homo sapiens
ggcggcgggcacccggaggcgcccgagcgcggagcggcggacaccagaaga

SEQ ID NO: 161347 - RNA, 81 nt, Homo sapiens
gaggaggcgccggggcgcaggcgggggacccccaaggcacccgccggcgccccccggcacaacccgcgggcaccagccccg

SEQ ID NO: 161348 - RNA, 67 nt, Homo sapiens
gcagaaacgcaccaggccaaagaaagagaagagaagacagaggagccagaccaagagacagcacagg

SEQ ID NO: 161349 - RNA, 69 nt, Homo sapiens
aggggcaagagccgccgaaagggaagcaagagggcgggcgaacagcgcagcgcacaccgcaaaacaagg

SEQ ID NO: 161350 - RNA, 76 nt, Homo sapiens
cccagaaaaagcaccccgaggaggaagacgaacgaaacacaggcaggaccgggcaaggagggacagcccgaccaag

SEQ ID NO: 161351 - RNA, 64 nt, Homo sapiens
gaggagccccaagaacagaggaaaccccccaggcaagaggcgcaggaccgggaagaccaacaaa

SEQ ID NO: 161352 - RNA, 67 nt, Homo sapiens
gacaccaccaacggaaaacaacacaggaaacagaagacagccgaaccaagggcgacaaccagagaca

SEQ ID NO: 161353 - RNA, 61 nt, Homo sapiens
agaccaagcccgaagcgcacaggcgaccggcccgaggaccgccgcacgaccaaacgcagaa

SEQ ID NO: 161354 - RNA, 58 nt, Homo sapiens
gggggcacgcggaaacggcgggcgcggaacagaggaaagagagccacgaaccacggca

SEQ ID NO: 161355 - RNA, 34 nt, Homo sapiens
aaagaccaacacagcaaccagacaaacagaagga

SEQ ID NO: 161356 - RNA, 88 nt, Homo sapiens
agcgagaccggagcgccacggccacgccccccgcaacaacccacaagccccaaaagcacgcacgaaaccggcaagccagcggagggga

SEQ ID NO: 161357 - RNA, 71 nt, Homo sapiens
ggccggcagcgggcaagaaaacaggcacgacgcggcgcggagacaggaggagccccaccacaagacggagg

SEQ ID NO: 161358 - RNA, 79 nt, Homo sapiens
agcgggaacgcaaacgaaggcggacagcaaaccacaagagcaaggagccccagaggggggcagcagcccccaccgagag

SEQ ID NO: 161359 - RNA, 72 nt, Homo sapiens
gacaagaagcgcgacggcaggaagaggagaggcggacgcagggccgaacggagaccagagggaaaacaaaaa

SEQ ID NO: 161360 - RNA, 73 nt, Homo sapiens
acaacgggaaagcaagaaccagcacaccggggagagagaccaacaagggacgcagagcgcaacccagcacccc

SEQ ID NO: 161361 - RNA, 63 nt, Homo sapiens
ccagccgcggggcccggggagaggaggggccggggcgggccgcaggcaaagaaaaagccagcc

SEQ ID NO: 161362 - RNA, 74 nt, Homo sapiens
gaggaacccgcaaccgaagcacaaaagacaaacccggggaccaagagacgggaagcccgaagccagagagggca

SEQ ID NO: 161363 - RNA, 77 nt, Homo sapiens
agaagcaccacggagacaggagaaccggggcaagagacggcagacaaacacagccgagagaaggcaggcgacgggca

SEQ ID NO: 161364 - RNA, 82 nt, Homo sapiens
cacccaccgccgccgcccccaggaccacaaaacaaaccacccaacacaagcaaagaccacgaagccggaaaagaagacagaa

SEQ ID NO: 161365 - RNA, 61 nt, Homo sapiens
caacacgcaaaagacaggcacacagcaacagaagaccggccgcggagcgacgcgcacggac

SEQ ID NO: 161366 - RNA, 67 nt, Homo sapiens
ccgaggaagcccaacccagagcccccggcagcaccaaagaacaaggacgaagagagacgcgcgaaga

SEQ ID NO: 161367 - RNA, 81 nt, Homo sapiens
caggagacacagcaaccggggcaacaccaccagcagagaaagacccccagaaaccaccaccggccagagagaaaagaaaag

SEQ ID NO: 161368 - RNA, 82 nt, Homo sapiens
gacaccagcccgaaacaccaccaaggcccccccaggagcaaggcgcagcccccccggcgagccgccgggcccccacgggacc

SEQ ID NO: 161369 - RNA, 76 nt, Homo sapiens
ggcggagcccgcagaccgcagaaggccggagacaccagcagcggacggccggcccgggccagggcccagaaagcca

SEQ ID NO: 161370 - RNA, 51 nt, Homo sapiens
cacagaccgaaaagaaagcaggggcagggacgcccgcaccagacacgagaa

SEQ ID NO: 161371 - RNA, 70 nt, Homo sapiens
cgccccagagggacagccaacggagcgaagcagagccaggagcagcgcaggcaggaagaaccacaagcgg

SEQ ID NO: 161372 - RNA, 91 nt, Homo sapiens
ccggcagcgcccggacgaggagaggccgcggaacaccaccggaacggcgcgcgcagaccgggcagaggagcagcgccggcaccaagagggc

SEQ ID NO: 161373 - RNA, 82 nt, Homo sapiens
acaccacacgccaggcacggaggagccgaacggcagggcaggggaggacgcgagcggaagagaagcaaaaagacaaggagga

SEQ ID NO: 161374 - RNA, 34 nt, Homo sapiens
aaggacgacagccagagagggaagcccagaggca

SEQ ID NO: 161375 - RNA, 82 nt, Homo sapiens
acggagcccggcccgggcgagcggggcgcgccgcagagcggcaccgaaggacaggagacggagcccaacaagcagccaggag

SEQ ID NO: 161376 - RNA, 48 nt, Homo sapiens
ccaaaggacgaagaacccacagagggcaccacagaacagccgaagcag

SEQ ID NO: 161377 - RNA, 76 nt, Homo sapiens
caggcaggaaaagacagaaaccagggcgaaggacgaggaccgaaaaagggcagaggacgaccagagcggggaaaac

SEQ ID NO: 161378 - RNA, 77 nt, Homo sapiens
cggacgggagcaagcgacccggccggacccaccgaccagggccggaccagcaggacccaaaggagcgccaagccaaa

SEQ ID NO: 161379 - RNA, 77 nt, Homo sapiens
aagaaagccgggagacagacgagaaaaaagagcgacaccgccagccccaacgagcaacaacagagggcgggaccacg

SEQ ID NO: 161380 - RNA, 70 nt, Homo sapiens
acccggccccagggcagggcagccggacgcaaggagggcacccagcaccaggcacgcaaaagaaaggagg

SEQ ID NO: 161381 - RNA, 75 nt, Homo sapiens
gaaaacaccagcaggcggaggaagcgaaagcccagcacgcagagagcagagaacgagaaagagcccccccccagc

SEQ ID NO: 161382 - RNA, 72 nt, Homo sapiens
gcaacacggacagcacaaaccgccacacaaaagcggacaagcgaaggaacggacaaggcacccccaagccgc

SEQ ID NO: 161383 - RNA, 50 nt, Homo sapiens
gaaggaccaagaaccaggaagcgggcaccaacagacaaccagggcaagca

SEQ ID NO: 161384 - RNA, 90 nt, Homo sapiens
cggcgggacgacgcggacagcgggcggagccgacgagcggcggacagcccagaagaaaagagggcacaagccaaagagaccgaagaagag

SEQ ID NO: 161385 - RNA, 100 nt, Homo sapiens
cgccgccgagcagccgccagccccacggacggacgccagccccacaacagaagccacagggaggaggaccagcgggagggccacggaacgccacaccggc

SEQ ID NO: 161386 - RNA, 69 nt, Homo sapiens
ggacacgcggcagagaggccaccccaggccaccagcaagaccaccccccgagaacgagggcggaagaag

SEQ ID NO: 161387 - RNA, 78 nt, Homo sapiens
aaccccgcccgggccaagcagcccgcaccagcccccaaggagcgggacccaggccagcaagagaacgaccaagaaggg

SEQ ID NO: 161388 - RNA, 63 nt, Homo sapiens
agcgccacgcgcggaaggcagcgcccagcagcgcaggagaaagcccgaacgcgggaagaacga

SEQ ID NO: 161389 - RNA, 78 nt, Homo sapiens
agcaaccaccagcagcccccagagcggaacacaggcagcacagcaccagaagcagcacgagccccaggcagaccaaag

SEQ ID NO: 161390 - RNA, 75 nt, Homo sapiens
cgagaggcaggaccgccccagcccaggggggaagagcaaaaaagacccaaaaaaggcacccaacacaccacggaa

SEQ ID NO: 161391 - RNA, 76 nt, Homo sapiens
gagacccaccggagcagagcgccggaaggccagaagcagggccgagcaacacaggggcgagcaccacagggaccca

SEQ ID NO: 161392 - RNA, 78 nt, Homo sapiens
gaggagcagaggccaggcgcgccgggagaacacagaagagaacccgaacacagcaggagcaagcgggggcaggagcca

SEQ ID NO: 161393 - RNA, 87 nt, Homo sapiens
ggcgcgcggggggggcggaggcgcgccgagggcggcgggcgccgcgcaagggggcgcgcgcgcggcggaggcaaggcgcaaccggcc

SEQ ID NO: 161394 - RNA, 56 nt, Homo sapiens
ggcccacgcacaagcgggcaccagggccgaccgccgcaggcagcacacagaaagag

SEQ ID NO: 161395 - RNA, 79 nt, Homo sapiens
cgcgccaaagccgaagccccaaggagcagaagcacaagcagaggaagggagccagcaaacgagggcaggaggaaccgcc

SEQ ID NO: 161396 - RNA, 64 nt, Homo sapiens
gcgaacaaaggaaagagggaagccacaaggaaagcgaggcccagaaggggaagacccccagcga

SEQ ID NO: 161397 - RNA, 36 nt, Homo sapiens
cacagacccacaagcaagcacagcacccaacgagag

SEQ ID NO: 161398 - RNA, 78 nt, Homo sapiens
agcccgggcccgcagaagaggcagagacgaagaggggccagcacacgcacaggagagggcgcaagaagaccccgacca

SEQ ID NO: 161399 - RNA, 77 nt, Homo sapiens
ggaggagggaccggcgggaggagggagaagaggaagaccagccagaaacacccacagacccaccaaaggggagacaa

SEQ ID NO: 161400 - RNA, 66 nt, Homo sapiens
gaagagcaagcgggggaccgaacaaggcaaaaggggaacgcgaacacgcgaccccggcaggaggac

SEQ ID NO: 161401 - RNA, 66 nt, Homo sapiens
cagcagcaagagcccaaacgcacaggaagggaaggggcggagacgggcggaacgcaggaggccaga

SEQ ID NO: 161402 - RNA, 39 nt, Homo sapiens
gcaggggccgccccagagcagccccaccccacggagcgc

SEQ ID NO: 161403 - RNA, 84 nt, Homo sapiens
ggaccaggcggaacaaggagaagaaccaggagacggaggaagaacccaagccagagcccagccaaccgaggcaaaagaaacaaa

SEQ ID NO: 161404 - RNA, 78 nt, Homo sapiens
gcgagcgcccgaccacaccaagcggaaaaaagacaccagcgacaaggacagggcggggaacagaccagggaaggggag

SEQ ID NO: 161405 - RNA, 74 nt, Homo sapiens
gagaaacaaagagcgcagagacagagcggacacagacaggcaggagaagaaggagcggcagaaggggcgaaaac

SEQ ID NO: 161406 - RNA, 74 nt, Homo sapiens
ccagggaaaggagcagagagagagagcagaagccgcagaaagcaacaaagcgagagcacaagaaaacagccccg

SEQ ID NO: 161407 - RNA, 79 nt, Homo sapiens
cggcgccccggacggccgcgccccggccgcgccggggccgcgcggccccgcggagccaggcaggggcacaccagacaga

SEQ ID NO: 161408 - RNA, 77 nt, Homo sapiens
gagaccacacccaggaagccaggcacgcacagcgcggggccggggagcccgggccagaccccccagacccagcccac

SEQ ID NO: 161409 - RNA, 77 nt, Homo sapiens
gccgcacgagggccagcgcgccgcgccaggaccggaggcagagacggggcgacggggagaggcaggcgaggggacga

SEQ ID NO: 161410 - RNA, 77 nt, Homo sapiens
cgccgccgccgcagccgccggagccgcaagccaaaggagggaaacccagacgacaaggaaggccaagggacccacga

SEQ ID NO: 161411 - RNA, 73 nt, Homo sapiens
aggcaaagagccgacaccgggacagggacagggaaccagcggcaccaggcggcaggaacaaagaaagccagcg

SEQ ID NO: 161412 - RNA, 76 nt, Homo sapiens
cgggaacgcaggagcgaccagaagacagcaaagccacagagagagcccgcgagagagaagggaaagaaaagccaaa

SEQ ID NO: 161413 - RNA, 79 nt, Homo sapiens
aagacgcaaggggagcacggggccggaccagccccgaaacacgggaggagagaaggcgaggaagcccaagcacaaagga

SEQ ID NO: 161414 - RNA, 58 nt, Homo sapiens
cccggaagcccccacgggccaccgacccgcagagcagccccgcgagccgcccaggggg

SEQ ID NO: 161415 - RNA, 80 nt, Homo sapiens
ggagcgggccgccgaagcagcgcgcccgggccacccccggaccccggagaagcagaggaaaaggcacaggagggcagacc

SEQ ID NO: 161416 - RNA, 35 nt, Homo sapiens
ggaaaaccgacacaacaggcgacacaacccaagac

SEQ ID NO: 161417 - RNA, 65 nt, Homo sapiens
gcaaggaggccccagcggaccgaacaggggcagggcccagccccgaaccagacaagggaccccca

SEQ ID NO: 161418 - RNA, 67 nt, Homo sapiens
gaccagcacagcacaagacacagggaaaagaaggacggcgccagagaaggaacagggacgaaaggga

SEQ ID NO: 161419 - RNA, 79 nt, Homo sapiens
acccggaaggccaaaggcgcgcaaggaggaaggacgcaaagaccacagcagcgcgcagaccggcccgggccccaaccaa

SEQ ID NO: 161420 - RNA, 84 nt, Homo sapiens
gcaggcccggccgacggccacacggcggccgcagggcgccggagccccccaggaagaggaagaaaagccaaacagaggccaagg

SEQ ID NO: 161421 - RNA, 80 nt, Homo sapiens
gacaggggcaagaaacaaacaaaagggacacgaaaagcacaaaccccacacgcagagcaaacccggaccggcggggggaa

SEQ ID NO: 161422 - RNA, 65 nt, Homo sapiens
agacagcaaaaaaaaggaagcacaccagagggcacggagccagcaccacaacgcccaccgcagcg

SEQ ID NO: 161423 - RNA, 67 nt, Homo sapiens
acgcccaacggcagacaggccccgagggagagaggcacggcccccgggacggccgccggagcagagg

SEQ ID NO: 161424 - RNA, 80 nt, Homo sapiens
gagggccgagggagggccgagccagccgcggccggaggagcccccaggccaacggccggggggcgagcgaccgaaagaca

SEQ ID NO: 161425 - RNA, 78 nt, Homo sapiens
gagcggggcaggggcgacgagagcgcgcggaacggcaagaacccgaccacaggacagggaccaagcagacacccagaa

SEQ ID NO: 161426 - RNA, 68 nt, Homo sapiens
accacacagcgcccaggccagagaaggggaaggaggggcagcggcaggggcaaggcagaaagcggcgc

SEQ ID NO: 161427 - RNA, 50 nt, Homo sapiens
gcagaaccaaacccaccgcaagacagggaagcggacgcagagcgcaaccc

SEQ ID NO: 161428 - RNA, 55 nt, Homo sapiens
agcccaggcggcgcggacggggcggaggcgcaggaagggcaacaccaaaccagaa

SEQ ID NO: 161429 - RNA, 80 nt, Homo sapiens
gagacgggcggcgaacggcggaggcaggggggggagcacgggaggcagcgacaggacaggccgggagccggcccccagcc

SEQ ID NO: 161430 - RNA, 81 nt, Homo sapiens
gaccggccgagaggaagacgagccgggaggaacggcccggaaacaggaggaccccccgggcgcgccggacaggccgccgcg

SEQ ID NO: 161431 - RNA, 68 nt, Homo sapiens
aaaaccacaaagcggccgaaacagaaaacaagagaccacagaagggacaagcagaggccgagggcggg

SEQ ID NO: 161432 - RNA, 74 nt, Homo sapiens
cgggcaccacccaaagaagcgggcaacacagagggccacacggggaaacggccaacagggggccagccagggag

SEQ ID NO: 161433 - RNA, 77 nt, Homo sapiens
aaacacaggcccaacagacaagaacaaggaagccccccagaaaagaggcgaggcaccacacaacaaaggaacggaac

SEQ ID NO: 161434 - RNA, 71 nt, Homo sapiens
cgcggaaggcagcgcccagcagcgcagcaaggaaaaacagaggccgcaagacgaaacgagggcagcacaag

SEQ ID NO: 161435 - RNA, 68 nt, Homo sapiens
aagaaacaacaggccaggcccggacaggacacaagaaccggaacgggagaacagagcccgccccaaac

SEQ ID NO: 161436 - RNA, 81 nt, Homo sapiens
gggggcggcgcggccagaacggagccccaaccgcgcgccgaacgaagagaaagggccagaaggaagacccagaaagagagc

SEQ ID NO: 161437 - RNA, 96 nt, Homo sapiens
gaaacggacaaccaacggccaagaacaagaacaaaggccgcgacggagaagccgagaaacaagccacccccgaaagagggagacaacgaagaacca

SEQ ID NO: 161438 - RNA, 58 nt, Homo sapiens
caggaagggcacaaaggaaaagcacaagaagagaaaggcgaggcaaggcaggaagacc

SEQ ID NO: 161439 - RNA, 74 nt, Homo sapiens
acccgcccccggacacaacacccacgcaggccagagagggaccaagaaaggcccagggaccaaagcccggacaa

SEQ ID NO: 161440 - RNA, 79 nt, Homo sapiens
gcggaggccgaggacgcggaggacgcggccgccagagaagacccaaaaacgcccgggaaagaaaacggaaacaaaaaca

SEQ ID NO: 161441 - RNA, 45 nt, Homo sapiens
aggaaggagggcagcccaagggggagagagaacggggagaagcaa

SEQ ID NO: 161442 - RNA, 79 nt, Homo sapiens
cggaagggaaagcccaaaaacacgagcaggcgcgagacgggggaacggacccccaggaaagcaccgaaaggagagggag

SEQ ID NO: 161443 - RNA, 43 nt, Homo sapiens
gcgagaacgaccccgagacgggccggccgcgcacccagacccg

SEQ ID NO: 161444 - RNA, 59 nt, Homo sapiens
ccggagcgggaggcgggccagcgacaaaaagaggaccaaagacagagacaagcggggaa

SEQ ID NO: 161445 - RNA, 71 nt, Homo sapiens
gccggcggcgcggcgagagagcggcgacagaggggagcgagcccccaaacggccgggaaggacaacagcag

SEQ ID NO: 161446 - RNA, 68 nt, Homo sapiens
ggaaaacaggaacagagcgagggaggagagagggagagccaaagaagaggaacagggagggcccccgc

SEQ ID NO: 161447 - RNA, 73 nt, Homo sapiens
gggagggacgacaggccgcccgcgacagaaccaccaccaaaaagccgggaacgcggagaagaagaagacacgg

SEQ ID NO: 161448 - RNA, 75 nt, Homo sapiens
ggccgaccgggagggagcggagaacacagcagccggccacggggcggagaacggaaaagcaccaggaagcagaga

SEQ ID NO: 161449 - RNA, 81 nt, Homo sapiens
cacacgcaaagcagagaaaggggcaaagaaaaaggagagaaaaagaggcaaaacaacaagaagaaaagagaaaaaagagag

SEQ ID NO: 161450 - RNA, 77 nt, Homo sapiens
acggcagcggagggggaacccgcagcaggcccccggcgcggacgcggcaccaacaagagacaggagaaaacgacccg

SEQ ID NO: 161451 - RNA, 58 nt, Homo sapiens
gccgaggcgcccccaccacccacaaggggccagcacgaaagcagccaggagaagagca

SEQ ID NO: 161452 - RNA, 77 nt, Homo sapiens
cacggccaacagcccgcagggaaaagagccagccaaaccgaaacaacagagcggccgacgaggaggccaagacaacc

SEQ ID NO: 161453 - RNA, 74 nt, Homo sapiens
cccgggacagggaccagcgggaaggcagacagcgagggcgacgaccaccgcaccagccaagacagacgggccag

SEQ ID NO: 161454 - RNA, 84 nt, Homo sapiens
ccgaccacacaagggagggcggagggaaccaaagagagcgcagagaggagaccgcagagggccaggagaagggcagagggaaga

SEQ ID NO: 161455 - RNA, 82 nt, Homo sapiens
gcaaggccgcccgggaacgcgacgcgagagaaggacccacggcgcgcgaagggaagcaaaaaaagccaacggaccccacaaa

SEQ ID NO: 161456 - RNA, 72 nt, Homo sapiens
cgacaccgcgggccgccagacgggaaggggccaggacaggacaggaccggacagcccccagccagaggacag

SEQ ID NO: 161457 - RNA, 72 nt, Homo sapiens
acggccggagagaaaacgcaaggaaaggaacaggaacagaggcccaagaacacccgggacaccacagcaaga

SEQ ID NO: 161458 - RNA, 58 nt, Homo sapiens
gagcacgaggacggggagcaagaagagagagagagagagaggaagcgaagaaaaagcg

SEQ ID NO: 161459 - RNA, 35 nt, Homo sapiens
ccaaaggggacacggagaagcggaggagaccaagg

SEQ ID NO: 161460 - RNA, 74 nt, Homo sapiens
acgaaaacaccggaacaaaaggacggcaacaaggcgcagcggcgaacaccagaaagagacaaggagggcgacgg

SEQ ID NO: 161461 - RNA, 85 nt, Homo sapiens
cgggcgccacaccgagaggcagcccccagccccggcaggagagagcagccaccaggcccccccagcagcgccgcggccagccccc

SEQ ID NO: 161462 - RNA, 76 nt, Homo sapiens
gaccgagcacccgccccgggcaccaacgccagggcccagcagcagcccacggggccagcggaggaaaaggggagcg

SEQ ID NO: 161463 - RNA, 77 nt, Homo sapiens
ccccccggcgccgcgccggcggcggggaggaacgcaagcggggagaacagaaaccagagaggacagggggggacggg

SEQ ID NO: 161464 - RNA, 78 nt, Homo sapiens
ccccccggaccagagagccagccccgggcaacaaagggaaaggagaggagcagggaaaaaaacgcaacacccaaacgg

SEQ ID NO: 161465 - RNA, 74 nt, Homo sapiens
aaaccagccccaggaggggacaaaaccccgaaaaaggcgccagaaccacaagaccgcaagccagccccaaccgc

SEQ ID NO: 161466 - RNA, 86 nt, Homo sapiens
gagggggccggaccgggagggcagcccgagaccgaggacgagaagaagcgcgaggaaggcaaagggcggaccgcagagaaggcgaa

SEQ ID NO: 161467 - RNA, 54 nt, Homo sapiens
aaagaggcgggcagaacacggagggaagagaggcgggaagagggcgggcgcgac

SEQ ID NO: 161468 - RNA, 72 nt, Homo sapiens
gagaccaggagaccggcagccccagcgacccaagaaccgggcgccagccggaagcccgagggcagcgcccac

SEQ ID NO: 161469 - RNA, 62 nt, Homo sapiens
cggagcggcgcagccggagggggccggagccccaagggaggaagaaaccgaagagggaaacc

SEQ ID NO: 161470 - RNA, 73 nt, Homo sapiens
ccggaacggcccagcaaaaaaccaaaaagacccggaggaaaccaaagcggcgcaagcaggaaaagcagagccg

SEQ ID NO: 161471 - RNA, 83 nt, Homo sapiens
gccgccgaggaggcgagcagccgggagacaccgccaccgccaggcagagcagccgagaagaagccaaaaaacacggaggagca

SEQ ID NO: 161472 - RNA, 77 nt, Homo sapiens
cgcacgaacgccgcagcccccagccgcgcgcgcgcacccccggacagggccagcagcagagagacagggaagaaggg

SEQ ID NO: 161473 - RNA, 77 nt, Homo sapiens
cgccaggcgggcccccgcggcccgggcgagcccggagaagaggaaggaaccccgacagcagagacgacgcggcaagc

SEQ ID NO: 161474 - RNA, 77 nt, Homo sapiens
gcggcgccggcggcgcgcgacccccgcgcaggcacccaaaggccccacgggacagcccaccggcgccgcgagcgggc

SEQ ID NO: 161475 - RNA, 73 nt, Homo sapiens
gcgcgcggagaagaaggggaaaaaggagagccaggacaagcccaagacggacagggagccaaacaggcagcga

SEQ ID NO: 161476 - RNA, 71 nt, Homo sapiens
cccaacagagccccagcaaggccaaagagccccaggacgagacaaggacacacccagaaagagccaaacga

SEQ ID NO: 161477 - RNA, 71 nt, Homo sapiens
gcaggccagcgcagcaccaccggcagccggggagccacgacaacagaggacaaccggaaacacacaggaac

SEQ ID NO: 161478 - RNA, 71 nt, Homo sapiens
gaaccaaagaagcaaaacacgaggcgaccaaaacgaggaggcacgcacagggaagcaaaccaaccagacca

SEQ ID NO: 161479 - RNA, 85 nt, Homo sapiens
ggcaggccagcccggagcgcccaggcaccaccaccagggccagagagggacgaagggggggaacacgacaaggggccaagaacag

SEQ ID NO: 161480 - RNA, 82 nt, Homo sapiens
cggcaggaagccaaggcaccgggacgcgcacccccgcgccgcacggggacgagcacccaggccacagaggaggaaagagagg

SEQ ID NO: 161481 - RNA, 69 nt, Homo sapiens
accaaccgaggaaggcaacagaacagcccacccaaacaagaacaccacgccagaaacaaaggaaaaggc

SEQ ID NO: 161482 - RNA, 53 nt, Homo sapiens
cacagggaaccaaacacccccagaaagggacaggggcccgagacacccccgcg

SEQ ID NO: 161483 - RNA, 56 nt, Homo sapiens
caccagacgaccgcggaacaaacagaagacagcgaaggggagaggccaacaaccaa

SEQ ID NO: 161484 - RNA, 78 nt, Homo sapiens
ccaaccagaaacacagaccgaagggcacagcacacgaagagaccgacagacacaaggaaagggaaaaccagggggcag

SEQ ID NO: 161485 - RNA, 68 nt, Homo sapiens
agggaccggacaagcaggcccaggcccggccaaagacgaagcgcagaaggaacaagggacagggggaa

SEQ ID NO: 161486 - RNA, 71 nt, Homo sapiens
gacaagaacccggagagggcgagaagggaacggcgaaaggcaaggacacagcgcggaagggagacccagaa

SEQ ID NO: 161487 - RNA, 67 nt, Homo sapiens
gccccagcacccccagcgggcagcgagacgacgggaccgaaggaccccgccagagacaaccgagcgc

SEQ ID NO: 161488 - RNA, 44 nt, Homo sapiens
agagacaccaccgagaggcgccgcgggcggacacgccagaggag

SEQ ID NO: 161489 - RNA, 75 nt, Homo sapiens
ggaaggggacccggggacgcggcgagacagcaagcggaaaaggaaaccagaaaaacggagccgaaccgggacccc

SEQ ID NO: 161490 - RNA, 86 nt, Homo sapiens
agcacagagaaagagaagagaagagaaaggcccggagacgcgaagccgacgagcccgaacagacgcaccagcgggaggaagaggga

SEQ ID NO: 161491 - RNA, 78 nt, Homo sapiens
cgcgcccgcccccgggagcccgcacggaaaacaagcgaccagaagaacgcacaaaaagagcgcagggaaaggccaggg

SEQ ID NO: 161492 - RNA, 69 nt, Homo sapiens
accaaggaagcccgaaagaacaacaaaaacacgcacccgaccagcggacagaagcacccccagcagcgg

SEQ ID NO: 161493 - RNA, 74 nt, Homo sapiens
cgcaaggccggcgcggaggaggggagcagcgcgcaagcagggcgacagccaggaagccacagacccaaggaaag

SEQ ID NO: 161494 - RNA, 70 nt, Homo sapiens
cagcgcacaagagagagccccccacgcaacacagggagggcaggcgcgcgaacacaaaggcgcgagggac

SEQ ID NO: 161495 - RNA, 75 nt, Homo sapiens
agaaacagcgaccaccgaggagacaagcggagcgagcggagggaaagcacgaccaggaacccgggcgaaccggaa

SEQ ID NO: 161496 - RNA, 86 nt, Homo sapiens
cgcaagaggagaccaagaggcgggggcgcacgacaaccagcagccgagagggaaccaagaacgagacaccaccggcccgggccacg

SEQ ID NO: 161497 - RNA, 53 nt, Homo sapiens
caccaggagcaccgaagaggggggccccccacgccaacgaccgcccggcagaa

SEQ ID NO: 161498 - RNA, 123 nt, Homo sapiens
agcagagcgaccgcagcaccaggagcagcgaggcaccaccgcacgccggcgaggccagcgaccgcgaccgcacaagcagccgccagcggaaccaagcggcgcggcacacgagaccagggcggc

SEQ ID NO: 161499 - RNA, 85 nt, Homo sapiens
gggaaaacggagagcagcagccgcccgccaaccccaggggaccagaggaaccagcccgagcgccaacaggcagaccacagaaacg

SEQ ID NO: 161500 - RNA, 52 nt, Homo sapiens
cccgcccgagaacaccaggagacacaagacagagagagcaaaacgacgaagg

SEQ ID NO: 161501 - RNA, 99 nt, Homo sapiens
gcccaccccccacgcaccgcacaacaagaggccggcggggcgacagggagaagaaaaagcagaaaggaacagaaaacaaaagaacaaggcacaacggac

SEQ ID NO: 161502 - RNA, 86 nt, Homo sapiens
accggagaacgccaagcgccgccacgacaagggcgcccgcgccggcagaggaggcgagcacccgccagggagaggaacccccgcgc

SEQ ID NO: 161503 - RNA, 64 nt, Homo sapiens
ggcgcaccagagaccggacccgccagcgccgcagcgggaaccgcaagagcggggaggaacgccc

SEQ ID NO: 161504 - RNA, 86 nt, Homo sapiens
ccggagcgcgaaggccgggacccggccccggcccacaggggggggcaaacccgagagaacgggagaacgcgccgccggccggggcg

SEQ ID NO: 161505 - RNA, 61 nt, Homo sapiens
gaagaggcaccggaggagggagagaacgccgagccgcgccgcagccccgccgccgagaagc

SEQ ID NO: 161506 - RNA, 70 nt, Homo sapiens
agaggaaggcaggagcgaaggaggcagcccagaacgcagcagaacacggagcagaagaaggggcgaaacc

SEQ ID NO: 161507 - RNA, 80 nt, Homo sapiens
agcgacgcgcgccgcacggaggcaagaagaaacccaccgcaaagagagaaggagaagcggcgaggaaggaagccgacgcc

SEQ ID NO: 161508 - RNA, 61 nt, Homo sapiens
aacacagggagggccccgagaacccgaaagccaggacaaaaccaggcagaaccaacacgaa

SEQ ID NO: 161509 - RNA, 49 nt, Homo sapiens
caggccgggcggccccggagggcccgcaccccagcacgacagggcgaaa

SEQ ID NO: 161510 - RNA, 76 nt, Homo sapiens
ggaagggagaggacgccaagaccagcacgggaggggaagccaaagcaaccagagaaggcagacacagaggccgggg

SEQ ID NO: 161511 - RNA, 87 nt, Homo sapiens
gaaaacaaccacccccaggaccaacgagggcaagagcggaaacagaagagacaaagcagagacggacagccaggaaaagcagagaag

SEQ ID NO: 161512 - RNA, 71 nt, Homo sapiens
agccccgcacagcagagagcaacccgaaaagggagaagaaaaagcagaaaggaacagaaaacaaaagaaca

SEQ ID NO: 161513 - RNA, 78 nt, Homo sapiens
gagcgagcgagggggggcgcgccggaaaccggagcgcgcagcagagaaggcaccggccaaagggggcgaccgggacag

SEQ ID NO: 161514 - RNA, 68 nt, Homo sapiens
cccaagggcgggaacaggcaaccacaacaggaacaccagaaggaaacagggcccaaaccggacaaaag

SEQ ID NO: 161515 - RNA, 75 nt, Homo sapiens
acgaagagagaacaagcaaccacacgaaagcgggccaaccacgagcaaacagggaagacgggccaaacaaggcaa

SEQ ID NO: 161516 - RNA, 73 nt, Homo sapiens
cgggcggccccggcgggccacagcccaaaccacaacccaggagcgaacgaccggaccggggcggccagagcac

SEQ ID NO: 161517 - RNA, 68 nt, Homo sapiens
aggaagagaggcgccacgcagcagcacaagaccgcagcacccggaggaagagaccacgaccaaaagaa

SEQ ID NO: 161518 - RNA, 53 nt, Homo sapiens
acagcggaacagcggaaccggagacaggcaggggcacaaaaccaggggaaaga

SEQ ID NO: 161519 - RNA, 78 nt, Homo sapiens
gacaccaccgaggccacgggacccggccaacgacacagacagaccgaggggacggaacagaagaccgccacagaccgg

SEQ ID NO: 161520 - RNA, 77 nt, Homo sapiens
gcaaagcaaaaccacaacacgcacacaaacggggacggcagcccaccggcaccaagagggggggagcacgcgggcga

SEQ ID NO: 161521 - RNA, 82 nt, Homo sapiens
ccaccccccaaggggccgccgagggagaccggccagagcaaggacgaaggacaggcgggcgggacccccaggcgccacagag

SEQ ID NO: 161522 - RNA, 85 nt, Homo sapiens
gccccgcagacggcgggggcacgacagcgcaaggaggccgcacccaaggccgcagacaaggggcccaccacgaggacaacgaggc

SEQ ID NO: 161523 - RNA, 53 nt, Homo sapiens
ccgagggaggacaccggaccccggacgcgggaaagggagggagcagaccaggg

SEQ ID NO: 161524 - RNA, 71 nt, Homo sapiens
ccaaaggcggaaacagaaggacagaaaggacaccagccaccacgggacaccagcacagaaagcagcccggg

SEQ ID NO: 161525 - RNA, 71 nt, Homo sapiens
caggcacacgggaacagcccacccggccacaaacccacacaacagagaacgggacaaccccagagaaagag

SEQ ID NO: 161526 - RNA, 81 nt, Homo sapiens
cccacaggcgacagagggcgggaggacaaagggagaaggcagagacgaaggagcccagagcgcccaaaccgggaccaaccc

SEQ ID NO: 161527 - RNA, 80 nt, Homo sapiens
gccacgaggagcaaacacccaaaagaccaaaggggagaacgaccaggagcggccgaggaccgcgcggagccagaaggggg

SEQ ID NO: 161528 - RNA, 40 nt, Homo sapiens
cccggcaccacccacgagacgaccagcccaccgcacccag

SEQ ID NO: 161529 - RNA, 73 nt, Homo sapiens
ggccagcgaaaacgcccagaaacaacgaacgagcaaggaagggccaaggcagaccccacaccggagaacgcaa

SEQ ID NO: 161530 - RNA, 71 nt, Homo sapiens
aagaaacccccccaaggacaggcgaacagaagacgagagcagcagaaacccacgcaggccgaggaaacaca

SEQ ID NO: 161531 - RNA, 85 nt, Homo sapiens
gccacgcgcgggcccgggccaggccgccgccgagccgaggacaagcacagcccaccccagaccggccggaagagagacaaaggag

SEQ ID NO: 161532 - RNA, 91 nt, Homo sapiens
gcccaggacaaaggggggagcaaaccaccacaaaacggagggaaaggccaagcagagagaagcgaggaccaacgaaggccaccccagcgcc

SEQ ID NO: 161533 - RNA, 78 nt, Homo sapiens
agggagcgcccaccagaggagcgaaagagagagaaagagaacccccgagggacgggagaccaaagaaggcagaaaaaa

SEQ ID NO: 161534 - RNA, 84 nt, Homo sapiens
ggggagagggagccccaaggcgcacaccgaaaaaaggcagcggaaagaagaaaagaaacggcccacaagacccagccccacacg

SEQ ID NO: 161535 - RNA, 68 nt, Homo sapiens
gaccagcaggaacgaccccgcaggagccgcgagaaccgagccggagcagggcccacaggccagcgacg

SEQ ID NO: 161536 - RNA, 94 nt, Homo sapiens
ggaggagacaaccgacccggcgaccggcagacccaggggcaagacagaccggggagaagaacggaccgaagccaaagaacaagagcgcagggac

SEQ ID NO: 161537 - RNA, 79 nt, Homo sapiens
aaagaaagagaggaagaaagaacagaacagcgaaacaagagacgacggaggcgccgcacgacgcggggacagaccccag

SEQ ID NO: 161538 - RNA, 70 nt, Homo sapiens
acgacgacgaggaagaggaggcgagacagggcagaccgaggcgaccgggggcaacaggcaaagacacaga

SEQ ID NO: 161539 - RNA, 46 nt, Homo sapiens
gagcccaccaagcgggaaagagaagaagaaggaggccgcggccaga

SEQ ID NO: 161540 - RNA, 71 nt, Homo sapiens
cgggcaccagaggggaaggggcccgcacgcagaggccggacgcagaggggaggaggacggcgcggcccgca

SEQ ID NO: 161541 - RNA, 45 nt, Homo sapiens
caccaaggaacgggcgcagcgagagagccagacgacaacacaacc

SEQ ID NO: 161542 - RNA, 79 nt, Homo sapiens
cgcgggaggcgcgggccgggccggcgggcgcgcggcaacgggggcccaggcgccccaggagggccagagcgggagacac

SEQ ID NO: 161543 - RNA, 82 nt, Homo sapiens
gaagccgagccgcgaggagcgcacccgggccccgaggagcggacaaaggcggacaacgcaggcccgggagaaccaggaaacg

SEQ ID NO: 161544 - RNA, 76 nt, Homo sapiens
aagaggcacaggcccaggcagaccgcagcaaacaccccacacaggggacgggaccagagcggcagacaaggacaag

SEQ ID NO: 161545 - RNA, 73 nt, Homo sapiens
acacacaacggaacgccacacagaggaaagcacaaaggaagacgaaccggagaagagaggcacgaaggccccc

SEQ ID NO: 161546 - RNA, 39 nt, Homo sapiens
gcccccagccagggaacgagaaacagagccaccaaggga

SEQ ID NO: 161547 - RNA, 71 nt, Homo sapiens
ccaggcgcagaagaagcacccagcaagcgagggaccgggacgccacagccaggcgggcgccacggaaagga

SEQ ID NO: 161548 - RNA, 78 nt, Homo sapiens
gcgagcgagggggggcgcgccggaaaccggagcgcgcagcagggacagagcgaagaaccccccaagaagacgaaaccc

SEQ ID NO: 161549 - RNA, 68 nt, Homo sapiens
ccagcccagggaagccggcacccacgcccaacggcgcgcacagacggccacagaagcccagccaagga

SEQ ID NO: 161550 - RNA, 68 nt, Homo sapiens
gcaagaccgggcacgcaccgaccaccccgaccggagcagcggagccgcggaagagggaaagcagaaga

SEQ ID NO: 161551 - RNA, 47 nt, Homo sapiens
ggcaaggcagaagcgggggggggaacagacaacccagaaaaacaagc

SEQ ID NO: 161552 - RNA, 80 nt, Homo sapiens
acgcaaccggcagcagcgcgccgccgcgcccagccaccgccccccccacgggcgacacaccaaacgcaggaacccgccga

SEQ ID NO: 161553 - RNA, 75 nt, Homo sapiens
ccaaggcgaccaagggaggccccgggaggccgaggcgggcggggccacgcaggggccggcggggcgcgaagaagc

SEQ ID NO: 161554 - RNA, 39 nt, Homo sapiens
ggggaccggagcgaggaggaaggaaggaggaaccaaaag

SEQ ID NO: 161555 - RNA, 57 nt, Homo sapiens
cgacggaaagaacaggaagagcagagagcgcagaaaaggccggcgaagaaggcaggg

SEQ ID NO: 161556 - RNA, 76 nt, Homo sapiens
cagcagccggaccgaaagacacaccaccggccaaaacaaaacgaaggggacagaccgaaccagggggagaagaaag

SEQ ID NO: 161557 - RNA, 84 nt, Homo sapiens
gaaggggcaagagggggaaagcacaggggcggaagccgaagcggcgggccagggagaacagagggagccgcccccgaagccaac

SEQ ID NO: 161558 - RNA, 51 nt, Homo sapiens
cagaagaaaagagcaagggggaaagcaaacaagaacgagccagcaaacccg

SEQ ID NO: 161559 - RNA, 52 nt, Homo sapiens
cgggccagagcaaaggcaaaagaaaaagcaacggcgcgccgcggaaaggaga

SEQ ID NO: 161560 - RNA, 74 nt, Homo sapiens
gaagacaacacccgcgaggaaaaggcccggccaaggaggccgcggacccgggcggcagacacgcccgggaggac

SEQ ID NO: 161561 - RNA, 73 nt, Homo sapiens
gggagcggggaccgcggggccccgggggcgccgagggcacaagggcaacgacagaagggcgaagccaacgcca

SEQ ID NO: 161562 - RNA, 95 nt, Homo sapiens
accgggaaccgaggagacgagccaacggcggccgccccgggcacacccggcccccggacgcccgagaaacacagcccaaagaaacacaccccccc

SEQ ID NO: 161563 - RNA, 88 nt, Homo sapiens
ggccgcgagcgggccgccaccacgccaagcagaaggcgagacgcggcccaggcccgggcgggaaggacaccccaaaaccagcgggggg

SEQ ID NO: 161564 - RNA, 50 nt, Homo sapiens
accaaaaaccagagaccgcgccagcgccacgagaaacagccccagaaggg

SEQ ID NO: 161565 - RNA, 82 nt, Homo sapiens
gcacacagcccccggagaacaagacgcccaccccacaagggcccggccccaccaaaccgggagaaccaagcaaagaagaacg

SEQ ID NO: 161566 - RNA, 82 nt, Homo sapiens
ggccgcagcaacccgccgggcagcggaggaggaaaggcaggccaacaaccgcacgccgcggacaccaagcagagcggggcga

SEQ ID NO: 161567 - RNA, 72 nt, Homo sapiens
aaccacacagacaccaaacggacaacaaaaagaggccgacaggaaaacgcacaaggcgacaaggacagaagg

SEQ ID NO: 161568 - RNA, 84 nt, Homo sapiens
ggcgcccgcgcccgggccgcgggagcggagcccccgggaccagggcggagaacggaaaagcaccaggaagcagagaggaccgca

SEQ ID NO: 161569 - RNA, 75 nt, Homo sapiens
gcggcgcgacggcgggcgcaggacccaaagacaggaccacgcaccagcagagaaggaaagcaaaccgaagcaggc

SEQ ID NO: 161570 - RNA, 78 nt, Homo sapiens
cggagggagacgcccgaggacagggagggcgcgcagcggcgcggaagagaaacagcaacgcggagagagcgccaagcg

SEQ ID NO: 161571 - RNA, 79 nt, Homo sapiens
cggagaaccgagccaaaaagaaggaaaacgacagaccaaagagcaacccagcaaggcccaagcagacaagcccaagaaa

SEQ ID NO: 161572 - RNA, 64 nt, Homo sapiens
gaccccagcaggggacaccgggggcaacacccacgccccggagcccgggagcacagccggccag

SEQ ID NO: 161573 - RNA, 75 nt, Homo sapiens
ccaaaggaggcaacaagggagaagcagcaacggcagggcaagaacccgccacacaaggcgaacagagggcagcag

SEQ ID NO: 161574 - RNA, 82 nt, Homo sapiens
ccggccccgcggccggagcaccccccgcggggggccgggacaggcaggaagaagaccagcacaaggaaaaccgaaaaacacc

SEQ ID NO: 161575 - RNA, 62 nt, Homo sapiens
cccgcccccgcagcagcgccagggccaggccgagggcccgcccggccccaggagaagaacca

SEQ ID NO: 161576 - RNA, 69 nt, Homo sapiens
cccaagcaaaagaagagaaagaaaaaaacccaccacagaaccaggacgaaagaggagagaacgacccca

SEQ ID NO: 161577 - RNA, 54 nt, Homo sapiens
acacgcgcaaagcccgaccgggaaacacagagcggcggcggaaggagaggaagg

SEQ ID NO: 161578 - RNA, 76 nt, Homo sapiens
cgagcggccggcagggggaggagcggccgaagggggagaagggcgcagagacccccgccaagggccaaggaaagag

SEQ ID NO: 161579 - RNA, 61 nt, Homo sapiens
cccgaccaagcacgagagaaaaagcggaaagcgccgcaagaaagcaccgcaaggcagaggg

SEQ ID NO: 161580 - RNA, 62 nt, Homo sapiens
caaagcagccgaagagaggaagacgaggaagcagaagaacaccaagcccaccaacaaggaac

SEQ ID NO: 161581 - RNA, 50 nt, Homo sapiens
cagaaaagcgaaaaacgcggccggacccagcagggcccccggaacaaacc

SEQ ID NO: 161582 - RNA, 74 nt, Homo sapiens
ccccccccccaacaccgcgacacgcaggaaagaccacagcaagaccacgcccccagccgggggaccaggccgaa

SEQ ID NO: 161583 - RNA, 75 nt, Homo sapiens
agccacaaggaggagagacagccggaggaacggaaacaaaccagagcagggacggggggaaaagcgcacccgggc

SEQ ID NO: 161584 - RNA, 73 nt, Homo sapiens
agcccggcgcccgcggccagccgcaagacccgccacaagcaacgcgggaagagaagggcccaccccgccgagg

SEQ ID NO: 161585 - RNA, 75 nt, Homo sapiens
acgagccgccgacagagacccgcgccaccccgcgggcccacccccaagcaagcagcgacccccaagccaagcggg

SEQ ID NO: 161586 - RNA, 59 nt, Homo sapiens
cgcccgcccaaggcaggaagaggggccgcaaagaagacggccccaccaggccggggccg

SEQ ID NO: 161587 - RNA, 80 nt, Homo sapiens
aagaaaagcccaaggacaagggaggacagccaggcagagccacacgggaggaacacggagccaagaggaacacggagcca

SEQ ID NO: 161588 - RNA, 83 nt, Homo sapiens
cggcaagaccagacgggaacgggagacaagcgcagcgaggcggccggcgcggggcgcaggcggcgcggccagggccgcagggc

SEQ ID NO: 161589 - RNA, 68 nt, Homo sapiens
cccccggcgccgcgccggcggcggaacagagacagacccgggggcccccaaggagagggaagaagcca

SEQ ID NO: 161590 - RNA, 78 nt, Homo sapiens
acgcggagcgacccgccacgcggggaggcccgcccccccccacccccggagcggaagaaagggagggccgcaaccggc

SEQ ID NO: 161591 - RNA, 77 nt, Homo sapiens
ggcggacggccacgcagccaggacgcggaacggcacacgcagccagaagcaacaagagaagcagaaaaacagacacg

SEQ ID NO: 161592 - RNA, 59 nt, Homo sapiens
agaagagaccgacacaaggaaagcgaagcgagccaggacgccccaaggcccgcagggag

SEQ ID NO: 161593 - RNA, 74 nt, Homo sapiens
caggcgcgagaaggacgcgcagccaccccaggagaggagcaaccggaagggacaaaagaacaaaaaaggagacc

SEQ ID NO: 161594 - RNA, 60 nt, Homo sapiens
gaaaaacaaaggacagaaaccggcagcgaagaaaaagcagcggcgcaccgcagagacagc

SEQ ID NO: 161595 - RNA, 74 nt, Homo sapiens
aaaaggcggcggccaaggggagaaccgcagagcaaaccaagcagcgcaagacccaaacgagcggcaccgacaga

SEQ ID NO: 161596 - RNA, 75 nt, Homo sapiens
gccaccccccggcccgaagccccacgccagaaggacagaaaacgggccccagacacaagccccaccaagaggaca

SEQ ID NO: 161597 - RNA, 52 nt, Homo sapiens
cgacacacgacggaacccgaggaaaggaggccaacagaaagaacccagcacc

SEQ ID NO: 161598 - RNA, 77 nt, Homo sapiens
ccacacccccccggggggggggcccagacagacgagagcggcacgaggaccaaggggagcagacccagcagcggaag

SEQ ID NO: 161599 - RNA, 93 nt, Homo sapiens
cggagccgcgccgagcgcgcggagaaccagagaagccgggccaaccccagccccagcggcacggaggcacacaaccagaaggcccggaaagag

SEQ ID NO: 161600 - RNA, 71 nt, Homo sapiens
ccggggccggcggccaggggcgcgaccccccgggcggagaacggaaaagcaccaggaagcagagaggaccg

SEQ ID NO: 161601 - RNA, 80 nt, Homo sapiens
gccccccgccagaagccgaggaaagcggaagcggccggcaggggaaggacgagcacaagagggccagggaccaggggacg

SEQ ID NO: 161602 - RNA, 73 nt, Homo sapiens
gggaggagcgggacaccccggaagcgggaaagcaaggaccccacaagcgaccggcaaagcgccagagaacaac

SEQ ID NO: 161603 - RNA, 82 nt, Homo sapiens
ggaggccccagggaagcgcagaaagcaggcgaacccgcggcgcaaaacggccggccgcggagaaccgaaaaaacagccaacc

SEQ ID NO: 161604 - RNA, 93 nt, Homo sapiens
gggcagcagggggccagccaggacacacagacccagcggaaccgcagagaaacagcagaacaaacggaaggggaaggagccggcacaaacgag

SEQ ID NO: 161605 - RNA, 83 nt, Homo sapiens
ccgcccccggccgagcgacgacgaaagcgcgcgcgcagggagcagcacccccaccgcaggggcagaagggagcggaagcgcac

SEQ ID NO: 161606 - RNA, 80 nt, Homo sapiens
ccaaaccaacacccgaggcaagaagaggcccaaaacgcagggaagcgcaacagcaaaggaccgcagcccaccaggaaagg

SEQ ID NO: 161607 - RNA, 81 nt, Homo sapiens
cgagggggggcgcgccggaaaccggagcgcgcagcaggggcgggccccggccagggcccaggcagccggggcggaaccccc

SEQ ID NO: 161608 - RNA, 80 nt, Homo sapiens
gcagaggcggagcccgcagaccgcagaaggccggagacaccagcagacccaacagaggaagccgcaagaaacgggacgac

SEQ ID NO: 161609 - RNA, 56 nt, Homo sapiens
gcgacggcgccggcgcgcccggccgcccgcgggagagggaggccaacagacccaac

SEQ ID NO: 161610 - RNA, 53 nt, Homo sapiens
ggacaaaaccccgaaaaaggcgacacggacgacaccgagcccaaccgaccaac

SEQ ID NO: 161611 - RNA, 84 nt, Homo sapiens
agaacgaggaacgcccagagcccgcagcacagaccacagcagacagcaggccgaagaaaggcagcacgaagcagaagggacggg

SEQ ID NO: 161612 - RNA, 87 nt, Homo sapiens
ccgggacgcggagcccggagcggggcgacgaggcgagcgggggccgggcagaggcgaggggacggcggggagcgcaggacagacgcc

SEQ ID NO: 161613 - RNA, 79 nt, Homo sapiens
aaggaccaagaaccagggacccacaaagcacaagaagcaagagaacccccgagcccgacagagaacacgccgaagacac

SEQ ID NO: 161614 - RNA, 64 nt, Homo sapiens
ggagagaacgaggaggaaggagagaaaaggcgccacggcacggagcgggcacccccaggccccc

SEQ ID NO: 161615 - RNA, 52 nt, Homo sapiens
aggacagccaccagcgaacaccagcaccacccaaagcaccagacacgaaaga

SEQ ID NO: 161616 - RNA, 73 nt, Homo sapiens
aaccacaggaaagcagcgaggaacacagggcaagcaacaggaggcaaacacgccccgggggaccacacccaga

SEQ ID NO: 161617 - RNA, 60 nt, Homo sapiens
ccaaacggaaggaacggaggcgggacaagagaaaaaaagggcgggcgaacaaaaagagca

SEQ ID NO: 161618 - RNA, 68 nt, Homo sapiens
aagcacacaacaaacagaacgcaaagaacagagagaagggcgggagaaaccaaggaaagagaaaagcg

SEQ ID NO: 161619 - RNA, 75 nt, Homo sapiens
acaagccccaccaaccacaagaagaaaccaagggcagagcaacaagagaccgcaaccccagagacggggcgccag

SEQ ID NO: 161620 - RNA, 82 nt, Homo sapiens
aaaccaccaaaaaagcggaggcgcgcaggagccaagccaagagaaaccaccaagagccaggaaggcaaaggccgagagagag

SEQ ID NO: 161621 - RNA, 75 nt, Homo sapiens
ccccagcccagaaagccggcgggaggggggcaaggagaagaccggacgccaggaaagcaggcagagcaaccccca

SEQ ID NO: 161622 - RNA, 81 nt, Homo sapiens
aacgaggcgccgcgggcgcggacggcgggaaccggcccggagcgagaacgcgcggggcagcacgccgaaggagagaccaga

SEQ ID NO: 161623 - RNA, 73 nt, Homo sapiens
ccacaggaggcgcggaggacgccccaccgccgacgcccccagccaccagacaggaacacagaggacgacgccc

SEQ ID NO: 161624 - RNA, 99 nt, Homo sapiens
cgccccgcgccgcgccccccgcccgcccgggccgccaggaaagaacagaggcccggaaacacaagaggaagaggaaggggcgagaagagcaaaagcaca

SEQ ID NO: 161625 - RNA, 68 nt, Homo sapiens
ccagaagccccgaaaagagcaggcgggcagaggaaccaaaacacgggccagcacagagccaacaacgg

SEQ ID NO: 161626 - RNA, 80 nt, Homo sapiens
gagacacaccagggcaaggcccaacccagcagcggaccaaaacagaccaggaccgcccccaacggcccccgagagaaccg

SEQ ID NO: 161627 - RNA, 76 nt, Homo sapiens
gacagcagaacggaaagaaaggcggcgaggaagagccagaaggcagaacaagaagggcaaccaggggggaaggagg

SEQ ID NO: 161628 - RNA, 86 nt, Homo sapiens
aaaaacagcaagaacccaaaagggaagggaaaaggacagcacaggagcccccaaggagagcggccagagaacaacaggagaaacca

SEQ ID NO: 161629 - RNA, 83 nt, Homo sapiens
cgggagcggcacggaaccaacaaaaacaagcagaccggaagaccgacggaagaccacaccccgagggagcccaggacaccacg

SEQ ID NO: 161630 - RNA, 72 nt, Homo sapiens
cggacaaccagaagcagaaaggacagcagcgacacgggcacggaccagaagaacccacccagggagcgccag

SEQ ID NO: 161631 - RNA, 80 nt, Homo sapiens
acgagcaagggaacacgcggcaggaggagcaagcacaacaggccgaagaggccggagaaggacacgcgaagaagaagaga

SEQ ID NO: 161632 - RNA, 71 nt, Homo sapiens
accgggcaagccagccaaccaagaaagagcagggacacagcaggcaggagagacaacagcaacccagcaac

SEQ ID NO: 161633 - RNA, 69 nt, Homo sapiens
caccggccccacgcacgacgagagggacagcacggagaggagccaagcccaacgggacgggaaaacggc

SEQ ID NO: 161634 - RNA, 73 nt, Homo sapiens
cagaaggaacgcagaaacacaggaccccccccaacgaggaaagcaagaaccagaggcggagccgggggacagc

SEQ ID NO: 161635 - RNA, 84 nt, Homo sapiens
aaagaaggaagaaaacacaggagccggagcagaagcaaagagaggccgcgaaccagggcgcgggagcagcaacccaagagagga

SEQ ID NO: 161636 - RNA, 70 nt, Homo sapiens
gcagccgccccaggccagcagacaaaacggacccaaaaaagccaagccaagaagccccgccccgacgccg

SEQ ID NO: 161637 - RNA, 59 nt, Homo sapiens
ggagcacagaaacaagagcagaagccagcccaacaagacggaccagcgaagcgcggcaa

SEQ ID NO: 161638 - RNA, 57 nt, Homo sapiens
cgcacccgggggaccgggaggggcacaagcgaagaacaacgggaccagccaagaggg

SEQ ID NO: 161639 - RNA, 83 nt, Homo sapiens
cgccgcaggccgggaggagccgcagcgccgggcgaccccgcccgggcccgggaaaaagacaagggcagagcagccggggaaaa

SEQ ID NO: 161640 - RNA, 56 nt, Homo sapiens
ggaagcaaccagccgacggcccaaccccgcaagacccagaaggacagaaaccgaag

SEQ ID NO: 161641 - RNA, 58 nt, Homo sapiens
ccccaagagcgggagcagccgcagaacaagaacggcaggcgaaagaccgacagcaaga

SEQ ID NO: 161642 - RNA, 38 nt, Homo sapiens
aacaggccaacaaaaaggggacgcagacacgagcaggg

SEQ ID NO: 161643 - RNA, 75 nt, Homo sapiens
cgggggagccggaccgcccccagccgacagcgccacgggacagccaacaccagaccgagcccacgcgcgccacag

SEQ ID NO: 161644 - RNA, 64 nt, Homo sapiens
gcgaggcgcggagcccgggacgcgcgacgcccgcgccccggaagggaaaccacaggcccgagag

SEQ ID NO: 161645 - RNA, 77 nt, Homo sapiens
gagaggacacgcagagaaacaaccggagcgcaggagggagaagaaagcaaagaacaggaggccaaagaagaaacggg

SEQ ID NO: 161646 - RNA, 64 nt, Homo sapiens
ggaaccggagccgggcgggcagggacgcggcgccgagagccgaacaagcgcaggaggaaagaga

SEQ ID NO: 161647 - RNA, 78 nt, Homo sapiens
gacagggcacaccaacaccgacaacccccggagacaacaaccgcgggcacccacggaaaagagagaggagcgagagga

SEQ ID NO: 161648 - RNA, 89 nt, Homo sapiens
ccagcgccagcgcagccgccagcgccggagggagaacgcagaacaaagaccaggcggcccacacgccgggagacgcccaaagggggggg

SEQ ID NO: 161649 - RNA, 76 nt, Homo sapiens
gaggaaacgcccccgagaagaaggaggcgcaggcacacaggcccgagcacaaacacaagaaacgcacgcccgccag

SEQ ID NO: 161650 - RNA, 66 nt, Homo sapiens
ggcgacgagagcaagccaaagaccaaggggggggcacccccacaacgggcgcggggcagagcacgg

SEQ ID NO: 161651 - RNA, 75 nt, Homo sapiens
cgccgcgcgccaaagcgcgccgccccgggcaaaagcccccagaaacccacaaagccccgaggggcagggagccca

SEQ ID NO: 161652 - RNA, 81 nt, Homo sapiens
gacgcgggcgcacgcgcggagggagcgcgggaccaaagccccccgaggcaaggaacacaagaggggaaagcgaacccgaac

SEQ ID NO: 161653 - RNA, 68 nt, Homo sapiens
ggccaagaggcagaccaggaaaggagagggagggaccggggcacgggccccccagcccgcggaacggc

SEQ ID NO: 161654 - RNA, 34 nt, Homo sapiens
gcccgccagccgcggagccccagaaaaagaccag

SEQ ID NO: 161655 - RNA, 81 nt, Homo sapiens
cgggagcccgaggcgagaccaccggaggaagcggcgcgagcgccccgccacgcccggccgccagacccaacccagcaaaca

SEQ ID NO: 161656 - RNA, 75 nt, Homo sapiens
ccgagcccaggagcgccacgcgcggaaggcagcgcccagcagcgcaggaggaagccccccacgccgcaggccgcg

SEQ ID NO: 161657 - RNA, 37 nt, Homo sapiens
ccccgcggcacaaccagagcagcccccagcgggaaca

SEQ ID NO: 161658 - RNA, 83 nt, Homo sapiens
ggcggagggggagaacacccagagcccccgcgcggggacgacacggggcacaggcagaaggggcccggaccagcgcacggcgg

SEQ ID NO: 161659 - RNA, 41 nt, Homo sapiens
gccacagcaccccagcacccaggaccggagggagggaagac

SEQ ID NO: 161660 - RNA, 40 nt, Homo sapiens
ccagcaggacccccagagggcgccccgagaaggcacgcca

SEQ ID NO: 161661 - RNA, 67 nt, Homo sapiens
aaggcacaccggacaaggggagagaccgagcgccggaaacacgaggccgggacaagaaggcagcacc

SEQ ID NO: 161662 - RNA, 71 nt, Homo sapiens
agcaagcccgggcccccccacaggagcccaacccgagggcggagaacggaaaagcaccaggaagcagagag

SEQ ID NO: 161663 - RNA, 84 nt, Homo sapiens
cgcacccccggccggaggcaccagcgagcggcagagcacacgaccgaaaggaaagccagaagcagccgccggccgcgaccggag

SEQ ID NO: 161664 - RNA, 75 nt, Homo sapiens
aaccacggagcccccgaggcagcgagagagaaggacggaagagggccgaagcccagaggagcgggaacccgcagg

SEQ ID NO: 161665 - RNA, 73 nt, Homo sapiens
cccaaccagagaggaagacaacgagcgagacgacgggaccgaaggaccccgccagagacaaccgagcgccagg

SEQ ID NO: 161666 - RNA, 68 nt, Homo sapiens
aggaagggccccaggaacagggagccacggccgcggggaaacaggaccggaaggagcaccagccaggc

SEQ ID NO: 161667 - RNA, 74 nt, Homo sapiens
aagaaccaaaaggggcccagcacccggagcgaacagccagacgaggcgcacggaagaccaggagagagagggac

SEQ ID NO: 161668 - RNA, 79 nt, Homo sapiens
gagcgcccggcggaaaaccgaagggaaggccagcagcgcgcggagaagaacggggagccagggcgccggccgggcggag

SEQ ID NO: 161669 - RNA, 43 nt, Homo sapiens
gcaaaacccaagcaaaaccagagcaaaggacccagaaagagac

SEQ ID NO: 161670 - RNA, 72 nt, Homo sapiens
cgggaccacgaggcaacgccccagacaggagaccggcacaccacaggcccaaggaccggcacaacgcacacc

SEQ ID NO: 161671 - RNA, 80 nt, Homo sapiens
gaagaagggcgagggagcaagcgcacacgaagagaagcaaggcccaagacccaggcgggcaacaacacggcaccacacaa

SEQ ID NO: 161672 - RNA, 72 nt, Homo sapiens
aaaaagaacaggaaaccccggagaagaaacacagacagcgccaacgagcacagaaggacaggagaaacaggg

SEQ ID NO: 161673 - RNA, 49 nt, Homo sapiens
ccgcggagacagcgagacccgccaggagcaaagacgaagagagaaaggc

SEQ ID NO: 161674 - RNA, 73 nt, Homo sapiens
cgaccggagcgggccaggccgggagaccaagacacaaaagagaaggacaaaaagccagagagagcgaggccga

SEQ ID NO: 161675 - RNA, 77 nt, Homo sapiens
cgccgcgacggccggccgcgccaccgcaccgccaccggcccgacccagaggccccgcgccaccgccgggcccggcac

SEQ ID NO: 161676 - RNA, 92 nt, Homo sapiens
agaacgaccggcccgccaagaccagagaaggaggagggaccacgcgcgaggagacggcgaagaacagaggaacaacgccaacgacaagacga

SEQ ID NO: 161677 - RNA, 59 nt, Homo sapiens
gcggaaaggagcgcgcccggcggggagcgcagcgcgggggaccaccaggcaggaaaaca

SEQ ID NO: 161678 - RNA, 73 nt, Homo sapiens
ggacacccacagcggggcggcggcggcggcggcgcggcccaaaaggaccaagaaaacggggaaaaacacagag

SEQ ID NO: 161679 - RNA, 65 nt, Homo sapiens
ccgagaacggcgggaagagaagacacgagcacaaacggcgcaaggaagaagagacgccgcgcggc

SEQ ID NO: 161680 - RNA, 67 nt, Homo sapiens
ggccaccaagcagggacccggaaacgggaaagagcaaagaggccagacacacgcggccccacaaaga

SEQ ID NO: 161681 - RNA, 78 nt, Homo sapiens
gcacgacaggcaggaaacaggaaaagccccagacacagacgaggacgaggagcacagcaagcgggagcaggcagacca

SEQ ID NO: 161682 - RNA, 78 nt, Homo sapiens
gcaacgcccgaacaccaaacagaggccaggccagagggaccaacgaaggcaaacaccacacgcagaggggggacacac

SEQ ID NO: 161683 - RNA, 80 nt, Homo sapiens
aggaagaaccaccaacacaagaagaggcagaacccgagagacgcagcagcacaagcgaagagggggggccccagcccggc

SEQ ID NO: 161684 - RNA, 71 nt, Homo sapiens
cagacgcacgggccggcgcgcgccgggcacccccagaagggaacagggcacaaccaaggagggccagccac

SEQ ID NO: 161685 - RNA, 32 nt, Homo sapiens
gcggaaaggaagagacgggccagcagccagaa

SEQ ID NO: 161686 - RNA, 76 nt, Homo sapiens
ggaaaggaagaccaggacgcacagaaaaccggcgcagagccaaaaggaaccgaggaaaagcaggggaaacgacgca

SEQ ID NO: 161687 - RNA, 82 nt, Homo sapiens
cagcccaaacccggaaacccagcggcccagccgggcaaaagcagaccggaaaacccaccggcaagaccacacccgaggggag

SEQ ID NO: 161688 - RNA, 74 nt, Homo sapiens
agcaacagaagacaaggcgcacacacaagaaaggcaacaaaaccacgcagccaacaagcccaaaggaaaagcga

SEQ ID NO: 161689 - RNA, 78 nt, Homo sapiens
cgacaacaaacggccaggcaaaaggggcaaagggaaaaggcccaaagagagaaaagaaaaagcaggccacccacaaca

SEQ ID NO: 161690 - RNA, 75 nt, Homo sapiens
cgggccagcggccgcgcacccccggccggaggcaccagcgaccgcagcgaagcacagcagaaggggccacaagac

SEQ ID NO: 161691 - RNA, 72 nt, Homo sapiens
gagacaaacaaacgagaagagacgggacagccggagggggcagccagcgcaagcacgaccagagaaggcggg

SEQ ID NO: 161692 - RNA, 56 nt, Homo sapiens
caaaaaaaagagaaccgacaagccaaaagacgacaagcagggggaaagaggcgcgg

SEQ ID NO: 161693 - RNA, 89 nt, Homo sapiens
acggaggagagaaaccaagaagaaaccacagaagcgggcgagcaccagcacaacaaggagaccaagaacccgggccagaggggcagcag

SEQ ID NO: 161694 - RNA, 80 nt, Homo sapiens
gcgggcgcgcccggccgcgacgcccgggacccagagcgggcaggcggacgaaagaaagaaggagcaccaacgcaaagaaa

SEQ ID NO: 161695 - RNA, 76 nt, Homo sapiens
cacacacccccgaacagcgccgggacacgacacaccggcagcgagcccagcggcagcaggcaaaaggcaaccaagg

SEQ ID NO: 161696 - RNA, 75 nt, Homo sapiens
caagcgcccaccacagcccagaaaggaaagcggggcagcaaggcaaggaaaaaacgaagagcaggggaaaacaaa

SEQ ID NO: 161697 - RNA, 71 nt, Homo sapiens
gcccgggcgaaaccggaccgggcccggaggagcgaacaaggcgacaacacagcagcggcgcaccgcagaga

SEQ ID NO: 161698 - RNA, 57 nt, Homo sapiens
agaaaccaagacggcagagagccggacaggggccacaccggaacccagaaccaggag

SEQ ID NO: 161699 - RNA, 75 nt, Homo sapiens
cgggaggcagaggggcagggcccggaccaagagacgaggaaaaccccacccacaaaggcgagcccagggacggag

SEQ ID NO: 161700 - RNA, 79 nt, Homo sapiens
gaagcagacgagaacggcagccaagggagaaaagaaagccagaaggaaggaagcaacgaaccaagaaaaaacggaacag

SEQ ID NO: 161701 - RNA, 85 nt, Homo sapiens
gccggcccccgccaaccgaccggccaacgacgccccaaggcgccaaggaggggacccccaggagcccgagggacagagaagcgcc

SEQ ID NO: 161702 - RNA, 53 nt, Homo sapiens
agggcaaagcacacgcggaacaaagagcagaggccagcagccaccgacagccc

SEQ ID NO: 161703 - RNA, 80 nt, Homo sapiens
agaagcggcgggcgcacacggggcaagggcagcagaagaggagccccgccgaggcagagggccggcccccccagaggaag

SEQ ID NO: 161704 - RNA, 71 nt, Homo sapiens
gcccaccggcaaccacaagccaggaagaagccgaggacaaagcgggagacggcagacagaagaacaacaac

SEQ ID NO: 161705 - RNA, 79 nt, Homo sapiens
cagggcgcgagacaaccaccgggggccaggacagagacaccacgggcagaccacggagacaagcagaccggaagaccga

SEQ ID NO: 161706 - RNA, 62 nt, Homo sapiens
aaggcgcgaggaggaaaggaggacgaggccccgggggccagcggcaccaaggccccggcacg

SEQ ID NO: 161707 - RNA, 128 nt, Homo sapiens
gccaaccgcagccaccgccggcccgcccacccagcccagggccccgaggcccgcccagccgacgggacgacccaccggagcccggacgcgaacaagagaggcagccccgggccaccaccgggcgccgc

SEQ ID NO: 161708 - RNA, 55 nt, Homo sapiens
ccgcccccgcgggcgccgggccaggacgggaagggccgggccggggcacgggccc

SEQ ID NO: 161709 - RNA, 81 nt, Homo sapiens
cgcccccaccgggaccgaccgcaaacaaggagagccacgagcagccgagggcgcgaaaggggcggagaacaagagagaaac

SEQ ID NO: 161710 - RNA, 69 nt, Homo sapiens
agagccgagaaacgcgaaaaggaagcggaaggggaacaacagacaagccgcgcccccaccaggggcacc

SEQ ID NO: 161711 - RNA, 79 nt, Homo sapiens
gaagaccagcccgaaaaagacaggacgacaaaacaccagagagacccgagcaaggaaaacgagggacaggagagacaac

SEQ ID NO: 161712 - RNA, 83 nt, Homo sapiens
cgaggaagggcagaagggcacagccacagcgccgagaggagggcgaagcggccaggcccgggcggacgcagagccagagcgcc

SEQ ID NO: 161713 - RNA, 78 nt, Homo sapiens
gagcaagagcagaaaccaacagacaagccaaacggcaaggaacacagagacagaccccgccagacccaccggacccag

SEQ ID NO: 161714 - RNA, 80 nt, Homo sapiens
cccaggggcggaggagagcccggagcgcgaacccgagcccaggagacgagcccagaacagccagcaaagacaagagcaga

SEQ ID NO: 161715 - RNA, 69 nt, Homo sapiens
agcaaggccaggacggacaaggagaacagaaaacaccaaagacgaaagcccagaagcaccgaacagcag

SEQ ID NO: 161716 - RNA, 41 nt, Homo sapiens
gaaggaaagcgcgagcggcaaggaaccggagcaaacgaccc

SEQ ID NO: 161717 - RNA, 69 nt, Homo sapiens
cccggcgccggccgagaaggcagaggcgggcagcccaaggaccaagggagaagagacccaggaggcagg

SEQ ID NO: 161718 - RNA, 57 nt, Homo sapiens
gggaggaggccccaaagggcgaggccaacagggccagcagacaacccccacacgacg

SEQ ID NO: 161719 - RNA, 76 nt, Homo sapiens
aagcgcaggccgggccgcaacgacgcagcacgcagcacggggaacgagggggggaagaaaagaccgagaggaacca

SEQ ID NO: 161720 - RNA, 84 nt, Homo sapiens
gcggagcaaaaaaagagcccgcaagaagaacagagacagcagccaaacccccaggggaaccgcccaaaagcccgccagaagaag

SEQ ID NO: 161721 - RNA, 88 nt, Homo sapiens
cagcccccaagagcgagaacaggaggagaggagaccaggagaagaggcagagccgaggaagaggaggaggaggggaggaggaggaggg

SEQ ID NO: 161722 - RNA, 72 nt, Homo sapiens
gcgaccgcggaccggcgccccggcgcgaagaggcggaccggacggccgagaggaaaggcaagggcagaaaag

SEQ ID NO: 161723 - RNA, 83 nt, Homo sapiens
gaagccgaaaaagcgcccgagacgggcccgccgaaagaaaggggagcaagaagaaagagcagggaggagggagcgacaggaag

SEQ ID NO: 161724 - RNA, 80 nt, Homo sapiens
ccagggcacagcggaggcgacacccagagagcccagagaaagcaagaccaacaggcgaaagagaaacagaaacacaaacg

SEQ ID NO: 161725 - RNA, 69 nt, Homo sapiens
ggagcgagagcagaaacgaacgcagaagagagcgagccacaggaaacgggagacgagagagaaaaaaaa

SEQ ID NO: 161726 - RNA, 87 nt, Homo sapiens
cgggccgcggccccgagcgcgcgggagcagccgccgcaggaacacaaagaccggaggagaccccacccccagggagaagaaaggagg

SEQ ID NO: 161727 - RNA, 79 nt, Homo sapiens
cgggcccagcggacgggcgggcggcgggcaagcacacaagaagagggacggaaacagacgacgacacggacaggacggc

SEQ ID NO: 161728 - RNA, 87 nt, Homo sapiens
ggacacgaggcggcgggcggagacaggaccgcggcgagcaaggagccaaaaaccgaacacccggaaggggacaagggacggcgaaca

SEQ ID NO: 161729 - RNA, 86 nt, Homo sapiens
cgagagcagggaccgggccaagacgagcgacaggagcacacccggagaagcaggagcccaccggcagccaccaggagagaacgccg

SEQ ID NO: 161730 - RNA, 85 nt, Homo sapiens
cgccgcgccccggagaacagagaaagcgacagggaggggcagcagcaggacagggaacccgggagacagcaacagacggaggaac

SEQ ID NO: 161731 - RNA, 85 nt, Homo sapiens
ccagcagggaggccagagaaaaagaaaagacaccgcacgaaagggcacccacacacaccgggggcacaggagagcagagacagca

SEQ ID NO: 161732 - RNA, 72 nt, Homo sapiens
accgaggaggcagcgcggggcagcgcgagccgggaagcagcaaaacaccgaggaacacaagaagcaaggagc

SEQ ID NO: 161733 - RNA, 73 nt, Homo sapiens
gacaaaaccccgaaaaaggcggggcacccgaggaggaagagggcagggcccacggaaagaagggaaacccggg

SEQ ID NO: 161734 - RNA, 60 nt, Homo sapiens
gggcaggagcccaggaagccgccagcgggccaagcggaggagagcaaaagacaacaccca

SEQ ID NO: 161735 - RNA, 86 nt, Homo sapiens
gggcccgcgcagccgccgccggcgccgaacgggccgggaagccggcggaccgcgccgcgccggagcagaacagccagcaaagacaa

SEQ ID NO: 161736 - RNA, 66 nt, Homo sapiens
aaggagggcaccccgccagagcccagacaacaaagcacacggagagagagaagaaccgagcacagc

SEQ ID NO: 161737 - RNA, 67 nt, Homo sapiens
gaacggccaacagaacagcgacaagacgagaacacgcggaggcacccaccacgggccaggcgggcca

SEQ ID NO: 161738 - RNA, 72 nt, Homo sapiens
ggcagagcccaccaaggccggaagcgacgcggaaaaacgcaaagcgaggagccgaaaaccaacaggccacaa

SEQ ID NO: 161739 - RNA, 81 nt, Homo sapiens
cgacggcgaccaagccccacgagccagggagccgccgggaccggcccgggagacgacaacccaaaccgaaaaggcaaaagg

SEQ ID NO: 161740 - RNA, 71 nt, Homo sapiens
cagaacacaggaagaaggcagggggccggcccacagcacccggccccgcggggcgccaaaaacgcacgcaa

SEQ ID NO: 161741 - RNA, 85 nt, Homo sapiens
agaggacgccccagagcagcgcggccaggaggagacaggaagagagagcggagaagagaagaagcagcaacgaagaagggcccgc

SEQ ID NO: 161742 - RNA, 80 nt, Homo sapiens
cgggaacgggcagggaacagcggacaagaagaagacagaacgcccccaccaccgcaaacaaaacgccagaggcagcagca

SEQ ID NO: 161743 - RNA, 70 nt, Homo sapiens
aaagaacaagcgcacgacaagccaagaacgacgagaagacggaagcccagacagaaagacaacccaccag

SEQ ID NO: 161744 - RNA, 85 nt, Homo sapiens
ggacaagagaacaacaaacggcacggcacgaagccccaaagacaagaagagcgggcagggaacgcagcggccgaggaagcggcag

SEQ ID NO: 161745 - RNA, 82 nt, Homo sapiens
ggggacaggaagaaccaaagccagcccaggcgaaagacaccagcacccgaggccagcaacaacaccgccagcaagcacaagc

SEQ ID NO: 161746 - RNA, 77 nt, Homo sapiens
ccagagaaccggcgagcaccaagagccggaggagggaggagcgcccccggccgccacacacaggaaggaggagcgcc

SEQ ID NO: 161747 - RNA, 54 nt, Homo sapiens
acaacgccacgggccggaaggcaaggcacccgagcgaacgggaagccacggcag

SEQ ID NO: 161748 - RNA, 78 nt, Homo sapiens
aacgaaccaaccccacaacaccgccggagacagccaaggcacccgcaaaccacccgacccgaagccgaaggaggcggg

SEQ ID NO: 161749 - RNA, 72 nt, Homo sapiens
aagccgcccagggaaaaccggaggcagcaaaggggcgcaagcaccaaagccccaagagacgacagaaaggca

SEQ ID NO: 161750 - RNA, 57 nt, Homo sapiens
accccccagccggcaccaggggggcgcgagagcaccaccgcccggaagaacgccaga

SEQ ID NO: 161751 - RNA, 80 nt, Homo sapiens
cgcgggagcacaccggcggagacgggcggccggccgacccccgcgcgacggcgacgcgggaggccaggcgaaacagaccc

SEQ ID NO: 161752 - RNA, 81 nt, Homo sapiens
agccagccgcaaccgagcggcacggggaaaagaggagcaggagaacaagacccaacccagaaagaggaaagaccaagagcc

SEQ ID NO: 161753 - RNA, 76 nt, Homo sapiens
agggaggcccaagacccacaacaaaagggaacaacgagagcgccccaagggagccagcgcagccacacaagcacac

SEQ ID NO: 161754 - RNA, 78 nt, Homo sapiens
cagccaccggacccccaggccaaggaaaaggaacagagagagcagaaccgaaacggggaaagaccgaagaaagaaaag

SEQ ID NO: 161755 - RNA, 71 nt, Homo sapiens
aggccaccgacaaggccagagaaagaacaccaaccaaagcgccaaagaaagccagccagacggggcagaag

SEQ ID NO: 161756 - RNA, 63 nt, Homo sapiens
cgggacaggagagccgggcaagacggagaggcagccggcacccgcacaacccagggggccgaa

SEQ ID NO: 161757 - RNA, 70 nt, Homo sapiens
ggaacaccaggcacaaggagacccggacagacaccagggagagaagaagccagacagagcaaacaaggac

SEQ ID NO: 161758 - RNA, 80 nt, Homo sapiens
aacgagacacccgcacggacccgggcgcaggggggagggcgaaacccagcaggcgcacacacaggaccgaggagagaaac

SEQ ID NO: 161759 - RNA, 72 nt, Homo sapiens
aggacacacgaaaacagacgggggaacaagagggagaacaacaagaagaaacccaccaagagaaaacgggca

SEQ ID NO: 161760 - RNA, 82 nt, Homo sapiens
cagcgagaaacagaaagaccacgaaccaaaggggaaagcaaggccaaagacagggagaagagcagccacagcagggacccca

SEQ ID NO: 161761 - RNA, 51 nt, Homo sapiens
gagcaaaggggccagggaacgcaaaaccccacccacgcaaaaggcgaccga

SEQ ID NO: 161762 - RNA, 70 nt, Homo sapiens
cggcggccggggagccggcccaagcggacggagaaagaagaacaaacacaaaacacacaccgagcagaac

SEQ ID NO: 161763 - RNA, 76 nt, Homo sapiens
cgcccacgacagcacgccaggaaggaggcagcggccacaaaagccacagcggaaccggaaagaagcacaccacgca

SEQ ID NO: 161764 - RNA, 60 nt, Homo sapiens
agcaggaaagaaagcaagcagcagaacaaccgagaaaccacaagccgccgggaaccaaag

SEQ ID NO: 161765 - RNA, 93 nt, Homo sapiens
gccaagaccgccggacccggggcgccgcggcccggcacgcaccggagaaccggggcaagagacggcagacaaacacagccgagagaaggcagg

SEQ ID NO: 161766 - RNA, 48 nt, Homo sapiens
gcccggcacccccgcaaaggggcccgagacacccccgcgcaacagagc

SEQ ID NO: 161767 - RNA, 51 nt, Homo sapiens
ggaggaaaaacgaggccggaaagggcccgcgcgagaagaagcagaagaaac

SEQ ID NO: 161768 - RNA, 84 nt, Homo sapiens
acgaaggccaccacaaaagcagacggccgaagcccgcagcccacgcacagccggagagcagccgagcacggggccaccagacag

SEQ ID NO: 161769 - RNA, 38 nt, Homo sapiens
gggcaaggggacgcgcagcgagagccaagaaccgaagc

SEQ ID NO: 161770 - RNA, 47 nt, Homo sapiens
aagggccaccccacagacggagcccagggaacccagccagcacagca

SEQ ID NO: 161771 - RNA, 82 nt, Homo sapiens
cccgcgccgccgaccccccggcgccgcgccggcggcgacaagcagaccggaagaccgacggaagaccacaccccgagggagc

SEQ ID NO: 161772 - RNA, 81 nt, Homo sapiens
ggccccgaccaagcgggaccccggagcgacccggacaccgacgcgccacgcggagcccgcgccagaggaagaaaaaagccc

SEQ ID NO: 161773 - RNA, 74 nt, Homo sapiens
gggcgcccgccgccgagccgcccgcagcggcccccgccggacgaaaacaccgacagaaaaaaaagccagggaag

SEQ ID NO: 161774 - RNA, 71 nt, Homo sapiens
ccaacagaaagcaggaggcagcgccagggaggacggaggcacaggaggaggagaggacacgggaccccgca

SEQ ID NO: 161775 - RNA, 73 nt, Homo sapiens
ggcaccagggggcggcaccccgggggaaagcgggaacgaacaaggcgacccacagaaccggcagcaggaagaa

SEQ ID NO: 161776 - RNA, 86 nt, Homo sapiens
ccgcggccacccggaccgagcgcagaccggggccgcgccgcagggggcccggcaggggccccagccccgacccggacaccggcccc

SEQ ID NO: 161777 - RNA, 38 nt, Homo sapiens
gcagaccaaacggcaagagcgagcaccgaagacccgcc

SEQ ID NO: 161778 - RNA, 58 nt, Homo sapiens
aaagagaaggaaaaacagaacggcaaaccggaaaaaaacggaggccgcgaaccagggc

SEQ ID NO: 161779 - RNA, 82 nt, Homo sapiens
gggcgcccccgccacgcagccggccaccgccgagacccagcacacgccgaccagaaagccaacgcgggcgcaagaggagcca

SEQ ID NO: 161780 - RNA, 53 nt, Homo sapiens
gcgcagaagcccagaaaagaaaggagaaagaagacccggagaagagggccccc

SEQ ID NO: 161781 - RNA, 39 nt, Homo sapiens
agccccgcgagcgggaacagaacacgcccaggacgggac

SEQ ID NO: 161782 - RNA, 62 nt, Homo sapiens
aagaagcaacagaaaacaggaagggcaagagggggccgagaacgggaggaagcggagaaaag

SEQ ID NO: 161783 - RNA, 89 nt, Homo sapiens
cggcgaacgcggagagcacgccagaaggcccgggcacgacagacacggagacgagcgggggaagaaggcaaggcacggccccacagacg

SEQ ID NO: 161784 - RNA, 73 nt, Homo sapiens
gaggccgagaaggacagagaaccgggaacaggcggacggccagcccacacaggcccaaacccccggacaaacg

SEQ ID NO: 161785 - RNA, 43 nt, Homo sapiens
cccccagccagggaacgcagaggagcccaggagcagccaggac

SEQ ID NO: 161786 - RNA, 77 nt, Homo sapiens
cccgggccaaccccgcgccgcccgagaaaggacccggccaggaagccgagccacggagcacccaaagagaccacccg

SEQ ID NO: 161787 - RNA, 79 nt, Homo sapiens
agggaaaggagggcagacaaaggaggcaaaagggaaaaaacaggagcacagggcaaagacaggcacagaggccaacaca

SEQ ID NO: 161788 - RNA, 67 nt, Homo sapiens
cccaggcagagaaaacacccgagagcaccgccgagcggaccccaagccacccggcccgcgcgcccgg

SEQ ID NO: 161789 - RNA, 79 nt, Homo sapiens
gcggaccacccgcgacggcagacagcggcgggcgcaaagacaccgccagaagaccagaggaccccggaggaagcagccg

SEQ ID NO: 161790 - RNA, 74 nt, Homo sapiens
ggcccacccggaaggaaggcccagcgccaaacgacaaagcccggcgcagacgccgcggcccgacaggagccaga

SEQ ID NO: 161791 - RNA, 41 nt, Homo sapiens
gacagacgcgcaaaacccaggaacgccccacaccacgagcc

SEQ ID NO: 161792 - RNA, 63 nt, Homo sapiens
acaaccccacgagaaggccccagacccgcgagaacacaaagacaagcccaggagggaacagac

SEQ ID NO: 161793 - RNA, 85 nt, Homo sapiens
cgggacacagcggggcaggagcgcccgcaccacaccccacccgcggcgagccgcacagggcaacacacgcaccgcacggcccccg

SEQ ID NO: 161794 - RNA, 48 nt, Homo sapiens
gaaggaccaagaaccaggagaacggaggagaagaacgaaaacgagacg

SEQ ID NO: 161795 - RNA, 73 nt, Homo sapiens
gaagcacaggcccgggcgaaggggccacgcgagggaaacggccgagccgagaaccagcccacgcgggcccggg

SEQ ID NO: 161796 - RNA, 40 nt, Homo sapiens
gcccggacagagcccgggcgcgcagcacagaccggacacg

SEQ ID NO: 161797 - RNA, 60 nt, Homo sapiens
accaagaaacgacacccgacccaggcacagggaagccgcccacggcagagagagcagccg

SEQ ID NO: 161798 - RNA, 84 nt, Homo sapiens
gcgccgcagcccgggcccaggccccggcagcgccgggacaagacagggaccaccccgcccggacccccccacagacaggcagcg

SEQ ID NO: 161799 - RNA, 77 nt, Homo sapiens
gggccgcagccaaggaaggaggccgcaaacagacaggaagaggcggcccaaaggcgaaacacagaaggagacaacca

SEQ ID NO: 161800 - RNA, 74 nt, Homo sapiens
acgcgagggcgggaggggaggaacgcggcaccagaaacaacacaaagcacagaagggacagaaccgcaaggacc

SEQ ID NO: 161801 - RNA, 71 nt, Homo sapiens
gcagcaggcaaaaagacgaacgaagacaaagcaaaaccacaggagaaacagaaacagaaggcagcacaggc

SEQ ID NO: 161802 - RNA, 76 nt, Homo sapiens
gaaaacaagagaccacagaagcaacagaagccaggcaaggaacgcggagaaacaaaaggcaggaaaggccaagccc

SEQ ID NO: 161803 - RNA, 56 nt, Homo sapiens
cgagccagagcaaaaccagcccagagaacaagaggagacaggccgagcagaccccc

SEQ ID NO: 161804 - RNA, 74 nt, Homo sapiens
ccgcaggagaagcgaaaagaaacccaagaaggagaagagagcggacccacaccagggaagacaggggagagggg

SEQ ID NO: 161805 - RNA, 75 nt, Homo sapiens
cgccgggaacccaggcagcggacagagcgggagccaccagcgccaaagggaagccaggagcccgggggcacgggg

SEQ ID NO: 161806 - RNA, 78 nt, Homo sapiens
gacggacccggaaaaccggcccccaacgacaaaagcagaccgacggagcccagcaagccgaggagaaccaggaaacac

SEQ ID NO: 161807 - RNA, 34 nt, Homo sapiens
cccagggccaaggggacagaggcccaggaacgac

SEQ ID NO: 161808 - RNA, 67 nt, Homo sapiens
acagggcggaagaggcgaaggaagcaacaaacacaacccagaaacccagacaaggggcaccaaacca

SEQ ID NO: 161809 - RNA, 85 nt, Homo sapiens
cccagggaagcgcagaaagcaggcgaacccgcggcgcaaaacgggcaggcccgaaaggaaaaacgcaaccacagaggaagaaaag

SEQ ID NO: 161810 - RNA, 68 nt, Homo sapiens
acggagaaggaaacaaccccaaggaccaggagaccagaaagcgggcaacaccaaccgagacgcgagag

SEQ ID NO: 161811 - RNA, 70 nt, Homo sapiens
ccgccccgcgcgcgcccgccacggcgccgagccgcggccgaaagcacaaggaccgaggaaccacgccagg

SEQ ID NO: 161812 - RNA, 80 nt, Homo sapiens
ccaaaagaccaggagccacaaaggagggccccccccgaggagccccccacggccccccacagaacgcacgccagcggcga

SEQ ID NO: 161813 - RNA, 75 nt, Homo sapiens
cgcaccagagcggggcaccgagccgggccggggcgacaaaagcgggcccggcggcggccccacgacggcgacaca

SEQ ID NO: 161814 - RNA, 82 nt, Homo sapiens
ccgcggccaacaccacgaaaccacccacgggcggcgggcgccagcccggagcaagaaggcccggacagaacaggaggcaggg

SEQ ID NO: 161815 - RNA, 85 nt, Homo sapiens
gaggaggaccagaggagggagggagcagaaacacaagacccgggaaaaaacgagaaacagacaagcacgcacaccaacgaagacg

SEQ ID NO: 161816 - RNA, 72 nt, Homo sapiens
ggacaacccgaaaacgacggcggcagcgcgaagccagagggggcggaagcacggcacaaacacggccgaaaa

SEQ ID NO: 161817 - RNA, 85 nt, Homo sapiens
gaaccggagaccccgaaaacggaagcgcagggagaaggaagaggggaaaagagcaaggcagacacaagcagaaaacaccgaccgg

SEQ ID NO: 161818 - RNA, 80 nt, Homo sapiens
cgccgaggcccagagagaccccagaaggacacaaccagagggaagcacgcccgggcacagcggaagagacgacggaacag

SEQ ID NO: 161819 - RNA, 39 nt, Homo sapiens
ccaaggggcacaacaggggcgagagcgagcggacaacaa

SEQ ID NO: 161820 - RNA, 70 nt, Homo sapiens
cggaccaccagacagcaaccgccgcgccggcggcaggcccagccagagcggcagaggacacgccacccag

SEQ ID NO: 161821 - RNA, 64 nt, Homo sapiens
gacgagacagagaaaggagcgccagcagaggcgggggaccggccggaaggggggcgacgcggaa

SEQ ID NO: 161822 - RNA, 39 nt, Homo sapiens
agccgccgaaggcggccaagaaaggagccccgggaacac

SEQ ID NO: 161823 - RNA, 73 nt, Homo sapiens
gaaagaaggcgagcacgccgaagaacgaccaaaagggaagggacccaggcgacaggaaaaacaaagccgcaga

SEQ ID NO: 161824 - RNA, 83 nt, Homo sapiens
gaagagggcccaggcaccggccggcccgcggggcaggccagaaagcagacccagggaggaagcacagccggcacacgggaagg

SEQ ID NO: 161825 - RNA, 80 nt, Homo sapiens
caacaggcagaggccgaggccgaggaaccccggaaagggacagggcagcggccgagagcccgagaagaggccgcccgggg

SEQ ID NO: 161826 - RNA, 68 nt, Homo sapiens
cacagaagaagcaacacgagaaccaccccgacacaacaccaccagggcaaggaggagccccggaggag

SEQ ID NO: 161827 - RNA, 73 nt, Homo sapiens
gaaggccggagacaccagcagagcaccacaagcaaggaacaaaagaaagcaaggaaccaaaaaaacaaagaag

SEQ ID NO: 161828 - RNA, 65 nt, Homo sapiens
cgccgcagcaccccccggacccagccccggccaacggaagagcggcagaaaagagaccacggcac

SEQ ID NO: 161829 - RNA, 71 nt, Homo sapiens
ggaggagggggcggccacggccaacgccgcgcccgcggagggaaaagcgagcacacaagaaaagaacagaa

SEQ ID NO: 161830 - RNA, 77 nt, Homo sapiens
caagccaggagccaggccggaggacccagacagcggccccccacgagcccggacaaaggggcccagggagggacacc

SEQ ID NO: 161831 - RNA, 69 nt, Homo sapiens
caagaagacaaccggcgaacggcgcagggagggggcgaggaagagacaggcgggggagaagaagcaggg

SEQ ID NO: 161832 - RNA, 87 nt, Homo sapiens
ccccaaggggagccggcaggacggaaggggaagaggcccacccggagaaccccacggagaaccagaggaaacagagaaagagagggg

SEQ ID NO: 161833 - RNA, 76 nt, Homo sapiens
agggggcgcccagcgccaacaccaagacgccgaggaacgagaggaaggacccggaggaacgaagaaagaagacagc

SEQ ID NO: 161834 - RNA, 78 nt, Homo sapiens
gagaggcgggacgccacccaaagcggccgggagcgcgccccccaccccgagacagaacagccagcaaagacaagagca

SEQ ID NO: 161835 - RNA, 57 nt, Homo sapiens
gaggcaccccagagggcagcccacacaaaaagccccgagagccagcccggaaaaccc

SEQ ID NO: 161836 - RNA, 68 nt, Homo sapiens
aaaaggaagcgaaaacccaaacgcaggaagcgacacagaacggggaggggccacccagagcacaacag

SEQ ID NO: 161837 - RNA, 75 nt, Homo sapiens
gggccgcaggccaccaagaccgggaacaagcaacccggggcggagcgacaggggaccagaccaccgcgcaacagc

SEQ ID NO: 161838 - RNA, 87 nt, Homo sapiens
gggagcagcgcagccccggaggaggaggcggaggccgagaacaccccaccagaccacccagcaagcccacaaaaaaggcacaagcag

SEQ ID NO: 161839 - RNA, 87 nt, Homo sapiens
acaagaccaaggcaacaaggacaacaagagacgggacaagacagggcaaaggacagaccaggcgcgaagaggccagaaagcaccaac

SEQ ID NO: 161840 - RNA, 88 nt, Homo sapiens
ccgccagccggccccgggaacagggcgggggcgacaccccagggagagggcgaggaccgcaaaaacaacgagcgccaagacacgagcc

SEQ ID NO: 161841 - RNA, 55 nt, Homo sapiens
gggacgcagcggaagaaaagaaagaaaggagcaagaaagcaaaccggcacaaagg

SEQ ID NO: 161842 - RNA, 84 nt, Homo sapiens
gggacaccgcggaagccgggaaaggcgacagggggaccgcggcgcgagggacgcaccgccccaggacggggagaaagagcccca

SEQ ID NO: 161843 - RNA, 40 nt, Homo sapiens
gaaccaggccaaagacaaggcgaaagaggcaaccgagagg

SEQ ID NO: 161844 - RNA, 56 nt, Homo sapiens
agagagccaacaagagccagacaaacagggacacaagggcgcaaccaaagcaccag

SEQ ID NO: 161845 - RNA, 66 nt, Homo sapiens
acaggagaggaaacgggggcggacaccaagaaaccagacaccggcaccaccaggcaagcacacagc

SEQ ID NO: 161846 - RNA, 68 nt, Homo sapiens
aggggaacaagagaaagcagggaagcgacagggaggccgcaaagaagagagacaaggccccacccagc

SEQ ID NO: 161847 - RNA, 80 nt, Homo sapiens
aggcgacaggggcacccgggaccgcggcgagaagccccagcgcacacgcggacagagcccgaagccagagaaaaaagcag

SEQ ID NO: 161848 - RNA, 70 nt, Homo sapiens
agacacacggaaaagggcagagaaaagccaggaaggacaaaaccgcgggcgcggcgagggaccagcgaca

SEQ ID NO: 161849 - RNA, 106 nt, Homo sapiens
gaagccgagcaacccccaggagaagagcccaagcagcgccagacaaagagcaaggcagggcagaaaagaacagacccagaagaagcgaaaggggagaaagaagaaa

SEQ ID NO: 161850 - RNA, 74 nt, Homo sapiens
cgccccgacgaggacgaccaacaggcagcagcgggccccgccaccggcacaccgaaggggagggcagggagagg

SEQ ID NO: 161851 - RNA, 74 nt, Homo sapiens
agaaaaggaaccggccccggggcaaaagcccacagagagagccaggaccaaggccgccaaacaccaacaaggaa

SEQ ID NO: 161852 - RNA, 84 nt, Homo sapiens
ccgcggccccgcggcccggcccaccagcgccccagaggcccaggcacaggcaggaccaccggaggagagcgaagcgggaacggc

SEQ ID NO: 161853 - RNA, 81 nt, Homo sapiens
aggaacaggacgacccaggagacgcaggccaaggagaaagcaggcaccaggcggagaagcagaacagcacaccgagaggac

SEQ ID NO: 161854 - RNA, 84 nt, Homo sapiens
ggacaacgacaccaccgcagcgacgagcaggccgacgcccgccgcggccggggaacaggccacagccaggagcgcacacaggag

SEQ ID NO: 161855 - RNA, 85 nt, Homo sapiens
cgaagacgcgcccagcggcgggcgagggcgacacgacgccacagcaacaagcagggcgagcggagaaacggccgacggcacaaga

SEQ ID NO: 161856 - RNA, 84 nt, Homo sapiens
cacgccgccagccccgggggccacgagcggcgcagagccagaaggccacgcccaaagcccaccaccacgcagccaagaaacccg

SEQ ID NO: 161857 - RNA, 83 nt, Homo sapiens
gggagcacgagaagaacgagagcgaacagcggcagcgaaacagaacagaaggcccagcagcagacaacagcagcaacagcaac

SEQ ID NO: 161858 - RNA, 37 nt, Homo sapiens
agcaagaggccgcaaaaacagagccacgggcccaggc

SEQ ID NO: 161859 - RNA, 64 nt, Homo sapiens
ccaggccacacaagccccagccaaaaccagacaccgccagaagcaccaggacagccacaagggc

SEQ ID NO: 161860 - RNA, 84 nt, Homo sapiens
aaagagacgaagacaccacaggagagaaacagcagaggaaagcccgggccacaggagcgaaaaagaagaagaaaaaaaaaaggc

SEQ ID NO: 161861 - RNA, 54 nt, Homo sapiens
agcaagggaaggcgccccaacaaagggagaacggaagaggacaagagacgacac

SEQ ID NO: 161862 - RNA, 81 nt, Homo sapiens
ggagcaaggagaggagccggccagaggaggaaccaaaccagagcacccaagcacgcacaaaaccagaacgaccacaggaac

SEQ ID NO: 161863 - RNA, 56 nt, Homo sapiens
aacaaacggccaagaagggccaccccacagacggaggaagcaggggacagagaggg

SEQ ID NO: 161864 - RNA, 77 nt, Homo sapiens
aaaggcgcgcggacaccggacgggcgcaacacggaggaagcggcgcacgagaaccaacagaggcaaaagcagagaca

SEQ ID NO: 161865 - RNA, 73 nt, Homo sapiens
caccacgccacgagccaagggaacccgaggggcagaagacaacgaggcaagagagcaaagcgaacaaccagaa

SEQ ID NO: 161866 - RNA, 78 nt, Homo sapiens
ccgcccacaagcggcgccgcgccccggccgcacgggaacacgaggacccaaagaacaaacccggagagaagaaaaccc

SEQ ID NO: 161867 - RNA, 54 nt, Homo sapiens
cagaccgcaaggccccaggaacaccacagacagcgcgggagccaggaaacgcag

SEQ ID NO: 161868 - RNA, 80 nt, Homo sapiens
cgggcgcccgggccgcgcggcgccgcgccggcggccgccagcagcgcgccccagaccaccggcagggaacagccgagcag

SEQ ID NO: 161869 - RNA, 71 nt, Homo sapiens
gaggcccccagccagggaacaaaagaagcagcacaagggagcccaagggagggaaaccagggcagcacgag

SEQ ID NO: 161870 - RNA, 74 nt, Homo sapiens
ccccacggacggacgccagccccacaacaaagacagcacaagaccagcgaacacggagaagaaaaccacaggaa

SEQ ID NO: 161871 - RNA, 84 nt, Homo sapiens
gccgccaccgcccaggaccgccggccgggggacgagccggagcagcagccaggccccaccgaggcaccaccaaccaaagcggca

SEQ ID NO: 161872 - RNA, 77 nt, Homo sapiens
cgccacgccacacggcccagacaccgccacgaggcacagcacgccaagaggaaaccaggcaccggagagcgaagcac

SEQ ID NO: 161873 - RNA, 83 nt, Homo sapiens
gcggggcgcaggcggccgagccggccgggccgcgccacaccggcaccaaggacaggacaacagaaaaacacacacagggggaa

SEQ ID NO: 161874 - RNA, 84 nt, Homo sapiens
gcgagaacgccacgcgggccggcgaaagcgcacagacgcagccagcaaggaaggcgggaacgcccggaggaacccaggaagagc

SEQ ID NO: 161875 - RNA, 63 nt, Homo sapiens
gcaaccggaggcaagggagaaaaggggaaccggcaaacaaggccccggagcaaggggaacggg

SEQ ID NO: 161876 - RNA, 107 nt, Homo sapiens
ggagcgaagggcagaggaagcgccgccaggcccgcaggaccgccggagacagggcaaagcccaaaaggcagagcgaggagagaagaaggagggaaagccaaacaacg

SEQ ID NO: 161877 - RNA, 61 nt, Homo sapiens
caaagacgggaagcaaaaaggccggaagaagaaagacgcaaaagaagggaccgcagaccaa

SEQ ID NO: 161878 - RNA, 72 nt, Homo sapiens
ccacccaggcccggaggcagcgcaggcgacacaccaaagaaaaaacacaccaagcagaaacggagccaaggg

SEQ ID NO: 161879 - RNA, 69 nt, Homo sapiens
gccgggccagggacacggccaccggcagacccggggaaggaggcgaaacacggagccaaagagaaccac

SEQ ID NO: 161880 - RNA, 76 nt, Homo sapiens
gaaaacaccaggcaccgagagaccagcagcggcacacggacccgacaccggcgccagcgcaagaaacgagcagaag

SEQ ID NO: 161881 - RNA, 66 nt, Homo sapiens
agaaggaccaagaaccagggacaggcacccaccgcaggcaagaacagcagaaacaacacacaaccg

SEQ ID NO: 161882 - RNA, 85 nt, Homo sapiens
aggacgggaccaggcgaagcggccgagcaggcgagcgaacgacgagagacaaaaggacccaggaaaggaagacagcagagacaaa

SEQ ID NO: 161883 - RNA, 79 nt, Homo sapiens
agaggccagccgggaggacacacaagcggggaacaacagaaaaaacaagagaggaagcccagaggaacaagggaggcga

SEQ ID NO: 161884 - RNA, 86 nt, Homo sapiens
cagacgcagccgagacaccagcccgaaacaccaccaaggcgacgccggaccgcgaagagacgagaggggcacggaaggggagaggg

SEQ ID NO: 161885 - RNA, 66 nt, Homo sapiens
aaaggagccggccggcggcaaagggagcacgccaacacaacaccgaaaaaaggagcagggaaccaa

SEQ ID NO: 161886 - RNA, 69 nt, Homo sapiens
aaagccccagcaggaacagagacaagccacagggccggacaccaggcaacaaggcagacacaaaaacag

SEQ ID NO: 161887 - RNA, 99 nt, Homo sapiens
agaagcaggaggcaagaaaggggaaccccggagaaaaggccaagaaggcaggagccagaggagccccaccgcccagcggcccggaggcgggcaccaggg

SEQ ID NO: 161888 - RNA, 78 nt, Homo sapiens
gcccccccggggcaacccagacggcaacaaaggcgagggaggccaacagacccaacccagaaggcaccaaacggaggg

SEQ ID NO: 161889 - RNA, 79 nt, Homo sapiens
gggccaaagggcgagggcacaaaaaaccacaccccccaccgaggaagagcgggagaaaggcgcaaacagagacaccgag

SEQ ID NO: 161890 - RNA, 81 nt, Homo sapiens
cccggagccggcgcgaaccggcccccgcagcgggacccggggcggagaacggaaaagcaccaggaagcagagaggaccgca

SEQ ID NO: 161891 - RNA, 43 nt, Homo sapiens
cagacacacagacgcagaaggggcaccccaccacagagggcgg

SEQ ID NO: 161892 - RNA, 101 nt, Homo sapiens
gaccccaccaggaaccacacgccagcaccgacgaacccagccccagaacggccgccaaccaggaccagcgacacccacccagcccggggcccaggagcagg

SEQ ID NO: 161893 - RNA, 84 nt, Homo sapiens
cgagggagggccgagccagccgcggccggaggagcccccaggccgacagcccagagcaagcacacggaggcccgggagccagac

SEQ ID NO: 161894 - RNA, 73 nt, Homo sapiens
cacaaccgacaggaaaaaaagcggaagagcgccagcacgaaaggagaaccgacgcggcaccccggagacaagc

SEQ ID NO: 161895 - RNA, 77 nt, Homo sapiens
aggagcccaccaggacgaccgcgccgcccagcacgccagacggagcggaaccgccagaccacaagaaaagcagaaga

SEQ ID NO: 161896 - RNA, 78 nt, Homo sapiens
agaaaaagccaagccaccgagacccggaggaggcgaagcgagaggacagaagccgccccggggcggcagccacgcagc

SEQ ID NO: 161897 - RNA, 70 nt, Homo sapiens
aacgcccgaggcccgaaccgcgggagaggggaagagacaagaccaggaggaggagccccagacaaagggc

SEQ ID NO: 161898 - RNA, 43 nt, Homo sapiens
gcggagccgcgagcagaggacaggcggggcgcggggcccgagg

SEQ ID NO: 161899 - RNA, 59 nt, Homo sapiens
aggcagacgaagggaaagcccagaacaaaacagggaggggaggacacgccagccgccca

SEQ ID NO: 161900 - RNA, 79 nt, Homo sapiens
gacaggagacccacagaggaaaacaaccccggggccacaaagcgaggacggcacagaaaagaacacacgaaagagaggg

SEQ ID NO: 161901 - RNA, 63 nt, Homo sapiens
gaacaggaacgggacaagcagcacacacacagacagacggccacaggaacggggcccaggaca

SEQ ID NO: 161902 - RNA, 67 nt, Homo sapiens
ggagagcagcacccagggccgcaaaaacacagggagaggacggaccacaaaacccaacgcggacccg

SEQ ID NO: 161903 - RNA, 81 nt, Homo sapiens
ggccagggcagcggcccccgcccgacacgcacacccccgacaaggaaggcccgccccagcgggccaccgcggcacacgagg

SEQ ID NO: 161904 - RNA, 78 nt, Homo sapiens
cgcccggaaggccaagaaaacaggaacgagcaaaccaagccaggcccgaagagcacccagacagggaccccgcccgcc

SEQ ID NO: 161905 - RNA, 72 nt, Homo sapiens
gaaaccacaggcaggagaggaggcgcgggggagccagaaggaaagaccacagcaagaccacgcccccagccg

SEQ ID NO: 161906 - RNA, 41 nt, Homo sapiens
ccgccaccggaaaccaggaaaaggccacagaccggaggaga

SEQ ID NO: 161907 - RNA, 78 nt, Homo sapiens
gccccaacccagaaagcagaggccagagcggagacagacggaaagcagaagcgagccccaaagcagaggaagagcacg

SEQ ID NO: 161908 - RNA, 82 nt, Homo sapiens
agggagagcgggcagccccaggggacaggagaccaaggaccggacagaggaagaaacccggaaggggaagaggaaagcaaag

SEQ ID NO: 161909 - RNA, 80 nt, Homo sapiens
aaccgccacgagacaccaagagaacccccggcccagacagcaagaggcacagaaaacgcagaaaggaccgaaccaagaca

SEQ ID NO: 161910 - RNA, 76 nt, Homo sapiens
gaggaaaagaaagcaggcaaagaacaaacgagcagaccgcagccaaggggccgcaaggccaggcgcgcagaggcac

SEQ ID NO: 161911 - RNA, 53 nt, Homo sapiens
cacaggaacaggcaagggaggaaggcagagaaaaaaggagggccaaagacaag

SEQ ID NO: 161912 - RNA, 59 nt, Homo sapiens
caggaagagcagcgcgcaggacccgcaggggaggggaaacacagagaacggaacagaag

SEQ ID NO: 161913 - RNA, 78 nt, Homo sapiens
cgagcaaaacagcgggggcgagcaaaggaagaacaaaagcgcaggcagacaacacagacgacaggcagcaaacaggag

SEQ ID NO: 161914 - RNA, 78 nt, Homo sapiens
cggagacagcccaaaacccggaagagcgccccaggagaaacaagccggcccggaggacacaggccccgaagacaaccg

SEQ ID NO: 161915 - RNA, 71 nt, Homo sapiens
aagcaaccaacgcagagcaccagaagcaaacgggagagaaagacgcagaaagaggggcaaaaaagagcaca

SEQ ID NO: 161916 - RNA, 77 nt, Homo sapiens
gaggcgcgaggccgcagagcaaagggggcccccagggaggccgcacggcccacgcgagagagagagaacccggcgag

SEQ ID NO: 161917 - RNA, 77 nt, Homo sapiens
gaagaagccaaaaagccccgacagcaagggaagacagcaagaaaaaacgagaagacccccgcgcccccggcccaccg

SEQ ID NO: 161918 - RNA, 78 nt, Homo sapiens
acacgggacagagcgacagagagacaagagagacgacagcaggagcggcgcggaggcgcagccggggcgccaacgggg

SEQ ID NO: 161919 - RNA, 78 nt, Homo sapiens
ccagaaacagagggaggaagacagccagcaccgggagaacccaacccaaagccagcaaacagccaggcgccagcgacc

SEQ ID NO: 161920 - RNA, 81 nt, Homo sapiens
aggccgggggcagccgccacggcagcgccaggcgcgggggcaggcagggcgcgcgggccaaggcccggccaacggcccacg

SEQ ID NO: 161921 - RNA, 57 nt, Homo sapiens
cggagcggcgcagccggagggggccggagggcagcgacgagacaggccggaaggagg

SEQ ID NO: 161922 - RNA, 81 nt, Homo sapiens
agaggacgccccagagcagcgcggccaggaggagaaagagaaagaaaagcaacaccgaaggacaccgggaaaacccagagg

SEQ ID NO: 161923 - RNA, 72 nt, Homo sapiens
caggcgggggcagaaggaccacgccgaggcccacgcaccccgggacagcggcagggaaggaggcgccacggc

SEQ ID NO: 161924 - RNA, 72 nt, Homo sapiens
aagaacaccacccagcccagaagcgcgagaaaaaaagcaccgagaaaaagaccgggacgaacaggccgagaa

SEQ ID NO: 161925 - RNA, 71 nt, Homo sapiens
cagccacaggaggcgcggaggacgccccaccgccgacgcccccagccaccagacggagccgccgcccccag

SEQ ID NO: 161926 - RNA, 84 nt, Homo sapiens
ccggcgcgaggagaacggcggggggacgccacacagcacaacacaacacgccccgaagggcagccagggccaaaccaacccccc

SEQ ID NO: 161927 - RNA, 70 nt, Homo sapiens
gccacaaccccagacgcaaacagcagacggaagaccccacggcaaaaccacacccgaggcgagcccagga

SEQ ID NO: 161928 - RNA, 53 nt, Homo sapiens
aaccgcgacacaaaaacacgcaggcacaccccggagaacgaccgcaacacaca

SEQ ID NO: 161929 - RNA, 79 nt, Homo sapiens
cgagaagcgacccagacaaaggcaggccgaacagagagaccaaaacacggccccgggaaaggcccaccagacgcccggg

SEQ ID NO: 161930 - RNA, 73 nt, Homo sapiens
gagcaagaccgggcccacgagggacaaaccgccgggcgagccccgcgagcgcagacccagaagagaccagcag

SEQ ID NO: 161931 - RNA, 77 nt, Homo sapiens
agcagaggaaagagggcagagcagccacaaaacagacccgcagacccggaaaacagaacggagacagaaccgaggac

SEQ ID NO: 161932 - RNA, 73 nt, Homo sapiens
cgaaagcgagccaggaaacccggcggcacaggaaacaaagggggccaaaacagaagaggcaaagcccagccac

SEQ ID NO: 161933 - RNA, 65 nt, Homo sapiens
caccagccaggagacgccgcaagcaggcaggagaagggcaccggggaggaccgcgcgacgcgccg

SEQ ID NO: 161934 - RNA, 63 nt, Homo sapiens
gccgccggagggaggccgccgggggcaggcgggcagaggagcagagagaaggggcaccaggcc

SEQ ID NO: 161935 - RNA, 105 nt, Homo sapiens
gacgccagaggggaggggaggagaggacacgggagagccgaaccagaagagaaagccacgccacccgacccacgcgggaaacggccagcaaaacagaacgcacgg

SEQ ID NO: 161936 - RNA, 100 nt, Homo sapiens
gcacccagaccaaaaaaaaaaaacaaccgaggggccgacccaagcacaccagaaaggaggacccggacaccccggacaggaagaaggaaaaagaaagagg

SEQ ID NO: 161937 - RNA, 76 nt, Homo sapiens
cccaagcggggagacagcacaaggcagggggaaggaaaggaagaaccaaagcccgcaagcaaagcgaggaaacagg

SEQ ID NO: 161938 - RNA, 68 nt, Homo sapiens
gccacacagcgcgaccgagaacgaaagagaccagaggaacacagccgaggaccagcaccccaccaagc

SEQ ID NO: 161939 - RNA, 68 nt, Homo sapiens
cggaaagagccagggggccgccagagagaaaacaccagcagagagagaaaagaagaaacaggagcgca

SEQ ID NO: 161940 - RNA, 82 nt, Homo sapiens
cccgcgcccgacgagcaggaccaccaggccacgaggagggcgcgagaagacaaagggcgacccagcaacgcggccggccagg

SEQ ID NO: 161941 - RNA, 73 nt, Homo sapiens
ggacaaaagagaagaaccaaaacggccccgccgccccagccaccacaaggacccaacaccgcacccccacgga

SEQ ID NO: 161942 - RNA, 77 nt, Homo sapiens
gaaaacggcggcgcacagaaaggaccaacacacaagcacagcaaccagccgaaaaagcagggaagcagccacacacg

SEQ ID NO: 161943 - RNA, 79 nt, Homo sapiens
agaagcccagaccgcagggcgggaaaaaaccaagcagcgagcaccaggcaggggaaggaaaacacggcagggaaaccac

SEQ ID NO: 161944 - RNA, 84 nt, Homo sapiens
acaacagggaccggaagagcccacggacacacaggaacgggggccacgcacggagaaacgaaagcaagaagacacaccggaaag

SEQ ID NO: 161945 - RNA, 89 nt, Homo sapiens
cgggacgccacgccaagcaaaccgggaaaggagaggacccggagccggggagccgccaccaaaagcagacggaaaacccacggggaaga

SEQ ID NO: 161946 - RNA, 74 nt, Homo sapiens
cagcacgggccgagagccgcccgggccagcggccgcgcacccccggccggaggcagagggcaccacagacaaga

SEQ ID NO: 161947 - RNA, 82 nt, Homo sapiens
aacacaacaggaggcggaggcgaaagcggaacgagccagaggacaaaacccagccggcacaaaccaggaaaggaagccggag

SEQ ID NO: 161948 - RNA, 38 nt, Homo sapiens
cgggcgagaaccgcccccaggagcaaaaacaccacggc

SEQ ID NO: 161949 - RNA, 66 nt, Homo sapiens
ccggaaaccccagagaaaaagcgggacaaaccagaaccaccacgaacggggcccgcgaacgggaaa

SEQ ID NO: 161950 - RNA, 73 nt, Homo sapiens
gaagcacagagcgaggacaaccaccgagcaaacacggcaggggggggcggaaacacacccagcccagggccag

SEQ ID NO: 161951 - RNA, 81 nt, Homo sapiens
aaggaagaacagaaaccaagccaacaaaagaagcgccacagggggagggaccaccacacaacaagcgcaggcggaccccaa

SEQ ID NO: 161952 - RNA, 75 nt, Homo sapiens
accggggcggcccaccccccacgcaccgcacaacaagaggccggcggggcgacaggggggaccgcggggccaaaa

SEQ ID NO: 161953 - RNA, 82 nt, Homo sapiens
ggaaaagggagaacaagccggacagaagacgaaaaccgcggaagcgaacaagaggagggagaggggaaacagaggcaggaag

SEQ ID NO: 161954 - RNA, 75 nt, Homo sapiens
ccacccaggcaaagcacagacgaaggaaagacaaggaagcagacaaagagccccagcaaagagaccggcaaaccc

SEQ ID NO: 161955 - RNA, 80 nt, Homo sapiens
gagacggaacaccggcagaaccgcaaaggcaagccgggggaagaccacgccggggacacaggccgccaaaggagggaaaa

SEQ ID NO: 161956 - RNA, 73 nt, Homo sapiens
aaaagccggacccaggagaagaggggagagggaccacacagaaacggcaccaagcagccgaagagaaacaagg

SEQ ID NO: 161957 - RNA, 67 nt, Homo sapiens
gaaacccacgacgacagacgaagagcgagaagcgggcaggcccggcgcaggacggacggcccaaacc

SEQ ID NO: 161958 - RNA, 63 nt, Homo sapiens
ccaggcccacggaggaagagccgggcagcccggagcgggccaggcgccacggccggaacgcac

SEQ ID NO: 161959 - RNA, 60 nt, Homo sapiens
cggcgccgcggccgcgcggacggacgccgccgccggcgagggcgcaccgacggacacgcc

SEQ ID NO: 161960 - RNA, 67 nt, Homo sapiens
cgcgcgcaaggaagaaacccccagccgacgcccgcgccccccagcaagccaccagaagaacagaaga

SEQ ID NO: 161961 - RNA, 76 nt, Homo sapiens
gacagaacaggaaaaaggagaaggcgacagaccgaagaaagaaaaccaggagagaagacccacccaacgaagccgc

SEQ ID NO: 161962 - RNA, 77 nt, Homo sapiens
cccgcgcggcgcggggaccgcggcccgacaagggccgaacaccaacagaggaagaaaggagagccgcagaagcaaga

SEQ ID NO: 161963 - RNA, 66 nt, Homo sapiens
aaagcaccaggaccaaacggcagacagagagaagaacccgaccccgccccccacggaggaagaacc

SEQ ID NO: 161964 - RNA, 78 nt, Homo sapiens
cgcagaagaagcgccgcgaagacccccagaaaaccaaaggaccaccagaagacaagaggggcaggaacacccagacag

SEQ ID NO: 161965 - RNA, 72 nt, Homo sapiens
agaaaaaaagacccaagaaagcacggacagcggaaaagcggccccaaggcgaacaaaccggccaggggcaaa

SEQ ID NO: 161966 - RNA, 83 nt, Homo sapiens
cacccgcgcgcgcccgggaggaaggaacgaggcaaggagcaaagcagcggcgcagcccggggcccgcggcaggcggggccagg

SEQ ID NO: 161967 - RNA, 68 nt, Homo sapiens
caacagccgcagccagcaagcaacaggaaacaccaaagccagaaagagaagcgagggcccacaagacc

SEQ ID NO: 161968 - RNA, 71 nt, Homo sapiens
caaagaaaaggggcaagggaccaacaacaggcaagggaaaccacacagccaggagccccaagggggggcag

SEQ ID NO: 161969 - RNA, 80 nt, Homo sapiens
acgcaggccagcaaccccagccaagcaaggcacgagaagagaagcccagagcaaaacaccccaaaccagaccaccgacgc

SEQ ID NO: 161970 - RNA, 77 nt, Homo sapiens
cccgagcccggaggggggagaaaagcgagacgacgggaccgaaggaccccgccagagacaaccgagcgccaggagag

SEQ ID NO: 161971 - RNA, 85 nt, Homo sapiens
agaggaagagaggaggcgcgagagcgggaagaggcggcagacagcgggagccggggccggacgagaaagccgaaggagacgacgg

SEQ ID NO: 161972 - RNA, 77 nt, Homo sapiens
cacccaggccccgacgccccgaggaacgcaacgaaagcgggagaagacacggcgagaacggggccagcacagagagg

SEQ ID NO: 161973 - RNA, 72 nt, Homo sapiens
gggacacaggcgccaaagggaaaaaacggccaccccaagagacagaaagcgaggacggggccaggggaagca

SEQ ID NO: 161974 - RNA, 58 nt, Homo sapiens
gggaagacgagccaccgaggcacagggacagaccagccaccacgcccgcccacacagc

SEQ ID NO: 161975 - RNA, 82 nt, Homo sapiens
gggcggcgggcggcgggcggcaaaggagcagccagagggccgggcccagcaccgaccacggcaccaggacaagcgagggaga

SEQ ID NO: 161976 - RNA, 64 nt, Homo sapiens
ccgaaggcggccaacggccaggagccagggcagaaacccccaccaggcgggcgccacacggcac

SEQ ID NO: 161977 - RNA, 89 nt, Homo sapiens
cgggcggaggaagagcaccaggggcaaaaggcaaaggggagagaaggaaagaagccaaaaagaggcccggaacgcaccggaaaaacaga

SEQ ID NO: 161978 - RNA, 31 nt, Homo sapiens
cgggcacgggggcgcgggccaccggccaggc

SEQ ID NO: 161979 - RNA, 80 nt, Homo sapiens
accgagagcgcgaaacgcacgagaagccaagacgcaggcagagacgacaacccggcccaagcgggggagcgccggcagga

SEQ ID NO: 161980 - RNA, 80 nt, Homo sapiens
agcacaagaaaggcccaacgaggaaagcaccaagaggaacgacgaaacacaagaaacgggggagcagagagaggagcccc

SEQ ID NO: 161981 - RNA, 78 nt, Homo sapiens
ccacgcccagcagccggggaagagacccaaacgccaacagaaacgcaccaccaagaacgccaacggcaagaaagggaa

SEQ ID NO: 161982 - RNA, 71 nt, Homo sapiens
ccacacaagaaaagcgaaccacaccagcaagacgacgaagaacagcagggagccggacacgcacagaaaaa

SEQ ID NO: 161983 - RNA, 77 nt, Homo sapiens
ggcacacagcccagccgacggcagagcagcccccacagcgggcggcagaaaacacaggaaccaggaacacaagccga

SEQ ID NO: 161984 - RNA, 75 nt, Homo sapiens
caagggcgcccccccggaacggcaccacaaggccgggaggcccagcccccgcgcggccggaggccggagccccga

SEQ ID NO: 161985 - RNA, 51 nt, Homo sapiens
caccgagcaacgagggcagacgacgcagccagagcagcaagaggccaaggg

SEQ ID NO: 161986 - RNA, 39 nt, Homo sapiens
cgggccaggagagcgccggcgggcaggcacggggacaca

SEQ ID NO: 161987 - RNA, 76 nt, Homo sapiens
cggaccacagaggcaccgccacaggacccaaggccgcacaccgacagagaacccaggccaacacacagacagaggc

SEQ ID NO: 161988 - RNA, 86 nt, Homo sapiens
gaggagcgcggagccggagcggacgccgccgccgccaccgccaccgcgcggcagcacaagagagacggggcaccggagccaggagg

SEQ ID NO: 161989 - RNA, 69 nt, Homo sapiens
cagagagagaggaaacgaagggagcgacacacacccaagggaccaccacacgaaaccaaggaaaaaccg

SEQ ID NO: 161990 - RNA, 82 nt, Homo sapiens
cgggacccccaagagcacaggcagaaggcacaagggcagcaaagcaccgccgagggccaggggaagcgaaccggacacgcga

SEQ ID NO: 161991 - RNA, 84 nt, Homo sapiens
ccaggccgagacaccgcagcgccgccgccgccaccgagccgccgcggcccggccaggccccaccgccacaagcaggggaacacc

SEQ ID NO: 161992 - RNA, 58 nt, Homo sapiens
acgaagacgagggacccacgcccgcacgggaagaaaagaacagggcaaaccaagagcc

SEQ ID NO: 161993 - RNA, 72 nt, Homo sapiens
caaaccaacacagaaaagagccggaagaaaacagaagcggagaaagggagagcacaggggggcagaggaggc

SEQ ID NO: 161994 - RNA, 80 nt, Homo sapiens
aggcaggaaaaagcaacggacaaaccggcagagagggcggagaaggaacagggagagaaacaacgggaacagaaaggagc

SEQ ID NO: 161995 - RNA, 53 nt, Homo sapiens
acgcggagaagaaggcccagagaggggcaacaagggaaagggagcagcaccgg

SEQ ID NO: 161996 - RNA, 78 nt, Homo sapiens
ggagggaagcaagacgcgaagccacccagcgccggaggcaccgacacgaggcccaggagagaggagccgggcacgaga

SEQ ID NO: 161997 - RNA, 79 nt, Homo sapiens
ggcggcgggcggagacaggaccgcggcgagcaagaaccagaagggagcaaagcccggaaaaacggggaagggcgagcac

SEQ ID NO: 161998 - RNA, 73 nt, Homo sapiens
aacccacgaaccaaaagggacggacaaaggaacaggaccagaagggacaaagacaagaagaagcaaaagagaa

SEQ ID NO: 161999 - RNA, 72 nt, Homo sapiens
agaggagaagacaccaaaaagcaaacggaccagaccgaccaccaaaaacggcggaaaacccgaagcagaagc

SEQ ID NO: 162000 - RNA, 80 nt, Homo sapiens
cagccaggagcagagcgacagcggcgagcagaacacggcgagcggggggaaaccacaccacccgccacagacagggagga

SEQ ID NO: 162001 - RNA, 73 nt, Homo sapiens
caccaccaacggaaaacaacacagagacgaggacgcgcacaggaaaggacgcggaacaagcaggcagccaggc

SEQ ID NO: 162002 - RNA, 80 nt, Homo sapiens
caaacccaaaccaacccgaagaaagccagggccaggcagagggcggagaacggaaaagcaccaggaagcagagaggaccg

SEQ ID NO: 162003 - RNA, 73 nt, Homo sapiens
aaagcaccaaggaccaagaaggggggcgcgacaggaacgagggaaaccgccccacccggagggcccccacaca

SEQ ID NO: 162004 - RNA, 83 nt, Homo sapiens
agaaagaaagcgcggccgacaccagaggagaagacgagcagaagacaagggccgaacaccaacagaggaagaaaggagagccg

SEQ ID NO: 162005 - RNA, 41 nt, Homo sapiens
accccagacaccggagacgggaaagcccagcaacgggagca

SEQ ID NO: 162006 - RNA, 70 nt, Homo sapiens
ggacgacaccaggccaccaccgcgcacgccagcagcaagacacagacggaagggagggccacccacggca

SEQ ID NO: 162007 - RNA, 73 nt, Homo sapiens
ggggagaggggccaacaccggagcaacgaagacgcaagaccggggaagacccagacacacaccggagaaagcc

SEQ ID NO: 162008 - RNA, 72 nt, Homo sapiens
cacagagggggaaagccaaggaaaaacggagagccacaaaaaaggaagcgaaaagccggcccaacagagaac

SEQ ID NO: 162009 - RNA, 77 nt, Homo sapiens
gagaaccaaggaaggcccaccgaacagaggagcgagaaagccggccccagcaccaccaaggaaacgaacccaacagc

SEQ ID NO: 162010 - RNA, 69 nt, Homo sapiens
cgaaggaaaaaggggaagaaagagaaagcaggaagccagccagagcagcacaaggggaagaaagcacac

SEQ ID NO: 162011 - RNA, 84 nt, Homo sapiens
gagccaagaaaccagcgaccgggaggacacaaccagagggaagcacgcccgggcacagcggaagagacgacggaacagccccgg

SEQ ID NO: 162012 - RNA, 60 nt, Homo sapiens
aaacgggcaaacagagcagcgaacacccgccggaccaagaaacagccacccagcgacggg

SEQ ID NO: 162013 - RNA, 77 nt, Homo sapiens
gcggagcagcccccccgcgcccccgcccgcccgggacccgcggccccgccgcgagcaaggcccaagcacaagcagcg

SEQ ID NO: 162014 - RNA, 79 nt, Homo sapiens
cgccacgggagcccggcaagccgccaccgggagaagcggccgggccaagggggacggaagcggcagcgggcagccggcc

SEQ ID NO: 162015 - RNA, 73 nt, Homo sapiens
cgacaagcaggagcgagcaggccaaaagggaccggcaacggagaaccgccgcagccagaaaacaccagcagcg

SEQ ID NO: 162016 - RNA, 58 nt, Homo sapiens
agcggaacaggagggccgcccaacgccgacaggggcaaggccgaggggaacagcacac

SEQ ID NO: 162017 - RNA, 74 nt, Homo sapiens
cgcaggcccaacagccaaggaacaagcgaaagcggaaccaagcagggagccgaggccggaagaagcgggcccag

SEQ ID NO: 162018 - RNA, 83 nt, Homo sapiens
ccaggccaagcagccaccagcagcccccagagcgggaccacaggaccgggacgagccaagcagaaggaggaccggagcggcca

SEQ ID NO: 162019 - RNA, 55 nt, Homo sapiens
cgcaggagaaacgaagacagacaccaaaaggacccggaaccccaaggaaacgagc

SEQ ID NO: 162020 - RNA, 83 nt, Homo sapiens
ccggcgcccggggaggcgcacggggaaggcagccagcacgagcccccccaccaccacagccccccacccacaagccagcgggc

SEQ ID NO: 162021 - RNA, 71 nt, Homo sapiens
gcgcaagaggggaacaagaacggcgacagacaagaggcgaagcgagaaccagccaaaacacacgaacaggg

SEQ ID NO: 162022 - RNA, 82 nt, Homo sapiens
cggccacacgcccggcgcggggaggcggcggcggcagcgacagcgccgaaaagcgaaaagaaacaagccgcggcaacagcga

SEQ ID NO: 162023 - RNA, 63 nt, Homo sapiens
cgcccggcgccaaccgaacgcaacaaccaagaaacagccacccagcgacgggccacgaagagg

SEQ ID NO: 162024 - RNA, 80 nt, Homo sapiens
ggccaaggaaagcccagcacccggggagcgacccagcaggggacccagccggaacgacagccaagaacgagccaacgccc

SEQ ID NO: 162025 - RNA, 74 nt, Homo sapiens
aagcaccagacacgacaaacacggagaagaccagagagcaccagggggccggccccaaagaaaggaagaccagg

SEQ ID NO: 162026 - RNA, 69 nt, Homo sapiens
gagccacggccggcccaacggccaaaaggagaggaagacgaggaagcagaagaacaccaagcccaccaa

SEQ ID NO: 162027 - RNA, 82 nt, Homo sapiens
cccgcgaacgagccacagggacccagcaaaggagagcaggagaaaaacggcagcagagcacgcaccaagaagaggagaaaac

SEQ ID NO: 162028 - RNA, 83 nt, Homo sapiens
ggagagggaaagacagggccaaggagacagggaaacgaaaaccaccgggcaccacgagcccacgagagaggacagccccagga

SEQ ID NO: 162029 - RNA, 71 nt, Homo sapiens
aaaggaagcgcgggccagcgacccgcgccagcgcccagggggggaaaccaccgaagccacgccagaagcag

SEQ ID NO: 162030 - RNA, 74 nt, Homo sapiens
aaaaggacagagaaaaggcccaggcaaaggaccagaggagacaacaaagaaacaaacagcacaaggaaccaaaa

SEQ ID NO: 162031 - RNA, 72 nt, Homo sapiens
cgacaagaagcacgaacagcaggccaaagaccagagaccgggagcacccagacaaaccgaagggcagacacc

SEQ ID NO: 162032 - RNA, 66 nt, Homo sapiens
cccccccccccccaaggcacgcagcacgggggcaggggccgacccagaacgccagcgccgcaagga

SEQ ID NO: 162033 - RNA, 86 nt, Homo sapiens
acaaccgcagggggaccggccgcggcacaccggagagcgacgggacccccccgcagaaggccgaggagcgagcgacaggcagagga

SEQ ID NO: 162034 - RNA, 85 nt, Homo sapiens
aagccaagcaaacgcagaaggacgcccacgagcaaccaagagaagaaacgcacagacgcgaaagagggaagaaagaaacgaccgg

SEQ ID NO: 162035 - RNA, 67 nt, Homo sapiens
ccaccggcccgacccagcaacccagcgcagggagcgggcgagcgaccgaagccaggagggaacagac

SEQ ID NO: 162036 - RNA, 68 nt, Homo sapiens
cgcggcggcgaacacagaccaacacggaacagaaagaaggagcccccaaccacgaagagacaaaagcc

SEQ ID NO: 162037 - RNA, 57 nt, Homo sapiens
gcccccagcaggacgcgaagaaacacggggaacggccaggccgcgcaggcagacggg

SEQ ID NO: 162038 - RNA, 84 nt, Homo sapiens
cccaggcccgcgaccgccgccagcgcccgaggacgaccgaaaacccagccagacaaaagagaagcagaggagcgaagaaagaga

SEQ ID NO: 162039 - RNA, 57 nt, Homo sapiens
caagacaacaccgacagcaaggaggcacccacccgcgagacccccaagagacaaaag

SEQ ID NO: 162040 - RNA, 73 nt, Homo sapiens
cgcggcacaccggagagcgacgggacccccccgcagaaggcggagagggagagacggaaagcccgccagcgcc

SEQ ID NO: 162041 - RNA, 76 nt, Homo sapiens
cagggggcgccagaaacgcccccgaaggaaagaccacagcaagaccacgcccccagccgggggaccaggccgaacg

SEQ ID NO: 162042 - RNA, 74 nt, Homo sapiens
ccacgcgcggaaggcagcgcccagcagcgcagcggagcggcggacaccagaagagaaaagggcaagccagacgc

SEQ ID NO: 162043 - RNA, 82 nt, Homo sapiens
ccacgcgaacaccaccagaagacacagacaccgcacccacaaagccaagagacaagcgacccgcagggaggacagcgcaccg

SEQ ID NO: 162044 - RNA, 77 nt, Homo sapiens
ggaagagcgagaccaagagggaccgagcgggaagccacggaccggccaacggaccacaccaaaagccaccaaaggaa

SEQ ID NO: 162045 - RNA, 77 nt, Homo sapiens
ccccaagagccgggggaaaagcaggagcacgccaggaaagagagaagaaaaccgaacaacaaaccagaacaagagag

SEQ ID NO: 162046 - RNA, 71 nt, Homo sapiens
cgggccccagaaaaacaaggaaagaggggaaaggagggacgaccggggcacagccgggaagcaagacggga

SEQ ID NO: 162047 - RNA, 67 nt, Homo sapiens
ggcggaaggcccacaccccacccaggacggaaggacagaacggaaaagagaaaacaaagccaccaaa

SEQ ID NO: 162048 - RNA, 74 nt, Homo sapiens
cggcccggcggcgaggccggaagcggagccgacagagcacgcaccaagaagaggagaaaacacgaacaaagagc

SEQ ID NO: 162049 - RNA, 84 nt, Homo sapiens
cgcgcgagccggagaagccgcagcgcgaggccgccgcgcgcccggggccggccggaaccaaaaagaagccccagagccggggcc

SEQ ID NO: 162050 - RNA, 84 nt, Homo sapiens
gaaaaccccgagggaaacaagaaaacacaaagaggcagcaaaggaggagcaaccgaaagaacgacaagcagaaaagaagcaccc

SEQ ID NO: 162051 - RNA, 49 nt, Homo sapiens
aagaagaaaggccacacccgggcaaaaccagccaaagagacacccgagg

SEQ ID NO: 162052 - RNA, 69 nt, Homo sapiens
gccgcaggccgggaggagccgcagcgccgggcgaccccgcccgggcccgggcacgcagcacgggggcag

SEQ ID NO: 162053 - RNA, 77 nt, Homo sapiens
cagacggaaacaaggcaacagaaagagcaacagcagggcaacagcaaaacaaacggagagaggagggagaaacaaag

SEQ ID NO: 162054 - RNA, 76 nt, Homo sapiens
aagagcaaagcacccaccagaaagaggcacagccccaaaagaaaggcagggaacgccgcagaaagaagaaggggca

SEQ ID NO: 162055 - RNA, 83 nt, Homo sapiens
gcaaagacagggacaggacagcgagcgaggacgaggaacggcgaaccaaaacccgggcagaagaggagaggaggaagcagcag

SEQ ID NO: 162056 - RNA, 66 nt, Homo sapiens
cgcacaagcagccccggaacacacagacaaagaggacacaccagcggcgccaccgccgcgcgaccc

SEQ ID NO: 162057 - RNA, 78 nt, Homo sapiens
cacgagacccgcggacagaaagacagaagaaaaccaaggcgaaggggacgcaaaagaggggcggagaacggaaaagca

SEQ ID NO: 162058 - RNA, 76 nt, Homo sapiens
agaagaagccaaaaagaaacagcgcgccaggcccaagcagcagcagccgagccaggcgaagaacggcccaacaaca

SEQ ID NO: 162059 - RNA, 83 nt, Homo sapiens
ggcggcggcggcggcggcggcggcgcgccccgggggcgacggacagcgaacgggcacgacggccagcgaaacagagaacaaac

SEQ ID NO: 162060 - RNA, 50 nt, Homo sapiens
ggggccaaggagaaacagcaggccagcggggaagaggagaaaacacggaa

SEQ ID NO: 162061 - RNA, 40 nt, Homo sapiens
aagcgacgagccgcgaggaggaagcgcaacgagcaaagga

SEQ ID NO: 162062 - RNA, 87 nt, Homo sapiens
ccgccagaggaggccccccagccacggaaacccgagaccgacccgcccgcccgcggccccgcagcagcccaagaaggaaccaagaga

SEQ ID NO: 162063 - RNA, 74 nt, Homo sapiens
acgacccaagcccgcgagcaggagagggaaccaaacaagacaaaggaggcagcaaacagcacacaacggacgga

SEQ ID NO: 162064 - RNA, 84 nt, Homo sapiens
gggcccggggcccggcgcgcccgggacggcggagaggcgccccccgcagcagaggacagcagcggacggccggaccaagaggcg

SEQ ID NO: 162065 - RNA, 73 nt, Homo sapiens
agggagaaaaggacaaccagagagaggaggaaaagaaggaagcaagaaacacggaggaaagcagacgaggaac

SEQ ID NO: 162066 - RNA, 70 nt, Homo sapiens
caagagcgcgacacccaaggccggcagggaaaaaccaggacaaaaagcaaaggacggcgcaaggaggcca

SEQ ID NO: 162067 - RNA, 81 nt, Homo sapiens
cggccgccggggcgcggcacacaccaggccggcccgcacgcacgggccgccaagaggcagagagacgaaacacgcgccgcc

SEQ ID NO: 162068 - RNA, 84 nt, Homo sapiens
gggcaaaagaccaaagaaggcaaggagagaagagaagaacagcacaggacagaaagggaaccaagaacgagaagagcggcggaa

SEQ ID NO: 162069 - RNA, 76 nt, Homo sapiens
cgcgaaccgccgcaggagcccagcccagaagcgaggcgaagcagcggcgagaaacgagagcacgagaaagaaggcc

SEQ ID NO: 162070 - RNA, 73 nt, Homo sapiens
acccgcccagcccccgagagcgggaacaggcacgcgccaccaccccaggacggcagagaacgccggagcacga

SEQ ID NO: 162071 - RNA, 74 nt, Homo sapiens
gcgcgcaacaccccacaggagggcggagaacggaaaagcaccaggaagcagagaggaccgcagaagggaaggag

SEQ ID NO: 162072 - RNA, 37 nt, Homo sapiens
agacagcccaggagggagaccgagagacgggggccag

SEQ ID NO: 162073 - RNA, 77 nt, Homo sapiens
aaaagagagcaggaaggcacaaaggaggaggaggaggacgacgacgaggggaacggcgagaacaagagagggaagga

SEQ ID NO: 162074 - RNA, 78 nt, Homo sapiens
agaaaagccaaaagaaaccgaaggaggaaaaagggccacaacagcaggcggagcaaggcggaccggccaccacaaccc

SEQ ID NO: 162075 - RNA, 79 nt, Homo sapiens
cagagccaacccagaagagccaaggcagcagcaaggacaagaggagaaaagccagcaagcacaagcccgaacgagcagg

SEQ ID NO: 162076 - RNA, 70 nt, Homo sapiens
cacggggcgcacaccacggcccgggcgaggagggcgaggcagggcaaggcaacgaacagaaaggcacgac

SEQ ID NO: 162077 - RNA, 40 nt, Homo sapiens
gaggcagaagagacggacagcaacggggaagagaagagag

SEQ ID NO: 162078 - RNA, 57 nt, Homo sapiens
aaccgcaggagccagagccagagagaacggacccagagaagaaacaggaaacagaag

SEQ ID NO: 162079 - RNA, 71 nt, Homo sapiens
accaacagccccaacccagaaagcagaggccagagcggagacagacggaagacagaagaaggacgccccaa

SEQ ID NO: 162080 - RNA, 72 nt, Homo sapiens
ccaaccggacaagacagcagacaaaggcggaaggcagaaagccagcaggaaacgacggggcggcgcccagca

SEQ ID NO: 162081 - RNA, 72 nt, Homo sapiens
gccgggagaccgcggcgcggaggccagaaggacagcagaccacagcccggcaggcccaaaaacccaaaggga

SEQ ID NO: 162082 - RNA, 61 nt, Homo sapiens
gcaccccgcacaccgccaggccaggcgggaccggaccaccacgaccggaccaagggccagc

SEQ ID NO: 162083 - RNA, 86 nt, Homo sapiens
cgcagccccacgcaacgggcccgcgcgcagaccagaggacaagacaaagggagcaagacaagccaaagaggaaaagcaaagcccag

SEQ ID NO: 162084 - RNA, 61 nt, Homo sapiens
gccaagccacgaacccgcgaccaggcggagagcccagaaacagaaaacaagccgacagaag

SEQ ID NO: 162085 - RNA, 74 nt, Homo sapiens
gagcccaagccggaacagccaacaaagagaggcacccacaccaaggaggagcaccccgggcaaggcacggggcc

SEQ ID NO: 162086 - RNA, 74 nt, Homo sapiens
ggagaaaggcagggaagcaggcgcaaaacgaaaaccaaggagcgacagcccaacgcagccacggaaaagcccgg

SEQ ID NO: 162087 - RNA, 72 nt, Homo sapiens
ccccaggaccagagaaaggagacccaccaagccaggaaacggagaagaaggaggcccggagcgagccagccc

SEQ ID NO: 162088 - RNA, 71 nt, Homo sapiens
agcccgccgacagcccacacgacagccccggggggggcggcggccgagggggcgggaccgggggcgggagg

SEQ ID NO: 162089 - RNA, 83 nt, Homo sapiens
ggaacagacgagccaagcaagcggcggccccggagccgggcccaccggagcaggcgaagcgcgaaagaggcagaagaaggggg

SEQ ID NO: 162090 - RNA, 76 nt, Homo sapiens
aaaacagagagggcagccacagacagacgccacgccgccccggccagccccaggaccgagcagcggccgccgagcc

SEQ ID NO: 162091 - RNA, 53 nt, Homo sapiens
ccaccagcagcccccagagcggaacacagccacagcacggacccaaacacggc

SEQ ID NO: 162092 - RNA, 77 nt, Homo sapiens
acgcccgcgcgccccagcagagcaaggcccgagaccggagaacaggaaagaacaggccgggcagcggacgcgagaac

SEQ ID NO: 162093 - RNA, 84 nt, Homo sapiens
cggagccggacacgaaacgcccagaaaccccgaaggccaccgccaccacccccagcccggccaccaccagcagacgagaccacc

SEQ ID NO: 162094 - RNA, 62 nt, Homo sapiens
caaaagaagaggcacaggcccaggcagaccgcagcaaaggcggaaggcgacagcggcgggag

SEQ ID NO: 162095 - RNA, 68 nt, Homo sapiens
cgaagagcaacggaaccagcgccgagggaaacacaaagaagacaccagaagggccagcaccacgacaa

SEQ ID NO: 162096 - RNA, 80 nt, Homo sapiens
ccaccacaggaggcgagaaccagagaaagaccgaccacaaacgggcagcacgagccagggagccgccgggaccggcccgg

SEQ ID NO: 162097 - RNA, 43 nt, Homo sapiens
agcagaggcgcagggccagcagggcagccagagcgggaaagga

SEQ ID NO: 162098 - RNA, 65 nt, Homo sapiens
cagccacaggaggcgcggaggacgccccaccgccgacgcccccagccaccaggaaacaaagagca

SEQ ID NO: 162099 - RNA, 84 nt, Homo sapiens
gaacggccgggaaaccagcgcacgaccggggccgaaggaggccgcgggagcccagaagcgcggaggagccaccaccgccggagg

SEQ ID NO: 162100 - RNA, 66 nt, Homo sapiens
ggccagaggggaggacaggcgccacgaaccaaaggcgaagggaggaggcagcgaaaacacaccaac

SEQ ID NO: 162101 - RNA, 47 nt, Homo sapiens
agggccacgcgaggcccaaaagcgggggaccaagaggaccaccaaca

SEQ ID NO: 162102 - RNA, 83 nt, Homo sapiens
aacaggagaaaacggcgcaagagacccagaggaggagagcaggaggagagaggaccagaggaagagagaagacagcagcgaac

SEQ ID NO: 162103 - RNA, 74 nt, Homo sapiens
cccagggacgagaggaagaccgaaggacaaggaaccgaaagacgacgcaccgaaacgaagagcaacgaagacag

SEQ ID NO: 162104 - RNA, 82 nt, Homo sapiens
gcacagcgaacacacaccaaaaacagaaggagacagaggcccggccccgcacagggcagcagccagcccggacacaggggac

SEQ ID NO: 162105 - RNA, 68 nt, Homo sapiens
gcccagccgcaccaccacacaaaagcacacgagcggcgaagcccagacacgcagaccaagggcgcacc

SEQ ID NO: 162106 - RNA, 71 nt, Homo sapiens
cggcgagcgagagcacacgcaaacaagaggcagcgaggccagaaccacggcacggggccaaaaaggcacga

SEQ ID NO: 162107 - RNA, 51 nt, Homo sapiens
agaaagagcacccgccccacagacagagcaggaagccagaggacaacagag

SEQ ID NO: 162108 - RNA, 61 nt, Homo sapiens
ccacagcacaccaccaacgcccccggagagacaccccaccggaggaccagaagacaaagag

SEQ ID NO: 162109 - RNA, 52 nt, Homo sapiens
agcggcggacacacagacccccaccaagcagaacaaaccaggggagggaaac

SEQ ID NO: 162110 - RNA, 72 nt, Homo sapiens
cggcagcaggcgccggacgcgagcgaggcggagaagggacacggcaggcgccagagggaaaagaggacgagg

SEQ ID NO: 162111 - RNA, 49 nt, Homo sapiens
accaaaaaagcggaggcgcgcaggagccaagccgccgaggccgcgagca

SEQ ID NO: 162112 - RNA, 89 nt, Homo sapiens
ccggagcagcggacccaggcagaaaaacaaccaccagcgagcaaaaaggcaaagaccaagaccaccaagaagcgccccagcggcaacac

SEQ ID NO: 162113 - RNA, 70 nt, Homo sapiens
acccaggcgcccgcacgcgaggaaaggcccgagccaaaagacccagagaaaggagcacgaaggaacaaag

SEQ ID NO: 162114 - RNA, 75 nt, Homo sapiens
gaggggagcaccaggaccgggccggaacgagacgcacggcacccccagcaggacagcacacccaaccagacacac

SEQ ID NO: 162115 - RNA, 73 nt, Homo sapiens
ggcgcagccccccccccgaacgcagcgcaagggggaacgcgaaggaagccccggacagacccacccggcgagg

SEQ ID NO: 162116 - RNA, 64 nt, Homo sapiens
gagggacaacaggcaggagaaagggagcgcaccccaggggaaagaaaggcaaagcgagcaagag

SEQ ID NO: 162117 - RNA, 67 nt, Homo sapiens
agcagccaacagaaaggggcagcgccacagcccaagacaagagacagagacgaaaaagaggaccgaa

SEQ ID NO: 162118 - RNA, 77 nt, Homo sapiens
caaggagcaaggcaacaaggacaggcagggaaaaacagcacggagccagcagcagcaagcagcgggcaagacccgcg

SEQ ID NO: 162119 - RNA, 90 nt, Homo sapiens
cgggccaggccgccgccgagccgagcacaaccggaggaagagaaggccagcaagaagagcgcagaggaggagccagaagacaggccacag

SEQ ID NO: 162120 - RNA, 77 nt, Homo sapiens
ggcccgggcgccgccccagcggagggcagccccgagccaggcccgccgccgagcgagcgagccaccgccgggagcag

SEQ ID NO: 162121 - RNA, 125 nt, Homo sapiens
gcgccaccaccacgccagccgcaccagccgcccaagccgcacagccgcggcggcagcagcaggagagcggagccggagcgaggcgggggaggcagcagaagcccgcccccgagagcgaccccgag

SEQ ID NO: 162122 - RNA, 70 nt, Homo sapiens
agcaagacgacggaaccaacacacaaagccgcagaaagcagcaaccaggcaaaagaaaccaccgacgaag

SEQ ID NO: 162123 - RNA, 74 nt, Homo sapiens
accccgccccgagcaaggaccacacccagccccccaaagcgggaacagggacgcaccaaagaagacagacacgc

SEQ ID NO: 162124 - RNA, 39 nt, Homo sapiens
agaaaggacgacagccagagaggcacccgcagacaaggc

SEQ ID NO: 162125 - RNA, 84 nt, Homo sapiens
ccggggccgcccagccaagcggccaaacccacccggcccccggcgccgccagcgaggcacagggaaagaaaggcaaagcgagca

SEQ ID NO: 162126 - RNA, 87 nt, Homo sapiens
gccgggcaccggggagccggccggacacggcacagcaagcagaagcacggcagccagggaaggcccccaaccaggcaacggacggag

SEQ ID NO: 162127 - RNA, 66 nt, Homo sapiens
cggcccgcccgccgcgcagggcccggacaagagaggaggcgcaaacggaccaggggccccccgaca

SEQ ID NO: 162128 - RNA, 72 nt, Homo sapiens
gacaagacaagacaaaagacaaaaacacccgggaaaggcgaagaagaaccaccagaagcggcccggagaaac

SEQ ID NO: 162129 - RNA, 89 nt, Homo sapiens
gccgcgcagacaacaaaccacagccaacacaacgccaacagaaaccgcgcaaagcgggggagccccccgcccaaagcgcaccaggcaac

SEQ ID NO: 162130 - RNA, 63 nt, Homo sapiens
ccagggcgcaggcacagcccgagaaaccgcagcacacacaggacagcagcggacggccggacc

SEQ ID NO: 162131 - RNA, 84 nt, Homo sapiens
cggaagcgcagcaacagcaagccccgggcagccgcccaacagcacaagaagcgccaccacgccggcccgggggaaaggacccga

SEQ ID NO: 162132 - RNA, 85 nt, Homo sapiens
cggagcagcagcagccaggagaccggagccaggggggcccggaacagagcacacccccggggaggcagacagaacaagaaaggga

SEQ ID NO: 162133 - RNA, 76 nt, Homo sapiens
caccagcgccgcgaaggacaaggggcacccgcgcgcacacgcaggcccggccaacgcaacagggagcccacgcaag

SEQ ID NO: 162134 - RNA, 72 nt, Homo sapiens
ggagaaggaccaagaaccagcgaggggagcgcagcgggagcagaccaggccaggagacagcagcggacccgg

SEQ ID NO: 162135 - RNA, 91 nt, Homo sapiens
ccccgcccgcgggagggcgaggccgcacgcaacccccaagcagcaccccgcacaccgccaggccagggagggacaggcaagaaggaagaag

SEQ ID NO: 162136 - RNA, 66 nt, Homo sapiens
ggaagcagggaaaacaggaaggaaccagccaaaaagcaaggggacacgcgcccaccagggggagcc

SEQ ID NO: 162137 - RNA, 75 nt, Homo sapiens
acccacgacgcagcgccccacgaagggccccacaccaaaccgccacgcaacagacgcagagccagccaggagccc

SEQ ID NO: 162138 - RNA, 89 nt, Homo sapiens
caccaggggcagacccagccggcagcagccaggcggagaacaacaaacaggaaacaggaggaggcaacgaggaccaagaaccacacgaa

SEQ ID NO: 162139 - RNA, 59 nt, Homo sapiens
cagaggacccggcgggcggcccgcgggcagagcgagccacccccggcgcccgcgggccc

SEQ ID NO: 162140 - RNA, 74 nt, Homo sapiens
ggaaccgcgaagcaacaaccgcaccaccaggcagaggaaagcgccagcagcgaaccccagacggaaagcccacc

SEQ ID NO: 162141 - RNA, 79 nt, Homo sapiens
ggagaagggagaggagcacggaaacgcagaccacaagaggccgagcaagccagagcaggaggaagaggagaaaggccca

SEQ ID NO: 162142 - RNA, 70 nt, Homo sapiens
aaggccaaaagggaggacgaaggagggccacagggaacaggggaaaggaaaccaaaccaggaaagaagga

SEQ ID NO: 162143 - RNA, 87 nt, Homo sapiens
gaggacacggacacgcggaaaaaaccacagcccgcgggaccacagcaggacgaagacggccagacgcaccgcggcccccaagacagc

SEQ ID NO: 162144 - RNA, 55 nt, Homo sapiens
gaagagaacaccaagagaaagcagcagcacacaaggaaagggacaagacggacag

SEQ ID NO: 162145 - RNA, 60 nt, Homo sapiens
agccccccgcccggggagggcaccaggaggaccgggggaaagcaaaaaaaccaccccaag

SEQ ID NO: 162146 - RNA, 66 nt, Homo sapiens
aacggcagcagaacaccccgggcacagaaaaggggaacgaggagaggcgcaggccacggagcaggg

SEQ ID NO: 162147 - RNA, 80 nt, Homo sapiens
aagcaggaccgagcgcgcacaccgaggaaagcgcccgagggaggggggagaggccgcacagcgaccacaggggaaacggc

SEQ ID NO: 162148 - RNA, 82 nt, Homo sapiens
cgccaggagggaacggagcgcccccacgcggggggacgcccacccgggccacggagccaacaaaggcaaaaagaggggggaa

SEQ ID NO: 162149 - RNA, 83 nt, Homo sapiens
cagcgacgaagggcccgcacccagccgccaggaagcaaaggacagaaagagaaacgcagaaagccacgggcccgaagacccac

SEQ ID NO: 162150 - RNA, 54 nt, Homo sapiens
gcgcaacgcgaccagcaggacagggcggaagcgagcgcaaagggcgagaaaggg

SEQ ID NO: 162151 - RNA, 41 nt, Homo sapiens
ccagggaagagacacacccagaagaggcaggaacgaaccaa

SEQ ID NO: 162152 - RNA, 79 nt, Homo sapiens
cggagagccgcaggacggcgcggcagagccccgacgccacagaacggcagaaggcggcagcggagcacgcaccaggagc

SEQ ID NO: 162153 - RNA, 77 nt, Homo sapiens
gcaaagaagcgaaaccgagcaggcagagagcagaagaacacagacagcggaagagaaccggcgcaagcagcgaagaa

SEQ ID NO: 162154 - RNA, 78 nt, Homo sapiens
gggcggcgggccggacgacaaggaaaggcagcagaagcaacgcagcaagaaacgaagcggacgaggccaaagggcccg

SEQ ID NO: 162155 - RNA, 82 nt, Homo sapiens
ccaacaagcgcacggagccccaagaggacggagaacaggacccccaccacccgaaggacgcagggagaaggggaaccgagcc

SEQ ID NO: 162156 - RNA, 40 nt, Homo sapiens
ccccaccagcaccgacagagcccggaagcaggaagaggag

SEQ ID NO: 162157 - RNA, 71 nt, Homo sapiens
ccccgcgccggaccgcgggaggagacgagcaagaccacgacacccgaagccgggaaagcggaaaagccagg

SEQ ID NO: 162158 - RNA, 58 nt, Homo sapiens
gcgcgaccccagggaacaagggggagaggcaccagcaacagaccaaccgcagcaagca

SEQ ID NO: 162159 - RNA, 79 nt, Homo sapiens
ccgcggccgagcagccgggcggccgcgcgagccggcggcccggagggggcggcggaaaggccaagagcaccagccgacg

SEQ ID NO: 162160 - RNA, 78 nt, Homo sapiens
cccgcagaagagagcgaccggagcggggaacacgggcgagcaaggcaaccagcaagaacaggccacgccagcaagcgc

SEQ ID NO: 162161 - RNA, 84 nt, Homo sapiens
gggccgcaaggccggagaaggccgccgggcccgggcaggggcggggcaacgcggaagacaacaacaccaccgcaggagaagagg

SEQ ID NO: 162162 - RNA, 82 nt, Homo sapiens
cgacaccgaaaacccaccgagcccgccaaaggcagacggacagacggggagaaggccaaagaagaacggcggaaggaggcaa

SEQ ID NO: 162163 - RNA, 73 nt, Homo sapiens
cgcccggaggcccacagcagggggcaggagcaaaagaaaaggccaaaacgaaaaaccaaacagagggagcagg

SEQ ID NO: 162164 - RNA, 78 nt, Homo sapiens
cccacggcgggagaggccgcggcggaggaggcgggcccagacagaagaggaaaagaggccccagacggaggccggccc

SEQ ID NO: 162165 - RNA, 70 nt, Homo sapiens
cagaacagacaggcaggggacaccaggaaaagaagcacagcagcagaccgaagcagcagcaaagcaggga

SEQ ID NO: 162166 - RNA, 81 nt, Homo sapiens
ggaagcaggaagcaaaagaacagacgcaaaaccccagagccacgagcaagaagggaaggcgcagccggcaagagaggcaag

SEQ ID NO: 162167 - RNA, 79 nt, Homo sapiens
agcccagcaccacccgcccagacacaccggagcaaggccccagggaaaggaccgaggcaggaaagaggccagacgcagg

SEQ ID NO: 162168 - RNA, 77 nt, Homo sapiens
gaagaggaagaacgaccagagcgacccgagcagcgcagaccccgaaaacaaaaggagaagacaaaagagagaaaaga

SEQ ID NO: 162169 - RNA, 69 nt, Homo sapiens
caaggaaaaacggagagccacaaaaaaggaagcgaaaacaacgaagagaggaaagaagcggaaaggagg

SEQ ID NO: 162170 - RNA, 68 nt, Homo sapiens
ggcgcggcgggccggcggcgcggaaagcgcaaagccgacgaggagagaccccgcagcggacaagacag

SEQ ID NO: 162171 - RNA, 81 nt, Homo sapiens
accagccagggcacggccgggacgaaagccaacaggcagaccagagacagcgccacgcacccggggagcagaccacgccgg

SEQ ID NO: 162172 - RNA, 58 nt, Homo sapiens
ggccccagggaccaaccccaggacagaggacggccagcagaagcaggcgagccccccg

SEQ ID NO: 162173 - RNA, 35 nt, Homo sapiens
cagccaccgcagccgaggccccaaacggagaacaa

SEQ ID NO: 162174 - RNA, 79 nt, Homo sapiens
aaggcgaaggggaagccaaagaagcagagaaaccaggagggaaagaagcgccaagaagccaaagacaagacgcaggaga

SEQ ID NO: 162175 - RNA, 49 nt, Homo sapiens
agaccgagagccaagagccgagagaaccagccagagaacaagaaacaaa

SEQ ID NO: 162176 - RNA, 74 nt, Homo sapiens
aaaccaaccagaagacgaacaaacagcaagaaagaccacaagaccaaacccaagggggaggaaccacccacgaa

SEQ ID NO: 162177 - RNA, 83 nt, Homo sapiens
cgagagcgcgaaacgcacgagaagcgcaccacgacaaagaagagaaaacgcggcagagcaacaaacacagccagaagaagaaa

SEQ ID NO: 162178 - RNA, 81 nt, Homo sapiens
gaagacgcagaggcaaaaaccacaagaagggaaaaggccgaggcacagcgggaagaccgcaaagacgacccgagacaggga

SEQ ID NO: 162179 - RNA, 103 nt, Homo sapiens
ggcagggaacacaaaggaaaccaaaggccggagaggaacagaagcggcgagcagaagaagcagcggggaaaagggagacgagcacaacagagaggaccagaag

SEQ ID NO: 162180 - RNA, 74 nt, Homo sapiens
aggagacaggaaccgggagcgcacagacagccaacagagcaagaagggaaagaacggcaccaggaggaaggacc

SEQ ID NO: 162181 - RNA, 38 nt, Homo sapiens
caccggaacagacgcaggaagagcgccggaaacaggcc

SEQ ID NO: 162182 - RNA, 64 nt, Homo sapiens
gcccagaagaacgaggaaacccaaggaaacggagccacggggcagacacgaggacaaaaagagg

SEQ ID NO: 162183 - RNA, 81 nt, Homo sapiens
gcaagggagagagcccgcagagcgcgcacccagcagcaacagagaaccccaagcgaaggaagaagcaaggaaaggagaccg

SEQ ID NO: 162184 - RNA, 68 nt, Homo sapiens
gcgggaagaccagaagaaggccacgaaacccgaaagcggcggagaaaccaccacaaacacgaggccag

SEQ ID NO: 162185 - RNA, 64 nt, Homo sapiens
ccaaaggccggcccggcggccagccccacagcggaaacggcgaggaaagagaggagccccggaa

SEQ ID NO: 162186 - RNA, 73 nt, Homo sapiens
gccaaccccaaacaagaacagaaaacgggaagagagggaacacgcaggagggggaaagaaaagcaaaagcccg

SEQ ID NO: 162187 - RNA, 67 nt, Homo sapiens
gaaaaaaagacagcgggagaagcgcagacacaagcccgccgccaaggcccaggaaaggccaagagca

SEQ ID NO: 162188 - RNA, 70 nt, Homo sapiens
gcacaccaagggcgcccccccggaacggcaccacaagcccgaagggcacggaagagaaagaccgccgcca

SEQ ID NO: 162189 - RNA, 62 nt, Homo sapiens
gaggcaccaaacggccgggggcccgagaagcccccagggaaggagccgggagaggccaggcc

SEQ ID NO: 162190 - RNA, 83 nt, Homo sapiens
aggaccggcacgcgagggagcacggacagggcagagaaccgagcggccggagcagaaacgagcggaccacggagcccgggagg

SEQ ID NO: 162191 - RNA, 71 nt, Homo sapiens
gcagggccacggaacaaccacgcgcggcacaggcccaggaggcaagagcgagaagagcgcaagacagaaag

SEQ ID NO: 162192 - RNA, 68 nt, Homo sapiens
cgcgacgggaggagcgccggaacgccgaggcccagggaaagggagcagcaccggccacacccacagca

SEQ ID NO: 162193 - RNA, 88 nt, Homo sapiens
gggcaggaagaaggaaggacccccaaccgcagggcagaaaagaacagacccagaagaagcgaaaggggagaaagaagaaagcaagacg

SEQ ID NO: 162194 - RNA, 77 nt, Homo sapiens
gcaacgaccagccagggagaaaaaacaggcccccacgagacagcccaggcaaaaaagaaaaacaagcacacaagcaa

SEQ ID NO: 162195 - RNA, 79 nt, Homo sapiens
caaagaccgcgaccagacaggcggcgccaccgaacagacccggaaggacggcgaggaaaaacagagagggccaaggccc

SEQ ID NO: 162196 - RNA, 54 nt, Homo sapiens
accggcccccaacgacaaaagcagggaaaaggggagagaagaaagaaaagacgg

SEQ ID NO: 162197 - RNA, 76 nt, Homo sapiens
ccacagggcacacagcaccgggcgaaaaggaggaaaagaagccagaccgagagagaacgaaacagccacacgaagg

SEQ ID NO: 162198 - RNA, 97 nt, Homo sapiens
cgccgggagccgaccgaggcgcccgcggggcggggaccgccgcccggggcacgcagcacgggggcaggggccgacccagaacgccagcgccgcaagg

SEQ ID NO: 162199 - RNA, 77 nt, Homo sapiens
gaagcgcgcagagccggaggggcgcgggacacacccccaggaggcccggcagagcagggaaagcaacggcgcaagcg

SEQ ID NO: 162200 - RNA, 69 nt, Homo sapiens
gaagaacgccggggggcgacagcaaggcacggggacggagacgaggacggagaggcgccacggccggcc

SEQ ID NO: 162201 - RNA, 75 nt, Homo sapiens
gacagaaacgacaggaggaccaggagaccaccacagccgacccaggagaacgggaaagcgcacaagccaccgcgg

SEQ ID NO: 162202 - RNA, 67 nt, Homo sapiens
aaagaggcggcggcgcgccgcggccggccacgcgaagacaaacagaccccagaaagaagaagaggaa

SEQ ID NO: 162203 - RNA, 79 nt, Homo sapiens
cagccaagcagggaacggcaccagaaccgaaaggaccgcaaaaaggccaaggacaaacgcacacggaagcgcacacgag

SEQ ID NO: 162204 - RNA, 73 nt, Homo sapiens
gaaaaccaaagaccgacaagacccaaaagaaagccgagggaaaaaccggagaagagaaacaaaaggacagaga

SEQ ID NO: 162205 - RNA, 76 nt, Homo sapiens
ggagaggagccagagccccacgggaaggagagcagccagcaggaaggagacccaggaagaaagggcgaaggacacc

SEQ ID NO: 162206 - RNA, 73 nt, Homo sapiens
gaccacccacccagcaagggcggcccggcccaaccgcacacccggaagcagccacggcggggaacgacaggcc

SEQ ID NO: 162207 - RNA, 80 nt, Homo sapiens
aaggaccaagaaccagcaacagcaaggacaagggcgcacgcaccaagcgggagaccaaagcggaaacacgggaccaagcg

SEQ ID NO: 162208 - RNA, 57 nt, Homo sapiens
acggccagggcaggcggccggcagagccaaggagggaccccaagaaagcaagcaaga

SEQ ID NO: 162209 - RNA, 82 nt, Homo sapiens
aaagacccggcacaccaggccaagacaaaggagagagagcggggacagacaggcaaggccaccaccgcagacaggggcgcag

SEQ ID NO: 162210 - RNA, 75 nt, Homo sapiens
cagagaaagcaagcgaacaaaagagcaagaaagaacaggccagacaaacagcgaagagcagaaaacccaagaaac

SEQ ID NO: 162211 - RNA, 79 nt, Homo sapiens
gggagccggaacgggccaggaaagacagaaaagcgcacaaacggccacaaaaagaagaaaaagagagacgaagacacaa

SEQ ID NO: 162212 - RNA, 76 nt, Homo sapiens
agccacgagagacagcaggccgagcccgagcgcgggaagaaaggggaaaaagaaaagggcgaagacccgaagcagc

SEQ ID NO: 162213 - RNA, 55 nt, Homo sapiens
gcgaagaaggaggcaggcacgaccgacagcaccgacggaacagcggacgcccccc

SEQ ID NO: 162214 - RNA, 78 nt, Homo sapiens
gaagccagcccacaggggcaaggaccgcaggacaacggccacacagccaggggaccacagaaaggacgcaggaaccgc

SEQ ID NO: 162215 - RNA, 79 nt, Homo sapiens
gcgacgaagggacggcggccgaccagggcccgaaccgcgaccaacaaaaaaaagagaagaaaggaaacagcggcaaacc

SEQ ID NO: 162216 - RNA, 53 nt, Homo sapiens
cagacgcaggagcggcgagcagggcggggcaggaaccgaaaacccacacacaa

SEQ ID NO: 162217 - RNA, 74 nt, Homo sapiens
gggcggacagcggggcccgcggaaaacaggaagcgacacagaacggggaggggccacccagagcacaacaggac

SEQ ID NO: 162218 - RNA, 76 nt, Homo sapiens
cccaaggccaacaaggcagcccaaagacacaccacagagcaacaagaggaaaccagaccacacgcggaggaggcgg

SEQ ID NO: 162219 - RNA, 100 nt, Homo sapiens
aaaaagacagggaagaggaagaaaacacagagccacccggaaagacacgagaggcgagggacgacagagcaagcggcagagggcaagcgggaaaaagacc

SEQ ID NO: 162220 - RNA, 95 nt, Homo sapiens
agagacaagaaagaggaccagagagccaagaacgaagaaagcggaagaagcgacgcagccccagacgcagacacaggagccgccaagcaaaagga

SEQ ID NO: 162221 - RNA, 81 nt, Homo sapiens
caggcacaaccaagccgccggggaacagcccgagcagcagcgagacccagaccggggcggggagaacaccaaaacaaaccg

SEQ ID NO: 162222 - RNA, 53 nt, Homo sapiens
gcacaaaaccgcgcggaaaccaccggggcgcggagcggagcacgagggaccga

SEQ ID NO: 162223 - RNA, 72 nt, Homo sapiens
aaccccccgaacaaagccgccggaaccaaagccagccggcaacgaagacgcagggggccggcccagggagaa

SEQ ID NO: 162224 - RNA, 67 nt, Homo sapiens
acaggaccacgaagggacagagcgaagaaccccccaagaagacgaaacccccgggccacaagaaggg

SEQ ID NO: 162225 - RNA, 35 nt, Homo sapiens
aaagagagaaaccgcagaacagcacagccaaaaca

SEQ ID NO: 162226 - RNA, 79 nt, Homo sapiens
gcgaggaccgggggggagggggcccggcaggacgaggacgaaggccgagaccaagagcgagccagagcaaagcacccca

SEQ ID NO: 162227 - RNA, 79 nt, Homo sapiens
gcgggggcggggggccgagcaaccagaaccggagcaggaggcgcacaacacccagaggagcaagaggggggggcccccc

SEQ ID NO: 162228 - RNA, 63 nt, Homo sapiens
aggcagaaaaaacgcccagagccgagccacaagcccacgagagggggagaggcaccagcaaca

SEQ ID NO: 162229 - RNA, 73 nt, Homo sapiens
cgggccgccgcggcgcagagcaggaagacacccacgaggacaaccccacagagcaagagacgaagaagccaga

SEQ ID NO: 162230 - RNA, 131 nt, Homo sapiens
acgagagaggcaccgggacggaccgagaccggaccgagagcggaccgagagcgcgaaacgcacgagaagggaggggccaaagggagagggacaacacacgagcacaaacacaagcggagacagaagcacga

SEQ ID NO: 162231 - RNA, 58 nt, Homo sapiens
caccaagggccaggaagacagaacggcaaggggaaaccagaagcgggggggcggggca

SEQ ID NO: 162232 - RNA, 90 nt, Homo sapiens
cgagcccggcacagcgccgcgccgccgccgcggggcagcagcagccggcagcagcagcggcggcaaccggcacgcaccagagcagcccac

SEQ ID NO: 162233 - RNA, 58 nt, Homo sapiens
cagcagccccggcgggccgcaccccaggaagaaaaggccacaagcccagagccagccg

SEQ ID NO: 162234 - RNA, 57 nt, Homo sapiens
cggcccgaggaccagacgaggggcccagccgccgaggccagggccgcaaggccaggc

SEQ ID NO: 162235 - RNA, 87 nt, Homo sapiens
gcggcacagagagggccgggagcgcgcagccaggagacgacccccggccggcgggacagaccccgcgcaggccccgccagaccacgg

SEQ ID NO: 162236 - RNA, 85 nt, Homo sapiens
ccccccccccccccagcggggccccaagaagccgagacacgcgcaggcggacaccgaccgcaggaaggaggaggaggagggagcc

SEQ ID NO: 162237 - RNA, 83 nt, Homo sapiens
ggcggagaagcagcggggggccacgcgacaagcccccacccaggaaggaacaaccccacaccaccacacagcaccagcccacc

SEQ ID NO: 162238 - RNA, 75 nt, Homo sapiens
aggaggggcccggggggaggaaaacagggcgaggacgggagaacagggcaggaaaagggccaccgccccaggcgg

SEQ ID NO: 162239 - RNA, 82 nt, Homo sapiens
gaaaaggagaaggaaagcgaaggggaaggcgccgaagaggacgaagccaagacaagcaaacccaggaacacccggccggccc

SEQ ID NO: 162240 - RNA, 71 nt, Homo sapiens
aggcagaccagaaggcgagagcggcgccaacggccgacaagcccgacgaagaccggcggccacagcagcaa

SEQ ID NO: 162241 - RNA, 84 nt, Homo sapiens
acgcaccgcagccggaggagcggccgaccgcggcgagccgcacagggcaacacacgcaccgcacggcccccgcccacaaagcgc

SEQ ID NO: 162242 - RNA, 69 nt, Homo sapiens
aacgaaaccggacaacggcagcggggaccgcgcagacgcgcaggacggagcggggccaggcggccagga

SEQ ID NO: 162243 - RNA, 80 nt, Homo sapiens
cccgaagagcaacggaaccagcgccgagcgagcccacagcccgggccccccgagcggacggaccggagcccacgacaacg

SEQ ID NO: 162244 - RNA, 68 nt, Homo sapiens
cggcgcccggggacggagcgcgcgcaaaggccaggcagagcagcccaccagggaggggagggggggag

SEQ ID NO: 162245 - RNA, 83 nt, Homo sapiens
agcccgagcccacaagggacggacagagaagacggaacaagaaaggaccaggagccccgggcaacagacagagggacaccaag

SEQ ID NO: 162246 - RNA, 46 nt, Homo sapiens
aacacacaacacacaggggcacgaagagcccggaacgccagagcgg

SEQ ID NO: 162247 - RNA, 85 nt, Homo sapiens
ggcagaaaacggacgcccacagaaggaagcacaaaaagggacagcggcagcaaaaccccagaagaggcgaaccgcaggaaaccag

SEQ ID NO: 162248 - RNA, 78 nt, Homo sapiens
acggaccagcagaacagaaacaagggaaagcagagccaagagaacccaaccaaacagggagacaagagcaagaagcag

SEQ ID NO: 162249 - RNA, 78 nt, Homo sapiens
ccccgaggaacagagaaaagaaaccagcagacagaagcagacaaaccagggccggaggaacgaaagagagagaaaaca

SEQ ID NO: 162250 - RNA, 85 nt, Homo sapiens
ccaaggcacaccaccccaggaagaaggaggccgaccaggccgacaaagcagacgcccgcaaacgaccggggaaagcacccaggaa

SEQ ID NO: 162251 - RNA, 37 nt, Homo sapiens
cgcccagcgaccagaaggccaagggaggaaaaagcgg

SEQ ID NO: 162252 - RNA, 76 nt, Homo sapiens
gccccaggcgcccaccgggacaaagaggaggacaagaacccacccgcgcccaaccggccagaacacaacccaaaag

SEQ ID NO: 162253 - RNA, 81 nt, Homo sapiens
gcagcaacaacagagagcacggaccagagccacgcgcccaggcgcaggcaggggccacacgcgcacgcaacccgcccccgg

SEQ ID NO: 162254 - RNA, 74 nt, Homo sapiens
acagcagaggagcccgagcagcacggaccggagaaccgggcaaaaaccaaagggaaaaagaccaggagaaagac

SEQ ID NO: 162255 - RNA, 77 nt, Homo sapiens
gggcacaccaacaagccacgaccggggagcaggacgaaccaagaaacaaaagggaagaccggaacggagacgcacaa

SEQ ID NO: 162256 - RNA, 56 nt, Homo sapiens
aagaggcaaaccagagcggcacaggcgcacaaggaaacaaggcggacaggagagcg

SEQ ID NO: 162257 - RNA, 73 nt, Homo sapiens
ccgaacccgcgccgcacgaaccaaagccagagaaccgcacccgcaggcaggcagaaacccacggccaaacccg

SEQ ID NO: 162258 - RNA, 79 nt, Homo sapiens
gagaaagggagccgagcgagaccacgcaccacgggcgggagacggcgaaaaccaaagaagaaaagcaccccaagagacg

SEQ ID NO: 162259 - RNA, 64 nt, Homo sapiens
ccgcggccgcgacccagccagccagcaaccggaccggcagccagcacgagcccccccaccacca

SEQ ID NO: 162260 - RNA, 64 nt, Homo sapiens
caggccgagggcccagggaggagaggacagaacagagaaggggaagacgaccgcgccacaagga

SEQ ID NO: 162261 - RNA, 72 nt, Homo sapiens
aacccgccaggcaggccccccggagcggccccgccgcggcgaacaccccagggccgaagggggccccaagag

SEQ ID NO: 162262 - RNA, 90 nt, Homo sapiens
gcccagccaagccccgccgacgcgggcaccggagccagccccgcagcgggacaccagaggaccagaacccacgagaaacagacgagccaa

SEQ ID NO: 162263 - RNA, 74 nt, Homo sapiens
agccccgacagcgggaacaggagcaagaggggagggaaaaggaaaagcgcgaaagagcaccagcccggaaaaag

SEQ ID NO: 162264 - RNA, 87 nt, Homo sapiens
caagagaggcggggcgcccccgccacgcagccggccaccgccgagacccagcacacgccgaccagaacaacagcgaccccaaggaag

SEQ ID NO: 162265 - RNA, 87 nt, Homo sapiens
agcgcggcggggccccgcggcgccaggcgcacagccagcggcgccccgaacgggaccaagaccccggaccggggcccagcggcccca

SEQ ID NO: 162266 - RNA, 35 nt, Homo sapiens
gacggcgacgaccaggacgagaggagaacagaagc

SEQ ID NO: 162267 - RNA, 69 nt, Homo sapiens
aaaccccaaacccaaccgggcacagaagaggaacaagacaagacagcccaagaaccacaagacaggcca

SEQ ID NO: 162268 - RNA, 67 nt, Homo sapiens
ggccccaagaaacacccgaaaaaccgcaaaagaggcagagcaccggcacccgggcggcgcgccacac

SEQ ID NO: 162269 - RNA, 70 nt, Homo sapiens
caccacacgcaaagagaagaagggggaaaaagggaccgcgggccaaaaggacccgggccccacacaacaa

SEQ ID NO: 162270 - RNA, 36 nt, Homo sapiens
gcacaacacgccagaacccagaacgaacaggacaaa

SEQ ID NO: 162271 - RNA, 75 nt, Homo sapiens
aacgcgacacaacaagccagccaaagagcccgccccaggagagccacgaaggaccaacccagcacaagaagagga

SEQ ID NO: 162272 - RNA, 81 nt, Homo sapiens
gggcgcgggccggccccgcggggagcgcccccggcgcgagccccaggaaaggcgcgagaacagcccagacccgcggagggc

SEQ ID NO: 162273 - RNA, 82 nt, Homo sapiens
ccgcgaggggcgagaaaggcccacgcagcccccaagcagccgggccgcccgcggcagagcagcagagcgccgcccacaagag

SEQ ID NO: 162274 - RNA, 79 nt, Homo sapiens
acgagaagcaaagacagggacaggacagcgagcgaggacgaggaacggcgaaagacagaaccagcacagcaaaaaaggc

SEQ ID NO: 162275 - RNA, 95 nt, Homo sapiens
gaaagcggaaaccggggaggaggcagacaaaagcaggaccccagagagagcccaggcagcccgagaacacgaagagcgggaccgaacccagacag

SEQ ID NO: 162276 - RNA, 71 nt, Homo sapiens
cagcgcagcagagcgccaagacgccggaggcgcagaccggggacagcaggcaagcgccggggaaccagagg

SEQ ID NO: 162277 - RNA, 61 nt, Homo sapiens
aaaagcgggacagcgcagaaaagacagaggccgggacaggcgagcagacagagcaccagcc

SEQ ID NO: 162278 - RNA, 44 nt, Homo sapiens
gagcacaacaggagcacgaggaggcaccacgccacgggaaggca

SEQ ID NO: 162279 - RNA, 55 nt, Homo sapiens
gaccgacaagcccaccccaggaggccaccgcaccaggcgccggcccgcagaccaa

SEQ ID NO: 162280 - RNA, 85 nt, Homo sapiens
gccccggcccacaggggggggcaaacccgagagaacggggacccagaacgggggaacggcacccccccccggcagccaggggcaa

SEQ ID NO: 162281 - RNA, 76 nt, Homo sapiens
accggcggaccacccagcaaaggcgccagcccagcacgccgcgacggccccgggaaggaggaaaggagcgagaaac

SEQ ID NO: 162282 - RNA, 93 nt, Homo sapiens
acgcgagaagcccagaccgcagggcgggaaaaaaccaagcagcgagcaccagggaaaagaaggacggcgccagagaaggaacagggacgaaag

SEQ ID NO: 162283 - RNA, 86 nt, Homo sapiens
cagaacccagaggcgggaggggccgggaggcagaggggcaggggcgaccccgcacacacacccaccagccacggcagcccagcggg

SEQ ID NO: 162284 - RNA, 70 nt, Homo sapiens
accccaaaccccgcgcaaggcagagaaacggaaagacagccccaagcgagaacaaacaacaaaacccagc

SEQ ID NO: 162285 - RNA, 78 nt, Homo sapiens
agaacccaggagaggaaaaaacccagaaaggcaaaggggaaaaaggcgccaacgcaaagccacacgggcacggcccac

SEQ ID NO: 162286 - RNA, 77 nt, Homo sapiens
ccgggcagaggacgggcgcccagaaccgcaagggcaaggccaggagacaaaaccagaggaccaagaagacggggaaa

SEQ ID NO: 162287 - RNA, 75 nt, Homo sapiens
cccgcgccgccgaccccccggcgccgcgccggcggcgagagcgcccccacccccaggcccgagggacaggagcag

SEQ ID NO: 162288 - RNA, 85 nt, Homo sapiens
cacggagcgggcccgggccagaggcagaaaacggacggaagaaaaggcggccgacccaacagaggaagccgcaagaaacgggacg

SEQ ID NO: 162289 - RNA, 65 nt, Homo sapiens
cagcccgccgaacccgaaaggagcacaccgacagagaacccaggccaacacacagacagaggcag

SEQ ID NO: 162290 - RNA, 78 nt, Homo sapiens
ggggcgcccgagaaggggacggcgggcgagggaggggaccgccgcggcccacagaaaggggcggaaaggaggaaagac

SEQ ID NO: 162291 - RNA, 51 nt, Homo sapiens
gaaaccaaacaaaggcgcggacggggcgagacaggcgggaaaccaacccgc

SEQ ID NO: 162292 - RNA, 56 nt, Homo sapiens
ccggaggaaggcgagcgccgcacgaagaacggaagcgccccagaggagagggcgga

SEQ ID NO: 162293 - RNA, 83 nt, Homo sapiens
aaaacacagacagaccaaacagagacgaagaccacgccggggacacaggccgccaaaggagggaaaagggagagcgaagacca

SEQ ID NO: 162294 - RNA, 40 nt, Homo sapiens
gggccgcgaggagcgcgccaggccccgagccccggcccca

SEQ ID NO: 162295 - RNA, 71 nt, Homo sapiens
aaaagccggacagcaggacacaaaccaaaacgagaggaccacccgcacccaggggacgcacggcccaaccc

SEQ ID NO: 162296 - RNA, 76 nt, Homo sapiens
gccgggcgcgggcccacgcggcgcagagaagacggcccagcagagcacccaaccagcgggaacacagcgccgcccc

SEQ ID NO: 162297 - RNA, 60 nt, Homo sapiens
cgaggagaagagcgggccaaggcaaggaggccagggagaggcgccgcccgcggccgcccc

SEQ ID NO: 162298 - RNA, 56 nt, Homo sapiens
agaacagaggagaccggcaggacacagcccgaaaaggcaccggcacggaccacccc

SEQ ID NO: 162299 - RNA, 70 nt, Homo sapiens
caagagcacccgacccacaggccagagagagagaggagacacaagaggaccaggcaggggcaaccaagaa

SEQ ID NO: 162300 - RNA, 83 nt, Homo sapiens
aaaccaaaaagcagggaagaaacgaaggaggcccaaccacaaaaggagccgacggaacccagacggagaacaaaaggaagaaa

SEQ ID NO: 162301 - RNA, 71 nt, Homo sapiens
cccacgcccaggcggcacccacgaaacaacagagaccaccagggggaagaaaaagccaagcccggcacaac

SEQ ID NO: 162302 - RNA, 75 nt, Homo sapiens
aaaaaggaccaaccggcaagggacaacggccaagacaaacacaaggcgccgcaaaaaaaaacgacaaagaagagg

SEQ ID NO: 162303 - RNA, 67 nt, Homo sapiens
caggcaaaaagagagccaggaaacaggaccgccacaggcgcaggagaacccgaacggcaacagacga

SEQ ID NO: 162304 - RNA, 74 nt, Homo sapiens
gcacgccgccagccagcaggaaccaaagcggacagagagggcaccggaagaaggaaggaaacaccagccgggaa

SEQ ID NO: 162305 - RNA, 76 nt, Homo sapiens
cgagagaaggaggccgcagcggggcccagcacgagagacgcgcaccaggagacacaaacgccgcaccagaagaagg

SEQ ID NO: 162306 - RNA, 42 nt, Homo sapiens
gacaaaagcaacgaccgaggaaaggcaggagaggagcagcaa

SEQ ID NO: 162307 - RNA, 60 nt, Homo sapiens
ccggccgagacggcggcagcagcggcacagggcagccaagcaggaccacccaccagccac

SEQ ID NO: 162308 - RNA, 79 nt, Homo sapiens
ccagagcgacagcccgggacaccaagaaagaacaaaaaggcacaaacccagcacagagaagacggcgacaagcaaaaga

SEQ ID NO: 162309 - RNA, 77 nt, Homo sapiens
ccgacagccgcaaaacgcacagagaacaccccagcagaacagggaggaccaccagccaccagaaggagacagaccgg

SEQ ID NO: 162310 - RNA, 83 nt, Homo sapiens
gcagacccggaagggaggcgggagaaggcgcaacgcggcgcgaacccccgaccgaaaaacccagggagcaaaggagggagccc

SEQ ID NO: 162311 - RNA, 81 nt, Homo sapiens
ccagcccgaccaccaccgacaccccggcagagaagaaaggagaaagaagcggaggcaagagcgaaggagaaaggcaacaag

SEQ ID NO: 162312 - RNA, 67 nt, Homo sapiens
acacacaaacggcgcggcagaaaaaccagcccggcgcagcacgccgaaaggggacgagacaccaaaa

SEQ ID NO: 162313 - RNA, 74 nt, Homo sapiens
ccccgacacggggcgacacagcggccgagagacggaaacacgagcgaggggaggccaacggcgagcgccgacgc

SEQ ID NO: 162314 - RNA, 89 nt, Homo sapiens
gccagagccggagcgcgaaggccgggacccggccccggcccacaggggggggcaaacccgagagaacgggaaacggaacgccaagcgaa

SEQ ID NO: 162315 - RNA, 77 nt, Homo sapiens
agccccgcgaagggaacagggggaggggaacagcagcggagaacacggcagagacaaaacggaccaccgcgacagaa

SEQ ID NO: 162316 - RNA, 69 nt, Homo sapiens
gcagcgcaagaccgcaggcagcgccaacaaaaaaaaaccaagaaaccaccagagagcacccacaaagac

SEQ ID NO: 162317 - RNA, 74 nt, Homo sapiens
gaaacgacaggagacacaagacccaaagcacagcaaaccagggccaagggaagaagaacagaagaaaccgagac

SEQ ID NO: 162318 - RNA, 77 nt, Homo sapiens
caagcggccaagcacaaagagcgccccacgagagaacggcacacgcgagcggccaaagccgacagaaaaggaagaga

SEQ ID NO: 162319 - RNA, 86 nt, Homo sapiens
cacacgccgccaccgggaggcccagggaaggccaaacacacaggaacgccagaccccagccgagggaggcaacagcaaagggacag

SEQ ID NO: 162320 - RNA, 74 nt, Homo sapiens
agggcaaccagggaaacaggagagcaccccagaccagaccacagacaaccgcccccagcccgaggaggacgagg

SEQ ID NO: 162321 - RNA, 94 nt, Homo sapiens
cggagagacgcacagcaagagcaggacaccggaagcgggaaaggaccaggccccggccgaagggagagcccagcccaaccccgaaagacccgaa

SEQ ID NO: 162322 - RNA, 83 nt, Homo sapiens
cggccggaggcaccagccgccgcgccaggacggcagccagacgagcagggccgcagcaggccgcagcgccaaagaccacagcg

SEQ ID NO: 162323 - RNA, 74 nt, Homo sapiens
gacaagcaggcaaaaagaaacggagccaccacaagcgcaagccaaagaacccagggagaccgaaggaccaccgg

SEQ ID NO: 162324 - RNA, 59 nt, Homo sapiens
cggggcggcgcggcccggccccgggcccggccggcggcgccggcggcagagcggggaga

SEQ ID NO: 162325 - RNA, 53 nt, Homo sapiens
ggagaaccaggaccccaccaaaccgaaaaggaggagggagacaggggcaaaaa

SEQ ID NO: 162326 - RNA, 77 nt, Homo sapiens
agaaagaaagaacggacgagaggagaaggccaaggagagacacaaggcaaagagccagcgacagcgaccgaagaaca

SEQ ID NO: 162327 - RNA, 71 nt, Homo sapiens
cccggccaaaaacagcaaacggaagaggagaaccggaaccgggagcacaggaggcgcgagacggcagccca

SEQ ID NO: 162328 - RNA, 58 nt, Homo sapiens
cacgggacaggggcgcggccagagccaagaccacagcagcaggaggagcggaggaggg

SEQ ID NO: 162329 - RNA, 65 nt, Homo sapiens
agggaaaagggccaaggggaaggaacagaaggaccacaggggccgcaagccaggggaaggacaca

SEQ ID NO: 162330 - RNA, 76 nt, Homo sapiens
ggcaggaccggaccgcaacagggggagagccagcaaccggaagcaggagaagaggagggaaacaggcaccggggca

SEQ ID NO: 162331 - RNA, 77 nt, Homo sapiens
cgccagaccagaaaggccagacaagaggaagaccagccgcaaaccaagggaaaaagcgggaccaagggacaagggca

SEQ ID NO: 162332 - RNA, 83 nt, Homo sapiens
caggagagacagaagcggacccagaaagacaaggcccagagaggcggacccacggggagacaccgggccagccagcaccaggc

SEQ ID NO: 162333 - RNA, 66 nt, Homo sapiens
agagccgcagcagaagccggaaaggcgaaggagcagaagacaaacagaccccagaaagaagaagag

SEQ ID NO: 162334 - RNA, 88 nt, Homo sapiens
ggcgggcccgggaagcgggccggcagcgcccggacgaggaggaaagccaggccagaagaaggaaggccggggaggggacaggaaagac

SEQ ID NO: 162335 - RNA, 81 nt, Homo sapiens
acgcggccgaagcgggaagggggcagcaggcacaggagaagcgaaagggggcggggaagagacacagaagggaggcgagca

SEQ ID NO: 162336 - RNA, 66 nt, Homo sapiens
ccacagagaagaccgcgagggcgcaaggcaggggagccaagccgccgcaggaacaccgacggcgcc

SEQ ID NO: 162337 - RNA, 64 nt, Homo sapiens
gcacagacaccgcgcggaccagggggcagcggcaagcaggggagccagccacacagagacagac

SEQ ID NO: 162338 - RNA, 64 nt, Homo sapiens
agccacggccgggggcgccagagcaacgcaagaggagccaggagcacggggggaacaagaccgc

SEQ ID NO: 162339 - RNA, 74 nt, Homo sapiens
caagcggaagaggcagaggcgcggggaccaaacaccccggagggaacaacgagagcgccccaagggagccagcg

SEQ ID NO: 162340 - RNA, 77 nt, Homo sapiens
aagaaggcgaaggaccccaacggggaggccaacggaagaagaggaggcggcaggagaagcagagaagaccgcacggg

SEQ ID NO: 162341 - RNA, 32 nt, Homo sapiens
ggaacagaacggggggcagacaggaaggaaaa

SEQ ID NO: 162342 - RNA, 49 nt, Homo sapiens
caccagagagaggccgaacggagcagacaaaggcgggggaaccgaaccc

SEQ ID NO: 162343 - RNA, 80 nt, Homo sapiens
accccagaccccgcccaacacgacccagcagccagagagccaccaagccaaagccagacccgaaagcagagcacagcaga

SEQ ID NO: 162344 - RNA, 68 nt, Homo sapiens
caagccaggggccccaccaggagccagggaggacgaagaaagacagaaagaaaccaggcaccaaaggg

SEQ ID NO: 162345 - RNA, 69 nt, Homo sapiens
cccccggaaaaccccccccggccggcaaagcaccaggcacagcaagcgccgaaagaccagggaaaaaac

SEQ ID NO: 162346 - RNA, 72 nt, Homo sapiens
aaacaggcggggaccggcgaggagcgaagaacaaacacccgagcgcgagaggagaggagaaaaccaggggcg

SEQ ID NO: 162347 - RNA, 66 nt, Homo sapiens
acaacgagcccaccgagccaaaaacaggcaggcacaggcggacggcgggggcaaggccaaagagcg

SEQ ID NO: 162348 - RNA, 73 nt, Homo sapiens
caaccaacgacaacaaggcagaagccacaggaaaaggccgagacaggcaaccagacggagggaacaaacaggg

SEQ ID NO: 162349 - RNA, 72 nt, Homo sapiens
agaacacagcaacacccacggccggaacaagaggagaccaagaaaacgaagaaagaaaagaaaagaacaacc

SEQ ID NO: 162350 - RNA, 72 nt, Homo sapiens
acaaggccaggcccaagagccagagaagagaacgagcggaagaggcagaagccgaaggagaggaagagaaca

SEQ ID NO: 162351 - RNA, 79 nt, Homo sapiens
gaacccgaagcgggaaaggcagccgggaaggggacccccaaggaccgcccagccgaaagagagccaaggggagcgaaga

SEQ ID NO: 162352 - RNA, 72 nt, Homo sapiens
cccagacaagccaaaggagacgggaacccagaaaccccgccgacccacgagcccggcgacagcccagggagc

SEQ ID NO: 162353 - RNA, 83 nt, Homo sapiens
aaagcgaccacagaaaagcccaccaggagcagggcaggccaaaaagcgacaaaaaccagccaaagggccgagcccagaaaacc

SEQ ID NO: 162354 - RNA, 57 nt, Homo sapiens
gggaggcgccaccaggaaagaaagggcgcaagccccggggcagagacacaggacacc

SEQ ID NO: 162355 - RNA, 68 nt, Homo sapiens
caccgcagaacagcggggaaacacaggcaagcagaaaacacagagaaaacacggagaaacagcaacag

SEQ ID NO: 162356 - RNA, 75 nt, Homo sapiens
gagacgggcaccgagagggacacggggcaccgcgccgcagcgaaacgccaagggaccacggaacagcgcaagaaa

SEQ ID NO: 162357 - RNA, 80 nt, Homo sapiens
cgagggaagggaacggaaacagaggaggaccccaggaaaggcaggaacaagacgccaaggagacgccgcagagacccccg

SEQ ID NO: 162358 - RNA, 61 nt, Homo sapiens
accagcagaacagacaggcaggggacaccagggggacagacacacgcagggccccgagcag

SEQ ID NO: 162359 - RNA, 78 nt, Homo sapiens
cgcccccacacgcaaacccagcagcggaccccgagaacacaggccacgggcggacacccacggccgggcacagccaga

SEQ ID NO: 162360 - RNA, 47 nt, Homo sapiens
gccggggcacagcacagcgccggcgcaagggaaaaaccacaaaaacc

SEQ ID NO: 162361 - RNA, 80 nt, Homo sapiens
agggacgagaggaagaccgaaggacaagggggagagagggagcaggccaccggaagagggcacaacgggaagagagggga

SEQ ID NO: 162362 - RNA, 84 nt, Homo sapiens
ggcccccaccacccggaggagcagcccgccccgccgggggagacgacccccgccaggccccgggaccaaggacacgcagacccg

SEQ ID NO: 162363 - RNA, 81 nt, Homo sapiens
aaacaaacgccaaggaagcaacaacgggaacgaggagcggaggaccagaagaagcccccccaaccgcggaaccgccagcga

SEQ ID NO: 162364 - RNA, 67 nt, Homo sapiens
accaggcccaagcgaaaaagcgggaacgcaggacccaaagcagacgggccaccaaacacaccacgcg

SEQ ID NO: 162365 - RNA, 34 nt, Homo sapiens
caagccaaagaacccagcacgccaaccaccggag

SEQ ID NO: 162366 - RNA, 80 nt, Homo sapiens
gcgagcgcagcaaagcgcccagccgccgcccgcgcccgcggccgggggcgagggggcacacaggcaaacaggaagagaac

SEQ ID NO: 162367 - RNA, 71 nt, Homo sapiens
cacgacccccgagaagcgggcccaagcaggggccagaagcagcgcgcagacaggacaaccagcggaggcac

SEQ ID NO: 162368 - RNA, 77 nt, Homo sapiens
ggaaagcaaaggcgcaggaaggccccaggcggggccggggagcccgggccagaccccccagacccagcccaccccgg

SEQ ID NO: 162369 - RNA, 85 nt, Homo sapiens
caggccagggcagaggcgaagggcgggggcgagggcccgggacagcgcacccacacagcccaggacacgcgcgccccgagccggg

SEQ ID NO: 162370 - RNA, 84 nt, Homo sapiens
aggcgagggagcccgcgcggcgagagcccacaggcccccacaggaaggagggccccggagcagccacaccaccgaggccccacc

SEQ ID NO: 162371 - RNA, 84 nt, Homo sapiens
cacgaaaccgccccacacacccggggacaggggagacaaaccacagggaagcgcccaggagaagacgacaaaagaaagaaacag

SEQ ID NO: 162372 - RNA, 85 nt, Homo sapiens
ggcccgcgcgcccagggagaagggcccccgaccccaagccgccacgaagggccaccggggccacacgcagggaacgagcgcagag

SEQ ID NO: 162373 - RNA, 81 nt, Homo sapiens
cagcaccaccagcaggcacaggccccccaggccacccaggaccagcggcacacccccccgcggcccaaaaagcccgggcag

SEQ ID NO: 162374 - RNA, 86 nt, Homo sapiens
gggagaaggaggagagcagcagcgccagcgacgagcgcaccgggcaccgaaagacgacgaaagacaacggaaccgaagaaaaaaac

SEQ ID NO: 162375 - RNA, 77 nt, Homo sapiens
aacaagcacccacgaggacagcaaacaagggcccagcacagaagacagcacgccaccagaacagagacgaaaaaaca

SEQ ID NO: 162376 - RNA, 74 nt, Homo sapiens
ggagcgaggaaaaagaccagggccgaagagggcggaaccacacaagaggaggggcgcgggccacacagaagagc

SEQ ID NO: 162377 - RNA, 73 nt, Homo sapiens
ccaaggggacgagcaaaggaagcgcgaacagcagcgcagggaacccacccaccacccagggcacaacaccaca

SEQ ID NO: 162378 - RNA, 73 nt, Homo sapiens
acacgcaacagagagggaaaaaagaagccggagaggacacccaaaacaggaggccccaaaggcagaagaaaca

SEQ ID NO: 162379 - RNA, 79 nt, Homo sapiens
gagcagaccagaagagccaccagggagcgaaaccaagaagaaaacaccggagcccaagacaccaaaacagacgcaggca

SEQ ID NO: 162380 - RNA, 78 nt, Homo sapiens
agaccccgggaagaagcgcccacaccgggccaggaccaaccaccgcgcaaagaaggacaacaccacgacccggagacg

SEQ ID NO: 162381 - RNA, 76 nt, Homo sapiens
caacaagcagaacacaaccgggggggaacacccaggccaggaggaagcgaagaaagagccaaaagaaagcaaagcg

SEQ ID NO: 162382 - RNA, 73 nt, Homo sapiens
ggacacgaaacagagaggggaaggagcccagcgaccagccgaaccagggagcagcgacaggagccagccacgc

SEQ ID NO: 162383 - RNA, 75 nt, Homo sapiens
agggaggccacagaaggaacacagggagagagcccaccaaggaaccacgaaaccaccgcgcagaaaaaaagccca

SEQ ID NO: 162384 - RNA, 55 nt, Homo sapiens
gaagcaggacgcgccgcgccccaagagcggaggccgcagccaaccgggcggaccg

SEQ ID NO: 162385 - RNA, 54 nt, Homo sapiens
ggcagacaggcccaagcaaaaaaaaaacagaggagaacgggaacaggaaacgac

SEQ ID NO: 162386 - RNA, 82 nt, Homo sapiens
gcgcacgcccggacggaaggcgcggcacacacaccccagcaggggcgcggaaaccgagaggaagaaaggccagaacgaacgg

SEQ ID NO: 162387 - RNA, 43 nt, Homo sapiens
cagcacgagcagacagacaacggacgccgggcaggcaggccac

SEQ ID NO: 162388 - RNA, 79 nt, Homo sapiens
gggcgcccgccgcgccgccacggcagaagaagaagagcggagaaccgaacaggcgcagggagcccccaccacagcagca

SEQ ID NO: 162389 - RNA, 74 nt, Homo sapiens
cggacgggcacgggcgaccggcccgcgaggcgcccgaagacaacaaacacagcacaccggccacaggcaggcga

SEQ ID NO: 162390 - RNA, 55 nt, Homo sapiens
ccagcccacacccaaggagagaagggggagccacggaccagggggacggcgacag

SEQ ID NO: 162391 - RNA, 74 nt, Homo sapiens
acggaaagcgacaagggaggcgccgccagcggccgggaccgaacaggcggaggccagaagcaaggaaagagcag

SEQ ID NO: 162392 - RNA, 76 nt, Homo sapiens
ccaaagcggagagagaggagaaaaggcacgcacagaggcgggcgcggccagagcggcccagaaggcacgcccccga

SEQ ID NO: 162393 - RNA, 56 nt, Homo sapiens
agaacacagagaaagcagccaacagcaaagccaggaaaggacagcggagacagccg

SEQ ID NO: 162394 - RNA, 76 nt, Homo sapiens
gaccccgacaaggaagaccaaacagccaaaagcacaagcgcccaggggcacaaacaccgcagcagcagcaacagca

SEQ ID NO: 162395 - RNA, 80 nt, Homo sapiens
ccccacaccaccgaccaggaccgggaagccgcaaccggcagaaggccaaagcgaaaagggaaagaggcaggaagcgagag

SEQ ID NO: 162396 - RNA, 80 nt, Homo sapiens
agaaccaggagaccccaccaccacagaaaaagcccaggagcgccgaagaaagagccagagacagagagaggagaagagaa

SEQ ID NO: 162397 - RNA, 72 nt, Homo sapiens
cacagccagcaaccagagggaaagcaaacgccgaaggaacaggaaccgcaagagggaggccagccacaaacg

SEQ ID NO: 162398 - RNA, 74 nt, Homo sapiens
cgacaagccgacccagaggccgcgcgcagacaccacggcaagcagaggaagaagccccccagagggcggccgaa

SEQ ID NO: 162399 - RNA, 74 nt, Homo sapiens
acacagagaagcaccgagaagcgccacacgggaaggggaaaaaggaagaaggagaaagacaaagccccgagaaa

SEQ ID NO: 162400 - RNA, 34 nt, Homo sapiens
gaggagggccccgaggcggccagcaacagcgcca

SEQ ID NO: 162401 - RNA, 58 nt, Homo sapiens
ccgcccagcccagcagaggaccagccgcagcagaggcacacccagaagccacaggaga

SEQ ID NO: 162402 - RNA, 80 nt, Homo sapiens
gcccagggggcagcaggacagcagccggccacagcccaggggacacccagcaggccagggaagaggcagcccaggggaca

SEQ ID NO: 162403 - RNA, 35 nt, Homo sapiens
cacagaacaagcgcccccagaggccccgagcggag

SEQ ID NO: 162404 - RNA, 54 nt, Homo sapiens
aacaccaacacaaaaaaaaccaacagccccccaggccggcccggcagaaaaccg

SEQ ID NO: 162405 - RNA, 61 nt, Homo sapiens
gcacacgcccccgaagcggggacgcgggccggagacccccgcaacggggcgagagaaaggg

SEQ ID NO: 162406 - RNA, 90 nt, Homo sapiens
ggcggcacccaccgccgggaggaggaggaggagccgagaggagcgagcgagcgcggaagacaagccgagaccaccaggagcagagcggag

SEQ ID NO: 162407 - RNA, 58 nt, Homo sapiens
cacagcaacagccccgcaaagggccaaccgccccccagcagcaggcacgggcgaaccc

SEQ ID NO: 162408 - RNA, 71 nt, Homo sapiens
cagagcccagaaaagaaagacagcccaacaaggcgggacgacaacaccacagacacccccaaaccaccaag

SEQ ID NO: 162409 - RNA, 82 nt, Homo sapiens
acaagaagaagagaacaaagagccgggagacggagcacggcgccgcggcaagagccagaacgccaacggcaagaaagggaag

SEQ ID NO: 162410 - RNA, 75 nt, Homo sapiens
aggaaaaacggcccgcgcccgccagccaggccaccccgggaacggagacaaccaaggcaggcaggggcagaaggc

SEQ ID NO: 162411 - RNA, 72 nt, Homo sapiens
acgggaacccacgaccaaagcggaaggccgcccagagccgcgggagggcaaaagaacagggggaaaacgccg

SEQ ID NO: 162412 - RNA, 75 nt, Homo sapiens
agcagcccagccagcccgagcaagaaagaggacacaaggcacgaggacgaagaggaaaggggccacgaggaagac

SEQ ID NO: 162413 - RNA, 75 nt, Homo sapiens
gaaacaccaggaaagaacgaagagaggcgcagcagacccacagggccgcgcagaagacggcaacccaggcgaggg

SEQ ID NO: 162414 - RNA, 62 nt, Homo sapiens
aagaccaagaagaagagccgcgagcccacagcccgggccccccgagcggacggaccggagcc

SEQ ID NO: 162415 - RNA, 75 nt, Homo sapiens
cggcaaacccaagacgggaggacagccgacagaggccggaagagcgagagccaggggacacgaggccgcgggcca

SEQ ID NO: 162416 - RNA, 79 nt, Homo sapiens
acaggggccacggagccacggccacggccgcaagaaacacagggacaagggaccaaaagccccagcccaacaccaccga

SEQ ID NO: 162417 - RNA, 61 nt, Homo sapiens
gagagcgagcagagaaccacccgaaggaagccgggagggagcagaaacgggagaaaggaaa

SEQ ID NO: 162418 - RNA, 71 nt, Homo sapiens
gagaggacgccccacggagaaagagagcgacgaggcggagacacggggagaggccggggagagaggaagcc

SEQ ID NO: 162419 - RNA, 74 nt, Homo sapiens
agcccccgagggcgggaacaggcacgccaggacaccgacaacacccggccggaaaccgccacagcacaacaaca

SEQ ID NO: 162420 - RNA, 49 nt, Homo sapiens
acaagcaggacaaggcgacaccgaaagaaccgagggaaggagagcccac

SEQ ID NO: 162421 - RNA, 81 nt, Homo sapiens
cgcccccggcccggagcaacgagcgcagcgccgggcagcgcaagccacaggaacgagccacgagaagccccaacaaaacaa

SEQ ID NO: 162422 - RNA, 65 nt, Homo sapiens
ccggggcacacagccaagacacaaggaacagcgccgaagccaagaagcgcacagaacgcacaccc

SEQ ID NO: 162423 - RNA, 77 nt, Homo sapiens
ggacgcaggcgggagacgcacagcaagagccaggacaccggaagcgggaaaagagaccgcggccaggagccaagaag

SEQ ID NO: 162424 - RNA, 55 nt, Homo sapiens
cacgcaggacgagcggccgaagcagcgcgagagggagggaccggggcacgggccc

SEQ ID NO: 162425 - RNA, 39 nt, Homo sapiens
ggggaagcgcaggggacaaaggcggaggcagggaggacc

SEQ ID NO: 162426 - RNA, 76 nt, Homo sapiens
cgagaccggaccgagagcggaccgagagcgcgaaacgcacgagaagaaaagcgccaggcaggcaggaaagcgccgg

SEQ ID NO: 162427 - RNA, 75 nt, Homo sapiens
caggcacccgggcccagccgggaacccccacgcggccagcgaaaacgcccagacaacaggcacaaagagagaagg

SEQ ID NO: 162428 - RNA, 95 nt, Homo sapiens
ggcagaaagccagaaggagaaggaacgggagagagacccccggcccaggccacaccagaggccccagccccaccagaggccccgcgcgcccggcc

SEQ ID NO: 162429 - RNA, 75 nt, Homo sapiens
aacaccaaaaacaaaacgaaccaggacggcaagggaagaggagaggaacgggcacccgcccaggccaaaacaaaa

SEQ ID NO: 162430 - RNA, 71 nt, Homo sapiens
caggccagcgccccaggccaagagggacccacccggcgccggcacaaaccgagccggcagagaccaggagg

SEQ ID NO: 162431 - RNA, 64 nt, Homo sapiens
ggcgcggacggcgggaaccggcccggagcgagaacgcgccacaagagggccagggaccagggga

SEQ ID NO: 162432 - RNA, 83 nt, Homo sapiens
cgcgcgggcggcgggagagcgaggcacggcaaggggccggagggccggcccagaacgcaggagagcgaccagggggaaccgaa

SEQ ID NO: 162433 - RNA, 75 nt, Homo sapiens
gggaggcccagaaccaacgaggggcccagcagaagcaaagagaggagagagaaacaccccggagggcaagaagca

SEQ ID NO: 162434 - RNA, 72 nt, Homo sapiens
aaaagagcagaggaggaacaccaggcacaagacccaagcggacacacaacaacagaccgcaaacccaagaac

SEQ ID NO: 162435 - RNA, 80 nt, Homo sapiens
gcaccgcagcagagcgaaagcacacgcggagggcacagcgggggccagcggggggcagaaggaagcccaccgcgaaaccg

SEQ ID NO: 162436 - RNA, 79 nt, Homo sapiens
cgccgcgccagcgacaaacaaccagaaccccaaacagcccaaggagacgcccaaaagccagcgacacccacggcgcaca

SEQ ID NO: 162437 - RNA, 44 nt, Homo sapiens
aaccgcccgggaccagggccaaggagcggcccccgcgcgcgcgg

SEQ ID NO: 162438 - RNA, 92 nt, Homo sapiens
gcccaaccagacgcagagccggggcaccacaacgacacacccagcccagggcacacgggccacagaggaccagcaaggagaagaaaggagca

SEQ ID NO: 162439 - RNA, 80 nt, Homo sapiens
caggaccgaggaaagaacaggggccagaacacccaacagcggccggcagcagggcagcgcgggcgggcgccaagagagag

SEQ ID NO: 162440 - RNA, 79 nt, Homo sapiens
accagagagaccccaaggcggaggccagcaaggccagcacagccccgcgacaaccagagaacgaccgaagaaaagcaac

SEQ ID NO: 162441 - RNA, 74 nt, Homo sapiens
ccaggaaacacgcagagaagggacaaaagaagcacgaaggccaagagaaacagagcaggacgaagaaaccaaag

SEQ ID NO: 162442 - RNA, 64 nt, Homo sapiens
cgccgggcgggacgggggggcggcccggccccgcagaggggggcgggccgagcacccgcaggcc

SEQ ID NO: 162443 - RNA, 80 nt, Homo sapiens
acagggcacacagaaccgaaaaagagcgggcaggaagaggaccccaaagcaacaccagagacaggaaagaggaagaaaaa

SEQ ID NO: 162444 - RNA, 78 nt, Homo sapiens
aagacaaaacggcacgacaaacaacagaacccgaaacccacagaaacggcgaggaaagagaggagccccggaaagaaa

SEQ ID NO: 162445 - RNA, 77 nt, Homo sapiens
ggccagggcagcccaggcgcacacaggggacgcccgagcgaggccgaagacccagaggaccccagcaccacagaaac

SEQ ID NO: 162446 - RNA, 80 nt, Homo sapiens
aaaagaaaagacacagaagagaagaaaacagaacaagcaaaaaagagcaaaaaacagacagaagggccaaaggcaaagcg

SEQ ID NO: 162447 - RNA, 43 nt, Homo sapiens
aaacaagagaccacagaagggagagaacggagcagaccgcagg

SEQ ID NO: 162448 - RNA, 74 nt, Homo sapiens
acaagccggcaacacacggaaggcagccccgggccggggacgacaacccacaccccagcgaggagagcgaggca

SEQ ID NO: 162449 - RNA, 91 nt, Homo sapiens
agcggagagccaggcgagagaggcccgggccccggaccaggggagccagccaagacacggagccaaaaagaagaaaaagaaacaaaaaaag

SEQ ID NO: 162450 - RNA, 79 nt, Homo sapiens
agaaggccaaaccacaagccaaaacccgaaaaaggccccccgagaaggaaaaagaacagaggccaacccgacaagagga

SEQ ID NO: 162451 - RNA, 85 nt, Homo sapiens
gcgcggcaggaggggacggccgggccggcgagagcccgagacaaaccgagagccccgggacacaagcaccacggcaggagcgcga

SEQ ID NO: 162452 - RNA, 54 nt, Homo sapiens
gggaacaccagaccggagcaggaacacgcagagaaaaaggagaagcggcaagca

SEQ ID NO: 162453 - RNA, 73 nt, Homo sapiens
aaccggccaacggacaggagcacagcaagcgggagcaggcagaccaaaggaacagaagccagggccggaaaac

SEQ ID NO: 162454 - RNA, 109 nt, Homo sapiens
ccgcggcggccgggaaggcgacccggcggcgggaggccacgccagccgccaggcggcgcaggcccgggcaacccagggggcaggacgaccagcgggaggccagaggaag

SEQ ID NO: 162455 - RNA, 73 nt, Homo sapiens
gagcagcacaccaccgaaagcagaaacaagagggaagaagagaagcaggaagacagaggaaacacacggcaac

SEQ ID NO: 162456 - RNA, 70 nt, Homo sapiens
gacaacccaacaaaacgaggcagcaagaccacaaccagaacggaaggcgacagcggggaaagagcaagga

SEQ ID NO: 162457 - RNA, 75 nt, Homo sapiens
gacccgccgcgcgcgcacgcccaggcaaacccagcaggaagccacgggcgaaacagaaaagaaaggaagaggagc

SEQ ID NO: 162458 - RNA, 76 nt, Homo sapiens
ccaacacaaaaaaaaccaacagccccccaggcgaagacaaaaacaggaagcaaagaagaaaaggacagcagaggca

SEQ ID NO: 162459 - RNA, 67 nt, Homo sapiens
aaaggggcacaccaagaagacgccaggaaagaaggaccgccgcaaagagaagccccgggaagaacaa

SEQ ID NO: 162460 - RNA, 57 nt, Homo sapiens
aagcagcgacaaagaaaacccgaagaacagccagaccacaccgacccaagagaaccg

SEQ ID NO: 162461 - RNA, 59 nt, Homo sapiens
agcccgagacagaccagaaaaggaaagagaagagccggcgaggaggaaaggccaggcac

SEQ ID NO: 162462 - RNA, 70 nt, Homo sapiens
gagggccaagggagccgcgcaaaggccccggcaagaagagaaaggcgaggcaaggcaggaagacccacag

SEQ ID NO: 162463 - RNA, 76 nt, Homo sapiens
ggggcggcccaccccccacgcaccgcacaacaagaggccggcggggcgacaggcacgagaagagaagcccagagca

SEQ ID NO: 162464 - RNA, 74 nt, Homo sapiens
acagacaacacgaaacgagacgacgaacgggaacaaaaaacagccgaccgcaaaaggcagaaaagaacagccag

SEQ ID NO: 162465 - RNA, 61 nt, Homo sapiens
aggacccacggaagccagaaagaaagcaccgggaggaaagagagccacacgaagaacacgg

SEQ ID NO: 162466 - RNA, 76 nt, Homo sapiens
ccccgccgcacacggacccagcaggaagcccgggagggacgagccaccgcaaagaacacacaagcaacccaacagc

SEQ ID NO: 162467 - RNA, 67 nt, Homo sapiens
aaagaacaacagcgcagacaaaagccagggacaagccacacaagaaggagaaaaaaaagagaaggca

SEQ ID NO: 162468 - RNA, 67 nt, Homo sapiens
gccgcgcaggagagcgcaaagcacggaggcaggagagcgaagacaccacccaaaggcagaacagaga

SEQ ID NO: 162469 - RNA, 65 nt, Homo sapiens
ccagggaacccggcaccgccccaggcgagcacacagagaggggaagggcagcagcagcagagaac

SEQ ID NO: 162470 - RNA, 76 nt, Homo sapiens
ggccggcgggggacgagcaggacacaggcaggaaacacagaaacaggggggcaggcaggagccaggagagagcaca

SEQ ID NO: 162471 - RNA, 42 nt, Homo sapiens
aggccacagcccaggcacaggaaagggcccggcaggaaccgg

SEQ ID NO: 162472 - RNA, 38 nt, Homo sapiens
gcccgcccaggggacaccgggaagacaaagggcgcagc

SEQ ID NO: 162473 - RNA, 70 nt, Homo sapiens
aagaaacagcagccaaccaggcccgagacaaaaagagagaaagcagcccaagaggccagagggaccaccc

SEQ ID NO: 162474 - RNA, 72 nt, Homo sapiens
caaaggccagccgcaaaaaacccaagaccggcaagagccccaacgacagaaaaacacgcagaagcggcagcg

SEQ ID NO: 162475 - RNA, 82 nt, Homo sapiens
ccgacgacagcgggccgggaaaagggcacgaggccggaaccgcccagccccggagacagacccagcacggacccccccccca

SEQ ID NO: 162476 - RNA, 92 nt, Homo sapiens
gacccgggcggcgcgcgcccgaggggagcaaggacagaagaggaaaaggggagcaggaggcgacaagaggagacgaagaagaggaagaaggg

SEQ ID NO: 162477 - RNA, 65 nt, Homo sapiens
ccccgagcggcgggcagccacacgacaagacaaggaaggccaaccgaaccgggcggcgccagaaa

SEQ ID NO: 162478 - RNA, 79 nt, Homo sapiens
ggccggccgggccagcacccggccgagacggcggcagcagcggcacaggacaagaccaggcccaagaaacagagaggag

SEQ ID NO: 162479 - RNA, 81 nt, Homo sapiens
gccgccaagaggcggcgcagccaccccgcgggaacgcccagcgcggggccagcacgaaagcagccaggagaagagcacaag

SEQ ID NO: 162480 - RNA, 68 nt, Homo sapiens
cgaacagacgagcgaagagacccagaacagggagccagaaacgagcagacgaaaagaaaacgcaggaa

SEQ ID NO: 162481 - RNA, 80 nt, Homo sapiens
cagccgcccgccacacagggccgcaaccgccggggacccagggagccgagagcggcccaggaggaacaaccagcccaccc

SEQ ID NO: 162482 - RNA, 38 nt, Homo sapiens
gacaacagccggggcagcgggaagcggcaggagcaaaa

SEQ ID NO: 162483 - RNA, 93 nt, Homo sapiens
gaagggcgacccacaacccaaagcaagacaaccagccgccccgacgggcgagggaaaaaaagacaggacaacaggagagcgaagggaaaagcc

SEQ ID NO: 162484 - RNA, 77 nt, Homo sapiens
caacagaaggggaaggggagccgcacaagagggggaaacggggaaaaggcaagcagaaaacaagccgcggcagaaac

SEQ ID NO: 162485 - RNA, 58 nt, Homo sapiens
gccagaaaagcaggacgggcggagaacggaaaagcaccaggaagcagagaggaccgca

SEQ ID NO: 162486 - RNA, 74 nt, Homo sapiens
gaagaccacggagcggggagagccgccgcaaacccagaccgcggcaggacacaccagggccccccaaggagcgg

SEQ ID NO: 162487 - RNA, 75 nt, Homo sapiens
cagaggccggccgagaaaagaccaaccgagaagccgaccaaaccaagacgcaaagagagaacaaaaaacagaaaa

SEQ ID NO: 162488 - RNA, 70 nt, Homo sapiens
gcacagcagagagaccggaagcagaacacgacaaagacggggggcgagacaccggccaagaaaaagccga

SEQ ID NO: 162489 - RNA, 68 nt, Homo sapiens
gccgaggcgggaaaaggcgcgaggagccaaggacgggacccccggggcaacacccaaccgaccagcca

SEQ ID NO: 162490 - RNA, 84 nt, Homo sapiens
gggagcgagaagaagcaagcccagagccaaagcggacgccggccaccacgaaggcgacacagaagacgagcgacaaaagcacgg

SEQ ID NO: 162491 - RNA, 76 nt, Homo sapiens
ccagccacggcgaacccccccaacggaacagcaccccccaagacagccgcgacggaaggaaacaagaaggggaagc

SEQ ID NO: 162492 - RNA, 83 nt, Homo sapiens
gaagaggaaaaaaaacagaacaggaggggagagggcaggaaccaccgcccaaagggaaggcgaggagcggaaggcgagcggag

SEQ ID NO: 162493 - RNA, 79 nt, Homo sapiens
aacgaacgccacgcgcccggcgcccagcccaccagcacggcagcaaagggagaagaaaaagcagaaaggaacagaaaac

SEQ ID NO: 162494 - RNA, 84 nt, Homo sapiens
gccggagcagcgagggcccggcgaggagaaccaacggcccgaaagagaacgcgaaagaagccaagagcacacagaagaccaccg

SEQ ID NO: 162495 - RNA, 79 nt, Homo sapiens
ggcaccgacgcgggagaagccaagacggcccacccccccccagacgcgagaacggacacccacccaagaccaaccaccg

SEQ ID NO: 162496 - RNA, 54 nt, Homo sapiens
ccggcgaaaggagcgggccggcaagggaggcagcaacgaagaggcacggagcca

SEQ ID NO: 162497 - RNA, 68 nt, Homo sapiens
caaggagcacacagcacggacgaaagggcggaagaccggccgaagaacaggagaaggaagaacaaaga

SEQ ID NO: 162498 - RNA, 87 nt, Homo sapiens
gaggccgaggagaagcggaggagcggcgaagcgcggcgcagggccaccaggagagcccccaccagcacagaaggccggccccagcgc

SEQ ID NO: 162499 - RNA, 121 nt, Homo sapiens
aggaggcgcgagcgagccgcgaaccgagcgggcggcgggcgcgcgcaccagggggagaaacccgggaccaggaggaaccccggagaccgggccgacaccccccgggcagagcccggcagcg

SEQ ID NO: 162500 - RNA, 38 nt, Homo sapiens
cacgcccccagccaaacagcggaacggggggcaccagg

SEQ ID NO: 162501 - RNA, 121 nt, Homo sapiens
aagaacaggaagagagaagaagcaaaacaacaagaccagcaccagaccaggcagaacaaagacccagggcaacaacacggcaccacacaagcgaagaagccgagaaaccagccacgcagaa

SEQ ID NO: 162502 - RNA, 69 nt, Homo sapiens
aagcgaaaaggaaggcggaaaaagcgcaaggcacccacgagaacgaagagaagcgaaacaaaaaagaga

SEQ ID NO: 162503 - RNA, 96 nt, Homo sapiens
aaagaacaagagcgcagggacagagcgaccaggggcgagagcgggcaccccccaaacgacgcagccacggagagcccagaaaccccgaaggccacc

SEQ ID NO: 162504 - RNA, 43 nt, Homo sapiens
gagagaagaggagagagaagaggaacacaagccgagaacagcc

SEQ ID NO: 162505 - RNA, 70 nt, Homo sapiens
agacgcccaacgagggcaagaccagagagccgcggggaaaggaggacaggaaagaggagagaaacgccaa

SEQ ID NO: 162506 - RNA, 62 nt, Homo sapiens
accacaagacccaggccacgccgagccgccaggcagcaggacggaggcccccaagccggcag

SEQ ID NO: 162507 - RNA, 56 nt, Homo sapiens
aggacggaaaacggcaccgcgagcgcagggagacaggaaccaaaaagcaacagaag

SEQ ID NO: 162508 - RNA, 55 nt, Homo sapiens
ggagggcgagaacgaccccgagacgaaggggcaccagggccaggcggccgaaccc

SEQ ID NO: 162509 - RNA, 70 nt, Homo sapiens
gggaaccccggagaaaaggccaagaaggcagcagaccagagagggggcccgaagaacagaaaaagcggag

SEQ ID NO: 162510 - RNA, 71 nt, Homo sapiens
caagcagaacaaagccgcccgagccaccagcaacagaaacaagaggaggcacccgggaagcggaaaagcag

SEQ ID NO: 162511 - RNA, 79 nt, Homo sapiens
gaggcagggaacacgcggaacacagaagggagcaaggaccacagaaacgcagaaaaaggggaaagaaaaggcacccaga

SEQ ID NO: 162512 - RNA, 71 nt, Homo sapiens
gcccagcgccagcgcgcaggcaaggggaacaagcagagaagcaagcgaaggaacgcgaagaagagcaaaag

SEQ ID NO: 162513 - RNA, 80 nt, Homo sapiens
aggcgaagacagagggccgacggcgacagaagaggacgagacgcagggcacgggccaccaggggaacaggacaaacgaga

SEQ ID NO: 162514 - RNA, 83 nt, Homo sapiens
ggaagcagcgaggagggcagcccccaccacccgcccaggccagccccagcagcaacagcagcacaggggcagaagcgggagcc

SEQ ID NO: 162515 - RNA, 48 nt, Homo sapiens
acggacagcccacgggaacaagaggggacagaaagggccacccccaac

SEQ ID NO: 162516 - RNA, 94 nt, Homo sapiens
cgggagcgcggcgccccggcgggaccgggcggcacgcacgcgggcagggaacaggcggagcggaaggcacaacagaacggaaaaacaaaccaaa

SEQ ID NO: 162517 - RNA, 79 nt, Homo sapiens
cggaaggaagagacagagaccaagccaaacccccagggcacccacagaggcaacgaaagcacaaaagaaagggccaccc

SEQ ID NO: 162518 - RNA, 74 nt, Homo sapiens
cgcgaggaggaaaggaggacgagcagggagcacagaagagaagagaacgaaccaaagaaaccacagaggaccaa

SEQ ID NO: 162519 - RNA, 81 nt, Homo sapiens
gccaggacgagcagagccccccccaccagaggacgggaggagcagcaacagagcccacagagaaaagaagaaacaagggca

SEQ ID NO: 162520 - RNA, 83 nt, Homo sapiens
gcaagcagcagaagagccaaggaaaaacagcaagaacccaaaagggagaagaagcagaagaagacaaagcagcaaaaacaaag

SEQ ID NO: 162521 - RNA, 40 nt, Homo sapiens
aacaaaagcaacaaagagggggcgccggacccgccccaga

SEQ ID NO: 162522 - RNA, 72 nt, Homo sapiens
agacaggagaagagaaagagagaaggcgagaagaaaacagaacacccagaacgaagacccccaggggacaag

SEQ ID NO: 162523 - RNA, 77 nt, Homo sapiens
cggcaggagggagcaggagcggaccggcccggaagggagacccgacacacccaccccaccgggccgcgacccccagc

SEQ ID NO: 162524 - RNA, 77 nt, Homo sapiens
aggacggagagggagaaggaacagacgccccaccaggccagcggggcgcagagagaacccgggcccaggcgacgaag

SEQ ID NO: 162525 - RNA, 70 nt, Homo sapiens
cgcaccagacacaaaaggacgaagcggcaggaaagacaaagagaggccacggggcaacacaagagcagga

SEQ ID NO: 162526 - RNA, 52 nt, Homo sapiens
ccaggccacaagacaccgccggaaccgacaagaacaggcccaaagacgcacc

SEQ ID NO: 162527 - RNA, 72 nt, Homo sapiens
aaaaggaaacgacccggacagccaggggaggcgcaggcggaaggccggaccggcaggaggaaagccgcgagc

SEQ ID NO: 162528 - RNA, 82 nt, Homo sapiens
cgcaccaaggcgcggccaacgacccacccagcaggagaacggacccggagacggaaagcacaaaccacaaaagaaaacgaaa

SEQ ID NO: 162529 - RNA, 69 nt, Homo sapiens
gaaaacagcaaaccgggaaacacaaagaaacacaggcaacgagccacacagcagagggaaaaaacgcaa

SEQ ID NO: 162530 - RNA, 68 nt, Homo sapiens
gggagaccgcaagagaagcaaaccaggggacagggaaagcagaaccgcgggaaaagaagggagaagca

SEQ ID NO: 162531 - RNA, 54 nt, Homo sapiens
ccagggcaaacccaggaaaggaaggcaaagccagccccgcaccacaaaggcccc

SEQ ID NO: 162532 - RNA, 73 nt, Homo sapiens
ggaccagggagcccacagcgcccaaaaaggggagcaccacgccgccgaggaccacaagagcaaacaaaaaaca

SEQ ID NO: 162533 - RNA, 56 nt, Homo sapiens
cacgagcaggcgcgagacgggggaacggacccccaggccaggaacagaagccgcag

SEQ ID NO: 162534 - RNA, 56 nt, Homo sapiens
cgggagaggcgaggaaggccggggcaccgggacagcgggagagcagcagaaagcgg

SEQ ID NO: 162535 - RNA, 87 nt, Homo sapiens
cagcccccaagcccgggacacagggcccacgagacgcgaacaaacgccgcgccgccagaagaacagaccgggagaccagccacgcac

SEQ ID NO: 162536 - RNA, 69 nt, Homo sapiens
ggccggcgggcgggggccccgcgccgcggccgagcagcggacgcggcgcgcaacgcaagccccaaccgc

SEQ ID NO: 162537 - RNA, 70 nt, Homo sapiens
agaggagaaaaccgggcgcagccgccggcagaaaccaccacccgaaagcccagaggaagaggagccagac

SEQ ID NO: 162538 - RNA, 77 nt, Homo sapiens
caggaccaggacagagcggcgccgccgccagacgcaccagaagagaacacgagccacgcagagacggagcaccggag

SEQ ID NO: 162539 - RNA, 77 nt, Homo sapiens
gggcggagagacccgggggcgagcacaaacggggcggggccggggaacacacaggcagaaggcaaagaacagaggag

SEQ ID NO: 162540 - RNA, 75 nt, Homo sapiens
gcacaagcgggcaccagggccgaccgccgcaggaggaagaggagaaaggcccaaaggggcgaaaagccaaaaaga

SEQ ID NO: 162541 - RNA, 79 nt, Homo sapiens
cccccaacaccccacgaaggcggcaccaagaacggcacaaaaccacaacaagccaggacgcaaacaaaagcaggaccaa

SEQ ID NO: 162542 - RNA, 80 nt, Homo sapiens
cgaaaagacaccacaagaaaccgggagaagcagaaaacccggccagggacaggaaagaaggaccgcccagccaacccgcc

SEQ ID NO: 162543 - RNA, 57 nt, Homo sapiens
gcgcccgcgcggcgcggggaccgcggcccggaaacaggaacacgaaagaggaaaaac

SEQ ID NO: 162544 - RNA, 65 nt, Homo sapiens
caaagaggaacacaaacggcgcacaggagagggaaggcggacgggccccgaagcccaaggggaga

SEQ ID NO: 162545 - RNA, 72 nt, Homo sapiens
aggagaagagagaaagagggacacgaccccaggcacaagcggggaggcccaagaggaagcccaaaaagggaa

SEQ ID NO: 162546 - RNA, 58 nt, Homo sapiens
ccggacgcgcgagacggacgggacgaaaacccgaggcaccggacagaagggaggaaga

SEQ ID NO: 162547 - RNA, 73 nt, Homo sapiens
agggaggaaaacaaccgagggcagaagggaaggggaacaggaccggccacagacagccccccaggggccggag

SEQ ID NO: 162548 - RNA, 80 nt, Homo sapiens
acggacacagggccacagcaggcagagcagacccagccaaacaggacaagcagcaacccgcagagaccccagccagcgga

SEQ ID NO: 162549 - RNA, 79 nt, Homo sapiens
accaggcccgccgagcggcagaaccccccacggaaaggacgaaagaaagaagcagccccagaaagaaggacgccgcggc

SEQ ID NO: 162550 - RNA, 57 nt, Homo sapiens
cagcagagcgagaccgccaacaggacaccgaagccaaccggaaccacaggcccggag

SEQ ID NO: 162551 - RNA, 70 nt, Homo sapiens
caagacacgccaagcagggagaagacacggcggacgcggaagaccgcaggaaagcaggaaggcaagaaag

SEQ ID NO: 162552 - RNA, 65 nt, Homo sapiens
gccaacaagaaaggagaaagagagccaaaacggagacagagaggcaccacaggagccaggacgag

SEQ ID NO: 162553 - RNA, 76 nt, Homo sapiens
cgggcaccgaggaccagccaagacaggaacgaaaaccacacaagggacaacagaagaggacagaccaggacaaaac

SEQ ID NO: 162554 - RNA, 60 nt, Homo sapiens
gaagcagccaaaaaagagaaacgcgagagagacccagaaagagcagaagaaggaagcaag

SEQ ID NO: 162555 - RNA, 66 nt, Homo sapiens
caacggacagcaaaaaagggcaacgaagaggacgcaaaacagaaggggaaaaccagccagcaggcc

SEQ ID NO: 162556 - RNA, 57 nt, Homo sapiens
cgaccgcaacagaacggacccggccaagccgacgccagcgggcgccacccaacaggc

SEQ ID NO: 162557 - RNA, 81 nt, Homo sapiens
acacccaccggagacggcaaggaggagccagaggcaacaaggcggacaagagaagccgccagccaagacaagcaaacccag

SEQ ID NO: 162558 - RNA, 95 nt, Homo sapiens
gacggcaggcgcacggaacagcgaggccagcaggagacggagccacggagcagaagcccacaggggcaacacagcccaacgccaaacacggacgc

SEQ ID NO: 162559 - RNA, 34 nt, Homo sapiens
gacgaggacacagcgaagaagcaacagcagcaag

SEQ ID NO: 162560 - RNA, 75 nt, Homo sapiens
aggccaggcgcggcggcaagcggggcgggagccgcagagggagaagccgaagccaagcagggcacagcgggcaag

SEQ ID NO: 162561 - RNA, 67 nt, Homo sapiens
cccgacccgcggcccccgagcgcgcgacagagaccgggcagccacagggaccccaccacgccgggac

SEQ ID NO: 162562 - RNA, 70 nt, Homo sapiens
gcaagcggcgacacacgacggacagcgcaccgaagcaaggaacacagcaggggccgaggacggaagagac

SEQ ID NO: 162563 - RNA, 76 nt, Homo sapiens
gaggaccacgaggagcacagcgagacccagagggggaaggaaacagccagaaaggaggagcaaggaagcccaggaa

SEQ ID NO: 162564 - RNA, 58 nt, Homo sapiens
cagagcgacagcggcgagcagaacacggcgagcggaagagcggccacagaagacggca

SEQ ID NO: 162565 - RNA, 65 nt, Homo sapiens
accaaggagcaccaaaaagaagaaccgcgccaaggcaggaaacgcaaccggacagaagaggaggc

SEQ ID NO: 162566 - RNA, 70 nt, Homo sapiens
gcaacgaacgccagaggaacacaagggaaagcgccgacacaagaagcgccgacggaacagcgacgaacaa

SEQ ID NO: 162567 - RNA, 71 nt, Homo sapiens
ccaggcagcgcccccaaacgggaggggaacggcagcccaagccagcaagaccacacacgaacagcccccac

SEQ ID NO: 162568 - RNA, 72 nt, Homo sapiens
caaggacaagccacgcaaccggaaccccagccaagagaccccagcccagcccccggagaaggaccaagaacc

SEQ ID NO: 162569 - RNA, 76 nt, Homo sapiens
cagcacccccgccagcagccgccggagccagccaacgagcgacccagcgccaccccccaccagaagcgaggacaaa

SEQ ID NO: 162570 - RNA, 71 nt, Homo sapiens
gacgaaccccggagcccaacaaagaaaggacagcaagaagacaggacacacaagaagcacgaagaagagcc

SEQ ID NO: 162571 - RNA, 69 nt, Homo sapiens
accaggacgcaggcgaggggccacgggacgcagacagagggaaaggagccgagagacggggcccgggcc

SEQ ID NO: 162572 - RNA, 93 nt, Homo sapiens
gagagcgaggcggggccgccggggccgccaggagcccgaccgggagaggacaagaccacgagccaggccggaagaggacgaaccagaagaagc

SEQ ID NO: 162573 - RNA, 84 nt, Homo sapiens
gacaagaccacagaaagaagcgaacaggagggagcaaaggaggcgcgcccaccgcgagcggaaaagaccccaccaaaacgccag

SEQ ID NO: 162574 - RNA, 53 nt, Homo sapiens
ccgagcccccaagagcaggacaagcccggacgaggggcaggaccggggacaca

SEQ ID NO: 162575 - RNA, 74 nt, Homo sapiens
gaaaagaacaacagaagccccgcaggacaacgaggggacaacagagccgacacagccaagaagcagagcaaaac

SEQ ID NO: 162576 - RNA, 67 nt, Homo sapiens
gcaacgcggccccagccgcggagacacaacaacagaggcagcaacgacaggaacggccgaacacaga

SEQ ID NO: 162577 - RNA, 61 nt, Homo sapiens
cagagcaaggaggccccagcggaccgaacagccacgaagaccgggcgccagggccgccgcc

SEQ ID NO: 162578 - RNA, 62 nt, Homo sapiens
cggagcgggcgacgagcgacccgggagacacgacggaagcccggggcggcgacggagcacga

SEQ ID NO: 162579 - RNA, 73 nt, Homo sapiens
ccagacgggcaggaagcaaggagggaaaaggcagaaggagaaaaggcagccaaaccacgaaagcagggaaccc

SEQ ID NO: 162580 - RNA, 72 nt, Homo sapiens
acagcaaccagcaccagagaaggagcacccggccagaggggacggcagagacaaaaccccgccagacagaac

SEQ ID NO: 162581 - RNA, 83 nt, Homo sapiens
ggcgccccagagcccagggcaggacaccgacaggaacagggaccacgggggcgccccaagggagaagaaggagccaaggagac

SEQ ID NO: 162582 - RNA, 53 nt, Homo sapiens
ccaaccccagcggggaaaacaaaggcagaaaaaacacaggaacgaaacaccac

SEQ ID NO: 162583 - RNA, 72 nt, Homo sapiens
aagccgggaaagggacaagaagggcaaagccgaaacgcaggagagagagacgccggaagaaagaaaggagac

SEQ ID NO: 162584 - RNA, 64 nt, Homo sapiens
agcggcggcgaacagcgcgacacaggagacacggacccggagaaaacccacaagaacccaaacc

SEQ ID NO: 162585 - RNA, 74 nt, Homo sapiens
gacggaagcaaggaacaaaccgaagaacagcgggaaagaaggcaaaacacgggccgggcccgggaggagcaggg

SEQ ID NO: 162586 - RNA, 112 nt, Homo sapiens
acgggcccagaggcccagggaggcaggggcagaaacagagaaggaacagggcagagcggcgggaaaccaccaacaacacccccaaaccaaaacagccggaagcgggcagccc

SEQ ID NO: 162587 - RNA, 73 nt, Homo sapiens
gccggagccgccggaagggcgcccgcagccccccacggaagggagagaccagcagccgcgaaaccacccgaaa

SEQ ID NO: 162588 - RNA, 69 nt, Homo sapiens
cagccccaccacggccaaaacacaaacaagaccgcagaccaacgggagccgcaaggacaacagccgcgg

SEQ ID NO: 162589 - RNA, 68 nt, Homo sapiens
ccgccaaggcaaccacagccccagccaccacccgaacacaggaaggaacggaaggagacggaagaaac

SEQ ID NO: 162590 - RNA, 79 nt, Homo sapiens
ccggggcaggggcggaggcggaggcagaggggaggcgcgaaagggggaaaagccagccagaacacagaacagaacacac

SEQ ID NO: 162591 - RNA, 67 nt, Homo sapiens
aacaacagcagacagcgcaagcgaaaaggccgcaagccaagaaaagggcacaacacagaagaaggcg

SEQ ID NO: 162592 - RNA, 86 nt, Homo sapiens
agagaggaagacaaggggacaccagccgaagaagcacagagaacgcgcacgcaacaacagcagacaacgcgcaccaaccacccccc

SEQ ID NO: 162593 - RNA, 53 nt, Homo sapiens
gccggggaagaaaagggcaaggcccgagaaggaggaaaaggaggccaccgcaa

SEQ ID NO: 162594 - RNA, 68 nt, Homo sapiens
acgaaaaaaagaggacacccaacgagaagcggggaaaaagaaggcagagggggcgagggaggaaaggg

SEQ ID NO: 162595 - RNA, 86 nt, Homo sapiens
cgggcacccccgagggccccgagcccgagcgccccagcccgggaggcagcacggcaggagacgaggagaggacagcaggacacccg

SEQ ID NO: 162596 - RNA, 80 nt, Homo sapiens
accgggggcgggggcgccagcccaccaagaagggccgagcacagcaagcaaaaagggcaaagacaccagcagagagagga

SEQ ID NO: 162597 - RNA, 71 nt, Homo sapiens
cggaacagaaggcgcggccgaaaaaggaccacaaaacaaaccacccaacacaagcaaagaccacgaagccg

SEQ ID NO: 162598 - RNA, 74 nt, Homo sapiens
gacgcgccgggcgccacaacggaaagaccacagcaagaccacgcccccagccgggggaccaggccgaacgaccc

SEQ ID NO: 162599 - RNA, 82 nt, Homo sapiens
cgacgagcgcgcacaacgcaggaccggcgccgaaggcccgccaggaacaggaggcccggacccccagcacaagcgcaggcca

SEQ ID NO: 162600 - RNA, 74 nt, Homo sapiens
gcagcgccggaccgccagaacacaggaaaggaagagggcaacgggcgagggcacggcggggaccccacaccccg

SEQ ID NO: 162601 - RNA, 60 nt, Homo sapiens
ccggaagcagagaagaacagcagaaccacaaccagacaggcgccaccccagagccagacc

SEQ ID NO: 162602 - RNA, 87 nt, Homo sapiens
gcccgccggagcagcgagggcccccagccagcccgacagccgcaaaacgcacagccacagccgcaagccaagagcagcagaaaagaa

SEQ ID NO: 162603 - RNA, 82 nt, Homo sapiens
cggaggcggcggaagccggcggagcgagacgagaacccggccgcgcaaggggaacagcgagaacagaccaccaaaccaccgc

SEQ ID NO: 162604 - RNA, 80 nt, Homo sapiens
ggaggcgggagaaggcgcaacgcggcgcgacccagaagaccccagacggggagcgcagcagagggagcgccgaaggacaa

SEQ ID NO: 162605 - RNA, 76 nt, Homo sapiens
acacggccccccacgaagacaaaaagcgagggaaaaggccaaccaagcggagagcaaaagagggggagcacagcga

SEQ ID NO: 162606 - RNA, 71 nt, Homo sapiens
aaaacgcacaaaaaaaagaagccacgccaaaagacgaaagggggcgaccacaggacaccaacaggaaaagg

SEQ ID NO: 162607 - RNA, 61 nt, Homo sapiens
accacgcaacaagccacaaggaagaaaagggagagacagcagggacagacacggagaccag

SEQ ID NO: 162608 - RNA, 82 nt, Homo sapiens
gaagaagagaacccgcggaggagaccggcgaggagaagcagggagcaggcgaagcgagccagggaagcgaaccaggcgaaca

SEQ ID NO: 162609 - RNA, 55 nt, Homo sapiens
cgcgagacggcacaagggcagcgcaagaccccgcacggaagcagcaagcacaggc

SEQ ID NO: 162610 - RNA, 80 nt, Homo sapiens
ccaacagagccaaggcgccaccaacagcccggcagggaaagcaaagacggaggagagagaggacgaggagcccccacaag

SEQ ID NO: 162611 - RNA, 72 nt, Homo sapiens
caggcccccaacagacagccagaagaagaaaaagcagcacgaaggcgaggaaccagcagacaaaaaagaaga

SEQ ID NO: 162612 - RNA, 74 nt, Homo sapiens
gggagagccgccgcaaacccagaccggcaggcccagaggaagagaaaaagggaaacggcaccaccagaaagcgg

SEQ ID NO: 162613 - RNA, 89 nt, Homo sapiens
gagagccaaccgacaccagagcgccccagacaaaccagccagcacgggggcccagccagccagcagcgaggggggacggaggcggcacg

SEQ ID NO: 162614 - RNA, 69 nt, Homo sapiens
ccgcagccacaacaccggcaggaaccaccaggacagaagggcccccaaggaagacagcacgagggaaca

SEQ ID NO: 162615 - RNA, 58 nt, Homo sapiens
gacccaagaccggccaacccaagcggagcaggggcagagacgggagcgagcacaaccg

SEQ ID NO: 162616 - RNA, 52 nt, Homo sapiens
aagacacccacacagaacaagagcggacaggaaggaggagcacggcgaaccg

SEQ ID NO: 162617 - RNA, 80 nt, Homo sapiens
ggagcccggggacgacggcaacccacaaggccaagcacccccgcaccagccacacaccagggaagcagagccccgggccg

SEQ ID NO: 162618 - RNA, 95 nt, Homo sapiens
cgacaggggaagacagacaaggaagaaacccgggagacagccgaagaagacaagagcccaggggagcccagccggcgggggccgagagaagcaac

SEQ ID NO: 162619 - RNA, 52 nt, Homo sapiens
aggcgacgcccaccaagggcggggaacgcaggcccgccacccacggcacccc

SEQ ID NO: 162620 - RNA, 65 nt, Homo sapiens
gaaacagcaagaaaccccacagccaaggcccaacgcagccaggcaagaagacccggagcacacag

SEQ ID NO: 162621 - RNA, 73 nt, Homo sapiens
gcggcagaggcggccccagcggccggcacggagcgcggacgcccaggagcgggcgccggcggagcgccgcccc

SEQ ID NO: 162622 - RNA, 67 nt, Homo sapiens
agggaaggaaaacccacaccgcaccagggcacacgacggacccagcaaaaaggacaggggcccccac

SEQ ID NO: 162623 - RNA, 44 nt, Homo sapiens
cagacacccgggcaccaagcagggcacaaaaccacacgcaaagc

SEQ ID NO: 162624 - RNA, 92 nt, Homo sapiens
gagagccgagcccaaggcaagacccaaggcgacgaccgacaggggggaaagcaacacagagacacacggggcacaccaagcgaccccgagaa

SEQ ID NO: 162625 - RNA, 77 nt, Homo sapiens
gcccgaaggaccagagcaaggaggacggaagcaagcgaacagcagaaaccagaaggcagcccagaacacgggaaaaa

SEQ ID NO: 162626 - RNA, 72 nt, Homo sapiens
ccaaaagggacggacaaaggaacaggaccaggggaaagggaaaggacgggagaggagcacagcagagggggg

SEQ ID NO: 162627 - RNA, 75 nt, Homo sapiens
ccgaccgcacgaccaaacccaggcaccggggggcaggcagcccgaggcccacaagcagagaagagaacacaccca

SEQ ID NO: 162628 - RNA, 63 nt, Homo sapiens
caagaacgccaagcgccaaaggcaaaaagggaagaagccaggaaaaaaagagaaacaagcgaa

SEQ ID NO: 162629 - RNA, 85 nt, Homo sapiens
ccggccgagccgagggccacccccggcccgccccgcgccccgcagggccagaggaggcaggaccgggcaaaaaggcagcacccca

SEQ ID NO: 162630 - RNA, 55 nt, Homo sapiens
gcagaccgcagaaggccggagacaccagcagagcccggcggcacccgggaggagg

SEQ ID NO: 162631 - RNA, 72 nt, Homo sapiens
agcgcccaggccggaccgggccgggcgcccgcaggggccagacccaagaggacgcagaggcgagcgcggaga

SEQ ID NO: 162632 - RNA, 70 nt, Homo sapiens
ccggggaccccagagcagcacaggcgccccagccgaccagcagcgagagaccagaagcacgcgccgagca

SEQ ID NO: 162633 - RNA, 78 nt, Homo sapiens
agaaacaaacccaggaaaaagccaagagagaccggagaacgcgacaggcagccaccggggacggcaggcagaccccaa

SEQ ID NO: 162634 - RNA, 78 nt, Homo sapiens
agacagccagcagggaagacgaacgcacaaaacggagaaaaaacgagggagcgaacgcggcgcggaaagacaaaaccg

SEQ ID NO: 162635 - RNA, 80 nt, Homo sapiens
agaaggcgcaacgcggcgcggccaccagagccccacccagaaaggcagaggggagagccagagcaccccaacccggagag

SEQ ID NO: 162636 - RNA, 77 nt, Homo sapiens
gacggcagccggagggaggaggaaccggaaacccggaagccgggaaagcccaccagccggacacccgaagcagaagc

SEQ ID NO: 162637 - RNA, 77 nt, Homo sapiens
aggaacaagaaccagggagaagccgcccgaacaccagacaggccgacggcgcaaggccacggcaagcaccgggagca

SEQ ID NO: 162638 - RNA, 42 nt, Homo sapiens
agacggaggagagggccgggcggcgacggcggcgcgaggacc

SEQ ID NO: 162639 - RNA, 55 nt, Homo sapiens
cgaacgagaggcaacagaaaccgccagcgcgaagcgaccggccacacggcccgac

SEQ ID NO: 162640 - RNA, 105 nt, Homo sapiens
aacgagccgccgaccgagaaacaccgggcgggccccgggcgagcgggggccgcgaagaggaaacaaaagcgcaggagagaccaggccggagaccaggaggcgcca

SEQ ID NO: 162641 - RNA, 79 nt, Homo sapiens
cccgcggggcgcgaacaccgaggcccgggcaggccacgacagggcagaccgccagcagcacagcaagccacagagaggg

SEQ ID NO: 162642 - RNA, 72 nt, Homo sapiens
ggacagcgaggcgcccggggaacgcaccagagcggagggcagcgcaagaccccgcacggaagcagcaagcac

SEQ ID NO: 162643 - RNA, 88 nt, Homo sapiens
aagcagccaccaaccaccacccggcagccgaggaagggcccgccaacaccgagcccgggagcgcgggccaccgcaagaaccccgaccg

SEQ ID NO: 162644 - RNA, 58 nt, Homo sapiens
aagcgggagaaggacgcggacagcagcaagcagcagggccaaacagccgagagcagag

SEQ ID NO: 162645 - RNA, 80 nt, Homo sapiens
cgcggaggaccgggccgagcgggcaccaagggaccgcagcagcgcacccaggcaaaaaggcagcagcaacaccgccaaga

SEQ ID NO: 162646 - RNA, 62 nt, Homo sapiens
ggagacagaaagccccaagaaggggaagcccaccagcccaggagaaaagacgcagcccgaag

SEQ ID NO: 162647 - RNA, 72 nt, Homo sapiens
aaggagagaacaagagggggaaggacagggcgaaccccgcgccccgcagcggagagcgcggccgaggcagaa

SEQ ID NO: 162648 - RNA, 75 nt, Homo sapiens
aaacacacaaaggaaaccaccgccccaggaagacccagacagcgccgcaggcgccaaaaggaaacacggaagacc

SEQ ID NO: 162649 - RNA, 48 nt, Homo sapiens
gagaaggaccaagaaccagacgcgcaacacagagggcaggcagcacag

SEQ ID NO: 162650 - RNA, 77 nt, Homo sapiens
ccgggccccgggcggcggcgccaggccagggccgggggacccgagagcagcggagcccaccaaaaaacacggcgggc

SEQ ID NO: 162651 - RNA, 57 nt, Homo sapiens
gggcgaaggagccggcccaagaggcccacgcggaccggcagcgccaccggaccacca

SEQ ID NO: 162652 - RNA, 72 nt, Homo sapiens
agggaagagacacaaggaaaagcgacagaaccaaggaagcccaacgaacgaggggagggacaaagaagagag

SEQ ID NO: 162653 - RNA, 33 nt, Homo sapiens
cgggacgggccgagaggaaaagcagacaagaga

SEQ ID NO: 162654 - RNA, 92 nt, Homo sapiens
aggaagacgccgaggccgggccaggaacggcggacggggggcggcagccagccgcagggaaacaggaagagcgagacagcaagacgcaagaa

SEQ ID NO: 162655 - RNA, 75 nt, Homo sapiens
accccgcccaacacgacccagcagccagagagccagagaccaggcgacagaagaagaggaaggggaccgggacgc

SEQ ID NO: 162656 - RNA, 80 nt, Homo sapiens
cgccgcccccggccacgacccccgaagagccgcgccgccagggaccaacaggggaaccaaaggacagcacagaccgagca

SEQ ID NO: 162657 - RNA, 72 nt, Homo sapiens
agggcaggacgcgagcgcgcaggggaggacacgaggaggggacggcccgccacaggcacagacgaggaggga

SEQ ID NO: 162658 - RNA, 74 nt, Homo sapiens
cccaccgagacggccacagacaacggagcccaacaaagaaaggacagcaagaagacaggacacacaagaagcac

SEQ ID NO: 162659 - RNA, 73 nt, Homo sapiens
gggaccaacaaaaaagagaaaaggccagagacccccagaaagccacccgcacaaaaagcaaacccggaacgca

SEQ ID NO: 162660 - RNA, 74 nt, Homo sapiens
ccagacaggaggagagaagacccacggagccaggcccaggaacccaaccaaccacagaggaaagggaaccgcac

SEQ ID NO: 162661 - RNA, 76 nt, Homo sapiens
agcgacggagcggagccaggggcggcggacggggcgcccacacagcggaccaagaggcccacacaaaggcgcgaaa

SEQ ID NO: 162662 - RNA, 77 nt, Homo sapiens
gacccagggagacaccgaaaagaagagaaaccagcgcggggaagaagagccaaagcagacccccaagcgagcggagc

SEQ ID NO: 162663 - RNA, 70 nt, Homo sapiens
cccaccccgcccaaggaggcccagcggcgccggcgaaagcaacgaagggacgccagaacaagagaaggag

SEQ ID NO: 162664 - RNA, 65 nt, Homo sapiens
gaacaccacccggagggccaaaaccgaaaccgcaggcaccaggaagagcccagggagccgcaccc

SEQ ID NO: 162665 - RNA, 80 nt, Homo sapiens
aagaaaacaaaggcaccggggacgccaccggagaagggaggaaaaccaacaaggcgacccaaaggcagaggagagaaaac

SEQ ID NO: 162666 - RNA, 88 nt, Homo sapiens
cggggaagcagccgccacggaggcaaagcagccgggaaaggaaaaccccagcgcaagggaaaccaccaagaagcaagaggaaaaggag

SEQ ID NO: 162667 - RNA, 79 nt, Homo sapiens
aaacacagcagaaccagccaacaaacaccggagcaggggagcgagcacccagagccagggaggagagaagagcgccagg

SEQ ID NO: 162668 - RNA, 62 nt, Homo sapiens
aaccaagacagcgccacagacagaaaaggccacaagaccccggagagggggaaacagaaagc

SEQ ID NO: 162669 - RNA, 78 nt, Homo sapiens
cggaggcggcggaggccagggaggaagagcgaagagcggacgaggaggggcagcaagccgccagggccaccaggacgg

SEQ ID NO: 162670 - RNA, 84 nt, Homo sapiens
gcagccccaggacccccaagagccacagagccgacacccaacacacgcggggcacggaacaccgcggcaccgcgcaggccgcca

SEQ ID NO: 162671 - RNA, 68 nt, Homo sapiens
agcgagcgagggggggcgcgccggaaaccggagcgcgcagcagcaaggaagagaaaggaaccgcccga

SEQ ID NO: 162672 - RNA, 73 nt, Homo sapiens
gggcaaaagaacaagacggacacagaaaccccagagaaccaagacaaaggaaaaaaaacgcccccaaaacaag

SEQ ID NO: 162673 - RNA, 69 nt, Homo sapiens
gagaaggaccaagaaccagcccaaagagagcaacacacacaggcgggagcgcagagcaaggcccccagg

SEQ ID NO: 162674 - RNA, 78 nt, Homo sapiens
cacaaagaccaggcaagggccccagaaaacgggacaaaccaggggaagggcaccaccaaagaacggccccgggacacc

SEQ ID NO: 162675 - RNA, 84 nt, Homo sapiens
ggaaaagcgccgggcggaccagcagagaggcgggacccaggcagacagagggaggagcagcaaaggcaggcgcagcgagcagga

SEQ ID NO: 162676 - RNA, 67 nt, Homo sapiens
ccgcgcaccgacccgacgcgccggcccacgcgcggccaagcggggacgagagccccggcacaaacgg

SEQ ID NO: 162677 - RNA, 65 nt, Homo sapiens
gcggagcggacaaggcccggccgcgaggaggaacgcacaccagcaccagcccaccaaaccagcac

SEQ ID NO: 162678 - RNA, 71 nt, Homo sapiens
cacgagggaccgagaccacgaggcccggcgaaccaaacaggggcaccagggaggaagaccgcaagaggggc

SEQ ID NO: 162679 - RNA, 78 nt, Homo sapiens
ggcaggcacaacaaccaagaaaaacgggggccgccgccaagagagcacaggaccccggaccaaaagacgggaacagaa

SEQ ID NO: 162680 - RNA, 74 nt, Homo sapiens
aagaagccaaacagaggacgcagccaggccacggaggaacaaaagcaccacgcccagggaaacacccacccgga

SEQ ID NO: 162681 - RNA, 70 nt, Homo sapiens
gcgaagcccaaaagaaagaggcaaaagaaaggggggcggcaccaaccgggaacggcccaacagggcagca

SEQ ID NO: 162682 - RNA, 79 nt, Homo sapiens
cccagaaaacacgagcaaaaacgcagagcaacggcgccggggaaagagaagacagacgaagcaagaagccaaaagaggg

SEQ ID NO: 162683 - RNA, 79 nt, Homo sapiens
aacggaccagcacacagaccagggacggaccggacccagacacggccaccccagccgaccccgaaacgcggcaaggcgg

SEQ ID NO: 162684 - RNA, 77 nt, Homo sapiens
ggacgggacgggccgcccgcacagcagggacgcagccagcgaggccaccagcgccccgcgaaaggagcgcccgagac

SEQ ID NO: 162685 - RNA, 77 nt, Homo sapiens
gcccggaccgcccccgagcccggaggggggagaaaagaggcggggcaccaggcccagacggcgaacccgagcaagca

SEQ ID NO: 162686 - RNA, 83 nt, Homo sapiens
aggagcggaacaacgcggcgagcggggagaggaagaagcggggagagaccaacaagaccgcggcagaggccaccaggggaagc

SEQ ID NO: 162687 - RNA, 72 nt, Homo sapiens
caagcacaacaacaaaggaagccggcgagcaaggggaagcccagccgcagaccgcacaaaccaagaaaaaac

SEQ ID NO: 162688 - RNA, 48 nt, Homo sapiens
cacagcgcaccacacacagagggaaacggaaagggcgcgcacagacgg

SEQ ID NO: 162689 - RNA, 69 nt, Homo sapiens
cccaagagaggcaggcagcgacagccacacaacggacagaagcacaaggaccgaggaaccacgccaggg

SEQ ID NO: 162690 - RNA, 59 nt, Homo sapiens
cgcaggaggcaaccaggagccaagacaaccacacacaaaaggaaagggaaaagccacac

SEQ ID NO: 162691 - RNA, 78 nt, Homo sapiens
cgagaggacgggaccaggcgaagcggccgagcaggcgagcgaacgacgaccggaggagcggcgcggaacggcacaagg

SEQ ID NO: 162692 - RNA, 82 nt, Homo sapiens
ccgcagcccacgcagcaccgcggggggcggggccgcgacaaggccgaagaagccacacacagaagacccaaagagaacacag

SEQ ID NO: 162693 - RNA, 65 nt, Homo sapiens
caccggacccgccaccaccaaaaaaccaccccccaggggacacgcgcccaccagggggagccagc

SEQ ID NO: 162694 - RNA, 66 nt, Homo sapiens
ccgggaggcaagaaaaaggggaaagccacccaggagagaagaagagaaacccacggagagggcaga

SEQ ID NO: 162695 - RNA, 69 nt, Homo sapiens
gccccggcccgggagggagcgggcgcaccgcggcccccaggacacgcgcgagcgcagaggcggagacag

SEQ ID NO: 162696 - RNA, 83 nt, Homo sapiens
cacggaagagagccccaggccagaagagagacccgacgacggaccgcacacggagaaggaagcagagacagggcaccggagcc

SEQ ID NO: 162697 - RNA, 65 nt, Homo sapiens
agcaggaagacgcagaggaaacggcagcagaacaagggagaaccacaagggcgagccaagaagag

SEQ ID NO: 162698 - RNA, 48 nt, Homo sapiens
ggccaagaaggcagacagacagaaagcgcccaggacaggaccaggagg

SEQ ID NO: 162699 - RNA, 97 nt, Homo sapiens
gcccaagaaggaacccagaagaggacgacacgcagccaaaaaccaggccgggcaccagaaagaccacaggggacagagaaagaagaagaacaagcgc

SEQ ID NO: 162700 - RNA, 83 nt, Homo sapiens
ggaaaggcaccaggacaagcaaagccgcgccaggcccagacacgcagaggagacccgaaccggcaacagcaccggaggcccaa

SEQ ID NO: 162701 - RNA, 52 nt, Homo sapiens
acaggggcagaaaaagcacacaccacgcaacggccagcaaaggagagccaga

SEQ ID NO: 162702 - RNA, 69 nt, Homo sapiens
gcaaccggcgagaaggccagcaaagcgcagcgaccggccaagcgggggaccaagaggaccaccaacagc

SEQ ID NO: 162703 - RNA, 80 nt, Homo sapiens
ggcagccccgggccaggccgcggccggggcaggagcgcagccggccccgggcgaagagccggccgccgcgcgcccgacac

SEQ ID NO: 162704 - RNA, 79 nt, Homo sapiens
aaggcggacgcgaggaggggaccgaaacaagaccccagccgggaacccgaaggccgcaacgagcaccacccacggagaa

SEQ ID NO: 162705 - RNA, 87 nt, Homo sapiens
ccggcgacccggccaccggggcgaggaagcgccccgaaacccccagaagacacgccgcagaggcccaccacgcgaggccgcgggaag

SEQ ID NO: 162706 - RNA, 83 nt, Homo sapiens
agcaagagaaaggagagagcggagggcagaaggcgcaaaggcaaagaccagcagggcgcccccgccccggccaacaggaccgg

SEQ ID NO: 162707 - RNA, 73 nt, Homo sapiens
gaacgcacgggcaacggagaaggcaaggcagcgcgaaggccgaaggccaggacagagaaccgaaggaccagag

SEQ ID NO: 162708 - RNA, 35 nt, Homo sapiens
aaagcggaagacggcaccgccaggagcaaggcagc

SEQ ID NO: 162709 - RNA, 37 nt, Homo sapiens
cacaccaaggggagagaagcagcacgggcccagacgc

SEQ ID NO: 162710 - RNA, 52 nt, Homo sapiens
cggcccagccccagaaaaggaacacaaggcgaaggccaagacacgcgacgcg

SEQ ID NO: 162711 - RNA, 82 nt, Homo sapiens
cccacgccgcccgacccaggggagccgggcccccccgcccagcgcgaggcgcggggaggcccagcccgccgcagggccaccc

SEQ ID NO: 162712 - RNA, 58 nt, Homo sapiens
gacggaaaaggcgggaaagaagggacaaaaaggaccagaagaaaggcgcacaaaacca

SEQ ID NO: 162713 - RNA, 73 nt, Homo sapiens
gaagggaacaacaaaggaaaaacgaaaacaccaccaggcacccaggaccccgaacaagaacacacgaaaaaca

SEQ ID NO: 162714 - RNA, 80 nt, Homo sapiens
gggaaaggagcggggagccccgcgccacagaaacagccaacccgcaacaacggcagaagaaaagcccggaaaacggaaaa

SEQ ID NO: 162715 - RNA, 88 nt, Homo sapiens
cagaacggccacagaacacacccaagaagacggcagaacacccagcacgcccagaacgaccagaggccgaacacagaagacaccgaag

SEQ ID NO: 162716 - RNA, 78 nt, Homo sapiens
cggaagagacgccccagaccccgcacagacagccggcagcagaacaaccgagagaaacacaacagaaaaaacgaacca

SEQ ID NO: 162717 - RNA, 82 nt, Homo sapiens
gggacgccacgccaagcaaaccgggaaaggagaggacccggagccgacaggagcgccgcggccaagcccgccaggcacggag

SEQ ID NO: 162718 - RNA, 71 nt, Homo sapiens
cagaagcagacgaccagaggagcccccacaagccgcagagaccccagaacacaggagaaagcgaagccaag

SEQ ID NO: 162719 - RNA, 69 nt, Homo sapiens
caccgcagaaggggacaaagggacagaccggggaccggcaggaacaaaggaagcaaagcgagggaagac

SEQ ID NO: 162720 - RNA, 78 nt, Homo sapiens
aggcacagccaacgcgcacagaaaaaaagggcccagcagagggcggagaacggaaaagcaccaggaagcagagaggac

SEQ ID NO: 162721 - RNA, 78 nt, Homo sapiens
ggaaggcgcccgcggcgacgggggcggcgcccccgggcgaacggcagacagaaggggaggcaacaccgaacaggacca

SEQ ID NO: 162722 - RNA, 75 nt, Homo sapiens
ccagccgcccaacccaggggagcagaccccgcccagggaacgccacaccgcccaccaagaagagaggccggccgg

SEQ ID NO: 162723 - RNA, 87 nt, Homo sapiens
agaacgaccggcccgccaagaccagagaaggaggagggaccacgcgcgaggggagcaaaacgcccaccacggaggcaccgaggacga

SEQ ID NO: 162724 - RNA, 85 nt, Homo sapiens
cggagaacagcggcgcgccggcaagagcagcgggagcggcgcggggaagggggcgggccgcagagcaggggcccggcagcggccc

SEQ ID NO: 162725 - RNA, 77 nt, Homo sapiens
accgcggagcggagccggccgacgcgggcgcgagggcagaaccggagagcaagcgacacaggagaggggccagagag

SEQ ID NO: 162726 - RNA, 74 nt, Homo sapiens
agccgcgaaaaaggggggccgagcggggacgacgagcccacggcacaacggaccgacagagcagcaaccggccg

SEQ ID NO: 162727 - RNA, 35 nt, Homo sapiens
aggccaagaaggcaggcacaacaaaaccaagagga

SEQ ID NO: 162728 - RNA, 72 nt, Homo sapiens
agggcaaggacacggggaaaagacagacaggaaggagccacaagaccaagcgccacaagggaggaaagccag

SEQ ID NO: 162729 - RNA, 66 nt, Homo sapiens
acaggcgcaaaaggggcggaaccacgcaaacacacagaccccgggaaccggggacccaggaagggg

SEQ ID NO: 162730 - RNA, 82 nt, Homo sapiens
cccgaagagcacaaccgggcgcccggacgggggcaagcggaagggagcccaagaggaccagggcaggaaaaggaggacgagc

SEQ ID NO: 162731 - RNA, 102 nt, Homo sapiens
gaagggcaccagcgccgcggcggcgggcaagggcccacacaggacccggggaaagccaccagagccgcgacagccaaggaggcaagcaaggggccccggccc

SEQ ID NO: 162732 - RNA, 75 nt, Homo sapiens
cacgcgcggaaggcagcgcccagcagcgcagggccaccgcaccgagcagaggcaggggcgacacagcacgcagca

SEQ ID NO: 162733 - RNA, 71 nt, Homo sapiens
ccccaagagcgggaacagagcaacaagaggccggccagagaaccgggggaccgaagaaaagccacaaaaag

SEQ ID NO: 162734 - RNA, 75 nt, Homo sapiens
caccagggaccaaacggaccccaaagaggagcagcaggggacggaaagagagccgcagcgcagaacaagggaaaa

SEQ ID NO: 162735 - RNA, 62 nt, Homo sapiens
ggaagggacggcacgaaccaaaagcgcaaaaaccaggcgacggccaagacaccgaagccagg

SEQ ID NO: 162736 - RNA, 76 nt, Homo sapiens
cacaacccgggccgaggagccacagaggagggcccgggaaggacaaaagcaggggcacggaagaggacaagaaaca

SEQ ID NO: 162737 - RNA, 82 nt, Homo sapiens
ccccggcccacaggggggggcaaacccgagagaacggaccggaaacagaagcacaaaggaccgcccgcaaaacgggcgcgac

SEQ ID NO: 162738 - RNA, 30 nt, Homo sapiens
acaaagccgcaccagggaaggggaggagca

SEQ ID NO: 162739 - RNA, 57 nt, Homo sapiens
gcagagcaggcagggcagaagaaaagggaaagaaaacaagccacccagacaagagga

SEQ ID NO: 162740 - RNA, 80 nt, Homo sapiens
gacccgggccccgggcagcagagcggaggcgcgccacgaaaccgaccgcggcaagagcaggggagcaagaacaaaggggg

SEQ ID NO: 162741 - RNA, 73 nt, Homo sapiens
gagcaaggacaccaccagggagccaggagaggagagcccggcaaagagcggcaggcgaagaaggagcagaccc

SEQ ID NO: 162742 - RNA, 72 nt, Homo sapiens
caccagaagaagaaggccagaaaaaagcaaaagcgcagcaccagcggcagagaaagaggagagccggccagg

SEQ ID NO: 162743 - RNA, 78 nt, Homo sapiens
ggcgccggggccaccaggaggaaccggcaaggcgacagaaccacgaggggggggaacgacggcgcccagccggggcgc

SEQ ID NO: 162744 - RNA, 57 nt, Homo sapiens
gcaccaccaggaggcggcacacaacaacgccaggaaccccgacagcagagacgacgc

SEQ ID NO: 162745 - RNA, 54 nt, Homo sapiens
cagccaacaaagagaagagaaaccaagcccgcaaccaccgaaacgggcgaaaaa

SEQ ID NO: 162746 - RNA, 73 nt, Homo sapiens
agaacaacccaaaccaaggcccaggaaaagagcacagaggaagaaagcgaagggagcaggagaaaaaaagaag

SEQ ID NO: 162747 - RNA, 111 nt, Homo sapiens
ggccgagcccgccagccggcccggcggcgcgcgcgcgacgcgcgcgcccggcccgggacagagagagcaaaacgacgaaggagccaagaggaccgggacccaaacagggcc

SEQ ID NO: 162748 - RNA, 90 nt, Homo sapiens
gcgccccagaggacacacgccaaggcccacgccagggagcgggaggacgaggaggaggccgccacgagcaagccagcagagagagacagg

SEQ ID NO: 162749 - RNA, 89 nt, Homo sapiens
cgcccgcaccgccgcgggagcaccggagaggggccgcggaaaccggagggaaggagcccccaaagacacacggaccaccaccccaccga

SEQ ID NO: 162750 - RNA, 87 nt, Homo sapiens
cgacacgaccgcccgcgagagagagaaagacgcgaggggacgaggaagacagagcgcgcccaaagggagcaaggaggaacagcggga

SEQ ID NO: 162751 - RNA, 73 nt, Homo sapiens
cagccgggagccagagcacaccgcgcaggagaggccaagagaaagaccaaaccgcacaaacaaagccaaggaa

SEQ ID NO: 162752 - RNA, 79 nt, Homo sapiens
gcacccgggcccagccgggaacccccacgcggccagcgaaaacgcccaggaaacagacagcgcccacaggcagccgaag

SEQ ID NO: 162753 - RNA, 81 nt, Homo sapiens
ccccgcccgccacagccggcagcgcgaagcagcaaccagacccgggaaaaggagaagagaaggaagccaaggagcccgcaa

SEQ ID NO: 162754 - RNA, 75 nt, Homo sapiens
ccagcacgcgaccacaaggaacgaggggccccaagagcacagaccagcagccgccaaaggccaaacgccagggcg

SEQ ID NO: 162755 - RNA, 77 nt, Homo sapiens
agcacgggaacgcgaagcgccaaagccagacaagccccgagccggcgcaggaggaagcgcggagaccggcgagcagg

SEQ ID NO: 162756 - RNA, 73 nt, Homo sapiens
ccgccagcccggcaccgcccccccccgcgaggacagagcagccaggccacgagccagaaccgagacacacaca

SEQ ID NO: 162757 - RNA, 77 nt, Homo sapiens
agccgagcccaaaggagaggggggaggggagaaagccaccgccacagccacgacagaagcagaaagggccgccaaaa

SEQ ID NO: 162758 - RNA, 79 nt, Homo sapiens
cccggacggaacaggcaaaagagcccagcaggcgcagcagcaagagggaaaaaggcaacgggaccgcggcaaaggccaa

SEQ ID NO: 162759 - RNA, 74 nt, Homo sapiens
gccccagaaagagacaacacaggaacaagcaccacagagcgcaaacgccaaggcgccggggagcaggagaagaa

SEQ ID NO: 162760 - RNA, 84 nt, Homo sapiens
agcagaacaaagcagccggaaaggagccaagaggaggcgagacaggaccgcggacaaaccgccccagggcgaccagcaccgaag

SEQ ID NO: 162761 - RNA, 81 nt, Homo sapiens
cagaagaagagaggagggagaacacagaaaccggccccagggggcccccaaagggaagccaaacacaaaggaagaagcccg

SEQ ID NO: 162762 - RNA, 85 nt, Homo sapiens
cgcagcaggacggcgaggaggccgagggcagcggaacgcgccgacgccgcaaccagcaccccgaggagcggaaccagaccgccgg

SEQ ID NO: 162763 - RNA, 86 nt, Homo sapiens
caggagagaagaccagaagggaggagagaaaagaaggaggccagcgggacacacaaagaaagacgaaggacacccaaagggaagga

SEQ ID NO: 162764 - RNA, 76 nt, Homo sapiens
cgcgcacccccggccggaggcaccagcgggcagggaccccacacaaacaaagaaaggaaacgcaaggaacccgaag

SEQ ID NO: 162765 - RNA, 80 nt, Homo sapiens
gcgacgaagagccccccaagcccgaagaggaaggagcgggcccaagaaaagccagaagaaccgaaaccgcagaggggggc

SEQ ID NO: 162766 - RNA, 78 nt, Homo sapiens
ggagaccagcccccagccaaagggaagagcacggggcgcaagagggcgcgcggggaagggagcaacagaagagaggcg

SEQ ID NO: 162767 - RNA, 84 nt, Homo sapiens
ccgggcccgcagaagaggcagagacgaagaggggccagcccccaggcccgccgccagagggacaggagccaggccagaaaagga

SEQ ID NO: 162768 - RNA, 97 nt, Homo sapiens
aacaaggaccgggaaagaggagacaaaccccagacgcgccggagggccaggccgcaaaggaacgccacaaagaggagggcaaagcagaaaagcccac

SEQ ID NO: 162769 - RNA, 76 nt, Homo sapiens
cgggaaacaggagagcggccagcacagcagagagaagccaggagaggagccaagcccaacgggacgggaaaacggc

SEQ ID NO: 162770 - RNA, 58 nt, Homo sapiens
ccaagaggagccaagaaaggaagagcggacaccgcccaaaggacgcccgggaaagccg

SEQ ID NO: 162771 - RNA, 81 nt, Homo sapiens
ggccacagacggaggacacagaggcccagaggccaagcggcaaagagccaggaccccaggagcgggccagcccgcccccag

SEQ ID NO: 162772 - RNA, 83 nt, Homo sapiens
aggagacaacacaccaaacagcacccggcaagaagaacacagggggaagccaagcagaacaagccccccaggccacccaggac

SEQ ID NO: 162773 - RNA, 88 nt, Homo sapiens
gcagcgaggaacagacaggaggggaggcaccggcagcggacccgcccaggcacaagcagaccgccacaccagagaccacggcagggcc

SEQ ID NO: 162774 - RNA, 65 nt, Homo sapiens
ggccgagggaagccgcccagcagggcaggggcaaggaaagcagcgcacaaccgggacggccggca

SEQ ID NO: 162775 - RNA, 51 nt, Homo sapiens
cccaaaccagacaagaaagacaaccaccggagaaggggggcagaaagaaga

SEQ ID NO: 162776 - RNA, 81 nt, Homo sapiens
ccagccggggcggccggccaggaaccacccgaaggcagaagaagaagagcggagaaccgaacaggcgcagggagcccccac

SEQ ID NO: 162777 - RNA, 81 nt, Homo sapiens
cggcgcagcccagaggacaaccggagcccgcgggccccgaagcaaggaaggaccgcggagcagcgagacgggagggaaggc

SEQ ID NO: 162778 - RNA, 76 nt, Homo sapiens
gcacaggagagcgcaaaaaacgcgggaacagagaacagaacaccaaggagagaacagaagaccggcaacgggccaa

SEQ ID NO: 162779 - RNA, 82 nt, Homo sapiens
ccgaaccgggagcgaggaaccagaacgaaaagcgccagaaagagccaccggcagagcaaccagacgcgggagcgcgcgagga

SEQ ID NO: 162780 - RNA, 78 nt, Homo sapiens
cacagaggaccaaaggagcacagggaccagaccaccacagcgccccgagagaccccggagaccaagcggccgcaagga

SEQ ID NO: 162781 - RNA, 86 nt, Homo sapiens
cggagcccaccggccaacacaaacccgaaacacaaggcagccccagcagcacggacaggggagaacgccggggccacggcccgccc

SEQ ID NO: 162782 - RNA, 84 nt, Homo sapiens
cggcacgcccagcaccaccccgggagaaaacaggggcacagacgacagaagccaagagggcgcaaagaggaaaagaagagaaaa

SEQ ID NO: 162783 - RNA, 78 nt, Homo sapiens
acaggcccaggggcaaccaggcagacccgaccccagcgaaaacagccccacagaagcagacgcgagcacaggaacggc

SEQ ID NO: 162784 - RNA, 72 nt, Homo sapiens
gaggagccacaaagccagaggagaaaagaaaaggggcaaagacacagccggccagggccacccgcaagggca

SEQ ID NO: 162785 - RNA, 130 nt, Homo sapiens
gcgccgcgcacccgcgccagcaccacgcccgcgccgcgccgccgccaccagcccaagagaaagggagaagcccaccacgcaacgggacggcgcggcggaaggcgcgccagacgagccacgcgccacaccg

SEQ ID NO: 162786 - RNA, 64 nt, Homo sapiens
gcggaagacccgggaccacgggaggcggcgccccaggcaaaagaagaacgaagcacaaaacccg

SEQ ID NO: 162787 - RNA, 78 nt, Homo sapiens
ggcgccgagccggaccggagagcacaagccggccacgacacaccgaaggcgcaaaagacgaaaagacaaggacgaaga

SEQ ID NO: 162788 - RNA, 72 nt, Homo sapiens
gaagccccgaaaccccaggacccagacacagacaccagaggaccagaacccacgagaaacagacgagccaac

SEQ ID NO: 162789 - RNA, 66 nt, Homo sapiens
ccgccaccgcggccaccgacagcggccccgcggcgccgcggcccacggaagaaggacacaagacag

SEQ ID NO: 162790 - RNA, 85 nt, Homo sapiens
agagacccaaggacaacgcaagggggaagagagagaaacaaaagcgccagagccaagaacggggaggcgccaccgcgcagaagcc

SEQ ID NO: 162791 - RNA, 51 nt, Homo sapiens
cgcggcgcggcagcgcgcccgagagcacgaccgcacaggcaaaggaaggcg

SEQ ID NO: 162792 - RNA, 82 nt, Homo sapiens
gaaaagaccgcaaccgccagcaccgggaagagaaagaaaagccgaaggcaccagacaggggaggcgccaccgcgcagaagcc

SEQ ID NO: 162793 - RNA, 72 nt, Homo sapiens
cccccggcgggcacagaggaacacaccccaaaacggcccacgagaagccaggaagaaggcgccaaaagcaga

SEQ ID NO: 162794 - RNA, 65 nt, Homo sapiens
cagagcacaacaccacacacgaagagaacacaagggaaagacacgagacaaagggcacaaaggca

SEQ ID NO: 162795 - RNA, 54 nt, Homo sapiens
agaagaaagcagcagacgaccagggaaaacaagaccaaacccgacgacagggac

SEQ ID NO: 162796 - RNA, 76 nt, Homo sapiens
acccccgcgcacacaccccgagggaggaagcaaacaccagagagacccggaagcgccgaacaaaaccggaggcccg

SEQ ID NO: 162797 - RNA, 115 nt, Homo sapiens
gccggagcgcgaaggccgggacccggccccggcccacaggggggggcaaacccgagagaacgggccacagaaccgcagacccagcaaagagcccgcccgaggacgccccgaccga

SEQ ID NO: 162798 - RNA, 66 nt, Homo sapiens
gccaggagcagagcgacagcggcgagcagaacacggcgagcgggaacaagcgaaagcggaaccaag

SEQ ID NO: 162799 - RNA, 74 nt, Homo sapiens
cggcagcaagcaccagcacccgcagcccggaaccacgcaccagacaacacagggcaaggcccggcgaccacgcc

SEQ ID NO: 162800 - RNA, 75 nt, Homo sapiens
cccagccggcccccccagaaccaagagacaccgacaagagggagggagagggacagaccagcagacaccagacgg

SEQ ID NO: 162801 - RNA, 74 nt, Homo sapiens
ccaagaacagaagacgaccaccagacacccggaggaacaaggggagaagaagcccagcccacgcgacgaaaagg

SEQ ID NO: 162802 - RNA, 70 nt, Homo sapiens
ggcaggacccccaaggaggacaaggcaagccaaggggggcgcaaagccccagcagaaccgggaacaaccc

SEQ ID NO: 162803 - RNA, 97 nt, Homo sapiens
gcggacccgcccaaaggacacgacagggaggagcggagaacgcaggaaccggcccacagagccggcagcgcccgagggagcaaggagaagagcggaa

SEQ ID NO: 162804 - RNA, 55 nt, Homo sapiens
cagggcggcaaaacgagcgggccagacccacccagggaacccccccaccccccga

SEQ ID NO: 162805 - RNA, 76 nt, Homo sapiens
gccgaacccagcgcgcagcgcgcaggaaccccccaaacgcaaaagccgccccaagggacaagagaaaaaaagggcg

SEQ ID NO: 162806 - RNA, 62 nt, Homo sapiens
gcacaggacggccagaggggacccggcagcaaccccaacaaacgccagaggcagcccccccc

SEQ ID NO: 162807 - RNA, 78 nt, Homo sapiens
gggccacccacaaagagaaccggggcaagagacggcagacaaacacagccgagagaaggcaggcgacgggcaaagaga

SEQ ID NO: 162808 - RNA, 70 nt, Homo sapiens
gcaccccagggaccaggaccgaggagagccccgccaggggggcagcagccaggacgaaggaaaaaggaac

SEQ ID NO: 162809 - RNA, 79 nt, Homo sapiens
ggcggcgggaccacggcagaaggagcggaaggcggagcgaagagccggaccaagcgccagcgagagagagaccaacggc

SEQ ID NO: 162810 - RNA, 48 nt, Homo sapiens
gagcggaccacggagcccgaagaggacgggcccagccagcccggacag

SEQ ID NO: 162811 - RNA, 78 nt, Homo sapiens
gggcccggaccccaagacggccacggaggagaccacaaacagccacaagaaacaggggaaaggcccacacggccggga

SEQ ID NO: 162812 - RNA, 75 nt, Homo sapiens
accaaaaaaaaagaaaaacagaaaaaaaaaacacgcaaagaccaccagagggccgggccccgaggaagcgaagca

SEQ ID NO: 162813 - RNA, 81 nt, Homo sapiens
aaaaagcagcaaaccggaccaccccgaagaaagcacaggggcaggggaggcaggaccaggccaagcaaaagggaaggaagc

SEQ ID NO: 162814 - RNA, 76 nt, Homo sapiens
ggggagggcagaaacaggaagaagagccaaaggcgaagggcagagaggagaacaggagcagaacaccagacacccc

SEQ ID NO: 162815 - RNA, 67 nt, Homo sapiens
gcgaagaccacagaaaccaaaaacaacggcaagcggagaagagcaaggccgaaccgagaggaagggc

SEQ ID NO: 162816 - RNA, 78 nt, Homo sapiens
caggccgccgccgagccgaggaagaccgcaggaaagcaggaaggcaagaaagccaaggacgaaacccacacggaggag

SEQ ID NO: 162817 - RNA, 112 nt, Homo sapiens
gggggcgccaacgaccacagcggagcgcgggcagccagaccgaaagagccagagaccccagaccgcgcccggcccgcgacccaggccggcgcacaacaccaagacaaaggcc

SEQ ID NO: 162818 - RNA, 76 nt, Homo sapiens
cccagaccggagccagacagcagccaagccaacgggagcaccgacggagaaaagaagaccaccaccagagaggccg

SEQ ID NO: 162819 - RNA, 97 nt, Homo sapiens
cggccgccgccccacacggagaggcccggcggcgcgcccaaccggcgacggaaccaaggcgcggcagaggaagaagaaggcgcaaagcgccgaaggg

SEQ ID NO: 162820 - RNA, 69 nt, Homo sapiens
gagcacagagcgagaccaggaaagaagggggcagaagagggggaggaaaaagcggccaacagggggacg

SEQ ID NO: 162821 - RNA, 80 nt, Homo sapiens
cgcccgggaaggcacgggacagcaacagggacgcgacaccgcacgagcggcccaggggaggcaagcaggggggcaaagga

SEQ ID NO: 162822 - RNA, 47 nt, Homo sapiens
gcgggaggccaccgccagacaacggcaagcggagaagagcaaggccg

SEQ ID NO: 162823 - RNA, 67 nt, Homo sapiens
cagaagcagcgccgacgagcccccggaaccacacccagcgggaggaagcacgaaacaacacaaaacc

SEQ ID NO: 162824 - RNA, 81 nt, Homo sapiens
cgaaggggagcaggccgagcccgagccgcagcacgagccaaaccgagaaaagcgcccaggaagcggaaaaacaaaagagcc

SEQ ID NO: 162825 - RNA, 81 nt, Homo sapiens
cgggacggcagagaacccacaaagaggcgacaaagacaccaccagccgggacgaggggaggaaaaaaaccagaccccgcac

SEQ ID NO: 162826 - RNA, 82 nt, Homo sapiens
gccgagggcaaggcgccagaccaagaacgagaaggaaaagcagaaaaaagaagaccgcgaaaaaaggccaaagaaaaacacg

SEQ ID NO: 162827 - RNA, 72 nt, Homo sapiens
ccaaagcaacgagaagaccgagagggcccccacacccaggcgacagggcacgcaacccagccccgggcgaag

SEQ ID NO: 162828 - RNA, 54 nt, Homo sapiens
gcagaggagcagggagaagagaaagagacgcagaaccgccgccaaggaaaagaa

SEQ ID NO: 162829 - RNA, 81 nt, Homo sapiens
aggcagcaacagcccaggagcggaaacagcgcaaaaaccccgaaccacgaacagcccaggggagggacaggaagaaaacag

SEQ ID NO: 162830 - RNA, 59 nt, Homo sapiens
gaaccacacgaagaacaaggcgaacaccagcaggggccagacaacgcccccggagagga

SEQ ID NO: 162831 - RNA, 69 nt, Homo sapiens
accccgaaaaagccagaggagaacggaaagagaggacaaaaacaagaacgaaaggaagagacgagaccg

SEQ ID NO: 162832 - RNA, 58 nt, Homo sapiens
gccaagaggaggacagcgcacacagcaagcacgagggcacacggcacggacagggcgg

SEQ ID NO: 162833 - RNA, 63 nt, Homo sapiens
ggaaagaagaaaaccaagaaagccccacgcagaaaccaggccgaaagaaacccaaaaaaacca

SEQ ID NO: 162834 - RNA, 60 nt, Homo sapiens
acaaggcggacaagagaagccgccaggacgacgagaacggcaggagcccagcggacggag

SEQ ID NO: 162835 - RNA, 61 nt, Homo sapiens
agagagaacccaggcacggccgacagggggagccgcagagcaaaagaacagccccacgaaa

SEQ ID NO: 162836 - RNA, 80 nt, Homo sapiens
ccgggcgcacaacgcgggagcccgccagcggcccccgacaaggacgaggcccaaggaaacggcggcgccagcaggacgcg

SEQ ID NO: 162837 - RNA, 74 nt, Homo sapiens
acggaggaccggacccaccggacacgcccagggcacacaggccccaaaggccaagccaacgagaagcaccggag

SEQ ID NO: 162838 - RNA, 84 nt, Homo sapiens
aagacggcaaaagcacaaggaccgcggacagagacaacaccgagagagaagggaaaagaaacaaacaacaagaagaaggacaag

SEQ ID NO: 162839 - RNA, 76 nt, Homo sapiens
cagagccacacggaagccgccaaacccggacaacgggcgagaggacagccgacggaccagagcgagcgccagagcc

SEQ ID NO: 162840 - RNA, 42 nt, Homo sapiens
ccaggacgaaggcccacgggcaagaaggacagcaaaaggaga

SEQ ID NO: 162841 - RNA, 72 nt, Homo sapiens
accgggcgccccgcagaaaagcaccaaagcagcaacaaagcacacagcgcgccaaagcaagagcgccgacaa

SEQ ID NO: 162842 - RNA, 72 nt, Homo sapiens
aaacagagagaaaagagacggagcaagagaacgcaagagacgggcccaaacccgagcccgcaagcagagacc

SEQ ID NO: 162843 - RNA, 74 nt, Homo sapiens
aggcaccgaacccagcacggcaaccgcgcggcaggccaggggaccgcccccgagcacaacaaggagagggagag

SEQ ID NO: 162844 - RNA, 76 nt, Homo sapiens
gacaagaaaggacacgggggagagaagcgaggccggaaaaaccgagccacacgaaggacaaggaccaagaacaaag

SEQ ID NO: 162845 - RNA, 59 nt, Homo sapiens
gcccgcgaggcccgggcccagcccggccagcagggaaagcaaagaagacggcaagagaa

SEQ ID NO: 162846 - RNA, 62 nt, Homo sapiens
cacacaagaccgcacgacaggcacaggagcgagaacccgagcagcgccagagcaacacaccg

SEQ ID NO: 162847 - RNA, 60 nt, Homo sapiens
ggcccaagagagccacaggggggcgcccagcgaggagaagaaagggaagcaaagaaagaa

SEQ ID NO: 162848 - RNA, 60 nt, Homo sapiens
gcccgcggagagcccaaacaccaccaccaagggggacaggagagagcggcgagccgggcc

SEQ ID NO: 162849 - RNA, 71 nt, Homo sapiens
gagacgcaggaagcagcgaaagagcagaaaaaagaaggaagcccaaagacgcaaagcgcaagccccggggc

SEQ ID NO: 162850 - RNA, 75 nt, Homo sapiens
ccgagaacgaaaccacgcaagaacgcagcagcaggcagcaaccggcccaaggaggagagaaagaacccacgcagg

SEQ ID NO: 162851 - RNA, 80 nt, Homo sapiens
gagggggggaccacgaaaggagcaagagcaagacaccggacaccgagggcccccaaaagggcgaaagcagaggaaaaaaa

SEQ ID NO: 162852 - RNA, 60 nt, Homo sapiens
acagcgaaggcgcgagggacaagagcagagagggagacagagggggcacccagaggccgg

SEQ ID NO: 162853 - RNA, 73 nt, Homo sapiens
gagggaaggggccagcccccggggggagagcgaggccgagggcaggcaagccagaccgggagggagggccgac

SEQ ID NO: 162854 - RNA, 83 nt, Homo sapiens
ggggcgggcacaacggcaaaggcagaccaacaagaggacccaggagaaacgccccaaagccccacacacccaccccgacccgc

SEQ ID NO: 162855 - RNA, 81 nt, Homo sapiens
cgggaaagacaccacacagcgcagcgggaccacgccggagccgaggacacccgcgcacagaggagcgaagaaaccgcaaag

SEQ ID NO: 162856 - RNA, 77 nt, Homo sapiens
ccgaaaaaacaaccagagaggcggacagcagcagagggaaggagcacacgggaagagccgccgcagggcgaaggcga

SEQ ID NO: 162857 - RNA, 67 nt, Homo sapiens
ggaacacagacggacaagagaacaacaaacggcacggcacgaaggaagaagagagggcgaaggaggc

SEQ ID NO: 162858 - RNA, 71 nt, Homo sapiens
gcgccgccgaccccccggcgccgcgccggcggcgagcggggcccggcgcacccaccaccgccgcccacggc

SEQ ID NO: 162859 - RNA, 78 nt, Homo sapiens
acagagaggagccgaggccaggaggagaccagccgaacaacaacggcggagaaaccaccacaaacacgaggccagcaa

SEQ ID NO: 162860 - RNA, 74 nt, Homo sapiens
ggcgccccgccaccgccagccgaaagaaagcggcgacccacgaccccagcgcggaaaaaacaggacccgccgcg

SEQ ID NO: 162861 - RNA, 72 nt, Homo sapiens
ggagccgaagaaggaagaaccacgaagaaacaccacaaaccgggaaaaccagaaccaagcaggacaacggca

SEQ ID NO: 162862 - RNA, 56 nt, Homo sapiens
ccagagaccacagcgccggccacccaccgaagaggcgaacaaaaaaacccaggcac

SEQ ID NO: 162863 - RNA, 83 nt, Homo sapiens
acccgcccgcggggacccacgggaagaagacgaggcggacaggcggaggagaagccgcgggagcggaagacaggcccggagcc

SEQ ID NO: 162864 - RNA, 77 nt, Homo sapiens
ccaggagcgagagcacaggaaaagaaaaccggagaccagggcaacccagacaaagggccacaccacaggcgcaggag

SEQ ID NO: 162865 - RNA, 73 nt, Homo sapiens
ccgggagggcccagggcggggcccgagaagacgaccccgacgcaggccaggagccgcggacagaagccgagca

SEQ ID NO: 162866 - RNA, 76 nt, Homo sapiens
ggacagagcccccgaggccccagaacaccggggaaaccaaaaccagagaagccggaacccaaggccccaccagaaa

SEQ ID NO: 162867 - RNA, 66 nt, Homo sapiens
ccccccccccccaaggcaagagcaacgaaccaaagcaaaggaggccgggggaagacggaaaagaga

SEQ ID NO: 162868 - RNA, 79 nt, Homo sapiens
caccagagggcaagaaggcacagaaaggaagaccagcagaaggcaagcggcgggccaggcccccaaacggggaaaggag

SEQ ID NO: 162869 - RNA, 118 nt, Homo sapiens
gcaccgcccagaacagggcgcccgagacccccagcgcgccggaggagaacaagagcccgagccgacgacgcgcagaccaccgccaacgcagccccacagcccgcccagcagccccgga

SEQ ID NO: 162870 - RNA, 42 nt, Homo sapiens
gcgcgagccaagcgcgcgccgggccccacggcacgacaggag

SEQ ID NO: 162871 - RNA, 74 nt, Homo sapiens
cggaaggcgacccaccagggagagagaggaggcacaaagaaccccagagcgaggccgaagacccagaggacccc

SEQ ID NO: 162872 - RNA, 63 nt, Homo sapiens
ggagagcgccggcggagaaaaaggccggacacccaacagcacgcagacaaggcaccaacagaa

SEQ ID NO: 162873 - RNA, 78 nt, Homo sapiens
ggggcccggaccgcaggccccaagagagggagacaagccagccaaaggcccaaggcggcagccggggcggaaaccccg

SEQ ID NO: 162874 - RNA, 45 nt, Homo sapiens
gggggaggcgccacacgaccaccgcgccaaggggaaagccaagcc

SEQ ID NO: 162875 - RNA, 85 nt, Homo sapiens
ccagggaagcagccgaccagccgcggagccgggggcaggcccacccccccacgagcacaaaaaaccccacaccagccagaccaac

SEQ ID NO: 162876 - RNA, 78 nt, Homo sapiens
gcgcgagcggccgccccacgcgcgccgacagaagacaacgaagaaaggagcacaaaagaacaaacacacgagccaaaa

SEQ ID NO: 162877 - RNA, 72 nt, Homo sapiens
ggaccgagccccccaccggccggaaaaccagccaggccggggggggcacagagccccggaagacagccccca

SEQ ID NO: 162878 - RNA, 76 nt, Homo sapiens
aacaagagcccgaacacccaagcccagaaggacaaacggaggagcaagcacagacggccaaacacacaggaacgcc

SEQ ID NO: 162879 - RNA, 51 nt, Homo sapiens
caaaaagacccaacaaagccccggcgcaggaacacaggacggccgaacacg

SEQ ID NO: 162880 - RNA, 70 nt, Homo sapiens
acgcaaagccgggaagacaaagcacccaagcacaaaggagacagcacaaaaggaggccagcccggccgcg

SEQ ID NO: 162881 - RNA, 75 nt, Homo sapiens
gagccaagaccacagcagcacccaggagaaaacgaccgcaaaaagacgaggagaacgaaaaagaagccgcagaga

SEQ ID NO: 162882 - RNA, 64 nt, Homo sapiens
ggcggaaacaccagacacaacacacaggcacggaaacaggccgagaagaacgggagaagaaaag

SEQ ID NO: 162883 - RNA, 71 nt, Homo sapiens
aggggcagaggccaagagcccaacaccacccgagagccccaaggccagcgggaagcccgggagaccgaggg

SEQ ID NO: 162884 - RNA, 66 nt, Homo sapiens
aaagaccagccaaggccgccagcagcagccaggaggccggcaaccggcccagacagggccaacaag

SEQ ID NO: 162885 - RNA, 77 nt, Homo sapiens
cgaaggaggcagaggcacagcgcagccccgacaagggaccgggcgggccccgcaggaaacccccaccggcccacaca

SEQ ID NO: 162886 - RNA, 56 nt, Homo sapiens
caccaaaaaggggaaacccggcacaggagacgagggccagaaccgcccaaacgagc

SEQ ID NO: 162887 - RNA, 83 nt, Homo sapiens
ccgcgccccccgccgccgccgccgcgcgccaaagcgcgccgccccgggcaaaagacacgagaggcgagggacgacagagcaag

SEQ ID NO: 162888 - RNA, 71 nt, Homo sapiens
gagaaggaccaagaaccaggaccaagcgcaccagggcaagcaacagccacccagacgcaggcaacaccgga

SEQ ID NO: 162889 - RNA, 74 nt, Homo sapiens
ccagacaccccccccgcccagaccgcaaggagccccgggcgccaacgcgacacgggagcacacagcgacaccac

SEQ ID NO: 162890 - RNA, 80 nt, Homo sapiens
cgcagccacagcgaggagcgaggaaaaaagcagagggaaggcaacacgagcggaagaacacacaccgggaccgcgagcag

SEQ ID NO: 162891 - RNA, 81 nt, Homo sapiens
gccaagcaggaaggagaggggcaagaagaagagggaaagaaggcgcggacaagaagacagcagacggacgaagagagggaa

SEQ ID NO: 162892 - RNA, 76 nt, Homo sapiens
cagccccgcccggcccgcccccaagacgcgaccaaacggaccagacgcagggaacggagaagcccagggaaacaag

SEQ ID NO: 162893 - RNA, 76 nt, Homo sapiens
aaagaaaaacaagcaccggaaagagaaccccggaggcaagacaaagagagcagccacccagaaggcagaacagcag

SEQ ID NO: 162894 - RNA, 74 nt, Homo sapiens
agccggagcagacccagccgcaggcaaagcgaagggagcaacgaccccagcacacacacccagacagaaagaca

SEQ ID NO: 162895 - RNA, 73 nt, Homo sapiens
aaggacccggaagccacaaagcaaaacggcacgggagagggaggcccaagcagccccaaaaaacagacaaacg

SEQ ID NO: 162896 - RNA, 71 nt, Homo sapiens
aaagacagcccgcagcacgaccagcaggaacggacgggaaaagccagccggcacggccacaaccgaccgga

SEQ ID NO: 162897 - RNA, 86 nt, Homo sapiens
gcggaagcggagagcaacagcgcgccggccgggaggcccagcccccgcgcggccggaggccggagccccgagcaggcacagccggc

SEQ ID NO: 162898 - RNA, 46 nt, Homo sapiens
ggcccccagccagggaacgaacacaccccaacggaccaggagggag

SEQ ID NO: 162899 - RNA, 68 nt, Homo sapiens
aacccagaacacgggagaaaaaggaaaacgcggaaaaccgacacaacagggagcgaagaacagagccg

SEQ ID NO: 162900 - RNA, 61 nt, Homo sapiens
cgacaagacaccacggacgagagacaaacgccgaaggcccgccgccccggggcacgccagg

SEQ ID NO: 162901 - RNA, 74 nt, Homo sapiens
gagaaggagagagaaagggaacgggccacggggagggagagccaccacagagaaaggaacggcccggccagcgg

SEQ ID NO: 162902 - RNA, 48 nt, Homo sapiens
aagggccaaagaagggagagggccggccaagggcgacggaacccaccg

SEQ ID NO: 162903 - RNA, 81 nt, Homo sapiens
gcgggcggccacggaccggacccgcgggcccggcggcgcccggcagggcccggcccgccccccacccccggccccagggcc

SEQ ID NO: 162904 - RNA, 80 nt, Homo sapiens
gcgcggcacgaggcgggccgaggcgggaggcggcagaagcagccagaggagggcacaggcggcgcggagcgcgccgaggg

SEQ ID NO: 162905 - RNA, 84 nt, Homo sapiens
cgccccgcccgcgcccccggggccgcggagccaggaggcaggagcgcagccggcagagaggagcccgcaccagcagggaggagg

SEQ ID NO: 162906 - RNA, 64 nt, Homo sapiens
agcaaggagaggggaaaagcaacaaggcgacgaaacagaaggccaagagaggccaacagaggaa

SEQ ID NO: 162907 - RNA, 72 nt, Homo sapiens
accaacacaaaaaaaaccaacagccccccagggaccggggccagccaggggaacggggcgacagggaaagaa

SEQ ID NO: 162908 - RNA, 81 nt, Homo sapiens
agaacggcaaagacagagaagggagggcaagcagaaagcagaggaaaacgaacaacacccaaagccaaagaagaaacagcg

SEQ ID NO: 162909 - RNA, 69 nt, Homo sapiens
gacggcagacacggcgcagccggcaaaaaggcggcaaccggaaacaagaccgcgcacgggagcgcaagg

SEQ ID NO: 162910 - RNA, 73 nt, Homo sapiens
gacgcgccgagagcaaaaccgccggccggaccagaccggggggaaaggcgaggagccgcgggccaggcggagg

SEQ ID NO: 162911 - RNA, 72 nt, Homo sapiens
acaacggcagggcggcacccaacaaaacgcagaagcaaaggaacaaggcggcgggggcccagggggagcgaa

SEQ ID NO: 162912 - RNA, 73 nt, Homo sapiens
acagaaagagccgaaagaagacggggacagagagcgcagggcaccccagcacccagcaagaaccccggacggc

SEQ ID NO: 162913 - RNA, 73 nt, Homo sapiens
ggacgggaggggaggcaaagggaggaggaggaccggagaaggcggaggggggggggacacggagacgggaagg

SEQ ID NO: 162914 - RNA, 80 nt, Homo sapiens
gccagaggacagaggccagaccccaggcccgaacgcggacggcacgcagacgccaggcggccgagcacgccacgacaccg

SEQ ID NO: 162915 - RNA, 75 nt, Homo sapiens
agcacaccccagcacgacccgagagcacagagggaccacagagcaccagccgcaggaaccccccaccagccccac

SEQ ID NO: 162916 - RNA, 71 nt, Homo sapiens
acggaccagaggaaggcagcaccaggaagacaggggaacacccccagagagaggaacccaccaggaaacgg

SEQ ID NO: 162917 - RNA, 84 nt, Homo sapiens
gccccccggcgggagccccgcgacgcgcccggcccggagcccccagcgcagcggccgcgaaacgccgaagggaccaggcagacg

SEQ ID NO: 162918 - RNA, 70 nt, Homo sapiens
gggccaggaggacacgcgcagggcccacgacgagacaaccaacacaaccaggacaagccgaggaaaggag

SEQ ID NO: 162919 - RNA, 74 nt, Homo sapiens
aacagcggcccagggcaggcaagcaaaaagccagcccccccgcaagccgaggaccaaagcccgccaacccacgc

SEQ ID NO: 162920 - RNA, 50 nt, Homo sapiens
gccagcccagccccaacccccgcccagagacgccaaaaacaccgagcggc

SEQ ID NO: 162921 - RNA, 72 nt, Homo sapiens
gccaaccagaccagcgcacgggacggaggcacgcgagaaggggagggggagaaagaagaggaagaagccaca

SEQ ID NO: 162922 - RNA, 72 nt, Homo sapiens
caggaggagcaacacgggaccgaccacaaggccccacgagcggagaaacaggcaaggacaggcaagccggga

SEQ ID NO: 162923 - RNA, 74 nt, Homo sapiens
gaagcgcgcggcaggcgcgcgccgccccaggccgcaagacccagcgcccaaccgcccgggaacacagcacccac

SEQ ID NO: 162924 - RNA, 66 nt, Homo sapiens
cggggacccccgacgccaggcagcgcccccaaacgaaggaggaacacccgcagcgacaggaaacag

SEQ ID NO: 162925 - RNA, 84 nt, Homo sapiens
gaggggggggcgggagcagcgcagccccggaggaggaggcggaggccgaggaaccagaacccggcgaaagcaaaagcagagcgg

SEQ ID NO: 162926 - RNA, 75 nt, Homo sapiens
agcgcagaacagccccccgccacaacggccgcagggccgaggagacaggagaagggccagagaaggacaagaagc

SEQ ID NO: 162927 - RNA, 60 nt, Homo sapiens
aaccgaggccggccagaggcgagggccggccaaggggcaggcacgagaagagaagcccag

SEQ ID NO: 162928 - RNA, 83 nt, Homo sapiens
cgggcgagcggcgagccgaaaagcgagcgcgaggaaaaggcggcgggagggcggggagcagaaaccaccgccaggagacagca

SEQ ID NO: 162929 - RNA, 74 nt, Homo sapiens
gccagacgaggggcagggggagcggagacccggggcacgcagggacgggaggagcccaaaaggcagagcgagga

SEQ ID NO: 162930 - RNA, 74 nt, Homo sapiens
cacgggaccggagacggcaggacgagaacaaagaaccaggaggcagcaaggacgagcccaaggaggacacgaac

SEQ ID NO: 162931 - RNA, 84 nt, Homo sapiens
acaccggcggccccaccagcagacgcagccgagacaccagcccgaaacaccaccaaggagaagacagaggagccagaccaagag

SEQ ID NO: 162932 - RNA, 71 nt, Homo sapiens
ccccagcgccaccgccaggacagagggagcacagccaaaacgcccccagcccggccacgccgggccgggcc

SEQ ID NO: 162933 - RNA, 74 nt, Homo sapiens
gcggcgggaggggacccgacgcccgagacagacgagcagaaccacagcagcgcccaaggacaagccaagcggcc

SEQ ID NO: 162934 - RNA, 94 nt, Homo sapiens
gcggcgagccgaaaagcgagcgcgaggaaaaggcggcgggagggaaggacaaaaccgaaaagaggccaaagacccaaaaccacgcaagacgaag

SEQ ID NO: 162935 - RNA, 75 nt, Homo sapiens
accgcgccgacggcagcaacccagaacgccaggaggaccagagcgccacggccgggaccccgcgaggcggggggg

SEQ ID NO: 162936 - RNA, 65 nt, Homo sapiens
cggaaagcggcggacagccgaagcaaggaccgggacacccagaggcccgggaggagcggggacac

SEQ ID NO: 162937 - RNA, 77 nt, Homo sapiens
agaagcaagaaggcagagagccggggaggcccgaacaacaagggcccccacggagagagacgggaaggagcggcggc

SEQ ID NO: 162938 - RNA, 80 nt, Homo sapiens
gggcgggcccggcccgggggccgccccggcgagccgcgacggcgccgcccacggcgagggcagcggagcagaaaaggaaa

SEQ ID NO: 162939 - RNA, 83 nt, Homo sapiens
gaggacaccaaacacacgggaccgaaacaggccggggcacagcacagcgccggcgcaagcaggcaccccccgagcccagccca

SEQ ID NO: 162940 - RNA, 78 nt, Homo sapiens
agcaccaccccaggagcaagcaaacggagagaacagacaggagcaagccaggaccaacggcacaaaccccgaagagac

SEQ ID NO: 162941 - RNA, 74 nt, Homo sapiens
gagaaaggcccaccggccgggagggcccagggcggggcccgaggaaccgggaccaaagaagagaacagcaggaa

SEQ ID NO: 162942 - RNA, 79 nt, Homo sapiens
cgcacgaaacaagggaggccgcagcagcagggacacgaagcgagcgccgaggccccgggaccaaggacacgcagacccg

SEQ ID NO: 162943 - RNA, 73 nt, Homo sapiens
aaacgcaaacaagcggaagacacaaacagcagggagaagagacaacaagacagacagcacagagggccaagcc

SEQ ID NO: 162944 - RNA, 74 nt, Homo sapiens
aacagcagggaccacccaggcgagacagagggaaagaaccaccaccaacgagacacaaaaagaaaagagagggg

SEQ ID NO: 162945 - RNA, 80 nt, Homo sapiens
caagacggaaccgccgagacagaccggcaacgagcaagcgaaccagccacccgaggaggcacccccggaagcagccccaa

SEQ ID NO: 162946 - RNA, 63 nt, Homo sapiens
agaggaaccggagaccagaaaagacgagggaagaaaccaaaaacgcccagccgaagccaagca

SEQ ID NO: 162947 - RNA, 53 nt, Homo sapiens
ggagcagaagggaggcccaagacccacaacaaaagacccccgagcccccagcc

SEQ ID NO: 162948 - RNA, 78 nt, Homo sapiens
caaagacaacgaaagagacagcacaaaaaggggggggcccagggggacgacaaagagaggccacaaggacaccagcaa

SEQ ID NO: 162949 - RNA, 81 nt, Homo sapiens
ggaaagcacgggcggaacacaaggcccgaggaaacacacaccagaagaagaggaagacccccgcggaaggaacccacgccg

SEQ ID NO: 162950 - RNA, 74 nt, Homo sapiens
ggccaagcccccccaaccccccagagcggccgccgcaaaaagacggggaggagacgcgagagcagcacgggggc

SEQ ID NO: 162951 - RNA, 82 nt, Homo sapiens
ggccacgacagcccgaagagggaaaggcagcaaacgaaccccaaaacccacagagaaaagggaaggcagcagagggcccaag

SEQ ID NO: 162952 - RNA, 73 nt, Homo sapiens
aacacgcccagaacagcggaacagcggaaccggagacaggcgcgaagcaaggaaaagaacagaaccaggccag

SEQ ID NO: 162953 - RNA, 81 nt, Homo sapiens
ccaggaagggcgacgagaagccccaacagcacggcgggccccagcccgggacagaagagcgcgaaaggaacaagaaaagac

SEQ ID NO: 162954 - RNA, 80 nt, Homo sapiens
cgcaccagagcgggggaagggcgcccggaggcccgcaagcccccccggagaaaaaggaagcgaacggacgccgcccgaac

SEQ ID NO: 162955 - RNA, 70 nt, Homo sapiens
agccgaccagggaacaacgggagaaacagcaacgccacacacccccacggcgagacccagagagccaaga

SEQ ID NO: 162956 - RNA, 67 nt, Homo sapiens
cccaaccgccaccccgaggccaagcaccagaaggccaacacaaccaaggggaaacagcaaaacacga

SEQ ID NO: 162957 - RNA, 87 nt, Homo sapiens
cagccacccgacaggagccccgccgccgcgcaccgcccgccccgcaccgggcggaaaacaccccaaaagccaaaagggaaaggaaaa

SEQ ID NO: 162958 - RNA, 71 nt, Homo sapiens
accaacacgagaagaagccccacacggacagggaccaaagaacccaccgccccgaggaaacgagaagccca

SEQ ID NO: 162959 - RNA, 86 nt, Homo sapiens
agggacaccgcagagaggcagagagccccagcccccagcagccgacaggaggcccgcaagagcaggcaggcagccaccccagggag

SEQ ID NO: 162960 - RNA, 53 nt, Homo sapiens
ccgcaagaacaagacccggcaggagccccagggaggagagaccgccgggcgca

SEQ ID NO: 162961 - RNA, 76 nt, Homo sapiens
caaggagaaaggcggcgggcgggcgcgaggggacgcgcacggcgggccggccaggagccggggcgccaaaaaagaa

SEQ ID NO: 162962 - RNA, 76 nt, Homo sapiens
ccaccggcgggaggaacaaaagggacacaaaagcaaccgagagggaaacaaccacgcgaaaaggagacacagcaca

SEQ ID NO: 162963 - RNA, 62 nt, Homo sapiens
gaacccagcacggaaggccaagccgggccaggagaggagcccaaggcaacacgccagggaag

SEQ ID NO: 162964 - RNA, 39 nt, Homo sapiens
agcacaaacaacaaggcggacgaaagaaagaaggagcac

SEQ ID NO: 162965 - RNA, 74 nt, Homo sapiens
cggcaggacgaggacgaaggccgagcgacggaagcccggacgaagaaaaaccagaaacacaagaaaggaaaaaa

SEQ ID NO: 162966 - RNA, 104 nt, Homo sapiens
caaacgcagaaacagagccacgggggggacgcagccaaaagaaacaggcacggcagacacaccgaccagaggaaggcgaacccgccacgcagcaggagcagggg

SEQ ID NO: 162967 - RNA, 72 nt, Homo sapiens
ggcaggaaggacagcacgcaaggccagggggaaccagggagggccccccggagaagagccaagggacggacc

SEQ ID NO: 162968 - RNA, 80 nt, Homo sapiens
ggcccgcccccggccagcccccacaacggggaccaccgccccagcagacgcggaagccccagagccaaaaggggcaggac

SEQ ID NO: 162969 - RNA, 86 nt, Homo sapiens
cgaacacccgggcagggggcaggaggaggacggcagcaaccgcagcagcagcccaggcaaaagcagaccggaaaacccaccggcaa

SEQ ID NO: 162970 - RNA, 63 nt, Homo sapiens
aagagcacacggaccccgcgagagaagaagagcgaggacagggagcaaggaggacagcagaac

SEQ ID NO: 162971 - RNA, 80 nt, Homo sapiens
cagccggggggaaggccaagaggcggcgggagaccccaaccgcagagcgcccgacagcccaagcacaaaacaacccaaaa

SEQ ID NO: 162972 - RNA, 55 nt, Homo sapiens
cccagacccaccagaggcaggccaaaccagaaaggggacagcggcgggcagggag

SEQ ID NO: 162973 - RNA, 68 nt, Homo sapiens
gagcccgagcccgccccagccccggccccagaagagggcggacacggcgacaagaccgggacgagaag

SEQ ID NO: 162974 - RNA, 53 nt, Homo sapiens
ggaagaagcccacgcacaggaaccggccgaaccagaccggagcaggggcagcg

SEQ ID NO: 162975 - RNA, 57 nt, Homo sapiens
cccggaagaaaggcagaagaccggaagaagaagccaggaaaaaaagagaaacaagcg

SEQ ID NO: 162976 - RNA, 75 nt, Homo sapiens
agggccagcgggaccagagccaaagaccccaagacagaccggccgccccacgaaagaccacaagcgcccggaaac

SEQ ID NO: 162977 - RNA, 79 nt, Homo sapiens
ccaaccaaagcgccaaagaaaagccaggcagcgagcgggagcagacagggaaccgaaggcagcagaaaagaaggccagc

SEQ ID NO: 162978 - RNA, 56 nt, Homo sapiens
gaaaacaaggcgcagcgaagccaaagaaacgccaaccgcccaaaaacccagagcag

SEQ ID NO: 162979 - RNA, 82 nt, Homo sapiens
agcaggaccggggacaagcgcgcagacgcagggacacagaagcgcccagagcccagaccaagcaggacgccgggagccacca

SEQ ID NO: 162980 - RNA, 71 nt, Homo sapiens
gcggagcgagcgccccagaagcacaccgcgccgcgcagggcgcgcgcagaacggaaagaccaggagcaggc

SEQ ID NO: 162981 - RNA, 37 nt, Homo sapiens
ccgaggagcgggaacagggaacccggcgacgggggca

SEQ ID NO: 162982 - RNA, 83 nt, Homo sapiens
gaagaagcccaaaggaccacccacccaggcgccaggaacacaggcaaggccggacaggggccacaccggaacccagaaccagg

SEQ ID NO: 162983 - RNA, 68 nt, Homo sapiens
aggaggggcaggcggccaagcaggaaggaaaggaagggacgaagagaagaacccaacaccgcaaaggc

SEQ ID NO: 162984 - RNA, 68 nt, Homo sapiens
caagcaagcggcccacgaggccaggaaagcccccgaccgagcggaggcgaagaggccgaaaagcgcac

SEQ ID NO: 162985 - RNA, 44 nt, Homo sapiens
ggcagcgcccccaaacgaacccacggcaaccaacgccgaagccc

SEQ ID NO: 162986 - RNA, 73 nt, Homo sapiens
aggaggccgacagccggagaggagagccccggccccgccccccagcgcgcccggccggggcaggaccgaccag

SEQ ID NO: 162987 - RNA, 80 nt, Homo sapiens
ggccaccaccggccaacagcagacccgaaggacaacgggcggcgggacacagaagagcccgaagaaaggcgggcaacgcc

SEQ ID NO: 162988 - RNA, 77 nt, Homo sapiens
gacgcaggggggaaccacagcgacaagaaagagacacgggaagacgagggaaaggggaagagacccgaaaggaaaga

SEQ ID NO: 162989 - RNA, 114 nt, Homo sapiens
ggcaagcggggcgaggagacacgagggcggaccacgccccacccaacaagacgacgggccagggaaggaccagcaggaggcagcccggggacagggaagacggcgggaggaccc

SEQ ID NO: 162990 - RNA, 62 nt, Homo sapiens
cgcccccgccgccgcgcacaaccgcacggcagaacacgaagagagggccggcacccgccgga

SEQ ID NO: 162991 - RNA, 68 nt, Homo sapiens
aaaagacgcacgcaagaggcaaagaagaggacccagccaggaaggacacccagcaagagacaggacca

SEQ ID NO: 162992 - RNA, 73 nt, Homo sapiens
cgaaagcacgaagaaacccaaaggacagaaaaaccacgggaaacagaagacagccgaaccaagggcgacaacc

SEQ ID NO: 162993 - RNA, 78 nt, Homo sapiens
ggacggagacagccagacaggcaccaccaagagaccaaaaggaacagccggcggagccccagcggcccgacacagaag

SEQ ID NO: 162994 - RNA, 73 nt, Homo sapiens
ccccggggccggagcgccggcccacacccccaggcacgcgcagagacccccacccgggaagacacggaccccc

SEQ ID NO: 162995 - RNA, 83 nt, Homo sapiens
aggaagcagcagaagagaagaagaagcaggagaacgaaacggagccagagaaggcagaaggcaccggcacggaccaccccaac

SEQ ID NO: 162996 - RNA, 53 nt, Homo sapiens
gcgccccgggagcacaggccccgaagagcgaaagcgccaccggaggccgagcc

SEQ ID NO: 162997 - RNA, 78 nt, Homo sapiens
ccgacaccgcgggccgccagacgggaaggacaagaggagaagggaggcaacagagaaagaaggcggcagccacggccc

SEQ ID NO: 162998 - RNA, 77 nt, Homo sapiens
aaaccagcccggaagggaaagggagaaacaggcccgggaggagcggggacacgaggaccccccaaaggccccaacca

SEQ ID NO: 162999 - RNA, 74 nt, Homo sapiens
aacggcgggaacccagacgcacaccccgcagcccggacagacccccgccccgagggaaaagacacacacaaacc

SEQ ID NO: 163000 - RNA, 88 nt, Homo sapiens
gggacgggcggcgcggcccgcgcgcagccggccggcgccggaccgaaggcgcgaccacgacgagaagcgggggccgcagcggggcacc

SEQ ID NO: 163001 - RNA, 69 nt, Homo sapiens
gacgaaaggcaaggccaaaagggagagccacagccccaagcggccgaagagggagaaaacacaggggcc

SEQ ID NO: 163002 - RNA, 79 nt, Homo sapiens
aagagcacagccggaagaggaggagaaaggcaggccagccacccccaggagccagggagccagacagagaccgcagagg

SEQ ID NO: 163003 - RNA, 55 nt, Homo sapiens
agaagccacaccacggcccagggagacagaggcaggaacagacagccccgggaac

SEQ ID NO: 163004 - RNA, 68 nt, Homo sapiens
accgaccggaccaacccagagacccgcagaggagcccaccgggcaacgacagaggaagaaccaagacg

SEQ ID NO: 163005 - RNA, 84 nt, Homo sapiens
ggcaaggccacagaccacaacaccaggaggaccagcggacgacccccgggacagaacagcagagaacacaacacaggacaagca

SEQ ID NO: 163006 - RNA, 58 nt, Homo sapiens
gaaaaaagaaggggaaggccccaggcccaaggcagcacccacgcagccacagaggccg

SEQ ID NO: 163007 - RNA, 70 nt, Homo sapiens
gggaagcgggacaacgggggacacagaaagcgccccaagccccggcgcaggcgccgggacaagcgggcgg

SEQ ID NO: 163008 - RNA, 77 nt, Homo sapiens
ccagaaaccaagaccaaggaagacgaacgcaccccagagccgacccccaccgcaagaggaaggcgggggagaaggag

SEQ ID NO: 163009 - RNA, 84 nt, Homo sapiens
ccgggaccgcccggacccggccgggagaagcagcagagaaagacaagcagaccggaagaccgacggaagaccacaccccgaggg

SEQ ID NO: 163010 - RNA, 36 nt, Homo sapiens
cggaaccaagaacaagcacgcagcagaagaagggcc

SEQ ID NO: 163011 - RNA, 75 nt, Homo sapiens
gcaaaccacgaggacagagaagagagaagccaccagcaaaacacaggaagaaacgccaggaacacaagaaaagac

SEQ ID NO: 163012 - RNA, 69 nt, Homo sapiens
ccccagacacgggcgacacgaacaacaagcagaggaccaaagcccgacagagaaaggcacaacccagac

SEQ ID NO: 163013 - RNA, 42 nt, Homo sapiens
gccccgaggagcgggaacagcacagagacccccacaccaggg

SEQ ID NO: 163014 - RNA, 72 nt, Homo sapiens
cgcacgcccaacgaggaagccagcaaggaagaaggaaaaaacccagagacgagcagaccggggaaccagcac

SEQ ID NO: 163015 - RNA, 66 nt, Homo sapiens
ggagaacacccccccaggaggcgaggagagggggcgcagaggcgcccccaccccggccaagggccg

SEQ ID NO: 163016 - RNA, 63 nt, Homo sapiens
cgggagggggaaggggccggagggcagggggcagggcggcagagggcggaagagcgcgggagg

SEQ ID NO: 163017 - RNA, 77 nt, Homo sapiens
ccggcccgaggacaccgacaccagcaggacgcgagagcggaaagggcaccgacccacacgacggaggcacccgggac

SEQ ID NO: 163018 - RNA, 44 nt, Homo sapiens
gaagaggagagcagcaagcgggggagaaacgacggaaggaaaac

SEQ ID NO: 163019 - RNA, 80 nt, Homo sapiens
agagcaacgccagagcccagggcccagaggaccccagccgcgcccgggagagcaaggccaccaggaacacaccgagccca

SEQ ID NO: 163020 - RNA, 86 nt, Homo sapiens
caagacgcaacaaaaacaaggagagcccagcaacggacccaacagagcacgcaaaggggcgaagcagcaaaacacacagccccccg

SEQ ID NO: 163021 - RNA, 76 nt, Homo sapiens
gcaagaagaagcaccaagcaccagagaaccggacccgggaagaagccggagcgcccaggcggcccacaggagggga

SEQ ID NO: 163022 - RNA, 73 nt, Homo sapiens
gaccggcggccaccgagcgagacacgcggaacaaacgaaaaagaagaggcccagcacaagcggaagccccagg

SEQ ID NO: 163023 - RNA, 65 nt, Homo sapiens
gcccagggaaccaccaaccccaggacagaaagcgggacacaagcaggagcacagaccccgaaaag

SEQ ID NO: 163024 - RNA, 56 nt, Homo sapiens
gcgaggggacccagagaagaaacaacacagggaaacacacgaaggaacccaccaac

SEQ ID NO: 163025 - RNA, 73 nt, Homo sapiens
cccgggagcgacccgcgcaaacaaacagaaggccaggccagacggcaaaaaggcagaacaacggaggcaaaca

SEQ ID NO: 163026 - RNA, 59 nt, Homo sapiens
ccacgaaccaaaagggacggacaaaggaacaggaccagccacaacacagcagcccccag

SEQ ID NO: 163027 - RNA, 75 nt, Homo sapiens
gcaggagcacaacaagaggccagcccagggcacccgccccgggccaccaccacagaccagacggcccgccccggc

SEQ ID NO: 163028 - RNA, 80 nt, Homo sapiens
agcgagcccccgacgaggagcgcggcgagacacggccagggagagcggcagaggacagaagaggagggaaggaggcgagc

SEQ ID NO: 163029 - RNA, 73 nt, Homo sapiens
gaaaacagggcgaggacgggagaacagggcaggaaaaggaaaagcagcagcaacgggaacgaagagagaaagc

SEQ ID NO: 163030 - RNA, 78 nt, Homo sapiens
cgaggggcggacgcggccgaccgcgcgcgccaccgccgagaaccaccacccgccaggcgcgcggccacaccccggcgg

SEQ ID NO: 163031 - RNA, 51 nt, Homo sapiens
caccaggccaaagaaagagaaggcgccaacggggagaaggaggcacaagaa

SEQ ID NO: 163032 - RNA, 57 nt, Homo sapiens
ccacagaagacgccgaggagggaaaaagagagccacaagaagaggacagcagcagac

SEQ ID NO: 163033 - RNA, 68 nt, Homo sapiens
cggcaccacccagccacaggaaggaaacgaagaggccacacagaggaaccagcacgaagaaaccagag

SEQ ID NO: 163034 - RNA, 98 nt, Homo sapiens
acggaaaccaggaaaccgcagaagaaaaggacgaaccccagaaaacaggggggggaaggcgcaaaaaaggaaagacccacgacccaacagagaaccac

SEQ ID NO: 163035 - RNA, 54 nt, Homo sapiens
cggacccccgcggcgcgcagcccagcaggaacacaagaggacagcgaagccccg

SEQ ID NO: 163036 - RNA, 82 nt, Homo sapiens
cagcgacgcaccagcaagacggcaggcgagagccgacccaggccgccggccccacaggaccgcaaaacgggacaagcccgca

SEQ ID NO: 163037 - RNA, 69 nt, Homo sapiens
gaccccgcggaacgcccaccgcggagagcagcacgaccccagcacagagcgaccagaaagaaacacggc

SEQ ID NO: 163038 - RNA, 74 nt, Homo sapiens
ccgcccacggccggagcgcacccggaggagaggacgagcccgaacggacaagacaaccgcagaaccacacaagg

SEQ ID NO: 163039 - RNA, 69 nt, Homo sapiens
cagagaagacccaagacaaaaaacgccagggaggccacaagcgaggcccgagccaacgaacaacgcgag

SEQ ID NO: 163040 - RNA, 69 nt, Homo sapiens
gcagagcggggcggccacaagcaaaggggccagaagagaccaagaggaccccagaccaagaaggaaacc

SEQ ID NO: 163041 - RNA, 80 nt, Homo sapiens
cggagagcaggcagcgggggggcgagcccgaaacgaggcgggagcagcacagcgcccccgaggagccaaggcacaaaacg

SEQ ID NO: 163042 - RNA, 72 nt, Homo sapiens
aaagcacaaaagggaaagagacggagaaaagaagaacacgcccaaaacgagacgaccgaaggcaccggaaca

SEQ ID NO: 163043 - RNA, 86 nt, Homo sapiens
acaaaacccaggcgcggaagcaaggaaagaccggcagagaccaagccaagggacaaccggcgccccccggggcccagcggccgggc

SEQ ID NO: 163044 - RNA, 81 nt, Homo sapiens
aagaaacggcgcgcccagaagaagggaaggcgcgaggaggaaaggaggacgaggagccgacaggaggcccaggcacaagga

SEQ ID NO: 163045 - RNA, 76 nt, Homo sapiens
gcaccagaagcggccgaggcggcaaagaaacggacaggaccgaagccgaagcaccccgcggagcaagaggcagagc

SEQ ID NO: 163046 - RNA, 79 nt, Homo sapiens
agcccacacacagggaaaaaggagcagcccgggcaccacagaaaagagagccaggagagcagcaagccggccaggcagg

SEQ ID NO: 163047 - RNA, 53 nt, Homo sapiens
gcagggcgcccccggccggcagaagaaaggagaaaaaaacaagagcaacaaag

SEQ ID NO: 163048 - RNA, 66 nt, Homo sapiens
acagccgcacccgcgccccagcagaaagcaggagcccggaaaggagaaggaaaagacggcaggagg

SEQ ID NO: 163049 - RNA, 83 nt, Homo sapiens
gcggcggcgcccaggcacccggcccggagaaacagcaccaggacacgcccgccggcgccgacaccaggaccagcaaagaagcg

SEQ ID NO: 163050 - RNA, 73 nt, Homo sapiens
aaaacacggcacaaaacaaggaaagagagggcccggccacaggaggggcgccaggccgggccccccgccccgg

SEQ ID NO: 163051 - RNA, 66 nt, Homo sapiens
accagcgagggccacacaggagcccggacggcacaggggaagacaggagggcggcaaagagcgaca

SEQ ID NO: 163052 - RNA, 67 nt, Homo sapiens
gcccggcgccccaccccaggcgaccggagagaacagaaaaaaagcggcccgggaccaggaaagacag

SEQ ID NO: 163053 - RNA, 75 nt, Homo sapiens
gggagaaggcgcaacgcggcgcacggcccgccacgggccccgcagccgcgcccgagcgcccgagcagggacagcg

SEQ ID NO: 163054 - RNA, 65 nt, Homo sapiens
gaagaaaacagaccaacgaaaggcccagacaacacggaggccagggaaaagacggagccacaagc

SEQ ID NO: 163055 - RNA, 73 nt, Homo sapiens
gaaacacacggcacagagccagagcaccagagaaaagacacagacgacccagaacgaaggaaggaaagacgag

SEQ ID NO: 163056 - RNA, 82 nt, Homo sapiens
cgaagaaagccagggccaggcagagggccagcgagacagaccgaaacccaaagaaaaggagcgcgcccaacgagagaaagac

SEQ ID NO: 163057 - RNA, 66 nt, Homo sapiens
gaaggacgagcagcgagagaagaaccgggagagaacccagcaaaagccaccccaaacaggaacagc

SEQ ID NO: 163058 - RNA, 35 nt, Homo sapiens
gaaagggagcgcggcgacaagaaaagaagacgcca

SEQ ID NO: 163059 - RNA, 56 nt, Homo sapiens
agggaacccggcaccgccccagcgccaaaagcccagcaagagcgggacacagcgga

SEQ ID NO: 163060 - RNA, 60 nt, Homo sapiens
ggaaggcacgaagacaccaggaccagagaagaagcagaagaacgggaaaagaaacaagaa

SEQ ID NO: 163061 - RNA, 72 nt, Homo sapiens
gacccaagcacaccagaaagacaacacgcggggccgggagacagagaaacacgaaagcagggagcagaaaaa

SEQ ID NO: 163062 - RNA, 77 nt, Homo sapiens
accaggagagcgagggagcgagcgggcagcgcgggaaccaagaccaggacaaagaagacccggagagacaagccgga

SEQ ID NO: 163063 - RNA, 78 nt, Homo sapiens
gaggagggaaacacagcaaaggaaaggccgagggggacggcaagagcacacaccccggaccacggcccgggacacccg

SEQ ID NO: 163064 - RNA, 78 nt, Homo sapiens
cacgggccgagccagaagggaaaaagcgcggaaaccgcggccggcacaaaaccggcacacaaaacccgaaagcgcgca

SEQ ID NO: 163065 - RNA, 60 nt, Homo sapiens
aaagacaagacgcacgggaaccaacagggacccagcagggaccaaccaagaagaaacaac

SEQ ID NO: 163066 - RNA, 86 nt, Homo sapiens
ccccagcagcagggcaaccccgggggcagcagcaacgccggacgcccacgcaagcagacagggaggccgcacagaggaggagcacc

SEQ ID NO: 163067 - RNA, 87 nt, Homo sapiens
gacaggccaaagccagccgggccaggaccaaagccgggacccgagaacagagagaggcgcccaaagagcaacggggagccaagacag

SEQ ID NO: 163068 - RNA, 72 nt, Homo sapiens
gaaaacagcaagagccggaagaaaggaaagaggacacacggagaaaagaaagccagaaggaaggaagcaacg

SEQ ID NO: 163069 - RNA, 77 nt, Homo sapiens
ggggagcaaaaccaacgccggccggagcagcagcccgagaaagccgagagaaggacagaaagagccccaagaccagg

SEQ ID NO: 163070 - RNA, 76 nt, Homo sapiens
cacaacagggcggcaacaggggcgagaaagggcccgccgccccggggcacgccaggcaaccaagacaacaagccaa

SEQ ID NO: 163071 - RNA, 82 nt, Homo sapiens
cggcaagcggagaccccgcgagcggcgcgagcggcagcaggacaccccggcaaggccagcaggcaacacgggagaaggaacc

SEQ ID NO: 163072 - RNA, 63 nt, Homo sapiens
ccccgcggcaccacccggcaccagaaccagaccagagccaaaacccagcagcaccaaggccgg

SEQ ID NO: 163073 - RNA, 72 nt, Homo sapiens
ccaggaaggaggaggaagcgagcagacaaggagaggggggccagcagcaagaacagagagagcagagagagc

SEQ ID NO: 163074 - RNA, 73 nt, Homo sapiens
acgacagaaaacgcagcaggcaaacgggcaaaccagcggggccgcggaaaaaaagcgcagaaaaggcacagaa

SEQ ID NO: 163075 - RNA, 71 nt, Homo sapiens
cgggagggcgacacgcgggccgcgggccggcaaaaacggacgcgccggcacaagcgacgacaaggaaagcg

SEQ ID NO: 163076 - RNA, 72 nt, Homo sapiens
gagagagacgagagaaacccacgaagacgcgcggagaaagagaccaccgagcaaccagccaagggaccgcag

SEQ ID NO: 163077 - RNA, 75 nt, Homo sapiens
caacaaaaagaaagcgcgaaggcaaagcagaggaagaacagagccggccagaacacacagaaaagggccaaagga

SEQ ID NO: 163078 - RNA, 79 nt, Homo sapiens
agccggcacccaccagggcggcgacggcggcgcgaggaccgaccgggcccgcggacgaagaaggcacccccccgccggc

SEQ ID NO: 163079 - RNA, 73 nt, Homo sapiens
cgcgagaggaagacacccgaccgacaaaaggacagaagagcccaagaccagaaaaagcgcgcccaagcgcaaa

SEQ ID NO: 163080 - RNA, 84 nt, Homo sapiens
cgagcagaggccgcgagcgacgcggcgccgagccgggaacgaccggggaagaagaggaacacccggaggaacgacaaggggaac

SEQ ID NO: 163081 - RNA, 51 nt, Homo sapiens
aacaaccagaaagcaaggagccggacggcccccgacccagacggccacagg

SEQ ID NO: 163082 - RNA, 77 nt, Homo sapiens
gcagaagaagaggaaagacagaaccagccaacaaaagggaagaaagcagacagcaccgacagagagggcaagacaag

SEQ ID NO: 163083 - RNA, 52 nt, Homo sapiens
cgcggagcggagcggcaggacacacaggcacaggcgaccgaagccaccgaca

SEQ ID NO: 163084 - RNA, 81 nt, Homo sapiens
gccgggcaccgaggagcgggccagccgcgcggcgggaagcggcggcggcggcccagcgccaagagacgaaaaggggaaagg

SEQ ID NO: 163085 - RNA, 76 nt, Homo sapiens
acagcgccacggcgggccgcgggaggacaccacccacagcggccaagggaggccgccagccgaggcgaggagcggg

SEQ ID NO: 163086 - RNA, 33 nt, Homo sapiens
ccccaccaagccgaggagacggccggcgaccca

SEQ ID NO: 163087 - RNA, 76 nt, Homo sapiens
aagaaggcggccaggccaaccgaaggcaagcggcagccacacccggagaaggagccgcccagggacgaagcaccca

SEQ ID NO: 163088 - RNA, 61 nt, Homo sapiens
cggggacgcccgcgcgacgagcaggggcggcggcgcagacaccacgccacccaagagagag

SEQ ID NO: 163089 - RNA, 85 nt, Homo sapiens
cagccccgcggaccagaccaggccgcggcccgggccgagaacacggggcgggccagaacacacggacgcgggggggcccccccgc

SEQ ID NO: 163090 - RNA, 77 nt, Homo sapiens
cgagaaaaccagagaccaagcccagagaagagaagcacgggccagcccaaggccgagacgcaccagagccggaccgg

SEQ ID NO: 163091 - RNA, 52 nt, Homo sapiens
agagcgacgcgcagcgccgccaacaccagaagcagccgaaacgaaccaagaa

SEQ ID NO: 163092 - RNA, 79 nt, Homo sapiens
ggggccgccaggagcccgaccgggagaggacaagaccacgagccaggggggggcccagggggacgacaaagagaggcca

SEQ ID NO: 163093 - RNA, 69 nt, Homo sapiens
gccagggcagagccccaggcgcaagcgaaccagggagagcacaaccggaaaaagaagaaggaaaaggac

SEQ ID NO: 163094 - RNA, 73 nt, Homo sapiens
acgccgcacaaggaggccaccgaggcaaggaggaacaaggcgccacgcccccgggccaaacagcgcagccgag

SEQ ID NO: 163095 - RNA, 61 nt, Homo sapiens
ggacccaaagcaagccaaggagacggcaacacagggcagcaaccagaagggcaaagagcaa

SEQ ID NO: 163096 - RNA, 76 nt, Homo sapiens
cccaagcccagaaggacaaacggaggagcaagcacagacgcacaccgacagagaacccaggccaacacacagacag

SEQ ID NO: 163097 - RNA, 76 nt, Homo sapiens
aagcaagaaggcccggacacagcaaaccgggccacagggagcacacggacagggggaccaggcagcacagacgaaa

SEQ ID NO: 163098 - RNA, 78 nt, Homo sapiens
aggcccaggccgaccggcgcgcggaggagcgagaagcggcccgaaaggagaaaaagcaaagaaaccagaggagcgaga

SEQ ID NO: 163099 - RNA, 75 nt, Homo sapiens
gccgcggcgcgccggccggcccgcggcgccgcgggagcgccgggccccgacgcggggacgagagccccggcacaa

SEQ ID NO: 163100 - RNA, 72 nt, Homo sapiens
gcaaagcgcgaggaaacaaagaccagacgaaaggcgcccgggaagggcagcggaacgcgccgacgccgcaac

SEQ ID NO: 163101 - RNA, 50 nt, Homo sapiens
agagaacgcaagagacgacaacgacgaaagacccacagaagcgcgccggg

SEQ ID NO: 163102 - RNA, 59 nt, Homo sapiens
cgagcgcgccaggccgacagccgcggccgggcccgagagccaaaaggaaaacggagaag

SEQ ID NO: 163103 - RNA, 78 nt, Homo sapiens
gccagggaggcgaggcccgcaccggaaggcaaaagcagaccggaaaacccaccggcaagaccacacccgaggggagcc

SEQ ID NO: 163104 - RNA, 73 nt, Homo sapiens
ccccccgcagcacccagccggccacggcacgcagcacgggggcaggggccgacccagaacgccagcgccgcaa

SEQ ID NO: 163105 - RNA, 76 nt, Homo sapiens
cccacagaccgaaaagaaagcagccagaccggaggaagacggccgaggaggagaccgcccagaggcacaaggaccg

SEQ ID NO: 163106 - RNA, 65 nt, Homo sapiens
ggaggcgcgggcggagcggaaagaggaggagaggggaggaggcgaaggggcaccagcgggcacac

SEQ ID NO: 163107 - RNA, 54 nt, Homo sapiens
acaaaccaagccaggaccaggaccgggcagcggccggccagcaaccaaccagag

SEQ ID NO: 163108 - RNA, 79 nt, Homo sapiens
cagcagcccaccagaaggcgaggcccagcggcggcccccccagcacgcacgcaggaaagcgggcggaggaccagaaaca

SEQ ID NO: 163109 - RNA, 82 nt, Homo sapiens
aaaagccaagaggaggacagcgcacacagcaagcacgagaagggacaaagacaagaagaagcaaaagagaaggaaagcggag

SEQ ID NO: 163110 - RNA, 55 nt, Homo sapiens
agccgaggcgccgaaggaccgacgcccggaagagcgacccgacaagcaccccgga

SEQ ID NO: 163111 - RNA, 54 nt, Homo sapiens
cgaggagcagccaccccgggagccccgcccacgccaagacaggaacacagagag

SEQ ID NO: 163112 - RNA, 78 nt, Homo sapiens
gccaaagcacaagaaagaacaggaccggcagcacagcagcagaggagaaggcagagcccccccaggcagaagcccgag

SEQ ID NO: 163113 - RNA, 56 nt, Homo sapiens
gccaacaccaaggcagcgacagcgacacggccaagacccaggaaaagccgaagcag

SEQ ID NO: 163114 - RNA, 67 nt, Homo sapiens
aaaggagaacaccgcaaggagaccgggacagcccggggcaagaaggaaagcaagaacagaagaagca

SEQ ID NO: 163115 - RNA, 73 nt, Homo sapiens
caggagcaaaagcaaccagccaaggcaggaaaagaggagaccccaagggaaacagaaaccgaaaagggaagga

SEQ ID NO: 163116 - RNA, 82 nt, Homo sapiens
aaaccgccagaacgcagaaggaaaccaaccaaaaagagagggaccggaccagaacagccacacgaacaacccgaggacggag

SEQ ID NO: 163117 - RNA, 54 nt, Homo sapiens
gaggaggcagccaagccgagccgccacccggcagggaaggggaacaggaccggc

SEQ ID NO: 163118 - RNA, 69 nt, Homo sapiens
acaaaagcaaaagcgcgagaacacccccgcggggaccggaacggggagcgaaccagagcagcgaaacgg

SEQ ID NO: 163119 - RNA, 77 nt, Homo sapiens
agcaagaggcgaccgggcaggcagaaagaccacagcaagaccacgcccccagccgggggaccaggccgaacgacccg

SEQ ID NO: 163120 - RNA, 67 nt, Homo sapiens
agggaaggagaacaccacccggagggccaaagcccgcagaagcaaacaaagacgacacagaccagcg

SEQ ID NO: 163121 - RNA, 80 nt, Homo sapiens
gcgggccccggacccggagacaccccgcagcacagccgcgaccaagggacgaacagcggggacgccccagcagaccgccc

SEQ ID NO: 163122 - RNA, 68 nt, Homo sapiens
gcaagacccccacagacgaggaggcgaggggagagagaagcacacgacgggagcggggaagacgacaa

SEQ ID NO: 163123 - RNA, 32 nt, Homo sapiens
aaccccgacaggaggaagccccgacacagaag

SEQ ID NO: 163124 - RNA, 85 nt, Homo sapiens
ggacgccggcccgcgcgcgcaccccgcggacgccacagcgcagccaggacaaaaccaggcagaaccaacacgaacccaagcacaa

SEQ ID NO: 163125 - RNA, 99 nt, Homo sapiens
cgcccgccgcgcggagcgcccccgcgccccgcaccagagcggggcaccgagccgggcggagggggccggggagcacgcacccaaagagcccaaagaccg

SEQ ID NO: 163126 - RNA, 38 nt, Homo sapiens
cgggaccgggggcgcagcaccgacaagcagaccggaag

SEQ ID NO: 163127 - RNA, 83 nt, Homo sapiens
gcgggggaagccccacgggccccccccccgcagcccggagcccgcaggacccggcccagagaggcggcggcgccaagcggaag

SEQ ID NO: 163128 - RNA, 91 nt, Homo sapiens
gaaacaaaagagcacaaaggaaaacgaggaaagcccaggagacacggcaaggaccaagaaaggcccagggaccaaagcccggacaaggccc

SEQ ID NO: 163129 - RNA, 71 nt, Homo sapiens
acagaaacaggcagcagaaacggcaagagaaggccgcaagaaaaaggccccccccccggaggcagccggcc

SEQ ID NO: 163130 - RNA, 59 nt, Homo sapiens
cggaagccaaggcacaaagcgacagagaaacggcaggaagcccccgaggaaagaacaaa

SEQ ID NO: 163131 - RNA, 68 nt, Homo sapiens
caccccaagccaggaaaagccggcgcccccccccaacacacgcgacacgaagaagagaggagggaacc

SEQ ID NO: 163132 - RNA, 78 nt, Homo sapiens
gcccagagaggacgccgcggggaaagggggacccgagcccgacagcccagccagggccaacgcgagccgacagagccc

SEQ ID NO: 163133 - RNA, 124 nt, Homo sapiens
gccggccaggccgggcccggaggacaggaccgcgcgacggccggccgacccgggccggccgcgggagcagaaacagagagaggacccagccaaggcagagaaaggcaaaacaaaggaaaggcag

SEQ ID NO: 163134 - RNA, 73 nt, Homo sapiens
aaggacaacgagaagaaccggaagccgacccggagccgagcaaccagagacggggcgacggggagaggcaggc

SEQ ID NO: 163135 - RNA, 77 nt, Homo sapiens
agaggccgcgcgagcggaaggccccccaaaccgagccgaaagggcagaacagggggaggcaaggaggccacggggcc

SEQ ID NO: 163136 - RNA, 69 nt, Homo sapiens
gagggagcggaacggaaggagcgcgccaagaggcacaaaaaacaccaaacaagaaaaaaacacaacagg

SEQ ID NO: 163137 - RNA, 68 nt, Homo sapiens
aaaccagaaaaacgggggagagccacggaagccgacagacaaccagggagcagggacggagaggcagg

SEQ ID NO: 163138 - RNA, 80 nt, Homo sapiens
cgaggacccagcacaccgagggaccccaggcccgcgggcagaggcggagagaccaccccgaagaagcgacagaagagggg

SEQ ID NO: 163139 - RNA, 68 nt, Homo sapiens
gcaaaaaaaagccagcagcgacagcccgacaacgcaaagaccgaagcggcagccaaaaccgggcaccg

SEQ ID NO: 163140 - RNA, 58 nt, Homo sapiens
agcaaggcagaagaggccgggaagagggaaaggaagggagggcaggaaggccaggcga

SEQ ID NO: 163141 - RNA, 80 nt, Homo sapiens
caagccaagacagaaagaagaaggacggggaagcccgaaccaagccagcaagacacccaagaagggaacgcacagcgaag

SEQ ID NO: 163142 - RNA, 73 nt, Homo sapiens
cgggagggaccacaaaccaaagcgcgagaagaacccggcaaaaggaaaggcgggggcaaacggaggccggcag

SEQ ID NO: 163143 - RNA, 60 nt, Homo sapiens
gggcggaccggcgcccagaagccccgggaggaagaagacggcacgggacccccagcacag

SEQ ID NO: 163144 - RNA, 79 nt, Homo sapiens
gcacgaaagcaccaacgagacccgccacacgaggcgcacccacgacgcgcacaccaccggcagaccggcgccacagcac

SEQ ID NO: 163145 - RNA, 54 nt, Homo sapiens
agcccccgaggccccagaacaccggcaggaaacccgcaagagaagcacccaaaa

SEQ ID NO: 163146 - RNA, 73 nt, Homo sapiens
gaaggaggaccagacaagaaggacagccgagcccccacagaagagggaaacagaacaaccggccacacccaag

SEQ ID NO: 163147 - RNA, 79 nt, Homo sapiens
gcgaggcccagcgcacagccggcgcgcgagccgcccaagcgcagccgcaccccagccccccacacaagaacggagcacg

SEQ ID NO: 163148 - RNA, 51 nt, Homo sapiens
aggacacagcggaccagggaagaacgaagagcaaagaaaaagccagccgag

SEQ ID NO: 163149 - RNA, 78 nt, Homo sapiens
agacccaaacaaaaagacacgaagaggaggaagcccaggcgaccggaacgcacaccaccgagggaacagagagcagac

SEQ ID NO: 163150 - RNA, 79 nt, Homo sapiens
agcccaagaccaagcaaacagaaacaacccacggagccagagaccaagagaaccaggacccgacggagccgccgcaccc

SEQ ID NO: 163151 - RNA, 56 nt, Homo sapiens
cggcggacacacagacccccaccaagcaggcaaggaacgcaaagaaaccaagaggc

SEQ ID NO: 163152 - RNA, 82 nt, Homo sapiens
ggacccaaaggaaagggcgggcggaacgacccagaaccggcgagagaggaggcagagagccccgcgacgagagagacagaga

SEQ ID NO: 163153 - RNA, 82 nt, Homo sapiens
agcgccgaggcgagaacgcacaggccgcgcagagcgggaccacccgggcacagcaggcacggaggcacagcgccgaggccca

SEQ ID NO: 163154 - RNA, 84 nt, Homo sapiens
agcccccgccgcccacagcccggggccgagcacgaggcacaggcagagggggaccagcagcgggaagcagccacgcggcaggcg

SEQ ID NO: 163155 - RNA, 65 nt, Homo sapiens
ccagcggggcgcccaggaggcaccacagggcagaacgacagcaaccccagccccagccaccacgg

SEQ ID NO: 163156 - RNA, 61 nt, Homo sapiens
gggaagcaggacgcgccgcgccccaagaccgcgaccgcacaagcagccgccagcggaacca

SEQ ID NO: 163157 - RNA, 41 nt, Homo sapiens
cgccgagccgcgggcccgcagggcggggaagccaagaaacc

SEQ ID NO: 163158 - RNA, 67 nt, Homo sapiens
agcgcaacgagcaaagagcggacccagcaggccccacgccaagaggcgagcccacacaaggggaagg

SEQ ID NO: 163159 - RNA, 76 nt, Homo sapiens
gaacggcacacgcgagcggacacgccaccacaccgacccacgacaagaacggagagacgagcggcaggaaggcgag

SEQ ID NO: 163160 - RNA, 90 nt, Homo sapiens
gaccagggaaagacgcagaccgagacgcaaggcccccgaagagaaagaaaccggaacagcgggaagcaggaccagagaaagcgccgcaac

SEQ ID NO: 163161 - RNA, 84 nt, Homo sapiens
ccacgcgggcccgaggcgcaccaagggcgaaggagccggcccaagccgagggaccaaggggccgggaggcgccggagaccaagg

SEQ ID NO: 163162 - RNA, 70 nt, Homo sapiens
acgaagacaccacaggaaacaaaaagacagcccaacaaggcgggacgacaacaccacagacacccccaaa

SEQ ID NO: 163163 - RNA, 69 nt, Homo sapiens
gccccgaaagaaagccgcgaacccaaggcagacacaacaccacaagcagaaggggggcagaaagaagag

SEQ ID NO: 163164 - RNA, 72 nt, Homo sapiens
accggaacccgaaggagcagggagggcgaacgccagaaaacaccccgaggggcccacaggaagagagaaaac

SEQ ID NO: 163165 - RNA, 62 nt, Homo sapiens
cagcgacgacagacccgagcgacaggaaacccagcggcggcagaaccagccggcacaaagcc

SEQ ID NO: 163166 - RNA, 66 nt, Homo sapiens
cgggaccgcggccaacggggaacgaggacgcggacgcgaaggcagcggggccggagcacagcccac

SEQ ID NO: 163167 - RNA, 71 nt, Homo sapiens
agggcagcaacgcccacggaccgagaaaagcccgggcaaacagccacgaagcgacccgcggccccagcacc

SEQ ID NO: 163168 - RNA, 64 nt, Homo sapiens
gcccagcggcagcagaaagagcaagccgcgagaaggggccagcaaagacggagcgggaagaagg

SEQ ID NO: 163169 - RNA, 75 nt, Homo sapiens
gaccggcccgggcaggcgcacgccaccgagacccgaccggaccgcccccgccgccacagcccaggcccagacaac

SEQ ID NO: 163170 - RNA, 80 nt, Homo sapiens
cggcccggggccgcggacgaggaccagcagaggccagcacgagaacccagccgggcagacgcccgaaccggcagaaaccg

SEQ ID NO: 163171 - RNA, 79 nt, Homo sapiens
ccggcgaacggcgcagggaggcgagcacacagagaggggaagggcagcagcagcagagaaccaaacccaaagcgaacac

SEQ ID NO: 163172 - RNA, 83 nt, Homo sapiens
cgaggcgcacaagcaggacgaccgcggccggaccacgggaaggggccccgcagagcccgcccccccggcagccagcccgccca

SEQ ID NO: 163173 - RNA, 58 nt, Homo sapiens
cagacacgacaccagcaccccggccccggcccgcccggacggcaggaccagggccggg

SEQ ID NO: 163174 - RNA, 62 nt, Homo sapiens
cgacgccgaccaggaaaaaaccggccaaggcgagaggccgccggaaacaccaggaggaggga

SEQ ID NO: 163175 - RNA, 74 nt, Homo sapiens
caccaccccgcgcaggagagaacacagggcacgggaggccgcgcagggagaagagcgggaagagggccacaggc

SEQ ID NO: 163176 - RNA, 75 nt, Homo sapiens
cggaaggggaacaggcgcaacaaagcccccacaccagacagccaaccacggagaaccacggggaccaagaagcga

SEQ ID NO: 163177 - RNA, 79 nt, Homo sapiens
gggaagaaggacggggaagacaggggaaacacagaggaaaacgagggagaggagaaaggacacggacgacaccgagccc

SEQ ID NO: 163178 - RNA, 61 nt, Homo sapiens
cgcaagcggagagccaggcaaggaccacacgcaggggagcgcgccccccagaaccgcccac

SEQ ID NO: 163179 - RNA, 75 nt, Homo sapiens
agccacgggggagaagggggcccacgagaagagcaggcgacgggggagagggagacagcggcgcaaagaagggac

SEQ ID NO: 163180 - RNA, 76 nt, Homo sapiens
aaacgggggagaacaaagcgaggccagagaaagagaagcggcacccccaggaagcgcgccgccccggggccccgac

SEQ ID NO: 163181 - RNA, 53 nt, Homo sapiens
aaagcagccgggaaaggagccggccggcggcaaagaaccggcagccaggaacg

SEQ ID NO: 163182 - RNA, 87 nt, Homo sapiens
gcgaacgaagagcaccgggagcggcgaagaggcaccggaggaggggagccgccaccaaaagcagacggaaaacccacggggaagacc

SEQ ID NO: 163183 - RNA, 73 nt, Homo sapiens
aacagcgggcaagacagacaggcccggagagaaagcgcccaaccacgggggagaagcccgacagagaaaggag

SEQ ID NO: 163184 - RNA, 73 nt, Homo sapiens
gccaaccggaaaaggagaccaagaaacagcagagggagagccaggaccggaaggaggcggccaaccagggcac

SEQ ID NO: 163185 - RNA, 72 nt, Homo sapiens
gaccacacacaccaggaaaaaggacgagcaggacagggagcagaaggccccagaaacagcagggagaagagg

SEQ ID NO: 163186 - RNA, 65 nt, Homo sapiens
agcacgcaacagagccaggaaaagaccagaacagaccacggaagggggcacccgaggaggaagag

SEQ ID NO: 163187 - RNA, 87 nt, Homo sapiens
gaagcagccgacaggcggaggcccccgggcaagaggcgcaaacaagccaacccaggaggaaaaacgagaaacgaaagaggagcacca

SEQ ID NO: 163188 - RNA, 58 nt, Homo sapiens
gggggcgcacccccggagcgaagccgaacagccagggggccgaggcccgggaaccgcc

SEQ ID NO: 163189 - RNA, 86 nt, Homo sapiens
gcggagccggacgcggggggcgggaagagccggggccgggcgacaggagcagcaccgccagagagccagagggaaccgcagccgaa

SEQ ID NO: 163190 - RNA, 80 nt, Homo sapiens
cgagaagaagacaagagggaccaagaaaggcccagggaccaaagcccggacaaggcccgagcaccaggaccgcagaaggc

SEQ ID NO: 163191 - RNA, 76 nt, Homo sapiens
cgccaaggggagccgggcacagggagacaacggggcacaagaagaccggaaggaagagcgcaggaagagggcaaga

SEQ ID NO: 163192 - RNA, 81 nt, Homo sapiens
cccacgcgcacgccgggggcgaggagacaaaaaagcccaaggccacagcccacaccagaagcaaaagcaccaagagcgaga

SEQ ID NO: 163193 - RNA, 87 nt, Homo sapiens
cggcgccgggcgggagaagagcggagcagggcggagagggcgaccgagcgggaacagcccacggcgaccagggccaggccaaggagg

SEQ ID NO: 163194 - RNA, 56 nt, Homo sapiens
cacgagcccgcacgagagggagggaccggggcacgggccccccagcccgcggaacg

SEQ ID NO: 163195 - RNA, 78 nt, Homo sapiens
gaggagcagacggccagagacacaaggccccggcagcagcagcggaacgcaaaaacaagcaggcccagagccagggca

SEQ ID NO: 163196 - RNA, 75 nt, Homo sapiens
cggagaaggaaaaagaaacggaaccccaacagagaaaaaacacaaccaaaggcccgagagagaaagggaaagaag

SEQ ID NO: 163197 - RNA, 65 nt, Homo sapiens
caaccgacacagaagcacggagcccaaggagcgggaccgcaaaccgcccgcagaccagcacgcga

SEQ ID NO: 163198 - RNA, 77 nt, Homo sapiens
gcaggcgaggacggcggaccccgcggcgggaggagccgccccgagaacagggaagcggaaccaaaaaaagacaaaaa

SEQ ID NO: 163199 - RNA, 75 nt, Homo sapiens
aaaacccagaacacgggagaaaaaggaaaacgcggaaaaccgacacaacagaacgcggaaaacaagaagaagaca

SEQ ID NO: 163200 - RNA, 79 nt, Homo sapiens
cccggcacgagcggccgcggccaggcgacgccacccaagacacaaacggcgacacagggccgcgcggccgcagcgacac

SEQ ID NO: 163201 - RNA, 81 nt, Homo sapiens
agaaaagcccccaaaagcagcacaggacccccccgcggcggcgaggcccgagccagagaggaggacccgcgcccagggacc

SEQ ID NO: 163202 - RNA, 77 nt, Homo sapiens
gaaagagcgccgggacagggggaggaaagcaccgaggcacaacagagggcccagaggagacaggggaaccaggagga

SEQ ID NO: 163203 - RNA, 63 nt, Homo sapiens
accagccgcccggccggcgaagacagcacaggagagaccgcacgcagggccacagcagcacga

SEQ ID NO: 163204 - RNA, 73 nt, Homo sapiens
aggaggcgcggagagcgcaaacgaccgaagaacggcaaagagaaaagaagcagaaaaaacaggaaggagaaac

SEQ ID NO: 163205 - RNA, 81 nt, Homo sapiens
ccaaaggcccagaggggagcagagggccgcgccgggacacaggcaaaaccagcgggggcccaagccccaaggggaagaaag

SEQ ID NO: 163206 - RNA, 57 nt, Homo sapiens
gcggaaggcagcgcccagcagcgcagggagcgccgacaggaagggcacagaagaacg

SEQ ID NO: 163207 - RNA, 41 nt, Homo sapiens
cccccaagagcggaacagggcgcgcacagcccgaccaagac

SEQ ID NO: 163208 - RNA, 86 nt, Homo sapiens
ccgccaaaaccggcgcacagagaagaaggggggggggacaaagcgagaccacagagacacggcgggacagcacgggccaggggagg

SEQ ID NO: 163209 - RNA, 82 nt, Homo sapiens
accaagacacggaccacgaggacggaagagcagagagcacagggagagaacagggaggcccacacgcccccagagccagacc

SEQ ID NO: 163210 - RNA, 75 nt, Homo sapiens
agagaccaggacagcccagcgaccccgggacaagcaagggagggaagcggcgcgggcccccccacccccaagaac

SEQ ID NO: 163211 - RNA, 79 nt, Homo sapiens
gagggagcgagcgggcagcgcgaggggggcgggccgagcacccgcaggccccgcagaggcgcccacagcggacggcagg

SEQ ID NO: 163212 - RNA, 71 nt, Homo sapiens
aacaagcgaaaaggaaggcggaaaaagcgcaagcccgaccaggagagaccaacccaaccaaaggagaagcg

SEQ ID NO: 163213 - RNA, 51 nt, Homo sapiens
ggccaagcgaggagccacggccgccaaggaccggagagaggaaaccaaaaa

SEQ ID NO: 163214 - RNA, 54 nt, Homo sapiens
acagcgcgcggcccccacaccacacagagagcgacgcagaacaaaaaaggaaac

SEQ ID NO: 163215 - RNA, 72 nt, Homo sapiens
ccagaacagacacaaggcagggcaagaacccgccacacaaggcgaacagagggcagcaggagcacagacgaa

SEQ ID NO: 163216 - RNA, 66 nt, Homo sapiens
agaccaggcccgccacggaggcgcgcgcaaagcccgcagacaaaaaaggcacacacacccgcagga

SEQ ID NO: 163217 - RNA, 54 nt, Homo sapiens
aaaaaccgccacgccggaacagcccaaagccggggggaccgcggggccaaaaag

SEQ ID NO: 163218 - RNA, 94 nt, Homo sapiens
agagaacccagaagccacaagaagaacgaagaagcggaggccagacagacacaacagccaagcggagcgacaagagcgggaccgacaaagaaag

SEQ ID NO: 163219 - RNA, 68 nt, Homo sapiens
gacagcagcccaccaagcacagacaagcaaggcagagcaacagggacacaagcaagaagaaagggacc

SEQ ID NO: 163220 - RNA, 55 nt, Homo sapiens
gagcgaaagcgaaaaacagcgaccagaagccgaagacacaaagcgcaagaggcag

SEQ ID NO: 163221 - RNA, 85 nt, Homo sapiens
gcccggggcccagcagcaaccagccacccgcccccaagaaggaagcacagggccggccggaacagagaaggagggggcagagcac

SEQ ID NO: 163222 - RNA, 80 nt, Homo sapiens
acgccagcggagaacgcggcaaagcgaggcggaccggaagcgagcaggagcagagcggaagacccaccagaaagagcaaa

SEQ ID NO: 163223 - RNA, 88 nt, Homo sapiens
gaccaccggccaaggaaaccccagggcccgcccaggacccccaagccgccgcggacgcagagaaagccacagaggccccgcagagcga

SEQ ID NO: 163224 - RNA, 73 nt, Homo sapiens
cggaggagggcacagcagggccaaagaagagaccggacaagcagacagcaaagcaagccaagagggcccagcc

SEQ ID NO: 163225 - RNA, 54 nt, Homo sapiens
aaggaaaaccgacgagaaacgaccccaaacaagcccaagagcaaagggcaaggg

SEQ ID NO: 163226 - RNA, 70 nt, Homo sapiens
gcaagcaaagcaacccagaccaaggaagaggcgaacaagacacggccgagacgccacaagccccaagaac

SEQ ID NO: 163227 - RNA, 69 nt, Homo sapiens
ggacacccggacacggcaagggggccacagacggaagaaaacggaaaacagaagagacaccaccgggac

SEQ ID NO: 163228 - RNA, 88 nt, Homo sapiens
gcgaaggcagcgccgacggcagccggcaccgacggcggaccgacccgagccgggcaccgccgaccgaaaccgcaaacacacgacagag

SEQ ID NO: 163229 - RNA, 76 nt, Homo sapiens
aagcaagagccagacccaaaggacccaaagaacaagccacacgcccacaaggaagaaggaaacaggaaaggcgaaa

SEQ ID NO: 163230 - RNA, 71 nt, Homo sapiens
aaaaggccaagaaggcagaaccgagggcaccggagggaagcgggccaccgcccggcccccaagacggcccc

SEQ ID NO: 163231 - RNA, 78 nt, Homo sapiens
ccagccccgagagcaggaacagccaccgcagagccaccggcaaaggaaggagcaggcggcgcccgggcgcagacccgc

SEQ ID NO: 163232 - RNA, 79 nt, Homo sapiens
aggggagccaccagccccccgcgaaggaagaccgagcacggacaggaacacacccaacccccaggcaaagcaaacaacc

SEQ ID NO: 163233 - RNA, 74 nt, Homo sapiens
acacacaagaaggccacccaacacacagcggacaaaacagggcgacgcaacagcacgaggccccgacaggcggc

SEQ ID NO: 163234 - RNA, 72 nt, Homo sapiens
aaaaccgcccaaggaacaggcacagagggaccacgaaaaagggaagggacgcaaaaaggaagccccacaagg

SEQ ID NO: 163235 - RNA, 67 nt, Homo sapiens
gaccacagaaacaggacaggccgccagggggacagaaggagcaggcaaaagcgccaaaacaaccccc

SEQ ID NO: 163236 - RNA, 81 nt, Homo sapiens
cacaagacgaagagggcccagccccaccaggcggggaagagccaagacccaaacacaaccagcaaaagaaaccaacagagg

SEQ ID NO: 163237 - RNA, 69 nt, Homo sapiens
gaggcagccagcagggggagaccgacggacacagaaaagcccccacgggccgggccgggcgggacggga

SEQ ID NO: 163238 - RNA, 74 nt, Homo sapiens
cggaggggaaacacgccgggaggaagagaagccaaaacaaagacagggaacagccaaaaggagccccccaggaa

SEQ ID NO: 163239 - RNA, 74 nt, Homo sapiens
gggggcgagaaggcgggaagccgaaggcagccacaggcggaagcccgagacgggaaccaagaggagaggacacc

SEQ ID NO: 163240 - RNA, 75 nt, Homo sapiens
caaggaaagaagcacagcgacaagaagaggacgaggggacgcaaacccaacaagggcacgcaggcacagagagca

SEQ ID NO: 163241 - RNA, 73 nt, Homo sapiens
gcaagagccaaccgcgcaaggaaaagagaagaagaaaccacacgggccaaaaaccagggagcaccagacagca

SEQ ID NO: 163242 - RNA, 70 nt, Homo sapiens
gcccgaggaaggcaagacccgagaggcgcgcaggggggccagcgcaccaagcagaggaaggagccaggcg

SEQ ID NO: 163243 - RNA, 74 nt, Homo sapiens
ggggcgcagaccgggcaagaccacccgcaagcacgcggcccccagcccggccacgccgggccgggccccccccc

SEQ ID NO: 163244 - RNA, 69 nt, Homo sapiens
gggcgcgcaccgccgcccccccagacaagaggacaccgcggaggaaggacaggcaaccacagagagagc

SEQ ID NO: 163245 - RNA, 81 nt, Homo sapiens
gccgcggagggagaggcgcagagcgagggcaggagaaaaggagcgccccacagcaaggcgggcaggagggcgcacgcccac

SEQ ID NO: 163246 - RNA, 73 nt, Homo sapiens
gggaaccggccacggagagcaccaccggaaacacggcaccgggggcggaaaagcagaaaggaaagggaagagc

SEQ ID NO: 163247 - RNA, 35 nt, Homo sapiens
accggccaccagcgcaccgcgacgacagagcagcc

SEQ ID NO: 163248 - RNA, 77 nt, Homo sapiens
agcagggcacggcgacacgcagagaaggccgaaaggaaaggaggagcacgaccagcgcgaaaaccaaggagcaggaa

SEQ ID NO: 163249 - RNA, 69 nt, Homo sapiens
agcgacgagcaagacgccaggccgcagcgggagacggcacaggacacaaaccaggcccacccaccaccg

SEQ ID NO: 163250 - RNA, 85 nt, Homo sapiens
ggcaacagcaagaggcggcccacaccggcagaacacagcagggcggaggaaaggcagggacacggacagaaacacggccaggccc

SEQ ID NO: 163251 - RNA, 78 nt, Homo sapiens
agcagaccaccgacagcaccccaggaacccaaggaccgcaaagaaaacccagagaacaccacccgaagagacaccgag

SEQ ID NO: 163252 - RNA, 74 nt, Homo sapiens
cggccgccaagagaagggcacccgcacggccggcccggacaacagagaagcaaaggccagaaacagagaccacc

SEQ ID NO: 163253 - RNA, 55 nt, Homo sapiens
ggccagaccggagcagcggggacagccacgaaccgacggggaccccaagaggaag

SEQ ID NO: 163254 - RNA, 92 nt, Homo sapiens
agcagaaccacgccagacaagacccagacggcgaacagacagaaggagaaaggaggaaaaacagccagaaccagcgggacgacggcgggacg

SEQ ID NO: 163255 - RNA, 68 nt, Homo sapiens
gggcaagggccacggagccaccccccaggacacacacggggacgcccaacagccaaaagaagacgacg

SEQ ID NO: 163256 - RNA, 75 nt, Homo sapiens
aggggaagggaagcccccagaacgggacgaaaggaaagcacagggaccccaggaccgcggcaggaaagcccgcag

SEQ ID NO: 163257 - RNA, 74 nt, Homo sapiens
cagaaacaccgccgagaccagcccaacaggaccaggagcgggagagggccaggccagaaaggaggcccacagcc

SEQ ID NO: 163258 - RNA, 85 nt, Homo sapiens
gcggagcaagaggcggacaccccggacgaaccacaggaagcgcggggcggcggcgaaaggacgaaaaagcggggaaggggggcaa

SEQ ID NO: 163259 - RNA, 90 nt, Homo sapiens
cccgcgcccccaagcagccgagcccgcggccggagagcggaggagaggcaaccgcgcccgggagaagcccaccacgcaacgggacggcgc

SEQ ID NO: 163260 - RNA, 79 nt, Homo sapiens
agggccacgcagaagggcaggagcagggccggaggccaagcccgcagagcagacagacagcgaacacggaagccacgaa

SEQ ID NO: 163261 - RNA, 64 nt, Homo sapiens
ggcaaacaagcaggacagcaagacccaaagaggacaaccagagggaaaaaacaaaggcagcacg

SEQ ID NO: 163262 - RNA, 78 nt, Homo sapiens
ggagaagcgcgcgggcacgccgcggccacgcgccggccagcgaggggcccacggacaagggcacccacaaaggcgggc

SEQ ID NO: 163263 - RNA, 75 nt, Homo sapiens
ccacacaggcccagacccagaggaagagaagagaaaagggaaggcacggaggaagcccgagaccacgaggcagag

SEQ ID NO: 163264 - RNA, 59 nt, Homo sapiens
cggcggccgcccggggccgcgggaaggccgaccgacgccgcgaacggccgagcgaccag

SEQ ID NO: 163265 - RNA, 84 nt, Homo sapiens
gggcggcagcgggagggcgcgcggccgagcggaggcggagcggcgccgagaacagcaacaaacaagcgcacgcacaagaccaag

SEQ ID NO: 163266 - RNA, 106 nt, Homo sapiens
cgagcgaggaggcccgggagcgccgagcgcgccgccgccgccgccagaacaaccgggcgccgacgagacggggccaggccgagggcccgcccggccccaggagaag

SEQ ID NO: 163267 - RNA, 71 nt, Homo sapiens
gcaagaaaacagaaacagcaaaaaagaaagaccacaacaagagcacgggcccagacgcagacaaacgagaa

SEQ ID NO: 163268 - RNA, 84 nt, Homo sapiens
agcggagagcgagcggcaacccggagaacacgaccaacggccccaaaaaccaccggcaagaagaagagcaggaagaacaaggga

SEQ ID NO: 163269 - RNA, 81 nt, Homo sapiens
cggcccaccaacaggaacagggcagacgagcggaggacacccaacccggacagcaaggccacgggacgggaaccgaagcga

SEQ ID NO: 163270 - RNA, 66 nt, Homo sapiens
cggaacggcaacaaccaaccagcaggcccagacagacagcacgcaggggcgaaggagaaagaaaca

SEQ ID NO: 163271 - RNA, 74 nt, Homo sapiens
ccgcccgaaagagcgcaaaaagagccccaacagagcaggagaggaaaagaaggacccaagcgggacacgaaagc

SEQ ID NO: 163272 - RNA, 96 nt, Homo sapiens
gcaaaaccaacgccggccggagcagcagcccgagacaagcagaccggaagaccgacggaagaccacaccccgagggagcccaggacaccacgagaa

SEQ ID NO: 163273 - RNA, 74 nt, Homo sapiens
cggcaacccacacaagcgaaggcgcgcaccggaagcaccagcgaggaaggaacaaccgagaaccagacaaaaaa

SEQ ID NO: 163274 - RNA, 55 nt, Homo sapiens
cgcggggcaaccgccacgagacaccaaggaagggcgaaagaggaagaagaaagac

SEQ ID NO: 163275 - RNA, 76 nt, Homo sapiens
gacgcagccccggccaaacggccagacgccgacgcgaccagcagagacggcgacacgggcggaccacaaacccggc

SEQ ID NO: 163276 - RNA, 44 nt, Homo sapiens
ccaaaggagaaccgcaggaaaggacagagcgggagccaccagcg

SEQ ID NO: 163277 - RNA, 65 nt, Homo sapiens
caagcagcacacacacagacagaaaaggcagagacgacccggcaagagcgaccaaagaacgaaac

SEQ ID NO: 163278 - RNA, 75 nt, Homo sapiens
agccaagcgccgcccggccgcgacgaggcggagacacggggagaggccggggagagaggaagccggaggccagac

SEQ ID NO: 163279 - RNA, 64 nt, Homo sapiens
accgacgagccgcagggcggagagacaccacagacacaccggaagcgagcacagaccccccaaa

SEQ ID NO: 163280 - RNA, 79 nt, Homo sapiens
agcgcgcccggcccgccccccgcaacgagaaccaagagagaacccaccgcaagagaccaaaggccaagagcaccgcagc

SEQ ID NO: 163281 - RNA, 80 nt, Homo sapiens
ggagaggcagggcgcgagggcgggggcagcggcaggccccccaccgaagacaagcgagagcggcaccaaaggcgacacaa

SEQ ID NO: 163282 - RNA, 81 nt, Homo sapiens
cgggaacagccagcaaaggcaggggaggaagccacccgagaaaggcgaaaagcgaagacagccccgcggaaggacaaaagc

SEQ ID NO: 163283 - RNA, 83 nt, Homo sapiens
gcgggcacccccgacgcaccaccagccaaaggcgcgcaggccgccgaaagaacacgggcagcggacacccagcccgggaacca

SEQ ID NO: 163284 - RNA, 68 nt, Homo sapiens
gaagaagaagaccacaaaaaagagacccacagccagcaacaccaccaaagcccaggagaggacaaaag

SEQ ID NO: 163285 - RNA, 77 nt, Homo sapiens
cggagagcacagggcccaagaggggcagggaccgcccaagacacgcgaagaggaagaaacgagaacggcaaaaggaa

SEQ ID NO: 163286 - RNA, 71 nt, Homo sapiens
caccgcgagggacaaagaccgaaagaaaaaccgcgacaagacaggaccacaagacgccagaacacaagaag

SEQ ID NO: 163287 - RNA, 82 nt, Homo sapiens
gggaaaccgggcgcgcggaggaagcgaccaaggagaacagaagcgcgccaggcgccagcaagaaggcagggaggaacgccac

SEQ ID NO: 163288 - RNA, 114 nt, Homo sapiens
caccagcacccgccgggcacccgaggcggacgagaagagaacacaccggggaagggcaccgggaaaagagaaccgccagcaagagcgcgcacgcaaacgggagagccggaaacg

SEQ ID NO: 163289 - RNA, 80 nt, Homo sapiens
ggaaacccgggggcagcgggccgaccaacccgaaaacagcaggcaagaacggaagcacgggcggaggaaagcacaagcag

SEQ ID NO: 163290 - RNA, 65 nt, Homo sapiens
aacggcgacagacaagaggcgaaggaaacaccccccagaggagcgaggcgagaaaaaccaggaac

SEQ ID NO: 163291 - RNA, 73 nt, Homo sapiens
gacccaacaaccacaaagcggaagagacccccccagcgacccagaacagaagaccaggacccaaaaagccccg

SEQ ID NO: 163292 - RNA, 100 nt, Homo sapiens
cagaacagcagccgaaaacccccaccaacccgccgagccagggccccgacaagggaccgggcgggccccgcaggaaacccccaccggcccacacagacgc

SEQ ID NO: 163293 - RNA, 75 nt, Homo sapiens
ccacccgcggacacgcaaggggccaagaaggccgggcgccaccccaaaccaggaaagacaggaccacaaccagaa

SEQ ID NO: 163294 - RNA, 75 nt, Homo sapiens
ggagaggcgacagggacaacagaacaaaggaagggcgcgcacaggcggaacccggcggccagagagcagaaaaag

SEQ ID NO: 163295 - RNA, 81 nt, Homo sapiens
gccaccccgcccccgccccccccgccgcaccagggaggcggaccggcggaggaggcgggagcccagcccgagagccgggcc

SEQ ID NO: 163296 - RNA, 59 nt, Homo sapiens
gacaaaagccaagaggaggacagcgcacacagcaagcacgaggccccgcgagaccggcg

SEQ ID NO: 163297 - RNA, 77 nt, Homo sapiens
aagcaaagaaccacggaagaagaaggaaggaaaccagagaagaagagagacgggaccccgagagcagcgagaaagaa

SEQ ID NO: 163298 - RNA, 38 nt, Homo sapiens
acggagggccagaacgcgcggaaaaggaacagaagagg

SEQ ID NO: 163299 - RNA, 75 nt, Homo sapiens
ccgaggacgcgagccgccagccccgggacggcagacagcaaagcagccagagaaacagaaacagcaacgggggaa

SEQ ID NO: 163300 - RNA, 57 nt, Homo sapiens
acagcacggcggggccgcccagcgcaagagaaagccaaagcagaacaagaagccgcc

SEQ ID NO: 163301 - RNA, 72 nt, Homo sapiens
agcacccccagcgacacccgcgcccggagggcgaacgcggcaaggccacaggcaaggccggacggaggaaga

SEQ ID NO: 163302 - RNA, 68 nt, Homo sapiens
cgaccgagcccaggagcgccacgcgcggaaggcagcgcccagcagcgcaggagaagaagcagggcaac

SEQ ID NO: 163303 - RNA, 111 nt, Homo sapiens
agcggaccggcccagaggacacgaccgagagggacacggagaccgggagcaagccccgggaaccaggaccccgggagggcgggacacccaggaggaagggggcagcggacc

SEQ ID NO: 163304 - RNA, 111 nt, Homo sapiens
gccgcaggagacgagaggacgggaccaggcgaagcggccgagcaggcgagcgaacgacggcccggcgagcgaccgccgggggaacgcccgagcggagcagcaggagcggcg

SEQ ID NO: 163305 - RNA, 73 nt, Homo sapiens
aaacagcaagaacccaaaagggaaagaagccaaaaagaggcccggaacgcaccggaaaaacagacacccaaaa

SEQ ID NO: 163306 - RNA, 64 nt, Homo sapiens
aggaagcccaacccggcgcgaaacaggagcaaaaggaacccggcaccagccgggcaaaaaccca

SEQ ID NO: 163307 - RNA, 69 nt, Homo sapiens
ggccaaccaaggcgggacagggcgggaggggacgaaggaagcaagcaaggcaggcgaccaaaaggaaag

SEQ ID NO: 163308 - RNA, 54 nt, Homo sapiens
gccgccccacgagcgggaggcagggacgagaagacggaacaagaaaggaccagg

SEQ ID NO: 163309 - RNA, 73 nt, Homo sapiens
ccaaaccggaaaaagaacgccaaaacaacacaacagaaaagacaggacccaggaaacagacacaagccgaaga

SEQ ID NO: 163310 - RNA, 71 nt, Homo sapiens
ccgggggaaaagaacgaggacagggacaagcgcacagcggagaaagcagcgcggccaggaggcgggaaagc

SEQ ID NO: 163311 - RNA, 58 nt, Homo sapiens
gaagcgcgacaacacacacacagcgacagcacaagaagacacggagaaagaaagaaaa

SEQ ID NO: 163312 - RNA, 81 nt, Homo sapiens
gccaggacgagcagagccccccccaccagaggacgggaggagcagcaacagggcacacaccccaggagggggaggggggag

SEQ ID NO: 163313 - RNA, 69 nt, Homo sapiens
cgacgccagaagccaggaacccaaaacagaagaacacgaaccggagaaaggagcgcggagcagccagcg

SEQ ID NO: 163314 - RNA, 79 nt, Homo sapiens
cccgcggaggagcgcccggacagaaggcgcgggagaaaagccacccccacagaccgcaaccacccccgcaggcggaccc

SEQ ID NO: 163315 - RNA, 104 nt, Homo sapiens
gcgggcccggggacacgcgcgggcgggagcggcccacgacgggacacgccccggagggagggagcacagcgggaagggcacaaagacccacacggaaaccaaac

SEQ ID NO: 163316 - RNA, 80 nt, Homo sapiens
gagacaacacgccaccaggaccaccccccgccagcccccccagcccaccccaaacggagcacccaaggaagcggaagcca

SEQ ID NO: 163317 - RNA, 90 nt, Homo sapiens
agcggccggacgccgcccgaacaggacccgccggccaaggaagcaaaaggagggaagaagccggaaccgcacaaaggaaaggagggaagg

SEQ ID NO: 163318 - RNA, 75 nt, Homo sapiens
ggccaacgccggcacagggggaccgggaccgcgccaccccggacgcccgaacaggaccaggacgccgacacccaa

SEQ ID NO: 163319 - RNA, 78 nt, Homo sapiens
gaaagggacggcgagcgagccggcgggccgcggagcgcaccgcggccgggagcggcggaccaaccggcagaacgaaga

SEQ ID NO: 163320 - RNA, 86 nt, Homo sapiens
gccgccccgcgagcacagagcccgccgccgaccgccgcccgccacacccgccgccagggacacccacaggagagacgacgccccag

SEQ ID NO: 163321 - RNA, 68 nt, Homo sapiens
cacaggaggcagaaggaaccgaagaagacaggaaaacgcagggccaaaaagcagaaaaacaaaccagc

SEQ ID NO: 163322 - RNA, 55 nt, Homo sapiens
aggaaccaccgaaagcggcgcaacgaggaacgaagcaggaagggaacgagcggca

SEQ ID NO: 163323 - RNA, 47 nt, Homo sapiens
ggaacgggagaaagcacgggaggagaggccggagcccacccagcaac

SEQ ID NO: 163324 - RNA, 68 nt, Homo sapiens
gagagaggagggggcaccgagcaacgagggcagagccgcagagcaagcgaaaacaaacaagaggacgg

SEQ ID NO: 163325 - RNA, 81 nt, Homo sapiens
gcacgaaggcaccgggcccagcacagccagcaccgcacgcccgcaagggagggggggccccagcccggccgaacgggcgca

SEQ ID NO: 163326 - RNA, 76 nt, Homo sapiens
gcgggcgggcggcggcggcgcgggccgaacgggaggagaaagcacaggaggcacaacaaggcaagccacgaggccc

SEQ ID NO: 163327 - RNA, 76 nt, Homo sapiens
ggagcccccgaagacccccggaccagccccaggcccggcgacggacaaagaccaaagaaaagcaaacccggggaac

SEQ ID NO: 163328 - RNA, 77 nt, Homo sapiens
gaccaccccagacgacacaaggcacacggggcacccggaccggagaggaggggagaaacgaaggaggcccaaccaca

SEQ ID NO: 163329 - RNA, 78 nt, Homo sapiens
ggcaaagaaggcagacaggaagccagcaacaggaacaacaacgcagccaccagaggcaagacacaagcacacaaagaa

SEQ ID NO: 163330 - RNA, 75 nt, Homo sapiens
ggccgagacaaaggcaccaggccaccacagaaacaaaagcaacaaagaggaaaagcacggcgccgagaggaagga

SEQ ID NO: 163331 - RNA, 72 nt, Homo sapiens
aaaggagcaaacaaccccacagccaacaagaaaggcggagaagaacccaaccaaaaccaggcggcaaccccg

SEQ ID NO: 163332 - RNA, 56 nt, Homo sapiens
ccgaaaaaggcggaagggacgcaaaaaggaagccccacaaggaccaggcaaaacgg

SEQ ID NO: 163333 - RNA, 80 nt, Homo sapiens
gacaaggagaaaaccacagaagaacggaccgaagccaaagaacaagagcgcagggacagagcgaccaggggcgagagcgg

SEQ ID NO: 163334 - RNA, 75 nt, Homo sapiens
gaacaggcggcgcgcgcggcgcgggacgcgcgcgggcacccacggagccccggggcggccggaagcaaacaccac

SEQ ID NO: 163335 - RNA, 78 nt, Homo sapiens
aggagcggccaacaaaacacaagaagcccaagaccagcagaaagaaggggaaaccggagcaggagccgcaagaccagg

SEQ ID NO: 163336 - RNA, 97 nt, Homo sapiens
cccacgaacccgaagcccccaaagagagaaccggagagcacccaacaggacacagagccacaaaagaggaaacaaacaggaacgacaaccgcacaag

SEQ ID NO: 163337 - RNA, 79 nt, Homo sapiens
ccccgggcccggcgccgccgcccgcagggccaaccgaaaaaacaaccagagaggcggacagcagcagagggaaggagca

SEQ ID NO: 163338 - RNA, 68 nt, Homo sapiens
ggagggaaagaaagccaacacacaaaagggacaccacgcaccccagcaggaggagagaccgccgggcg

SEQ ID NO: 163339 - RNA, 106 nt, Homo sapiens
aagaccgacacgagccaagggcacaaggccaccaaccggagagagggcggccagcagacaggcggccggaggcagcaggccacccagacccaggcaccaccgcagg

SEQ ID NO: 163340 - RNA, 77 nt, Homo sapiens
cgaggagcccaagggacagccgccccgggcacacaccccgacccgcccccccagggaaacacaaagaagacaccaga

SEQ ID NO: 163341 - RNA, 58 nt, Homo sapiens
cgcgccgcgacgccgaccagggcccaggacagaaggcgggcaaggagcgccccccgag

SEQ ID NO: 163342 - RNA, 74 nt, Homo sapiens
ggaaacaccggcagcacggaaacaagagggccgggcagaagggaaaaaggaccgagggaacagccaggagagca

SEQ ID NO: 163343 - RNA, 70 nt, Homo sapiens
aaccgggggagaaagaacgggcaaggaaacagggcgcgcagaggaggcggggacggcgcagccccggcgg

SEQ ID NO: 163344 - RNA, 88 nt, Homo sapiens
gcggcgggccgggcgcggcaccccggacacggcaagcagagcaccggccagaacaagccaaggagccaagacgagagggacacacgga

SEQ ID NO: 163345 - RNA, 71 nt, Homo sapiens
ggaagaaccccccgggagccagaccggcaccgaagaccgaagccaaagaggaaacgacacggccggcacag

SEQ ID NO: 163346 - RNA, 88 nt, Homo sapiens
ccagcccccgcccgcagccggacgacacgaccgccgcccgcggggcacacgggccacagaggaccagcaaggagaagaaaggagcagc

SEQ ID NO: 163347 - RNA, 60 nt, Homo sapiens
ccgggaacgaagcagaacggagccaccaccaccccgagagacggaccggaccacccccag

SEQ ID NO: 163348 - RNA, 92 nt, Homo sapiens
cagcagacggcaagaagaaggcagaagagggagaggcacagcaccaagaaaggagcggacgcccaaggagaacggagccaccagacgggccg

SEQ ID NO: 163349 - RNA, 89 nt, Homo sapiens
gaggagcggcagccgcgaggaggcgcgggagggcgagaacgaccccgagacggccagacgcgaggagacccacaagaccggccggagcg

SEQ ID NO: 163350 - RNA, 65 nt, Homo sapiens
aacagacgggagacagcaggggcccagcccccaacacgggaaacggccagcaaggacaaaaaaga

SEQ ID NO: 163351 - RNA, 73 nt, Homo sapiens
gggcgccccagggacagcaacagcggccgggaacgaccgaaacaccaggacaggagggcaggaaaaggaagca

SEQ ID NO: 163352 - RNA, 82 nt, Homo sapiens
cacggaagacccaaggacgggacgggagggcaaacaagcaggacagcaagacccaaagagccaggaaaggacacggaacagc

SEQ ID NO: 163353 - RNA, 67 nt, Homo sapiens
cacagcggaccccgcccgagacaggagagacaacggaggcaagaaagacggagaagcgagaagagac

SEQ ID NO: 163354 - RNA, 70 nt, Homo sapiens
aagcccggacaccgggagagacaaaggggcaagaccagcaaaagcgaacagccaggagaagaagacaagc

SEQ ID NO: 163355 - RNA, 89 nt, Homo sapiens
cgggaagggaagcggccaaggcacggaggccgcgagaggacggggacgggccccaggacgaggaagacaaggccagccacggaaggaga

SEQ ID NO: 163356 - RNA, 66 nt, Homo sapiens
aaaaggcagcgcaagccaagagaaacagagccgccaaccaagcacagcacaagcgccagcccggaa

SEQ ID NO: 163357 - RNA, 76 nt, Homo sapiens
cacccgcaccgccaaccacgggcgaggaggcgccgcgcaggagccaaagaagaggaaggcccacaaagagccggag

SEQ ID NO: 163358 - RNA, 78 nt, Homo sapiens
agccccgcgagcgggaacagaggacgccagcccggcagaaggcagaagcacgggggacaagcaccagcagaaacaccc

SEQ ID NO: 163359 - RNA, 76 nt, Homo sapiens
ccgaagccgggagccgccgccagggggccgccgggagccgccccgccagcgcgccgccgacccccggcaaagcacc

SEQ ID NO: 163360 - RNA, 84 nt, Homo sapiens
aacacagagccaagcgccaagacccggaaccggccagagacacccccagggcggcgggccgcagccccaagcgggggaggccaa

SEQ ID NO: 163361 - RNA, 71 nt, Homo sapiens
gaccagcgggaggccagaggaagggagaaccggggcaagagacggcagacaaacacagccgagagaaggca

SEQ ID NO: 163362 - RNA, 73 nt, Homo sapiens
ccggaggaaaacagccgggcagagcagcagaggaggaaggagagaaaaggcgaaccgaaagagaaaaccaaac

SEQ ID NO: 163363 - RNA, 50 nt, Homo sapiens
ccacccggagaaccccacggagaaccagaggcacagcaaacaggaccaaa

SEQ ID NO: 163364 - RNA, 74 nt, Homo sapiens
cccgacccgggcgaggcgggacccagcggcggcagggagcacgcgggcaggcagcccagcaaacccaggcaaga

SEQ ID NO: 163365 - RNA, 70 nt, Homo sapiens
cgggcgcgggcccacgcggcgcaggggaagggaaccgcgaaaacccggcaggaaacagaagaaggccagc

SEQ ID NO: 163366 - RNA, 79 nt, Homo sapiens
gaaccagaagcagggccaacccgaagagaggaacaccacaccagcagacgccccagcacgcccacaagcccgggcgagg

SEQ ID NO: 163367 - RNA, 68 nt, Homo sapiens
ggccgaacggagcagacaaaggagcggccagccaacaggacagcccccggcgcaaggaagaaagaaaa

SEQ ID NO: 163368 - RNA, 74 nt, Homo sapiens
gaaagaaacaaagcagcaggccgaagcgacaaaaaggccggagagccacagcaaacggggcagccaccacagca

SEQ ID NO: 163369 - RNA, 42 nt, Homo sapiens
cccagagggagccacaccccagcccccgcgacgagcccccaa

SEQ ID NO: 163370 - RNA, 81 nt, Homo sapiens
gccgaccaagaccacagaggacagagcgggagccaccagcgccaaagggaagccaggagcccgggggcacggggagaagac

SEQ ID NO: 163371 - RNA, 72 nt, Homo sapiens
gagagaggaccacccagaggagcaacgaggggcgagccagcaggcccagaaacaagcggagcggaaaggcaa

SEQ ID NO: 163372 - RNA, 84 nt, Homo sapiens
cgggccccacacgggccccgaagagcgccgcgacgcccggcccgcagggcaggagggagccacaccaaagccggacccccccag

SEQ ID NO: 163373 - RNA, 82 nt, Homo sapiens
gcaaccagacgccagcgggacgaggaccgagaccgcggccgggaccgaggcggaggcacccaccacgggccaggcgggccag

SEQ ID NO: 163374 - RNA, 63 nt, Homo sapiens
cgaaccgacagcgacgacagggcgaaggcacaagagaggcagaaagaaacgaaaaacagagga

SEQ ID NO: 163375 - RNA, 85 nt, Homo sapiens
caagaaggagagcgacagcccaagcaccagcacgccaggaaagagagaagaaaaccgaacaacaaaccagaacaagagagacgac

SEQ ID NO: 163376 - RNA, 68 nt, Homo sapiens
caacgacgacagaagaccgagggccagcagcaggaacccacaaaaagggaaaggaaggaggagaagga

SEQ ID NO: 163377 - RNA, 76 nt, Homo sapiens
gggggaagagaaaacggaaagaccggggcacagcaaggaccagacccaggcagaacaaaacgccacccaggcagga

SEQ ID NO: 163378 - RNA, 86 nt, Homo sapiens
cggacggacacccagcggcgacacgcgacgcgccaaaacccgcccggaaaggggacaccggcagaaaaagaggcacgccagacacg

SEQ ID NO: 163379 - RNA, 60 nt, Homo sapiens
ggcaccggcgagaacagcaccacgagaggaccgcgaggagacagcccagagcaagcacac

SEQ ID NO: 163380 - RNA, 51 nt, Homo sapiens
ggagaggccaggaagcggccagagaaaggaggcagaacaggccaccagggg

SEQ ID NO: 163381 - RNA, 76 nt, Homo sapiens
agcagagaagccaaaccaggccgaagaagggcaccgaaggagaccccaagaaaaggaaaaagagagaccaagccag

SEQ ID NO: 163382 - RNA, 55 nt, Homo sapiens
gccagcacgcgcaaagaaccaagcgaaacagaggcaaccggggccgaggccagag

SEQ ID NO: 163383 - RNA, 69 nt, Homo sapiens
acgcagaaaggaaggaagcaaaagagaagacccagaagcaaagaggcgaaaccacaaaaagggggcgaa

SEQ ID NO: 163384 - RNA, 85 nt, Homo sapiens
agccgaggacgccggagaccggcgccggcgacgcccgcgaggagcaaccggacgaccaagccaagaagaggaaaccagaacacgg

SEQ ID NO: 163385 - RNA, 74 nt, Homo sapiens
acggacaaagggggcgcggaagccccccccaccgaagcccccgcgggacaggaaaacaggcgaaggcaagagag

SEQ ID NO: 163386 - RNA, 78 nt, Homo sapiens
gaagaacagagacagcagccaaacccccagcggaagcgggcccccaggcaccccagccgcaaccgccaggacggagcg

SEQ ID NO: 163387 - RNA, 59 nt, Homo sapiens
cggcggggaccgagccggagcgcgggcggagacagcgaagccccgagagaagacaagca

SEQ ID NO: 163388 - RNA, 71 nt, Homo sapiens
cgcgcagcaaagaagagccacgcaggccaggaggaaccaaaggggagaaaaggaccggaaaggaaaacaga

SEQ ID NO: 163389 - RNA, 72 nt, Homo sapiens
acccagcagaacccccacgcaaggaggaagagagaacagccaaccaccaaagaagacccccagacagcacgg

SEQ ID NO: 163390 - RNA, 77 nt, Homo sapiens
gaacccaacacagggaaaggaaccgcggacaggccaacagagcacagcgccccaccagccagaaggggaaccggcaa

SEQ ID NO: 163391 - RNA, 76 nt, Homo sapiens
gaccggacagaggccagccacaaaaccacccaagaccacgccccacagcaaccccacccaggggccagacgggagc

SEQ ID NO: 163392 - RNA, 73 nt, Homo sapiens
cccgaggcccccaggaccccaccccaagggagggccgcgggccaagagcaaaagccgaccgcagagaccaaga

SEQ ID NO: 163393 - RNA, 69 nt, Homo sapiens
accagcagcagcaacggggacgacacaaccaacaacagaagaccgagaccacaggggcaacccaaggac

SEQ ID NO: 163394 - RNA, 73 nt, Homo sapiens
aagaacaacagcaaaagcacacaagcaccgggacccaggacgaggcccacacaaagaaaagggcacagcgaaa

SEQ ID NO: 163395 - RNA, 78 nt, Homo sapiens
ggaaagaaaccccagaaagcgcacacacgcagggcccgcgaggcagccacgcgaagggaggaagaaaagccccggacc

SEQ ID NO: 163396 - RNA, 76 nt, Homo sapiens
gaagcagaaccgagaaaacaagggaaggcaccaccaaaggcaaacaggccagagacgaagagacgagaagagagca

SEQ ID NO: 163397 - RNA, 78 nt, Homo sapiens
gcccccgcccgcgcaccaggccccgcccggcacaagggacacccggacgcaggcccggccaggagagcgcgcacgagg

SEQ ID NO: 163398 - RNA, 78 nt, Homo sapiens
gagcggaccgagagcgcgaaacgcacgagaaggccgcggaagaccagcgggagcccacgccgcgccaccccaacccgg

SEQ ID NO: 163399 - RNA, 61 nt, Homo sapiens
aggcacagccaccacgcccaggaaagaagccacaccagcaaaaaacaaacagagagcacca

SEQ ID NO: 163400 - RNA, 79 nt, Homo sapiens
acaagagagcacgcaaaggaaaacgacacacgggggggaccagaaaaccccagcaacaaggccaggcaagcacaaaagg

SEQ ID NO: 163401 - RNA, 77 nt, Homo sapiens
gcacagaaaggaaggagagccagcaaagacgcaagacggaacagaacgaaggggaagaacaccgagaaagcgcaaga

SEQ ID NO: 163402 - RNA, 74 nt, Homo sapiens
cgggggggcgcgcagcgaagcgcacggaaggaagcagggccgagaaaggaagaaacaagcccaggacgaagaaa

SEQ ID NO: 163403 - RNA, 101 nt, Homo sapiens
cggggaaggcgagcgccccccccaaccacaaaacaggcggagggcggcgagggacgcaccaaagaagacagacacgcagaaaaggagccggaccccagggc

SEQ ID NO: 163404 - RNA, 84 nt, Homo sapiens
agcccccgaccgccagcaccaccgaggaccagaaaccgccccagcgaggaagaggacaggagcggagagaccgggcagaaggaa

SEQ ID NO: 163405 - RNA, 68 nt, Homo sapiens
ccgacgccaggcagcgcccccaaacgagcggcagcaacagccggcagggaaaacgcggcgcaaaaagg

SEQ ID NO: 163406 - RNA, 84 nt, Homo sapiens
cgcccggggggcgagcccgccgcacccgggccgcgccggcacgacaccagaggaccagaacccacgagaaacagacgagccaac

SEQ ID NO: 163407 - RNA, 37 nt, Homo sapiens
gacgcggcgagggagagaggaaagggcagaacaagcg

SEQ ID NO: 163408 - RNA, 76 nt, Homo sapiens
ccggggccgcccaccggggcccgcccagcggacaaccccccaagcggaagaacaacaaagagggaagaaagaggag

SEQ ID NO: 163409 - RNA, 57 nt, Homo sapiens
cacgaaacaccgcgccgacaacaaagagcccaaaaaaaggggagacagccaaggcaa

SEQ ID NO: 163410 - RNA, 66 nt, Homo sapiens
agaacacaagcaggcagaaggacgccgggagagagagcagagcaaggccccgggaccaaggacacg

SEQ ID NO: 163411 - RNA, 76 nt, Homo sapiens
gcggccccagccgcggagacacaacaacagaggcagcaacgcagaccggggaaccagcaccccagaaggaggagag

SEQ ID NO: 163412 - RNA, 80 nt, Homo sapiens
gccgcgcagaggcagcagcagccgcggagcagagccgccggggagggagccagaagcaacgagcagccgcgacgcagaag

SEQ ID NO: 163413 - RNA, 58 nt, Homo sapiens
ggccagaagcgggcggcgcgggggagagccaaaagaagaacccggacccgaccgaagc

SEQ ID NO: 163414 - RNA, 76 nt, Homo sapiens
acccacagcccaccaaggacagcccagccacaccccaaaagggaaaggacagggcccaaaaaggcaacaaacggag

SEQ ID NO: 163415 - RNA, 78 nt, Homo sapiens
ggagaaacgcgaagagaagccgcggcggcgacaagggaagccaggagggaagcccagaagacgcacaagagagaccga

SEQ ID NO: 163416 - RNA, 83 nt, Homo sapiens
cgcggccgagagcgagagcacgcccggcgcagcccagcccgacccaggacagaagagaacaaaacaacgggaacccaggaagc

SEQ ID NO: 163417 - RNA, 79 nt, Homo sapiens
agccaacccaaaaccaaaggaggaacccgcacagacaagacagcaacgcaggaaaaggaagccacaccaggggcagaaa

SEQ ID NO: 163418 - RNA, 79 nt, Homo sapiens
gaggaaacaccaggcgcggcggcccagccccgacacaggcgggcgggcggacccccgccaagacagcccaggaaaagaa

SEQ ID NO: 163419 - RNA, 37 nt, Homo sapiens
gagcagggggccgaaaggccacaggagaaagccgagc

SEQ ID NO: 163420 - RNA, 99 nt, Homo sapiens
cccagccgcgccgaaagacggcaccaccccacaagagcgcggagcaccgaagagcaccccacccgccacagaggcccccaaacccaaggccaacaggga

SEQ ID NO: 163421 - RNA, 74 nt, Homo sapiens
caggaggccgggcagcacggagcaaaccagacacgaaaaccagaacgcacaggaccccagcccggcacaaacag

SEQ ID NO: 163422 - RNA, 70 nt, Homo sapiens
gaagaggacaaagaaacaaaacaaagaaccacacgaccacaaacagaaccagcccccccaagccccgggg

SEQ ID NO: 163423 - RNA, 81 nt, Homo sapiens
gacagacagccaggcgcccagaggggccccggagccagggccacagagccgaacacagcagagggggacaagcccacggag

SEQ ID NO: 163424 - RNA, 55 nt, Homo sapiens
gaacaggaggagccacgcgcccgccgaaaagcgccaggcaggcaggaaagcgccg

SEQ ID NO: 163425 - RNA, 74 nt, Homo sapiens
gagaagggcagaacaccgggaaccgaccccgcccgcggcagcacagcggacagccacaggggccacggacaaag

SEQ ID NO: 163426 - RNA, 69 nt, Homo sapiens
agacagcgaagggagacagccgaaagaaaaccgggccagacgacaagcaaacaaaagagaggacaggac

SEQ ID NO: 163427 - RNA, 82 nt, Homo sapiens
gaggacagggagaaagggccccaagaaccgagagacgaggcacgacccccaggaccccagaaggccgaaccccggagcccac

SEQ ID NO: 163428 - RNA, 70 nt, Homo sapiens
ggagaggcaggcgcggcccgcggggcgccaggcacgcgaggcccccagcacccaacgagaggacagaaaa

SEQ ID NO: 163429 - RNA, 77 nt, Homo sapiens
aagggacaagagaaagcagcggcagcagagagccgagggcagggagcaaccgccccacggaaaaccagaacacagcc

SEQ ID NO: 163430 - RNA, 81 nt, Homo sapiens
cacacgggggcagccgagcgcgcgagccagacagacgcgagcgacaagagaaggaggaaagggcacaagagacaagccccg

SEQ ID NO: 163431 - RNA, 91 nt, Homo sapiens
ggccgagggggccggcggagcccgagcgcggcccggcccgcagcgggggccccgagcgcggaaagaaccggaggcgaagcaggccaaagaa

SEQ ID NO: 163432 - RNA, 80 nt, Homo sapiens
gacgcagggcgcccccgaccgagacaggggcccggcaccgcgcccgagcccacccacagacagaaggggaggagacgcgg

SEQ ID NO: 163433 - RNA, 66 nt, Homo sapiens
gcccagccccgagagcgggaacaggcacagaggcccgcacacgagacaagacagccgacagcacgg

SEQ ID NO: 163434 - RNA, 75 nt, Homo sapiens
cgcaaggagcaaacgccaggacccacccgggcaaagaagagcaaagaaaccagggggagaccgcaccaggaggaa

SEQ ID NO: 163435 - RNA, 73 nt, Homo sapiens
agaagcacaacgcccccggcccgagcccggaaggaaaagggaagcgggagaggccacccgcccacgagcggaa

SEQ ID NO: 163436 - RNA, 78 nt, Homo sapiens
ggcaccacccacgagacgggacaccggaaacggaccaaggagaggagagggggaagcaggcaccccaccgaagaccga

SEQ ID NO: 163437 - RNA, 76 nt, Homo sapiens
ggcgggagcccaggagccgccccgcccggggacgaagagcgcagcccccggcgggcaaaaggccaaaacggaagaa

SEQ ID NO: 163438 - RNA, 65 nt, Homo sapiens
agaaaacgcagcggacagcagcgagcaccagcagcgccgagggggaaacaaagcccagccgcaga

SEQ ID NO: 163439 - RNA, 62 nt, Homo sapiens
ggggcggcagagagcggggcggcggcagcccagccgaaccagcacgggcccaaagaggccag

SEQ ID NO: 163440 - RNA, 77 nt, Homo sapiens
cgccccaagccccaacggacggcgcggcaagaagaagacccccgggagaaggcggagcgaaaggcccggagcgagcc

SEQ ID NO: 163441 - RNA, 89 nt, Homo sapiens
cccccgcacaggggccgggcacagacgggaaggacaaaggggagccgaacaaagccagacaagggccaacaggaaaagcaggaccagga

SEQ ID NO: 163442 - RNA, 73 nt, Homo sapiens
caccagagagagacccgacaccccaacacggacaaacgggagaacagaaagaccagcccaaggaaaggccggg

SEQ ID NO: 163443 - RNA, 69 nt, Homo sapiens
gcagaaggacagcccccaaggaaccggaaaaagaacagggccggagggaccccagcaaacgaacaagag

SEQ ID NO: 163444 - RNA, 90 nt, Homo sapiens
gaggaacagggaaggccaaagaaaagcaaaccgagccaggggcggcaggaccgaaaggccgaaagggaaaaaagagaaaggcaccggaga

SEQ ID NO: 163445 - RNA, 51 nt, Homo sapiens
agaccgaaaacccaagggagcaccccagagcacccgagggagagcgcacca

SEQ ID NO: 163446 - RNA, 73 nt, Homo sapiens
acgcagggcgcccccgacccggggaagagaggacaccgcagggccggggagaccccacagacagagcgcggag

SEQ ID NO: 163447 - RNA, 64 nt, Homo sapiens
agaagccaaggaaaacaaggagagccaaaaacaagccccaccccgaggcagaaagagcaagggc

SEQ ID NO: 163448 - RNA, 62 nt, Homo sapiens
caaaggacgaagaacccacagagacaaggccgacgcgcacgaacacgggggcaaagacaggg

SEQ ID NO: 163449 - RNA, 68 nt, Homo sapiens
gcgccgggggaagccggacaggagaaggcccaaaaacagaagacggccaaggggagagcaaaaaaaca

SEQ ID NO: 163450 - RNA, 75 nt, Homo sapiens
aggaggagacaggagacccaaagaccccagagcacaggggaggggaagcaacagggcggggggaaccgccaccaa

SEQ ID NO: 163451 - RNA, 71 nt, Homo sapiens
aagagggagccaggccagaaaacgggagaggaaaccaaaagaagacggaaaaaggccaaggaacacaaaaa

SEQ ID NO: 163452 - RNA, 68 nt, Homo sapiens
gggaaccgagcgggggagaggacgcgcgaaccagcagcaggcccagggcccaaccaagaccgaaccca

SEQ ID NO: 163453 - RNA, 53 nt, Homo sapiens
cgcagggcgcccccgggcgacaagagaaaaagaaagaaaccccaaaaacaaac

SEQ ID NO: 163454 - RNA, 64 nt, Homo sapiens
ccagcccaagaaagcaccgggcgaacagaaacagacgccgggagaaaaccaaggccagagaaac

SEQ ID NO: 163455 - RNA, 76 nt, Homo sapiens
ggaaaaaaaccccacggaagagacagagagagccaaaccccaggacagagcagagggagccccaaccaacagccag

SEQ ID NO: 163456 - RNA, 76 nt, Homo sapiens
cccgacacacagccaggcccacgggaaaagcacggaacagcaaacgagaaggaagacacagaaagaaaaacagaac

SEQ ID NO: 163457 - RNA, 69 nt, Homo sapiens
cgacaagaaagacaaacgcagaagcgaacagaggaccaggcagcaaacagaagaaacagagacggacaa

SEQ ID NO: 163458 - RNA, 112 nt, Homo sapiens
cacccccgggggaaaagagacaccgacaagacaccacggacgagagacaaacgccgaagaacaaggaaacacgcagaaggaaaagcgcagagaccacacaacaggaaaaaac

SEQ ID NO: 163459 - RNA, 87 nt, Homo sapiens
cacgaggaaggcggcggcgccgcaggaccgcagcacccagagagagaaaacgccggcacagagcaagaaagaaagccaacaacaggg

SEQ ID NO: 163460 - RNA, 70 nt, Homo sapiens
gggaaccgaagagagccgggcaagaaggcggagaaaagaacagagcaccacgaaagaccccgacaaacac

SEQ ID NO: 163461 - RNA, 85 nt, Homo sapiens
ccgaaccgcaaagccccagaggacaaccaccccaggacaggagcagagcaggcagcggcaccaacggacagggacaagaagaagc

SEQ ID NO: 163462 - RNA, 81 nt, Homo sapiens
cggacagcgccaaaaacacaccaggaggggcaacaaaccaccccaacacccaggggcccacgagacgcgaacaaacgccgc

SEQ ID NO: 163463 - RNA, 60 nt, Homo sapiens
accccgcccaagcagcgggaccacaggcccggccaacgcaacagggagcccacgcaagag

SEQ ID NO: 163464 - RNA, 68 nt, Homo sapiens
aaccgaggcaaaggccgagacaacagaacaacaagaaaaaggcaaagaacgcacaacagcaagaacag

SEQ ID NO: 163465 - RNA, 75 nt, Homo sapiens
ccaagaggaggcaaaaaggcaggaagaccgcaggaaagcaggaaggcaagaaagccaaggacgaaacccacacgg

SEQ ID NO: 163466 - RNA, 73 nt, Homo sapiens
cccggaacacgcaccccagcccccagaagggacgccacagggcagcaggcgacccccagcagcccaagccagc

SEQ ID NO: 163467 - RNA, 74 nt, Homo sapiens
gggagagaacccacgcgcaggcccacaccaggacgcgcggagagacggagggagcaacagaccagacccagagg

SEQ ID NO: 163468 - RNA, 83 nt, Homo sapiens
gcgccccggcgggaccgggcggcacgcacgcgggcagggaacaggcggagcggaaggggggcgcacacgcagaaagaacagcg

SEQ ID NO: 163469 - RNA, 80 nt, Homo sapiens
ggacgccgaccgccgggacgagaaacagagccagaccagcgaaaagccaacccagggagagaagaaggaggaaaggcggg

SEQ ID NO: 163470 - RNA, 59 nt, Homo sapiens
cagacgaccccacccgcgccgcgacccgaagcccaccagaggcgaggggaggaggaagc

SEQ ID NO: 163471 - RNA, 53 nt, Homo sapiens
cacgccagaaggcccgggcacgggacagccgaacggagaacgaagagcagagg

SEQ ID NO: 163472 - RNA, 104 nt, Homo sapiens
agaggcgacggcccgcagccggaccccaccggacggcggggccacgggcgccgggagcggaggcacccaccacgggccaggcgggccagaggcaagccgcggga

SEQ ID NO: 163473 - RNA, 85 nt, Homo sapiens
aacgggacgaaccacagggcggccagagcacacaccaggcacgggccaagccgcccgccaaccggcagcgccgacgacaaaccag

SEQ ID NO: 163474 - RNA, 72 nt, Homo sapiens
ccaccaaacacagggcagaaagccagacaccagaaacccaaacagcccggaaacccaggagagaagagacaa

SEQ ID NO: 163475 - RNA, 78 nt, Homo sapiens
acaacagaggagacaggaggaaagaagcgccggaccgaagaggaggagagaggaacggagcggagcccagaaggggaa

SEQ ID NO: 163476 - RNA, 75 nt, Homo sapiens
cgacgacaaaccccaccagccaggagcgcacccagcgcaggcaaagaccagcaaggcaccaacagaaaaacaacg

SEQ ID NO: 163477 - RNA, 56 nt, Homo sapiens
caacccccagacgcaagccaaggggcagaaaacaaaagcagcaaaagccaacgcac

SEQ ID NO: 163478 - RNA, 80 nt, Homo sapiens
ccggcgacggcgcacccagcgccagacggaaaggaggaggaagggcgcccggcggcgcgggcggggggcgggggcgagca

SEQ ID NO: 163479 - RNA, 81 nt, Homo sapiens
gaggagacgcaagacccaaacaaaaagacacgaagaggaggaagcccaggacccaaccgcggcacacagaaaacccggacc

SEQ ID NO: 163480 - RNA, 76 nt, Homo sapiens
gggaaaggggaaggacagaccagccaaccaaagaaggacaacacgcagcgaaggaggaggcggaggagaggaaaac

SEQ ID NO: 163481 - RNA, 79 nt, Homo sapiens
gcgggcgcccgccggcggcgccgggcgggcggacaagcgccgcgggcccaggaggccagcgcgagaagggaacagggcg

SEQ ID NO: 163482 - RNA, 77 nt, Homo sapiens
ccgggagaccggggaacgagccaaagaagagcgaagcagggcacacacacccccgcaggaggcaaagggaccccaag

SEQ ID NO: 163483 - RNA, 63 nt, Homo sapiens
ggacacgcccggggcgaggcccgcggggccaggaggggggcaccggcacggcgccagcgcgcg

SEQ ID NO: 163484 - RNA, 66 nt, Homo sapiens
gacgccgagggccagcgggacggagcagggagagcccagcgacgggaggggcagcaggggcagcag

SEQ ID NO: 163485 - RNA, 59 nt, Homo sapiens
gagggcaaggcgccagaccaagcccgggcaaacgaaaagccaaaaacacaaagagggac

SEQ ID NO: 163486 - RNA, 76 nt, Homo sapiens
gagggaggaaagagagcagccaagagagggagacggcaggcagcggaacacacaaaagcggcaaacgaacaaccag

SEQ ID NO: 163487 - RNA, 79 nt, Homo sapiens
caaaaggaccaaagggacgaaggggcaccggacaggcaaagaacggggcaaagaaaaaggagagaaaaagaggcaaaac

SEQ ID NO: 163488 - RNA, 58 nt, Homo sapiens
gaagcggccaccgacacgcagcagcggccaggggcagaaaacaaaagcagcaaaagcc

SEQ ID NO: 163489 - RNA, 81 nt, Homo sapiens
gcaaaaggcaagacggcggcgggagaggagagaaggcgaggaagcccaagcacaaaggagaagacgcccaagccaagaaaa

SEQ ID NO: 163490 - RNA, 73 nt, Homo sapiens
ccggcacacgaaaccacgacccacagaaaggcagcccgccaaaaaggaaaagaccagagaaagaaggcagcgc

SEQ ID NO: 163491 - RNA, 78 nt, Homo sapiens
ccgcgggccaaggcggcggccagccggcgggggcgcgggccgcgcgggggcgcaggcgacgccggaccgcgaagagac

SEQ ID NO: 163492 - RNA, 60 nt, Homo sapiens
ccaccaacaagcgggagaaagacagcaaggggaggcaagcaggggggcaaaggaaagaag

SEQ ID NO: 163493 - RNA, 99 nt, Homo sapiens
gcggcagaagacaccaagaggagcaaaaaagacccaaaccggaagaggcgccgccaaggccggcaggcaggagaaccaggccgcgccaccgagcccagc

SEQ ID NO: 163494 - RNA, 68 nt, Homo sapiens
gcccgcgaaccaacggagcggggcaggggcgacgagagcgcgcgggcaggcagaaggcaaaggaaaac

SEQ ID NO: 163495 - RNA, 61 nt, Homo sapiens
aggagcgcacacaagagagagagacgcaggagcgcgccccccagaaccgcccacagcccac

SEQ ID NO: 163496 - RNA, 78 nt, Homo sapiens
ccacagaaagacacacggagacaaaccgcgccaagccaaacccccaaaggcccacacgcgaacggcacacgacaaggc

SEQ ID NO: 163497 - RNA, 75 nt, Homo sapiens
cacccagaggacgggagggggaaggggccggagggcagggggcagggcggcagagccaggcccacccacagccaa

SEQ ID NO: 163498 - RNA, 77 nt, Homo sapiens
acccgacccccaaaccccacagcacaggaaggacacagcgagccaaaaagaacaccaggaagcaaggcggcagcgcc

SEQ ID NO: 163499 - RNA, 83 nt, Homo sapiens
gaaaccaggagaaaaccgaagaagaggcccggaccaacagagagaaagccagaaaggagcagcagagaacacaaggaacgaaa

SEQ ID NO: 163500 - RNA, 87 nt, Homo sapiens
caccgggcggggccgacggagcgcggcaggacggcggacggcgcggccacggagaagggcgcggaaaaacgggccgagaaagcgagc

SEQ ID NO: 163501 - RNA, 36 nt, Homo sapiens
gggaacaagacaagacacacagaggagcgcggcgcc

SEQ ID NO: 163502 - RNA, 69 nt, Homo sapiens
gagaaggaacgccgcaccaggcagcaacagaaaagcccgacccagagacaagggcagagccaagcgccg

SEQ ID NO: 163503 - RNA, 113 nt, Homo sapiens
cgagagagaaaagccgaggaaaagagaaagacagcaacaacaaccagcagcaacaaggaaacagaaggagagaaccaggagaccgaagcaaccaacaagcgaggaggaaaggg

SEQ ID NO: 163504 - RNA, 53 nt, Homo sapiens
aggccacagccgggaagcagagggagaaagggaacccaaaaaggccacacccg

SEQ ID NO: 163505 - RNA, 84 nt, Homo sapiens
gggggccccgggcacagccacacgccgggcaggagccacggacagcggccgaagccagagccggggcggcgccaggccccacac

SEQ ID NO: 163506 - RNA, 65 nt, Homo sapiens
ggaaggagacagaaacacaaagcgccaaaaggcggcccgcgcaagcaagcaaggagaacaggagg

SEQ ID NO: 163507 - RNA, 76 nt, Homo sapiens
cggaccagaagccagagcgaggacgccggcagggggacgaccaccagccaggccggggacaaacaggcaaccgacg

SEQ ID NO: 163508 - RNA, 60 nt, Homo sapiens
cggggggcaccggaccaaaccagggccgcgcaggggcagaggagacagggcccgaccagc

SEQ ID NO: 163509 - RNA, 65 nt, Homo sapiens
aaaggggccccacggaggccacagccacaacaacccaggcgccgaacgcaacagaccgagaccac

SEQ ID NO: 163510 - RNA, 89 nt, Homo sapiens
gggcagccgaacggagggcgacggagggagacaagcagaccggaagaccgacggaagaccacaccccgagggagcccaggacaccacga

SEQ ID NO: 163511 - RNA, 75 nt, Homo sapiens
gccaggaacacagacgggggcgagcggacccgcagccccaaagaccgaaaagacgcggccccaaaggaaacaccc

SEQ ID NO: 163512 - RNA, 53 nt, Homo sapiens
gcacaaccccaaaaaagggaacaggcccagggacaacacacgggagagcacaa

SEQ ID NO: 163513 - RNA, 80 nt, Homo sapiens
gaaggcgaggcggaagaaaaccaacacgacagcaaccaacggcgcggaagcgagagccgcggcagcccaagcgaacaccg

SEQ ID NO: 163514 - RNA, 70 nt, Homo sapiens
gaaaaccgaaaaagcagaagcacaagccaaacggacgcagccgcaagcacaacaaccagagcgagagagg

SEQ ID NO: 163515 - RNA, 36 nt, Homo sapiens
ccaaacaagcaggaaaaggacgaaaaggggacagaa

SEQ ID NO: 163516 - RNA, 73 nt, Homo sapiens
cagaggaaaagggaacccgacacagcaaagaggccccagggcagacagcagaaggagcgacagaaaagcagaa

SEQ ID NO: 163517 - RNA, 103 nt, Homo sapiens
gcacaaggcggcagcgccgagcgaacagagaacagcgccggaaaaccaccaccccaggcagcgagggcccaaaggcaccgccggaagccagccccccccgcgc

SEQ ID NO: 163518 - RNA, 77 nt, Homo sapiens
gcccgagcaccgccagccaccggcaccaagaccggccacacccagcacgcccacccgagaaacacgcagggccaaag

SEQ ID NO: 163519 - RNA, 67 nt, Homo sapiens
cggggccccgaggagccgcacgccggcggcaccaggccacccaaaaacccgccaggccaagcaaccc

SEQ ID NO: 163520 - RNA, 78 nt, Homo sapiens
gcggaggcagaggggaggcgcgaaaggcacagcagcggccaagggaggaacccgacacgggcacggagcaaagaaggg

SEQ ID NO: 163521 - RNA, 79 nt, Homo sapiens
agcggcagggcggcgcgaggaggcggacaccaaccagaagacggagagagcacccgcaaaaggacaggacaagcaccac

SEQ ID NO: 163522 - RNA, 96 nt, Homo sapiens
caaagcgagagagggaagcgcccggccgcgaagccgacgagcccgaacagacgcaccagcgggaggaagagggacggcccaggagcgcggcaacag

SEQ ID NO: 163523 - RNA, 75 nt, Homo sapiens
gggccgggaagaggaaggacgacgccgggaaggcggcgcggggagccagaaacagagaagcgagaaagagaagaa

SEQ ID NO: 163524 - RNA, 74 nt, Homo sapiens
agcacggccagccgaaacagcacagcaggccgcgggccggagcccacccacagacccaccccagcagacgcccc

SEQ ID NO: 163525 - RNA, 79 nt, Homo sapiens
gcagacgacgagcgagccaaaaggggggacacccaaggaaggagcaagacgagaacaacgacaaaagaaggggcggggc

SEQ ID NO: 163526 - RNA, 74 nt, Homo sapiens
gaaagaaaagcagcagagaacccaagcccagggccaacggcgccgccggaggcaacacaccgcgaaacagaggc

SEQ ID NO: 163527 - RNA, 79 nt, Homo sapiens
gaagaaaaaaacaaaaagaagaagagaagcgaagaagggaaagaacagcagagaacacaacacaggacaagcaagccca

SEQ ID NO: 163528 - RNA, 74 nt, Homo sapiens
gaggaaagaagggagccgcgacgaaaccagccgggagacaaggaaaacacacagaaaacaacaggggagcggac

SEQ ID NO: 163529 - RNA, 71 nt, Homo sapiens
ccagagggagggaccaaaacaggaccggcggggaggcaagcaggggggcaaaggaaagaaggcagaaaggg

SEQ ID NO: 163530 - RNA, 74 nt, Homo sapiens
caccgccggcgcgggaaacgggcgaagcgacgagccgcgaggagccggacacaagagggcaagaaaggcgcgac

SEQ ID NO: 163531 - RNA, 80 nt, Homo sapiens
cgccagccgccaggcgcgagcaccgggccggcggcgagcccccggcaccccccgcacggaagaggggccggacgccaccc

SEQ ID NO: 163532 - RNA, 73 nt, Homo sapiens
aagagaggaaagggaggcaccacacacaaaaaggacgaagggagcgggaccaaaccaccgccaaacagaagga

SEQ ID NO: 163533 - RNA, 76 nt, Homo sapiens
caagagccaacccaaaaccaagcccagaagaggccacaaggaagaagcagcagcgccaaggacccgcaagcgcacc

SEQ ID NO: 163534 - RNA, 58 nt, Homo sapiens
cagcgggacaccgcggggcccggccagacagccacaaccaggcagaggggcgggcaaa

SEQ ID NO: 163535 - RNA, 74 nt, Homo sapiens
ggcccgcgggaagcaggacgcgccgcgccccaaggcaccgacgagagggcgcaccgcgccggagcccgaccgcg

SEQ ID NO: 163536 - RNA, 57 nt, Homo sapiens
cacacggagcggcggcagccccagcgggacccaccccggggaagcacaccccagcgc

SEQ ID NO: 163537 - RNA, 62 nt, Homo sapiens
gagaaaaaacacagagacgaacaagacgcaacaggcgggaacacaagcaagggaggaacaga

SEQ ID NO: 163538 - RNA, 79 nt, Homo sapiens
ggaagaacaaaaacgaccccaggccagcacgaggacaggaacagcccagaggcaggcgaaccgcagaagcgcccagaga

SEQ ID NO: 163539 - RNA, 76 nt, Homo sapiens
aggccgcccccagaaccgcccaaccgcacggcacccgaaagagaagccgaagagaaaaagcggaaggagagggccc

SEQ ID NO: 163540 - RNA, 80 nt, Homo sapiens
ccgggcaaggggaggacgcccgaggcagcgagaagagaacgcagggccaggaagaagaggacacagaaggcgcaccccca

SEQ ID NO: 163541 - RNA, 78 nt, Homo sapiens
aaggagcagcccaggaccgagaccggagcagccggggcggagcgggcaaaaccacggaccaccaggggagcacaaaca

SEQ ID NO: 163542 - RNA, 71 nt, Homo sapiens
acacgaaaggcaaagagacacgcgaggggagaccgagggagccccaggcccaggcagagcaaggaggagga

SEQ ID NO: 163543 - RNA, 76 nt, Homo sapiens
aaggcaccccgaggagagcgcacacgcggggcccggaaacagggcgaggccaccgaaaccccaccccacccccagc

SEQ ID NO: 163544 - RNA, 55 nt, Homo sapiens
gcagcgcaccggcgacggcaggcgaccacgccacgcccggcgcggcccaggcgga

SEQ ID NO: 163545 - RNA, 72 nt, Homo sapiens
gcgacaaacgggaaaaagcagaagacagccacacaggcacccacccaggccaacgaggaggacagcagccag

SEQ ID NO: 163546 - RNA, 77 nt, Homo sapiens
acaggaacaaggagaagaccaggaagagaaagagaaaggacaagcaggaacccccagcaggcggacaccgaccgcag

SEQ ID NO: 163547 - RNA, 72 nt, Homo sapiens
gagcggagacacccaggaggcagaagccaccaagaagaggaaaccagaacacggcaagagcagccaccacca

SEQ ID NO: 163548 - RNA, 79 nt, Homo sapiens
cgcgccggccgcaaaccagaacccaacaagagccggagaggaaccagacagcaccaggggccagagcagccgagaaccg

SEQ ID NO: 163549 - RNA, 75 nt, Homo sapiens
cagcaagaacagacagaaccgcggaggcagccgacagggagaagagagcggacccacaccagggaagacagggga

SEQ ID NO: 163550 - RNA, 69 nt, Homo sapiens
gcaccgagcgggggagggggccccacgagccggaagagagggcgaagcgcgaagggccaaggaaaacac

SEQ ID NO: 163551 - RNA, 78 nt, Homo sapiens
acgagaacacccagaggaaggaagaaaccccggagccagcaaaaacacaaacgagggagcaaggacaccaccagggag

SEQ ID NO: 163552 - RNA, 78 nt, Homo sapiens
aggggaccgcccaagggggggaaaagccagggaacccagaagagggacggcaagggacagaaagaaagaagaagaaaa

SEQ ID NO: 163553 - RNA, 82 nt, Homo sapiens
aagacaccaaaaagcaaacggaccagaccgaccaccaaaaaaaaaaggcagcggaaagaagaaaagaaacggcccacaagac

SEQ ID NO: 163554 - RNA, 72 nt, Homo sapiens
aagacggccggggggggaccaaacgagaggcgggcaggaggacccaaacgaagacccggacccccacaccgg

SEQ ID NO: 163555 - RNA, 87 nt, Homo sapiens
gcgggccgcagcgagcgccgaggaacccacccagggaaggggaagacggcagcgggccggaggcccaaaagaaacaagaaaccaggg

SEQ ID NO: 163556 - RNA, 75 nt, Homo sapiens
cggcccacgcgcggccaaggcccaggcagcgcagagccaacagacgagcagaagccgcaaggagcccgcgggggg

SEQ ID NO: 163557 - RNA, 77 nt, Homo sapiens
ggcaccacgccggccacccacgcccacggccaccgaagagacggcgaagacaaacacccacagagggccacacagga

SEQ ID NO: 163558 - RNA, 74 nt, Homo sapiens
ccgcgaggaaaagcccagcggcccgccaggcccggaagaccgcaggaaagcaggaaggcaagaaagccaaggac

SEQ ID NO: 163559 - RNA, 86 nt, Homo sapiens
aaaaccaacgccggccggagcagcagcccgagacccgggaaaaggagaagagaaggaagccaaggagcccgcaaccaagggcaccc

SEQ ID NO: 163560 - RNA, 70 nt, Homo sapiens
aagccggaaccaagacggaagcccaagccggggcagccccaacccagcagcaagaagaggcggagacacg

SEQ ID NO: 163561 - RNA, 74 nt, Homo sapiens
gggcgccacgcacaaaacagccgggggcgacacaggaaggggacggaaagagagccgcagcgcagaacaaggga

SEQ ID NO: 163562 - RNA, 82 nt, Homo sapiens
aacagagccaacacaagggcaagagaagcaaggagccccgccacacacgcaaacgagaaaagaccaaagagagcagcacgac

SEQ ID NO: 163563 - RNA, 66 nt, Homo sapiens
agaggagcagggaaggaccaaacacgaagagacaaaagagggacacgcaggaagcacaaggaccga

SEQ ID NO: 163564 - RNA, 61 nt, Homo sapiens
ggaaaagaaaaccaggccaaggagaggcaaaagaagcaggcaggccacaagccggccggac

SEQ ID NO: 163565 - RNA, 93 nt, Homo sapiens
gcgccccgcaccgcggcaaagagaggacgcagcgagaaaggaaggggaaccacaaagaagagaaggcgggccaagaccgacaacgccaacaaa

SEQ ID NO: 163566 - RNA, 88 nt, Homo sapiens
cagcacagcaaacccgccgggacaaaggaccagcggcagcagggcccgggaaaccagcccagcggcaggagaggcagaggaggcaagc

SEQ ID NO: 163567 - RNA, 80 nt, Homo sapiens
gggccggaggacgggcaaaacggcgccgcaggggagaccggggcaaaaggggccggaagaaacaagggaggacagcccag

SEQ ID NO: 163568 - RNA, 47 nt, Homo sapiens
gaacaaacccacagccagagccagagacagggagcagagaaacagaa

SEQ ID NO: 163569 - RNA, 59 nt, Homo sapiens
gcgcagacggcgagaccccgcacagagaaggacggagaagcgaaagccagaccggcaag

SEQ ID NO: 163570 - RNA, 76 nt, Homo sapiens
agggggagggagccgaggcaacagaggaaaacaaacaaacgcaaacgggaacggacccaggagaaggaccagacga

SEQ ID NO: 163571 - RNA, 80 nt, Homo sapiens
ccaccggagaagcacaagcagcacacaaggaaacaggacccaaaaaacagagcacgcgaccagcgaggagcaacacagga

SEQ ID NO: 163572 - RNA, 57 nt, Homo sapiens
gcggaagccccgaggcagccccgcggaggagcagaagcacggaccggaacaaagaca

SEQ ID NO: 163573 - RNA, 81 nt, Homo sapiens
caagaaagccagcgggggagcacacgacgggacccacgagccaaggccaccgagccacaagaccacagcaccgacccccga

SEQ ID NO: 163574 - RNA, 87 nt, Homo sapiens
ggaacaaggagaagaaccaggagacggaggaagaacccaagccagagcccagaaaccaccagagaggacccgagacaaggcggcggg

SEQ ID NO: 163575 - RNA, 81 nt, Homo sapiens
ccgcaggacgggagaccaagggaggacggcggaacacggaggcgggaaagaacacacgcaggacgaaagagacaaaagcca

SEQ ID NO: 163576 - RNA, 82 nt, Homo sapiens
aaaaggccggcagaagggaggcacgagccccgcccggaggaccagccagcacccccagccccggcacacccccagacgagcg

SEQ ID NO: 163577 - RNA, 84 nt, Homo sapiens
gccgggacgcggagcccggagcggggcgacgaggcgagcgggggccgggcagggggcagcacgccgaaggagagaccagacaac

SEQ ID NO: 163578 - RNA, 41 nt, Homo sapiens
aaaagcagaaagccagaggaagagcggggaggagacaaagg

SEQ ID NO: 163579 - RNA, 79 nt, Homo sapiens
ccgcgaggggcgggcgaggcaccggagacccgagcaccccaacgggcagagaacgagaacaagaaaagaggccacaaga

SEQ ID NO: 163580 - RNA, 86 nt, Homo sapiens
ccagggacccggagggcgcaagcagcaggaaggagaccaaggggaaaggcgcagaggaccggaaggggaagggaacaagaagcagg

SEQ ID NO: 163581 - RNA, 89 nt, Homo sapiens
ccgccacgggggcgacggcaggccacgcaccagggagccaaccgacccgaggaggaccagaagaccccggcaagcccagaagcccggac

SEQ ID NO: 163582 - RNA, 86 nt, Homo sapiens
gcccaggagaagcggaacggcagagaagaaggcgcgagaagaggagcaggacggagggagaaggggccacacggaagggccgagga

SEQ ID NO: 163583 - RNA, 76 nt, Homo sapiens
cacaaccaacagcaaaacgcccgcggaaaaacacgaaaacccaagcacgcaagccagagcaacgggagccggccaa

SEQ ID NO: 163584 - RNA, 56 nt, Homo sapiens
caacgcgggggcggcggcgcaaaaggagggagcaacaacaaggagcaagcacagcg

SEQ ID NO: 163585 - RNA, 39 nt, Homo sapiens
acaagaaccaagccacagcaaaacaagcacgacagggaa

SEQ ID NO: 163586 - RNA, 77 nt, Homo sapiens
gacaaaggcaccaggccaccacagaaacaaaagcaacaaagaggaaggacagaaaccgaagggagaagagccacaac

SEQ ID NO: 163587 - RNA, 80 nt, Homo sapiens
cgagcagcgcaggccgggaagccgcgagcccagcgcgcggccccgcccggcggccgggcccagaacagcgcaaaagagaa

SEQ ID NO: 163588 - RNA, 56 nt, Homo sapiens
aagccgcaacgaaaaccggaaaagggacaccccccaggcacagccacaccccagcg

SEQ ID NO: 163589 - RNA, 73 nt, Homo sapiens
acccaaagcacaggaaccaccgaaagcggcgcaacgagaccacagagaagcccacccggaaacaaacgccagg

SEQ ID NO: 163590 - RNA, 74 nt, Homo sapiens
gccaccggcgggaggaacaaaagggacacacccagcgcagcacaaaacgacgaggaacagaagggccgagggcc

SEQ ID NO: 163591 - RNA, 77 nt, Homo sapiens
agagcccccaccaagccagcaagaagacgagcaggcgcagacccccaacacagcaggcgcaggggccacaggcggca

SEQ ID NO: 163592 - RNA, 61 nt, Homo sapiens
caccaggggagacccaccccacaccccaggcacgacccgaccccggggccccccacccagg

SEQ ID NO: 163593 - RNA, 93 nt, Homo sapiens
acagaaagagcaacagcagggcaacagggcaggagaaacccagcgggcccagagacgcagcgggaaaaccaaggcaagccaggcgagggaggc

SEQ ID NO: 163594 - RNA, 56 nt, Homo sapiens
gaacgaaagagaccagaggaacacagccgagcagaacggagaggagagaaacacgg

SEQ ID NO: 163595 - RNA, 75 nt, Homo sapiens
ggcaacggaggacaccagacccacagacaacagcagcgccgagaaaccggcagccgacaccacaacaaggcagca

SEQ ID NO: 163596 - RNA, 81 nt, Homo sapiens
cggaggagaagcaagaaggcccggacacagcaaaccgggccacagccagaaacgccgcggacgcgaggccccgggcgccgg

SEQ ID NO: 163597 - RNA, 63 nt, Homo sapiens
accgccggaaccgacaaccaggacacggccaaggccggcgagaacgcccgcggcagcgagggg

SEQ ID NO: 163598 - RNA, 71 nt, Homo sapiens
aaaggacaagaaaccccgacacaaagaacgaaccaagggggggccagcaccaagagcagagacgaacggag

SEQ ID NO: 163599 - RNA, 88 nt, Homo sapiens
gagcggccccgacaccccgggcaccagggaccagcgaaaaacaccgcacccgaagagccggcacggagaaacaccccggcggaggcac

SEQ ID NO: 163600 - RNA, 77 nt, Homo sapiens
ccggagccgccggccgcagcgcagcgccagccaggaaacacccaaggaaccaaagcaggccagcagaaaaccccgcg

SEQ ID NO: 163601 - RNA, 69 nt, Homo sapiens
gaggccagaaggccccgggggcggccacgaccaagaagaagccacggacccgcggcacccacccgcgag

SEQ ID NO: 163602 - RNA, 70 nt, Homo sapiens
aaggaccaagaaccagaacgccaaacaggacccaagaagcaccagaagcagccgaggaagaaaagaggac

SEQ ID NO: 163603 - RNA, 75 nt, Homo sapiens
aacgagccccccccacgagacaacggacaggcaggagacagcaacaaggaccacagagacacaaaaggacaagac

SEQ ID NO: 163604 - RNA, 72 nt, Homo sapiens
ggcggagacgggaggcgagaagccaccaggcccgacagaggaagggagagcgagccacgcacggccagcagc

SEQ ID NO: 163605 - RNA, 77 nt, Homo sapiens
agccaaaacagaccaggagcgcaagaggccgcacccggaggaaagcagaaacgccaagggaccacggaacagcgcaa

SEQ ID NO: 163606 - RNA, 41 nt, Homo sapiens
ggccaaggaacgcaccaggcaggaaccccgacagcagagac

SEQ ID NO: 163607 - RNA, 76 nt, Homo sapiens
cgccaacaaaaccgaacaagacgcagcaagagacaccaagcccgcagacacaaaacgcacacgacagcccacccac

SEQ ID NO: 163608 - RNA, 59 nt, Homo sapiens
ccggagaacgaggagccaacaagggggggccccagcccggccgaacgggcgcacgacac

SEQ ID NO: 163609 - RNA, 71 nt, Homo sapiens
gagcggaagcccaaacgggaacggagaagcggaggagaccaaggaggccaccaccacagaaggagcggcac

SEQ ID NO: 163610 - RNA, 56 nt, Homo sapiens
aaagaagccacgaagcaaaaagacccccaagggggacagcaggagcaacacccccc

SEQ ID NO: 163611 - RNA, 55 nt, Homo sapiens
caggaagccagacagacaagagaaggacggcaagaagcaagaagacaaggagcag

SEQ ID NO: 163612 - RNA, 89 nt, Homo sapiens
ccgcgacccccggcaacccggagaaggcacagagcggccgcgccagcgaagacgagagccgaggcgccggaaacaacagccaacaaaac

SEQ ID NO: 163613 - RNA, 33 nt, Homo sapiens
ggcccccgaccggccagcccagaacaaagcagg

SEQ ID NO: 163614 - RNA, 77 nt, Homo sapiens
gcgcgagagcccacgagcgaggccgcaggggagcccggcagccgcccgacacaagacacccaagaagcccagcagac

SEQ ID NO: 163615 - RNA, 75 nt, Homo sapiens
aggagggcggcccggacaagccagacaacgccgacagccggaagccgaagcggcgggccagggagaacagaggga

SEQ ID NO: 163616 - RNA, 64 nt, Homo sapiens
caacagcaccaccaaccgaaacggcgaggaaagagaggagccccggaaagaaaaggacagaccc

SEQ ID NO: 163617 - RNA, 43 nt, Homo sapiens
cacaagacgaccaaaggaggaaggggaaacgggagcggcgaaa

SEQ ID NO: 163618 - RNA, 59 nt, Homo sapiens
gccgccgcccggggcgcgcaacagggaccgcaggaaaagaggacccaggaaagaacccc

SEQ ID NO: 163619 - RNA, 89 nt, Homo sapiens
agcgcggccacccccaaagacaaaagacacagaagaaaaaggggacgaagacacgaagcaggaagagcaaagaggcggaaaaagagaac

SEQ ID NO: 163620 - RNA, 77 nt, Homo sapiens
agaagaaaagagggagaaaaggagaagcaggagcagaggccaagcacccaggaaagaacggacagcaaagcagggcg

SEQ ID NO: 163621 - RNA, 57 nt, Homo sapiens
gggaccccagcgacccggagaagacccgaggccccccaccaggcgcccaccccacca

SEQ ID NO: 163622 - RNA, 84 nt, Homo sapiens
ccaagagggcccacccagacccccggcagaaggcccgaccgccggcgccacagccacagcccggagaacccgagcccacacccc

SEQ ID NO: 163623 - RNA, 78 nt, Homo sapiens
gcggagacggccccaccggcaccgagaaagacaagcggcccagggcagcagcacacaaacaaccacaaacaacagcca

SEQ ID NO: 163624 - RNA, 49 nt, Homo sapiens
acaggccacaaaccacgacagcagagaccaaacaccccacgcccaggcc

SEQ ID NO: 163625 - RNA, 77 nt, Homo sapiens
acgccacggacagaccaacggaagaacacagcagcagaaagaggaaacggacaggacacaaacggcaaagcacagag

SEQ ID NO: 163626 - RNA, 57 nt, Homo sapiens
aaaaggacaagccgacaggccaagagcagcaggaacggaacgaggggcggagaccgc

SEQ ID NO: 163627 - RNA, 75 nt, Homo sapiens
agaaaaccccgccacagaaacgccccacaaagccaagcgaggagagaccaagaccacagcgagacacaaaacgcg

SEQ ID NO: 163628 - RNA, 69 nt, Homo sapiens
gccccacccgccgcagcaagcagagcggaggcacccaccacgggccaggcgggccagaggcaagccgcg

SEQ ID NO: 163629 - RNA, 81 nt, Homo sapiens
aaaagaggcgcacggacaccggacagggaccgcggcacgaggccccagggcaccaaggcccgcggaaacccgggcgaggac

SEQ ID NO: 163630 - RNA, 64 nt, Homo sapiens
agagcgggacagccaggaggaagggcagcggcagagcccaggaggagccaccgacccaggccgg

SEQ ID NO: 163631 - RNA, 50 nt, Homo sapiens
gaagcacgcgagcagggggacagacagaccggcgcgcgacgggaccacag

SEQ ID NO: 163632 - RNA, 57 nt, Homo sapiens
ggaggcagccaagaggaacagcaggaaagaccagcaaggaagagaaaggaaccgccc

SEQ ID NO: 163633 - RNA, 67 nt, Homo sapiens
gagggaacaggcagcaggaagcacggcgggcgaaacaggcggaccggaagcgagcaggagcagagcg

SEQ ID NO: 163634 - RNA, 55 nt, Homo sapiens
cggaaagaagagacacagaggagccacacccccagggccgcaagagacaccacaa

SEQ ID NO: 163635 - RNA, 67 nt, Homo sapiens
gccaggagccacgcaggaggggagcccaaaaggcagagcgaggagagaagaaggagggaaagccaaa

SEQ ID NO: 163636 - RNA, 80 nt, Homo sapiens
aggagccgccccgcccggggacgaagagcgcagcccccggcggcggccgcgagagaagccccgagcgaaaccacgcgcgc

SEQ ID NO: 163637 - RNA, 71 nt, Homo sapiens
gagggggaaagccaaggaaaaacggagagccacaaaaaaggaagcgaaaggcagcacgagcagcgccgcac

SEQ ID NO: 163638 - RNA, 69 nt, Homo sapiens
agacaagacgccgaaacacgccccacgaaaggccaaaaacaccgagcggccgccagaaagcaccccgac

SEQ ID NO: 163639 - RNA, 66 nt, Homo sapiens
ccccccaacccccacgacaacggcaagcggagaagagcaaggccgaaccgagaggaagggcaacaa

SEQ ID NO: 163640 - RNA, 55 nt, Homo sapiens
gaccggagcccaaggaggagaggaagccaggcaacgaccagggcacaaaaacccg

SEQ ID NO: 163641 - RNA, 76 nt, Homo sapiens
gacagaccgggagaaggagagcccgagcaggcagcaaggccaacaaagcccaagcaggggaaggcgaagcacgaca

SEQ ID NO: 163642 - RNA, 76 nt, Homo sapiens
ccacacaacccaggcaaccaacagaaaccccaccacgcggcaggggccgccgaggaaaaagcaacaagaagaaaac

SEQ ID NO: 163643 - RNA, 78 nt, Homo sapiens
acaaggccaacacggagcacagaaaagaagaacagagcaaacagacggaagaggagcagacaagggcccacaccaaag

SEQ ID NO: 163644 - RNA, 53 nt, Homo sapiens
cagccaacaacagccaggaacaccggcagcacacgaacagggaaagcacaggc

SEQ ID NO: 163645 - RNA, 52 nt, Homo sapiens
agcacacgacccagagaacccaccccaagcggaaggccaaagacagacgggc

SEQ ID NO: 163646 - RNA, 78 nt, Homo sapiens
gcggccgcggcggccgcgccccagggcgcggggacggaaacacgccgcaccagggaggagagaaacgacaccccccac

SEQ ID NO: 163647 - RNA, 90 nt, Homo sapiens
cgcggggcgggcaggcgagcgcggcggcggcggcgagcggacaaggacgaggcccaaggaaacggcggcgccagcaggacgcgcaacacg

SEQ ID NO: 163648 - RNA, 87 nt, Homo sapiens
gcccgggaggcacgaaggcaccgggcccagcacagccagcaccgcacgcccgcaagggagagacagggcagggcagcagcacgaccg

SEQ ID NO: 163649 - RNA, 74 nt, Homo sapiens
gcagcccagccagccgccaagaacgcagcagcagccgccaagacgcgcgccacgcgccgggagaggcccggggc

SEQ ID NO: 163650 - RNA, 58 nt, Homo sapiens
acgcccaccccccgaacccagccgcaccgacacacgcaagccacggagggcagcccag

SEQ ID NO: 163651 - RNA, 85 nt, Homo sapiens
ccgaccgcgcggccagaaggaacgccaccaacacaacaaccagcccaaaaccagcgcgcaaggccccagagagaccacccaaagg

SEQ ID NO: 163652 - RNA, 62 nt, Homo sapiens
ccggcccagcccgccacacacccgaccgcacgcccaggcgcagcccagcccgaaagcagaac

SEQ ID NO: 163653 - RNA, 83 nt, Homo sapiens
ccacagccaaaagcaccacaacaaaagcgaaagccggacacaccaaacgcagcccagcaaggcggaaggcgaaggcaggaacg

SEQ ID NO: 163654 - RNA, 84 nt, Homo sapiens
aagaagggcagaggaaaccagagcagccaagagaccagccagcaagcagaaaagagggggagagaagagccgaggacaccgagg

SEQ ID NO: 163655 - RNA, 84 nt, Homo sapiens
acaggccgcgcagagcgggaccacccgggcacagcaggcacggagggccgacgccaccgccgagcccagaccggaacagacggg

SEQ ID NO: 163656 - RNA, 70 nt, Homo sapiens
gagcggggacccaggagccggccagcgcgccggagccgccgaggagccaagaacccgagaaggagccaga

SEQ ID NO: 163657 - RNA, 83 nt, Homo sapiens
gaggggcgagaacgccacgcgggccggcgaaagcggaacaagcagaaagcacgaacaacgagaacaagacacgagcaaacccc

SEQ ID NO: 163658 - RNA, 46 nt, Homo sapiens
cagccaagcacagaagccaaaaggacggcgcgcccacgcggagggg

SEQ ID NO: 163659 - RNA, 78 nt, Homo sapiens
gagcaccaggaccagaagggcgaaggggacaaggaacaaaccaagggaaggacaccacggaccagcgcgccaggccga

SEQ ID NO: 163660 - RNA, 79 nt, Homo sapiens
acgcccaggagagggcccacgcagcggagaccgcaggacaccgggaccgggggcgcagcaccgggcagaagcaggcacg

SEQ ID NO: 163661 - RNA, 50 nt, Homo sapiens
cagcgccagcagacaagacagaccacagggaagggagcccaaaacaggag

SEQ ID NO: 163662 - RNA, 70 nt, Homo sapiens
cgaccggaaaagggccaagagcaggaacccgcagcgccaacgcaaacacagcagggggacacacacaccc

SEQ ID NO: 163663 - RNA, 90 nt, Homo sapiens
ggcaagagccaaaagcccagaggaccaaaaagaagccgcgggaggggcagagggacaggcgagcaggaaagacaagagaacaccaaccac

SEQ ID NO: 163664 - RNA, 63 nt, Homo sapiens
ccgcgaccgcccgcgccggcaccggggcggccggccaaagccagggccagcacccccaaagcc

SEQ ID NO: 163665 - RNA, 80 nt, Homo sapiens
cggaggggaaccccgagccgcaggaccggaggacagggacagagagaggcagaagaaaaagcacccccaagcgagagagc

SEQ ID NO: 163666 - RNA, 55 nt, Homo sapiens
gccaaccacgacgaagcggaaggcagaagaaggaggaagcccagcaaggaaaagc

SEQ ID NO: 163667 - RNA, 75 nt, Homo sapiens
gcggccgccgcgccaccaccgggcgccgaggggcgacgaaacaacagggcaacagagaaagccacagacgggaag

SEQ ID NO: 163668 - RNA, 73 nt, Homo sapiens
gggcacgcggaaacaagagcagaggcagcagcagagcgaacaggacgaaaggagaagagggagacccaaagaa

SEQ ID NO: 163669 - RNA, 63 nt, Homo sapiens
cgcgcgcgaggagaggagcgcaacagcagcaccagggcgccagaaagcagaaggaggcgggag

SEQ ID NO: 163670 - RNA, 81 nt, Homo sapiens
cggcgggggccccggacgcacgcgaagggagcggggaggaagacagcccagagcaagcacacggaggcccgggagccagac

SEQ ID NO: 163671 - RNA, 74 nt, Homo sapiens
gggaaagggacaagaagggcaaagccgaaaggagccccgccacaccagcaggcgccaaacaccgggccagggca

SEQ ID NO: 163672 - RNA, 70 nt, Homo sapiens
gggcgccggcgagagccgcaccgccaacccccgagcaagacggggacggggaaggaagccacacccaaaa

SEQ ID NO: 163673 - RNA, 86 nt, Homo sapiens
ggagaaaacggcgcaccggagagacgcagaggggcggcgggggccggaaaagggagagaagaagccagagcagagcaccgaaaggg

SEQ ID NO: 163674 - RNA, 80 nt, Homo sapiens
gaagggagagcagcacccagggccgcaaaaacacagggagagagcaacgcacacggagcggccccgagcaaagaaagaca

SEQ ID NO: 163675 - RNA, 74 nt, Homo sapiens
ggccggacgcaacgcggcgggcgagacgccagggacgaaaagcacgcagaaagcccacgcggagcgacacgccc

SEQ ID NO: 163676 - RNA, 75 nt, Homo sapiens
ggaacagaaaagggaaagggaagagaacggcacgaaaaggcaacacacaagaaaacaaggcagacccggaaacca

SEQ ID NO: 163677 - RNA, 71 nt, Homo sapiens
gaaggccccgaaagaaagccgcgaacccaaggcagacacaacaccacaagcaggaccagcaagacagaaga

SEQ ID NO: 163678 - RNA, 42 nt, Homo sapiens
aggcgccgccgcgcacgcaaccagacaggccagcagaggaac

SEQ ID NO: 163679 - RNA, 62 nt, Homo sapiens
cccacgcagaggcgaagacggggagccacgagggccaagccgcccgccaaccggcagcgccg

SEQ ID NO: 163680 - RNA, 76 nt, Homo sapiens
ccacccccacccacccccacccaccacaagaagcccccgcccccccgacagacggggacgccgcccgcggggggaa

SEQ ID NO: 163681 - RNA, 65 nt, Homo sapiens
aacacaagggccaagacccgcgcacagaaaccccaagccaagaagaagaagcacaggaaggagaa

SEQ ID NO: 163682 - RNA, 52 nt, Homo sapiens
ccaaccgggccccccagcagacgcggggagaagcagaccgcaccaggcggga

SEQ ID NO: 163683 - RNA, 63 nt, Homo sapiens
gggacgggcaaaggaaaggcgcagcgcagaacgaaaagccggaaggagcggccgaacagaccc

SEQ ID NO: 163684 - RNA, 85 nt, Homo sapiens
caggcacaaggagaacacgccgaagagaacaagacgggaagaccaggaagaaaaaagcgggcacgggcagcacaaagccggaggg

SEQ ID NO: 163685 - RNA, 85 nt, Homo sapiens
gccccaccggcggaacccagcaagacaagcagaccggaagaccgacggaagaccacaccccgagggagcccaggacaccacgaga

SEQ ID NO: 163686 - RNA, 76 nt, Homo sapiens
cacccgggcccagccgggaacccccacgcggccagcgaaaacgcccagggcaacaggcaccgacagaggcgagagc

SEQ ID NO: 163687 - RNA, 78 nt, Homo sapiens
agacacgagccccgacaaggaaccaccacacaacaaggcggagggagacggccgaaagagcgaacagcgaaaaagccc

SEQ ID NO: 163688 - RNA, 83 nt, Homo sapiens
ggcaccccccgcggccgggcaacgcgcggccggagcaggaaccagcacggggggaccgaaagaaccgcacagagcaggcccac

SEQ ID NO: 163689 - RNA, 74 nt, Homo sapiens
ggacccagcaaaacaagacaaaaaaccgccacgccggaacagcccaaagccgaaaccccgcgaagcagcagcgc

SEQ ID NO: 163690 - RNA, 76 nt, Homo sapiens
agaagccccaaaaagcgggaaaagggagcccaccacaccaggggaagccaacagcgggacaaacggacagcacggc

SEQ ID NO: 163691 - RNA, 70 nt, Homo sapiens
agacagaaccagaagaaaacccggaacaaagaagagacagcagagacaggcccaacaaaagcaaaagaaa

SEQ ID NO: 163692 - RNA, 40 nt, Homo sapiens
cgacgaccgcacaacagaaacaagggaggcgaggacggac

SEQ ID NO: 163693 - RNA, 75 nt, Homo sapiens
gaaagaggcaggacggcacagggaggcaggaggccgagcacgagaagagaaccaggaacagaagcacgacaagcc

SEQ ID NO: 163694 - RNA, 78 nt, Homo sapiens
acaacacccaaccaacggacaccaccaggggacggcacggacgacagaagcgacgggagaccggcaggagagagagac

SEQ ID NO: 163695 - RNA, 51 nt, Homo sapiens
gccgcgggagcgccgccaagggcccacacacacgcagggcgcccagcacgc

SEQ ID NO: 163696 - RNA, 115 nt, Homo sapiens
gcacagacggaagcaaggaacaaaccgaagaacagcgggaaagaaggcaaaacacgggcagcggggcaggaacaacgggccaaaggccacacacagagggcgccgagcgggacgc

SEQ ID NO: 163697 - RNA, 85 nt, Homo sapiens
accaggcgaagcggccgagcaggcgagcgaacgacgcgcgagcaaggaaccccgggccccgccacccacgcgaccagcccacgcc

SEQ ID NO: 163698 - RNA, 85 nt, Homo sapiens
gagaccgcggccgggaccgagggagcaggccgggcccgccagggcacgcgcccgccacgggaagcccgagaagccgcgcagcacc

SEQ ID NO: 163699 - RNA, 77 nt, Homo sapiens
agcccagcgagcccccccgcacaccacacgcacaggacaccaaagaggaagagaaacaccaaggaaccacacaagaa

SEQ ID NO: 163700 - RNA, 75 nt, Homo sapiens
cgaacagaaggaacgacgcggaccagaagccagagcgaggacgccggcagaaccacagaaaaccaagaagccaca

SEQ ID NO: 163701 - RNA, 85 nt, Homo sapiens
caacagaccccagcaccccccaaagggcacagggaagaaggagaaagggccaaccccgaagaagcaaacagaaacgaaggagaca

SEQ ID NO: 163702 - RNA, 85 nt, Homo sapiens
ggagacccggggacccccgacgccaggcagcgcccccaaacgagccaacgccggcggaccccagcgacacagcagaaccagcagc

SEQ ID NO: 163703 - RNA, 41 nt, Homo sapiens
ggccgcaggaggagggagcccagcagagcaaaggcccgaga

SEQ ID NO: 163704 - RNA, 72 nt, Homo sapiens
ccgcccccccccccccccccggaaaagcgagcaacacaacaggccaccaccaaaacggagggacccacccca

SEQ ID NO: 163705 - RNA, 57 nt, Homo sapiens
ccgcaccaggcgagcagcgcccccggaccccgaacaagaacacacgaaaaacagcca

SEQ ID NO: 163706 - RNA, 69 nt, Homo sapiens
caaggagccaggaaggaggaggaaaaaaggagcaaaaggaacacaacccacaggaccgcgaacaaggag

SEQ ID NO: 163707 - RNA, 84 nt, Homo sapiens
aaggggcaacaagacaccccagaccaacccgagaagaaccagaagcggaaccggaagaagacgaacagacggggagaaagccag

SEQ ID NO: 163708 - RNA, 77 nt, Homo sapiens
acaggccaggagccagacaagcccagcaagaccaaacagccaaaccagacagggagccgaaaggaggggcagcccgg

SEQ ID NO: 163709 - RNA, 78 nt, Homo sapiens
gaggcgcagcccaaggaggaggaggccagcagggagcgggaaacgcacaacagagaacagaaaagacccgcagacaac

SEQ ID NO: 163710 - RNA, 67 nt, Homo sapiens
cgaacgagccaggacaaaacagcaggagcagggagagaacaaaaagggaagcacccggccgaaagac

SEQ ID NO: 163711 - RNA, 71 nt, Homo sapiens
gccagaccgcgggcccacggccgccccagggcaagacggaacaagacaggcagaaaagagaccaaaagacc

SEQ ID NO: 163712 - RNA, 63 nt, Homo sapiens
cggagggccgcgccacaagcagcaggccaagagccagagacgcggaacaagagcaagaacaag

SEQ ID NO: 163713 - RNA, 73 nt, Homo sapiens
agaggaaagcggcccacaaaaacagcggaggagaccgggaaaccgccgaagacgaagccggacaggacaaaag

SEQ ID NO: 163714 - RNA, 78 nt, Homo sapiens
caccgcaggcaaaagaacccgcccacacggccagaggagaggcgaagggaagaagccacccagggagagccagggaac

SEQ ID NO: 163715 - RNA, 69 nt, Homo sapiens
cccggaagagaggaccaaaagcccccagcaaaaccaccccagacacgaccaggcagagggaaggagcgc

SEQ ID NO: 163716 - RNA, 58 nt, Homo sapiens
ggaaaaggccgaagaaaccaaggaggacagacaagcaacgaaagcccagccagccaag

SEQ ID NO: 163717 - RNA, 79 nt, Homo sapiens
acagccgcacccgcgccccagcagacaggccggacacaaccacaaacgagccacgccaaagggcccggccgggacaccg

SEQ ID NO: 163718 - RNA, 70 nt, Homo sapiens
gacacggggagaacggaagaaaggacacagggcagcgagaaaaaggaagaaacaccaagaacaagagcag

SEQ ID NO: 163719 - RNA, 79 nt, Homo sapiens
ggagccggggccgcagccaccaggacgcaaagcccaaaccccaggcccaaacacaggcgcgagacgacccagacggccc

SEQ ID NO: 163720 - RNA, 72 nt, Homo sapiens
cacggggacgagaaagggggggaaccacgacaagaacacaagaccgagagccgggaagcaacagggccagcg

SEQ ID NO: 163721 - RNA, 60 nt, Homo sapiens
gccggggacgacaaggaggacggcgccccccacaacacagcggcggagacaaggggcaaa

SEQ ID NO: 163722 - RNA, 67 nt, Homo sapiens
cgcagggcgcccccgaccaccgccagggagaaaacccacacaggcagccaccagagagcaaaggaca

SEQ ID NO: 163723 - RNA, 88 nt, Homo sapiens
gaggggccacgcgggcccgaggcgcaccaagggcgaaggagccggcccaaggacgaagccaagaggcgaccaggacccgcgggcacag

SEQ ID NO: 163724 - RNA, 66 nt, Homo sapiens
gacagaagcaacagggacggcaaaggcgcaacggccccaacgacaaggaagaacgccgaacagcca

SEQ ID NO: 163725 - RNA, 68 nt, Homo sapiens
gccccgcgccgccgaccccccggcgccgcgccggcggcgacaggaagggaaggggcggagacgggcgg

SEQ ID NO: 163726 - RNA, 75 nt, Homo sapiens
cccccaagagcgagaacagggaaggcggggccggggcgcagggaggcaggcgggccccccgcccgccaccacgac

SEQ ID NO: 163727 - RNA, 76 nt, Homo sapiens
aggaagaacaaaagaaaaaaaagacccggaagaaagcaggaaagacgccacggagaccaaaaagaagagagaaaag

SEQ ID NO: 163728 - RNA, 75 nt, Homo sapiens
ccgagggaggaagcaaacaccagagaggcaagcggcagccacacccggagaaggagccgcccagggacgaagcac

SEQ ID NO: 163729 - RNA, 83 nt, Homo sapiens
agaggaagaagcgcgagacccacgaggcgcggcccggaggcccagaaacgggccgcgccaccaaggacaggaggccagggcac

SEQ ID NO: 163730 - RNA, 66 nt, Homo sapiens
agcagcccgcagagccgcacaccccgaagaagacaagagcagacgagggagaagcgggcaaaacag

SEQ ID NO: 163731 - RNA, 66 nt, Homo sapiens
caccagacagagaccagcccgaaccggggggagccagcacgaggggcgaaccacggaaaggaggaa

SEQ ID NO: 163732 - RNA, 110 nt, Homo sapiens
ggaccgcagacgggggacgcagggaggagcgggacaccccggaagcgggaaaggacccaggaagccacccgcagaggggcaaggagaaagggcaaacgcagcacacaagg

SEQ ID NO: 163733 - RNA, 83 nt, Homo sapiens
cagcagccaagggccaggaagcagagagaacaggcaaggcccagcagcacacaaggagcaagccaggagaaagcaacagccag

SEQ ID NO: 163734 - RNA, 81 nt, Homo sapiens
aggaagacagggacagggcggaggcacgcacaggaccacaggagggggagacaggacaggacagccgagaaacacagcggg

SEQ ID NO: 163735 - RNA, 69 nt, Homo sapiens
aacagagacccgcccacgcaggacgaacgagagccaacagaagcaacgggacaggcgcagcggacaacc

SEQ ID NO: 163736 - RNA, 70 nt, Homo sapiens
cagggcgacagaacaaagcccgcaagaggagggcgacgcgcaagggaaaagacgcgagacgaggaggaga

SEQ ID NO: 163737 - RNA, 47 nt, Homo sapiens
gacaacgaacaaacccagaccagcagggaaagaccaccacacccaca

SEQ ID NO: 163738 - RNA, 69 nt, Homo sapiens
gccgcgggcgccgcccccccggcccccgggacggcccaaggccagcccgcagaggacaagaggaaaaac

SEQ ID NO: 163739 - RNA, 82 nt, Homo sapiens
ccaagacaacaacgaagacaaggagccagacacccgcaaaagagagacgcagaagcccaaagagaagagaagcaaggaaaga

SEQ ID NO: 163740 - RNA, 75 nt, Homo sapiens
gcggaagcaacacaacaggaggcggaggcgaaagcggaacgagcgcggcgacagagcagagagccaagcccagcc

SEQ ID NO: 163741 - RNA, 84 nt, Homo sapiens
acggcccacgaggcgcacgaggagggcacacccacccagagcggcggggaaggccacccagggcagcgggggcagagacgggga

SEQ ID NO: 163742 - RNA, 62 nt, Homo sapiens
agagaagaaaaaacacgccagagaaaccaggaggaaggaccgagcgcaggaaccaggccagc

SEQ ID NO: 163743 - RNA, 70 nt, Homo sapiens
acaaacaaggagggcgagagagacagggaggaagcgacggcggaacaccgggcgaagagcaggccgcgca

SEQ ID NO: 163744 - RNA, 71 nt, Homo sapiens
ccagacccggcgaaaggagcggcaagcaccacgggacgaaaaggggagagcccagggacgcggagggagcc

SEQ ID NO: 163745 - RNA, 83 nt, Homo sapiens
cgaccagggaccgcccgccgcggcgcccgggcaaaagggaaagcaaggggaagggcccaagaagacaccccaccagaaaccga

SEQ ID NO: 163746 - RNA, 80 nt, Homo sapiens
gagcccgccgcgcgggcccgcccgacgcggaagaagaggccccaggaccggcgaggccccccccccagcagcaaagggac

SEQ ID NO: 163747 - RNA, 77 nt, Homo sapiens
caaaagcagaagaaaccagaggcaaaaaggaaacacccgcgagcaaaggaaacggagccaccaccaccccgagagac

SEQ ID NO: 163748 - RNA, 43 nt, Homo sapiens
gcaggcgagaagagaagaccccagagcagaaggaggagaaccc

SEQ ID NO: 163749 - RNA, 35 nt, Homo sapiens
gggagggacggaaacaaagacagagacacagcacc

SEQ ID NO: 163750 - RNA, 82 nt, Homo sapiens
agagccagcggcgccccacccagaaacccaggacagagcacacagacgacacaccacaggggggaccgaaacaacacgaagc

SEQ ID NO: 163751 - RNA, 62 nt, Homo sapiens
ggccggccgcgccggccggccgggaccagcaggggaaagcgcgagcgagcacccggagcagc

SEQ ID NO: 163752 - RNA, 69 nt, Homo sapiens
gcagagacacagcgcagaggaaggaaagaacccagccagggggaggacaaaggaaagccagcagagcag

SEQ ID NO: 163753 - RNA, 71 nt, Homo sapiens
gaagcaggggccacaggggcacgggaggccgaagaacaggagaaggaagaacaaagaaagacagaggaaag

SEQ ID NO: 163754 - RNA, 82 nt, Homo sapiens
caggggccgaaagaccccaaagaggaccggcccacagacgccggggcccagaggagcgggcgaccagcagggagcaagagga

SEQ ID NO: 163755 - RNA, 87 nt, Homo sapiens
ggcggacggggggggccgcgcccggccccgcgcgggcggacggcggaggcgcccccagagagcacaggagcacgggagcaggggcag

SEQ ID NO: 163756 - RNA, 98 nt, Homo sapiens
agcaccccaccaggagcgcgggcggacccagacacagagcggaagaggggccagaggcgccggaaggacggggacccgagaaaaggaagggacagaac

SEQ ID NO: 163757 - RNA, 76 nt, Homo sapiens
acggagagcgcaccaggaacgggaaccagggaacaagcagcagccgagagccgaaagggccaggaacgccaaccgc

SEQ ID NO: 163758 - RNA, 83 nt, Homo sapiens
gacagacggagccgccacccagagcgcacggcgacgccccaggggaaaacccccgggaccagggcgaagaagagcagagcagc

SEQ ID NO: 163759 - RNA, 80 nt, Homo sapiens
gggggaaacacagaacgcagggccggcgcggaagaggccggcggcgggacggccccacgggacccgccccgaccacagca

SEQ ID NO: 163760 - RNA, 85 nt, Homo sapiens
gccccaccgcagcagcgggcccgaccagccggccaggcaggggccagcagccgggcccccaggaccgaggccaaaagaaaggaag

SEQ ID NO: 163761 - RNA, 73 nt, Homo sapiens
gcgggcgcgggggccggggcgcgcgcaggccgcagggcggagaaaaagggaacccgaggaagcaacagaaccg

SEQ ID NO: 163762 - RNA, 63 nt, Homo sapiens
gcgaaggagggcccgcccaccggggaggagaggaaggaagagccaggcggcacccagggccgg

SEQ ID NO: 163763 - RNA, 72 nt, Homo sapiens
gaacagagcagacccggacggaacaggcaaaagacgaaaagggcgacagcaagccagggggcagagacccgg

SEQ ID NO: 163764 - RNA, 78 nt, Homo sapiens
cgggggcagcgccgaaccaggaccggacccggacccaaaggccagcaacaacgaagggggaacagaaaaggcaagaag

SEQ ID NO: 163765 - RNA, 37 nt, Homo sapiens
acaccaacgggaccagaaggagggcgaaagagagaga

SEQ ID NO: 163766 - RNA, 76 nt, Homo sapiens
aaggaggaaaaaacaaccgggcccacgagacacggcagcagaggcgccgaacagacaggacagcaccagaaaaagc

SEQ ID NO: 163767 - RNA, 80 nt, Homo sapiens
agcagaaacacaaagcagcccaaccaaaggccccagcggcgcacagggagcaggcgggagggacgaaagaacagaaggcg

SEQ ID NO: 163768 - RNA, 74 nt, Homo sapiens
ggaaagggaaagcccgaccaaagggcgcaaggcccgagcagcaaacacaaacaaccccgcggagagaccacagg

SEQ ID NO: 163769 - RNA, 52 nt, Homo sapiens
gaaggcagcaaagccccccaaaggaagcccagaggcacggggcagaacacca

SEQ ID NO: 163770 - RNA, 74 nt, Homo sapiens
cgggagaaaaacaagaaacagcagccaaccaggcccgagacaaaaagacccaacagaggaagccgcaagaaacg

SEQ ID NO: 163771 - RNA, 79 nt, Homo sapiens
caaggagcaaagcagcggcgcagcccgggagaggacggggacgggccccaggacgaggaagacaaggccagccacggaa

SEQ ID NO: 163772 - RNA, 102 nt, Homo sapiens
gagggcgggcggcagcgcgacggggagcggcggagaccgcccgccccgccgggagaggcaagcaaccccggggaagaggccaggcagccacgacaacaagac

SEQ ID NO: 163773 - RNA, 75 nt, Homo sapiens
gacaccgcgacaccccaacaaacaccagcgcgggagggagcaacaacaaggagcaagcacagcgcgagccagccc

SEQ ID NO: 163774 - RNA, 84 nt, Homo sapiens
agagacaagaggcaccaaagcagccgcccccgcagccccgacaaggacacaccccaagcagcccaccaggggcggacaccccgg

SEQ ID NO: 163775 - RNA, 55 nt, Homo sapiens
agaggaccagacaaaaggaacagcagagaacaacaagaggcgggaggccgaaggc

SEQ ID NO: 163776 - RNA, 66 nt, Homo sapiens
caggaacaaaccgggggcaaggccaaaaagaagagacaagacaaagcgcaggaaaaggacaggagg

SEQ ID NO: 163777 - RNA, 72 nt, Homo sapiens
gcgaaggacccagacccacagagaacacgaacaggcacgggggaggggagccagacaacaaaaagaacaagc

SEQ ID NO: 163778 - RNA, 76 nt, Homo sapiens
cgacagcccgcccaggaagggacccgagcacggggcggagaacggaaaagcaccaggaagcagagaggaccgcaga

SEQ ID NO: 163779 - RNA, 60 nt, Homo sapiens
ccccgggcggcgcggcgaccgggccccggagaggaaagaaaaggggccaccagaccccca

SEQ ID NO: 163780 - RNA, 81 nt, Homo sapiens
acggggaagaaaggagcgaggagcagaaaccagccacgggccggaggcaaaaaaggagggaagccgggcgccaagagccag

SEQ ID NO: 163781 - RNA, 66 nt, Homo sapiens
cagcccccggccgcagcgcaggcagcccagcaggccacagaacaccgccggccacaccggccacag

SEQ ID NO: 163782 - RNA, 72 nt, Homo sapiens
gaggaacgccggcccgagaaagcccgccagcagggccgcaagagacaccacaaaaggacacccgagcgcgga

SEQ ID NO: 163783 - RNA, 52 nt, Homo sapiens
cacaccgaaagccacagcaagaagaacccgccacccccacccggcgccccgc

SEQ ID NO: 163784 - RNA, 81 nt, Homo sapiens
agccacccggagggggggggagcagcggcacaagagggcgaccggcgcccaggagcgcaggccggggcccgggaggacccc

SEQ ID NO: 163785 - RNA, 78 nt, Homo sapiens
aaaccccaagccccgccaggcccaaccacaccaggcaaggagagggggcaccccagacaggagaacgggacagggcag

SEQ ID NO: 163786 - RNA, 84 nt, Homo sapiens
ggaggcgcaggccccaagcggggaggggccggacgccggagagaggcgccacccaacagacgcccacccaaaacagccgacccc

SEQ ID NO: 163787 - RNA, 78 nt, Homo sapiens
cgccggaggcccggccacccgagaagggagacgacgcgcgggccgcgagcggggcgacccgagagccgagagcgccgg

SEQ ID NO: 163788 - RNA, 80 nt, Homo sapiens
agaaaaacaaggaaagaggggaaaggagggaaaaaccagaagagaaaaaacaaaggggagaggcaccccgcgggacgacc

SEQ ID NO: 163789 - RNA, 75 nt, Homo sapiens
cgcccgggccagcggccgcgcacccccggccggaggcaccagcgagacaccaggggagaagcgacgggccggcgg

SEQ ID NO: 163790 - RNA, 85 nt, Homo sapiens
acaaggcggccaccaaggcaggcagcgggcagcgacccgcaagggaaaacgcagagggaaaaccagaaggacagcaacagcgccg

SEQ ID NO: 163791 - RNA, 62 nt, Homo sapiens
gaaggaccaagaaccagcgaaccggacggcccaccacgacgggcgcgcccggagaggaggaa

SEQ ID NO: 163792 - RNA, 79 nt, Homo sapiens
cggagacagagcaagaaaagcccgggagcagaagggaggcccaagacccacaacaaaagacaacgaagagaggaaagaa

SEQ ID NO: 163793 - RNA, 76 nt, Homo sapiens
gagcaaagcacaaccggccccacaccaccccaaagaagccggaaacgaaacagcgcagccaggaacaggacgaaga

SEQ ID NO: 163794 - RNA, 78 nt, Homo sapiens
aaaaccagggcggcaaaacgagcgggccagggcgcgcgggggcacagcccaggcgcagcagcggacccccccggcccc

SEQ ID NO: 163795 - RNA, 85 nt, Homo sapiens
gcagagggcggggggcgagagccagagacggcgaggagagaagagacgaggaggaggggagaccgcggcaggacacgaggacagc

SEQ ID NO: 163796 - RNA, 79 nt, Homo sapiens
accaggagcagcacgaaggaagagccaggaagggagggaaaaagaaacgggcgaagggggaaaagagaaacgcacaaac

SEQ ID NO: 163797 - RNA, 54 nt, Homo sapiens
gcagccccagccaagggggcaaaagaaagccagacggagaaggaaagcacaccg

SEQ ID NO: 163798 - RNA, 76 nt, Homo sapiens
ccggccccacgcacgacgagagggacagcacggcgccaccaggggccagaaccgcccacggcccccacagcggacc

SEQ ID NO: 163799 - RNA, 71 nt, Homo sapiens
cggagggggccacacgaacagggggcacaggcgcagggagcaggagaagcggagcgaaggggcgggcaggc

SEQ ID NO: 163800 - RNA, 55 nt, Homo sapiens
cgagagcggaccgagagcgcgaaacgcacgagaaggagggcggagagaacacccc

SEQ ID NO: 163801 - RNA, 84 nt, Homo sapiens
aaaaggcggcgcccgaagaaggcaagagcagaggccccagaccgccaagaggcacaggaagagcgccgaagggaaggccaggac

SEQ ID NO: 163802 - RNA, 75 nt, Homo sapiens
agcggcagggccccgcgggcagcgggaaggggccgcaaggccaggcgcgcagaggcacccaacggcacagacccc

SEQ ID NO: 163803 - RNA, 57 nt, Homo sapiens
ggcggacaccacaagaagggcgccagcccagaaaccaccaaaacaacacaaaaaccc

SEQ ID NO: 163804 - RNA, 76 nt, Homo sapiens
aagccggacccgaggcagccgaaagaacgcaggaaggagaaacacagcaaaacagagagaacccaccaaccaaaga

SEQ ID NO: 163805 - RNA, 88 nt, Homo sapiens
ccgggacagccgagggcggccgagcccggcgcagggaccggcgcgcgggagcgcacggccccaacggccccgagccccggccccaaag

SEQ ID NO: 163806 - RNA, 94 nt, Homo sapiens
gggcgcgcggagcaggagcggggccggaacggagccgaggcgcaggggcgcggggccggcggcggcggcgccccgagggacgcggcccaggcgg

SEQ ID NO: 163807 - RNA, 90 nt, Homo sapiens
cgaagccacccagcgccggagggagggcgccgcgccaggccgggcggcaggccagccgagaggaagaggcaagcgaggagcacccaaccc

SEQ ID NO: 163808 - RNA, 69 nt, Homo sapiens
ccaccgcggcgccgagagaaaggaccagaggaccgaagaaagcaccagcgggcaacaagaaaggaaggc

SEQ ID NO: 163809 - RNA, 51 nt, Homo sapiens
gagaagccaaccacccgagccacagccggacacaagagggcaagaaaggcg

SEQ ID NO: 163810 - RNA, 88 nt, Homo sapiens
ccgagaagagcagagcggagggagccccagacacgacagagaagcagccaggccacacggagcagggcagggaggggagagcgaccag

SEQ ID NO: 163811 - RNA, 84 nt, Homo sapiens
gcagaaaccagaagggaaaaacacacagagaacggccacaacaaggagaggaagaagcggggagagaccaacaagaccgcggca

SEQ ID NO: 163812 - RNA, 83 nt, Homo sapiens
gaggaaccaaagggagaggaaagggcggaccgcggaacccgaggccagcccagaaaagaggggcggggacaacacccccccca

SEQ ID NO: 163813 - RNA, 78 nt, Homo sapiens
caaggcccacgccgcacaggggagcggcccgcacagcgcccaccaggaccggcccgcagacaacccacccggaacgcc

SEQ ID NO: 163814 - RNA, 78 nt, Homo sapiens
aagcaaaggcacggcggaaggacccgagacggaaaaaaacaggcgacggaacgaggaggaggccggaagaaaacgggg

SEQ ID NO: 163815 - RNA, 59 nt, Homo sapiens
agacggacaacaggaaaaacccagccagacccccccaagacacaagacccaccacccca

SEQ ID NO: 163816 - RNA, 73 nt, Homo sapiens
aacccggcccgcaaagagcacccacgggccggaccgacggaggaccacacgagggaaccggccgcggcaacgg

SEQ ID NO: 163817 - RNA, 78 nt, Homo sapiens
acaaaggcagcggaggcacggacaccacacacacacagcgggaaaaccagacaaggaaaacagaaggagaaaacagcc

SEQ ID NO: 163818 - RNA, 66 nt, Homo sapiens
aaaaccagagaaacaagaggaggagggcgagacgacgggaccgaaggaccccgccagagacaaccg

SEQ ID NO: 163819 - RNA, 82 nt, Homo sapiens
aaagagcgccccggcacggagcagcaaacgcagagacaaaagaaacgggccccgacgccacgagagaagaaagaaaaagaaa

SEQ ID NO: 163820 - RNA, 81 nt, Homo sapiens
ccggaagagcgcggccgaaggaggcgacgagacggagacagcaaacagaaagcacccccaggcaagcacccagaagaagga

SEQ ID NO: 163821 - RNA, 73 nt, Homo sapiens
agaaaggaaacgcagagaagaaacacggcaaaaagaaaaaccagcgaagcacaggaagcgccacgcagagagc

SEQ ID NO: 163822 - RNA, 76 nt, Homo sapiens
acagacagccacgcagacggaaacaaggcaacagaaagagcaacagcagggcaacaggaacacaagccagaaaaag

SEQ ID NO: 163823 - RNA, 92 nt, Homo sapiens
gccacacaaaagcggacaagcgaagcaggccgagagaagaaaaagacccaagaaagcaacgaaaggaacgcaagaacagaagaagaaagcag

SEQ ID NO: 163824 - RNA, 71 nt, Homo sapiens
gaaaaacagaaagaggaaaaccagagaaacaagaggaggaggggacagcagaccacagcccggcaggccca

SEQ ID NO: 163825 - RNA, 61 nt, Homo sapiens
cggcccccacaccccccgagccggagcaccaaaaccaccccggaaacgagaagaagagaca

SEQ ID NO: 163826 - RNA, 59 nt, Homo sapiens
gacaggaaaaaaagagcaccagggcagcgcagccccaggacggccgcacgccaccgggg

SEQ ID NO: 163827 - RNA, 69 nt, Homo sapiens
ggccaggcacagagcgggcacggggcagcaggagaagaacaagcgggacgaaggcacccggagacgcag

SEQ ID NO: 163828 - RNA, 64 nt, Homo sapiens
cgggcaccagggaccagcgaaaaggcgaagcgagaaacaaggcaggaaaacacacaaagaaccc

SEQ ID NO: 163829 - RNA, 60 nt, Homo sapiens
cgcaccaggacgccgagaggagcaagcgaggaacacccaacgccccccaggcaacagcca

SEQ ID NO: 163830 - RNA, 72 nt, Homo sapiens
gacgaaccagcaaagaagcccgaggaccagaacagcaagcgcagacccaggggagcccaccagccagcaaca

SEQ ID NO: 163831 - RNA, 82 nt, Homo sapiens
ggcaaaccagccacggggccaggacagaagacacaaggggaagaacacgcagcccacagcgggccgccccagacaagagggg

SEQ ID NO: 163832 - RNA, 70 nt, Homo sapiens
cagaaaacaaagaagccagaggggaggaagacaaggaacgcccccacgcagcgacaaaacgaaacacagg

SEQ ID NO: 163833 - RNA, 79 nt, Homo sapiens
aaagaaccacaagcccacgggacacgcggcaggaacggacagaacagggaggcgcagagcgaaacaaaagaagacacag

SEQ ID NO: 163834 - RNA, 74 nt, Homo sapiens
ggagcagcgaaaacggggagagccggaccccagccacgaggcgacagggccaggccaccaagccagaagagacc

SEQ ID NO: 163835 - RNA, 84 nt, Homo sapiens
cggcgcagacaccaacgcgggcgcgaccgggagcggaccccgggcaccagcccgaagaagccgggcagaccaggcagcagcgga

SEQ ID NO: 163836 - RNA, 78 nt, Homo sapiens
ccggacggaaagcgacaagggaggcgccgccagcggccgggaccgaacaggcggaaggaagggaacacggacgacgag

SEQ ID NO: 163837 - RNA, 79 nt, Homo sapiens
gaacagcgggaaagaaggcaaaacacgggccaagaagcgagagaagaaaaacagaaaaagccaagacagaaacaagaac

SEQ ID NO: 163838 - RNA, 76 nt, Homo sapiens
ccaccgcgaccaagccagcaacagaaaggccaagaccaaagaaccgcgcaccaggagcgagaccccgaagcaggca

SEQ ID NO: 163839 - RNA, 81 nt, Homo sapiens
ggaggcgccccgccccgccgcacagcccgcgggccagcgccgcgcccgagccccggcgggaggaagaagagcaccggcgac

SEQ ID NO: 163840 - RNA, 72 nt, Homo sapiens
aaaggcaccgcaacaacgcccagcgagcgggccgacaagaaagccgaggcggggcgggcagcaaccgaacca

SEQ ID NO: 163841 - RNA, 77 nt, Homo sapiens
aggcggagcccgcagaccgcagaaggccggagacaccagcagacaacaggcacaaagagagaaggaacacccacagg

SEQ ID NO: 163842 - RNA, 78 nt, Homo sapiens
cagaacccgagacaaccaccgggggccaccaccgaggagaggagcgaaaccagggcaccgcagcccccacaccccgag

SEQ ID NO: 163843 - RNA, 74 nt, Homo sapiens
cccacccccgacccgcggacggagagcccagcaaggagaagacgcagccgcaggagaaccagcgcccgacccgc

SEQ ID NO: 163844 - RNA, 69 nt, Homo sapiens
accagacaaggacccacaacagacaaaccgaacccagaccagcagggcccccgggcaccgggcaccgga

SEQ ID NO: 163845 - RNA, 65 nt, Homo sapiens
gaggagcacgcagcgaacaagaagagagccaccccaacagggaggcccagcgaagagaaagaaaa

SEQ ID NO: 163846 - RNA, 80 nt, Homo sapiens
gggaagaagccaggcagaagcagacccggccggccagcgcaccaggcaaggggagcgacagaacaagaaagaggagacag

SEQ ID NO: 163847 - RNA, 73 nt, Homo sapiens
aaggccgaaagaacggaaggaacaggaaccaaggaaaaaagcacacaagagaaccgccagcagagaggaccag

SEQ ID NO: 163848 - RNA, 79 nt, Homo sapiens
aaggagcgaccagaaggagccaccaggccgaggaggaaggaccgagcgcaggaaccaggccagcgcccagcaagcggaa

SEQ ID NO: 163849 - RNA, 56 nt, Homo sapiens
gagcgaaaaaacaggaggacacaagaaagcaaggcacacggacgagagaaagaaga

SEQ ID NO: 163850 - RNA, 71 nt, Homo sapiens
ggaagggagcgacaagggaagagaaaggggcaacaagaaaggccaaggaaaagaaggaaacaacagaacag

SEQ ID NO: 163851 - RNA, 77 nt, Homo sapiens
acaaccaagagggcaaaaacgaaagcaacggagccagaggagcacggccccaggccggaggaaaggcgcgacacccg

SEQ ID NO: 163852 - RNA, 70 nt, Homo sapiens
gaagcggagccgaaccaggccaacccagaaaggcccgagacaccccgcaacccagccgaaccgccgcgcc

SEQ ID NO: 163853 - RNA, 59 nt, Homo sapiens
agcgcaccggcgacggcaggcgaccacgccacgcccggaccagaacagagaagaaagca

SEQ ID NO: 163854 - RNA, 64 nt, Homo sapiens
aaaaaaacaagaaccagcacccagcagacacagccgcccaaaagcaggccaaggggcccaacgg

SEQ ID NO: 163855 - RNA, 99 nt, Homo sapiens
ccaccacaaccagcacacaaccaacagcaaaacgcccgcggaaaaacacgaaagaccagggagaaaaacagacggaaaccgaaagaacagaacagcaga

SEQ ID NO: 163856 - RNA, 78 nt, Homo sapiens
acgccaccaagcagccaaaggggcaccgcagggggagagccacccagcagggaggggaaggggagccagggaacaagg

SEQ ID NO: 163857 - RNA, 81 nt, Homo sapiens
caccgccccaacccacgagaggacagcccagggaccaagaaaggcccagggaccaaagcccggacaaggcccgagcaccag

SEQ ID NO: 163858 - RNA, 77 nt, Homo sapiens
aaacaccacccggacccgcgaccgcacaaagacgaacagcacgcaagccagaccacaggaagccaggccacagcgcg

SEQ ID NO: 163859 - RNA, 77 nt, Homo sapiens
agagaggcccgcagcaaagcagggcaaccagccaggagaaagccacagaccggggcccgccacccagccccccacac

SEQ ID NO: 163860 - RNA, 58 nt, Homo sapiens
agccgagcgacggccccaggcggagaccggcggaaggagagacaggaagggcacagaa

SEQ ID NO: 163861 - RNA, 72 nt, Homo sapiens
gagagaaaccgcagggagaccagcacgagccgggcgggacgccggaaggggcacaagacacgcacaaggaag

SEQ ID NO: 163862 - RNA, 62 nt, Homo sapiens
aaaaaagacaacaccaccaagacgaaggccggcgggcaggcgaaggccccgccgaacgccac

SEQ ID NO: 163863 - RNA, 84 nt, Homo sapiens
gccaccacccaggaccagaagggagaggcccccagcgcaggggcaaaagaaagaccaaccaagcccacagcacgaaaacagagc

SEQ ID NO: 163864 - RNA, 52 nt, Homo sapiens
agaccagagccgggaccccagccaggcgaagagccaccagcggcgacgcagg

SEQ ID NO: 163865 - RNA, 74 nt, Homo sapiens
aaaaccaggcgacacaaagcagcccccaacgaagaggcacaaaggaaagagcacaacagcggccccacaagcca

SEQ ID NO: 163866 - RNA, 72 nt, Homo sapiens
cggccgccagaccacagcacagccgggaaggggagccaccagcccccggcccgaacagagcaacaaagacgc

SEQ ID NO: 163867 - RNA, 83 nt, Homo sapiens
cagagacacgccaagcagccagcccaggagagccggacaccgagcccaagcccccacaccaggcaggagaggcggaaggaagg

SEQ ID NO: 163868 - RNA, 78 nt, Homo sapiens
cccggggcccggagccggcgcccccggcgcgggcgcggggcacaagcgggccagaagcacacccgcccggcgcgacaa

SEQ ID NO: 163869 - RNA, 74 nt, Homo sapiens
aggaaggcccagcaaagagaagaaggaggaaaaggcccaggcgagaaagaaaccggaagaaagagacgccaaag

SEQ ID NO: 163870 - RNA, 77 nt, Homo sapiens
aagaccagaacgagccaagaaccgagggcaccggagggaagcgggccaccgcccggcccccaagacggcccccgggc

SEQ ID NO: 163871 - RNA, 66 nt, Homo sapiens
gaaggagaacagccgcagcccaggagacagaaccacaagcagccggaaccccacggacccgcaggc

SEQ ID NO: 163872 - RNA, 72 nt, Homo sapiens
agaacaggcccaggaagaagaaagagaaagaggcccggcaaaaaggcagagacaagggcagagccaagcgcc

SEQ ID NO: 163873 - RNA, 84 nt, Homo sapiens
cgcggccccaggcgcgcggagagcagaggggaagcgagagaaaaacaagcgccacacggcagaccagagggaaacagcaggaac

SEQ ID NO: 163874 - RNA, 79 nt, Homo sapiens
gagacgagaggacgggaccaggcgaagcggccgagcaggcgagcgaacgacgccaaagaacacggcagaagcccccaag

SEQ ID NO: 163875 - RNA, 84 nt, Homo sapiens
ccgggaccaggcccgggggcggcggccacgccaaggacggaggcggagaagaacccaaccaaaaccaggcggcaaccccggggc

SEQ ID NO: 163876 - RNA, 75 nt, Homo sapiens
gaaaagagaagcagaagccccggggcaagagcgaagacagaagaagggggacacaaaaggccgggggaagcccag

SEQ ID NO: 163877 - RNA, 78 nt, Homo sapiens
ccacgcaaccggggggcccagcgcccgggcagggaagcagaggcacccacgcccacaagcgccaggccagggaggcga

SEQ ID NO: 163878 - RNA, 71 nt, Homo sapiens
acacccgagagcaccgccgagcggaccccaagacgggcggcagagaagagaagagcacagcgggaggaaag

SEQ ID NO: 163879 - RNA, 77 nt, Homo sapiens
ccgaccgagagccgggacgaacagcgggccgcagccaagcgccgccgggcaggcaacgagggaagagaagaaaccga

SEQ ID NO: 163880 - RNA, 66 nt, Homo sapiens
caaagccacccagccaagaagagcaaaaagcggaaccacaagaagaaagcaacgacaagaacccac

SEQ ID NO: 163881 - RNA, 72 nt, Homo sapiens
aaggcagagaggggaagaccaagagcacagaggagcaagacaacaaaagggaaaaacggaacagagagaaac

SEQ ID NO: 163882 - RNA, 83 nt, Homo sapiens
gccgaagcgcacgaccccgacacccccaaggcaaccacgagacagacaacagaaccagacacggcgaggggagggaaggccaa

SEQ ID NO: 163883 - RNA, 81 nt, Homo sapiens
ggacggagacaagcagagaggaggagagaaagaaagccagcgcaacgagagaaccagcagaaaagaagcccaagaaagaag

SEQ ID NO: 163884 - RNA, 75 nt, Homo sapiens
ccaaccgcgcggaggaggaaacaagggcagagccagcaaaggccccccaccaggcgcccaccccaccaaccaaca

SEQ ID NO: 163885 - RNA, 83 nt, Homo sapiens
cccgacgccgcgcccgcagccccgcccggcgcccagagcaggacccggccgggaccagccggcggaaaccccacaagcggcca

SEQ ID NO: 163886 - RNA, 70 nt, Homo sapiens
agaagcccagggagcgcaccccaggaaaccagggaagaagagcgcaacaggaggaaaccaggggaagacg

SEQ ID NO: 163887 - RNA, 75 nt, Homo sapiens
gccgaagcaggacccgaagccaaaccaggagggggagcgggacgggcggcgagcggaccgcgaggcccccaaccc

SEQ ID NO: 163888 - RNA, 54 nt, Homo sapiens
cgacagggggccaaggggagaagaaaaccggggaagaaaaggacccccagagag

SEQ ID NO: 163889 - RNA, 81 nt, Homo sapiens
gaacaccgcgcgggaagaagcggcagaccggccagcaacccgcaccaggcaacgcagcagcagcagcagcagcagcagcga

SEQ ID NO: 163890 - RNA, 68 nt, Homo sapiens
ggaaccccccgccggacaagggaggcggaagaaggaaccccgaagagcccacaagacggcgccagagc

SEQ ID NO: 163891 - RNA, 113 nt, Homo sapiens
ccccccggccccgaagggcacgcagcagacagccccgggcaccaggcagcaacagcagaagaggcggccacccacgagccgacggcaaacgccagggagccaccaagggcagg

SEQ ID NO: 163892 - RNA, 38 nt, Homo sapiens
ggcagggaccagcagacgggaaggagcaagcagagccg

SEQ ID NO: 163893 - RNA, 37 nt, Homo sapiens
gacaaagaaaggcccaaagagacacggcccccacaga

SEQ ID NO: 163894 - RNA, 50 nt, Homo sapiens
agaacaaaaacacgcagggcgcagagccaaaaggcgcgaacagggcccac

SEQ ID NO: 163895 - RNA, 85 nt, Homo sapiens
ggcgagaaggcacccccaggaaaacggcccgcgccacaaaggcccagcaccccacccagaagaccccaacggaagcacgagccac

SEQ ID NO: 163896 - RNA, 57 nt, Homo sapiens
cgaccagcaggaacggacacaggaacgccacaagaaacaacagcaaggcgagggcca

SEQ ID NO: 163897 - RNA, 84 nt, Homo sapiens
ggaggcggcagaaggcccggagccacaggccaggaagaaggaccggggagacaggaacacgggcaagacagcgcgggcaccgcc

SEQ ID NO: 163898 - RNA, 83 nt, Homo sapiens
gcgggcggaggcggcggagcgcgagagccgagcggaccagaacaagcaaagagcggcaggggcccggaggcacgggcagccac

SEQ ID NO: 163899 - RNA, 78 nt, Homo sapiens
cgggccaagagagccgagcaagaaaggagcaggcagagcaaggaaacaagagggcgagcaacagcagcacgcaaccag

SEQ ID NO: 163900 - RNA, 60 nt, Homo sapiens
cccagcccccaggcagcgcgacaagcacgaggaaaacagaaaagcagaaaaaagaagaga

SEQ ID NO: 163901 - RNA, 84 nt, Homo sapiens
cgggaccaggcgaagcggccgagcaggcgagcgaacgacgcagacaacagggagaccccacgggacaccagcccaccggccgag

SEQ ID NO: 163902 - RNA, 77 nt, Homo sapiens
cccaccggcggggaaaggccgcagcgcgccaccccgaccccgcgaaggagggcagaagaccccaagcgagcggccgg

SEQ ID NO: 163903 - RNA, 51 nt, Homo sapiens
cacacagccgacacaacaagacagacgccaggggggcgccgaccggaccac

SEQ ID NO: 163904 - RNA, 65 nt, Homo sapiens
acccaacgccccgacccaaccccaaccccggggaaggagggggggcgggcccaggcggcagggaa

SEQ ID NO: 163905 - RNA, 76 nt, Homo sapiens
aagaacgggaagcgagaaagcccggggacccagggaaagggaccccagacccacgggagcacgaagccaagaggga

SEQ ID NO: 163906 - RNA, 82 nt, Homo sapiens
aaggagggcagcagaaccagcggggcgacggaagagaagcgagcgcccagggaccgggacgccccagaaaagaggggcgggc

SEQ ID NO: 163907 - RNA, 51 nt, Homo sapiens
ggaaaaaccagccgcacgccaaggaaacaggccacaggaacgcgccgaaac

SEQ ID NO: 163908 - RNA, 86 nt, Homo sapiens
cgccgcgccgcaccccgagcgaccggaagaaggaccggggagacaggaacacgggcaagacagcgcgggcaccgccgcagggccgg

SEQ ID NO: 163909 - RNA, 77 nt, Homo sapiens
gccgcagaccccaggggacggagacgagccaccacgcagggccggcgggaaacggaccagccaccaacacagcggga

SEQ ID NO: 163910 - RNA, 78 nt, Homo sapiens
cccagcggacacagccccggagagcaccacaagcaaggaacaaaagaaagcaaggaaccaaaaaaacaaagaaggcag

SEQ ID NO: 163911 - RNA, 68 nt, Homo sapiens
gagacccacagccagcaacaccaaggcagacggaacaagacccgcggagaaccacgaaggacccacag

SEQ ID NO: 163912 - RNA, 63 nt, Homo sapiens
gcgcaccccagagagccccccaggaccccccaacgccagaagcggccgagacacagacaagcg

SEQ ID NO: 163913 - RNA, 52 nt, Homo sapiens
cggggcagccgaaagaggcacgccaggcccccagggaggccgaacacacagc

SEQ ID NO: 163914 - RNA, 50 nt, Homo sapiens
gacaaggcgaaaacagccgcgagggaggggggagccgaccgcgaagaaca

SEQ ID NO: 163915 - RNA, 81 nt, Homo sapiens
agcagcccagcgacggacacggaggaaggcagggacacaacgccacgacgagcgggcaaggcccccacgccgcgcccgggc

SEQ ID NO: 163916 - RNA, 57 nt, Homo sapiens
agagcaccaggaagcagcccccgaggaaagcacgcacaacgaggaaaagagaaaaag

SEQ ID NO: 163917 - RNA, 74 nt, Homo sapiens
aggagaagagcagccagcaagcggaggacagcaggcagaagaccccagaacagggaaggaccacgagccacccc

SEQ ID NO: 163918 - RNA, 70 nt, Homo sapiens
gggcaagcgcggcaagcgagagaaaccgggcaaccggccgacggaccgggggggccgaagaagccgcgcg

SEQ ID NO: 163919 - RNA, 81 nt, Homo sapiens
aggacggaaccgggagacaccgagaaaccagaggaaggaccccagagaagacagacgagaagaggacagacggaggagaag

SEQ ID NO: 163920 - RNA, 54 nt, Homo sapiens
aggcggccggagggcgcagcgagggcagaaagggcccagccggcagagggaccg

SEQ ID NO: 163921 - RNA, 78 nt, Homo sapiens
cgcgacgccagcacgacccaccgcacgcagaagcggaagcgagagccgccacgagaaagcaacaacagccaaaagcgg

SEQ ID NO: 163922 - RNA, 74 nt, Homo sapiens
gccgaagaagcacgaaagccccacccgccgcagcaagcagagggagacaacaagaaacaggagaagggaggccg

SEQ ID NO: 163923 - RNA, 74 nt, Homo sapiens
agacccaggcgggacagagggagccaggcagagcaaagggcacaagcccccgaagacaagaggccggggagacc

SEQ ID NO: 163924 - RNA, 77 nt, Homo sapiens
cccaccagccccgcccccgagcacgcagccaaccccagcaaggcaagagggagaagacagcgaccagggaggcaaca

SEQ ID NO: 163925 - RNA, 70 nt, Homo sapiens
ccaggcggcccaggcccaggacaaaaggggaggggccggcgccgagaagcgcgccccaacccaacgagag

SEQ ID NO: 163926 - RNA, 77 nt, Homo sapiens
ccgccgggggccggcaaggaaacccaaccccagaaaaaacaccagcagcccagcaaccaaaaagaagaccgcaccca

SEQ ID NO: 163927 - RNA, 70 nt, Homo sapiens
gacacccgaccgacaaaagcaccccccggggaaagacacgccccaccgagggcagggccgcccgaacccg

SEQ ID NO: 163928 - RNA, 82 nt, Homo sapiens
ggcgagaagcgccgccgaacgacaggacgggggcggccggcccccagcaaagaacagcgaacgacaagaggagaggaagaag

SEQ ID NO: 163929 - RNA, 76 nt, Homo sapiens
cacaagaagaacaaagcaagagaacaaccaggcacgagaagaaagacagccccccccacccggcacccgccagcaa

SEQ ID NO: 163930 - RNA, 68 nt, Homo sapiens
gaaacccaggcgccgcggcccgggcgaagggcaacggagacagaaaccaggaggccaagcaagggaaa

SEQ ID NO: 163931 - RNA, 71 nt, Homo sapiens
aagaaaagaaaaccgcccaaggaaccaaaccacaaaccgagaaaaaaaccaggaggagagcacccagcacg

SEQ ID NO: 163932 - RNA, 79 nt, Homo sapiens
gcgggaggacggcacaccgcggcggagaccagagacagacgaggaagacaccaagaaggcaaagaaaaggagccaggga

SEQ ID NO: 163933 - RNA, 79 nt, Homo sapiens
caccggggggcaacacccgagaacggcgggaagagaagacacgagcacaaacggcgcacaagagcagggaccccaggcg

SEQ ID NO: 163934 - RNA, 73 nt, Homo sapiens
gaggcgcccccagcacaaacgaccgccagaacagccgaggcacgcaagccaaaaagacagacgagaagccggc

SEQ ID NO: 163935 - RNA, 77 nt, Homo sapiens
caaacgggacggcacaagcaaggaagcaaagcgaaggcggagcaggagaaagcggcacagaccccagaggaaaaacc

SEQ ID NO: 163936 - RNA, 75 nt, Homo sapiens
agacaaccaaaacaaacgcaccccacgcaaaaacagcaaaagaaaagaaaaaacaagaaggagcgacaaaaagag

SEQ ID NO: 163937 - RNA, 80 nt, Homo sapiens
gccccgcagcagcccgaccaaccgagcccacggccagcacacggccccggagccacaaacccaaagcgaacgaacccagc

SEQ ID NO: 163938 - RNA, 60 nt, Homo sapiens
gcccagcccccgagggcgggaacagccaccaggagagaacgccgcgccgcgcgacaacgg

SEQ ID NO: 163939 - RNA, 90 nt, Homo sapiens
aaacaaaagacaaccgcccagaaacggccaggacacgacgcgagggccacaagacaagaccggacaaccagcacaccagaggcccccacc

SEQ ID NO: 163940 - RNA, 77 nt, Homo sapiens
gcggcgcccagcccaaaggcccagaggggagcagagggccgcgccggggggacccggacaagcaagggggaaaaagc

SEQ ID NO: 163941 - RNA, 85 nt, Homo sapiens
caacggcgcagggggggggcagcgccagcgccgagccacgcgcagcagaacacaaagccgcacccagggagaagcccacgacagg

SEQ ID NO: 163942 - RNA, 85 nt, Homo sapiens
ccgggagacagaaaggaagaagcgcccaaagagaccagaacagcagaagcgcacggaggcaagcggacgggcgcaaaccagggcg

SEQ ID NO: 163943 - RNA, 75 nt, Homo sapiens
gccgcggcccgggccgcaccagagcgcccggcccacgacacaggaagaagacaggcgaccggcccgaggaccgcc

SEQ ID NO: 163944 - RNA, 73 nt, Homo sapiens
cccccccaacaccaaggagcccaagaaccagcaacaccgacaacggcacacagagaaaaaaagggaacaaaac

SEQ ID NO: 163945 - RNA, 55 nt, Homo sapiens
gacagacacaacggaccaagcggaggccgcaccagcgcaagcggcccacaagaca

SEQ ID NO: 163946 - RNA, 53 nt, Homo sapiens
aaaacacggaaagaaaacgacacggccgggcgaggcgaggccacccgggccgc

SEQ ID NO: 163947 - RNA, 66 nt, Homo sapiens
ccgccagcgcagaaacacggcccagccccagaaaaggaacacaagagaccggaaggccggccggga

SEQ ID NO: 163948 - RNA, 49 nt, Homo sapiens
gcagaggcaccggggagaaaagggaacgcgagacaagaagaaacggcag

SEQ ID NO: 163949 - RNA, 78 nt, Homo sapiens
cagacgcaacgaacgaaaaaaccagaacacgccaagaaaccagagacgaccacaagaacccacaggacaaggggggaa

SEQ ID NO: 163950 - RNA, 70 nt, Homo sapiens
aaacaaccagggcaaaaggaaaggacccaccaagggaaagcaaaaccagcaaacgagaagaaagaaggaa

SEQ ID NO: 163951 - RNA, 93 nt, Homo sapiens
acggggccccaggaccccacaacaccagaacaaaaggcagaaaggcgaaaagcgaagacagccccgcggaaggacaaaagcacacaaacagga

SEQ ID NO: 163952 - RNA, 79 nt, Homo sapiens
aggacgcccaacaccacccacccaccacggaacacggagcaagggacccaagaaaaaaaacaagaagaaaaaaggacaa

SEQ ID NO: 163953 - RNA, 72 nt, Homo sapiens
aagcgcagggacgcaagccaggcgaaccagccgaaaaaggagaaaccaaaaggaaaagcgaaccagacagag

SEQ ID NO: 163954 - RNA, 35 nt, Homo sapiens
cccgaacacaacagaccacgggagaagaaggaagc

SEQ ID NO: 163955 - RNA, 80 nt, Homo sapiens
gcacacgggggcggacaccacaagaagggcgccaggacaccagagggggcgcaggcgagcacccggccccgccggagcga

SEQ ID NO: 163956 - RNA, 33 nt, Homo sapiens
accagaaggagcccaaggcacccaagagccgag

SEQ ID NO: 163957 - RNA, 85 nt, Homo sapiens
caagcaccgggcggcccggccggagcaagaggcgagggcgagcggcagccgccgccaggcagaaccagagaccacagaagaagga

SEQ ID NO: 163958 - RNA, 74 nt, Homo sapiens
ggggggccgggccgggcaagacggcgaagcgcgcgccgcgcccggaccccagacaccaccggagcaccaaaggc

SEQ ID NO: 163959 - RNA, 78 nt, Homo sapiens
gggagaccccgcgacccgagacagccccaagacaaccccaccagcaccacagaaagacaacggccagccaaaccaaaa

SEQ ID NO: 163960 - RNA, 60 nt, Homo sapiens
ggggcggcgccggacgccggccccgcgggagcaccaaaacagaacccaggagaaacgaga

SEQ ID NO: 163961 - RNA, 99 nt, Homo sapiens
agacaacggggaccaaacagcaggggacaaggccccagaaggcagaaccagcaaaacccgagagggaagcgaaacaggccaagagaagcagcaagaaga

SEQ ID NO: 163962 - RNA, 69 nt, Homo sapiens
cccgggcgggaagacagaaccagggccgggggccagaacggggcagaggaggaggggaaagagcaaacc

SEQ ID NO: 163963 - RNA, 66 nt, Homo sapiens
gagaagcaagacgaagaacagaggaccgggagacaacaaaaaagggagaacgcacaagggaaaacg

SEQ ID NO: 163964 - RNA, 73 nt, Homo sapiens
cagaaacagaacggaggccggaagcgaccgaaacaccaaacacgggccgagaacggagaaacacaaacgaaca

SEQ ID NO: 163965 - RNA, 84 nt, Homo sapiens
acagaccagccggaacaagagacccgcgggagggacaggagaacaggcacgaccccaccggcaccaccacggggacagcgaccg

SEQ ID NO: 163966 - RNA, 78 nt, Homo sapiens
cagaaaacccaacgcaacaaacaaaaccagcggcgcgcccaagaaaagaggaggaggagagggaaccagagcgccggg

SEQ ID NO: 163967 - RNA, 76 nt, Homo sapiens
gagagaagaaccaaagaagcaaaacacgagcgaagaaagccagaacagcaaacgaaaaggacaaccgaacgacagc

SEQ ID NO: 163968 - RNA, 82 nt, Homo sapiens
aacagagcagaaacaaagaagagagcaggaagaaggaagaaaaggaccgcaagggcacggccccgacgcggcccgcccaagc

SEQ ID NO: 163969 - RNA, 78 nt, Homo sapiens
cccgcccggaaaacgccccgcgggaaggagaggcacaagacagcccaacgccaagacagacgggccagggggcccgga

SEQ ID NO: 163970 - RNA, 77 nt, Homo sapiens
cgcggggcggggaggcggagcagaagacagagggaggagggccacggacaaacacgggcccggcccagcagagcgag

SEQ ID NO: 163971 - RNA, 71 nt, Homo sapiens
cggccagccagcacaaacgagcgaggacacacaggagggacaaaggggaagacaagaaacggcagagggga

SEQ ID NO: 163972 - RNA, 55 nt, Homo sapiens
agaacaacaagcgacgcggcggcgccggccaggcggagacagggagagaggccaa

SEQ ID NO: 163973 - RNA, 64 nt, Homo sapiens
cccaagggcccagcaaccaagaaccagaggaggggaggaaccaccacagaaagcaggagaacac

SEQ ID NO: 163974 - RNA, 66 nt, Homo sapiens
gcccaacacccccccccacaggccagaaccggcaccacaacggaggagaaagccaggaagcaccgc

SEQ ID NO: 163975 - RNA, 92 nt, Homo sapiens
aaaaggccaaggggggaccgccgccaggcaacgccgccggggacacagggcagcccgcagaggacagcgaccacggaagcccggggcggcga

SEQ ID NO: 163976 - RNA, 76 nt, Homo sapiens
accagcggagccgcaacaaagacacaacagccgcaacaaggacagcggccagggcacacgagacaacagcgccccc

SEQ ID NO: 163977 - RNA, 73 nt, Homo sapiens
agccaagaaggaggcaccaccaggagaaggacgggacaccaaaaggagcacgcaaccccaccaccggagggca

SEQ ID NO: 163978 - RNA, 79 nt, Homo sapiens
cccgagcgccgcggacgcgcacgagggacggggaaagaccaagcaaggaaccagcgagcaaacgcaaacacaacagaaa

SEQ ID NO: 163979 - RNA, 80 nt, Homo sapiens
gacccggccccggccacagccacacccaccgcccgggcaggccacggcggagagggccgggcgcgcaccccgaacccggc

SEQ ID NO: 163980 - RNA, 73 nt, Homo sapiens
gggcaacgggggaaagccgggaggaacaggaaggacaaacccagagccgacgaaaagaaagaccaaaggaaac

SEQ ID NO: 163981 - RNA, 40 nt, Homo sapiens
ggaccaacagcgagcgcgaaagccgccaggagcaaggcag

SEQ ID NO: 163982 - RNA, 74 nt, Homo sapiens
gcacccaccacaagccaggaaggagacacggccccccaaggaaaacaggacaacaccggacccacgaagggaca

SEQ ID NO: 163983 - RNA, 78 nt, Homo sapiens
agggccggagacgcgcagacccgcgacccggagcagccggaggcgggaacggacgaaaagaacaagcgcccggagaca

SEQ ID NO: 163984 - RNA, 63 nt, Homo sapiens
ggcccccagaacccagagacgggcagaacaacagcgaccccaaggaagacaaggagaaccgca

SEQ ID NO: 163985 - RNA, 69 nt, Homo sapiens
caaacagaaagagacacgcaaaaaaacgacccgaagagaagggggacaaaggggacagaaaggcgggag

SEQ ID NO: 163986 - RNA, 75 nt, Homo sapiens
cgcgcgggacaaaacaccacacgggaaggaaaaaaccccggacggggcgcaccgcgcggaccccagcaagaacaa

SEQ ID NO: 163987 - RNA, 65 nt, Homo sapiens
gggcccagcccggggccggcgcagggcggaaggacaacagcccgacaaccaggagcaagaaagag

SEQ ID NO: 163988 - RNA, 78 nt, Homo sapiens
accccacaggacgccccagagaaagcccgccgcaccagcaagcgcgggggcagacacaaggaacagccagccaggaga

SEQ ID NO: 163989 - RNA, 71 nt, Homo sapiens
gggaggccagcggacgagagaccccagggaccaccgcaagaccccacgccgccccaccccccaagaacccg

SEQ ID NO: 163990 - RNA, 73 nt, Homo sapiens
ccagcaggacgcacgcacgagccggcccagccgaagggagagcagccccgcagggagaaaacaagaaaaccac

SEQ ID NO: 163991 - RNA, 75 nt, Homo sapiens
ccgccggagcagcggggacaggaaggggcagacaagcacgccgcccagacaaccgaccaaagggaggggaaacaa

SEQ ID NO: 163992 - RNA, 53 nt, Homo sapiens
aaaagcagcaaacacgggacaaaaaccagaccaggagcaaagaagaacgaggc

SEQ ID NO: 163993 - RNA, 80 nt, Homo sapiens
aaggagcaagaccaaggaagcaacaagaccaagaaagagccgcagacgcacagcaaccaccggacccgaaggccaccacc

SEQ ID NO: 163994 - RNA, 55 nt, Homo sapiens
agaaaccgaccggaccgggccgggggagcggaggcagaagcaaacaggggcagga

SEQ ID NO: 163995 - RNA, 68 nt, Homo sapiens
cccccggcacgacaccgccccaacccacgagaggacagcccaggaaccaggaccaaggagcagccgcg

SEQ ID NO: 163996 - RNA, 84 nt, Homo sapiens
cgccggggcacgacacaaaaacagggcggaccccaaggagaacagggggggcaggcgagcggggggcagcccgcacaccagcac

SEQ ID NO: 163997 - RNA, 51 nt, Homo sapiens
gaccaggagacgcggggaccacaacagacaaagaacagaaaaagaaagcca

SEQ ID NO: 163998 - RNA, 69 nt, Homo sapiens
ccagggcggaagcccgccccagagcaggcccgaagacccaaggaacacacggaccgaaggaccgccacg

SEQ ID NO: 163999 - RNA, 54 nt, Homo sapiens
gaagggacaacagagacgacccgaagacaaaaccacccacgaaagcgaaaagac

SEQ ID NO: 164000 - RNA, 71 nt, Homo sapiens
cccggccgggccggccagcgccggaaaccaacaagaccggccacgggcgcacaaaccccaggacgcgacga

SEQ ID NO: 164001 - RNA, 70 nt, Homo sapiens
acacgcccagacggggcagaaagaagagaaaagcagcaaaaagaagggacagagaaagaagcaagaaaaa

SEQ ID NO: 164002 - RNA, 68 nt, Homo sapiens
caagcagcacgcggacgagccccagggacagccaaagaccggagcggagagagaagaaacaggccaca

SEQ ID NO: 164003 - RNA, 82 nt, Homo sapiens
aaaacccagagagaggacgcacggagggaacagaggacaggggcagcgccaacaagaagcaagaacaaaccagcgggaaaaa

SEQ ID NO: 164004 - RNA, 66 nt, Homo sapiens
gccgaacaggacagggcgcccggcgcaggccaaagggcccccgaaccagcgaaaacaaacccggcc

SEQ ID NO: 164005 - RNA, 78 nt, Homo sapiens
gcccaacggaaccacacggaaagccaacaggcagaccagagacagcgccacgcacccggggagcagaccacgccgggg

SEQ ID NO: 164006 - RNA, 78 nt, Homo sapiens
gcgccagggaagcgggaggcaggcagccaggagccccccgaccggcccaacggggaccggcaaggcagccagccggag

SEQ ID NO: 164007 - RNA, 76 nt, Homo sapiens
agggagagcaagaccacagcgcgcggcccccacaccacacagagagcgagcaaaggcaggacaaagcggaggcgcc

SEQ ID NO: 164008 - RNA, 80 nt, Homo sapiens
aggacagagcggcgccgccgccagacgcaccagaagagaacacgagccacgcggcagaacaccccaggagggccagcacc

SEQ ID NO: 164009 - RNA, 76 nt, Homo sapiens
ccacgcccagccgccacaaggggaagcgacgaggaagccaagcaggccggaaggggaaagggagagcaagggcaac

SEQ ID NO: 164010 - RNA, 52 nt, Homo sapiens
ggaggagggcagggacagccggacacaagagggcaagaaaggcgcgacgggc

SEQ ID NO: 164011 - RNA, 75 nt, Homo sapiens
cgcgacaccccaacaaacaccagcgcgggaacgacagaggaaccgacagaggaaccaccgaacgagagaaaggga

SEQ ID NO: 164012 - RNA, 76 nt, Homo sapiens
agggcgacggccgaccgccccggagacgaggcacaacgaaacccaggccaaaggggcagcagccagaagggaaccc

SEQ ID NO: 164013 - RNA, 81 nt, Homo sapiens
cggaaccaagccaaggcgaaagagacgccagagagacacccccaacacaaagacaccaacaagaagcaaaccaaggccccg

SEQ ID NO: 164014 - RNA, 80 nt, Homo sapiens
cacagcggcgagcggccaaggagccgaaaagaggaaggggcaggccacacgggcagaggccgaagaaggagcacgccccc

SEQ ID NO: 164015 - RNA, 73 nt, Homo sapiens
agggcagcagcacacgggaggacgccagggagcaaaccgagccgagccacggaggagggagacaggggcaaaa

SEQ ID NO: 164016 - RNA, 81 nt, Homo sapiens
agggacggcgcaccacagcccagggagcacggggcagggaggagaggggagcaggaccagcagaggcccgaccaaggagcg

SEQ ID NO: 164017 - RNA, 63 nt, Homo sapiens
gcggccacggaggcaccagaagaagcaccaggccagaagcggacccagaagaggggagcagca

SEQ ID NO: 164018 - RNA, 56 nt, Homo sapiens
gcgcccggcccgccccccgcaacgagaaccaagagggaaaagaggacgaggcgcga

SEQ ID NO: 164019 - RNA, 79 nt, Homo sapiens
cgccggcaaggaggcaccgcggcagacgggaccacgaggcaacgccccagagacaaagcaggaggacacaagaagggag

SEQ ID NO: 164020 - RNA, 100 nt, Homo sapiens
ccagggaaccagggaggaggagacgaggagcgaggaccggacaacaggagccagacccagcaacaacagagaggaaaagaaaaaacgcagaagaaaaaaa

SEQ ID NO: 164021 - RNA, 37 nt, Homo sapiens
gacgaaaggcgcagggagaagagcgggacaaacgaga

SEQ ID NO: 164022 - RNA, 51 nt, Homo sapiens
aaggaaaacgcggaaaaccgacacaacagaagcggcagaacaaaaagcaag

SEQ ID NO: 164023 - RNA, 80 nt, Homo sapiens
ccgcacacgaggccccccaacacccccgcacaggaacgcgcggacgccaccaggaaaacaaagagggaaaacggagaaaa

SEQ ID NO: 164024 - RNA, 67 nt, Homo sapiens
caagaggaacaacaagcaggcaggcgacggacagggcaaaccgacaccagcgacacaagcgcgaggg

SEQ ID NO: 164025 - RNA, 79 nt, Homo sapiens
gaccaacaacacggggaggggaggcgaagacgagacccagaccagagcaagccaaccaaaaccaagaagggcaggcagg

SEQ ID NO: 164026 - RNA, 105 nt, Homo sapiens
ccaggaggggaggcgggaggcggccacggggccaccgccggcggccgcaggagcgacccacagacagccagccacagaccagccggggggcagcagccgccacca

SEQ ID NO: 164027 - RNA, 76 nt, Homo sapiens
gaagcggccggggaggagaaaaggaagaggaaacgggagaagccccccagggccagacggcccggggcggccgcag

SEQ ID NO: 164028 - RNA, 74 nt, Homo sapiens
cccgagagcgggacagcggaaagcaaagacagcggaagccaaagccaccaaggccgaggagaaggagaaaaaaa

SEQ ID NO: 164029 - RNA, 73 nt, Homo sapiens
accagcccagagggaggcccacagggagaacagggcagaacgaggggaggaaagcagggagcaacacgcacca

SEQ ID NO: 164030 - RNA, 62 nt, Homo sapiens
gcggcggcacccacgcgggggacggagaggaaccagccagccagcaggcaacaggcccagac

SEQ ID NO: 164031 - RNA, 67 nt, Homo sapiens
ggggacaaccggccaccaaagggagaaggcaaccaaaggcaggacacaaaaacaaccgaaagaggcg

SEQ ID NO: 164032 - RNA, 72 nt, Homo sapiens
ggaagagcgccccaggagaaacaaacgacacaagcccacacaaggaccggacccaagcagaaagaaggaccc

SEQ ID NO: 164033 - RNA, 80 nt, Homo sapiens
cccccagccacagagagcgccacgcgagaacagagaagggagccaagcggagggagaacgcaagaggagccacccgcgcc

SEQ ID NO: 164034 - RNA, 77 nt, Homo sapiens
gcagaaggggacggcgggagcaggacgcagacccgagccggaaggaccaaggaaacacacagaagaacccaggaaag

SEQ ID NO: 164035 - RNA, 76 nt, Homo sapiens
aaggcaaagaacaaccggccaccgcaacgagaaaggcgagaacaggcggccagcccggaaaaacagacaaggcggg

SEQ ID NO: 164036 - RNA, 83 nt, Homo sapiens
gcacgaaaaaacccagcgaagaccacagaaaccaaaaggcgacgcgccacagagcgggcgggcgggccacgcggcgggacagg

SEQ ID NO: 164037 - RNA, 74 nt, Homo sapiens
cccaagaggcgacgccggcggaaacggcccgagaacacgaaacaaggaagaaagaagcaagaaaaacagaccgg

SEQ ID NO: 164038 - RNA, 77 nt, Homo sapiens
gcggagaccagaaagcgggagcccgcgggaggcagaccgccaggccgcaggggccgagagggggacaggacaccgcc

SEQ ID NO: 164039 - RNA, 79 nt, Homo sapiens
cagggcgccgcccggcaaggcgcggcccccggaccgcccccgacaagaagcgagagagagggaacccgagcgcagaggg

SEQ ID NO: 164040 - RNA, 76 nt, Homo sapiens
gcgagccagcgcggaaccagggcaagcaggagcacagggccgagagacacggccccccacgcgagaacccgggccg

SEQ ID NO: 164041 - RNA, 74 nt, Homo sapiens
acagcagcggggaaaaacaagaggacaggaaccaccaagaagaagaagaagaagaagaaagcaaaagaggagaa

SEQ ID NO: 164042 - RNA, 71 nt, Homo sapiens
ccacaaagcggccgaaacagaaaacaagagaccacagaaggacgaagagcaaagccacgaggaggaggcgg

SEQ ID NO: 164043 - RNA, 36 nt, Homo sapiens
ggcgcagcgcaccccaacccaacccccagccacaac

SEQ ID NO: 164044 - RNA, 38 nt, Homo sapiens
ccgcgcccaggaaagccaaagagagaaaacgccggcac

SEQ ID NO: 164045 - RNA, 72 nt, Homo sapiens
cgaagagggaccccccgagaagcggaccccggaaaagacaaggcccccaagcccggggggagggccgcgccg

SEQ ID NO: 164046 - RNA, 66 nt, Homo sapiens
aaggacggaaaggggcgccgacacgaacgcgagggaggccacaccagagaagaccagggccgggaa

SEQ ID NO: 164047 - RNA, 58 nt, Homo sapiens
cggaacaagcaagcggcccacgaggccagaaaaagcagagagacgcaagagagaaaag

SEQ ID NO: 164048 - RNA, 78 nt, Homo sapiens
gagcgacgcgggcccaggccaaaccaaacggagcgggcagcaggaagggacggcgcgcgcccaggagaaggcaacaag

SEQ ID NO: 164049 - RNA, 83 nt, Homo sapiens
accacccagacaagagcaccacgggcaggaaggcagcgcacgacagcaaaaggaaggagggccccggagcagccacaccaccg

SEQ ID NO: 164050 - RNA, 61 nt, Homo sapiens
cgcggcggaggaccaggcgcggcgcggcgcggcgaggacgggcgcacaacaccaacacgcc

SEQ ID NO: 164051 - RNA, 83 nt, Homo sapiens
aaaccggacacgaggacacgccagcgagccccacgccggggaggaggagccacggccggggacagaagaaggaaccagcaaag

SEQ ID NO: 164052 - RNA, 38 nt, Homo sapiens
gggcaccgcgccgcagcgggcggaagggcaagaaagaa

SEQ ID NO: 164053 - RNA, 74 nt, Homo sapiens
caggcgccggggagcagagccggaagcggcaggccacaaagccacagacagcgaacccacccaacacggcaaaa

SEQ ID NO: 164054 - RNA, 63 nt, Homo sapiens
aaaggagcggcgaacggggggcagcaggagccccagccgaggagagaaacaaacagccagggc

SEQ ID NO: 164055 - RNA, 81 nt, Homo sapiens
accagacgaaggaaagcagagaaagggaccccagcgaaccccccaggcacaaagccacgccgcaacggcaagggaccgcca

SEQ ID NO: 164056 - RNA, 57 nt, Homo sapiens
aaacaggcagcagaaacggcaagagaaggccgcaagaaaaagagacacaaaaggccc

SEQ ID NO: 164057 - RNA, 73 nt, Homo sapiens
ggaacaaaagaaaagaagcaggaggagaggacaacgagccagcccgcaccacacgcggggagacgaacagcaa

SEQ ID NO: 164058 - RNA, 73 nt, Homo sapiens
gccgaccagccgcggagccgggggcaggagcaccacgaagaaacgcccagaggagccagaaacagccaaacaa

SEQ ID NO: 164059 - RNA, 73 nt, Homo sapiens
gcacccacagccaaacacaccgacaaggggagaggggggacaggcccgggcggagcagagccacagcgcggag

SEQ ID NO: 164060 - RNA, 54 nt, Homo sapiens
gggccaagagagccccaaggaccggggcggaccaacgggccggggggcgaccgg

SEQ ID NO: 164061 - RNA, 77 nt, Homo sapiens
cccgcaaggccgacaaggaccaaagacgacaacaaacgcaagagcagaaaagaacacgcagcagcacccggaccccc

SEQ ID NO: 164062 - RNA, 81 nt, Homo sapiens
agaggagcgagcggacccgcgagggcaagagaagcacgacccagacccccagcagggcagcaggaaccaggccaagaccgg

SEQ ID NO: 164063 - RNA, 75 nt, Homo sapiens
cgaccaccagcccagagcccgcccccccgcagccgggaaccagccggcggaggaagggccccacaccaaaccgcc

SEQ ID NO: 164064 - RNA, 81 nt, Homo sapiens
ccggagcgggcggagacgccgggcagccgaacggagggcgacggagggagagccagccacagcccacccggaaaccagaga

SEQ ID NO: 164065 - RNA, 67 nt, Homo sapiens
gcgagggcggacagcggggcccgcggaaaacagaggcagagcaacagggacacaagcaagaagaaag

SEQ ID NO: 164066 - RNA, 81 nt, Homo sapiens
agaggggcgagaacgccacgcgggccggcgaaagcgaagacgaccccgacgcaggccaggagccgcggacagaagccgagc

SEQ ID NO: 164067 - RNA, 73 nt, Homo sapiens
aaaacgaagaaggcaaaaccaagaggaaaagagaacagacaccccgaagaaccccaaagaaacccagagacca

SEQ ID NO: 164068 - RNA, 77 nt, Homo sapiens
ggaacgacgcggcgcgcgcggacgaagagccccccccccaacaccgcgacacgcagcacccgagggacccgaggagc

SEQ ID NO: 164069 - RNA, 64 nt, Homo sapiens
cgcaaaagaggaagaaaaagaagcgacccagggaagagaagagccgggagaagaggcacaagga

SEQ ID NO: 164070 - RNA, 60 nt, Homo sapiens
ggcagggaagcaacgcagagccgcggagaaccgaaccaacagccagccaaagccaggcag

SEQ ID NO: 164071 - RNA, 66 nt, Homo sapiens
agcagaaaggcaagacgggaaaagcggcaaaccgaggggacggggcaggggccgccgaaccaacca

SEQ ID NO: 164072 - RNA, 72 nt, Homo sapiens
agaagacgacgcaccgcaggcagacaaaagggccaaagaagggagagaggcagacgccagacacacagcccc

SEQ ID NO: 164073 - RNA, 48 nt, Homo sapiens
agaaccggagagcacccaacagaaagcaggaaaacggcgcaaacggag

SEQ ID NO: 164074 - RNA, 70 nt, Homo sapiens
gaccaggcccgaacaccgccaccggcacacagagaaaaaaagggaacaaaacacagcaagcagacaaaag

SEQ ID NO: 164075 - RNA, 77 nt, Homo sapiens
cgcagacgaaaaggaagccaacgagacacggacaccaggagcacagcacacagaggggagcgaaaacgccacaacag

SEQ ID NO: 164076 - RNA, 62 nt, Homo sapiens
aacaccaaaaacaaggcgcaagacgacgggaaacacaaaggcaaggaagccaagcaaccaaa

SEQ ID NO: 164077 - RNA, 90 nt, Homo sapiens
ccacaagaccgacgcaagaggaacacgcagcagcacccggacccccgacgggcccgagagaaggcacccggcacaccacggcccaccagg

SEQ ID NO: 164078 - RNA, 74 nt, Homo sapiens
ggacccggacccaaaggccagcaagggccaccacagagcccgcagggacacagcagaacaagcaacccccggca

SEQ ID NO: 164079 - RNA, 92 nt, Homo sapiens
aggacgcgccgcggccgggcagggaggagaccggcacccagacaggggcgacggcagaggaggagcaacagcgagcaacaggcaacgaaaac

SEQ ID NO: 164080 - RNA, 41 nt, Homo sapiens
gccagcgacgccaggaagaaaacggagcgacagcgcacaga

SEQ ID NO: 164081 - RNA, 80 nt, Homo sapiens
agcgagggggggcgcgccggaaaccggagcgcgcagcagaacgaagcgcgcggcaggcgcgcgccgccccaggccgcaag

SEQ ID NO: 164082 - RNA, 74 nt, Homo sapiens
gggccgccggcccccgacagcagcacaccgccggaaggcaaaagccgagccgcaaagcgaacagaccagaaccg

SEQ ID NO: 164083 - RNA, 75 nt, Homo sapiens
cgcggaagaggggggccgcccggccgggcgcgccgcaccccagcagcacccaagcaggagaagaagcagagaggc

SEQ ID NO: 164084 - RNA, 72 nt, Homo sapiens
gggggaccgcaagagaccccggcggacaagccacgagagaaccgagagaggacacagaagaacgcagcccgg

SEQ ID NO: 164085 - RNA, 74 nt, Homo sapiens
cacgcagcggcggccagggaccaaacggaaaacagcgacccgggccgaggcacgaccccacacccccaaggggc

SEQ ID NO: 164086 - RNA, 79 nt, Homo sapiens
cggcgccaggccggcccaccggccaggggcaaaggagaggaagaggaagaggaagaggcagcggcgcgccagccaaccc

SEQ ID NO: 164087 - RNA, 66 nt, Homo sapiens
agaggggacagacagaggcagaaaggcgcccggggggacaccgaagcgaccgccaagccacaggcc

SEQ ID NO: 164088 - RNA, 84 nt, Homo sapiens
aaagaaggcggcggcaagaaaacgcagacaaaaccgcggaagagcgcagagccggaacccgaagaggcagcagcggaccggaaa

SEQ ID NO: 164089 - RNA, 66 nt, Homo sapiens
gggcaaaccggcaggcgcccggacacagaagaggacagaaaaacgagcacaacgagaaccgcgaaa

SEQ ID NO: 164090 - RNA, 75 nt, Homo sapiens
agcagaccgggcgaagggagaggacagcagggaggcgggacgcgggaagaacaggagccaggagacagccagagc

SEQ ID NO: 164091 - RNA, 77 nt, Homo sapiens
cggaccacgaggcgagacaccaggagccaggcagagaacagcagaccacagcagggagcgggcgcaccacaggaagc

SEQ ID NO: 164092 - RNA, 79 nt, Homo sapiens
ggccccggcgcagcccggaaagccggcaagacgagaaagcagggaaagacaaggagccgggccgagaaaccgaaccaga

SEQ ID NO: 164093 - RNA, 69 nt, Homo sapiens
cgagcccgcaggagccgcagccgaacagcccaaaagcaaagcagggcagcaaagaacacaaaggcacgg

SEQ ID NO: 164094 - RNA, 81 nt, Homo sapiens
acgaccgcccgcgagagagagaaagacgcgaggggacgaggaagacaggaggccagagggaagcaaagcagccaacaccag

SEQ ID NO: 164095 - RNA, 84 nt, Homo sapiens
ccacaacagacgcccaacgagggcaagaccagagagccgcggggaaaggaggcagcggaagaggacgcccccaaggggccccga

SEQ ID NO: 164096 - RNA, 36 nt, Homo sapiens
gcgcaaaacgaaaaccaaggaagcagaacggaaaaa

SEQ ID NO: 164097 - RNA, 68 nt, Homo sapiens
gggggacggaaagaggacggcacacagagaaaaaaagggaacaaaacacagcaagcagacaaaagggg

SEQ ID NO: 164098 - RNA, 85 nt, Homo sapiens
cccgccacacggcagacgccggggacagccgagacacagccccagcgagaggccaaccaggccccgaagccaccgggccaagcac

SEQ ID NO: 164099 - RNA, 74 nt, Homo sapiens
agaagaagcgagggagccggcagcagagcaaaacagagcggaacgaacaaggggaccgaaaccaaagaccaaac

SEQ ID NO: 164100 - RNA, 88 nt, Homo sapiens
ccacggccggaaggcagcaagccaggaagaacgaagcgcgcagaaaacacagaaggcaaaagcgcaaaaacaaaacaagagcgcagag

SEQ ID NO: 164101 - RNA, 71 nt, Homo sapiens
gccacggcgccccgcaagggagagaaagcaggagaaaaccaaagcacgaaaggaacccggcggcggcaaca

SEQ ID NO: 164102 - RNA, 78 nt, Homo sapiens
cgaggaagacgaggacaggacagagcccccgaggccccagaacaccgacaggacccagaccagccaaagagaagaaga

SEQ ID NO: 164103 - RNA, 58 nt, Homo sapiens
gaaacaaggagccaaacaaagaccacagcagcagcaaggaggaagcagcacaacccgg

SEQ ID NO: 164104 - RNA, 74 nt, Homo sapiens
accacgcgcccggcggcccggcccggccgacgccaagggcgggacaagggcgcaccggggcgcagcgagggagg

SEQ ID NO: 164105 - RNA, 80 nt, Homo sapiens
aagcgcccacggacaacccccagccaaagcaaacagagcggcgacagaagccggcgaacacggccaagacagaagccgag

SEQ ID NO: 164106 - RNA, 83 nt, Homo sapiens
cggcggagcgcaggggagaaccggaaggaggaggaagccaagaacgggagcgaagccacgcagcggcaccaacgaccgggccc

SEQ ID NO: 164107 - RNA, 81 nt, Homo sapiens
ggagacggggcgcccccccgccaaggcccggcgaggcgccagccggaagcccgagggcagcgcccacggccgcgaccggcc

SEQ ID NO: 164108 - RNA, 38 nt, Homo sapiens
caccagcacgcccacccagagcacccaacgagaggaca

SEQ ID NO: 164109 - RNA, 64 nt, Homo sapiens
cggggcccagcaaagccaaaggaaggaccagacagcgcagaagccgcacagcggcaagcagacc

SEQ ID NO: 164110 - RNA, 71 nt, Homo sapiens
aacgagagagcaaaagaggcggaacgaaaggagcgacgagagccgaaagaagcgaggaaacccaaagaagc

SEQ ID NO: 164111 - RNA, 70 nt, Homo sapiens
gacaagagggaaaccagaccagacccaaaaagagacaaggggagaaacggacaccaggggggaaaaacca

SEQ ID NO: 164112 - RNA, 81 nt, Homo sapiens
ggacgcgggaggacggcacaccgcggcgacgccgaacggaacaaggaacagcaccacaacaggaaggaacccaggagaaga

SEQ ID NO: 164113 - RNA, 74 nt, Homo sapiens
aacagagggcagccgcaagaaagacaccccaggcaaacaggaggcgcggggcacagacaaacaggagcccgcag

SEQ ID NO: 164114 - RNA, 77 nt, Homo sapiens
gaggacggggcacggacacagaggacaaccaaacggaggaaaaggacgccgaaaagggagagcacaaccagaccagg

SEQ ID NO: 164115 - RNA, 70 nt, Homo sapiens
agaaggaaaaggggcagcgaaagaaggagaagacagaggagccagaccaagagacagcacaggcgagcga

SEQ ID NO: 164116 - RNA, 72 nt, Homo sapiens
agacgagagccaacgcaaccaggcgcaggacacacagagagacgcgaccggaaaggagagagagacagaacc

SEQ ID NO: 164117 - RNA, 81 nt, Homo sapiens
cgacgagccgcacgcacgagcagcacaggcaccggcacgacgacgcccgacgagcgcaggcacccagaggcgaaaaccggc

SEQ ID NO: 164118 - RNA, 74 nt, Homo sapiens
gggagagagggcggcgcgcccaaaggccaagcccaggacgaggaaagccccaggaagaagaagaagccgacaaa

SEQ ID NO: 164119 - RNA, 78 nt, Homo sapiens
gaccaaggaaggagagggccgcgaaggaagccgcaaaagcagacaggcagcaaagaaaggaggagaagcccagccgcg

SEQ ID NO: 164120 - RNA, 82 nt, Homo sapiens
gaggaggaggggaggcgcccccggagccgccccggaggagaaggaacaccggacagaaacgagccagggcggcacccaggca

SEQ ID NO: 164121 - RNA, 71 nt, Homo sapiens
ggcggaggcgaaagcggaacgagcccagaaccgggacaacccagcaaacaggccagacccgacaggagcga

SEQ ID NO: 164122 - RNA, 73 nt, Homo sapiens
agaccccgccggaggacagcccaacaaagagaaagaaagggacaggcgaccggcccgaggaccgccgcacgac

SEQ ID NO: 164123 - RNA, 71 nt, Homo sapiens
acagcgccgcaccccagagcccacacccgcagagcgaggaccggaagacgccgaccacagcacacgaaacg

SEQ ID NO: 164124 - RNA, 87 nt, Homo sapiens
ggacgcagcccggcggcagcaggaggaggaagccaagaacgggagcgaagccacgcagcggcaccaacgaccgggcccggaagcaac

SEQ ID NO: 164125 - RNA, 82 nt, Homo sapiens
cgaagaggagaaggaccgaccgaggccagccagggaccagaaagaccacaaagcgacagcacagcggcccgagaggaaggag

SEQ ID NO: 164126 - RNA, 79 nt, Homo sapiens
gcccgcgcgcccggccaagaggcaaaggggaggacgcagcaaaccaccagaaggaccaagaacgcccagcccgcgggca

SEQ ID NO: 164127 - RNA, 80 nt, Homo sapiens
gcccagccccgcgccgccgcccccgccgcgccccgccagccgccacccgaacagacccaggaaagcacagcagagcgaca

SEQ ID NO: 164128 - RNA, 71 nt, Homo sapiens
gggcagccagagaaacggaaccagaagcagagccaacagaccgaacaaagaaagcccggaaggaaggagag

SEQ ID NO: 164129 - RNA, 63 nt, Homo sapiens
cgagaagcgcagaacgaagagccgcccagcccccaaacccaagaacagcagagccagacgacg

SEQ ID NO: 164130 - RNA, 78 nt, Homo sapiens
ggacacggcccgcagcgagggaagacgggcaaggcgcacccccgagagagccacggaagggcgccaaggagccaccgc

SEQ ID NO: 164131 - RNA, 35 nt, Homo sapiens
agggagagccaaagaaggcacgacgcgaaagagac

SEQ ID NO: 164132 - RNA, 87 nt, Homo sapiens
gacaccccggccccgcccgccacagagcagaggcggcggccgagcgacggccccggcccaggggggggacagaagagaggaggcacc

SEQ ID NO: 164133 - RNA, 57 nt, Homo sapiens
ggcagccagcacaagacagacaaacgggcacgacaaaacgagaaacagacaggcccg

SEQ ID NO: 164134 - RNA, 72 nt, Homo sapiens
acaaacaaaacaaagagccgcagaagaaagcagcgaagcacacacagggcggaagaagagcccggaaggggc

SEQ ID NO: 164135 - RNA, 59 nt, Homo sapiens
gccacgagcgggcaccagaggggaaggggcccgcagaagaaggaagcaagagaagaacc

SEQ ID NO: 164136 - RNA, 82 nt, Homo sapiens
gcgccgcggcggagcgacggacgcgaggaagacagccaagcagagaaacgaaggagcgacaaggagaccggcccccggcaga

SEQ ID NO: 164137 - RNA, 59 nt, Homo sapiens
gcggcacagcgccgccagcagggccgaccagaaggaaaagggacaccaagcacaggaga

SEQ ID NO: 164138 - RNA, 73 nt, Homo sapiens
cgccaccgcgaacaggagcccgacagaagaggccggaagagcgggagcgggagccaggcagaaggccaaccaa

SEQ ID NO: 164139 - RNA, 79 nt, Homo sapiens
gacaacaccggccccgaccccccacgacgcgcggaaaagagcgcccgcgagcaggagcgggaacccaaggcaaaagcaa

SEQ ID NO: 164140 - RNA, 104 nt, Homo sapiens
agccagcagacccccgagggccgagcaacaggagggcgaccacaagcaaacagggagcgcgaaggacggaggcccagaagggagaaagccggccaacccagcgc

SEQ ID NO: 164141 - RNA, 76 nt, Homo sapiens
ggcagaggaccaacagggcagagagcaaggggacaccaggcaaaacggacaaggacggaaaaaaacgaacgcaaag

SEQ ID NO: 164142 - RNA, 77 nt, Homo sapiens
agcagcgccgggagaaggaccacgcaggccgacaccggcccggcccaagcggaagcagcgggcagagccgagacaca

SEQ ID NO: 164143 - RNA, 76 nt, Homo sapiens
cggcacacccacgaccggccaagccagcccaccccaagccccaggcacgcggagacgacaccaggagagaggagca

SEQ ID NO: 164144 - RNA, 70 nt, Homo sapiens
aacggacgaaacacaaaaaaagaccgacaagcaacagcaggcaaaggagaagagaagggggaccagcagc

SEQ ID NO: 164145 - RNA, 72 nt, Homo sapiens
aaccaggcaacaggcagaaaaagaaccagagagcgcgcacaccgaaccagagcccccaaagggcagaagaga

SEQ ID NO: 164146 - RNA, 70 nt, Homo sapiens
gagcagaaccgagaagcgccccagaaagcaaggcgccaccggaagaaacgggaggggaggagccgggaaa

SEQ ID NO: 164147 - RNA, 73 nt, Homo sapiens
gaaagccccaagccagaggaagaagcaacagcaggaacggggcgcgaaagacacggacaacgcaaacccggcc

SEQ ID NO: 164148 - RNA, 78 nt, Homo sapiens
agccacaaagggaagcaagagaaaaagaacaacgcgggcacccgaaacaaaccagaaagaggcaacgggaagaccggg

SEQ ID NO: 164149 - RNA, 76 nt, Homo sapiens
caaaaagagcagggaacacaaacaggggcaaaggccgggccagcaagaaggcaaaaacaacaggccaaacggggag

SEQ ID NO: 164150 - RNA, 75 nt, Homo sapiens
gcagcgcgcgcgcgagccacaaggagagcgaagcaaggcccggcgcaaggccagacacacaccacgccaagaacc

SEQ ID NO: 164151 - RNA, 90 nt, Homo sapiens
ggccggcgggggcggcggcggccagcgccagagccagaaggccgggggaaagcaacacgagaccccggagaagaaccgcgccagaagggg

SEQ ID NO: 164152 - RNA, 72 nt, Homo sapiens
cgcgcccccggccgggccgcccggcggcaggcaggggcgcccagaggcgggacgagcggagagggacgaggc

SEQ ID NO: 164153 - RNA, 63 nt, Homo sapiens
cagcgaccaaaaacagaaacccagagcaaccccaagcgcccacccaagccgcgaaagaagaag

SEQ ID NO: 164154 - RNA, 49 nt, Homo sapiens
agagaccaagcaccaagaaaacgccaaggaacggcagcaacacgcaacc

SEQ ID NO: 164155 - RNA, 36 nt, Homo sapiens
gccacccaggcccaagaagaccacccaacacacaac

SEQ ID NO: 164156 - RNA, 87 nt, Homo sapiens
gcgggagcgggccggcgcccgggggcgcagggaaggagggcgccgagcaacaaccgccgagcgcccgggcgcgccaggcacagccaa

SEQ ID NO: 164157 - RNA, 74 nt, Homo sapiens
ggcggaccagggcgagcacgagcacccgccccaacgagcaaaccgaacacccaggcgccccaaggagagcgcaa

SEQ ID NO: 164158 - RNA, 76 nt, Homo sapiens
ggaggaacgcaggcgcgccagaaaaaacaccagcagcccagcaaccaaaaagaagaccgcacccaaacaagggaac

SEQ ID NO: 164159 - RNA, 56 nt, Homo sapiens
caaaaccaggggaaccaaacaagaaaaggggaaggaacaaaccaaagagcagaccc

SEQ ID NO: 164160 - RNA, 83 nt, Homo sapiens
gcgcacgaggccgcggagccggacgcggggggcgggaagagccggggccgggcgacaggagcaggaacagcgccaaccagcca

SEQ ID NO: 164161 - RNA, 76 nt, Homo sapiens
gaaagaaggcaaaacacggaccggcaaggcagagagaagcaccacacacgagccaagacagccccacccggacaga

SEQ ID NO: 164162 - RNA, 72 nt, Homo sapiens
gcgccggcccgcggaaaggccaaagcccagccccaggcacagaccccagcgaggcaagcaacacagggcccc

SEQ ID NO: 164163 - RNA, 55 nt, Homo sapiens
agagaggaagaagaacgacccgcccggggcagcagagccaacacccgaagcgaag

SEQ ID NO: 164164 - RNA, 71 nt, Homo sapiens
aaggaccaagaaccagaccaagacacccaggagaaagacagcggggaaaagaaaaaggagggggcaaaagg

SEQ ID NO: 164165 - RNA, 67 nt, Homo sapiens
gacccggggacccccgacgccaggcagcgcccccaaacggccaagcagaccagcgcccaggaagcca

SEQ ID NO: 164166 - RNA, 50 nt, Homo sapiens
gccgagaggcgcggggagaggaacaacggacagcaaggacccgcccagcc

SEQ ID NO: 164167 - RNA, 76 nt, Homo sapiens
aagcagcggccggaggacgccaaagaaggcacagcgcaagccccggggcagagacacaggacacccacccgccggg

SEQ ID NO: 164168 - RNA, 73 nt, Homo sapiens
ggcaaaagacccagcgaggcagcgcccgaaccaggcgggacgccggcagcaagcaagaaagagggacagccgg

SEQ ID NO: 164169 - RNA, 118 nt, Homo sapiens
ggggcgcaccgccgcccgccccgccaccgcggacccgaccgcccacccgcccgcccagcccaggaagaaaacaccggagcccaagacaccaaaacagacgcaggcaagaggcagaagg

SEQ ID NO: 164170 - RNA, 65 nt, Homo sapiens
cgccggggcacgacacaaaaacaggacgggggcaaccggacagagaagcccaagagaagcaggag

SEQ ID NO: 164171 - RNA, 77 nt, Homo sapiens
cgagcccggggaaggagcaggaagaggaccacagggaccccacccggcggaggaacaggcacacgcagccagaagca

SEQ ID NO: 164172 - RNA, 59 nt, Homo sapiens
ccaccaccaccaccaccacagagcgggaagaggggcgagggggaggggggcgaaaccga

SEQ ID NO: 164173 - RNA, 75 nt, Homo sapiens
cacggaccccagcgaccagcaccgccgcccaccacccgacccagagcccccgcccggcggacgaaagaaagaagg

SEQ ID NO: 164174 - RNA, 61 nt, Homo sapiens
ggacacgcacagcaaggcagaccagcaagaacagagaagagcagaggaagagaagagaggc

SEQ ID NO: 164175 - RNA, 57 nt, Homo sapiens
cggagaccgggcggagccggacgagcgcggggagcgaggcggccagggccccagaag

SEQ ID NO: 164176 - RNA, 60 nt, Homo sapiens
gacgacaagaccaagagaaaaaaaaggagcaagaggaaacagggccaccaggccgccagg

SEQ ID NO: 164177 - RNA, 70 nt, Homo sapiens
acaaccacacccaagccgcccgagacgcgcccacggaccaaaccacccagggaccaccagaggaagccgg

SEQ ID NO: 164178 - RNA, 82 nt, Homo sapiens
ggaggccacaccggcaaaaccgacaaggccagagcggggcccggcgcacccaccaccgccgcccacggcagcccagggaccc

SEQ ID NO: 164179 - RNA, 62 nt, Homo sapiens
ggaggcaaagaaaaggagaaaagaagccaaagggacacgagacaccccagcagaaagggaac

SEQ ID NO: 164180 - RNA, 85 nt, Homo sapiens
cgccagcccagcaaagcagacggccgcacgcgacccgaagggccaaccgccccccagcagcaggcacgggcgaaccccgagcccc

SEQ ID NO: 164181 - RNA, 76 nt, Homo sapiens
gcacccccgaacagcacccccagcagccaccagcagaccccgccccccgaggcgcagcccgaacccagcagccaca

SEQ ID NO: 164182 - RNA, 64 nt, Homo sapiens
gagcagcccccggagacagcggcacagagggccgccaggacaggaccagacaacccagggcaca

SEQ ID NO: 164183 - RNA, 70 nt, Homo sapiens
cccacacaccaccgggccagaacagacccaaggaagaagggcacgcaggaaggccggggggggcacagag

SEQ ID NO: 164184 - RNA, 86 nt, Homo sapiens
acaccacgaaaaggaaggccaagaccaggaaaagaaggcaccccccgaccagcagaggcacagcggcacagagacgaggagaagag

SEQ ID NO: 164185 - RNA, 73 nt, Homo sapiens
aagacaccaggggagaccggaccaaaagacacagcagggacgaaggagaaacagaggcgcaccgggacggagc

SEQ ID NO: 164186 - RNA, 84 nt, Homo sapiens
ccaccgcgagcccccaggaggcggagcacacgccaaaagaccacgggcccggcagaccaggacaccagaaaggaagaagaacag

SEQ ID NO: 164187 - RNA, 72 nt, Homo sapiens
ggacggcgcagccgaagcaacccaccagccacgggcacccacccgcagaacgagagcccagacagagaaagc

SEQ ID NO: 164188 - RNA, 77 nt, Homo sapiens
ccaggaaaaagcaaggcaggaaagagggagcgagcccagggcggggcgaaaggccacaaaccaagagcaggagagag

SEQ ID NO: 164189 - RNA, 64 nt, Homo sapiens
acgaggacaccggcagccagaccacacggacaagcccgcacagcgggcaccggggaccgcgagg

SEQ ID NO: 164190 - RNA, 69 nt, Homo sapiens
cgccggccgcagagcacgcggagcgacccgccacgcggaaaagaccggaagggaaggccccaaagacca

SEQ ID NO: 164191 - RNA, 57 nt, Homo sapiens
gagacacgggaggagcgccacacccacacacaaggacaggcaaccacagagagagca

SEQ ID NO: 164192 - RNA, 78 nt, Homo sapiens
agcgagccgaggacgaaaggccgggaagccgcgagaccaccggaaagaagcggggcaggaggaaaaggaggcaagaaa

SEQ ID NO: 164193 - RNA, 72 nt, Homo sapiens
gacgaggaacgcgcgagggagaaccagccgccggaacagacggaaccaaagccgaccccgaaacagggagca

SEQ ID NO: 164194 - RNA, 72 nt, Homo sapiens
cacgccacggagggaggacacaccgggccagacaggacaaccccagagaaagagacccacggccagaagcca

SEQ ID NO: 164195 - RNA, 86 nt, Homo sapiens
gccacgagccaacacagaaagggaacagacgagggcaacccaagcgaggcacggggcagcaaccggccggacagcgcacggccaag

SEQ ID NO: 164196 - RNA, 74 nt, Homo sapiens
ggcgaggcgggcggcggcagcgggccagacccaggaccgcgacacacccgggaagaggaagaccaacacagaaa

SEQ ID NO: 164197 - RNA, 67 nt, Homo sapiens
cggcgggacgcgggcgccaggaccggccgaacgcagagcaaagccgaggcgcaccaggacgaggcag

SEQ ID NO: 164198 - RNA, 69 nt, Homo sapiens
cagcgagcagcaccgggcacacgcagaagcacggaggacaagggaagcagccgagaggcgagaaagaag

SEQ ID NO: 164199 - RNA, 77 nt, Homo sapiens
acacaaccaagacgccgagggggagccaagggccagacagcaccaggagagaaaggccgggaaaacaacgggaagaa

SEQ ID NO: 164200 - RNA, 70 nt, Homo sapiens
agaaaacgggcggcacagcagacccacccaggaaaaggccacgaggccaggggagcaggggcgggcccag

SEQ ID NO: 164201 - RNA, 49 nt, Homo sapiens
aggggcaagagggggaaagcacaggggggcagcggagcagaaaaggaaa

SEQ ID NO: 164202 - RNA, 73 nt, Homo sapiens
agcccaccggagacagcacgcgggcgcgggaaagcccccgcccaaaccacgagggaaagacagggccgcaggc

SEQ ID NO: 164203 - RNA, 75 nt, Homo sapiens
accaggccaccacagaaacaaaagcaacaaagaggggcccggccacaggaggggcgccaggccgggccccccgcc

SEQ ID NO: 164204 - RNA, 79 nt, Homo sapiens
ggagcaggaggcgacggcggagcggaggaggcgccagcagcccggaggagaacaccgaaggagaagccaagccaggccc

SEQ ID NO: 164205 - RNA, 75 nt, Homo sapiens
gacagccagcacaccccgcgagcaagaaagcacagcggagagagagaccggacagaggggcgaaacgcaccagcc

SEQ ID NO: 164206 - RNA, 79 nt, Homo sapiens
caccgacccaccgcgcccgggccgccggcaggcggccgcagcaacccgccgggaggcccacaagcggcacccaccaaga

SEQ ID NO: 164207 - RNA, 67 nt, Homo sapiens
aagccaccgaggcagaacaacaacggaaaaggagaagccggacacaagagggcaagaaaggcgcgac

SEQ ID NO: 164208 - RNA, 61 nt, Homo sapiens
ggcgcccaaaacaagcgaaggagggccgggcacgcccccgagggaaacaagcgcccaggcc

SEQ ID NO: 164209 - RNA, 31 nt, Homo sapiens
gcggggggaccgcacggcaaagaaccccaca

SEQ ID NO: 164210 - RNA, 69 nt, Homo sapiens
ccccgccacacagagcaacacaccaacccgaaaaaacaccagcagcccagcaaccaaaaagaagaccgc

SEQ ID NO: 164211 - RNA, 85 nt, Homo sapiens
cggacagagacaacaccgagagagaagggaaaggaaaccaaaccaggaaagaaggacaaggagcgaggagaaagagggacaccag

SEQ ID NO: 164212 - RNA, 70 nt, Homo sapiens
gggcgcacggagggaggaaggccggcggcacccacgcgggggacgggcggccgggcccaccccggagcga

SEQ ID NO: 164213 - RNA, 81 nt, Homo sapiens
gaaggagaccgcgcagacgaaaccggaggagcagagaaaggagagagcaaagagaaggaagcaaaaacaaaacaaaagaac

SEQ ID NO: 164214 - RNA, 68 nt, Homo sapiens
ggagaaaggagcacacaggaaagaaagaaacggcccaagaacaaggggaaggcccccccccacgaaag

SEQ ID NO: 164215 - RNA, 43 nt, Homo sapiens
gccaaccccccaagaagcagagagcagcggaaagagccaggca

SEQ ID NO: 164216 - RNA, 88 nt, Homo sapiens
gcccaccccgacaacggaggggcgcccaggacccccagggcggacagacgccgcgcccgcccggcccccaggcacaggaagacccagc

SEQ ID NO: 164217 - RNA, 79 nt, Homo sapiens
ggacccgcggccccaccggcagcggggcacacaagagcccggaagcgccgaaaaggaaaagagaaaagagaaggagccg

SEQ ID NO: 164218 - RNA, 81 nt, Homo sapiens
aggaaccgaggagaagaagaagagcggccgggaaggaggccggggaggcggcaggagaacgccgggggaaccagcggcagc

SEQ ID NO: 164219 - RNA, 79 nt, Homo sapiens
agaaaccaacagacaagccaaacggcaaggaacacagaggaggggcacgcccggaagaccagacccgcagcccagccag

SEQ ID NO: 164220 - RNA, 70 nt, Homo sapiens
gcggccgaaacagaaaacaagagaccacagaagaggagcagcaagaaaaaagagaccacagaaaaaaaca

SEQ ID NO: 164221 - RNA, 79 nt, Homo sapiens
aaaaacacacccccgcggagggcaacagccaaagcgcccaacccaagcaaaggcgaaagagagaaaaccagaggaggag

SEQ ID NO: 164222 - RNA, 74 nt, Homo sapiens
acacgaggaggacggcaaagaccggaccacgaccgagccgcgcccacccccccgaggacgaggacggcccggaa

SEQ ID NO: 164223 - RNA, 83 nt, Homo sapiens
ccgagcaggcaggacgaggggaagacacccgccggaacccaaggcacaggaggacggaagaaagaccccaaaaaagaaagacc

SEQ ID NO: 164224 - RNA, 68 nt, Homo sapiens
caccaaccgccccacccaccggaagaacgagggaaacaagccggaagaagaaaacagcaaacaagaaa

SEQ ID NO: 164225 - RNA, 78 nt, Homo sapiens
gcgccaacgcccgccgcaggcccaggaacccgaagcgggcgagccagagcgcgccagaaccccgcagagggccggcag

SEQ ID NO: 164226 - RNA, 71 nt, Homo sapiens
ccgggaccaccacccacagcagcccagagagaggcccacgcggaccggcagcgccaccggaccaccagaca

SEQ ID NO: 164227 - RNA, 78 nt, Homo sapiens
cggccacggcgccagagccggggacgaaagggaaggacaggcagagcaaacaaggaggcgaggagcccgagcaggcgc

SEQ ID NO: 164228 - RNA, 83 nt, Homo sapiens
cgcccgcgagcgcggagcgcggcgccagaaagacaaagcggccagaagaaaagagaggggcccccgggaacaaaggaagaaac

SEQ ID NO: 164229 - RNA, 80 nt, Homo sapiens
acacggggaagcgcaaaaacaagacggggcgccccacagaggggcgacggagggaaacagcagaaagccgacagaccccc

SEQ ID NO: 164230 - RNA, 44 nt, Homo sapiens
ccgggggccaccaccgaggaacaggccgcgaaacacccaggaca

SEQ ID NO: 164231 - RNA, 53 nt, Homo sapiens
ccgccgggaacgccagcgagccagaggcaacagagcccagaggggggaaacag

SEQ ID NO: 164232 - RNA, 69 nt, Homo sapiens
aaaagaaggaaggagagcgggacaaaggaaaaagaggaggaaaacagcagggacgaacaaaagcgagag

SEQ ID NO: 164233 - RNA, 76 nt, Homo sapiens
ggcccccgcccccgcccgggaaccgccgggaacccgccagcaccaccgcccaaccccagaacccagacccaagaac

SEQ ID NO: 164234 - RNA, 72 nt, Homo sapiens
ccgagacacccaccacagcagcaggacacgggggggaaacaagcacgggcgagccaggacacgaccacaaca

SEQ ID NO: 164235 - RNA, 74 nt, Homo sapiens
gcgcaggcacccgccccaggccgcggggccggacccgagggcagggaacccgaccgcggaccagccacgagccc

SEQ ID NO: 164236 - RNA, 75 nt, Homo sapiens
agaagcacaacccaaccaagcagaaacaacagaggcgaagaaggggacccaccacacagaggacacaagaaccac

SEQ ID NO: 164237 - RNA, 71 nt, Homo sapiens
aaaacaaaccaagaacgaaagagacgaaggccgacgggaaccagaggagggaccgaacaggacgccacggg

SEQ ID NO: 164238 - RNA, 54 nt, Homo sapiens
ggccacggaggcaccagaagaagcaccagagcccaaaaggcagagcgaggagag

SEQ ID NO: 164239 - RNA, 76 nt, Homo sapiens
aaagaggcccccccccccgcgacggacgaaaaggcccaggccggcggaaaacccaccgccaaaagagcccagcagc

SEQ ID NO: 164240 - RNA, 73 nt, Homo sapiens
agacgcacgccggaccgagaaagccggccaacacggaaacgggggagcgacaaacaccaccacacaaaccccc

SEQ ID NO: 164241 - RNA, 84 nt, Homo sapiens
gagaccaacccccggccaggcagcccgaggagggccgagcggaggggaggagccagggacgcccgcggaagagcgcagcaccag

SEQ ID NO: 164242 - RNA, 75 nt, Homo sapiens
gcggaaccaagccccagccggagaaggagcccacaacaaccacagggagcaacagcgagcaacaggcaacgaaaa

SEQ ID NO: 164243 - RNA, 81 nt, Homo sapiens
aaacaaaacaggacagcacaggcacagaaggccaaaaaggcaaccacagagagagagagggaggggcagaagcacaggcag

SEQ ID NO: 164244 - RNA, 62 nt, Homo sapiens
caggggacaccagagagaaagaaggcaacaagaagaagggaagccgggggaggccacggaca

SEQ ID NO: 164245 - RNA, 78 nt, Homo sapiens
ggacgggggacggggagcccgggagcagccgccccccggccaggggacgccaggggaccgcggaccggacccacgaag

SEQ ID NO: 164246 - RNA, 82 nt, Homo sapiens
cggagaaggcgagccccgggacccccacaccaagacgcagcagccgaggcccagccaaggagaccgggagagagacgaagga

SEQ ID NO: 164247 - RNA, 93 nt, Homo sapiens
cccacccgcagccgcacccccggcggcagcacgaaagaccacaaaggcaagaccgcggcaacgcaaaagacaaaaaaacaaagcgccggacag

SEQ ID NO: 164248 - RNA, 92 nt, Homo sapiens
agcaaagcagacagccacccccaccacccaacacagcagagggagagacaagccaacgagaagagccccgagccacggagaagcagaccaag

SEQ ID NO: 164249 - RNA, 76 nt, Homo sapiens
accgcgcgcaggcagaagaaggagccagcagagcgccaggcaccgcggaaccgagcagcaggagcggacggacgga

SEQ ID NO: 164250 - RNA, 79 nt, Homo sapiens
caaggcccccaagccccccggcgacgacgcccgaggccccgacggcagcccaccccgagcgcggaaccgcaggggggag

SEQ ID NO: 164251 - RNA, 53 nt, Homo sapiens
gcacccaagacacgccagcacgaccggcaagagggagcaggaaccgagagagc

SEQ ID NO: 164252 - RNA, 74 nt, Homo sapiens
gcacgaaagccccacccgccgcagcaagcagagaaacgaaggaggcccaaccacaaaaggagccgacggaaccc

SEQ ID NO: 164253 - RNA, 79 nt, Homo sapiens
gcagacggaaacaaggcaacagaaagagcaacagcagggcaacagacccccggcggccaagacacagcgaaaaacccag

SEQ ID NO: 164254 - RNA, 76 nt, Homo sapiens
gcgaacgacacagaagagccaaaacccagcagcaaacaacaccacccaaacgccggcgaccccaagaggaagccca

SEQ ID NO: 164255 - RNA, 70 nt, Homo sapiens
ggcaagcgcaaaccgccgaccggcggcgggcaagcgccgggacaagacagcgcagagacgggacgccagg

SEQ ID NO: 164256 - RNA, 77 nt, Homo sapiens
gccgaagagaacgcgaagaagggccaaccccggggaggagaacaccaaacagaggaacaggcggacagccaaggaga

SEQ ID NO: 164257 - RNA, 70 nt, Homo sapiens
cccggcgcccgccgccgccccggagcgccgggggaggagcgagggagaagccagagagcgaccaccaacc

SEQ ID NO: 164258 - RNA, 95 nt, Homo sapiens
gagcggccgccgcggccaccgaagccaccgcggccacggagaagggcgagaagaagaaggagacaaggcgagaccaccagaaggaggccggggag

SEQ ID NO: 164259 - RNA, 80 nt, Homo sapiens
aacccccccgggagcaaggcccagcgggaggcggagcccggccaccagcggccaaaagaacacagccacaggaggagacg

SEQ ID NO: 164260 - RNA, 60 nt, Homo sapiens
gagcccaggcagcccagcccgcccccagaaaccagccaggacacggccaaggccggcgag

SEQ ID NO: 164261 - RNA, 73 nt, Homo sapiens
ccagaaacgagccaaaaagacaagcgaaaaagggcagaccaagaaggagaagaagcaccaacaggaaaaacgg

SEQ ID NO: 164262 - RNA, 67 nt, Homo sapiens
aaagccggcggaccaacgaagagacgacaggacgccgaaggcaaaaaaggcaccgaccccccagaac

SEQ ID NO: 164263 - RNA, 83 nt, Homo sapiens
gacagagcgagcgcggcgcggggccaccagggggcccagccagcacggcagcgcaccgcaaaggccccagggagccccgcgcc

SEQ ID NO: 164264 - RNA, 78 nt, Homo sapiens
cgaaaagcgcagcgagcggagccgccggaggcacccggagccaacaccagaggacacacaccccgacaagaagaaaga

SEQ ID NO: 164265 - RNA, 71 nt, Homo sapiens
cacaaaaagcacacagcaagcacccgagcccaaccaaaacgccaagaaaggcggaagaaacaaaaccgaag

SEQ ID NO: 164266 - RNA, 75 nt, Homo sapiens
gggcggccacaagcaaagaagcgccagaaccagacagccagaaggcaagaggaaccaaaggaaaaggcacaaagc

SEQ ID NO: 164267 - RNA, 86 nt, Homo sapiens
caggcgccgacaggaacgggagacggaagacaagaagccaaagagcggaggcggcccgcggcagaaaaagccaccggagcgaagcg

SEQ ID NO: 164268 - RNA, 38 nt, Homo sapiens
acgagccacacaggcacagggaccgcgggaagcccgac

SEQ ID NO: 164269 - RNA, 82 nt, Homo sapiens
cgaggcggcccggcggcggcggcaccaggcgggcaaaacgccgagcccgagaacgaccccagaaggaaggagcgaggcacgg

SEQ ID NO: 164270 - RNA, 78 nt, Homo sapiens
gccagggaagagaaaccgagcaacagacaaagcccggggagccggggagcgagagcacaagaaagaaccagaagaaaa

SEQ ID NO: 164271 - RNA, 82 nt, Homo sapiens
ggagccaccagcacggaccaggaggcgagcaacagagagaagaagaaggaggccgcggccagaaacccaagaaaaagcgaag

SEQ ID NO: 164272 - RNA, 69 nt, Homo sapiens
aaaagagagccgggcgcggaaacgagccgccgccggaaaggaggcacgagagccccgcggaggcccgag

SEQ ID NO: 164273 - RNA, 83 nt, Homo sapiens
caagaacaaaggccgcgacggagacgcagcgaaagaaaaccgaccccagaggcccaaacagcaccaggacacgagaaagacaa

SEQ ID NO: 164274 - RNA, 71 nt, Homo sapiens
aaaaaccaagcaccagagccccaacagccccgcggccacagcgcaagaaggaggggcagagggaaaaagaa

SEQ ID NO: 164275 - RNA, 109 nt, Homo sapiens
aagaagaaacaacaagagaaagacccaggaagcagaagaagcgaggagaagaagagagaaggaacggcacaagaggcagaaagagaaaaaccaaaaagcgaaagaaaac

SEQ ID NO: 164276 - RNA, 69 nt, Homo sapiens
gagacaaggacgggaagaaacagcaaggggcagacaaggacgcaaaggagagggaagcggcagggcccc

SEQ ID NO: 164277 - RNA, 74 nt, Homo sapiens
ccagccccaacccccgcccagagacgagaagcacggaccagcagcccaaaggcaaagggccccgaggcgagaca

SEQ ID NO: 164278 - RNA, 69 nt, Homo sapiens
gcagcagcacgcacgaccaaaagcaggaccaaaagcggaacagccagcaaagacaagagcagaccagca

SEQ ID NO: 164279 - RNA, 69 nt, Homo sapiens
cacagccaggccgcccggaaagggcgcggggacaggagccagcggcccaggggcgggggaggaaacaga

SEQ ID NO: 164280 - RNA, 69 nt, Homo sapiens
cagacaacgccagaagaacaaaaccgacagaacagggaggacaagaggaccaacgaggaagcaagagca

SEQ ID NO: 164281 - RNA, 69 nt, Homo sapiens
cggcaaaccggcccacagcccggccaccccccggcccgaagccccacgccaggggaagggggaacggag

SEQ ID NO: 164282 - RNA, 76 nt, Homo sapiens
gggaagccagccccggcccgggccacaagacccaaggcgcgcggggccgcgcagggcagcggaacgcgccgacgcc

SEQ ID NO: 164283 - RNA, 81 nt, Homo sapiens
agaaacagcgaaggagaaggagccagggcgaaaaaaaagaaggagaagaagcaccagccgacgcgaacggaacacccggga

SEQ ID NO: 164284 - RNA, 75 nt, Homo sapiens
agcccagaacggcgaggacgagaaaggaagagaccccaaggacccggaaccccacaggccgaggcacgaacccaa

SEQ ID NO: 164285 - RNA, 59 nt, Homo sapiens
cgcgggaagcaggacgcgccgcgccccaagggggaccccacccgaggagcagagagcga

SEQ ID NO: 164286 - RNA, 58 nt, Homo sapiens
cacaaacgccaagggacggaccacgcccgcaccagcaaaagagccacaaggaaggagg

SEQ ID NO: 164287 - RNA, 74 nt, Homo sapiens
aggggggccggccagccacccaaggccccggacgccggagaggcaccggaccgggggcggagacacgcacacaa

SEQ ID NO: 164288 - RNA, 58 nt, Homo sapiens
gaaggaccccaaccaagaacaggccgagaacacccagaacgcggacaaacaccgcggc

SEQ ID NO: 164289 - RNA, 78 nt, Homo sapiens
ccggagggagaacggaagccagcaccaccgggcccgcggagcgagaccacagaccaaccaaaggcgcaaaaagaacac

SEQ ID NO: 164290 - RNA, 73 nt, Homo sapiens
cgaagaagagagacaaccaaaagacacaagggcacgaaagagcaccaggacaaaagaagggcagcacaaagga

SEQ ID NO: 164291 - RNA, 83 nt, Homo sapiens
cgggccggcggacaggagggcgcggcccagagggaggcacaacagcgaggacaccaccgagcccccaccgcggcaggacaaac

SEQ ID NO: 164292 - RNA, 77 nt, Homo sapiens
agaaacccaccaacgaccgaccgccggccggaccgcgaagagaaaagccccagcccaggagaaaaggccacccgccc

SEQ ID NO: 164293 - RNA, 53 nt, Homo sapiens
cagacgcagggcgcccccggcgcggccgaacccagcgagaaaccaggaaccac

SEQ ID NO: 164294 - RNA, 71 nt, Homo sapiens
aacagcaaagccaggaaaggaagagggaccaggggagacggccaagcaagcagcaaccgcacaaaccgaaa

SEQ ID NO: 164295 - RNA, 75 nt, Homo sapiens
gaccagcgagacacgggaacagaggaagaaacaagcgagaggaagcacagcagaggagggagcacaagccggggg

SEQ ID NO: 164296 - RNA, 79 nt, Homo sapiens
cgaacgcaaagggaacgcaagaagagagccgaagaaacccacgaagaggaagaaaaggccacaagcccagagccagccg

SEQ ID NO: 164297 - RNA, 81 nt, Homo sapiens
cggcagcacacaaccgcgacaaaacgagaacaccagagcagcaggcaaaagcagaccggaaaacccaccggcaagaccaca

SEQ ID NO: 164298 - RNA, 54 nt, Homo sapiens
aagagaaagcgaaaaagggagcaaaggggcacccggaaacaagccacgaaggag

SEQ ID NO: 164299 - RNA, 79 nt, Homo sapiens
ggaaaaacagcaagaacccaaaagggggcagacacggcccagaaccgaccggaccccagaggccgcgggcgggccccca

SEQ ID NO: 164300 - RNA, 53 nt, Homo sapiens
acaagcagaaacagacaggaccacgcaagcacaagagagagggcacaggacag

SEQ ID NO: 164301 - RNA, 89 nt, Homo sapiens
ggcccgcgcccgccagccaggccaccccgggaacggagacaaccaagacaaagccacagacccaagcagcggaacaggaggcagcacca

SEQ ID NO: 164302 - RNA, 41 nt, Homo sapiens
gccaagcgccggagcaaggaagggggaacgaggccagagac

SEQ ID NO: 164303 - RNA, 67 nt, Homo sapiens
gcagggaagcgacagggaggagccgacaagccgaacccaaaagggcccagaccaagaggagagccgg

SEQ ID NO: 164304 - RNA, 54 nt, Homo sapiens
ggcgcgcaggagccaaggcgagcagcgcgcaaagagagaaggcgggaccaagaa

SEQ ID NO: 164305 - RNA, 71 nt, Homo sapiens
gcagaccgcaaaggaacagaaccaacaagaaaaggaccacagagccaccggaaggccgcgggggaaggagg

SEQ ID NO: 164306 - RNA, 84 nt, Homo sapiens
gaaaacccaacgagaccaaagaggcaaggcagaagaaacacacaggagaacccccgagaacagagagaacacgcccacccaaaa

SEQ ID NO: 164307 - RNA, 82 nt, Homo sapiens
ggaccaccacagcccggagaagacagcgacggaggaaccgaggcccagcacgccgcaccaccaggggggagcgcaccacccg

SEQ ID NO: 164308 - RNA, 71 nt, Homo sapiens
accgacacacagcacaaacacaccaaagcgaacccgggaagaaggaacagggggggggaacaaagaggaaa

SEQ ID NO: 164309 - RNA, 80 nt, Homo sapiens
ccagcggcgggggagagccgaaggagcagcccaggaccgagaccggagcagccggggcggagcggaggaccccgcagccc

SEQ ID NO: 164310 - RNA, 54 nt, Homo sapiens
aggaacgagcggaagccacgccccacacagcagccaggcaaaaggagcagaaag

SEQ ID NO: 164311 - RNA, 82 nt, Homo sapiens
ccgagcaggcggagcgcacgacgacaggccccgcagaaggcgggggagaggcaccagcaacagaccaaccgcagcaagcaca

SEQ ID NO: 164312 - RNA, 67 nt, Homo sapiens
cggcggcaacagcaccacagagaaaacgacagaagaaaaagaaaaacacgaggcccagcagacagcg

SEQ ID NO: 164313 - RNA, 66 nt, Homo sapiens
agcagaaacagggacaaaccacacaaccagggaaagacaaggagccgggccgagaaaccgaaccag

SEQ ID NO: 164314 - RNA, 76 nt, Homo sapiens
cgggagggcgcggacgggagaccaaagcaaccagaaccaaagggacagggaagaagccaaaacagaaggggcaaga

SEQ ID NO: 164315 - RNA, 79 nt, Homo sapiens
gcgccaggcgccgcgcaaggggcccgaggaagcgcgggcggacgacagaggagccgaaccacccacggaaaagccaggg

SEQ ID NO: 164316 - RNA, 82 nt, Homo sapiens
agagcgggcgacagaggagaaacaacaaacgccaaaaaccggacagagaaacgacaaaagagcagcaaaaccagggcccgcc

SEQ ID NO: 164317 - RNA, 75 nt, Homo sapiens
gccgcggccacaccccaggagcagccaccaagggggcacgggcaacaggacccccaagcggaagaggccaagacg

SEQ ID NO: 164318 - RNA, 72 nt, Homo sapiens
ggaacggaacagaccacaggagccgggaaagcggacgacagcagacgacccgaagggcccggggcaaagcac

SEQ ID NO: 164319 - RNA, 74 nt, Homo sapiens
caggaccgaaaaacagagcaaggagagaaagccaacccagcgaaggaacaagcaaaccccaagcggcaagagac

SEQ ID NO: 164320 - RNA, 73 nt, Homo sapiens
caccagcaccggcccaggggccagcccagaggcccggaaggcgcaaaagggggagaacaacaccaccaaacca

SEQ ID NO: 164321 - RNA, 50 nt, Homo sapiens
gaaccgcgccccagaaggcagaggaacacaacagaggacaacagcagagc

SEQ ID NO: 164322 - RNA, 82 nt, Homo sapiens
cgaggagccgggcgcaaggagcggaagagcaccccccggggaaagacacgccccaccgagggcagggccgcccgaacccggg

SEQ ID NO: 164323 - RNA, 73 nt, Homo sapiens
agcaccgggcagcgagacgaaaaaccaaggcgccaccggaagaaacgggaggggaggagccgggaaagacagc

SEQ ID NO: 164324 - RNA, 89 nt, Homo sapiens
ggccccacaccacccgcagggccggcacggccaaggagagaccccaagaagaagcggaagaggagccgcggaaccaagacacaaggaac

SEQ ID NO: 164325 - RNA, 80 nt, Homo sapiens
gcagcagcaggcgaggaggaagaggcgggacggcgccggccggggggacgggcacgggaagaaagaagaggcccgaacca

SEQ ID NO: 164326 - RNA, 81 nt, Homo sapiens
gagcagcgaagaccgaagagcaacagaaccacgaggcaggagcaaagcgaggagggggagcagaccggaagacccgacgga

SEQ ID NO: 164327 - RNA, 75 nt, Homo sapiens
aaaagagaccgaggaacagaagaagggcacccgcacagcaaagagaagggcccgagggcaggacagcaggcaccg

SEQ ID NO: 164328 - RNA, 76 nt, Homo sapiens
acgagcgccacaaccccaggccagcggcggggcagccgagggcaggagcaagaaggcgccccccggccgggccccg

SEQ ID NO: 164329 - RNA, 76 nt, Homo sapiens
agcggaccagcccggagggaacagcagcccagagggaccacagaaagagagacgcccaaggacaagccgagaaaac

SEQ ID NO: 164330 - RNA, 96 nt, Homo sapiens
gggcgcaaccagcgacacaggaagaacagggcgaggacgagggacacgggaacacagaggagccaagcgcccgccggacaacaagagccccaacag

SEQ ID NO: 164331 - RNA, 60 nt, Homo sapiens
ccgggccccacacaccgcccagggagacacccgcagccgcacagccgggccggacccgga

SEQ ID NO: 164332 - RNA, 72 nt, Homo sapiens
acagaccaacaaccggacagacgcagagacccggaaaaaaggcaaagaaaccccaaagccagcaagaccaca

SEQ ID NO: 164333 - RNA, 54 nt, Homo sapiens
ggagcccaccgccaagacacagagaccggggaccacgggaaagcccccgcagcc

SEQ ID NO: 164334 - RNA, 76 nt, Homo sapiens
agaccccaaacgcaagaaacccggcaaaccgacgcgaagacccgagagaccgagagcggcccaggaggaacaacca

SEQ ID NO: 164335 - RNA, 80 nt, Homo sapiens
ggaccgggaaggagcacccaggaccaccagaacggaagggccagcgcaagcgggcgccaggacggggaggacgacgagga

SEQ ID NO: 164336 - RNA, 77 nt, Homo sapiens
cgagaccaggggaccaggaccccagggaacaagccagccagcaccacccaacaccagccagaccggcagcaaccagc

SEQ ID NO: 164337 - RNA, 82 nt, Homo sapiens
caacaaccagggcaagaaaccacggacggcaaagacccaccgaggagaagacaaacacagagagagaagggcggagggaccc

SEQ ID NO: 164338 - RNA, 74 nt, Homo sapiens
gaagccaacaagggaaagcccaccgaggcaggcgcccaggcaagagcccgcccacgggaaaccgccgggcagca

SEQ ID NO: 164339 - RNA, 78 nt, Homo sapiens
aacacgccggagagcagaagaggagccaggaaggaaagagaagaagggcaagaaaacagaggaaaagcgcggcaaacc

SEQ ID NO: 164340 - RNA, 72 nt, Homo sapiens
ggacgaggaccagcagaggccagcacgagaacccagaacagggagagcgagcccgacccagagcccgggcgg

SEQ ID NO: 164341 - RNA, 50 nt, Homo sapiens
cacgcagcggcggccagggaccacccccgcagccggcggacaccaaggga

SEQ ID NO: 164342 - RNA, 62 nt, Homo sapiens
agaaggcggccaaggcccccaggaggagggacacacggacagagaagggcgccccgcccacg

SEQ ID NO: 164343 - RNA, 76 nt, Homo sapiens
ccccggagaggggaccgcgcccgacaggagcccagccggggaggcgaaggcggaaggaacagggccacacggaccc

SEQ ID NO: 164344 - RNA, 96 nt, Homo sapiens
gaaccggagaccccgaaaacggaagcgcagggagaaggaagaggggaaaagaaggaagaaaccaaacgaaacacaacgaccaacgggaagcggaaa

SEQ ID NO: 164345 - RNA, 76 nt, Homo sapiens
gaaaagccaccaggaaacccccaccgccagcgggaaaacaccacggaccccgaacaagaacacacgaaaaacagcc

SEQ ID NO: 164346 - RNA, 74 nt, Homo sapiens
ccagaaggcagaaccagcaaaacccgaggccgacccgcgccagaggagcaaaggacagcccaaccaacacacgc

SEQ ID NO: 164347 - RNA, 73 nt, Homo sapiens
aaccgcaccgcgcaccaaacccagcgacacccccaagaagccaccccaaaaaagaccggcgcccggcgcaggc

SEQ ID NO: 164348 - RNA, 124 nt, Homo sapiens
cgacgacaagggcgacccaaggaaacgcggcgacccgaggaggaaggcccgcgggcccaaggaccgcgaggcaggagacagagagaaagcaacagcaggccagccccagagcccggggagcacg

SEQ ID NO: 164349 - RNA, 69 nt, Homo sapiens
caaggggaggacaaccgcccgggaccagcggccagcaccaagacacgagggcggcgcagcaaacgagaa

SEQ ID NO: 164350 - RNA, 80 nt, Homo sapiens
ggggaggcagcgcgggacccagcccaggcggcgcggacggggcgggagagagccgagcagaagaaaaaaggaagccagac

SEQ ID NO: 164351 - RNA, 62 nt, Homo sapiens
gggcagggccaggcaaagggacagcacagagcgaggagaagaaagggaagcaaagaaagaag

SEQ ID NO: 164352 - RNA, 75 nt, Homo sapiens
cgcggggcgccgccgcgcagcgccgcgcgaacaggagagagcagccgggcggcccagccaaacaggccccgagag

SEQ ID NO: 164353 - RNA, 73 nt, Homo sapiens
caaaggaccagcagaggcaggaccagagggggacccaacaacagggagcgggaggggcaaaccaaacagccag

SEQ ID NO: 164354 - RNA, 56 nt, Homo sapiens
acaacacagaacagccgcaaaacgagacaaaaacgagcaaccgggacccccgcagc

SEQ ID NO: 164355 - RNA, 79 nt, Homo sapiens
aagaccaggcacacgaccaagaagcagggaaagaacgccggacaacagcggcgaagaaggcaaaccgaaggcccacaga

SEQ ID NO: 164356 - RNA, 66 nt, Homo sapiens
cccacgcgcgcaggcccgccgccaccgacgccagggcgccggcgccccccaagagggacgagacgg

SEQ ID NO: 164357 - RNA, 85 nt, Homo sapiens
ggcggacaccaggaagaggagccgagcacgggccgagaccaccgaggagagccggcccacgccaaaaagggaaaaaagagagcca

SEQ ID NO: 164358 - RNA, 67 nt, Homo sapiens
gccagacaaaaccccagacccagaacagcacacagcaagaaggaggccacagcaaacgggaagagga

SEQ ID NO: 164359 - RNA, 77 nt, Homo sapiens
gcagaggcaggggcgcgggggcgccacaccaggagccagggcagaaacccccaccaggcgggcgccacacggcaccc

SEQ ID NO: 164360 - RNA, 68 nt, Homo sapiens
gcgcaaggaacgaagcaggcccaggagaaagcacaggacagaggccagcgaagacccacagccgacac

SEQ ID NO: 164361 - RNA, 73 nt, Homo sapiens
gaccgagaagccagaggaagaaggaaagcccaaacaagacccagcagaccgaggccccccgggcaagagcaaa

SEQ ID NO: 164362 - RNA, 59 nt, Homo sapiens
aaccgccaaagcccgggcgcggaagaagccaaggagggacaaggcacacgcgggacgga

SEQ ID NO: 164363 - RNA, 74 nt, Homo sapiens
agaggcgggacgcgaacacagagggaagagaaagcaaacgagcagggcaaggacgccccaagggaagggcagga

SEQ ID NO: 164364 - RNA, 70 nt, Homo sapiens
cccggcccccgacccagacccccagagaagcagcccacgcgagcccaaggcggggaacgggaaccaggga

SEQ ID NO: 164365 - RNA, 66 nt, Homo sapiens
ccaggagcccgagagagaaggaggcggggcaccaggcccagacggcgaacccgagcaagcaaccac

SEQ ID NO: 164366 - RNA, 73 nt, Homo sapiens
ccagaggaggaagagcaagcgggggaccgaacaaggcaaaagggacagccagcacaacaaccaagacaggacc

SEQ ID NO: 164367 - RNA, 81 nt, Homo sapiens
gccacgcggagagcccacagggggagaccaaggccgaagcgaagaaccgcggccccaggacagccagcacaccgccagggc

SEQ ID NO: 164368 - RNA, 88 nt, Homo sapiens
cagcaagaggcggacgagaaggacagggaaggccgagaaacagacaacccacagaacaaagcggaccaaggcacccccagagcgagcc

SEQ ID NO: 164369 - RNA, 68 nt, Homo sapiens
ccaccccagccgccagcaaaccgcagaagagaagagaagcccccaaaacaggcggaacagaaaaccgc

SEQ ID NO: 164370 - RNA, 54 nt, Homo sapiens
aagcacggggggcaggccaccggcaccgcgcgccgcgcccccccaccagccccg

SEQ ID NO: 164371 - RNA, 58 nt, Homo sapiens
cagaaaacgggacaaaccaggggaaggcgaaggaagaacagcccgccaagccgaggcg

SEQ ID NO: 164372 - RNA, 75 nt, Homo sapiens
ccgggcggcggcacagccacaccgcaccgcaggccgccccgaccgccgaacaagaccgagaaaagaaggaagacc

SEQ ID NO: 164373 - RNA, 76 nt, Homo sapiens
caggccaggaggcagggaggaaggggggagggggaggagccgaacgagccccagccaggaaaacgaaggaaggagg

SEQ ID NO: 164374 - RNA, 80 nt, Homo sapiens
ccagagcgccccggcagaccccaggcgccgcacgcggggcagcccgaggcgcaccaggagaaggaagcgccggccaaacg

SEQ ID NO: 164375 - RNA, 79 nt, Homo sapiens
gaaacaagcaagccgccaaaggagaagagcgcgacagagggagagcacccgccacaggccacaaaggaggcaggcccgg

SEQ ID NO: 164376 - RNA, 77 nt, Homo sapiens
aagggaccaggcagacgggaagaacccagaaagaaaggagcgccccaaaaggaaacagagggagcaacaacaaggag

SEQ ID NO: 164377 - RNA, 79 nt, Homo sapiens
cccgcaaagaccgggagaccaaggagacaaagacgaaacgaacgcaggaaacgagaagacaacggccgagaagacccca

SEQ ID NO: 164378 - RNA, 76 nt, Homo sapiens
gcagaggacgacaggccgggaggaccaggacggggagacagcccccagcggccacagaaaccagcccaccgaggag

SEQ ID NO: 164379 - RNA, 77 nt, Homo sapiens
aaaaagcaccgccccagaccgcaaacagagaaccaaggacgggaagcagaaaaaagaacaagacagcgacgccagca

SEQ ID NO: 164380 - RNA, 78 nt, Homo sapiens
aggggccccgaagaaccccacaagccacaggaggaggcagcagggacccagaggcaggccagaaaaagagagacaaag

SEQ ID NO: 164381 - RNA, 88 nt, Homo sapiens
aggagaagagcgaccagggacaaaagaggggaaacagggagcccaaaacaagaagcagggcagagagaagccaacaagaaagacacag

SEQ ID NO: 164382 - RNA, 83 nt, Homo sapiens
gcccggcaccgcccgcgccaacagcccagccgcaggccagaacccggggagagcccggcacgaccagcaggacccagggccag

SEQ ID NO: 164383 - RNA, 71 nt, Homo sapiens
gcagagaaaaaaggacaccaaagccagagaccacaggagccaacccgcggaggacaaagaaaagacaccac

SEQ ID NO: 164384 - RNA, 76 nt, Homo sapiens
aagaaacccccggaggaaaccggcagaccccagacccaaacaacggcagaagcagcaccggagaaagaacccggag

SEQ ID NO: 164385 - RNA, 62 nt, Homo sapiens
aacgcagcagcgaacaaagaaacggcagcggccaaacgcacccagcaacagcaagagaaaag

SEQ ID NO: 164386 - RNA, 71 nt, Homo sapiens
ccgccgcgggagagaggacccccccccccccccaagggaagaagagaaagccgaaaaagacaaggggagga

SEQ ID NO: 164387 - RNA, 85 nt, Homo sapiens
ccgggcggcaccgcgggcgcaagcgcaaccgcgggggcggggacggcgccgagagggcgcaagaggcagacagacaggcgacggg

SEQ ID NO: 164388 - RNA, 55 nt, Homo sapiens
caaaagggaaaaaacaggagcacaggggaagagccaagaaaaaaaagagcaaggg

SEQ ID NO: 164389 - RNA, 67 nt, Homo sapiens
ggaagagggagaaaaaagcagcccagcaggccaccgcggaccccaaacagccaccccacgcccccca

SEQ ID NO: 164390 - RNA, 77 nt, Homo sapiens
caaaaaaggacaaagcggagaaccaacaccgagacagcacaacaacacagcagaggcaaaaacaagcaaaccccaga

SEQ ID NO: 164391 - RNA, 66 nt, Homo sapiens
cgcgcgccgcgcccggaccccagaaaagcaccgaagggaagagacgaggcggaaacccgaagaacg

SEQ ID NO: 164392 - RNA, 69 nt, Homo sapiens
gcagggcacacaccaaaaccaaggaagagcacaagggagcaccaagcggaaaacgagacgaaggacaag

SEQ ID NO: 164393 - RNA, 80 nt, Homo sapiens
gcagacaagacccggagggcgagccggcaccagggcccaggccccccagccagcgcagggcagaaggcccccccgagaga

SEQ ID NO: 164394 - RNA, 51 nt, Homo sapiens
gaaccccaggaaacggccaggaaaacgaacacaggcgaggcgccggcaacg

SEQ ID NO: 164395 - RNA, 67 nt, Homo sapiens
agggcacgaccagacgcccacccacaaagccaggaccccccgaggcaggcggggagcgggaggagga

SEQ ID NO: 164396 - RNA, 77 nt, Homo sapiens
aagaagaccaagagcgacgacgaccaccacccggggcccccccagccgcaccaccaagcccccggcccgagaagcgg

SEQ ID NO: 164397 - RNA, 68 nt, Homo sapiens
agggaaacgacacgagcaaaaacgggaagagcgaaccagggagaagaaggaaagaagaaaagaagaaa

SEQ ID NO: 164398 - RNA, 73 nt, Homo sapiens
cccgcagcacagccgcgaccaaggaccgcggcaagcgggagcggacccacccaagccaccgaacccggcccga

SEQ ID NO: 164399 - RNA, 76 nt, Homo sapiens
gaggcaacagaaaagagcgcaaagggcaggaaacaaacaggcgacagacacagcaccggccccggcagcgggacgc

SEQ ID NO: 164400 - RNA, 77 nt, Homo sapiens
aggagggacccgggaggccaaggcgaggcagaagcacggagccacacaaagcggaagagaaagacccagagacaacc

SEQ ID NO: 164401 - RNA, 68 nt, Homo sapiens
gacagccagcacaccccgcgagcaagggacaagagaaaaaaagggcgggcgaacaaaaagagcagagg

SEQ ID NO: 164402 - RNA, 55 nt, Homo sapiens
ggaccgggagacacggccagacgcccccagaagaagaagcgcacaaggagcacaa

SEQ ID NO: 164403 - RNA, 75 nt, Homo sapiens
gaccgagagcgcgaaacgcacgagaaggacgaacgacaccgggccccccccggcgaggacccacgcgcagcccaa

SEQ ID NO: 164404 - RNA, 34 nt, Homo sapiens
caggccggggaccacgagacaagagagggcggca

SEQ ID NO: 164405 - RNA, 72 nt, Homo sapiens
ggggggcgggcgcagcgcggacagggcggagaacggaaaagcaccaggaagcagagaggaccgcagaaggga

SEQ ID NO: 164406 - RNA, 87 nt, Homo sapiens
cgcggcagcccgggagcggcgagggaaaagcgaggcaaggcaggcggaagaagccacacacagaagacccaaagagaacacaggaga

SEQ ID NO: 164407 - RNA, 71 nt, Homo sapiens
gagaaagacaccgaaaaggggaacccgaaaagcgcagacgaagggacacagaaaggccagaaccaaggaag

SEQ ID NO: 164408 - RNA, 68 nt, Homo sapiens
agagcacacgcccgccgccgacgaacggggacaagccccaccccgaggcagaaagagcaagggcccca

SEQ ID NO: 164409 - RNA, 41 nt, Homo sapiens
accgcccgccgcggcgcccggacacgagaggcgagggacga

SEQ ID NO: 164410 - RNA, 68 nt, Homo sapiens
agcccgccaaagggagaagacaagcgaaaacggccgacggagaagaccagagaacaaaagcaaggcaa

SEQ ID NO: 164411 - RNA, 79 nt, Homo sapiens
gaacaaccgggcgccgacgagacgggaaacccaccagagaaggcgcggccacccaggacccgggggaggcagcgaagaa

SEQ ID NO: 164412 - RNA, 62 nt, Homo sapiens
gcggcccaggacgcccagggccagcgcacggccaccgagccaggacacacagcaacgaagca

SEQ ID NO: 164413 - RNA, 55 nt, Homo sapiens
cgcagccgacaaagcagcagccagaaagacccagagaagcgagaagcagagacaa

SEQ ID NO: 164414 - RNA, 74 nt, Homo sapiens
gggggcgaggcgggcgggccggcgagcgcagcgcgaccgggaggcccaggaagaagagagggcgaaggaggcca

SEQ ID NO: 164415 - RNA, 71 nt, Homo sapiens
aaagaaagaagcaccgaagcaagccacacccagaaccagcagcccgcagaagaaaggcaaacccaaggccc

SEQ ID NO: 164416 - RNA, 75 nt, Homo sapiens
aaaagcgcgcacagcaacggagaaggggaagccaccccagaacaaaaacccgcaaagcgagaacaggggacccaa

SEQ ID NO: 164417 - RNA, 78 nt, Homo sapiens
cggccccaggacgcccggcggccggggagccggcccaagcggcacacccacagaggcagaccgaaaacacccagcaag

SEQ ID NO: 164418 - RNA, 76 nt, Homo sapiens
caagcagccaggcagacgggagcaggaaagccagggggacccagcacagagggggaaggcgaagaagagggcaacc

SEQ ID NO: 164419 - RNA, 77 nt, Homo sapiens
gcagagaccccagacgccaccacaacccccagacgcaagccaagaacagagagaccgagagaagcgcacaagaacac

SEQ ID NO: 164420 - RNA, 76 nt, Homo sapiens
aggagccaagcaaacagaagcgcggccaaggaaaaagaacgcacgggaaacccaagaaggagcaccggcccaaaaa

SEQ ID NO: 164421 - RNA, 57 nt, Homo sapiens
caaggcagcaagggagagcgccccagccgggggggacaagcaaggggccaaggagcc

SEQ ID NO: 164422 - RNA, 79 nt, Homo sapiens
aacgaagcgggaggggcgaaacgaggaggagaaacgcggccgggccggccgcgggagagcgggggcgggaggcgggccc

SEQ ID NO: 164423 - RNA, 68 nt, Homo sapiens
agggaagaaagggaagggcaagggggccgaagcaaccagggaacaaaaaccggaagcaacccccacag

SEQ ID NO: 164424 - RNA, 83 nt, Homo sapiens
caagcccgaggcccagaggaggagcgccagacgaccaggaggccgcagcaacggccgcaacggcgcggggacaagccggaggc

SEQ ID NO: 164425 - RNA, 47 nt, Homo sapiens
gcgggggacccaagacaggagcagcgacggaagaggggaggacggag

SEQ ID NO: 164426 - RNA, 71 nt, Homo sapiens
aaggaccaagaaccaggccccagggcaggggcccggagagcgcgccccccaggacccagaccgagccccgc

SEQ ID NO: 164427 - RNA, 70 nt, Homo sapiens
gcaccaagggcaccaaacacccagaacaacaaagagggcacacagggaccaagaagccccggggacacgc

SEQ ID NO: 164428 - RNA, 65 nt, Homo sapiens
cacacaacgacccagcaaaccaggaacacgagccaagcgaggagaagaacccacaagagcgggag

SEQ ID NO: 164429 - RNA, 81 nt, Homo sapiens
cagaacagggcgcccgagacccccagcgcgccggaggagaacaagagcccgagggggggccccagcccggccgaacgggcg

SEQ ID NO: 164430 - RNA, 84 nt, Homo sapiens
ccagccccgcggcgaagggaagaggcccagccggcccgcgggggagccccgggagccgcacggcgagcccagacaccagaagcg

SEQ ID NO: 164431 - RNA, 75 nt, Homo sapiens
caccaagagggaagcacagaccagcggacccaaaaacaaggaacacccggcagcgaggcggcggaacaaaccagg

SEQ ID NO: 164432 - RNA, 78 nt, Homo sapiens
cgcggcggcgcccgcaccgcgcccgcaaagccgacgcccgccgcggccggggaacaggccacagccaggagcgcacac

SEQ ID NO: 164433 - RNA, 83 nt, Homo sapiens
ccggagcccgaggcgcggcgaccacgagaagcgagagaaaacgccagagcaaccagaggcagcccaaagaggagagcacaaaa

SEQ ID NO: 164434 - RNA, 55 nt, Homo sapiens
acagacagccacacggagagaacagacagccacgcagacggaaacaaggcaacag

SEQ ID NO: 164435 - RNA, 83 nt, Homo sapiens
acccgaggcccagaaaagacgagaagccaaggaccgagcggcaggacagagcccggcagaaagcaggccagggacccccccca

SEQ ID NO: 164436 - RNA, 72 nt, Homo sapiens
cccgcgccgccgaccccccggcgccgcgccggcggcggccccgagccccggccccaaagacccaaaacagag

SEQ ID NO: 164437 - RNA, 55 nt, Homo sapiens
gagcacacggcaccgagggaggacaaaaagcgagcccgagaacacagggcgcggc

SEQ ID NO: 164438 - RNA, 74 nt, Homo sapiens
cagacggccaccggcgggaggaacaaaagggccgacgccgggcaagccaagccagccgcccgggaaggccaaga

SEQ ID NO: 164439 - RNA, 79 nt, Homo sapiens
aaaagagagacgcagaagagaggacagaccccaggaccaagacccgcaaccaggacacagcagaagcagaagaggaagg

SEQ ID NO: 164440 - RNA, 77 nt, Homo sapiens
ggccgcccaagcacgaccaggggacccgggcgacacaggggacccaggccgccaaagcagcgccaccagaaaccagg

SEQ ID NO: 164441 - RNA, 82 nt, Homo sapiens
cagacaaaacccccaaaaacggcgcagagcaggcccaggaagccgaagcaggacaaggagcccgaggagcggagccgaagcc

SEQ ID NO: 164442 - RNA, 84 nt, Homo sapiens
caaaaaacccacacaggacgcggacaagggcggcagagccaggccccggggccccagcggcaccagcggagaccacgggagccg

SEQ ID NO: 164443 - RNA, 81 nt, Homo sapiens
ccacccacgcaggcagacaaagaaggacggcaaaagaagaggaagaggaagagaagaggaagaggaagaggaagagaagag

SEQ ID NO: 164444 - RNA, 68 nt, Homo sapiens
caaaagggccaaagaagggagagagggaccaaagccacgaagccgagcgccaccgccagccagaggag

SEQ ID NO: 164445 - RNA, 59 nt, Homo sapiens
gcccagccccccagagcgggaacagagcagaaagaccaggggaggggccccacccccga

SEQ ID NO: 164446 - RNA, 55 nt, Homo sapiens
acggaaacacccgaccacccaaccacgcgcccagaccaagcagaccccacagaga

SEQ ID NO: 164447 - RNA, 59 nt, Homo sapiens
gcgccccccgagcggggggacgcgccaggcacagcagcaggaagcccggggcggcgacg

SEQ ID NO: 164448 - RNA, 73 nt, Homo sapiens
ccgcgccgaggccgcgggcggcgggcccgggagggacggagagaccggaggaaaccagaagaaaaacacaggc

SEQ ID NO: 164449 - RNA, 77 nt, Homo sapiens
caggaccccgagcagggagcacggaggcagggaagcacccacccccccccccaaccggcaggagagcgaaagcacac

SEQ ID NO: 164450 - RNA, 72 nt, Homo sapiens
ccacgccaacggggcgggaacagccgcaagaggccgcggcgcgccaagccggccccacagggccccgccacg

SEQ ID NO: 164451 - RNA, 82 nt, Homo sapiens
ccgggaggggaaacgccgacacgggagggaaacaggagaccccccggcgaagggccgccccggcccgcggcccagccacccc

SEQ ID NO: 164452 - RNA, 83 nt, Homo sapiens
gaagaggccgccgccgggcccaggcccgcgaccgccgccagcgcccgaggggaccgagacccgacgagagagacgaggggaag

SEQ ID NO: 164453 - RNA, 83 nt, Homo sapiens
gccgccagaggccgggacagcgccggggccccaccgcggccccacagccacaacacagcagcccccaggagagcaggaaaagc

SEQ ID NO: 164454 - RNA, 71 nt, Homo sapiens
gagaggaccaggcgcggacccaaaaagcaacagagggcgggaccacggagcacggcaccgaagaagaaaag

SEQ ID NO: 164455 - RNA, 82 nt, Homo sapiens
aagggaaaggaggcagcgcaaggagggcggcgggacgcaccgaggccagaccgccgagacgaaaacaccgacagaaaaaaaa

SEQ ID NO: 164456 - RNA, 80 nt, Homo sapiens
ggacccgaaaagcgaaaagaaacagagcggcggagaaaccaccacaaacacgaggccagcaacgaccaacaagacagacc

SEQ ID NO: 164457 - RNA, 58 nt, Homo sapiens
cgaagagcagcaggaaaccgacgaacaacacaggaccagggaccaagaaaggcccagg

SEQ ID NO: 164458 - RNA, 46 nt, Homo sapiens
caggcggagacacgaaaacagggacaagcccccacgaggaaaaccc

SEQ ID NO: 164459 - RNA, 81 nt, Homo sapiens
cccggagggggcaagggaccagcaaggcggcagagcaaggggcacgcagaaggaccggccacggggagccgccagcgaccg

SEQ ID NO: 164460 - RNA, 84 nt, Homo sapiens
cggagaaggccgccgggcccgggcaggggcggggcaacgcggaagggggaaggaagggccccacaccaaagaaacccaaaaaga

SEQ ID NO: 164461 - RNA, 67 nt, Homo sapiens
aagcagagaggccacaagagcgggaacaacccaggccaaaaagggccacgaccggcgcgcgcgaacc

SEQ ID NO: 164462 - RNA, 82 nt, Homo sapiens
cgagagcaccaccagccacggggccaccaggacaagcgggcagaacagcgcggcaggccccaagcagccagaccaaacgaga

SEQ ID NO: 164463 - RNA, 71 nt, Homo sapiens
gccgaaggaagcagccacccgcccacaggcgggggccccgaccccgaaggaccccgaaccaggaaccggaa

SEQ ID NO: 164464 - RNA, 100 nt, Homo sapiens
ggaggggcagccgcggcgcagccggagcagagcgaggcggcgggcccaggacgggggcaaccggacagagaagcccaagagaagcaggaggagcagcgca

SEQ ID NO: 164465 - RNA, 52 nt, Homo sapiens
ggcacggaccccggaccgcacggggcgggaaaaggggaggcccgaacacaga

SEQ ID NO: 164466 - RNA, 82 nt, Homo sapiens
cgagcggacccggaccggggggacaacccgccacaacgacaaaggaccccaaagaccccggaaggcggaccaggcacaagaa

SEQ ID NO: 164467 - RNA, 80 nt, Homo sapiens
ccccggccgggcgaccaagcggaggcgcgcggaacagcgccgaggcgacccgcccagaaggggaggggccagaaccagca

SEQ ID NO: 164468 - RNA, 74 nt, Homo sapiens
acggcaaccaacggggccggggcgccccacgccagcaaacgggccaagcaggaggagcaggacggagcgaaggc

SEQ ID NO: 164469 - RNA, 88 nt, Homo sapiens
ccggagcggccgcggaggcccggcacgcgggcggccgcgaaggccacggcaggggcaggagagagcaagccacacaggcccggcagac

SEQ ID NO: 164470 - RNA, 87 nt, Homo sapiens
cagaacaccaccgcggcgcgggagacgagccggccgcccgggccgggggacccgcccgccaggccaccaagggaagaaagcagacag

SEQ ID NO: 164471 - RNA, 76 nt, Homo sapiens
aagacggaagcaaccggaggaggagcgacagggaaagacaaggagccgggccgagaaaccgaaccagagaccagag

SEQ ID NO: 164472 - RNA, 71 nt, Homo sapiens
ggagagggcagacggacaagagcgcggaacaggacgccccgagcacacagagaaaaaaagggaacaaaaca

SEQ ID NO: 164473 - RNA, 59 nt, Homo sapiens
cgggccgcggccagaccaacagagagacgggccgcaaggccaggcgcgcagaggcaccc

SEQ ID NO: 164474 - RNA, 67 nt, Homo sapiens
caggaacaaaagaaaaaacacaaaccgcggaaggacaagcaggggcgcaaggagcccccggcccagg

SEQ ID NO: 164475 - RNA, 69 nt, Homo sapiens
ggagaaaaacggccaagaggcagaccaggaaaggaaaaggccagaggaaccaagaaccaacacagacag

SEQ ID NO: 164476 - RNA, 61 nt, Homo sapiens
gacagaggcaagaagaaccgcaaggagaggaagacagaacaaggcagcccgagacaaaggc

SEQ ID NO: 164477 - RNA, 70 nt, Homo sapiens
gacacaagccagacaaccggcagaaacagaggacaaggcagcaaagaagagagagaagagcacagaggcc

SEQ ID NO: 164478 - RNA, 88 nt, Homo sapiens
accacgacggcgccacaccgagcgcgaggcgcggagagcaacgccgggacagcgcaaggcggccggcgcggggcgcaggcggcgcggc

SEQ ID NO: 164479 - RNA, 69 nt, Homo sapiens
gccgagggaaaaaccccggaagggcggacaccccacacgccgccacccccaccggaggaagacccgaac

SEQ ID NO: 164480 - RNA, 58 nt, Homo sapiens
caagcaacgaagccggggaccagaaaggaacggcaagacaacaaggcggagccgagcg

SEQ ID NO: 164481 - RNA, 80 nt, Homo sapiens
cgaccagccaagagccggcagcagacgagaaggcccaccgcggccccgaggagaggggacccgcaggggcaagaggccga

SEQ ID NO: 164482 - RNA, 57 nt, Homo sapiens
aacggagaccaaggccaccacaaacaacccccaccacgccaagagaaggagagagaa

SEQ ID NO: 164483 - RNA, 101 nt, Homo sapiens
cgaggagagacagaagaagcggaggccggcaaagccaagggagcaggaagaagagagccaagcgaacgccgaggaacagggacaacggacccggcaagaaa

SEQ ID NO: 164484 - RNA, 77 nt, Homo sapiens
ggggaagaagcacagccacgagccaacacagcccacagaacaacgagaagccaggagagcccggcaccgcagacgcc

SEQ ID NO: 164485 - RNA, 73 nt, Homo sapiens
acacggaagaaagggaaccggagaagagagagaaagaccaaggcagcaagcaaagacggaggagcagacggcg

SEQ ID NO: 164486 - RNA, 71 nt, Homo sapiens
agggcagcaggagaagggcccacggaaccaaggaccaccaacccagggcagggcagcagaaaggcagcggg

SEQ ID NO: 164487 - RNA, 66 nt, Homo sapiens
ccgaccgcaacagaacggacccggcgggcgcggacggcaggggcgccggggaacccgcgggaagaa

SEQ ID NO: 164488 - RNA, 81 nt, Homo sapiens
agagcggaccgagagcgcgaaacgcacgagaaggaagccaaaaagggagagaagcaaaacaagcaggcaacagcagaaaaa

SEQ ID NO: 164489 - RNA, 86 nt, Homo sapiens
gcaaaggcgccagcccagcacgccgcgacggccccgggaaggagcaaaagcggcaggcgacagaggcggcccaggacggacccggc

SEQ ID NO: 164490 - RNA, 72 nt, Homo sapiens
ggccaaaccacaagccaaaacccgaaaaaggccccccgagaagacagcgcgggagccaggaaacgcagaccc

SEQ ID NO: 164491 - RNA, 55 nt, Homo sapiens
gaccggacagaaagccaaaaaggagaaaggaggaggggaacggacccagccagag

SEQ ID NO: 164492 - RNA, 70 nt, Homo sapiens
agcggacacaagcccagagcagagaaacggagggagagcgggccgaagaaacagagggaaacagaaaaac

SEQ ID NO: 164493 - RNA, 79 nt, Homo sapiens
agaaaaacacgggcgccaggaacgcggaacagaaccaaaggcaggacagccagcaggggaagaggagagacagaacaag

SEQ ID NO: 164494 - RNA, 74 nt, Homo sapiens
gccggcgcaccaccaggccacccaggggcgccaggcgaggccagaggacaggccgagcgccggccggaacacgg

SEQ ID NO: 164495 - RNA, 73 nt, Homo sapiens
aaggaaaaccaacccggacacaggggcagaagaggaacggggaaggggcaaccagagcgcaaagcgagccgca

SEQ ID NO: 164496 - RNA, 75 nt, Homo sapiens
gaaccacagcaccggccgcgagaaagacagaggacagagaccagaagccaacccaggaaggagagcccggaccca

SEQ ID NO: 164497 - RNA, 59 nt, Homo sapiens
gcgcagagacaggcgcgaggagacaccgcaggcacaacagacagaagcgcaacagagca

SEQ ID NO: 164498 - RNA, 75 nt, Homo sapiens
gaaaccgaaacggggaaaaaaaccgcagggcggagagaccagagaggaagaagacacggaccgacggacgggaaa

SEQ ID NO: 164499 - RNA, 75 nt, Homo sapiens
agcaaggcccaagacccaggcggcccagcacgacagagacccggaaagcgagcagcaaagacccagcacccaaca

SEQ ID NO: 164500 - RNA, 89 nt, Homo sapiens
ccccacaggagggaagaggggggaaacaagaagagcgaggggaaggaaagccaggccagaagaaggaaggccggggaggggacaggaaa

SEQ ID NO: 164501 - RNA, 90 nt, Homo sapiens
ccggaggaggcgaccgcggcgcagcgacccccgccaggcaaaaggaagacaacggcaagcggagaagagcaaggccgaaccgagaggaag

SEQ ID NO: 164502 - RNA, 76 nt, Homo sapiens
gcagcaaaaaaccccccacaacacaaccacagcccaggggacaaaccggcgaccacacacggggacgacggggaag

SEQ ID NO: 164503 - RNA, 77 nt, Homo sapiens
acaagccaacccaggaggaaaaacgcgggaacaacacacggcagggcacacccaggaccgcagcggagcagccacac

SEQ ID NO: 164504 - RNA, 86 nt, Homo sapiens
cccgggcgcccggccgccgcacccccagcagggacgcagccagcgaggccaccagcgccccgcgaaaggagcgcccgagacacgag

SEQ ID NO: 164505 - RNA, 78 nt, Homo sapiens
cgccgcggagaccccaccgccggcgcgggaaacgggcgaagcgacgagccgcgaggagccggagcgggcagggcacac

SEQ ID NO: 164506 - RNA, 77 nt, Homo sapiens
cggcgcaccagggggcggcggggccccccgccagcggggcgcagaccacaagacgggaaaccacggaagaccgagga

SEQ ID NO: 164507 - RNA, 64 nt, Homo sapiens
gagagccgagagaggacgccaccagcacagaggaagaccgcaggaaagcaggaaggcaagaaag

SEQ ID NO: 164508 - RNA, 79 nt, Homo sapiens
cccgaaagaggacagccgcaggacagaagacaaacggagagggaaccccaagagcaccaaagaagcggcaaagaaaaca

SEQ ID NO: 164509 - RNA, 84 nt, Homo sapiens
cgggagccgggccgagccggggcgaagcggaccccagggcacaaggccaagacggccaagggagccacagggcccagagcacgg

SEQ ID NO: 164510 - RNA, 66 nt, Homo sapiens
ggagagaaacacaacaccgaagaacgcccggaaacagaaaacagggaagaccacaacaagcaagca

SEQ ID NO: 164511 - RNA, 85 nt, Homo sapiens
acggaaggagggagagggagccgccccgcaggggccagggcacgcacgcaggccagagaggagcgggaaggccccgcacccggag

SEQ ID NO: 164512 - RNA, 38 nt, Homo sapiens
ccgggccgagccaggaaaaaggagcggagaacagacgc

SEQ ID NO: 164513 - RNA, 77 nt, Homo sapiens
ggcgggcacccaccccggccgagagggaaaaaggggagaagggcagaggaggggcgaagagaccggaggcggagcga

SEQ ID NO: 164514 - RNA, 81 nt, Homo sapiens
gaggaggaaaaacagagacacaaaaggaaagcgaagagagggaagggcaaaaaggcaccgaccccaaaacccaagccacaa

SEQ ID NO: 164515 - RNA, 72 nt, Homo sapiens
ggagaaaaaccccggaggaaaagcccggaccgacaggaaagaaggagcccacaaagaaaagaacaccgccag

SEQ ID NO: 164516 - RNA, 74 nt, Homo sapiens
ccacgcccgcaccagccacgcaaggcccagcagcacacaaggagcaagccaggagaaagcaacagccaggcaga

SEQ ID NO: 164517 - RNA, 89 nt, Homo sapiens
agcgggaccacccgggcacagcaggcacggagggcgcacccacgacgcgcacaccaccggcagaccggcgccacagcaccacccgacgg

SEQ ID NO: 164518 - RNA, 83 nt, Homo sapiens
agcaccacgccggggcggcggggacgagcgggcaaaggcgacgcccacccaggccccagggaaaggaccgaggcaggaaagag

SEQ ID NO: 164519 - RNA, 59 nt, Homo sapiens
gggccgcggaaggccagaacacaagaccacaccgcgccagaccccccaggagagccgcc

SEQ ID NO: 164520 - RNA, 81 nt, Homo sapiens
caggcgccggaaggccgcaccgcccccccgcccccagcagcgcggaggccgccgcagcaagaaaacacggaacggagaagg

SEQ ID NO: 164521 - RNA, 74 nt, Homo sapiens
ccggacccaggggggggagagggacgcccaccacgggaagcgcacacacagagcaaggagggagaaaaaggacc

SEQ ID NO: 164522 - RNA, 71 nt, Homo sapiens
agaggcgccgcgagcggagaccaccgggggacaaggcacgaggcgcggcgaccaccacagcagagcccggc

SEQ ID NO: 164523 - RNA, 68 nt, Homo sapiens
ggagagacaaggaaccccaccccgacccagagcaggaaacagccggaagccagagacgcgcacgaaac

SEQ ID NO: 164524 - RNA, 73 nt, Homo sapiens
cgggggaggagcacgcccggggcggcccggcgggacgggcggcgcgacccccccggcgagccaggccccccgg

SEQ ID NO: 164525 - RNA, 78 nt, Homo sapiens
aggaagaaaaccgaccagaagagaaagagagaagccaaaccccaggaagaaggagaaagacaaagccccgagaaagac

SEQ ID NO: 164526 - RNA, 80 nt, Homo sapiens
gagggaacgacacccgggcacacagggaccaagaagccccggggacacgcgagaaaagacgccgaagggaagaccagcgg

SEQ ID NO: 164527 - RNA, 71 nt, Homo sapiens
aggcggagcgacggggaggcgcggccaacggggccacaagggacccacccccaccccacccagagaccagg

SEQ ID NO: 164528 - RNA, 77 nt, Homo sapiens
cggccgggccccaccgccacccgacccaggcgcgaagaggacagaaagaaagacaacgcggcagaccagaagcaccc

SEQ ID NO: 164529 - RNA, 68 nt, Homo sapiens
gaccaccgaagagcagagaagggaagaaaagcaggcaaggagagaaggccagaccgaaccacgaagga

SEQ ID NO: 164530 - RNA, 62 nt, Homo sapiens
acacggcagcaccagcaggcaaaacgaggcgcagcggggaaggaagagcaaagaggcgaaca

SEQ ID NO: 164531 - RNA, 68 nt, Homo sapiens
cggaaggcccccggcgcgagacccgccggaggaacgccagggcgaccgggcaaggaacgggagacgca

SEQ ID NO: 164532 - RNA, 56 nt, Homo sapiens
ggccgggaggagacagagagcccggacaacaggccggcccccccccgaggcggagc

SEQ ID NO: 164533 - RNA, 71 nt, Homo sapiens
ccgggagagacaaaggggcaagaccagagacggggcaccaaaccagcggcgaacccgagccaaggaccccc

SEQ ID NO: 164534 - RNA, 36 nt, Homo sapiens
ccccccacagaaagggcggcggaagccaaaccgaag

SEQ ID NO: 164535 - RNA, 59 nt, Homo sapiens
agcaaggagcacaggaagcagcagaagggggagaggcaccagcaacagaccaaccgcag

SEQ ID NO: 164536 - RNA, 89 nt, Homo sapiens
ccgaaggagccgaggcccaccagccagccccgacagccgggaacaggaccacagggcacggggaaacggcacccagaagaacaacgcgc

SEQ ID NO: 164537 - RNA, 79 nt, Homo sapiens
gcaggagaaagccgagagaaggacaacaccacagaccgaagccaggacagcacagccgagcacccagaccagccaacgc

SEQ ID NO: 164538 - RNA, 53 nt, Homo sapiens
aacagcccacagaggcaccaaaccagaccccgggagccaggagcccggcgcgc

SEQ ID NO: 164539 - RNA, 71 nt, Homo sapiens
aaggagggcgggaacaaagaagaccgaggaagcgacacaaacccgccgggcgggcaaccaagaacacaacc

SEQ ID NO: 164540 - RNA, 79 nt, Homo sapiens
accacagacagccgagacagcacggaaacaccccaggacacaagacaccaccaggggacccaccagggacaccgccagc

SEQ ID NO: 164541 - RNA, 74 nt, Homo sapiens
caccggaaagaccgacgcagaagagaagcgagaacagccagagaggcccccacagagagcacacaaacaaagcg

SEQ ID NO: 164542 - RNA, 80 nt, Homo sapiens
acagcgcagaggggcaggagccgggagccaccgcgaaggagaacacgagacccgcacaaaaccccgccccccaggccaca

SEQ ID NO: 164543 - RNA, 69 nt, Homo sapiens
gaaacagcgcgaaaacacgacgccaggcaggaggacacaaggagcggcagcccacaagcaggaagacca

SEQ ID NO: 164544 - RNA, 77 nt, Homo sapiens
ccaacgacagcaccagcggaaagggaacccgacaagaccaagacacccaagaagacaagagacgaaacggaaaaaaa

SEQ ID NO: 164545 - RNA, 70 nt, Homo sapiens
cggagagcagcgggggagccggcgcgcgcagaaacaaggcacgaagcacggcacgaaggacacaaagccc

SEQ ID NO: 164546 - RNA, 82 nt, Homo sapiens
ccccagcccagcggcgcgaagcgaaaccggggccaagagaaggcaaccaaaggcaggacacaaaaacaaccgaaagaggcga

SEQ ID NO: 164547 - RNA, 70 nt, Homo sapiens
caaggcccaggagagaggggcgcacagaccagcgcgcggaggcgaggaggcaagcagagacggggggaaa

SEQ ID NO: 164548 - RNA, 71 nt, Homo sapiens
cacagacagaaggagcgagggcaacacggcaggagcaagcacaaggcggcccaccaagggaccagcgcagc

SEQ ID NO: 164549 - RNA, 73 nt, Homo sapiens
accgacaccaggaacaccaccagaaggggggcagaaagaagaggaggacaacaagccaacagagagagacgaa

SEQ ID NO: 164550 - RNA, 64 nt, Homo sapiens
agcgaagagcagaacagcagaggagcagacaccccaggagagaccccagcgaacacgaagagaa

SEQ ID NO: 164551 - RNA, 77 nt, Homo sapiens
aaaggcgggcaccaaccccacacaaccacacgcccaggagacaaggcaaagggaccaccgaccccaagagaccgacc

SEQ ID NO: 164552 - RNA, 47 nt, Homo sapiens
cccacgcagacaccagccgcgccagccggaaccaaaaagaagcccca

SEQ ID NO: 164553 - RNA, 53 nt, Homo sapiens
ggacccaaaaggcgcaggagcgggcgcgcgcggaacgaaagcgccgcggcaaa

SEQ ID NO: 164554 - RNA, 78 nt, Homo sapiens
aagaaaccaggcgaaaggacgacacgaggggaccagaagaagcaggaaacaacaagaacgaagagaggaggagcacca

SEQ ID NO: 164555 - RNA, 69 nt, Homo sapiens
aacgcagaagcccccagccggcggcaagagacgccaggaggaaagcccagaaccgggacaacccagcaa

SEQ ID NO: 164556 - RNA, 84 nt, Homo sapiens
cccccaggcgaagaagcgcagccgcaccggccaaggagggcccagcaggcggccacaaaaggcgcaagaaggagaagaacgccc

SEQ ID NO: 164557 - RNA, 72 nt, Homo sapiens
accccacccaggccaaaccaaccgcaccccgaacccgcaaaccgccggcaagggcccgaccaagaaggagag

SEQ ID NO: 164558 - RNA, 70 nt, Homo sapiens
gccggccaggccaaaggaccccagcagcacccggaagagaacaagacaacacacacgcaccagggcagaa

SEQ ID NO: 164559 - RNA, 54 nt, Homo sapiens
ggagaaacaggaaccccagggagacgggcagacaacgaacaagcgaagaaccag

SEQ ID NO: 164560 - RNA, 58 nt, Homo sapiens
ggacgcacacagcaacacgacggagaccgcaccccgagcccggagaggacccacgcgg

SEQ ID NO: 164561 - RNA, 82 nt, Homo sapiens
caggagggacaagaccggaccagccagaggacgcgggccgaggagagcggaggagggggcgcaggggggaagaagaaaacaa

SEQ ID NO: 164562 - RNA, 71 nt, Homo sapiens
gacaagaccaagacacccaagccagcaggacaggcacacccgggcagccccagcccgcagaagcccagaac

SEQ ID NO: 164563 - RNA, 78 nt, Homo sapiens
gcagccgacggcaaagggcgggggcaaagcggagaccgggcccaacgagaagggcacgcaggacgagaaagcccgacg

SEQ ID NO: 164564 - RNA, 82 nt, Homo sapiens
gaaggaaaaaggggcgagagagagaccaggccacccccagggcccacaaaaaagcgcgaagcagcgacccaagcgcgccggc

SEQ ID NO: 164565 - RNA, 74 nt, Homo sapiens
ggccacaccacaacaagcacaaacacagcccacagcgccgcagccgcaggaagcgaagccgaagaagccgcggg

SEQ ID NO: 164566 - RNA, 78 nt, Homo sapiens
ggagcccccagcgcagcggccgcggaaagagaccaggaggcggcagcacaaaaccgccaaggacgcgcagagcaccag

SEQ ID NO: 164567 - RNA, 51 nt, Homo sapiens
ggggaaggcaccggcagccaaggaagaggacaccagcccgggagaagaggc

SEQ ID NO: 164568 - RNA, 72 nt, Homo sapiens
gcggagcccagcacggcagaaacagccaaggccaacaggaaccggaaaacaacgcgcagggccgcagaagcg

SEQ ID NO: 164569 - RNA, 58 nt, Homo sapiens
ggaacgcagaaacacaggaccccccccaacgagaggggaggaagaccgggcagaggag

SEQ ID NO: 164570 - RNA, 44 nt, Homo sapiens
ccgcgcggggacccgacgcccgcacgggagaaaaacgacaaaca

SEQ ID NO: 164571 - RNA, 84 nt, Homo sapiens
ccccaacggcgggaacaggaaacggagaggcgggcggaccaagaccccccccaggagcaggccccccccccaacaaccggccac

SEQ ID NO: 164572 - RNA, 82 nt, Homo sapiens
aaaggagaaggaaagcgaaggggaaggcgccgaagaggacgaaggcacgaaaagacagcagggggagcagcaaagaaaggag

SEQ ID NO: 164573 - RNA, 83 nt, Homo sapiens
agagagccgcacaagcgccggccaaggacaccagacacgaaggaccacaggccccggaggggggacagccaggcccagagcac

SEQ ID NO: 164574 - RNA, 92 nt, Homo sapiens
cgccgccggagaggggaggaaacgcgccggaaaggaagaccaggacgcacaggagaacacgagacccgcacaaaaccccgccccccaggcca

SEQ ID NO: 164575 - RNA, 75 nt, Homo sapiens
ccggacccgcgcagcgagcccgagcggcagcgccggaggccgcaggagggaagcgcacggaaaccgccccgggag

SEQ ID NO: 164576 - RNA, 88 nt, Homo sapiens
caaaccagacgaaacagaaaccaagaaccaacaaccaaagaaaacagaacagaaaaggggacccccaaaagacaagggcaaaacggac

SEQ ID NO: 164577 - RNA, 41 nt, Homo sapiens
ggaaagcagaagacaagcagcagcgccagccaggaacgaga

SEQ ID NO: 164578 - RNA, 69 nt, Homo sapiens
ggaggaacaagaggaaaaacagagcagaagaacggaaggagccacaagaccaagcgccacaagggagga

SEQ ID NO: 164579 - RNA, 76 nt, Homo sapiens
cgcaaggcgaggacccaaaggggacaaacccgggagaacacccccccaggaggcgagcgccacgcccacaaagcac

SEQ ID NO: 164580 - RNA, 74 nt, Homo sapiens
cccaaaagaggagccaaaagagaaagcacagaaaccaaagccagccaggacagaagagcccaagaccagaaaaa

SEQ ID NO: 164581 - RNA, 34 nt, Homo sapiens
accaaccccccggagccaggaaacacgacaccgg

SEQ ID NO: 164582 - RNA, 70 nt, Homo sapiens
aagccccgcggggaagaacggcacgcggggccggcaacggcaggcccgcgaccccgccgcggagagcacc

SEQ ID NO: 164583 - RNA, 84 nt, Homo sapiens
gaaaggcaacaaaaccacgcaggcaacaagaaggggaacagcaaagggaagaagaaaggcaaaggaaaccagccaaacgcaaac

SEQ ID NO: 164584 - RNA, 78 nt, Homo sapiens
gggccaaagccacggaacaagcccaaacaagaaagaagcggcacggaaggaaacggcccagcagacaagcaggaaggc

SEQ ID NO: 164585 - RNA, 44 nt, Homo sapiens
acaccggaaccgggaaaggacaggccgacggcgcaaggccacgg

SEQ ID NO: 164586 - RNA, 76 nt, Homo sapiens
aacacacgcagcggggggacacacgcgaccggcgaggcccaccaagccagaggaaggcacaaccacgaggaagcgg

SEQ ID NO: 164587 - RNA, 75 nt, Homo sapiens
gagagccagagagagcggacgacagaacccggccgacccggaccaacaaccccaaggggggaggcagcaaaggaa

SEQ ID NO: 164588 - RNA, 78 nt, Homo sapiens
gcacagcacccacaaagcaacgacgcaaaacgaagaagcaaggccgacaacacgaggagaccaccaaacccccaccaa

SEQ ID NO: 164589 - RNA, 72 nt, Homo sapiens
ggcaccagaagacggaccggagcacgcgagggaaaaagaaaagggcgaagacccgaagcagcgcaggaacag

SEQ ID NO: 164590 - RNA, 96 nt, Homo sapiens
caggcgggggccagaaacgggccccgcgccaggaggcccaccccgccggcggaggagcggacaacccagagagaaacgccagaccacagcggagag

SEQ ID NO: 164591 - RNA, 82 nt, Homo sapiens
aaaagaccggcgccgccgcccccggaaaagggcaccgcccgggggggcggagcgcgcgggcaggacaagggaaaaggcaacg

SEQ ID NO: 164592 - RNA, 79 nt, Homo sapiens
gcccccgcgccgccccgaagcccagggcgaagaagagcagagcagccgaagcggggacgacacgaggccacgagcccgg

SEQ ID NO: 164593 - RNA, 70 nt, Homo sapiens
ggaaacagcagagaccccagacgccaccacaacccccagacgcaagccaagaagcaaacaggggcaggaa

SEQ ID NO: 164594 - RNA, 81 nt, Homo sapiens
agcggggggggaagcggaggcacgggcggcccgcaggaccggaccgggggagaggaggagaaaacgaaccaaggaaacccc

SEQ ID NO: 164595 - RNA, 67 nt, Homo sapiens
gggccccccagggcgcccggccagagaaggacacgaggaggcgggaccggcgcacaaaagacgaagg

SEQ ID NO: 164596 - RNA, 77 nt, Homo sapiens
ccagggacagcacggaaacgaagaccaggcgcagaacagagacgacgcaaccaaaggggggagggagcaaacaagga

SEQ ID NO: 164597 - RNA, 69 nt, Homo sapiens
gaaagagaccagaggaacacagccgagggaccaaagaagccaaacccacaaaccgaagcagcgaagcga

SEQ ID NO: 164598 - RNA, 67 nt, Homo sapiens
cgcccgcagaggccaaggcaaaccgcaccccacccagggcccgagggcaggacagcaggcaccggcg

SEQ ID NO: 164599 - RNA, 54 nt, Homo sapiens
gggaccggggaagacgccggccgcaggcagggccgcgcgaagcggcccccgagg

SEQ ID NO: 164600 - RNA, 73 nt, Homo sapiens
cgggcggaagacaggccacccagcggggagcacggcgagcagccaggccaggagagaccaaaacagaaagcag

SEQ ID NO: 164601 - RNA, 61 nt, Homo sapiens
cccacccacggacagagcccaacaccaccagagcacgaaggacagaaaacgggccccagac

SEQ ID NO: 164602 - RNA, 57 nt, Homo sapiens
gggacgaggaggcgaaggaccgccccgccaggagaaggcccgcagcaccaaaaaaga

SEQ ID NO: 164603 - RNA, 82 nt, Homo sapiens
gccaggagggagggacccagcagagcgagaagaagaaaagaagagagcgaggagcggcaggagcaagccaagaaagaaccga

SEQ ID NO: 164604 - RNA, 48 nt, Homo sapiens
acagcaaggagcacaggaagcagcagaagggacaggaccaacagggcg

SEQ ID NO: 164605 - RNA, 113 nt, Homo sapiens
cgcccaggggccaggcgaagcacgagcagaccggcccgaccgcccacagacccaaacaaagggaggccccgaaggagcaaggaaacgcgaaccaagggccacggggagacaag

SEQ ID NO: 164606 - RNA, 75 nt, Homo sapiens
ggaaagccagaaccaaggagcacaacggacacacacagggagccagaaacgagcagacgaaaagaaaacgcagga

SEQ ID NO: 164607 - RNA, 59 nt, Homo sapiens
aggaggaggagggggcgcaagagacaagaacgaccgggaggcccgagacaccgggaaca

SEQ ID NO: 164608 - RNA, 65 nt, Homo sapiens
ggggggggagcggccgggagcggggacgagagccccggcacaaacggaccaccagaaagcacccc

SEQ ID NO: 164609 - RNA, 77 nt, Homo sapiens
aaaacagcaagaggccagagcagacgaagaccaacgaaagaaaacacacacacacaaccaaggccagagaggaggag

SEQ ID NO: 164610 - RNA, 73 nt, Homo sapiens
caagcgcaccaccgcccgaacccgcgccgcacggaggcagcacggcaggagacgaggagaggacagcaggaca

SEQ ID NO: 164611 - RNA, 73 nt, Homo sapiens
agcgcaggccaacaacccgacacaggagaggccccccgggcacaggcagacaaccgagcacaaaaaaggcacc

SEQ ID NO: 164612 - RNA, 70 nt, Homo sapiens
cggaaggaacggaggcggacaggaggccagggcacgggaaggcagcacgaggcaaaacaaggagcaaacc

SEQ ID NO: 164613 - RNA, 79 nt, Homo sapiens
gagcgacccaggaaggagagagcaaaagaggcggcaaggcagcccaggcaaagaagaaaggcgagggccagcagaggaa

SEQ ID NO: 164614 - RNA, 58 nt, Homo sapiens
aacaaagagcgaccgagaaaaaccgaaagagccaagggaaaagaggacgaggcgcgaa

SEQ ID NO: 164615 - RNA, 87 nt, Homo sapiens
gggagaccacagcaagacaccgggaccccggaagccaaaaagaggagcacccccagcccggcgcagccccggacccccgccacacga

SEQ ID NO: 164616 - RNA, 65 nt, Homo sapiens
agcgagggggggcgcgccggaaaccggagcgcgcagcaggcaaccagccaggacccggaggccca

SEQ ID NO: 164617 - RNA, 74 nt, Homo sapiens
aggaggcagcaagagcacaaagggaaccgacccagacacaccgcggccagaggcccagcccagccaggcaaacc

SEQ ID NO: 164618 - RNA, 72 nt, Homo sapiens
gaaggaccaagaaccaggggacaccaagaacgaagcacccagaccagcaaaagagacaagaagcaacagaac

SEQ ID NO: 164619 - RNA, 36 nt, Homo sapiens
acggcgcagccaacaagggacacgagagccacggcg

SEQ ID NO: 164620 - RNA, 67 nt, Homo sapiens
cggacccggacaccaccagcggccaagaggcaccacacacagcgacaagagaacgcacagaccagcc

SEQ ID NO: 164621 - RNA, 86 nt, Homo sapiens
gagaacacaggaccaggccacccaaggccgaagaacccgagaagcaccaccaacaagagcgacagaagagcagagggaccaggaag

SEQ ID NO: 164622 - RNA, 79 nt, Homo sapiens
accgggccagccagaggggcggcgcacccccaggccacgaggagggcacgcggaggagacgaagaggaggccggcagaa

SEQ ID NO: 164623 - RNA, 106 nt, Homo sapiens
aaaagaagggaaaggagcagggaaaagaccagaagcagagcgacacacaccgaagaacgaccaacacggagaagaccacaggagacggaagaagcaaaagaagaac

SEQ ID NO: 164624 - RNA, 36 nt, Homo sapiens
gaagacaaaagagaagaaggcaggggaagggacggg

SEQ ID NO: 164625 - RNA, 35 nt, Homo sapiens
gccggggcgggcagggcaacggagacagaaaccag

SEQ ID NO: 164626 - RNA, 58 nt, Homo sapiens
aaagagagaaccaagccaggaaaggaagaaacccaaacacgagaggcgagggacgaca

SEQ ID NO: 164627 - RNA, 86 nt, Homo sapiens
ggaaaaccgaagggaaggccagcagcgcgcggagaagaacggggagccaggccccgagccccggccccaaagacccaaaacagaga

SEQ ID NO: 164628 - RNA, 96 nt, Homo sapiens
ggaagggcaggcccggcgccgccacgccgcagccaggagaggcgggccagcggagccgggacggagagaccgcaacagaacagagagaccaaccgg

SEQ ID NO: 164629 - RNA, 70 nt, Homo sapiens
ggaacccacaaaagacgcaggccggacccagcagggcccccggaacaaacccgggagccacgccagacca

SEQ ID NO: 164630 - RNA, 79 nt, Homo sapiens
caggcccccaccaggccgcggcaggaaaccaccccacccaacccccgacacagaagaggagaaaacggaacaacaggag

SEQ ID NO: 164631 - RNA, 94 nt, Homo sapiens
cgaagcacgccacacgcaggaaaacccagaggaaagaggaggacaagggaagaagagagccagccaggcaaagcgaaggcggagcaggagaaag

SEQ ID NO: 164632 - RNA, 78 nt, Homo sapiens
cgccaacagcgcccccaccaggacaaagagaggggcggggccaccaccgccgcagcccaaagagcgcgagaccagccc

SEQ ID NO: 164633 - RNA, 74 nt, Homo sapiens
aagccagggggcgggccccagacggacccagaagaccgaaacagggagcccagaaaagaggagagaagcagcca

SEQ ID NO: 164634 - RNA, 89 nt, Homo sapiens
cgccgccgccggacgcggcaacggagaaggcagcaccgggaccggaggcccagagcgacggacggagaaccaggcccgcagcagcagcc

SEQ ID NO: 164635 - RNA, 82 nt, Homo sapiens
cggggcagggcccggccccgaccccgcggccggacgacccaagcccgcgagcaggagagggaagcagggggaaggagcagga

SEQ ID NO: 164636 - RNA, 62 nt, Homo sapiens
gggcagccggaaggacaccaagagcggaccgggccccggacagccagacaagaccccaacga

SEQ ID NO: 164637 - RNA, 82 nt, Homo sapiens
gggaaaggaccaagagaaggcccagcccaaagaaaaaggcgcacacccagccaagaggggaaggaccccaaccggcccccgc

SEQ ID NO: 164638 - RNA, 119 nt, Homo sapiens
aggacccccaccacgggaagagcaacaggaaagaaaggagccggaaagcacggaaccccagagaggaaagggaaaaacagacaaggcacagagccccacgggacccgggcccaaggaca

SEQ ID NO: 164639 - RNA, 75 nt, Homo sapiens
aggcagccagaaccaagcggagagagcagcccggcagacgcagaaccacagagagcacagcgacagcgcaaaaca

SEQ ID NO: 164640 - RNA, 85 nt, Homo sapiens
agcaggacccccaagcggcccagcagacgaggcccggccaggggaaggaaacaagccagaaggccaaaacaagggaaggaacaag

SEQ ID NO: 164641 - RNA, 64 nt, Homo sapiens
ggcacggaggcacacagaaccacaggaaagcagcgaggaacacaggggggacacaggacaacga

SEQ ID NO: 164642 - RNA, 86 nt, Homo sapiens
caggggcccccaccacccggaggagcagcccgccccgccgggggagacgacccccgccaggcccgcgagccccagcccgggagacc

SEQ ID NO: 164643 - RNA, 75 nt, Homo sapiens
agcaccacagaaaaaaggagacgaaaccagacagagggcaagacagagaccggcgcaagagcacccggacgcgcc

SEQ ID NO: 164644 - RNA, 68 nt, Homo sapiens
agccgccacacgccaaagggggacggaagcggcagcgggcagccggcccagcacagggagcagaaccc

SEQ ID NO: 164645 - RNA, 71 nt, Homo sapiens
acgacaagggcccgcggaccgggcggagaacggaaaagcaccaggaagcagagaggaccgcagaagggaag

SEQ ID NO: 164646 - RNA, 82 nt, Homo sapiens
gcgggccgggacccagccaggcagaccccgggcagcagggaaagaccacagcaagaccacgcccccagccgggggaccaggc

SEQ ID NO: 164647 - RNA, 71 nt, Homo sapiens
agcgcagaaggagaaaaggacaaaaggcaacccagaaacagaaggcaagaacgcccccacaggagcaccgg

SEQ ID NO: 164648 - RNA, 55 nt, Homo sapiens
cacagaacgcccagacacagggcaaaaccaacaaaggacagcccgaagcgcacga

SEQ ID NO: 164649 - RNA, 73 nt, Homo sapiens
cccaaaaacaaaaaacaaaccagacaacagaccgcgacgagaagagcaaaacggagcccaaaaaaggaccaac

SEQ ID NO: 164650 - RNA, 73 nt, Homo sapiens
cggaaccccgcccaaggaccgcggccgagacccgcacggagcggaaccgccagaccacaagaaaagcagaaga

SEQ ID NO: 164651 - RNA, 70 nt, Homo sapiens
agagagcagagaggagaaagagagaagcaacagggaaggagcagacagcaagaaccgacccccgccccag

SEQ ID NO: 164652 - RNA, 82 nt, Homo sapiens
cgaggcccccagccagggaacgaaaacagggccgagcggacccgaggggcaaacgaggcaggccggcccccacaaacgcgac

SEQ ID NO: 164653 - RNA, 68 nt, Homo sapiens
agccacaggaggcgcggaggacgccccaccgccgacgcccccagccaccagaacaaagccagccgaaa

SEQ ID NO: 164654 - RNA, 72 nt, Homo sapiens
ccccccggggggccgcggggaagcccccgcccgaagcaacccaggcacccccaacaggcacccacccccgga

SEQ ID NO: 164655 - RNA, 39 nt, Homo sapiens
gaaaacggcaaggaagcgcaacagaagccagcaacgcgc

SEQ ID NO: 164656 - RNA, 75 nt, Homo sapiens
aaaaggcagaggaacggaaggacgccgcgcaggcggcacagaagagaaggcggagggaaaaaagaacgaaggggc

SEQ ID NO: 164657 - RNA, 74 nt, Homo sapiens
ccggcccccacccccaggagcacgccgcacaggccgcgaacggggcaaaggcggcaaccggcacgcaccagagc

SEQ ID NO: 164658 - RNA, 81 nt, Homo sapiens
acaaagccgaagaccccggagccccagccagggaaccacggagcacgagaaaacggcggggccaagggaggaaaaacgcgc

SEQ ID NO: 164659 - RNA, 86 nt, Homo sapiens
ccggggcgcggcgaccccggcggcgggaggcccggccgggcaggaccgcaagaccaaccccccccccagccaccaaccgaagacaa

SEQ ID NO: 164660 - RNA, 78 nt, Homo sapiens
ccagaggccgccacaaccgccagacaaccggagccacgccccacgaccgccagaaacgccaaggacccaggcgaccca

SEQ ID NO: 164661 - RNA, 84 nt, Homo sapiens
ccgcccacccacccggcagcgggggcagcagagcggagccaagagcgaagggacagcaaggaacgcacagaacagcaagagacg

SEQ ID NO: 164662 - RNA, 77 nt, Homo sapiens
ggccgccacgcccccgggccgacgccagaagacaaagagccaagaaacccaaaacccgacccaaccagccaaggacc

SEQ ID NO: 164663 - RNA, 82 nt, Homo sapiens
caaggccgggccgcccgcaagaaaacaagcagccgcacgacgcacggcccaggaccgcacaagagacaggggccaggccagg

SEQ ID NO: 164664 - RNA, 55 nt, Homo sapiens
gagaacacagcaaccgccaggggccgacgcccgccgcggccggggaacaggccac

SEQ ID NO: 164665 - RNA, 80 nt, Homo sapiens
ccgcggcccggcccggccccgaggccggcaacggagacccaagggcgacagcaagagggcgcccggaagaggaaaggacg

SEQ ID NO: 164666 - RNA, 88 nt, Homo sapiens
gaacagaggcgagagcggcagcagcaccagcccaagagaagcaccgccggccaggaggagagcgcaccaccaaaaaggcaaacacacc

SEQ ID NO: 164667 - RNA, 74 nt, Homo sapiens
aaaaggagaagcacgggagggggcgagggcaaacaggcggaaaaagagcacagagcagaaaaccaggagacacc

SEQ ID NO: 164668 - RNA, 82 nt, Homo sapiens
cagcagaagccaggcccagcaggaggaaaaccccagagaaagcaccaagaaacagggcgaggggaaggaccccccacggaag

SEQ ID NO: 164669 - RNA, 72 nt, Homo sapiens
aacaacgggagaagaacgaaagaacaggcgcaaaaagaaaccacgacgagcgaggggaaagagcccgggaga

SEQ ID NO: 164670 - RNA, 74 nt, Homo sapiens
cggcggggggcacgaggaaaggccaggcgaaccagccgaaaaaggagaaaccaaaaggaaaagcgaaccagaca

SEQ ID NO: 164671 - RNA, 71 nt, Homo sapiens
gggacacccccacgcccagccaagagagggagcagggcgaacaacacagaaggaggcccggcacagcgcag

SEQ ID NO: 164672 - RNA, 72 nt, Homo sapiens
aaggaccaggcgacgagcccggagagagagaagagagaacaaaccggggcgccaacccgaaagcagcgagac

SEQ ID NO: 164673 - RNA, 78 nt, Homo sapiens
aggaagaagaacagccgagagagcaacaagccagcccgggaccgagggccacgggaaacaggcacagaggcgggaaga

SEQ ID NO: 164674 - RNA, 52 nt, Homo sapiens
acggggcgaaccgagcaccaggcacaggcaaggacgcacggacagcaaaacg

SEQ ID NO: 164675 - RNA, 60 nt, Homo sapiens
gaaccaacggcccgaaagaggcccccagacaccaccgaacgcccccccaagggggggcac

SEQ ID NO: 164676 - RNA, 71 nt, Homo sapiens
ccaggcggaacgcccgccccgcagagaggcggcagaagcaaagagacagcgggagaaacaaaaggaagaaa

SEQ ID NO: 164677 - RNA, 71 nt, Homo sapiens
gcaacagccacccagacgcaggcaacaccggacagggaaagaccacagcaagaccacgcccccagccgggg

SEQ ID NO: 164678 - RNA, 71 nt, Homo sapiens
gcaggacggccaccccaggagccggccgcccagccggccaggggcaaaggagaggaagaggaagaggaaga

SEQ ID NO: 164679 - RNA, 72 nt, Homo sapiens
caacccacaccaggccagccgggaaccgaacccaaaacgagacaacgaagagaggaaagaagcggaaaggag

SEQ ID NO: 164680 - RNA, 112 nt, Homo sapiens
aggaacgggccgaaccgggagcgaggaaccagaacgaaaagcgccagaaagagacgggccgagacccaaggccaagggaaagggggagcggagcagggggagaggaaggggc

SEQ ID NO: 164681 - RNA, 37 nt, Homo sapiens
ccaaagcccagagcccagaaccgacagaagaaaaggc

SEQ ID NO: 164682 - RNA, 68 nt, Homo sapiens
gagagaacagagcgggagccgcggaggcccacggcggcgaccaggacacagcaggggccagacaacca

SEQ ID NO: 164683 - RNA, 71 nt, Homo sapiens
gaaagacacggaagcacacagcccacgagaaaaggaagaccggcggcagcagaggagcccgggagcgaagg

SEQ ID NO: 164684 - RNA, 53 nt, Homo sapiens
gcggccccaggcgcgcggagagcaggggacgaagggaacccgccgggcggccc

SEQ ID NO: 164685 - RNA, 59 nt, Homo sapiens
caacacccccgcacaggaacgcgcggacgccaccagccagcaagagacgggagaagggc

SEQ ID NO: 164686 - RNA, 78 nt, Homo sapiens
agcagagaaagacaaaagccacccaggccggccagcacccaccgagaaggccagcagccggaaacgaaacagcgcagc

SEQ ID NO: 164687 - RNA, 102 nt, Homo sapiens
gagccacaagagagccagagcaacgcacaagaacgaaaccggaaccagacagaaggaggagcaagcgaacaaaaaaccgaaaaacacacgggccaggaaaag

SEQ ID NO: 164688 - RNA, 80 nt, Homo sapiens
acaccaccgcagccagggcaacgccaagcccgaacagagccacacgaccccgcggccaagagcccagaaaaccagagagc

SEQ ID NO: 164689 - RNA, 77 nt, Homo sapiens
accgggccggaacgagacgcacgagaaggggcggggccgcagaagagcgagggcaacaggacgcagcagcgcagaca

SEQ ID NO: 164690 - RNA, 82 nt, Homo sapiens
gaggagaggaggcgcgggcggagcggaaagaggaggagaggggaggaggcgaaggggacaggcgcggggccggccaccggag

SEQ ID NO: 164691 - RNA, 77 nt, Homo sapiens
gccgcgcagcccccgcgcgggcagccaccccgcccccgccccccccgccgcaccagggggcagaggccgcggagcca

SEQ ID NO: 164692 - RNA, 46 nt, Homo sapiens
gaagaagagaaagaaaaccaggaagccagcacaacagacacccggc

SEQ ID NO: 164693 - RNA, 75 nt, Homo sapiens
agcgagccggagaagagggggcccggggggaggaggggcaggcccggcggagaggcggccgagcccaagcagacg

SEQ ID NO: 164694 - RNA, 68 nt, Homo sapiens
gcacaaggagcacaacgcccacccaggaacccccgaacagaaggaggacaagcccaaccagggaccag

SEQ ID NO: 164695 - RNA, 78 nt, Homo sapiens
caaggcaaggcccaacaaagccccccagcccccacgagaaaaccacccaaagccaaaggaacgggcgcaccacgccac

SEQ ID NO: 164696 - RNA, 72 nt, Homo sapiens
caccggaagcgggaaagggcaaggccagagaaggcgggagaaagacacgaaccacagaacgcaacaggacag

SEQ ID NO: 164697 - RNA, 83 nt, Homo sapiens
ggaagaggaagaagagaaggaagaggaaaaggacaagggagagaggaggaggaaggagaagagaaacggaacggggagggagg

SEQ ID NO: 164698 - RNA, 83 nt, Homo sapiens
gacacacaggaacgggggccacgcacggagaaagggggcccggaggggcgcccaggccgagcacccaggcgcagacagcgggc

SEQ ID NO: 164699 - RNA, 75 nt, Homo sapiens
gggagcaccacggaccccaaggaagccacggcagacacacaacccgacccgacgaaaaagggacacagacgccag

SEQ ID NO: 164700 - RNA, 79 nt, Homo sapiens
cgccagacgccccaaacaaacagagagcgacgcaggggaggacagggaacggcgaggagccaccgggacggccggcccc

SEQ ID NO: 164701 - RNA, 72 nt, Homo sapiens
agccaaaacacacaccggccaaagagcggaaaggcaaaaggacaggagaaagaggacacggccgacagacag

SEQ ID NO: 164702 - RNA, 81 nt, Homo sapiens
agaaacagccccccaacaaaccccaacgcaaaaacaagaggaccacgaccaccaaccgaagacccacccgaccaaagacca

SEQ ID NO: 164703 - RNA, 90 nt, Homo sapiens
gccgggagcggcggcgcggcggaaccagggccgacccgggccggaccgaccccaggcggcggaagccgacggccacgcggacggaggacg

SEQ ID NO: 164704 - RNA, 81 nt, Homo sapiens
agccccggaggaggaagcggacacagcaacaaagagagaaacagcagcaacagaaaaaggccagggcaggacagcagcccg

SEQ ID NO: 164705 - RNA, 87 nt, Homo sapiens
gcggcgaagcgcggcgcagccaaaacagagggagacgagaaaagggccgagcacaagccaagaaggcgccccaaagcagcgaccggg

SEQ ID NO: 164706 - RNA, 52 nt, Homo sapiens
ggccgggccggcggcacagccaagacgaacccccccaccaccccccccggcg

SEQ ID NO: 164707 - RNA, 65 nt, Homo sapiens
aggaaccgagacacccagagacggaggaaacccgacagcaaaggacaccaaaaccaccaaccgag

SEQ ID NO: 164708 - RNA, 87 nt, Homo sapiens
gacgggaccgggaaccacgggggccgcggccggaccgagcgcccgacccggcgaggagggagccgcgagcaaacgaggggaaacgga

SEQ ID NO: 164709 - RNA, 83 nt, Homo sapiens
gcagcgcaggagggcggggaagcagcagcggccaggagaacccagggccggagcggagggaacggacgcacagaacagccccg

SEQ ID NO: 164710 - RNA, 96 nt, Homo sapiens
ggaaaagcagacccaagcggagggcgacacgagaacaaaaggccaaaacagaagaggcaaagcccagccacagcagcagcccagcagcaaacaacc

SEQ ID NO: 164711 - RNA, 85 nt, Homo sapiens
gcggggagaggagcacgaccaagcgaggcgcaccacagcagcacagcgagaaagggcacgacacaagacgaccaccaccgcggac

SEQ ID NO: 164712 - RNA, 78 nt, Homo sapiens
ccaagccggggcagcagcccaccccaaagcagcccggacgaggggcaggaccggggacacacgacgcgggacgagccc

SEQ ID NO: 164713 - RNA, 56 nt, Homo sapiens
ccacggcaggcggcgcaaaacacagagaggagagggaaaacgaaagccggaaacgc

SEQ ID NO: 164714 - RNA, 73 nt, Homo sapiens
gaccgcaggagggagaccacagcaagacgccaggacccacggaagccagaaaggccaaagagcacagggacag

SEQ ID NO: 164715 - RNA, 83 nt, Homo sapiens
ccgccagcaggggcgccccggacgagagcccggcgggggcgcaggcacacagcggcaggaaaagagcacagggagggagagac

SEQ ID NO: 164716 - RNA, 81 nt, Homo sapiens
aaaccagggcgggggcggacccggcggcccaagcggcacggggcccgcaggacaagccagggagacacgaccaccgcccga

SEQ ID NO: 164717 - RNA, 71 nt, Homo sapiens
gcgaaagcacccagaggagaaaagcccaaagcgagccaaagggccggaggaaaaagaacagaggccaaccc

SEQ ID NO: 164718 - RNA, 74 nt, Homo sapiens
gccacagcggcgaccgggacgccacccggccaagccggaaaggaagaccaacaccaccaaacccccccccccag

SEQ ID NO: 164719 - RNA, 82 nt, Homo sapiens
gaggcgggggacgcagaaggcagccgcccccccacagcggagccaaaacaggccaccagacaccccccaggcacagccacac

SEQ ID NO: 164720 - RNA, 70 nt, Homo sapiens
agaaaaggccaagaaggcaggcaccagaaacgccacacgggcgggagcccacccacggaaaaaaacacgg

SEQ ID NO: 164721 - RNA, 66 nt, Homo sapiens
aaacaacagcgcccgacaagccagaacgcgccaagaagagagaccaggagcaagggagcggaaggc

SEQ ID NO: 164722 - RNA, 45 nt, Homo sapiens
ccgcagacagaagggggagaagcggaggaggggggaaggcaggca

SEQ ID NO: 164723 - RNA, 101 nt, Homo sapiens
agaagcccgaggcgcaagagacaagcaccgacacgcaaagaagagcccccgaccagaggaagcgaagggccccgccaggacaacagccaaccacagccaga

SEQ ID NO: 164724 - RNA, 78 nt, Homo sapiens
ggaccagaagccagagcgaggacgccggcagaaggccaaaaggaaggcaggaagaacaaaggaagaagaacgaagaaa

SEQ ID NO: 164725 - RNA, 71 nt, Homo sapiens
cagaccagaagccgacgcgagaggaagacacccgaccgacaaaagcagggccgggccagcgccaccgcccg

SEQ ID NO: 164726 - RNA, 73 nt, Homo sapiens
ggcccgacaccacaaccccgccggccaacgcaaaggacacagcaggggccagacaaccagacccgggaggcaa

SEQ ID NO: 164727 - RNA, 81 nt, Homo sapiens
cgaccccacccgcgccgcgacccgagcgccacagcagccaaacggggacgcccagagagccgaagaaggaggcggcggcgg

SEQ ID NO: 164728 - RNA, 85 nt, Homo sapiens
ggcgcgcagggcgggggcgccccaggagccggacaggcgacagacacagcaccggccccggcagcgggacgcaggacggcagccg

SEQ ID NO: 164729 - RNA, 79 nt, Homo sapiens
gcagaggacgccgaggagggggacccacgcccggcaggagaggagacaggaagcaccggacccagaacgccccaacccg

SEQ ID NO: 164730 - RNA, 88 nt, Homo sapiens
gagcggcgggcggcggcgcgcggacccaggcgcggaggcgaggccagcagggcgggggggggcacccccaaaggaagggccccgggca

SEQ ID NO: 164731 - RNA, 81 nt, Homo sapiens
aggcgaagcacgagcagaccggcccgaccgcccacagacccaaacaaagacgaggagcgccaggaaagaggcagagacgaa

SEQ ID NO: 164732 - RNA, 53 nt, Homo sapiens
caacgagcgcccggagggaaggccgcggacccccccccccccaccccacagga

SEQ ID NO: 164733 - RNA, 74 nt, Homo sapiens
agaaccaacaaagacggaccaacccaggacccccccacagaaagccagaccgcgggcggcaccagcgccccagg

SEQ ID NO: 164734 - RNA, 83 nt, Homo sapiens
ccggccgccgcgccgcccggcagcccggcagggggcggagccgaccggccgcccggcgaaagagagggcggcagcagcaagga

SEQ ID NO: 164735 - RNA, 86 nt, Homo sapiens
gagggagagcaagaccacagcgcgcggcccccacaccacacagagagcgagcgagaaccgaagggaggagacgagcaggcgagcgg

SEQ ID NO: 164736 - RNA, 75 nt, Homo sapiens
ccgcggcccggcagggggaacgggagggggaaacccccgaaaaaggcagaagcagccagccccaaagaggaaaag

SEQ ID NO: 164737 - RNA, 75 nt, Homo sapiens
gcgagcgcccgggaaccccaggcccgggggcacaaggggcaggagggagaaaacgcaggacacaaggaagaagaa

SEQ ID NO: 164738 - RNA, 69 nt, Homo sapiens
caaggcagaggcgaggcggaagggcaccccacccgggaaacccagacgacaaggaaggccaagggaccc

SEQ ID NO: 164739 - RNA, 97 nt, Homo sapiens
ggacggagggggaaaggaagccaagaacaagcacaaagccacagcgaccaaggcgcccggccaggagagggaccagagggagcggaagcccgagagc

SEQ ID NO: 164740 - RNA, 70 nt, Homo sapiens
agaaacccgggccggcccaagagagagacacggagggggccgagacaacaagaaggggaggaacaaaagc

SEQ ID NO: 164741 - RNA, 74 nt, Homo sapiens
gcccagagcccggaccaagcaccccaccaccaaaccacgcgggcgaacgccagccgcaagcgcccaggaggccc

SEQ ID NO: 164742 - RNA, 78 nt, Homo sapiens
acggccgagaggccaagggcacacacaagaccgccaagcaaagacccgggagccaggcacaaccaaagaagacagaca

SEQ ID NO: 164743 - RNA, 55 nt, Homo sapiens
accaagaccgcagaccgaccccgagagaggacgacagcgcgggagccaggaaacg

SEQ ID NO: 164744 - RNA, 81 nt, Homo sapiens
cgcgcacgcgccccggccgacagacaagaccgagaagaaggcaaaagcagaccggaaaacccaccggcaagaccacacccg

SEQ ID NO: 164745 - RNA, 72 nt, Homo sapiens
ggaagacaggaaaggcaccagggagagcgaggagaacaaagcggcccgggagggaacaaagaggaacaggcc

SEQ ID NO: 164746 - RNA, 82 nt, Homo sapiens
cggggcgcccaggaggcaccacaggcaaacgaacacgcgcagcgcagaggcccggcagccccaaggaacgcggccccgacag

SEQ ID NO: 164747 - RNA, 73 nt, Homo sapiens
agcgcagagcccggggacggcgaggccccagaccacacggcgcaaagccacaagccaggcgaacccccccaaa

SEQ ID NO: 164748 - RNA, 72 nt, Homo sapiens
acaggagcagcggaaggagcaagccagcacagaacacacccacgcccaccaacaccccagccccacgaaggc

SEQ ID NO: 164749 - RNA, 54 nt, Homo sapiens
acaagaggagagagaaaaggcgagaaagaaggacggagcgcagagagccagggc

SEQ ID NO: 164750 - RNA, 73 nt, Homo sapiens
ccacgagggaaggagagcagcaaaaacaagaccagcgaggacgacaagcaccccagcccgggggccagggccg

SEQ ID NO: 164751 - RNA, 69 nt, Homo sapiens
agggacagcgcaggcagcaggacagaagccagccaggcgcaagagagcacaagaagaggaacaagacgg

SEQ ID NO: 164752 - RNA, 74 nt, Homo sapiens
gaagcggagcagccggaggacggagaagcggggggcggacacgcgaccaaggggaagaaaaggacccccagaga

SEQ ID NO: 164753 - RNA, 69 nt, Homo sapiens
gaccacccggcagacccaaggcgaccccggacaaaggaaagggcgccaacaaaggagagaagaaaacac

SEQ ID NO: 164754 - RNA, 78 nt, Homo sapiens
acagaggcgcgagccccaaacggaaccccgcaaccggcggggcggagaacggaaaagcaccaggaagcagagaggacc

SEQ ID NO: 164755 - RNA, 76 nt, Homo sapiens
gcgagcggcgcgagacgcgggagccacggcgccaccaccaggagaaggcgggccaaggccagcggcaaagcggggc

SEQ ID NO: 164756 - RNA, 54 nt, Homo sapiens
cacaacaaaccgacggcaggcaagggggacaaagcaaaaaaccaacaagaaaca

SEQ ID NO: 164757 - RNA, 62 nt, Homo sapiens
aaaaagcaaccacagagagaagagcacacgagaaggaacaagccacaacagcccccgggccg

SEQ ID NO: 164758 - RNA, 51 nt, Homo sapiens
accagacgcaacagacgccagaaagagggcaacggccgacgaacaccgccc

SEQ ID NO: 164759 - RNA, 81 nt, Homo sapiens
ggaacgcccaagccccaccgcgagggcccgagcaccccaacccggaaagccgcacgccagagggccccgccaggcacccca

SEQ ID NO: 164760 - RNA, 81 nt, Homo sapiens
gcgcggcgcggggccccgcggcggaggcgcccgaggccccggaggcgaagccacacaggagaggaaaggacagaggcacag

SEQ ID NO: 164761 - RNA, 72 nt, Homo sapiens
cccaggaaaaagacagcccgcagcacgaccagcaggaacgaggcagcgagaagaaaaagaagagagagacac

SEQ ID NO: 164762 - RNA, 93 nt, Homo sapiens
aggcacccagccggagcaggcgcaagaccacaagcgcccggagcacagggcagcggagaccgccagacggaaggcacgagggccgacacgccc

SEQ ID NO: 164763 - RNA, 77 nt, Homo sapiens
gaggaaaaagaagcgaggaacagcaggacggaaggaaacagcaaaggacggcaagaagaagcgaaaaccgcccacaa

SEQ ID NO: 164764 - RNA, 82 nt, Homo sapiens
ccgagagccggccacaacaagcccacaagccgacgcgggaaaagaaacgaagccgggcacggacaggacagagaaagcaggc

SEQ ID NO: 164765 - RNA, 73 nt, Homo sapiens
agagcacggagcaaggaaaaaaggcaaccacaagcacgaaagcagggaaccccagccgaccagagacacaagg

SEQ ID NO: 164766 - RNA, 88 nt, Homo sapiens
gccagccgggccccagcccacacccaccaggaaagcggggaagcgaaggcagaaacacccacaacaggagacaccaaagaagagaaag

SEQ ID NO: 164767 - RNA, 76 nt, Homo sapiens
cggggagccccgggcggcggggaccgccagcccagcgaccagcaggacacccggcacaccacaaaggccgccccca

SEQ ID NO: 164768 - RNA, 73 nt, Homo sapiens
acagcggggccacccagaacaaaaagggccaggcgggcagagcggccccaaacagacaggcggaagacacacg

SEQ ID NO: 164769 - RNA, 81 nt, Homo sapiens
accgccagcaaaggaagacgagagacagggcagggcagcagcacgaccgacccagcagccccggcagacccagggaacgga

SEQ ID NO: 164770 - RNA, 71 nt, Homo sapiens
cccccccccggaacagggcggacaaagcagacaggccaggcacacagaaaagacaaaacagaggagaccag

SEQ ID NO: 164771 - RNA, 76 nt, Homo sapiens
cacagcccgcagccccgccagccacccccaggacacgccaccacaccgacccacgacaagaacggagagacgagcg

SEQ ID NO: 164772 - RNA, 100 nt, Homo sapiens
gcccaacaccggaaacccaaacaccagccacgcaccccaggagaaccaggggaagcaggaccaagccacgccaggagacgagcaaacaagcgcagagaaa

SEQ ID NO: 164773 - RNA, 75 nt, Homo sapiens
ccgaccccgcgcgacgacccgccgccgccgggcggaggaccaagaacgcccagcccgcgggcaccggcagaaagg

SEQ ID NO: 164774 - RNA, 84 nt, Homo sapiens
gcgccccccccaaccacaaaacaggcggagggcggcgaggggacagagaaagaccagggcagaggaagaacgcagggaaaagaa

SEQ ID NO: 164775 - RNA, 55 nt, Homo sapiens
aaaagcacagcgccgcggagaagcaggggcgacgagaggccaggggccggaacca

SEQ ID NO: 164776 - RNA, 72 nt, Homo sapiens
ccagaaggcaggcaggcggaacccaagacgcaccaagcccacaagaggaaaaccgggaaaagcacacaacag

SEQ ID NO: 164777 - RNA, 57 nt, Homo sapiens
ggaagaggaaaaacacgacaaagagaggcagaaacgaagcgaaaggaaaccaaaagg

SEQ ID NO: 164778 - RNA, 59 nt, Homo sapiens
agcaggaaccaaagcggacagagagggcaccggaagaagagaaggaagagaacgaaagc

SEQ ID NO: 164779 - RNA, 76 nt, Homo sapiens
aggccccgaggaacagagaaaagaaaccagcagacagaagcagggggccgcagccggccaggggacccgaaggggg

SEQ ID NO: 164780 - RNA, 73 nt, Homo sapiens
aggcgaggcggacgcgcccaggcgaggaaagaagggcaccagcacccagaaccgggcgcgcagcgcagacgcg

SEQ ID NO: 164781 - RNA, 54 nt, Homo sapiens
aagccagggccccacgacacaacgggccacggcaggcgggcaacgaggaacgag

SEQ ID NO: 164782 - RNA, 37 nt, Homo sapiens
cccgagagcgggacgcaggaaaccaccccacccaacc

SEQ ID NO: 164783 - RNA, 67 nt, Homo sapiens
gacacagggccgaaaggcaggaggagacaccaaaagggggaagagcccccccaacaaaggacgaaaa

SEQ ID NO: 164784 - RNA, 65 nt, Homo sapiens
agacacaggaaaggagagcaaccgccgagagagaggaaggccaacgcggggaaacacaggcagcg

SEQ ID NO: 164785 - RNA, 51 nt, Homo sapiens
cccccagcagcagaccggaagagggggggccgcccgcccaaggcaggaaga

SEQ ID NO: 164786 - RNA, 84 nt, Homo sapiens
aggcggaggccccagggaagcgcagaaagcaggcgaacccgcggcgcaaaacgggaccagaccccacaagaaaacacacaacca

SEQ ID NO: 164787 - RNA, 78 nt, Homo sapiens
aaaaaagagaaaccggggaaccacggacaacccagaggacaacgaaggcgggaaacccagacgacaaggaaggccaag

SEQ ID NO: 164788 - RNA, 80 nt, Homo sapiens
cgaaaaacaagcaccaggaaggagcaagaccggcacaccacgccggcaaaacaggaagaaaaaagcgggcacgggcagca

SEQ ID NO: 164789 - RNA, 79 nt, Homo sapiens
cacacagaggcaggacgcagagacagcccccagaacaggaaggccccagccccagccaaaccccccacacgaaccagca

SEQ ID NO: 164790 - RNA, 75 nt, Homo sapiens
aacagagagccagaaggaagacaagcggaagaccgcaggaaagcaggaaggcaagaaagccaaggacgaaaccca

SEQ ID NO: 164791 - RNA, 76 nt, Homo sapiens
agaggcggcagggaccagcagacgggaaggcagaacaagaagggcaaccaggggggaaggagggagcggagaacgc

SEQ ID NO: 164792 - RNA, 47 nt, Homo sapiens
ggcccgggcccagcccagcgcacggccgccccgaccgggcggccgcc

SEQ ID NO: 164793 - RNA, 79 nt, Homo sapiens
gagcagccaacaggcagaccaaaagacgcaaggaaagccaaccagacaacagaaagcgcaacccaggcccaagaaacag

SEQ ID NO: 164794 - RNA, 71 nt, Homo sapiens
ggagccagccagccacccaccggaccccacgggccccagacaggagagagaaagggagcaaagacaagcag

SEQ ID NO: 164795 - RNA, 77 nt, Homo sapiens
ggaggacacggcagagacacacagcaaggggcgggacaggcaaggagccaggccaaggagcagaagagacaaagcaa

SEQ ID NO: 164796 - RNA, 77 nt, Homo sapiens
cgagcgagggggggcgcgccggaaaccggagcgcgcagcagacacgagaggcgagggacgacagagcaagcggcaga

SEQ ID NO: 164797 - RNA, 85 nt, Homo sapiens
ccacgcgcgggcgagaaggggcccacgaggaggagaacccgggggcacaaaccgaagaccgaaggacaagacagcaggccggcgg

SEQ ID NO: 164798 - RNA, 80 nt, Homo sapiens
agaggcccagacacacggcggcacacgcagaccgcaccaggagacaagggaagacacaggaagcgccgaggaaggaaacc

SEQ ID NO: 164799 - RNA, 78 nt, Homo sapiens
agcccagagagcaccccagcgaggcccacagaaaagccacaacccaggccggaggaggcggaggccagccgagacacc

SEQ ID NO: 164800 - RNA, 75 nt, Homo sapiens
gaccaccccgccaacgcggcaccgcagaacgccacaaccagcgacagcggccagagagccaacgggccggcaagc

SEQ ID NO: 164801 - RNA, 52 nt, Homo sapiens
gcagccacccaggcaagacagaacacgccggagagagagacgggacaccagg

SEQ ID NO: 164802 - RNA, 92 nt, Homo sapiens
cagaaggagcaggccgcgggaggggagcaccgaagagagccagcagaagcccccgagcgcccacagcagaaggaggaggccccccggcgccg

SEQ ID NO: 164803 - RNA, 70 nt, Homo sapiens
gggccgccgccgcgcacagcgccgaggcccagagagaccccagaaggaaggacggcaggagaagaacacc

SEQ ID NO: 164804 - RNA, 77 nt, Homo sapiens
agcggcccccggagggggcagcccgggagaaccgcggcggccggagcggaccccgcgggcacggcgggacgggacaa

SEQ ID NO: 164805 - RNA, 106 nt, Homo sapiens
caccccaacaacacagcacccaaaccaaacaggcgcagccaagccagcaagaggaaaggggcggaggaaggcaagagggcaggcacacccacgcaccacagaaaac

SEQ ID NO: 164806 - RNA, 67 nt, Homo sapiens
cagaagccaagcacgaaaacaggacagggacaagcgcacagcggagaaagcagcgcggccaggaggc

SEQ ID NO: 164807 - RNA, 71 nt, Homo sapiens
gcgggaaaacccgggccaacagccgggaggaggcccggggaccagaagaggaggggcgaggaacaccggca

SEQ ID NO: 164808 - RNA, 77 nt, Homo sapiens
caagaagccggacacaaggcgccacggcagcggaaccaagaacagagaccagcacaaccagggaagaagacagaaag

SEQ ID NO: 164809 - RNA, 45 nt, Homo sapiens
accaggaggggcccaggagccaggccagcggagccgcaccaccgg

SEQ ID NO: 164810 - RNA, 79 nt, Homo sapiens
caccacgagcacggcccgcgcacgcccggagagaggagcacaggcggaggcagcggaggccccgccgcgccgcagccgc

SEQ ID NO: 164811 - RNA, 96 nt, Homo sapiens
ccagagccagcacccagccccggagcccaaaccagacccaccaccacaggagacaaaccaccgcggggccggggcccacagccgcggcccagccga

SEQ ID NO: 164812 - RNA, 74 nt, Homo sapiens
agccccggcaggccaagcagaaccacaggaggggcagaagaagaagagcggagaaccgaacaggcgcagggagc

SEQ ID NO: 164813 - RNA, 60 nt, Homo sapiens
aaccacagggggaagacgagagagagagaaaaaaacagaggcgggaaacacggcaaaccc

SEQ ID NO: 164814 - RNA, 52 nt, Homo sapiens
gaaggaccaagaaccaggcccacaagccgggagcccacacaccacaccggcg

SEQ ID NO: 164815 - RNA, 68 nt, Homo sapiens
ccacggacccaaaccagaagaaaaccgaaccgagaacacgaccccaccaccagagaagaggcagcagg

SEQ ID NO: 164816 - RNA, 67 nt, Homo sapiens
cacaaagggagcagggagaggagcgggaaacgggagggaaccagcaacaagccggagccgagacagg

SEQ ID NO: 164817 - RNA, 50 nt, Homo sapiens
gagagaaaggcggagcacaggcaaaaaagccggacccacagccgccagag

SEQ ID NO: 164818 - RNA, 78 nt, Homo sapiens
ggggcaaaccgccgccgcccccaccagacagacgcgcaaaacccaggccaagaagcccaggaggacagagacgaggac

SEQ ID NO: 164819 - RNA, 40 nt, Homo sapiens
aaaaacgcgccaaaccggaggaagccagcgaccccacaac

SEQ ID NO: 164820 - RNA, 69 nt, Homo sapiens
ggaacgaggcgccgaccccacaggaagggaagcacagcgaccccagaccggggaaccagcaccccagaa

SEQ ID NO: 164821 - RNA, 67 nt, Homo sapiens
accggaggacgcggacaaggcccagagagccagagaccggaacacagaagacaaacccagaagccca

SEQ ID NO: 164822 - RNA, 76 nt, Homo sapiens
agcgcgcggcggcggagagcaagggccaggggagcccagcggcgcgccggcagcaggaaaccaaacaaggacaagc

SEQ ID NO: 164823 - RNA, 76 nt, Homo sapiens
aacagaacaggcccaggggcaaccaggcagacccgaccccagcggaaggaagggaacacggacgacgagacacgac

SEQ ID NO: 164824 - RNA, 81 nt, Homo sapiens
cgcccgcaagaacggccaagaaagcccgaaaaccaagggacgacaccggagaaggcagcgacgacagcgacagcgagaaga

SEQ ID NO: 164825 - RNA, 73 nt, Homo sapiens
cgcaccaggccaaagaaagagaagggagcgggagcaggccacagacagacagagaagcggaaaaggggaaccg

SEQ ID NO: 164826 - RNA, 74 nt, Homo sapiens
cccaaggaaggagagaaagcacgaagaagccagcacaacagacacccggccagaccagcccaaacgaccaccgg

SEQ ID NO: 164827 - RNA, 85 nt, Homo sapiens
gccaggaacccgggacagcaggagggggccacggccaagcggaagacccaggagaaggcggaggccagggcccacagacagcaca

SEQ ID NO: 164828 - RNA, 88 nt, Homo sapiens
gccggagggcccgccgacccgggcgccgcgccgcacgagcaccagccagagccaggcgggagcagcggaagacaccaaggccagggag

SEQ ID NO: 164829 - RNA, 68 nt, Homo sapiens
cccaagcaaccccaagcaaaagggcaaacaagagcgcccaaaggacgcggaacagcaccacggccaac

SEQ ID NO: 164830 - RNA, 101 nt, Homo sapiens
gagaggaagacgagccgggaggaacggcccggaaacaggaggaccgcccaccccacgggaggccgggacgggacaacgaaccaccccgaagggaggagccc

SEQ ID NO: 164831 - RNA, 83 nt, Homo sapiens
gccagccccgcggcgcccgggcccgggcggcggcccaccgcccacgggaaacggccaagaagcggaaagagaccagagcagca

SEQ ID NO: 164832 - RNA, 71 nt, Homo sapiens
cgggacggacaggcagggaagcaacgcagaggacagcagaccacagcccggcaggcccaaaaacccaaagg

SEQ ID NO: 164833 - RNA, 81 nt, Homo sapiens
ccaaaggggcggcacggagaaacaggccaacccaggccagcacagacagaggaaaaagacgagcacacaaaacagaccacc

SEQ ID NO: 164834 - RNA, 76 nt, Homo sapiens
gaggcagcgacccccacaagcacaaacgaccaagcacagagcaccagccaagaagcaagggacccgagacagaagg

SEQ ID NO: 164835 - RNA, 75 nt, Homo sapiens
ccccgggacccgcaagaggcaccccagccacccgggacagagcaagagccccaagggcccaacagcgccaagaaa

SEQ ID NO: 164836 - RNA, 85 nt, Homo sapiens
gacagcgacgagagagaccggagaggggagagaaagcggcagcccagaaccggaagcgaccacggacacaaacgccagagaagaa

SEQ ID NO: 164837 - RNA, 75 nt, Homo sapiens
agggaccggaccaagcggcagaaagagcagagaaggcagagggggcgagggaggaaagggggcaaaacgacgaag

SEQ ID NO: 164838 - RNA, 67 nt, Homo sapiens
ccaaaggcaccccccagagcccagcgaccccccaagcaggaccaccagggggcagcccgggacaacc

SEQ ID NO: 164839 - RNA, 60 nt, Homo sapiens
ccgggagcgaggaaccagaacgaaaagcgccagaaagagaagaaggaagagacgggcccc

SEQ ID NO: 164840 - RNA, 67 nt, Homo sapiens
aggagaaaagggagcagcaggagccccgcggggaccccagaagggccccgagggaggagaaagaccc

SEQ ID NO: 164841 - RNA, 74 nt, Homo sapiens
cggagccgaaacaccggaggagcggggaggacagaaagcgggacacaagcaggagcacagaccccgaaaaggga

SEQ ID NO: 164842 - RNA, 71 nt, Homo sapiens
gcccggcagccccgacgcagccgggaagcccggagcgagagcgagagaagggaccagccagaagaaacaac

SEQ ID NO: 164843 - RNA, 79 nt, Homo sapiens
gcaaccgcccgagaccacgacaagagcgccgcgccagcccacccccccaacccccacgcaggacgggcaggacgagggc

SEQ ID NO: 164844 - RNA, 71 nt, Homo sapiens
gaaaagccacgaagaaaaggggaaggaggcgaacaggaagacagaggcacaaaaggagaaagcagaagaaa

SEQ ID NO: 164845 - RNA, 77 nt, Homo sapiens
cgcggccccagcgcccggccccccaccggacacccgcggggacgacggaggagcacggccgggagcgaagaggccca

SEQ ID NO: 164846 - RNA, 68 nt, Homo sapiens
gcgcagcacacgaccgggcccccacgggccccaggagaacacacaaccagaggaaaaggaaaaagagg

SEQ ID NO: 164847 - RNA, 74 nt, Homo sapiens
gggaccagggcgcgacccgcggagcccaggaggccgagccaagaagagagcgggcccagagccgacaagcagac

SEQ ID NO: 164848 - RNA, 95 nt, Homo sapiens
gaccgcacccagcaaccccgcagacagccccacaggagcagcccaggggaagcccgcacagcccgacaccaaggcaggaggcaggaggcacaaaa

SEQ ID NO: 164849 - RNA, 62 nt, Homo sapiens
ggggccgcaccaggaggcaaccccgagcaaggcgcggaccaggcgggcgcgacggggcagag

SEQ ID NO: 164850 - RNA, 71 nt, Homo sapiens
gaagggcccggggcaaagcacagacaggagaaagaagacagccacagaaagggcgccaacccccaacccac

SEQ ID NO: 164851 - RNA, 98 nt, Homo sapiens
gcaggaccagaacccgcgaaagagggaagcggcaaaccaaaagagcaacgcccagaggcagcggcaacgcccacccacggcccccgagaacgaaggaa

SEQ ID NO: 164852 - RNA, 72 nt, Homo sapiens
cgagaccaaagaggaacacaaacggcgcacaggagagggaaggcggggccggggagcccgggccagaccccc

SEQ ID NO: 164853 - RNA, 57 nt, Homo sapiens
cccgaagaagagaccaccaaccaggccggacccagcagggcccccggaacaaacccg

SEQ ID NO: 164854 - RNA, 77 nt, Homo sapiens
ccgggaagccaagccgcaggaccacccggcccaggcggaggcagggcagacagggccacgcagccgacccggaacag

SEQ ID NO: 164855 - RNA, 56 nt, Homo sapiens
gccgcgcgcaccaagcccagcaggggagcagcaggcaaaaggaagcaggccagcca

SEQ ID NO: 164856 - RNA, 69 nt, Homo sapiens
cacaggacccagagaggacacggggggggccgcgcgggacggaagagaaccggcaagaccaggcgccga

SEQ ID NO: 164857 - RNA, 68 nt, Homo sapiens
cgacgccaccccgcgcgcgcgcccccgcgcgcccccaggccgggcggacaacggggaccgcagcggaa

SEQ ID NO: 164858 - RNA, 92 nt, Homo sapiens
caccgcaggcagacaaaagggccaaagaagggagagagaggagaaggcagagcccccccaggcagaagcccgagcgggaaccagcgaagcca

SEQ ID NO: 164859 - RNA, 68 nt, Homo sapiens
gacccccacagccacaggaaagagagggacgaaaccccagacacaagaaaaccagcaaacaggggaag

SEQ ID NO: 164860 - RNA, 83 nt, Homo sapiens
aaggacccggggcggaaaagcaaagggaaggccaaagaaacaagacaagggaagcccggaagccgccagagaggcaaacccag

SEQ ID NO: 164861 - RNA, 67 nt, Homo sapiens
gacagcccgcccccagacgacaaaggcgcaaggcaggcagggcgagaggccgcccccacgcccgcca

SEQ ID NO: 164862 - RNA, 82 nt, Homo sapiens
gaagcagaagaaaaggagaaggaaagcgaaggggaaggcgccgaagaggacgaaggagggccagacaaggggaacacaagag

SEQ ID NO: 164863 - RNA, 75 nt, Homo sapiens
gaccacgacgaggccggggcacaggcgccggaagcagacaaaaccaggcaggcgaagcaaaaaaaaacaggaaga

SEQ ID NO: 164864 - RNA, 78 nt, Homo sapiens
cggcagagacccagcaggaagcccagaagccagccagacagggcacacagggaccaagaagccccggggacacgcgag

SEQ ID NO: 164865 - RNA, 59 nt, Homo sapiens
caggaccgcggcggcgaacacaggagagcagaaaagagacgcagacacaagaacaaaac

SEQ ID NO: 164866 - RNA, 70 nt, Homo sapiens
aaccgagacacaaagggaaagcggccggcagcgcgacagccacccgggggagggcagaaaccacccagcc

SEQ ID NO: 164867 - RNA, 87 nt, Homo sapiens
gccccggccggcccggaggagcggccgcgccgccgcgcgagaggaagcaaacgaacacgcgcagcgcagaggcccggcagccccaag

SEQ ID NO: 164868 - RNA, 74 nt, Homo sapiens
aacaggggcaaggacagaccacggaccgcagcgcaagacacgccaagaagaacgccaagccagcacaaagggga

SEQ ID NO: 164869 - RNA, 61 nt, Homo sapiens
cgagacgcgcaggcaccgcagaccccgcccggcggcccgacccaagaagacggcccagcag

SEQ ID NO: 164870 - RNA, 80 nt, Homo sapiens
aagacccagccagaccagggacaaagagcaaacagacagggccgcaggaccaccgcaaggcggcagagcggggaaaccca

SEQ ID NO: 164871 - RNA, 84 nt, Homo sapiens
caggggcccccaccacccggaggagcagcccgccccgccgggggagacgacccccgccaggcgaaccgaagaagcaggacacgc

SEQ ID NO: 164872 - RNA, 85 nt, Homo sapiens
aggagagcgagaggcccgcaggagaaggagcacagcaagcgggagcaggcagaccaaaggaacagaagccagggccggaaaacca

SEQ ID NO: 164873 - RNA, 63 nt, Homo sapiens
gcgagcaggaagcaacccagcggcccggccacaggacgaacggaagaccgaaacaaggacccc

SEQ ID NO: 164874 - RNA, 82 nt, Homo sapiens
ccgggagcgagcccaggcggcagggcgacccggagggacagaccgcggaccccaaaggcaccgacggaaaaccagacccgac

SEQ ID NO: 164875 - RNA, 35 nt, Homo sapiens
gcgcaccccacgcggccggaagaggaggacgcagc

SEQ ID NO: 164876 - RNA, 84 nt, Homo sapiens
ccggaggaggcgaagcgagaggacaggccagcgcgggccgccagcggcggccaccacagcgccgcagcccagcgaggcccaggg

SEQ ID NO: 164877 - RNA, 59 nt, Homo sapiens
aaggagagagccagagaaaggacgagcagcaagcagggagcaagggccaaaggaaccgc

SEQ ID NO: 164878 - RNA, 44 nt, Homo sapiens
gggaggcaccagcgccgcagagcacggcagcaagaaggagcgac

SEQ ID NO: 164879 - RNA, 84 nt, Homo sapiens
ccccgcgccgccgaccccccggcgccgcgccggcggcggaaggagggccccggagcagccacaccaccgaggccccacccagca

SEQ ID NO: 164880 - RNA, 72 nt, Homo sapiens
gagacgcgagcgcccccgaaccgccgcccgcggcggccggcacgagggcaagaagacaagccccggaccgcg

SEQ ID NO: 164881 - RNA, 65 nt, Homo sapiens
gaggacaggaagggaacgggaaagcgcaacaggacccaaacaggaaggggagaaaagaccaaacg

SEQ ID NO: 164882 - RNA, 75 nt, Homo sapiens
cgaacgcggagagcacgccagaaggcccgggcacgggaggacggaggcacaggaggaggagaggacacgggaccc

SEQ ID NO: 164883 - RNA, 64 nt, Homo sapiens
gacaaagggaaccacgacagacacaaggagggagaacagcacaagcaaagaggagacggacgcg

SEQ ID NO: 164884 - RNA, 82 nt, Homo sapiens
gggcgccaaacaggccacagcaccgggaccaagaagccaggcccagggccacaggccagcaaccaggagggagacgagacaa

SEQ ID NO: 164885 - RNA, 75 nt, Homo sapiens
gacgaaaaaaagagagcagggacagaaacagacaaaaaaggaggcacccaaaagcaagcgcgggaagcgacaccc

SEQ ID NO: 164886 - RNA, 77 nt, Homo sapiens
cagcccagcccagcacaccaggagaaccagcaaacacagaaaccggaacgaccaggaggagagagagagccagaaga

SEQ ID NO: 164887 - RNA, 67 nt, Homo sapiens
gcgaaaaaacaggaggacacaagacaccggacaaggacggacaacccacagaaggagacaaaggaaa

SEQ ID NO: 164888 - RNA, 100 nt, Homo sapiens
cgcggagcgcccggggcggcccggcgcggcacagcgccgccagcagggccgaccagaggagaaggagaaacggaggacgcccccacacaagccaacacgg

SEQ ID NO: 164889 - RNA, 81 nt, Homo sapiens
aaacccagcgaccgacgaccggccacaggaggagaagaagagccgccggcgccggccccgccaccagacgcacgaggcccg

SEQ ID NO: 164890 - RNA, 87 nt, Homo sapiens
ggggacaggccacccccagacggggagaagagcaggccccagcacccgcagagcagacacgcgagacaacggacgacacagaaggcc

SEQ ID NO: 164891 - RNA, 75 nt, Homo sapiens
gaccgcgcgcccgcccggcccgcacgccaagcacggggggcaggccaccgcaccgaccacgacaccccgggcgag

SEQ ID NO: 164892 - RNA, 78 nt, Homo sapiens
cggcagggccgaggacccgaccgaccagggcggggcacccgcaggacaagggcccccaaagcaacgggccaccagaga

SEQ ID NO: 164893 - RNA, 77 nt, Homo sapiens
gaggcgcaaacgaagaaggaaaagccgaagaccaaagacacgacagagcaccgaagacgacacagaggcagccgcaa

SEQ ID NO: 164894 - RNA, 75 nt, Homo sapiens
agccagcccgacgagcggcccggaccggacagaggccgccgcagcagcaacggaaacagaccagaccagcacaca

SEQ ID NO: 164895 - RNA, 65 nt, Homo sapiens
gcgaacacgccgcggcccgcgggcaaacaccagcaacacccgggacaaaaacgggggccaccacc

SEQ ID NO: 164896 - RNA, 77 nt, Homo sapiens
cgagacagcacagcagccagaaggaggaagggaggacccaagcaagggcaaaagcagcgagagcaagcagaacggaa

SEQ ID NO: 164897 - RNA, 71 nt, Homo sapiens
caaaaacaggcgaggcccgccaagcgcccccgggcacgagagcggacgagccaaggccgggaggaacagga

SEQ ID NO: 164898 - RNA, 83 nt, Homo sapiens
acagggccacaccgaggcaacaccgggaaccggcagaggagggacagcacccccgccggccaggcaaaccagaggagaccaga

SEQ ID NO: 164899 - RNA, 74 nt, Homo sapiens
gagcgagggggggcgcgccggaaaccggagcgcgcagcagcggcgcgagggcggcccgcagaagagcacagaag

SEQ ID NO: 164900 - RNA, 82 nt, Homo sapiens
gaccccgcccgaggcccccacaagaagcagcggacgcgcccccaagaaaggaaaacacacgagcgccagaaacacgagacca

SEQ ID NO: 164901 - RNA, 68 nt, Homo sapiens
aacagaaagagcaacagcagggcaacagcaacggggcggcacacaaggagcgaagggcagggagaacg

SEQ ID NO: 164902 - RNA, 51 nt, Homo sapiens
cggaggggacgaagacaaaaaccagcacccagaaccggagagcccagaacg

SEQ ID NO: 164903 - RNA, 75 nt, Homo sapiens
gagaggcagcagggagggagaaaggcaaggagggcgccagcccagacagagacgaaagggaagggagggggagcg

SEQ ID NO: 164904 - RNA, 63 nt, Homo sapiens
ggcaccgcccggggacgaaagcaggaagaagccaagaggagaaagaagcgacacccacacgaa

SEQ ID NO: 164905 - RNA, 58 nt, Homo sapiens
accaagaaccagaaacggaggccaaggcaaaagacgaaaaccaccggaacggcgaaga

SEQ ID NO: 164906 - RNA, 67 nt, Homo sapiens
gaccaagaaccaggacgggggagaagacccaaaccagaaagaaccaggggaaacccgcaggaacaga

SEQ ID NO: 164907 - RNA, 56 nt, Homo sapiens
aaggaagaagaagaagcgcaaagaagcaacacaaaaaccagggcaccggagcaccg

SEQ ID NO: 164908 - RNA, 79 nt, Homo sapiens
ccacacacgcgcacaagcccaacagccagggccaggcgcagacccccaagaggaggaccacacaacgaccgggcccaca

SEQ ID NO: 164909 - RNA, 75 nt, Homo sapiens
gccgcagaagaaagggcaacagcccggcggaggccggaccaaccgcgaaaagggacaaggaaaacaagacgacag

SEQ ID NO: 164910 - RNA, 67 nt, Homo sapiens
gaacaagaggggacagaaagacgggacggacagggaaagagacaaagaccagacagaagggcagagg

SEQ ID NO: 164911 - RNA, 62 nt, Homo sapiens
ggcgccgccagagaaccccagcaggacccccagagggacagcagccacgccgcaacaaccgc

SEQ ID NO: 164912 - RNA, 62 nt, Homo sapiens
gaggaaaaaaggagcaaaaggaacacaccgcgaacgaaacggcaaaaaaaaaacaaagccac

SEQ ID NO: 164913 - RNA, 79 nt, Homo sapiens
cggggcaccaaagccaacacaaaaggccaaggacagcgccaagagcccaaaagggagcccccggaagggagaggccggg

SEQ ID NO: 164914 - RNA, 66 nt, Homo sapiens
gcccccgcgcagccaggagagagcccaaacaggaaggaagaggaaccggaggaagcccaagagcca

SEQ ID NO: 164915 - RNA, 61 nt, Homo sapiens
cacgacccggcagcggccgggaaccagcgagcaggcgagaggggagccagccaagacacgg

SEQ ID NO: 164916 - RNA, 42 nt, Homo sapiens
cgccaccggcccgacccagggaagcagggaaaggccggagag

SEQ ID NO: 164917 - RNA, 71 nt, Homo sapiens
acaaggcaccgcacgagagggaagggaggacaccagagaaagagaagaagggcaagaaaacagaggaaaag

SEQ ID NO: 164918 - RNA, 71 nt, Homo sapiens
aaaggaagcccccgcagagcagcgccagagaaagaaccaaccacacacccaacaagaaagggaaaaggggg

SEQ ID NO: 164919 - RNA, 76 nt, Homo sapiens
gcaaaccaaccagaaagaggagcaggcggagacacaggcccgacaaagcgggacaaagggggggggaggagacaac

SEQ ID NO: 164920 - RNA, 75 nt, Homo sapiens
aaggaccccacccagccccgggacacagccggccccggacccccgcggaacagaggagggcagagaagcaaagac

SEQ ID NO: 164921 - RNA, 74 nt, Homo sapiens
ccaagagggagccaggagacaaccaggagagacaaagccgccacccacgcgcagcgaagcaggcgaacgaggcc

SEQ ID NO: 164922 - RNA, 77 nt, Homo sapiens
aaaagaaaccccccaccccaacgggccccagcgccaaccaaaccgaaagccagaagaagcaacccaggcacccccaa

SEQ ID NO: 164923 - RNA, 70 nt, Homo sapiens
aggaggcaccagacgccggcaacaaagaacacacggaagggcgcagcgaggaggggaagccccccgcagg

SEQ ID NO: 164924 - RNA, 74 nt, Homo sapiens
ggacgagaacgggccagaaccaagggggaaaggaaaagaggagaccccaagggaaacagaaaccgaaaagggaa

SEQ ID NO: 164925 - RNA, 69 nt, Homo sapiens
ggaaaggcgcaggcagaggacagaggacgcgccgggccagagagggaagacacccaggaaaaggaagcg

SEQ ID NO: 164926 - RNA, 63 nt, Homo sapiens
caggaccgaaaaacagagcaaggaggggaggccacgccccgaaagagaagaaaaaacgcaaga

SEQ ID NO: 164927 - RNA, 81 nt, Homo sapiens
aggccgggcccgcgccgccagaaccagagcggcgcggaagcgcgccggcagacccgaccaggaggccagagaggagcccac

SEQ ID NO: 164928 - RNA, 69 nt, Homo sapiens
caccgaaaaaagaccaggcaagaccaggaggaagaagacagaagagcccgcgaacggaagcggagcgga

SEQ ID NO: 164929 - RNA, 72 nt, Homo sapiens
aagcaaggccgcggggggagaccccaccaccgcggacccccggccaagccgagacccccagggcgagcaaag

SEQ ID NO: 164930 - RNA, 73 nt, Homo sapiens
gccaaggaaaaggacgagaacgccgcgacagaaagaaggaggcagaaagggagccccaagagagagggccaag

SEQ ID NO: 164931 - RNA, 86 nt, Homo sapiens
gaaaggacgaaaaggggcggaagaaaaacaaacacacgcaaaggagaaaggaaccgacagagcacagcaaggaggaaacagcaagg

SEQ ID NO: 164932 - RNA, 81 nt, Homo sapiens
acagaacagcacgaccagaggggaagccaagcaaacgcagaaggacgcccacgagcaaccaagaaacaccggcagagagag

SEQ ID NO: 164933 - RNA, 58 nt, Homo sapiens
accgaagccacgcccccacagaaccaacaagaacggaacgggaaaaccagcagagacg

SEQ ID NO: 164934 - RNA, 74 nt, Homo sapiens
cagaaacagcgggccgagggaaagagcaggcgggcagaggaaccaaaacacgggccagcacagagccaacaacg

SEQ ID NO: 164935 - RNA, 68 nt, Homo sapiens
cacaagacacagcagggacacgagacggcagacccagcgccggggcaccgaggaagagaaccaaggca

SEQ ID NO: 164936 - RNA, 78 nt, Homo sapiens
ccggaaaaccaaccagaagacgaacaaacagcaagaaagaccacaagaccagaccgccagaagcagcgcgacggagag

SEQ ID NO: 164937 - RNA, 81 nt, Homo sapiens
gcggccgagcaggcgagcgaacgacggcccacgacgaccaagaccacccccgagcaagaagccacccccgggcccccagcc

SEQ ID NO: 164938 - RNA, 78 nt, Homo sapiens
ggcgcgcgaaggagcggaagaaggcaggccaaaccaccgaccagcaaggaagagaaaggaaccgcccgaacccggacc

SEQ ID NO: 164939 - RNA, 55 nt, Homo sapiens
gacggacagccagccaaacacacgccaggagaaaagcagccacgaacaaacacaa

SEQ ID NO: 164940 - RNA, 64 nt, Homo sapiens
cgggggagcccacaggagccagaacgaggaaccccagagaggacagaagccaaccaggcagcag

SEQ ID NO: 164941 - RNA, 71 nt, Homo sapiens
caggaccggccgaagacaccccccccccggaccagaggaagaggaacaggcccggccacagccacggagaa

SEQ ID NO: 164942 - RNA, 93 nt, Homo sapiens
gccggggagcgcggcacacggcgacggccggagaagcgcaccgggcaagaggaagaaacagcgcccccaccccaccccagccccaggagcgcc

SEQ ID NO: 164943 - RNA, 78 nt, Homo sapiens
ccaagccgcacaggcaggcccaggaaaagcagcagcaacgggaacgaagagagaaagcaaacacgggaccaagacaag

SEQ ID NO: 164944 - RNA, 70 nt, Homo sapiens
gagcccgacacggggcagacaaacacaggacaaaaacgcggaggggaccagagaccaaaaaaaaaacgcg

SEQ ID NO: 164945 - RNA, 78 nt, Homo sapiens
cagcggaaacagaagaaggagccgagaagaagaaggcggagaacggaaaagcaccaggaagcagagaggaccgcagaa

SEQ ID NO: 164946 - RNA, 79 nt, Homo sapiens
accccccggaaagcaccaacaccagagcgaggcagcaggggaagcgcaagcccacgcaaaacacgggcaaaggagccgc

SEQ ID NO: 164947 - RNA, 79 nt, Homo sapiens
ggccacgcgcggcggccgaaagccaagaggaggcgcgagggcaacccgggaacgaggcccccaggcgcgaggcaacccg

SEQ ID NO: 164948 - RNA, 74 nt, Homo sapiens
cgcccgaggaacgaaaacgggaagaggcgaacccagacagcggagcagaccaccgcccagcaaaaagcggcgga

SEQ ID NO: 164949 - RNA, 68 nt, Homo sapiens
gaccagcgggaggccagaggaagggcagcaaaaggagcacgaaagaaagaagaaccggggagaccaga

SEQ ID NO: 164950 - RNA, 85 nt, Homo sapiens
aacacaagaaaacccccccgaggcaccacgccaccgagcacaaacccacgaagccaacgcccaggaggaggcaaaacagacagaa

SEQ ID NO: 164951 - RNA, 67 nt, Homo sapiens
cacaaaaaaggaagcgaaacaggagacaggacgggccagaagagcagaaggcgcggagcccaggaag

SEQ ID NO: 164952 - RNA, 55 nt, Homo sapiens
cccagagaaccacacacacaggagcgcccagcagccccaaggaggacgcagcacc

SEQ ID NO: 164953 - RNA, 36 nt, Homo sapiens
gacaagacaaggccgcggcaaccagaaaacggggag

SEQ ID NO: 164954 - RNA, 63 nt, Homo sapiens
cagccaaagcaggccgccgccccccgaggagaccgggcccggaagcccggagcgagagcgaga

SEQ ID NO: 164955 - RNA, 76 nt, Homo sapiens
gaccaagaaccagggcccgaaaacggccagcagccccgacgcaaaccccagcaccagcaggcggacagcacaccca

SEQ ID NO: 164956 - RNA, 74 nt, Homo sapiens
caaggagaaacacagaacagaacgaccgagcagagccccagagacagaaagaagacaggagggacccacccaac

SEQ ID NO: 164957 - RNA, 76 nt, Homo sapiens
aggccaggcagggagcagggaccagcgacgcacccgcagcaaccaccggagggcgcagagaagagacagagcggaa

SEQ ID NO: 164958 - RNA, 38 nt, Homo sapiens
ggcaaagggcaaagacggacccacggggaacaacaaga

SEQ ID NO: 164959 - RNA, 78 nt, Homo sapiens
ggaaagaagcgacgaggcaacgccgacggaacgaggaggagccaggaaagaagagaagccgcagacggggagaaacaa

SEQ ID NO: 164960 - RNA, 63 nt, Homo sapiens
aagcgccaacacagcccaggcccagcacggcaaagcaagacccacaggaccgcgaacaaggag

SEQ ID NO: 164961 - RNA, 71 nt, Homo sapiens
gggaagcaccacagccaccacaccaagacaccaggggagaccgggcaaaaggaaaaaggaaaccgggcggg

SEQ ID NO: 164962 - RNA, 64 nt, Homo sapiens
ccacgcagccccccacgcgcaggagagaccgcacgcagggccacagcagcacgaggacagcccg

SEQ ID NO: 164963 - RNA, 85 nt, Homo sapiens
cggaccgccgcagccgggcccggggccgacagccccccaggcgaagggagggccgccccaaccgacgcaccagccggaggaggag

SEQ ID NO: 164964 - RNA, 67 nt, Homo sapiens
ggaccccgcccggcagccgaaaaagaagagcacaagaccagcagacgaccacagcaaccccaaaccc

SEQ ID NO: 164965 - RNA, 75 nt, Homo sapiens
gccggcgcaggcgccccaacggcaggggaggagaaacagcggggaaaggggccaccccaggacggcagaacagcc

SEQ ID NO: 164966 - RNA, 78 nt, Homo sapiens
gccgcaccgccccccccggagcgcggccgggggaaccaaggcccccgaggagacgggcccagcacaggcagcgcaggc

SEQ ID NO: 164967 - RNA, 57 nt, Homo sapiens
aaagggagcaaagagaggcgcaaaggacgggcggacacagcaaggcacaggagagaa

SEQ ID NO: 164968 - RNA, 78 nt, Homo sapiens
agccaacccaccaaacaagaagggagagaggaccagaaccagaccggaaagcaccaggcaaagaaaaaaacaggagcc

SEQ ID NO: 164969 - RNA, 80 nt, Homo sapiens
agcgccacccagaaacacagagggaacccgagcgcagaggggaagcagaggacccaggcgaacagcaaggaggggacaaa

SEQ ID NO: 164970 - RNA, 77 nt, Homo sapiens
aagcccagcgccgagaagagaaacccccaggaaacaacacagcaaaggaaacagcaggacggcgcccggacccccgc

SEQ ID NO: 164971 - RNA, 81 nt, Homo sapiens
gcaaagacccagaacaccaagcaaagaagaggagcacaacagggagaacaagaaaagcgaagccaagacaggagaagaggc

SEQ ID NO: 164972 - RNA, 78 nt, Homo sapiens
cggccccggcgagacggagaaggcaaaggagcaacagcagcaacgcagcagcggcagaggagcaagaggggggggccc

SEQ ID NO: 164973 - RNA, 84 nt, Homo sapiens
gcccggcccggccccgggacaggggcgacgccggggcgccggcgagggggggccccagcccggccgaacgggcgcacgacacaa

SEQ ID NO: 164974 - RNA, 83 nt, Homo sapiens
cggcaccgccgccaccagcgaccccagccggaagccgcggacagccgggccgaacgcggaaaagacgacaacccccccggcgg

SEQ ID NO: 164975 - RNA, 100 nt, Homo sapiens
cccccggccgcggccccgaggggccaacgggccccggcaacgagggcaaggggaagggaccgcagggcccggcaaagggccccggacaaagaggagaacc

SEQ ID NO: 164976 - RNA, 54 nt, Homo sapiens
ccacagcggaacacacaacacacaggggcacggagaagagaaaagggaaggcac

SEQ ID NO: 164977 - RNA, 85 nt, Homo sapiens
acgcgcaacagggccgcacgcaagggacaccacaccgcccaccgggaacagggcaacacacaagcccaacaacaaggccaggcag

SEQ ID NO: 164978 - RNA, 81 nt, Homo sapiens
acacggcacacaccagcaggcgcagaacgagggacaaccaagggaagaagcagaagcaagcccagggcaaggaccgggaaa

SEQ ID NO: 164979 - RNA, 85 nt, Homo sapiens
caacggggaagggagagagagcaggaagcggcggcgaacgcggccgaacccggcgccggccccagccccgccgcgccgccagccg

SEQ ID NO: 164980 - RNA, 87 nt, Homo sapiens
ccgcaggcacccgggcccccgcccgacgggggcaaccggacagagaagcccaagagaagcaggaggagcagcgcagcggcagggccg

SEQ ID NO: 164981 - RNA, 61 nt, Homo sapiens
acaacccccggagacaacaaccgcgggcacccacggaaaagcggcaggagaaggcggaggg

SEQ ID NO: 164982 - RNA, 73 nt, Homo sapiens
cggggggcccaagcaaggccggaagaagagcgcagagggcggagaacggaaaagcaccaggaagcagagagga

SEQ ID NO: 164983 - RNA, 61 nt, Homo sapiens
cgagccgcgagagggccggcaggcccgggaagggccgaaaaggaaaaggagccagggcgga

SEQ ID NO: 164984 - RNA, 74 nt, Homo sapiens
gacggcggcgcggcggcggcgggacccggggaggacgggaacaggaccggaaacggaaccccacaacggcgagg

SEQ ID NO: 164985 - RNA, 72 nt, Homo sapiens
ccaaagacaccgaaagcaagaacacgggaggacgcagggagaagcaggaccccgggcccggggcaggaggaa

SEQ ID NO: 164986 - RNA, 84 nt, Homo sapiens
acgccggaacaaggaccgcacccgccacggcaagccccaaggacggggcccacgaggccagaggacgccgggcaagagcgccag

SEQ ID NO: 164987 - RNA, 66 nt, Homo sapiens
gcggagccacccaaccaaggccaagcaggaagcacgccgggaacgaagcacacggagaagcgggcc

SEQ ID NO: 164988 - RNA, 84 nt, Homo sapiens
cgggaaaggcggagccaccggccggcgaagacccagggcgaccccaacacaagagcaagcaaaccaaccaccagaaaaagaaac

SEQ ID NO: 164989 - RNA, 72 nt, Homo sapiens
gagcgacagagacggagcggagaacacgagcgggcaccggacgggaacggagccccccgcacaggacaacca

SEQ ID NO: 164990 - RNA, 53 nt, Homo sapiens
cacaagaccccgccgcacaacgcaggaacacagaaacgccccgggccagccgc

SEQ ID NO: 164991 - RNA, 70 nt, Homo sapiens
aacggcgagaagaaaagccacccccgcacaacaccggggacaggggaggcccccaggaccacagagccca

SEQ ID NO: 164992 - RNA, 69 nt, Homo sapiens
gggaagcccccggagaccagacgcccgcggagggaaggcacagcccagaagaacaggcggcgggcagag

SEQ ID NO: 164993 - RNA, 80 nt, Homo sapiens
aagaaagacgcaaagcccggccaggggaggcagccgggaggccacagaggggcggcacaggcagccgacggaaggaacgg

SEQ ID NO: 164994 - RNA, 41 nt, Homo sapiens
ccaagccaccggagcgggaggagaagaggagccggacggca

SEQ ID NO: 164995 - RNA, 78 nt, Homo sapiens
cgccgccgcgcggagagaaagaccagggggaggaagcgggcccgcacacaccaaaaccccccaggggaccccaagagg

SEQ ID NO: 164996 - RNA, 72 nt, Homo sapiens
ggggacgggccagcaagacacagaaagccgaaaacgaccaagccacaccaacccaggacgacaacgaagccg

SEQ ID NO: 164997 - RNA, 60 nt, Homo sapiens
cgcgccgccccgggcggccgcgggcggaacaccagcaggaaaaaagagcggcagaaggcc

SEQ ID NO: 164998 - RNA, 81 nt, Homo sapiens
cggaccccgccccgacgaggacgaccaacaggcagcagcgggccccgccaccggcacaccgaaggcccggacgaggggcag

SEQ ID NO: 164999 - RNA, 62 nt, Homo sapiens
ggcagacgagcggaggacacccaacccggggaccaagaaaggcccagggaccaaagcccgga

SEQ ID NO: 165000 - RNA, 73 nt, Homo sapiens
agagcggagacacccaggaggcagaagccaggaaaagggcagaaggggacacacgagccaaaacggaagaggc

SEQ ID NO: 165001 - RNA, 61 nt, Homo sapiens
caaaaacaaaacgaaccaggacggcaaaacgaaaacaaacggaagagagggcagcaagaaa

SEQ ID NO: 165002 - RNA, 59 nt, Homo sapiens
ggaaggaaaacccacccagacccagagggaacccaccagaaaacgacacacaaacgcag

SEQ ID NO: 165003 - RNA, 63 nt, Homo sapiens
acccagagcaaccagaaccgcaaccaacaacgacagggggggaggagggacaacacacaacgc

SEQ ID NO: 165004 - RNA, 59 nt, Homo sapiens
ggaaccccaagcgacgcaggcagaagcgagacggcaaggaacaagggggcgcaacagcc

SEQ ID NO: 165005 - RNA, 86 nt, Homo sapiens
ccgcgaggaaaagcccagcggcccgccaggcccggcaaaagcgcaggcagagagaaagaaagcaagggcaacacgaaggacacaga

SEQ ID NO: 165006 - RNA, 76 nt, Homo sapiens
gaaggaccaagaaccagcagaaaaagggacagggcaggcgaaggaacgaggaaaaacggaacggcagagaaggccg

SEQ ID NO: 165007 - RNA, 41 nt, Homo sapiens
gggagcagcggggaagcgaagaggggaacgagaagccacac

SEQ ID NO: 165008 - RNA, 80 nt, Homo sapiens
cccgacccgaccccaaaagagacggacgcacaggaaggaaaaagaccgagggcagaggcaacccggaggacacaggacca

SEQ ID NO: 165009 - RNA, 76 nt, Homo sapiens
aggcccccgccggacgggagcaagcgacccggccggacccaccgaccaggcccagcagccacagggaccagcaggc

SEQ ID NO: 165010 - RNA, 77 nt, Homo sapiens
ggcaccggcgagccgggacgcgcggaacaaggaaacccaccgagggcgcgcaacacgcagaagaggacgcacccgga

SEQ ID NO: 165011 - RNA, 81 nt, Homo sapiens
ggacaaggacagacagccaccaaccggacagcaccaacggaaccaaaaagcgaaaacagggacccagaagaaccacgcgca

SEQ ID NO: 165012 - RNA, 81 nt, Homo sapiens
gagcgaaccagaccaaaaacgcaacaacagacggggagccgccaccaaaagcagacggaaaacccacggggaagaccacac

SEQ ID NO: 165013 - RNA, 90 nt, Homo sapiens
cgccccggccccgggagccgggggcagaggcgcagagccccaggaggcgccgggaccagggcagggaccccggaaccgaagggcgacaaa

SEQ ID NO: 165014 - RNA, 78 nt, Homo sapiens
cggcagccaacagagcagaggcacccagccacggcaaaggcaaaccaaacgcaagaccagggcggagaaaagcaagga

SEQ ID NO: 165015 - RNA, 72 nt, Homo sapiens
ggaaccagagggaagcgcggacggaggcagcggggcagcacagggcagagcagaaccccggggcacggaaag

SEQ ID NO: 165016 - RNA, 77 nt, Homo sapiens
agggaaggcgcgaggaggaaaggaggacgagggaagaaaacgccagagaagcagagcagcccggagcgaggggagac

SEQ ID NO: 165017 - RNA, 66 nt, Homo sapiens
cgcgacacgcggaggaaacaccccagaaagggggggccgaagaagccagggggaggaaagcagaca

SEQ ID NO: 165018 - RNA, 37 nt, Homo sapiens
accggggagggaaagaaagagaaggaaggccagaaag

SEQ ID NO: 165019 - RNA, 53 nt, Homo sapiens
aaggaaccgaccaagcagaaggcccgggggaagaggaaaagggagaaggccaa

SEQ ID NO: 165020 - RNA, 83 nt, Homo sapiens
caccccggggagccaaccaggagccgaggagaaaaacaccccaaaacgcggagagagggacagagcgaggcagaagccaggga

SEQ ID NO: 165021 - RNA, 81 nt, Homo sapiens
caggacgcgccgcgccccaaggggggcggggggccaccgaacgcgcacgccggcagacaagcagaccggaagaccgacgga

SEQ ID NO: 165022 - RNA, 80 nt, Homo sapiens
cgagcggaggagaccagcagaagggcaggagccgaagcggcaccggaggggagcggagagggcagaggagcggcggaggg

SEQ ID NO: 165023 - RNA, 81 nt, Homo sapiens
cagaagagcggacacacacggagagacccgacccacaggacccagcggggcaagagacgacgagccacgcgccgagaacgc

SEQ ID NO: 165024 - RNA, 90 nt, Homo sapiens
ccacgccggacacagcccccaggaagccaccaacgccacaccgacccacaggagcgcccgcggaggagcgcccgggacagcagaccacag

SEQ ID NO: 165025 - RNA, 64 nt, Homo sapiens
caacagcccgacaaccagaagccagcgaccgcgcccggccacacccaggccgcggcgccacgga

SEQ ID NO: 165026 - RNA, 81 nt, Homo sapiens
gcgcccccagaggagaagacccgacggaccccagcgccgggcagcgaagggacagacccagaagagcaccagcagccaaaa

SEQ ID NO: 165027 - RNA, 108 nt, Homo sapiens
aaacagggccggccgcagagcccaccggaaggagaaggaagaggagcggagacgggcccgcgcgcacggcgcgggacacagggcgccacaaaagaaaccaagaagaaa

SEQ ID NO: 165028 - RNA, 54 nt, Homo sapiens
acaagcaccccccagcaacagcgaaggacacgaaggaggaaacggaggagggga

SEQ ID NO: 165029 - RNA, 84 nt, Homo sapiens
cgccaccggcggggggcgagcaacaccgggaaaccaaggcaccccggagcccggaaagggccacaccagaggcagcaagagacc

SEQ ID NO: 165030 - RNA, 71 nt, Homo sapiens
gaagcaaagaaggcacaggaaaccagcggcgagagagagcaaagaaaaagcagcacgaaggcgaggaacca

SEQ ID NO: 165031 - RNA, 84 nt, Homo sapiens
gggcgcaggagaagaggcggcccacagagacaaagcaggaggacacaagaagggaggaaaggcggacccaggaaccaccacggg

SEQ ID NO: 165032 - RNA, 70 nt, Homo sapiens
accagcagaagcgcacccgaagacacaaacgcaaaagcaagggccaagaagcccggacaaagccagagaa

SEQ ID NO: 165033 - RNA, 72 nt, Homo sapiens
gcacgaaagcaaaagagggagaagaccgaaccccaagaaagaagcccacagggcagccggcggaccgagcaa

SEQ ID NO: 165034 - RNA, 65 nt, Homo sapiens
ccgacgccaggcagcgcccccaaacgggaggccacccacgccccagaaacacccgaggaggcgca

SEQ ID NO: 165035 - RNA, 78 nt, Homo sapiens
accggcggagacgggcggccggccgacccccgcgcgacggcgacgcgggaggccagagcccaaaaggcagagcgagga

SEQ ID NO: 165036 - RNA, 79 nt, Homo sapiens
ggaggcgggagaaggcgcaacgcggcgcggaggagcggagggaagcaagcagaaaacaagccaaaaaacaacggaaacc

SEQ ID NO: 165037 - RNA, 97 nt, Homo sapiens
gaaggaaacgggacaaacggcgggcccgggaagcgggccggcagcgcccggacgaggagagcggaaaacgccagcggacaaaagggacgcgcggaga

SEQ ID NO: 165038 - RNA, 68 nt, Homo sapiens
gcacccggggacaagcgcgggaacggcgcggaagggaaacacaaagaagacaccagaagggccagcac

SEQ ID NO: 165039 - RNA, 63 nt, Homo sapiens
accagaaaaaccaagacgcagcgcacagcccagcggaggacacgccggggcagggcagccgag

SEQ ID NO: 165040 - RNA, 81 nt, Homo sapiens
cgagacaaaggcaccaggccaccacagaaacaaaagcaacaaagagggcaaccagcagcaaccagaaccccgaccccaccc

SEQ ID NO: 165041 - RNA, 42 nt, Homo sapiens
gagaaaacggcaaggaagcacgacgacaacagggagacggac

SEQ ID NO: 165042 - RNA, 67 nt, Homo sapiens
caggacccgcgccgcacggccggcacccaaccaaaggacggaggggggaggagcaggcccccaccgc

SEQ ID NO: 165043 - RNA, 77 nt, Homo sapiens
ggcaggaaaggacagcagaaaaacccagaagcagaacgaaggaaaccacagcccacacagaaaacacgagccacgaa

SEQ ID NO: 165044 - RNA, 81 nt, Homo sapiens
gaagcgaggagacagaagacagagccaaacacccaggacggccccgcgccacagggccacacaccacgccggccaggcaca

SEQ ID NO: 165045 - RNA, 82 nt, Homo sapiens
aaggaaccggaaggggacgccaggaccaccaggacgcaagggaggaaaccggagagagaacccaaaagcaacagaaagcagc

SEQ ID NO: 165046 - RNA, 68 nt, Homo sapiens
gaccaggaggcgagcaacagggacacgcacccacacacccacaggggagaagcaaagcaaaccaaaac

SEQ ID NO: 165047 - RNA, 82 nt, Homo sapiens
gacggcaggcgcacggaacagcgaggccagcaggagacggagccacggagcagaccaagagcgagccagagcaaagcacccc

SEQ ID NO: 165048 - RNA, 34 nt, Homo sapiens
ccgcccgagggaccagaacacaccgaagacaaag

SEQ ID NO: 165049 - RNA, 66 nt, Homo sapiens
agggcacgaagaacaggggaagggcaagaacaccggcagaaccgagaggcccccggaggcaccaag

SEQ ID NO: 165050 - RNA, 72 nt, Homo sapiens
gagccgaaacccagggacggcgcaccacagcccagccaagccagcagacggggccagcaagcacaccaagag

SEQ ID NO: 165051 - RNA, 72 nt, Homo sapiens
gccggagagacacagcacagcaacgccgcacaagaaagaaaggccaaggggagagcccgagcgacgaacgag

SEQ ID NO: 165052 - RNA, 79 nt, Homo sapiens
acggcacggacccaaccgcggcggagggcacggccacagggaaagagaggaaggaacagagccacagagaaaaagacgc

SEQ ID NO: 165053 - RNA, 76 nt, Homo sapiens
caccgcccccccccggcgcgccacggaggggcagccacccccgccccgacaagggaccgggcgggccccgcaggaa

SEQ ID NO: 165054 - RNA, 100 nt, Homo sapiens
gccgccggagccgcgcgcagccaggccgagaaccccagcggagaaccaccgcacaagagccaagaacaagggccgcgagggaacgcgccacacaccgagg

SEQ ID NO: 165055 - RNA, 71 nt, Homo sapiens
gccccagaacaccccccgagccaaggggacaggagggaaaccagaccacccccgagcaagagacaggcgaa

SEQ ID NO: 165056 - RNA, 59 nt, Homo sapiens
acagggagggacacacccaagcacggaccaaaggaggcaggcccagaaaaagggaaacc

SEQ ID NO: 165057 - RNA, 70 nt, Homo sapiens
ccacggcgccccgcaagagcaaggacccagggagagaggaacccaacaagaagaaaaccagcaaagaaaa

SEQ ID NO: 165058 - RNA, 80 nt, Homo sapiens
ggacgcaccgcccaccacgcccaccggccaacaccacaggacacacaaggagcccagaggagagaaaccaaacgagaaag

SEQ ID NO: 165059 - RNA, 72 nt, Homo sapiens
agaaggaccaagaaccagaaaacccacccggaaagacggccgagcggccaccagacgggcacccaccagagc

SEQ ID NO: 165060 - RNA, 70 nt, Homo sapiens
ggggacccgccccccagaggacacgcgcgccgagcgggaacccaaccagcggaaacgagggaaagagcac

SEQ ID NO: 165061 - RNA, 78 nt, Homo sapiens
ggacgcaagaccggacagcggggcgccccgcacaggcggcagcagagaccggcagcaccaccacccacccggaacacc

SEQ ID NO: 165062 - RNA, 73 nt, Homo sapiens
ccgcgcagaagaccaaaacagggacagggcgaagcacagaaccagcacgcgcaggacaagcgagcacaaaaga

SEQ ID NO: 165063 - RNA, 82 nt, Homo sapiens
caaggcaaaggcggcaggcacagaggcaagagggaaaggaggcccagaaagagaaacacgccccagcgaaaggacgcccacc

SEQ ID NO: 165064 - RNA, 77 nt, Homo sapiens
cggagcgacggcagcccccaggccaaagaacgccaaccgaaagaaagacaaagagggccaaaagaaagagacaacaa

SEQ ID NO: 165065 - RNA, 75 nt, Homo sapiens
cgacggcaaagggcgggggcaaagcggagaccgccaagccaggccggaccccccagcggggccccagaggagcag

SEQ ID NO: 165066 - RNA, 89 nt, Homo sapiens
accggacaagcacaggaggccagcgggccgaggaggaaaaccaacggcccggaggaccacagcccaggggccccaggcgaaacccagcc

SEQ ID NO: 165067 - RNA, 82 nt, Homo sapiens
accgggcgacgaggcacagcgcgcaagaagggaggaaaacaacggagcacgcaaagcaagccggcaacgggacaagcaggac

SEQ ID NO: 165068 - RNA, 67 nt, Homo sapiens
gaagaacccacagagacggaacagccccaagccggaaacccaggaacggaaacagaacggaacagcc

SEQ ID NO: 165069 - RNA, 70 nt, Homo sapiens
caaagaggacgcccgcgccccccagaggaggccccccagccacgggaacacaaggagcacagaacgccca

SEQ ID NO: 165070 - RNA, 74 nt, Homo sapiens
agagaaaagagggacgccaaacacccaaaggaccggcagacagagagggccgagagcacgaagggggggacagg

SEQ ID NO: 165071 - RNA, 81 nt, Homo sapiens
ggcggcggagcggggaggccaaaggcccggcaggaaccggaacaacccacagggcagagcggagaagccgcacgaaggaca

SEQ ID NO: 165072 - RNA, 90 nt, Homo sapiens
cgaacagagccgggagcaagaagaacacccagagcaccgacgagaggcggggaaaaaaaggggaccaccggcagagacaaccaaaaaggc

SEQ ID NO: 165073 - RNA, 67 nt, Homo sapiens
gagaggaaaaccagcggggcacgcgcagcgagcccgcaaggcaaggaggaccaagcgaaaaacccag

SEQ ID NO: 165074 - RNA, 38 nt, Homo sapiens
gccagacggacccgaagggaaggacaggcagcggcaga

SEQ ID NO: 165075 - RNA, 75 nt, Homo sapiens
ccccccggacagaaggccggccgggacccgaggcgagaggcgcggcgaccagcggagaccaggccaaaaggaggg

SEQ ID NO: 165076 - RNA, 55 nt, Homo sapiens
gagcccacaaggaagaacaaagacgagccagacccccagccgacaggaacgaaga

SEQ ID NO: 165077 - RNA, 57 nt, Homo sapiens
acgaagaagagccggaacaagcaacggcagaaaaggaaaagcgacacaccaggcgcc

SEQ ID NO: 165078 - RNA, 47 nt, Homo sapiens
caacaaacggcgagcaggcagacaagaggcagaacaaaagacaagga

SEQ ID NO: 165079 - RNA, 82 nt, Homo sapiens
acgggacagagcggcgggacagcccaagggccagcaccgcgcccaggcagagccagaccagccccacagccgacaacccagg

SEQ ID NO: 165080 - RNA, 78 nt, Homo sapiens
acaccggacccaacgggaaaggaagcccagggccgaaaagaaaacaggagaaccacccgccaacagcaagcgacccaa

SEQ ID NO: 165081 - RNA, 80 nt, Homo sapiens
cacaggacaaacagggggggagacgggccccacacagcccaaggcaggggaaagcgcagggggggaaagaccaggagcag

SEQ ID NO: 165082 - RNA, 77 nt, Homo sapiens
agcaagagccaggacaccggaagcgggaaaaggacacgcccaccaagaaagaaccggaaaggggaccgggccaggaa

SEQ ID NO: 165083 - RNA, 76 nt, Homo sapiens
gaaaacggcagcgaaggccacaacagcaaggaccagacaggcaaaacaccagagaaaaaccaagccgggcacaaca

SEQ ID NO: 165084 - RNA, 80 nt, Homo sapiens
aaggccggacgggcggccggcggccagggggagaggcggaggccaggcagcgagaagcccaccagaggcgaggggaggag

SEQ ID NO: 165085 - RNA, 62 nt, Homo sapiens
cagacagaaggagcaggaaccaaaggcgggagggacaggagaacaggcacgaccccaccggc

SEQ ID NO: 165086 - RNA, 82 nt, Homo sapiens
ggaagggcagaagggacccaagccgaacaccccaccagaccacccagcaagcccacaaaaaaggcacaagcagggacagccc

SEQ ID NO: 165087 - RNA, 54 nt, Homo sapiens
ggcaaccgcaaacgaaaagccaggaaaccagagacagaaaaggcaaaccgcacg

SEQ ID NO: 165088 - RNA, 79 nt, Homo sapiens
ggcgcgacgagacccgaccagcgggggcgcggcggccgcgcagccacccaagacgcgaccggaaaggagagagagacag

SEQ ID NO: 165089 - RNA, 75 nt, Homo sapiens
cgggaccgcaggcccggaaggccagggaggaccccagacaccggagacgggaaagagccgaaggacgaggcaagc

SEQ ID NO: 165090 - RNA, 73 nt, Homo sapiens
cgggcgcacaacccaaggagcgacaccagggccacacgaacccagcagaagccagccgccacgccgagccagc

SEQ ID NO: 165091 - RNA, 88 nt, Homo sapiens
ccggccgccacgcgcccccagccccgcaggcccaaccgccgccagcaccaggccagcaccaccgcagcaagcagagcccggacaggcc

SEQ ID NO: 165092 - RNA, 77 nt, Homo sapiens
accgcacagaacaaagaccagcccaacacagacaagagagggacaagcaggagccaggagccggagacgaccaaaca

SEQ ID NO: 165093 - RNA, 81 nt, Homo sapiens
cggcgagcaaacgagggccggggagcggaccaagacccgggaagacaagggaggcgaggacggacaaaaggaaacggacgg

SEQ ID NO: 165094 - RNA, 74 nt, Homo sapiens
ccggcgggccccgggcacaccaacaagccacgaccggggagcaggagaagcaaccaacgcggaaacggggcaca

SEQ ID NO: 165095 - RNA, 78 nt, Homo sapiens
gggcggggaccgcgccgggccgggagccgcgagcggcgccgcccccgcggagccccagacaccaggcgccgagaaggc

SEQ ID NO: 165096 - RNA, 69 nt, Homo sapiens
caagaccacagcgcgcggcccccacaccacacagagagcgacgcggcaaagccgccggcacagcccacc

SEQ ID NO: 165097 - RNA, 78 nt, Homo sapiens
acaacggccgaagcgccgagccagagccagggaacggaggagcgagccacggcggcaagaaaggcacaaaaggcagga

SEQ ID NO: 165098 - RNA, 56 nt, Homo sapiens
gaggggccacggaccaaccgagagcaccagaggagccacgcgccaagcgaagggca

SEQ ID NO: 165099 - RNA, 99 nt, Homo sapiens
cgggggaaaagagacaccgacaagacaccacggacgagagacaaacgccgaaggaaaaaggagcagacaccagggcgggcgcacagccagccagccggg

SEQ ID NO: 165100 - RNA, 60 nt, Homo sapiens
agagccaggggccgggagggcgccagaccaagacacccaggagaaagacagcggggaaaa

SEQ ID NO: 165101 - RNA, 57 nt, Homo sapiens
gcagggcgcccccggccaccgggagggcagaggccagcacaaccacgagaagggcag

SEQ ID NO: 165102 - RNA, 81 nt, Homo sapiens
ccaacgcgccgaacgggaaagagccacgggggccagaccggagcagccccagccaccgaggggaggcacaacaaggacagc

SEQ ID NO: 165103 - RNA, 79 nt, Homo sapiens
cgacccccggggagccagcgagcccccccgacacggccaaggagggccagaaggccccccaggcccacagagggaaaca

SEQ ID NO: 165104 - RNA, 80 nt, Homo sapiens
cgcgcggcgcggcggccgggccccgagacggggacgaaggcacgcccgaaaaggaaaaggccaaagaagggacagaccgc

SEQ ID NO: 165105 - RNA, 77 nt, Homo sapiens
gggcccagaggcccagggaggcaggggcagaaacagagaaggaacaggcaagaacgcgcaacacagcgaccgacggg

SEQ ID NO: 165106 - RNA, 76 nt, Homo sapiens
cccacccggcggaggaacagccaggagagagagaaagggaacgggacaagcagaacgcaggaggccaacgccacca

SEQ ID NO: 165107 - RNA, 82 nt, Homo sapiens
cgaccgagccggagcgccgacgaccaagaggcgaagaggcaccagacccggaggagcagcaccccggcaggcagaccagccg

SEQ ID NO: 165108 - RNA, 67 nt, Homo sapiens
aaacacagaccacacaaggaccaacaggggaaccaaaggacagcacagaccgagcaggggccaaacc

SEQ ID NO: 165109 - RNA, 69 nt, Homo sapiens
agcccagccaacaacgccgagaagcgcagcgcggaaaccagcgacacgagacaaaaaaacaaagaagca

SEQ ID NO: 165110 - RNA, 70 nt, Homo sapiens
ggcccccaacagcgccgagggagacggggggcggccccggacacgacccgaggacagcagagccccggac

SEQ ID NO: 165111 - RNA, 63 nt, Homo sapiens
agcgagggggggcgcgccggaaaccggagcgcgcagcagggacaagagaaaaaaagggcgggc

SEQ ID NO: 165112 - RNA, 36 nt, Homo sapiens
ccgagcaacccaggccagccaaaacggcagacccac

SEQ ID NO: 165113 - RNA, 73 nt, Homo sapiens
gggaagaaagaagcagcgccagaccccgggcgacacaggccagagaagccgaggaccggacgagcaaagcgaa

SEQ ID NO: 165114 - RNA, 76 nt, Homo sapiens
ccccccccacacacgcaccgcacagcaccggagaaccaggcggccggggggggcacagagccccggaagacagccc

SEQ ID NO: 165115 - RNA, 73 nt, Homo sapiens
agaaacagggaaacacaaaggacgaccgacaaaagaaggggaacaaagcagaagccagaaaccgcaaaacaga

SEQ ID NO: 165116 - RNA, 69 nt, Homo sapiens
ccgcggccccccgcgcgcccgggaacgagaccagggggcagcacgccgaaggagagaccagacaacagg

SEQ ID NO: 165117 - RNA, 81 nt, Homo sapiens
cgggggacgcggggacaccacaagcacggaggaggcggcacccagacaccggggacaccgggccccaggacaaggaccagg

SEQ ID NO: 165118 - RNA, 75 nt, Homo sapiens
cccgacgaggagcgcggcgagacacggccaggacaccaacaggaaaaggaagccagagacacgaggagaaagccc

SEQ ID NO: 165119 - RNA, 80 nt, Homo sapiens
caccggcggaacccagcaaggcgcagacggggaagcggagccaacagccagggcccggagcggggcgcaaaacaggaccc

SEQ ID NO: 165120 - RNA, 63 nt, Homo sapiens
ccggagaccccgaaaacggaagcgcagggagaaggaagaggggaaaagccaccaaaacaggac

SEQ ID NO: 165121 - RNA, 79 nt, Homo sapiens
aaaaacaaacagccgaagaggaaaacaccgcccagcaacagaaccgggaccagggagcagaaaccaggaaacacacaaa

SEQ ID NO: 165122 - RNA, 76 nt, Homo sapiens
cgcagagcgaagcagaagacgaggacacgcagccggccgaggaccccccaggaaaaagggccaccccgaccaccgg

SEQ ID NO: 165123 - RNA, 77 nt, Homo sapiens
gggccgggccggagcgccacagcacagcaagcaacccggccgaggggggcaccccgggaggaagcaacgggccaccg

SEQ ID NO: 165124 - RNA, 73 nt, Homo sapiens
cgacaaaaaccaaaccggagaagcgaaggacagggacaagcgcacagcggagaaagcagcgcggccaggaggc

SEQ ID NO: 165125 - RNA, 67 nt, Homo sapiens
gaagaaccccccgggagccagaccggcaccgaagacccggggacgagagccccggcacaaacggacc

SEQ ID NO: 165126 - RNA, 68 nt, Homo sapiens
caacagcccccacaccccggcaccgagacaaccaagcaagggccagcagaaaccgacagaaaagcgca

SEQ ID NO: 165127 - RNA, 38 nt, Homo sapiens
acggccaggcccaggccaggaccacggcacgaacagga

SEQ ID NO: 165128 - RNA, 51 nt, Homo sapiens
gcggagaaaaggaaccggccccggagcgacagaaacgaaaggccccaagcc

SEQ ID NO: 165129 - RNA, 61 nt, Homo sapiens
caccccgcaccagaaacagcgcgacccacgcacgagcccgcgggaccggacgagcccccca

SEQ ID NO: 165130 - RNA, 67 nt, Homo sapiens
gcgcggacacgagcgcggggacggacagaggaagcagccggaaaaacaaccacaaaacgaacgaaga

SEQ ID NO: 165131 - RNA, 68 nt, Homo sapiens
accaaaacggccccgccgccccagccgcaggggaagcccagccagggggagacagcgggagagccaaa

SEQ ID NO: 165132 - RNA, 39 nt, Homo sapiens
cccccagcagcagggaagggcggcacccaagaacgaggc

SEQ ID NO: 165133 - RNA, 82 nt, Homo sapiens
aagcgccaaaggaccggacccagagaagaggaaaaccaccgggcagcggaagaccaccaaaagcaggaaaacgagacggcgg

SEQ ID NO: 165134 - RNA, 81 nt, Homo sapiens
caaacggaggaaagggcacagaggggcccagaaaacaagccagcagggcaacacagagggccacacggggaaacggccaac

SEQ ID NO: 165135 - RNA, 78 nt, Homo sapiens
gagaggcggcggacgggccggagggaggagaaagccccgcggacagcccgcccgcggaggagccacgcaaccagcccg

SEQ ID NO: 165136 - RNA, 76 nt, Homo sapiens
ggaggaaccgccggcaaacgccgcccccggccacgacccccgaagagccgcgccgccaggggcccggccaggcccc

SEQ ID NO: 165137 - RNA, 66 nt, Homo sapiens
ccaaaaagaccggcaaaaaagaaagaggaaacaggacggcagagagaacgacaagcaagagcaagc

SEQ ID NO: 165138 - RNA, 80 nt, Homo sapiens
gggggaccagccagccccccaggaccacagccccgaccgagagaaccagcgccaggaaagaaccacaagcgccaaagaac

SEQ ID NO: 165139 - RNA, 81 nt, Homo sapiens
gaagaagaaaaaaccaaaaacgccaagacagcaagcaagcagaagaggaacagaagaagcagagcagagacggagcagcag

SEQ ID NO: 165140 - RNA, 72 nt, Homo sapiens
caggggccagcagggagcagccgaccgagccaggacaaacaggcacaagaaaggacgaggcggaacgcaggc

SEQ ID NO: 165141 - RNA, 75 nt, Homo sapiens
acagaacaacaggagaagccaccagccccagaacgggcgcagaagcaggaacagcaggcaagaaaggcaaccaca

SEQ ID NO: 165142 - RNA, 73 nt, Homo sapiens
ccgcagcaaaaacggccacacgacacacaggacagcagaccacagcccggcaggcccaaaaacccaaagggac

SEQ ID NO: 165143 - RNA, 48 nt, Homo sapiens
cacagccccagaaggggaaagcacgaaccaagaacagagaccagcaca

SEQ ID NO: 165144 - RNA, 79 nt, Homo sapiens
gcggcggagcaccagggcacaagacgagcacgggcagacggccagagagaaggcgcgagggcgccacaccaaagcacgc

SEQ ID NO: 165145 - RNA, 73 nt, Homo sapiens
aggagaagcacggaccaaagcagcgcaacccagccacaggccgggaacgggaaacgcgcgccgagaagccacc

SEQ ID NO: 165146 - RNA, 83 nt, Homo sapiens
ccgcaagaaaaaaggggagacacgcgaaagcaaaccgaggaggccaggcgaaccagccgaaaaaggagaaaccaaaaggaaaa

SEQ ID NO: 165147 - RNA, 39 nt, Homo sapiens
cgagaccaccggcaacacgagagacagggcaacggagcc

SEQ ID NO: 165148 - RNA, 59 nt, Homo sapiens
acagagccacacaagaaggccagcacgacgaggaccaaccagagccggcagaggaaggg

SEQ ID NO: 165149 - RNA, 87 nt, Homo sapiens
cagacgcccccaaaacccccgccggccggacccacggagccggcagcccagcacccgaggacagcagcggacggccggaccaagagg

SEQ ID NO: 165150 - RNA, 69 nt, Homo sapiens
cgaagaggcggaccggacggccgaggccaaacgccgcaaacccgccaaccagcaagcagaagccgccca

SEQ ID NO: 165151 - RNA, 110 nt, Homo sapiens
caaaagaccaaagcacgcagacgacgagcgagccaaaaggggggacacccaagcgacgagagaacagcccccaggagaggcaggcgcaaaggaggcaacggaggagcagc

SEQ ID NO: 165152 - RNA, 50 nt, Homo sapiens
ccacgacaggacggacccggaagcaaacaggggcaggaaaacccaaaacg

SEQ ID NO: 165153 - RNA, 62 nt, Homo sapiens
cggacggcggggccgggcccccggccgcaagcagggggccaaagggcgagggcacaaaaaac

SEQ ID NO: 165154 - RNA, 68 nt, Homo sapiens
cggcggaaggaggcgaggaccaggccaaagaaaggcaaaacccaagagaacgcccaaagaaaaaaaga

SEQ ID NO: 165155 - RNA, 51 nt, Homo sapiens
ggccaggggaccggacaaaccagcccaaacagccagagaggaaccacacgg

SEQ ID NO: 165156 - RNA, 52 nt, Homo sapiens
caaaggggcagggaaaaaaaggaaccgaacaagacagaaagcgggacgcgca

SEQ ID NO: 165157 - RNA, 81 nt, Homo sapiens
aagacaagcagacaaggagcaaaggaggcaagagcacccacagcgcgagccgccgcacgcaggggcgaaacgaccggagaa

SEQ ID NO: 165158 - RNA, 42 nt, Homo sapiens
cagaagaccccagacagcaagcaccaaaggagaagcggagca

SEQ ID NO: 165159 - RNA, 83 nt, Homo sapiens
gccaaccgcaaccagacgccagcgggacgaggaccgagaccgcggccgggaccgaggagggagacgcgcacggaccggaacca

SEQ ID NO: 165160 - RNA, 80 nt, Homo sapiens
ggggacccaggagccggccagcgcgccggagccgccgagggcacacaggcccgagcacaaacacaagaaacgcacgcccg

SEQ ID NO: 165161 - RNA, 83 nt, Homo sapiens
cggcaacagggcggcggggaaaaggccaagccaaaggaggccgccgcgccgcgacgacagggccggggaagaccaccaagcca

SEQ ID NO: 165162 - RNA, 54 nt, Homo sapiens
cggcccccaggcccaacacgcccaacgggacgaggaaaccggagaagccgcgag

SEQ ID NO: 165163 - RNA, 59 nt, Homo sapiens
cagagcgcggccaagaacagaggaaggggccaaagaggggccagagcaaaaaagggcga

SEQ ID NO: 165164 - RNA, 77 nt, Homo sapiens
gagaacaggaagcaaacccaagcaaagaccagcgccggaacaccaccgccaggccaggaagcgagagcagaaaacgc

SEQ ID NO: 165165 - RNA, 85 nt, Homo sapiens
cggaaacggaaccgggaggcgacgcacacgagcggaggcgaaggccggcaagaagccaacggagaaccaaggccaagaccagaac

SEQ ID NO: 165166 - RNA, 66 nt, Homo sapiens
ccggcacaaacggaccaccagaaagcaccccacaggacgccaaagggagaagagaagaaaaaacag

SEQ ID NO: 165167 - RNA, 53 nt, Homo sapiens
agaagagccgccccacacgcagaaaagggagagcgggcaaggaagaggaacac

SEQ ID NO: 165168 - RNA, 59 nt, Homo sapiens
aagacacggaggaacaaagggcggacggcagacaggcagcaaccggccccgcccaccag

SEQ ID NO: 165169 - RNA, 59 nt, Homo sapiens
cggcccacacacccagccgggacgcaggagaaaacgaaggaaggaggacccgaggagag

SEQ ID NO: 165170 - RNA, 114 nt, Homo sapiens
aaaaggggcggagaaacaacagaagaacgagcagaaagaacagaccacccgaaacagccagagcggagccacacaccgagggagagaagaacaaggggagccaagaacaaagca

SEQ ID NO: 165171 - RNA, 71 nt, Homo sapiens
ggcagcaaagcagcccgaacccagaaacccagaccagaaggaaaacacaccaggcacagaaaggccccccg

SEQ ID NO: 165172 - RNA, 77 nt, Homo sapiens
gaaggaagacagacacaggggccagaagccacgaccagaccgcaaaacaaggacagaacaccgaccagggccagagg

SEQ ID NO: 165173 - RNA, 59 nt, Homo sapiens
gcagaagagccccgccagagaggcggagcaaaagcaggacgaggagagaggacgagagg

SEQ ID NO: 165174 - RNA, 79 nt, Homo sapiens
cgcgaagagaaggggggaaacccaagaaaaccacccgggggcacgaggcacccgcagacaaggcccagcaggggggggg

SEQ ID NO: 165175 - RNA, 81 nt, Homo sapiens
acaagaccgaccggacgcgccgcccgaggccgcggccgccgcagcgagggcgccgagcaaccgacgcagaaaacagacaca

SEQ ID NO: 165176 - RNA, 74 nt, Homo sapiens
cggacagggccaagccgaaccgagccggggcgccgggagcagggaccgcgggacgcgcccgaccagccgaggcg

SEQ ID NO: 165177 - RNA, 72 nt, Homo sapiens
gggccaaaggcagcgacccccacgacagcccgccccccagaggcaggcccaaacgaccaagccaacagcgaa

SEQ ID NO: 165178 - RNA, 78 nt, Homo sapiens
ccagggaagaagaaacccaagcccacccgggcagcgcacccagacaccggggcccaaggaggggacacgccagaaagg

SEQ ID NO: 165179 - RNA, 70 nt, Homo sapiens
agaaggcaggggcggacaaggcgagacgagggaggcaagcacgcaaggcgaagccaggccgcaccagacc

SEQ ID NO: 165180 - RNA, 78 nt, Homo sapiens
acaaggaccagaaaagagaccgggcagggcagcaggaggggggaagcaggaggcacggaggggaccccagaaccccag

SEQ ID NO: 165181 - RNA, 38 nt, Homo sapiens
agccggccgcgcccccagcgggcgccacggaaaggagg

SEQ ID NO: 165182 - RNA, 61 nt, Homo sapiens
acaaggcagaccggccagcaagagagccgggaaccagcagcagggacgcaccaaaacggac

SEQ ID NO: 165183 - RNA, 79 nt, Homo sapiens
aagccccgcagcagcagcccaaaggaaggcagaaaagaaccaggaaggaagcaggcaaaaccagaaccacccagaacac

SEQ ID NO: 165184 - RNA, 71 nt, Homo sapiens
caaaagagacaggacacaacgcgaaggcgggggcgcaacacacagagggagaaaacccccagcgaagaacc

SEQ ID NO: 165185 - RNA, 64 nt, Homo sapiens
gcgagacaagaaggaaaaagagaagaccagaccaaggcagggaggcgccaaggagaccgggaga

SEQ ID NO: 165186 - RNA, 84 nt, Homo sapiens
ccgaggcgaccgcggaccggcgccccggcgcgaagaggcggaccggacggccgaggccagggcaggacagcagcccgcaacagg

SEQ ID NO: 165187 - RNA, 86 nt, Homo sapiens
ggagggggagggcccaagcaccccccaggacgccgccgagccggacgccggaaggaggaggaagaggcaaacagaccgcgacgaag

SEQ ID NO: 165188 - RNA, 98 nt, Homo sapiens
gagggggcgagggcgaagacgagaccagccgcgaacggaaaagaagaccccggagcaggcccgaaaggcggaccagccagaggccccgaaggcacaga

SEQ ID NO: 165189 - RNA, 84 nt, Homo sapiens
ggcagcagcgcagccggaggaaggccgggggaccccacgccggagacagggcgcagccagaaaacccacagagggaagccgccc

SEQ ID NO: 165190 - RNA, 79 nt, Homo sapiens
agcccgcgagcacaggagcgagagaggaccccggacacgaaagccgggaaaggaccgcaccagcaggggcccgaccagg

SEQ ID NO: 165191 - RNA, 82 nt, Homo sapiens
ccacgccgggcccaggcacgcgaccgcccgacaacaggaccgggagcgaaacccccgcagggccagccgcccagcagggacg

SEQ ID NO: 165192 - RNA, 54 nt, Homo sapiens
gcggagacagcgagacccgccaggagcaaagaccagcgcacccagggcgcgacc

SEQ ID NO: 165193 - RNA, 84 nt, Homo sapiens
agagaaaaaggacaaaagccaagaggaggacagcgcacacagcaagcacgaggggaccaaagccaacccagccaggcaacagca

SEQ ID NO: 165194 - RNA, 85 nt, Homo sapiens
ggcggccgccgccgggagagcccggggcagagcagagggccacagcacgaggcccggaagggaccgccacgaccagcagcccgga

SEQ ID NO: 165195 - RNA, 79 nt, Homo sapiens
accgaagcagcaagccgacacaacagccgacaaacgggagccaaggagccgaggaaggacagggcgggaggggccaccg

SEQ ID NO: 165196 - RNA, 78 nt, Homo sapiens
ggcaccgggccgggcccgaccccaggccaaggaccaccacaacaccagaaacgcgaacccacggccaaaacagccgga

SEQ ID NO: 165197 - RNA, 74 nt, Homo sapiens
agaaagaaaaaggggccaagaaccgcaagacacagggagaccgcgcgccggccacaacaagagccaaaccacga

SEQ ID NO: 165198 - RNA, 77 nt, Homo sapiens
aaagagaagaagacaggaaaaaaaaaacaccgagacagccccagcacagaggaaagagaaagagccagcaagaggaa

SEQ ID NO: 165199 - RNA, 69 nt, Homo sapiens
aggcgccaacaccaagagaaaccgacgcgggaaaaacgaccgcaagaccaggaacagaaaggagagcaa

SEQ ID NO: 165200 - RNA, 79 nt, Homo sapiens
gccggagcgggcggagacgccgggcagccgaacggagggcgacggagggagaacaggccaagacaaccgggaaagcagc

SEQ ID NO: 165201 - RNA, 51 nt, Homo sapiens
cgaggcgagaaaagacgcccacacgagaaaagaaagccagaaggaaggaag

SEQ ID NO: 165202 - RNA, 55 nt, Homo sapiens
ggagaaccccacggagaaccagagccggacaggacaaaaggacacaacccacaca

SEQ ID NO: 165203 - RNA, 74 nt, Homo sapiens
gaaaaacgagcagaaagaagccaggaacggaaaacagccccaaagcagcagaccgaagaaagaagacccgcaac

SEQ ID NO: 165204 - RNA, 83 nt, Homo sapiens
ccccgccgccgggccggggccccgcagcgacaacaggaggccggaagacccaaagcgagggccaggacaggacaggaccggac

SEQ ID NO: 165205 - RNA, 53 nt, Homo sapiens
acacagcaccacacgcccccaagacaacgaagcccgcggccccaccagccaga

SEQ ID NO: 165206 - RNA, 78 nt, Homo sapiens
cgggaaggccaagcgacgcacccggggaaggcgaccggcagaacaccagcgcagaggccagagcaacagaaacgaggg

SEQ ID NO: 165207 - RNA, 55 nt, Homo sapiens
aaaaaaacgagacggaaagagcaagccacacagcaggcccgggcgggaaggacac

SEQ ID NO: 165208 - RNA, 68 nt, Homo sapiens
agacaggaccacgaagccaagagagaacgaaaccccaaagcgcaggccaggggcggacccaggcaacg

SEQ ID NO: 165209 - RNA, 91 nt, Homo sapiens
gccgagaggccggcgggacgcgggcgccaggaccggccgaacgcagagcaggaggccacgcgcagccccggaagagccacccagacccacc

SEQ ID NO: 165210 - RNA, 72 nt, Homo sapiens
aacagacaaccaccaaaggggaaacagaaacaagaagcaggagaagaggcgggccgaccacaccaagcgcca

SEQ ID NO: 165211 - RNA, 81 nt, Homo sapiens
ccaggcggaccgcgggccgccgccggccgcaaggccggggcccccgcgcccgaaaagccgcagggccccgggcgcgggagc

SEQ ID NO: 165212 - RNA, 77 nt, Homo sapiens
ggacagggaaaaaggcgccaaagcacagagcaagcggacaaaagaaggagaacaaccgcaacgaacaaacaggagac

SEQ ID NO: 165213 - RNA, 54 nt, Homo sapiens
gcggcgcccgagcggcagaccgaccaccccccagaggcaaacggagaggcaaga

SEQ ID NO: 165214 - RNA, 54 nt, Homo sapiens
gagaaagacagcccgaacggagaaagagacagaagccgggcaaaccgaccaacg

SEQ ID NO: 165215 - RNA, 92 nt, Homo sapiens
gcccgggaccggccgaaaggcgaggaaccggcggaagcccggccgcgcaaaacgggcggcccgcgcggaggccgcgagaccgcagaaggagc

SEQ ID NO: 165216 - RNA, 68 nt, Homo sapiens
agcaaaaaacgcccacaccagaggccccccacccggcgccccgggccagcgggacaccagcaagcagg

SEQ ID NO: 165217 - RNA, 75 nt, Homo sapiens
ccaggcaggaagagcggccagaggccagcaggccacgcaaggaaagggcacacggcccgaacaagggaacaccag

SEQ ID NO: 165218 - RNA, 53 nt, Homo sapiens
gaacccaaaagccgacaaccccagaaacagggcacacaagcaacagaagaaaa

SEQ ID NO: 165219 - RNA, 49 nt, Homo sapiens
gagcacacgaggggcggccgaggcaccgccgaccccccaccgggccgag

SEQ ID NO: 165220 - RNA, 74 nt, Homo sapiens
acaaaagccaggcacaagaaagcgaaaaggacaggcgcggaggacgaagggacacaccgcagcagccagagcgc

SEQ ID NO: 165221 - RNA, 86 nt, Homo sapiens
aaaggcggacgggaaggcgggagacgagaagccgaaaagcgcagcgagcggagccgccggagggaccgacgggccaagccacgaag

SEQ ID NO: 165222 - RNA, 64 nt, Homo sapiens
gccgcccaccggcacagcggaccccgcccgaaaccagacgacagaaaagaagacaccagaacaa

SEQ ID NO: 165223 - RNA, 57 nt, Homo sapiens
aaaaaggacacggaagggcgcaagaggcagacagacaggcgacgggcagccaacaag

SEQ ID NO: 165224 - RNA, 71 nt, Homo sapiens
acaccaggagagaagcgacagccgcaggggaacaaacagagcaccaagaaagcacgcagccagagcaaccc

SEQ ID NO: 165225 - RNA, 78 nt, Homo sapiens
ggagcaggaccgcacgcggaggcggcgcccgcgccggcagaggccgcccagacagagcacagggagcgggagagccgg

SEQ ID NO: 165226 - RNA, 77 nt, Homo sapiens
gaggagcggagaaccaggaaccgcgcaggggacagagcgggagccaccagcgccaaagggaagccaggagcccgggg

SEQ ID NO: 165227 - RNA, 63 nt, Homo sapiens
gggaggaccaagcacgccccaaagacgagggcccgaggcaccaacgcaaggacccccccccgc

SEQ ID NO: 165228 - RNA, 42 nt, Homo sapiens
aggagggagccaaagggacaccgaaaacgagaaacgaaagag

SEQ ID NO: 165229 - RNA, 77 nt, Homo sapiens
agggaggacagcaaaaaccagggcccacagaggagggaaagcaacggcgcaagcggcggcggcgggcagaggacaca

SEQ ID NO: 165230 - RNA, 74 nt, Homo sapiens
acgaaaaggaaaaggagagagccagagcaagagcggaccgccgaagagagaccaaacaccaagcgcccaggggc

SEQ ID NO: 165231 - RNA, 81 nt, Homo sapiens
ccaccggcaaagaggggcagaacccggccccaaggacaaggcagaagaagaagagcggagaaccgaacaggcgcagggagc

SEQ ID NO: 165232 - RNA, 82 nt, Homo sapiens
ggggcaagagccgcgccggcagggaacgcagggacaccacaccgcccaccgggaacagggcaacacacaagcccaacaacaa

SEQ ID NO: 165233 - RNA, 68 nt, Homo sapiens
gggaccgaacaaggcaaaagggcaaaaagcccgcgccaccggccaagccaggggaccacgggccagcc

SEQ ID NO: 165234 - RNA, 57 nt, Homo sapiens
ggcgagcagccaggccaggagaggaaccagccaggaaaggagaggaaacggagaaaa

SEQ ID NO: 165235 - RNA, 58 nt, Homo sapiens
gcaggaagaagcgaagaggaagagcagcccagaagacagaaaaagagagaagaagaga

SEQ ID NO: 165236 - RNA, 80 nt, Homo sapiens
acaggaggacagcgagaaagggccagccagagcagggggaccgaaaccaaggacccggaaagagacccaggcaagggacc

SEQ ID NO: 165237 - RNA, 67 nt, Homo sapiens
gccagacacagcggaagacgcagagggagacagggaggcccagcgaagagaaagaaaacaagaagcc

SEQ ID NO: 165238 - RNA, 73 nt, Homo sapiens
gggacccgccagcagcgaagaccggcacagaaagaccggacacccgcacacagggaagagaaggacagaggca

SEQ ID NO: 165239 - RNA, 78 nt, Homo sapiens
gacgacaccgcggagcaaggaaaagacccggaaagaagagacacagaggagccacacccccagccagaagaaggccag

SEQ ID NO: 165240 - RNA, 83 nt, Homo sapiens
agcggccgccgcggggccgcggcgcgcccggcccggccggagaagcggagagacaaccggccgccgcagcgccgagaagacac

SEQ ID NO: 165241 - RNA, 80 nt, Homo sapiens
accggaggaccagaggagggacacggagaccggaaaccgagagaaacgaagacgaagaaacagccgcacacagaagaaaa

SEQ ID NO: 165242 - RNA, 84 nt, Homo sapiens
cgggagcaggggacgggggggacagcccaccagcgacgacagcaagagggacgggaagacgcgaccggaaaggagagagagaca

SEQ ID NO: 165243 - RNA, 81 nt, Homo sapiens
ccagacgccggcaacaaagaacacacggaaggaacaagcacacagagacggggacggcaacaacaacaagaaacgggccag

SEQ ID NO: 165244 - RNA, 78 nt, Homo sapiens
cagcggccggagggagggagaggaggaagacggaagcaaccggaggaggagcgacagaaaaggacgggacacggagag

SEQ ID NO: 165245 - RNA, 84 nt, Homo sapiens
cggggcccggaggagggggcagaggccgacgccagccagagagcggagagcgacgcaggggaggacagggaacggcgaggagcc

SEQ ID NO: 165246 - RNA, 68 nt, Homo sapiens
gcccaccgaaggagacccggaggacagaaaggggaggggccacaggcccggacccgaagaagcagcca

SEQ ID NO: 165247 - RNA, 54 nt, Homo sapiens
caaccaccagcagcccccagagcggaacacagggagacgcagccccgcgaaacg

SEQ ID NO: 165248 - RNA, 69 nt, Homo sapiens
gaccgccaagccgccgcgcagccgcgcccggacagggaggcacaagggcagcaaccagaagggcaaaga

SEQ ID NO: 165249 - RNA, 70 nt, Homo sapiens
cgcgacccgggcacccagagcagggaggggacagaacaccggacacgaaaaagaaagcaaagaaccagcc

SEQ ID NO: 165250 - RNA, 68 nt, Homo sapiens
aaagaaaggggggagagccacaggcaaaaggcccagcaggagaccagaagacggccagcccccagacg

SEQ ID NO: 165251 - RNA, 79 nt, Homo sapiens
cgcaggggcgcgcagcgcggggagcgccagacaaaacgggacaaagcgcaaagcacacaaaagcccaaacagacagaac

SEQ ID NO: 165252 - RNA, 86 nt, Homo sapiens
gaggagcgagcgagcgccccagcgagaaggagggagaaaggcgggcccgggaacaggagcagggacggggggaaaagcgcacccgg

SEQ ID NO: 165253 - RNA, 80 nt, Homo sapiens
cgggcgaaaaacggagccaaaccccacccacagcggagacccagagcaccaacgagggccaaagccaggggccaaaaggc

SEQ ID NO: 165254 - RNA, 94 nt, Homo sapiens
caagggaggccggccccccaccgcaccggccggacacaccgaggaaggagaacgaccgccagaagagaagaggaaggagaaaaacaaaaaagag

SEQ ID NO: 165255 - RNA, 79 nt, Homo sapiens
ggacccggagagccccggaggagcggagagcgagcggcaacccggaggcacaggaagagggcggcacgcggccagagag

SEQ ID NO: 165256 - RNA, 92 nt, Homo sapiens
gacgcagcggccagagagcggcacagggcccgcgcaccgcccagagaaaggacagagaaaaaaaaaggaagcagcaagcgcaagagacaaag

SEQ ID NO: 165257 - RNA, 42 nt, Homo sapiens
agaaagcagcccagggcacagacaagaacagagcgccaaaca

SEQ ID NO: 165258 - RNA, 67 nt, Homo sapiens
accagcagagaaacgggaccgcgacgagaagagcaaaacggagcccaaaaaaggaccaacgagcggg

SEQ ID NO: 165259 - RNA, 87 nt, Homo sapiens
aacaccgagcaagaacacccgcaccaacgagaagaaaagaggccagggcaccacaaggacggcaagcgacaagaacaagccccacga

SEQ ID NO: 165260 - RNA, 76 nt, Homo sapiens
cgcacagccgccaccgccagccccagcccgacggagcccagaagggaaagaaaggaaaaaagggagagacaggaaa

SEQ ID NO: 165261 - RNA, 74 nt, Homo sapiens
agacacagagagaacaggaaagagaaggggaagggccccgggagcaaaaacagggagcggcagcaagcaaaacc

SEQ ID NO: 165262 - RNA, 72 nt, Homo sapiens
gcccccaaacgaccgaggggacaggaagaagaaccgcagagaggaaaggcgccacacacccccagcgggggg

SEQ ID NO: 165263 - RNA, 33 nt, Homo sapiens
gagcgcaggacggcagagcagggaaaggacaag

SEQ ID NO: 165264 - RNA, 68 nt, Homo sapiens
aagagaacgaacccgcgacccacccccaggcaagacagccgccacccaacgcaagggaggcagaaagg

SEQ ID NO: 165265 - RNA, 75 nt, Homo sapiens
gaagagcggcccgagccgacgcggggcaagagcccaggccccccagccacccagccccaagagggagcgcgcgcg

SEQ ID NO: 165266 - RNA, 78 nt, Homo sapiens
ggcggcggcggcggcggcgcggcccaaaagaaacagagggaggaccaagccacagggggcccaagcccacgaaaacac

SEQ ID NO: 165267 - RNA, 80 nt, Homo sapiens
gagaaaggcccaccggccgggagggcccagggcggggcccgagggaaaccagacgaaacaacagccaaagacaaacagca

SEQ ID NO: 165268 - RNA, 74 nt, Homo sapiens
ccaaacgccccacgaccagcggagcggcggacaccagaagagaaaagggcaagccagacgcacagggccagcgg

SEQ ID NO: 165269 - RNA, 89 nt, Homo sapiens
cccaaaaaacaaggggcacggcgagaagaacagccaccgggaagcaggcacccgggaaaccaagaagagcccagaacccaaacacggag

SEQ ID NO: 165270 - RNA, 76 nt, Homo sapiens
cgggggcacacagggcggaggacccggggccccgcccccaagcggggggagaggcaccagcaacagaccaaccgca

SEQ ID NO: 165271 - RNA, 83 nt, Homo sapiens
gccagccgcaccagccgcccaagccgcacagccgcggcggcagcagcaggagaggacaggagagacaacggaggcaagaaaga

SEQ ID NO: 165272 - RNA, 85 nt, Homo sapiens
ccgacgacggcagcggggagccaaggaagccggagcaagggagcagccccgggcgcccccggggagggaccggccaagcagggca

SEQ ID NO: 165273 - RNA, 53 nt, Homo sapiens
cgggaagagggcgacaaggaagaacaagagagagaaccaaaaaccgccccgag

SEQ ID NO: 165274 - RNA, 59 nt, Homo sapiens
cagcgccgccagcagggccgaccagcccagagcgacgggcggaaacccaaaccccaagg

SEQ ID NO: 165275 - RNA, 54 nt, Homo sapiens
ggagggccggacgggacccaccacacgcgcccggccaccggacaagaagcaacc

SEQ ID NO: 165276 - RNA, 72 nt, Homo sapiens
ccagcgagaaccgcgcggacaagagggccgacgaggaccacggcccgagagacccgacccaccacgccaacc

SEQ ID NO: 165277 - RNA, 74 nt, Homo sapiens
aagcggagaacaacacacgacgcacggggccaaaacagacccacaacaggccgcaagccagagggaggcggcaa

SEQ ID NO: 165278 - RNA, 71 nt, Homo sapiens
gcgcaccacggagcgggcgcggcggcagcaccggaacaacaggagggagccgagcgcgcccagaagacgac

SEQ ID NO: 165279 - RNA, 88 nt, Homo sapiens
acccaccaggccgcagaccagcgcccgaaggccgacacgcggcccgaggcaacggccacagggcacggagaccaccagggcagaaaaa

SEQ ID NO: 165280 - RNA, 74 nt, Homo sapiens
gcccccgacgcacaaaagccgaaccccaagaaggaccgccgcggcagaggagcccggagaccaaacccacagcc

SEQ ID NO: 165281 - RNA, 70 nt, Homo sapiens
cacgcagcaacacccccacgcggaacacaggcaaaagggaaaggaaacacccagagaaaaacagcccccc

SEQ ID NO: 165282 - RNA, 74 nt, Homo sapiens
ggacagggaaacacaaaaacaacagcaacaaacgaaagccacacacccgaaaacgcggcgaacccgggacaaac

SEQ ID NO: 165283 - RNA, 69 nt, Homo sapiens
ggaacagcgagacacgggacaaaaaccaaagggcggggcacaaagcgaaggcacgaagcggccaccacc

SEQ ID NO: 165284 - RNA, 56 nt, Homo sapiens
agagggagcagcccacggcaaagaagggggcggcgccccgcccggccgagggggag

SEQ ID NO: 165285 - RNA, 88 nt, Homo sapiens
cgaggaccgcccggccagccaggaggcgcgcggaaccggaggaaggggcccgcggaacagagaaccaggagcggcagaccgccgccag

SEQ ID NO: 165286 - RNA, 109 nt, Homo sapiens
aagaaggcccgagcaaagaagagcccgaacaaacaaacacccagaaacaagagggagagccggcagcagaagacagagaagggcgccccggaggaacacaaaggaaaac

SEQ ID NO: 165287 - RNA, 70 nt, Homo sapiens
caccccaccagcccagacaaaggcgagagccacagaaggaggaggggacagcagcaggagcccagcaaag

SEQ ID NO: 165288 - RNA, 78 nt, Homo sapiens
ccccccccaggcagacgggacagcccagaaaccgccaaagacggaaccgccacagcaccaacaacggggcggcacaca

SEQ ID NO: 165289 - RNA, 36 nt, Homo sapiens
gaaaccacaaggccgagagggacagcacggacccca

SEQ ID NO: 165290 - RNA, 104 nt, Homo sapiens
gccggagaacggccaggcggccccgagcggaacggagaaagcgaggaggcaggaaagaagacacccgcaccccaaaagcccagcgaggagaaggaaagcggagg

SEQ ID NO: 165291 - RNA, 90 nt, Homo sapiens
ccgccagcacaaacccgaggaacggcccaaaccaaaaacgcagggcgcaagaccggcccacacagcaggcccccgaggcgggaccccaac

SEQ ID NO: 165292 - RNA, 79 nt, Homo sapiens
ccggaggggccccggaaacagcacgcggccacgcccccacgaccggacggacacccggccagcgacgcccaccggcagg

SEQ ID NO: 165293 - RNA, 78 nt, Homo sapiens
ggaggagcggagcacacgccgcggaggcccacaagccgcgccgaggaggggaaagaaccagacgacaggaaggcacag

SEQ ID NO: 165294 - RNA, 59 nt, Homo sapiens
cgaaaccaaagaaggagccaaaaaaaaggaaagggcccccaaaggcgaagaggaaggag

SEQ ID NO: 165295 - RNA, 58 nt, Homo sapiens
cgccaccaggcacccggaagagcgcggccgaaggaaaagaaggaggccagcgggacac

SEQ ID NO: 165296 - RNA, 76 nt, Homo sapiens
ggcgccagcaaaaccgagggccacggcgagggaggccacggaaacggacagggaacagggcggaaaacaccccaaa

SEQ ID NO: 165297 - RNA, 76 nt, Homo sapiens
aggacaggaagggaacgggaaagcgcaacaggacccaaacaggagaacaagagcgagaaggaacagaagcgcaaga

SEQ ID NO: 165298 - RNA, 73 nt, Homo sapiens
gaacaaaaaaggggcaggagaaagagagaacagaacgggaccgggcagaagaaaacgcaccaaggggcaacaa

SEQ ID NO: 165299 - RNA, 80 nt, Homo sapiens
gccgccgcccgcgccaccggcaggcgcccggggccgcagcgccgaggcccgacccgccgggaggcagcacggcaggagac

SEQ ID NO: 165300 - RNA, 57 nt, Homo sapiens
ccgcccgacccgccaccgccaggccagaaacggaaggacggagcaaggcgccggcca

SEQ ID NO: 165301 - RNA, 73 nt, Homo sapiens
acgcacccccgaagccggacaaagcggcgcacgcacggagacgacgggaggagcgagaccacccggccaacag

SEQ ID NO: 165302 - RNA, 122 nt, Homo sapiens
gcagcggggaggccgcccggcgcagcggggaccggcggcggcgcccaggcacccggcccggacaagcagaccggaagaccgacggaagaccacaccccgagggagcccaggacaccacgaga

SEQ ID NO: 165303 - RNA, 76 nt, Homo sapiens
cccgcgcggggcgcgggcgcggccggaccgcagccgcaagaccgggaccgaggcacgaagacgaaggaagcagcac

SEQ ID NO: 165304 - RNA, 66 nt, Homo sapiens
gggccagcaagacacaggagccccggacacacaggccccaggagggaaccagaccaaccagaagcc

SEQ ID NO: 165305 - RNA, 71 nt, Homo sapiens
caaaagggccaaagaagggagagaggaggaacccaaccggccaggacagcaacaaaccaccggaacacagg

SEQ ID NO: 165306 - RNA, 81 nt, Homo sapiens
ccagcggcaggggcccaccaccgcaagccaagggccccgcaccaccccagcaaccaaacaccacccggacccgcgaccgca

SEQ ID NO: 165307 - RNA, 39 nt, Homo sapiens
cccagcaaagagaagaaggccgagcgcaggaggagggaa

SEQ ID NO: 165308 - RNA, 72 nt, Homo sapiens
ccccgccccgggaccccagagcgcccgagaggaggaggcccgccggcgacggcggaaaacccgaagcagaag

SEQ ID NO: 165309 - RNA, 82 nt, Homo sapiens
acacgaaaccagcccagagaaacaaagcagcgcgccccagaccaccggcagggaacagccgagcagaccgaggaggcccacc

SEQ ID NO: 165310 - RNA, 75 nt, Homo sapiens
caagggcgaaaaaaaagggaagaggagacaccccgggggccccgagcaaaccaggagcagccaggaagagccccc

SEQ ID NO: 165311 - RNA, 75 nt, Homo sapiens
cggaacacagacggacaagagaacaacaaacggcacggcacgaaggaaaccacacggagaccaggaccaccccag

SEQ ID NO: 165312 - RNA, 79 nt, Homo sapiens
cagacggcgcgaggcgcgggcacagggacccggacaaaaggagagggaacaccaaggaagaaggaagacgaccccgcca

SEQ ID NO: 165313 - RNA, 79 nt, Homo sapiens
cgaggcccgcccggcacagggggccccgggggcgccgagggcacaagggcaacgacagaagggcgaagccaacgccaga

SEQ ID NO: 165314 - RNA, 74 nt, Homo sapiens
cagaaggggagcaagaagcaggaaaggccggacaccaggaacaagagcaaagaccaagagccaggggggggggc

SEQ ID NO: 165315 - RNA, 62 nt, Homo sapiens
gagcagccgagaacccggcacaccagggccggaagcccaagcggccccacaccacacacccc

SEQ ID NO: 165316 - RNA, 72 nt, Homo sapiens
gaaacacacagacccgagaaacgggaacgagcacagggggaaggggcccgaccccgaggaaccagcgacaga

SEQ ID NO: 165317 - RNA, 88 nt, Homo sapiens
caggcccgcgaacacacgccgccaccgggaggcccagggaagccacgaggcggccccagcgcgggcgacaggccgacacccccagaga

SEQ ID NO: 165318 - RNA, 72 nt, Homo sapiens
aaacacacgcaggaaaaacccgaacgccccccagaaccggcacccaaaaaaaagcaagagagcccaacaaag

SEQ ID NO: 165319 - RNA, 67 nt, Homo sapiens
ggcagcagggcgccgcgggagaaaaggaggaaaaggcaccgggagagcgccagccaggaaaaccagg

SEQ ID NO: 165320 - RNA, 84 nt, Homo sapiens
gagcggagcaaccggggagaagccggcccgacgccaggaacaggagcgaccaggacacccccgcccgccacggagacggaaggg

SEQ ID NO: 165321 - RNA, 72 nt, Homo sapiens
aaccgaaaacagaaacaaacacaccaggggaaaaagaacgaagacgaagaggacaggacaagcagcacaaga

SEQ ID NO: 165322 - RNA, 81 nt, Homo sapiens
ccagccccagccccaagggcagaggagaagcgcgccgggcacaccgaaggagagagaacaagcagcaaaaagcgaagggcc

SEQ ID NO: 165323 - RNA, 69 nt, Homo sapiens
ggacgccagacaccaaccagaggacaccgaagcgcgaggcgaccaggcggggcaagcagccgcccgcgg

SEQ ID NO: 165324 - RNA, 82 nt, Homo sapiens
aagccgggcggaggagagccaagcaagcccacaccgcggacagagcaaacagcaacaaggagcggggggaccaggagcagag

SEQ ID NO: 165325 - RNA, 81 nt, Homo sapiens
gagcaccccagggcccgggcagaggaagcgggggcaccccccaggcgcggggaggcccagcccgccgcagggccaccccgc

SEQ ID NO: 165326 - RNA, 80 nt, Homo sapiens
gacgggagacagagcgagagagaaacgccaacaaggaagccccccagaaaagaggcgaggcaccacacaacaaaggaacg

SEQ ID NO: 165327 - RNA, 76 nt, Homo sapiens
gagcaagaggcgcagacgcagggcacccggaggaaagcgacacacgacgggccaggaggagaaagacacaggagaa

SEQ ID NO: 165328 - RNA, 77 nt, Homo sapiens
ccccgcccgcgcgaccgcagggcgcccggcaagaagaggccccaggaccggcgaggccccccccccagcagcaaagg

SEQ ID NO: 165329 - RNA, 84 nt, Homo sapiens
gccgccgccgccggcgcggaaggacgaggcgaggcgagaaacgagcgaccggacagaagacagaccgacagacgccaaaccacc

SEQ ID NO: 165330 - RNA, 60 nt, Homo sapiens
gaggcagccaagccgagccgccacccggccaaggcgccaccggaagaaacgggaggggag

SEQ ID NO: 165331 - RNA, 57 nt, Homo sapiens
gaccgggaacaaagcgcagaagggaaaccagcacgagccagggagccgccgggaccg

SEQ ID NO: 165332 - RNA, 62 nt, Homo sapiens
ccaccagaacagccacagaacagaccacagagaagcaggcgaccaggcgcgcgggcaagaaa

SEQ ID NO: 165333 - RNA, 69 nt, Homo sapiens
gacccggacgggacaagggcaagacaccggccgaagcagaagaaacacagacagacaacgcgcaggccc

SEQ ID NO: 165334 - RNA, 76 nt, Homo sapiens
acccccaggcgccgagccagccgcacggccagacagcgagggcaggcgcaaaaacagcagcagaggaagcaaagcg

SEQ ID NO: 165335 - RNA, 80 nt, Homo sapiens
cggcggggaggaggaagaggcggccggcaagagcggcggagcgcaggggagaaccggaagcgggaacagcccgggccgcc

SEQ ID NO: 165336 - RNA, 85 nt, Homo sapiens
caggggagaaacgaacaacccgacccccaaaccacaccagagcgaccaccccaaacaacgccgagacgggcagaaggcacaccac

SEQ ID NO: 165337 - RNA, 83 nt, Homo sapiens
cgaggccgacgcaggggcccggaagggaaacgcgaggcgaaggaccgaaagcacagaacacgggcgaagcagaaccacaccgc

SEQ ID NO: 165338 - RNA, 71 nt, Homo sapiens
gaaaaaaccaacaccccggcagccgggaagaggggacaacaccacagaagaagaaaagaacgcagggaaac

SEQ ID NO: 165339 - RNA, 74 nt, Homo sapiens
acggccgcggcggggcccccccgcgaccccacgagggcaggacccgaggcgccagcagcagcaagaccggggga

SEQ ID NO: 165340 - RNA, 80 nt, Homo sapiens
caacgaacagaagcacaaccagagccggccccggacagagcgggagccaccagcgccaaagggaagccaggagcccgggg

SEQ ID NO: 165341 - RNA, 90 nt, Homo sapiens
ggaagcgcggggggcagaggagcggaggaggcagaagccaggaggggagcccaggcaaggagagcgaccacaccacacagcgcggcccag

SEQ ID NO: 165342 - RNA, 78 nt, Homo sapiens
cgcagagcgccgaggaggcccgcggggcaaccgccacgagacaccaagagagaagggagaccgagccaggccaggaga

SEQ ID NO: 165343 - RNA, 71 nt, Homo sapiens
gacaggccccggcaccaggaaacacgccgcaccagggaggagagaaacgacaccccccacccgaaggaccc

SEQ ID NO: 165344 - RNA, 72 nt, Homo sapiens
caagcagggagaagacggacgaaccacccacaaccaagaggaagaccgcaggaaagcaggaaggcaagaaag

SEQ ID NO: 165345 - RNA, 73 nt, Homo sapiens
cgaccaacgcgagccaccgggaaccagcgagaaggggggccaccccaacgccaacgacgagccagggagaagg

SEQ ID NO: 165346 - RNA, 75 nt, Homo sapiens
ggcagccccccggagcccacgaggcccccagcaccgacggaggcgaaggcacaagaacacccgagaggggggcaa

SEQ ID NO: 165347 - RNA, 75 nt, Homo sapiens
cgcgcgccgcgcccggaccccagggcccgccgagaggggcccccgggaggagagaagcagaaccacgggaaacaa

SEQ ID NO: 165348 - RNA, 89 nt, Homo sapiens
cccccaggaccaacccgagagccagggaccacaccaccaccaccacaaccaaaggccaggaaccaccagagcccggcaaaaccccagga

SEQ ID NO: 165349 - RNA, 59 nt, Homo sapiens
caagaaacagagagcaaacagaaagcaaacaagggacaggcaaccagcaagcagaagga

SEQ ID NO: 165350 - RNA, 86 nt, Homo sapiens
gcccgcgggggagccccgggagccgcacgacacgagaggcgagggacgacagagcaagcggcagagggcaagcgggaaaaagacca

SEQ ID NO: 165351 - RNA, 60 nt, Homo sapiens
ggcaaaaagaaaaccacaaagaaacggggaaagggagcagcaccggccacacccacagca

SEQ ID NO: 165352 - RNA, 76 nt, Homo sapiens
cggcgccgggaggaggccggggccgcgcgagggcgcccagcgaggcccgggcaggcccgaggcggcgcgccggagc

SEQ ID NO: 165353 - RNA, 58 nt, Homo sapiens
caccacacgacggcgcagggcagaaagaccgccccacgccgcagaaggggggaaaagc

SEQ ID NO: 165354 - RNA, 78 nt, Homo sapiens
aggacggccgcaggaacaggcaagggcgaggaagcaggcacgcaagaagaaggaacacgccaaaaagaccagggggaa

SEQ ID NO: 165355 - RNA, 58 nt, Homo sapiens
agcccaccgaaaggagagaagcaggccaaaaagagagaaaaaccagaaagaaaacaga

SEQ ID NO: 165356 - RNA, 65 nt, Homo sapiens
ggcccaagcaaggccggaagaagagcgcagagaggacccaagaagaccagccgaagcccggaaaa

SEQ ID NO: 165357 - RNA, 78 nt, Homo sapiens
aggccagagcccaaaccccaggccaagcagccaccagcagcccccagagcgggaccacagggacagacagccagaggg

SEQ ID NO: 165358 - RNA, 58 nt, Homo sapiens
gaagacaagaagccaaagagcggaggcggcccgcggaggcaaacggagaggcaagacc

SEQ ID NO: 165359 - RNA, 78 nt, Homo sapiens
cgcccgggccacgaggacgcaccagagcacaaagcagggcacagaagccccgacaaaagagaaaaccgaaaaacacgc

SEQ ID NO: 165360 - RNA, 85 nt, Homo sapiens
ggggcgggaggacaggggcagggggaaggagaccgaaaagaccgaagaaacggacgaaagcacagccagagaacaacacacacac

SEQ ID NO: 165361 - RNA, 70 nt, Homo sapiens
gaggaggggaccccaaagacaaggaggagaaaggaaaaaggggacccccaaaagacaagggcaaaacgga

SEQ ID NO: 165362 - RNA, 78 nt, Homo sapiens
gggccccccccagcagaccgcacgggagaaaacaagccaaggagaacccagcccgacggaggaaacccgcaagccggg

SEQ ID NO: 165363 - RNA, 120 nt, Homo sapiens
caggcccgcccggaagaagcgaccaaagcgccgaggaccggcaacagggcggcggggaaaaggccaaacgaccaagaaagcgggacgcggaaaacgggacccgcaggggcccccccggaa

SEQ ID NO: 165364 - RNA, 76 nt, Homo sapiens
ggccagacaggcgagggaccaaggggcgagagacaaacggaagagcggagggagacaggagaacccagacacggag

SEQ ID NO: 165365 - RNA, 82 nt, Homo sapiens
cggggcgcgccaaggacacggcacaccgaccgacggaacaaccaaagaggaggaaaggacgagcacgaggccgcagcgaggc

SEQ ID NO: 165366 - RNA, 76 nt, Homo sapiens
gaggccagacccaaaaccagacgcccgggcagacaagacagaagaggaaaaaacgcagaaaggagggaaaccaagg

SEQ ID NO: 165367 - RNA, 33 nt, Homo sapiens
ggagagcccagagacacgccgggcgaggcgagg

SEQ ID NO: 165368 - RNA, 76 nt, Homo sapiens
agggcagcgagaagcgggggggggcacgggcggcagcaccagaccaagagggcaagcggaaagaccggagagagca

SEQ ID NO: 165369 - RNA, 71 nt, Homo sapiens
gcgcggcgcggggaccgcggcccgagcgcaaacacggccacagcaggcccggcaacaagcggaacccagca

SEQ ID NO: 165370 - RNA, 81 nt, Homo sapiens
cagccgagacaccagcccgaaacaccaccaagggacgacggaggagcacggccgggagcgaagaggcccagaccaccgcac

SEQ ID NO: 165371 - RNA, 79 nt, Homo sapiens
caagagaacaacacagaaccagccagcgaagcagagcagaggagcccagcgagagcagagcacacgacgaaggaggaca

SEQ ID NO: 165372 - RNA, 54 nt, Homo sapiens
cagaacccggacgggcggcgcacagggaacaccagaggcgggaccacgggcagc

SEQ ID NO: 165373 - RNA, 70 nt, Homo sapiens
gccggggccccgggcagacccggccggacaaccgcgacagagaaggggcgcgccacccagcagccccccc

SEQ ID NO: 165374 - RNA, 53 nt, Homo sapiens
agaccccggaaacacccaccaccgaaccaggcgacacaggaaaaacgacacaa

SEQ ID NO: 165375 - RNA, 77 nt, Homo sapiens
ggggcccgcgccccccgagcagggcaggaaaggagggcgaaacacaagcaccacccccggaagcaccaggagccaca

SEQ ID NO: 165376 - RNA, 70 nt, Homo sapiens
gaaaagagcagacgccacggggccgcgccaagccagagggaacaacgagagcgccccaagggagccagcg

SEQ ID NO: 165377 - RNA, 82 nt, Homo sapiens
gaaaggacagcagaaaaacccagaagcagaacgaaggaaaccacagcccacacaggccgcaggccacaggaagaccggggac

SEQ ID NO: 165378 - RNA, 69 nt, Homo sapiens
gcccaccccccgaacccagccgcaccggccggaaaaacagggagagccacagagggggaaagccaagga

SEQ ID NO: 165379 - RNA, 78 nt, Homo sapiens
gagccccgcagcgcagccgccgaccacggcgacggacacgaggagcagaagcagcagcccagaaagccgggacaaagg

SEQ ID NO: 165380 - RNA, 69 nt, Homo sapiens
caagcaggaccacccaccagccaccagacgccaggaagccggacgcgcagggaaaacgagaggacccag

SEQ ID NO: 165381 - RNA, 65 nt, Homo sapiens
agaaacccaggaacgggaaggggcggaaaaggggccaaccaggaggggcccgcaacggacgcagc

SEQ ID NO: 165382 - RNA, 77 nt, Homo sapiens
accgaaagaaagcagaaaagcgcagagggaccggagggggacgcacagcggagggaaccaagaccaggacaaagaag

SEQ ID NO: 165383 - RNA, 68 nt, Homo sapiens
cccacggcagcaccagccgggagcaaaagcaccccgcaccaacgagaagaggagaggggcgggagccg

SEQ ID NO: 165384 - RNA, 69 nt, Homo sapiens
gaggcggacacacgaaggaacggcccgagacacagacagggagaccccaacaggcccgaccaacaaaga

SEQ ID NO: 165385 - RNA, 65 nt, Homo sapiens
ggagaggaacacaagcaagaaggccggcggagaaagcagaggggacgagccaaaaccgggacaga

SEQ ID NO: 165386 - RNA, 81 nt, Homo sapiens
caggagccgccggccaacacgaggacacgcggagcgcagaggcggagacagaggggccaacccgcgagcgcggaaggacac

SEQ ID NO: 165387 - RNA, 83 nt, Homo sapiens
gaaaagcaacagaaaaccagcagccaaccagaaaggcgcaccgcagaacgagacgggcacgggaagccaacgaaggccggagc

SEQ ID NO: 165388 - RNA, 87 nt, Homo sapiens
gaggacagaccagcagccgaggcccacaaaggaggagaaggcagagcccccccaggcagaagcccgagcgggaaccagcgaagccag

SEQ ID NO: 165389 - RNA, 51 nt, Homo sapiens
gaggaagcgagagccacacgcccaagccaccggacgaacggcaggaaagca

SEQ ID NO: 165390 - RNA, 42 nt, Homo sapiens
cgccacgcagggccagggaggaagagaagcccccaacccacc

SEQ ID NO: 165391 - RNA, 55 nt, Homo sapiens
gggaggggaggcaaagggaggaggaggaccggagagagccccagaggacgccaca

SEQ ID NO: 165392 - RNA, 84 nt, Homo sapiens
ccgagcacgccgcagggagaagaccagcaagcgggcggcaagacacggggcgacgccacagagaaagccacacgcacagacgcc

SEQ ID NO: 165393 - RNA, 60 nt, Homo sapiens
cgagcccagggggcacgcggaaacggccacagaccccgcaccggaggaggacgaaggagg

SEQ ID NO: 165394 - RNA, 74 nt, Homo sapiens
ggcagccggcgacgaggacgaaggccggaagagcgggagcgggagccaggcagaaggccaaccaaccccaggaa

SEQ ID NO: 165395 - RNA, 57 nt, Homo sapiens
gcacgcgggcagggaacaggcggagcggaagcacacgaccgcgagagggcgaagaac

SEQ ID NO: 165396 - RNA, 94 nt, Homo sapiens
ccaggcagcagcgcgggccagagcgcagcgccgagcgcggcccgggcgccacgagccggcggcggacggcagggacgcggcgcacggcgcggag

SEQ ID NO: 165397 - RNA, 71 nt, Homo sapiens
aacgcccaggacaaacccagaccacacaagggcaggggggaaaggccagcacagagccacccagaaagaaa

SEQ ID NO: 165398 - RNA, 79 nt, Homo sapiens
acacccaggccacacccacccaacagacgcacaggaacagagcaacccccagccacaacgcgaaccgggcggacgaagg

SEQ ID NO: 165399 - RNA, 55 nt, Homo sapiens
cagaaggggaaagaggagcacccacagcgcgagaacagacccagcccgaggaagg

SEQ ID NO: 165400 - RNA, 78 nt, Homo sapiens
cggaggggccccggcagcagcccgacgcaaaccaaggacggggaccgcacacccaaggagcgcggccgagcgccggca

SEQ ID NO: 165401 - RNA, 71 nt, Homo sapiens
agcagagccgcgaaacaaaagaccagagaaggcagaagcgcacaagccccagacaaagcaagaaagacaca

SEQ ID NO: 165402 - RNA, 80 nt, Homo sapiens
ccgggacagcgccggggccccaccgcggccccacaggaggcaagcaaccaacaaaagaaaagagaaaacggaccgaaaca

SEQ ID NO: 165403 - RNA, 77 nt, Homo sapiens
agaagaaagaaagaagccgcccaggaacagacccgagcaaaggagaagaaggaaggggaagaggcagaaaaggaaga

SEQ ID NO: 165404 - RNA, 72 nt, Homo sapiens
ccaacacagagccaagcgccaaggagcagcaacaaaaacaaccaagacagcagacaacaccacgggccaacc

SEQ ID NO: 165405 - RNA, 83 nt, Homo sapiens
cgccgagcggacccggaccggggacagcacccaagaaaacccaggccgcgaaggagaagaccggacaccaaccgacggccgcc

SEQ ID NO: 165406 - RNA, 72 nt, Homo sapiens
ggaagaaacgaaggggggaggcccaggccaaaagaagcagagaaagggggaggcggacccggcaacacgaac

SEQ ID NO: 165407 - RNA, 73 nt, Homo sapiens
ggcgagcacagcaccacaaccgcgggacccgagaaggaggcaaacagccggccagcaaaaggaaagggccggg

SEQ ID NO: 165408 - RNA, 72 nt, Homo sapiens
gaaccacggaaaggaggaagaagacaccggggacagacagggaggacccacagcccaggacccagagggaca

SEQ ID NO: 165409 - RNA, 59 nt, Homo sapiens
gagcccgaacaaacaaacacccagaaacaagaggggcgggcacaagggaagacagcgcc

SEQ ID NO: 165410 - RNA, 72 nt, Homo sapiens
gaccaaacaaagccagccggaaaaccaggagaaacagagagcaggcggaaagcggccgccggggcgcagcgg

SEQ ID NO: 165411 - RNA, 83 nt, Homo sapiens
ccgccccgccaaccgcaaccagacgccagcgggacgaggaccgagaccgcggccgggaccgagggagagcgaccagggggaac

SEQ ID NO: 165412 - RNA, 40 nt, Homo sapiens
gcccacggccggcgagacgagacggcaagcaggaaacgga

SEQ ID NO: 165413 - RNA, 84 nt, Homo sapiens
gggcacggagcaaccccaagcaccacaaaaaccacgagagcccgcccaacaaacagaggacaggacgagaacacacaagaaaaa

SEQ ID NO: 165414 - RNA, 55 nt, Homo sapiens
cagccccaagagcgggacacagaagaaaggcacaacccgcgcagcagcacaaacc

SEQ ID NO: 165415 - RNA, 53 nt, Homo sapiens
cccccagcggcagccgagcccgcccgcgcgccgacagaagcgaaggggacagg

SEQ ID NO: 165416 - RNA, 71 nt, Homo sapiens
ccaccccaacccccaaaccgcgcccccgagcagccccagagacccccagcccagggggggcgcggggggcg

SEQ ID NO: 165417 - RNA, 64 nt, Homo sapiens
aagcagcagaagggccagcaaaaagggagagacagcagggacagacacggagaccagaaagccg

SEQ ID NO: 165418 - RNA, 93 nt, Homo sapiens
aagaaaagcaagagaagccgaggagagccaagccgcaggcaccaagaagaccaacaagcagaagagccaagacaaaaaggaggggcagaaaaa

SEQ ID NO: 165419 - RNA, 50 nt, Homo sapiens
accaagaaccaggaccgaggaaaccagacgagcggagagaaagagaacgc

SEQ ID NO: 165420 - RNA, 77 nt, Homo sapiens
ggagaagcggcagcgcagcaggcgcaaacaagaccaccggagagaaaaccgcacacacaaagcggggacgagagccc

SEQ ID NO: 165421 - RNA, 108 nt, Homo sapiens
cgccaagggcccccaccaggggggcccccgaccccgagggaagagaccccgaagcgcaaggaagcggacacaggaaaacgagaagaggcaggcaagcaaagagcagag

SEQ ID NO: 165422 - RNA, 83 nt, Homo sapiens
gagccgaaccacaggaccagagggcgcgaggcaaggcagccagccacagagcccggcagcagggcccgcaagcagcagcaagc

SEQ ID NO: 165423 - RNA, 72 nt, Homo sapiens
agccacagagagggccggcagggcgggcaggacagaagcccggaccccggcgaagcgggaaccagacagccc

SEQ ID NO: 165424 - RNA, 41 nt, Homo sapiens
gcggaggccggcaaagccaaggcagcacaagggaaaccaca

SEQ ID NO: 165425 - RNA, 67 nt, Homo sapiens
ggacggccagccaagaaccgcacgacacgaacaaccaggaggggaaggaccccccacagcgggaggg

SEQ ID NO: 165426 - RNA, 80 nt, Homo sapiens
acccgcacgagcaacagacgagcgcgccaggccgacagccgcggccgggcccgaggagcggaaagaagcgaagaaaaacc

SEQ ID NO: 165427 - RNA, 59 nt, Homo sapiens
acacgcgggggcggcacccggcaaaggaaggaacgggaggcaacagaaggggagaagca

SEQ ID NO: 165428 - RNA, 89 nt, Homo sapiens
cgccaccaccacgccagccgcaccagccgcccaagccgcacagccgcggcggcagcagcaggagagacccaacagaggaagccgcaaga

SEQ ID NO: 165429 - RNA, 75 nt, Homo sapiens
aaggaaaggaacaggaacagaggcccaagaacacagaggagccaaagggaagaagcaggaaacaagccgaaaaac

SEQ ID NO: 165430 - RNA, 72 nt, Homo sapiens
gagagaggagaacgaacaccggaccgccagcaaagaaccacgaccaaggcagaaaaacggaccagagacaac

SEQ ID NO: 165431 - RNA, 75 nt, Homo sapiens
gaccggcccccagcaagccccagggcgagccgcccgagccagagggacaaagacgccaacgacacagcgggcccc

SEQ ID NO: 165432 - RNA, 74 nt, Homo sapiens
aggaggagcagccacgaaggggcagcacagggaaggagggccccggagcagccacaccaccgaggccccaccca

SEQ ID NO: 165433 - RNA, 79 nt, Homo sapiens
acaaccaagcaccggagaaaacccacgaaagcgaccagagaccgaggaccgcggacgagcacaacagcagagaaagagg

SEQ ID NO: 165434 - RNA, 70 nt, Homo sapiens
aacgagagagagcaaaaacaccagacaagagacccccgcacaacccgcccgagacgagaacaccaagccg

SEQ ID NO: 165435 - RNA, 75 nt, Homo sapiens
cgggaacagacgcccaccagaaaagaccgacgagaacaggccggggggggcacagagccccggaagacagccccc

SEQ ID NO: 165436 - RNA, 65 nt, Homo sapiens
ggcaaaacagggccgagcacagaaggaaaccagacaaagcggcgcacgcacggagacgacgggag

SEQ ID NO: 165437 - RNA, 77 nt, Homo sapiens
caggagcagagcgacagcggcgagcagaacacggcgagcggggcggaccgaggagggcggacacacccaggaggagg

SEQ ID NO: 165438 - RNA, 89 nt, Homo sapiens
aacgagcaggagcgacggccgccaagaagcacggcaccaaaaacaagcgcgggagcccacccagaggcagggggcgacccgaacccaaa

SEQ ID NO: 165439 - RNA, 60 nt, Homo sapiens
ccacagcacaacacaggcgggagggacccgagcaggcgccacggccggaacgcacagcgg

SEQ ID NO: 165440 - RNA, 74 nt, Homo sapiens
gacaagcggacccacccgcaacggacggcacaaacagagggccacgccaaggcgacaagcaaacgaggaggaag

SEQ ID NO: 165441 - RNA, 76 nt, Homo sapiens
accaggagacaaggagagacggagaaaaaacggaagcacaaaacaagagaagcacgaagaagaagaccaaggaaac

SEQ ID NO: 165442 - RNA, 81 nt, Homo sapiens
cgacggggaggcgcggccaacggggccacaaggcaaggacggggacacaagaccagccagcccagccacagagacaggccg

SEQ ID NO: 165443 - RNA, 72 nt, Homo sapiens
cgggaaacgagagcagaaggacgcaacaaggcggaaagaccacaagaaacgacggcccggcaagagagaaga

SEQ ID NO: 165444 - RNA, 76 nt, Homo sapiens
aaaacagaaaaacccagacacccgcgacagagacagccgacgaaaaggaagacgcaccaggaaggcccaggcgggg

SEQ ID NO: 165445 - RNA, 79 nt, Homo sapiens
cagcgcaacggcaaggacccgcccccaagacgggaccagccaaggaagcaacacagcagcgagagaagcagaaaaagca

SEQ ID NO: 165446 - RNA, 80 nt, Homo sapiens
gcagagagaacacgggcccaaaaaacaaaggccggggggggcacagagccccggaagacagcccccagcgaccagaccca

SEQ ID NO: 165447 - RNA, 76 nt, Homo sapiens
agcgcccgagcacggagagggggaccgggcgcacaggcggcgccgacagacggggacacacagaggaaaagcaagg

SEQ ID NO: 165448 - RNA, 74 nt, Homo sapiens
cccgggccaacccaccgggcaggcgggacacacagcggccggagggcaccacaagaagggaggaagccgaaacg

SEQ ID NO: 165449 - RNA, 74 nt, Homo sapiens
ccagacaggagcgggagaaaagaaccgacccacaccaagggaagcccagaggcacggggcagaacaccaacaga

SEQ ID NO: 165450 - RNA, 59 nt, Homo sapiens
ggcaaacgaaaaccggaacagcagcacagcaaagcccaagacacagccccagcagcccc

SEQ ID NO: 165451 - RNA, 78 nt, Homo sapiens
agcccaaaccccaggccaagcagccaccagcagcccccagagcgggaccacagaaacggacgggcaaggccggcgagc

SEQ ID NO: 165452 - RNA, 73 nt, Homo sapiens
ccaacgccggaccagcaaggcgaaggagacccaacaccccggccagacgggccaccaggccggcgccccacgc

SEQ ID NO: 165453 - RNA, 52 nt, Homo sapiens
gagagcaaccgacacagaagcacggagcccaagccccagggacaggaaagca

SEQ ID NO: 165454 - RNA, 66 nt, Homo sapiens
gaaggaccaagaaccaggacaaggcacgaggcgcggcgaccaccacagcagagcccggcgaaggag

SEQ ID NO: 165455 - RNA, 65 nt, Homo sapiens
caaaaccagaagaagaccccgggacgggggacaggaaagaacacaagacacagcacggaaacaaa

SEQ ID NO: 165456 - RNA, 69 nt, Homo sapiens
cgcgcagaccagaccgccgaccggcgcccgccgggaaacccagacgacaaggaaggccaagggacccac

SEQ ID NO: 165457 - RNA, 48 nt, Homo sapiens
gcccaaacccagaaacaagcggccacagcaggcagaagacgaggaaaa

SEQ ID NO: 165458 - RNA, 84 nt, Homo sapiens
gcgcgcgccccccgagcaggaggaccgaagaagacggggcaccacggggcgggggaaggaccagacaaaacgccgcggagaagg

SEQ ID NO: 165459 - RNA, 81 nt, Homo sapiens
cggcggggacacccgaccggaaggccaaagacagacgggcccagcacacagggacaacgccaggggcacacggggcagaag

SEQ ID NO: 165460 - RNA, 72 nt, Homo sapiens
ggagaggagcgggaaacgggagggaaccagcaacaagccgagaaggacggagaagcgaaagccagaccggca

SEQ ID NO: 165461 - RNA, 73 nt, Homo sapiens
cccccgggccgggccccacacaccgcccagggagacccaacccggagccggggacggcacacgggcgggggca

SEQ ID NO: 165462 - RNA, 74 nt, Homo sapiens
gcaccggcgaagccgggccaaaggacgaagaacccacagagcccccaggcccgccgccagagggacaggagcca

SEQ ID NO: 165463 - RNA, 79 nt, Homo sapiens
gacggaagcaaggaacaaaccgaagaacagcgggaaagaaggcaaaacacggacgcgcaccaggagacacaaacgccgc

SEQ ID NO: 165464 - RNA, 68 nt, Homo sapiens
agcccagcaacggacccaacagagcacgcaaaggaagaaggagccccccgagagcaaaccagaaaacc

SEQ ID NO: 165465 - RNA, 63 nt, Homo sapiens
cccaagaaacaaacagcccaccggcagaaagggagaaacacaaagggaaggaagggcgcgcac

SEQ ID NO: 165466 - RNA, 78 nt, Homo sapiens
ccagcacgccaagagaagagccaaccagcaggaaacgaacagcaccagggcagcaggaggggggaagcaggaggcacg

SEQ ID NO: 165467 - RNA, 78 nt, Homo sapiens
accagaccagaaacggaggagcccgccgaagcagagacagaaaaacggcccggaggcaaggaaacaaaaccacccaag

SEQ ID NO: 165468 - RNA, 75 nt, Homo sapiens
agggagcgaacggagagcgacccgagcggcaggaagaaggagaaggacacgccaaggagaagagaagcccgcacg

SEQ ID NO: 165469 - RNA, 81 nt, Homo sapiens
acaacacccacaccagccacgcgggcgaggagggcacaaggccaggcccaagagccaggacgagggcgcacagaacgggaa

SEQ ID NO: 165470 - RNA, 63 nt, Homo sapiens
ccagaagcgggcggcgcgggggagaggcggggccccgggccgcaccccccaccgcaacccgcc

SEQ ID NO: 165471 - RNA, 74 nt, Homo sapiens
cagggaagcgcagaaagcaggcgaacccgcggcgcaaaacgaagagcccggggaggggggccaccaacggcgaa

SEQ ID NO: 165472 - RNA, 72 nt, Homo sapiens
aaaacggaacaacaacaaaagagcgcgaaagggagaaacgaagcccaggacaagcccccacgaggaaaaccc

SEQ ID NO: 165473 - RNA, 84 nt, Homo sapiens
gccgagagcgagaaacaaagccacccagccaagaagaccagggccggagaaagaagaaaagaagaaagaaggaagaagaagaag

SEQ ID NO: 165474 - RNA, 59 nt, Homo sapiens
cgcacaggaggcccgaggagcggccacgcgcaaaacggaggaggcagggagagagcacc

SEQ ID NO: 165475 - RNA, 58 nt, Homo sapiens
cgcccggacagacaggcagaagcagaccccacgagcgaaagggaaaaaacgaaggagg

SEQ ID NO: 165476 - RNA, 75 nt, Homo sapiens
cggaggagccccggaggcagagcggcgccagggccggcacccgcgcaaggggccgagaacgccaccaagccccca

SEQ ID NO: 165477 - RNA, 81 nt, Homo sapiens
cccgaccccgccacccccggggcccagggccaccccccaagccgggaagaacggcagcgcggagggggccgcacggaggac

SEQ ID NO: 165478 - RNA, 84 nt, Homo sapiens
aaaagacaaacacacaccgcgggacgacaagaggaccccgcgcaaccggcacaacaggcagaggcacagccagagaacaacaca

SEQ ID NO: 165479 - RNA, 82 nt, Homo sapiens
ggaccggcggcgcggaggagcgaggcagcgacaggacgggaacggcggcagcagaagcagcggccaagaacccaggcacgca

SEQ ID NO: 165480 - RNA, 61 nt, Homo sapiens
gggggcaccgagggcaccacgcgcgggcgagcgggaaagccgaagaaaggagggcgagagc

SEQ ID NO: 165481 - RNA, 78 nt, Homo sapiens
gccggccggagaaggccagagcacacacggccaagagcgggcaccaggaagcgaaggcgggacgcacccgagaacgcc

SEQ ID NO: 165482 - RNA, 81 nt, Homo sapiens
cagaagcgcaccaagaaacaagaaccaacaccaggaacgggcaccagaacagcacccgaaaagaaaagacagcaagcccaa

SEQ ID NO: 165483 - RNA, 78 nt, Homo sapiens
ccgaggccgcgggcggcgggcccggacgcggcgcgcaacgcaagccccaaccgcgaggagagcgcagcaggcgcgcac

SEQ ID NO: 165484 - RNA, 62 nt, Homo sapiens
ccgccgcggccaaggcaagccagagacgcgcacgaaacgacgaagaggcccgaggacagagg

SEQ ID NO: 165485 - RNA, 93 nt, Homo sapiens
gggccagcacgccaccgggaaggcggggaggaggccccaaagggcgaggcgccccagagccaccgccaagacccaccccagaagaccaccgaa

SEQ ID NO: 165486 - RNA, 83 nt, Homo sapiens
cgcccacagaacacgaccgaaccagcagggaaccaaagaaaggcaacgaaagccaaccaggaggagccgccggcccaggcgga

SEQ ID NO: 165487 - RNA, 81 nt, Homo sapiens
gacaacagcagaaggagccagcagggacaaggaccagaagaaacgcaccggaaaggccaccagacgggaacggagcccccc

SEQ ID NO: 165488 - RNA, 75 nt, Homo sapiens
gaccacgacaagagcacaaccccggcccaagggaagcaagaaaaaagacgggcccggggagagaaggagcgaccc

SEQ ID NO: 165489 - RNA, 75 nt, Homo sapiens
gagaggagcgcaaaaacccaggaacaccggacagaagccgggaagaacaggcagcacaggcaccccacgagagaa

SEQ ID NO: 165490 - RNA, 80 nt, Homo sapiens
cacccaaagcacgggggcaacagagggggagagagggagcaggccaccggaagagggcacaacgggaagagaggggacag

SEQ ID NO: 165491 - RNA, 69 nt, Homo sapiens
caacaccgcacagccacaacaaggagcaagcagagccgaacaaagaacgaaggcgaagaacccgcaggg

SEQ ID NO: 165492 - RNA, 101 nt, Homo sapiens
caggcaccacagacagcagacggaaggggccaggaaaggagcgaagggcccgaccgagaagacagaggaagaaacagagcccagcgcgcacaaaggagaga

SEQ ID NO: 165493 - RNA, 71 nt, Homo sapiens
cggagggggcgccgacgcgagggcgacacgagcaagaggggagggaaaaggaaaagcgcgaaagagcacca

SEQ ID NO: 165494 - RNA, 77 nt, Homo sapiens
gagaggggcggacagcggagcccaagcgcggcggcgcgccgagggcggagaacggaaaagcaccaggaagcagagag

SEQ ID NO: 165495 - RNA, 82 nt, Homo sapiens
gcggggccagcggcgaggcgacccgcacagggaggagggacacacgacaggcccgagagggaacccacaccaaaacacccac

SEQ ID NO: 165496 - RNA, 65 nt, Homo sapiens
gcccagagagaacccgggagaaaggcggagaagagaaacagagcaccgaagggaacgacagggag

SEQ ID NO: 165497 - RNA, 79 nt, Homo sapiens
caggaaaaggagcaggcgagaaacaagggacgaacaaaacaccgaggaaggacacacacaacacgaaaccaaacagcac

SEQ ID NO: 165498 - RNA, 67 nt, Homo sapiens
caagcgcgacaggccaggcagaacaaacggaccagcgaccgggcagcagcacaagggaaaccacagg

SEQ ID NO: 165499 - RNA, 80 nt, Homo sapiens
gagcgcgccgcccccgcccacccagacccagcggccagcgccaggggggaggggccggaggaggaggaggaggaggagga

SEQ ID NO: 165500 - RNA, 92 nt, Homo sapiens
cgaagaacaccgccaggacaacccaccaaggcgccccccggcaccgcccgccccccgaggagccaagccaacaaggccacacggggccaaag

SEQ ID NO: 165501 - RNA, 74 nt, Homo sapiens
ccacggcaggaggcggcagagacgggaggaaggagccccaggaaggggacggagccaagagaccaagggacgag

SEQ ID NO: 165502 - RNA, 67 nt, Homo sapiens
cacaggaggcgcggaggacgccccaccgccgacgcccccagccaccagccccccgccccccccgcag

SEQ ID NO: 165503 - RNA, 80 nt, Homo sapiens
aaaagacagcgaggagcagcagcagcccagcaggcgcggcccgccaggcccaccacaaccaagcgagaggacccacgccc

SEQ ID NO: 165504 - RNA, 69 nt, Homo sapiens
acaccgcgggaagcacaacagaaggacaaccaagcgggaccgcccaaaagggagcaagaggcagacaga

SEQ ID NO: 165505 - RNA, 58 nt, Homo sapiens
ccaccggacgccaccgacgagaccggaccgccagccccggaccagaccccccagcccc

SEQ ID NO: 165506 - RNA, 73 nt, Homo sapiens
ggaaccaacccgcccaggacaagccgcgcggggacccgacgcccgcacggacacaccggaacaaagaaaacca

SEQ ID NO: 165507 - RNA, 58 nt, Homo sapiens
cagaagaaaggacagcaaaaggaagcccaaagagcaacagcaggaagaacgacagcag

SEQ ID NO: 165508 - RNA, 62 nt, Homo sapiens
agcccagccgaaccgcgcgggcgaaccgaggccagggaaggaagccagcgaagcaccgggac

SEQ ID NO: 165509 - RNA, 82 nt, Homo sapiens
cgcggcggggcggcgccccagcggcgggcggacggggggccagcagggacgcgccccagggggcaagccgagcgcgaggaga

SEQ ID NO: 165510 - RNA, 83 nt, Homo sapiens
ggacgacggggcgagaccccgcccggaccgcagggaaagggagcagcaccggccacacccacagcacgaccggaacccagcga

SEQ ID NO: 165511 - RNA, 73 nt, Homo sapiens
aaggagacaccggaggacgaagagggggagcccgagagagacgcagcgcaaggccgggggaggccacaaaaca

SEQ ID NO: 165512 - RNA, 72 nt, Homo sapiens
cgcagaccgcagaaggccggagacaccagcaggacccagaagaaccacgcgcaggccagagcagcccaggcc

SEQ ID NO: 165513 - RNA, 53 nt, Homo sapiens
ccacacacgcccaagacacagagccgagacggcccagacgcgcggcacaggca

SEQ ID NO: 165514 - RNA, 71 nt, Homo sapiens
ccagagaccgagaaagcggcggcaccagagcaggcaccgcacgcccagcacgcggcaacaagacaacgggg

SEQ ID NO: 165515 - RNA, 73 nt, Homo sapiens
gaccagaacgaccccgggacaagaccccacgaagcaaggaggggaaagccagcgcagcgcgagaagcgacagc

SEQ ID NO: 165516 - RNA, 70 nt, Homo sapiens
aagcaaaggaaagaaggaccagcagaagaaagaaccagcagcggcaaaggaagcgggacgaccaggacac

SEQ ID NO: 165517 - RNA, 79 nt, Homo sapiens
agaaggcaagagcagaggccccagaccgccaagaggcacagacgagaaaacaagggagaggcgaccgggaacgcgcagc

SEQ ID NO: 165518 - RNA, 78 nt, Homo sapiens
cagcgccagccgccgcggcgcgccgcacggaagagcagggcacaacgagagagccaaacacacagcccccaggacacc

SEQ ID NO: 165519 - RNA, 76 nt, Homo sapiens
agcccgggcggggcaggagccgacaccgaaaacgagaaacgaaagagacacgggggcacaaccgagcccggggaaa

SEQ ID NO: 165520 - RNA, 71 nt, Homo sapiens
caaggcccgaggaccagccccggacagccaaggcggagcaggagcaaaggagcaagaaaccagacccggaa

SEQ ID NO: 165521 - RNA, 78 nt, Homo sapiens
acagccggaagcaaggcagaagaggccgcgcaagaaagcgaagagccacgaaaagcccaggggaaaaagggaggccac

SEQ ID NO: 165522 - RNA, 105 nt, Homo sapiens
agaggcacaggccgcggaggaggaggaggggaggcgcccccggagccgccccggaggagaagacagccgccaggaagcaacgcagcgcggaaaggcacaaccaag

SEQ ID NO: 165523 - RNA, 60 nt, Homo sapiens
agcccccccgcccgcgcgccccggagcgcgaaggagcgcgggcaccacacgaaccgaggc

SEQ ID NO: 165524 - RNA, 68 nt, Homo sapiens
ccaccgcaggcaaaagaacccgcccacacggccagacccaaggcccaagaacacgaccagaagcggga

SEQ ID NO: 165525 - RNA, 66 nt, Homo sapiens
ccaacagggagggccaacggagcgggacaaagggaagcgaggaggaaagagagcccaccaaggcac

SEQ ID NO: 165526 - RNA, 74 nt, Homo sapiens
gaaccccgcacacgaggaagaggcaccggagcagagcgccaccagacagaggagcccggaggaggcaggagccc

SEQ ID NO: 165527 - RNA, 74 nt, Homo sapiens
acccacagggcacacagcaccgggcgaaaaggaggaaaagaagccagaccgagacccaagcgggacacgaaagc

SEQ ID NO: 165528 - RNA, 79 nt, Homo sapiens
gagcaggcccagcggcccggaccgcccaaacgcgaccaacacaaccagcagccaggggggaagaagagcgacaagaaga

SEQ ID NO: 165529 - RNA, 74 nt, Homo sapiens
acaaacgaagaaaaaggaaccccaaaggagcgacaaaaaccgccggagcacgcgcacccaagccgagccggccg

SEQ ID NO: 165530 - RNA, 77 nt, Homo sapiens
aacgccaaggcagcgcggacaagacccccagcacaacacaccggacaccccagagggccagagaagccaccaggacc

SEQ ID NO: 165531 - RNA, 75 nt, Homo sapiens
acgcacgcacacgccggcgcgcgaccgcgcaaaacgagaggaagaagacacggaccgacggacgggaaacccagc

SEQ ID NO: 165532 - RNA, 87 nt, Homo sapiens
cccaagcaggagcgacgggaaagaccagggggccacagaagaaagaggacgagacaagggcaacgagacacccagcggcccggcccc

SEQ ID NO: 165533 - RNA, 71 nt, Homo sapiens
caacagacgagcgcgccaggccgacagccgcggccgggcccgagccaacccagaggaccgcaaagggcgga

SEQ ID NO: 165534 - RNA, 50 nt, Homo sapiens
ccgcagccgagcggggccggccacaggaaccacggaaggagggggcgaca

SEQ ID NO: 165535 - RNA, 76 nt, Homo sapiens
aacgaagaagaaacaacaagagaaagacccaggaagcagaagaagcgaggagaagaagaggaccgacagacaggac

SEQ ID NO: 165536 - RNA, 77 nt, Homo sapiens
cgcccgccgccagcaaccccgacaagggaccgggcgggccccgcaggaaacccccaccggcccacacagacgcagcc

SEQ ID NO: 165537 - RNA, 82 nt, Homo sapiens
ggcacaggggcccgacccagcaggacagaaaggacagagcgggagccaccagcgccaaagggaagccaggagcccgggggca

SEQ ID NO: 165538 - RNA, 74 nt, Homo sapiens
accgccgcccccccagacaagaggacaccgcggaggaaggagaaggggcgccacgcacccgggacggacaggcg

SEQ ID NO: 165539 - RNA, 73 nt, Homo sapiens
cgcgcgcccacccaacccgagaacccaggacgagaaaaaacagagcggaacaagcggcccaagagaaagcagc

SEQ ID NO: 165540 - RNA, 78 nt, Homo sapiens
cgcccgacccaaagggaaaacagaaacaggagaaagaagaaacaaagagggacccagccaccaaaaggaggcgaaggg

SEQ ID NO: 165541 - RNA, 99 nt, Homo sapiens
ggagcccagggaaggagcggagaagaaagacacccagacagagagaaaacacggccacaggaaaggaacccccaccaaacagcggaacccccccacgca

SEQ ID NO: 165542 - RNA, 93 nt, Homo sapiens
ggaggcaccgacaaaccagcgaaggagcacccacccaggaacccgccaccagaagggacgagaacaagcaggcgcgaccgcaacgcccgccag

SEQ ID NO: 165543 - RNA, 75 nt, Homo sapiens
aggaccggagaggggggacccgaacacacaccagaaaccccaagccccaaaggaccgccgggagagccgcccacc

SEQ ID NO: 165544 - RNA, 75 nt, Homo sapiens
ccggagagagaaggaagaacacccccaccggccaggcgagaaaggcaggagacaaagacgcggcccagaccgaca

SEQ ID NO: 165545 - RNA, 58 nt, Homo sapiens
gccgcagccacaacaccggcaggaaccaccaggacagagacccaggagaaggaccaga

SEQ ID NO: 165546 - RNA, 72 nt, Homo sapiens
agaacgggaggcgcagaaagaggccaaggaagcacgggaagaacagaaaagagaagcaccacggaaaccacc

SEQ ID NO: 165547 - RNA, 78 nt, Homo sapiens
gcccaccagggagcccgcagccacacgagcgagaccccacggccagcgaggcagcgccagagcaccaccgacggaccg

SEQ ID NO: 165548 - RNA, 62 nt, Homo sapiens
cacgcccagcccagcggcaggcgggcagcaacagaacccaaggggagcccagcccagggcca

SEQ ID NO: 165549 - RNA, 81 nt, Homo sapiens
gggcaaggggcagagaaggaaggaggcccggacaccgagggagcagaaaagcgaggcaggccccagccgcccaggagagga

SEQ ID NO: 165550 - RNA, 58 nt, Homo sapiens
gcccacggcggcgaccagagcagagccgggcaggccacgcagaacaagacagggaaga

SEQ ID NO: 165551 - RNA, 59 nt, Homo sapiens
cgcccgcgcggcgcggggaccgcggcccggcagccagagcagccccccagcgcccgccg

SEQ ID NO: 165552 - RNA, 60 nt, Homo sapiens
aaacagcggcaagccacagacggccaccagcccccgggccaagagcagcacggagacaga

SEQ ID NO: 165553 - RNA, 80 nt, Homo sapiens
ggggagccaccccaggcaaccaggcaggaagagcggccagaggccagcaggccacgcaagggcaaggccagagaaggcgg

SEQ ID NO: 165554 - RNA, 52 nt, Homo sapiens
cgaccggacccagccccagaagaggaagcaccaaccgcccccaggggcagcg

SEQ ID NO: 165555 - RNA, 74 nt, Homo sapiens
ccacggccacagccgccgcagacccagcagccaagagggaagcagacgagagcaaggaagcccggggcggcgac

SEQ ID NO: 165556 - RNA, 79 nt, Homo sapiens
gccgccagaaagaggagcacccaggagcagcaggcggcagggggccaagcggaacaggagacaaagacacagcagacag

SEQ ID NO: 165557 - RNA, 81 nt, Homo sapiens
gaaaagaccggcgcggaaccagaggcaggaaaagagccgagagacagacgagcccacccccccacgagcacaaaaaacccc

SEQ ID NO: 165558 - RNA, 59 nt, Homo sapiens
gggagcgcggcgggcgcgcgccagagcgcaggaagacggagggccaagagcagagaaag

SEQ ID NO: 165559 - RNA, 83 nt, Homo sapiens
ggcggggggcgggaggcgccacccagcccccccgcgaacgcccaagaggcgaaaaaaccagaagcgggacagggagacggcac

SEQ ID NO: 165560 - RNA, 32 nt, Homo sapiens
gacaaccggaccaggccgaacaccggcagaga

SEQ ID NO: 165561 - RNA, 65 nt, Homo sapiens
agcgcgccacccaggcgaaaaggcaagccaccggccggagcccacccagcaacaccagagaaagg

SEQ ID NO: 165562 - RNA, 51 nt, Homo sapiens
cgcagggcgcccccggagcaaccagccagaggcaggagcccgccacagcca

SEQ ID NO: 165563 - RNA, 76 nt, Homo sapiens
gggcggaggaaaaccccacggcacgcaggaaagacagggaagacaaggaacggaggaaacagccagacagaacagc

SEQ ID NO: 165564 - RNA, 74 nt, Homo sapiens
ggccccgacagcaacaagaacccgaacagaaaggcaaggcaaaccgacaccagcgacacaagcgcgagggaacc

SEQ ID NO: 165565 - RNA, 76 nt, Homo sapiens
ggccccgaccgcggcggagcccgacccacccaaggcggacgggaccggaggcacaaaagaagaaaccggaaagcaa

SEQ ID NO: 165566 - RNA, 53 nt, Homo sapiens
acgggacccggccagaggaaagaacccgagaaccggaacagaagacagggaag

SEQ ID NO: 165567 - RNA, 68 nt, Homo sapiens
gagagacacgccgcgagaagcacgcacagggccgcgggaagaccagccccaaaggacccaggaagcac

SEQ ID NO: 165568 - RNA, 80 nt, Homo sapiens
gacaagccaccgacccgggaccgccccgggccacgcggaagcagccgcccggagaaacagacgagcgagaccccacagac

SEQ ID NO: 165569 - RNA, 78 nt, Homo sapiens
aggccgagaaggaccgccgacccgcccaccacgccagcagcgcgacggcaggcaaaggccgaagaggaccaaaacaaa

SEQ ID NO: 165570 - RNA, 72 nt, Homo sapiens
ccccgcaagaaagcccgcaaccggcagggcccccaaaccaaaggacccgcagagcaaggggaagagccaggg

SEQ ID NO: 165571 - RNA, 77 nt, Homo sapiens
cgcagcccggcggacgccggcacagaacgggcaagacgccaagagaaaaggcgagagcacaaagcaccaagagccga

SEQ ID NO: 165572 - RNA, 125 nt, Homo sapiens
gccgcacgcccgcggccaaggcggcgaccaggggcgggcgcccacgcggccggcccagcgacagcggacacacccaggcggagacaaccagagccagaggagagagcggagaggcaaaaacagcg

SEQ ID NO: 165573 - RNA, 66 nt, Homo sapiens
ccgggcggcccaagggaaaagcagcggccgcaagggggcagcggcaagcaggggagccagccacac

SEQ ID NO: 165574 - RNA, 77 nt, Homo sapiens
gcggcgcgcgcgcagcgcaggggaggaggacggggcgcaccgagaaccaccagcacgacgggcacacaaggccaagg

SEQ ID NO: 165575 - RNA, 81 nt, Homo sapiens
ggacacgcgccggaaggggcccgaagcccccgcaggaaccacaacccaaccagggagcaagaggcagacagaccgagacgg

SEQ ID NO: 165576 - RNA, 61 nt, Homo sapiens
gcccggcgcgagccaagcgcgcgccgcagggccggaaagagggcgggcccgcacggagcgc

SEQ ID NO: 165577 - RNA, 92 nt, Homo sapiens
gacggccggcggcacccgcacccggggacaagcgcgggaacggcgcggaagcaccccaagcccgaaccgacccccaagcccgaagaggaaag

SEQ ID NO: 165578 - RNA, 75 nt, Homo sapiens
gaagaaagcaagacccaggacaccccgaagccgagaaaggaaaacccaaccccaagaaacagaagcaaaaaaggc

SEQ ID NO: 165579 - RNA, 86 nt, Homo sapiens
agcccggcggccacgcccgccggaccgcgcccaggccccccaggacagcggaagcacgggccagacccgcggacacagagcagcga

SEQ ID NO: 165580 - RNA, 78 nt, Homo sapiens
gggagggcacagccagcaaagaacagacacacaaaaacaccggggaaaagagggggaaccaaaaccgaagaaaaggga

SEQ ID NO: 165581 - RNA, 75 nt, Homo sapiens
aaaaaagcagaggccagggcgccgcggaaaaggacagaagaggaaggcggccaacacggagcaaagaaggaccca

SEQ ID NO: 165582 - RNA, 65 nt, Homo sapiens
aagggaaaaaagcagagcccaggagaaaccggacgcgacgggggagaagaaccaacaacggaaaa
